United States Patent Application Publication US 2017/0009304 A1 - sequence listing, part 2

SEQ ID NO: 21198 - DNA, 100 bp, Homo sapiens
gtgaccttggaagtggatccttcccccgaaagcccggctttcagggtaagcctccaacaaagaaagcaaaagttcttcagaaacaacctttagttgctaa

SEQ ID NO: 21199 - DNA, 98 bp, Homo sapiens
ttggcggaggtggtgggctaccaggtactgggcctaatcgctacgtgcctctttggctatgatgcctatgtcaccttccccgttcggcagccaagaca

SEQ ID NO: 21200 - DNA, 100 bp, Homo sapiens
aacgcagcggccactgcgccgtggtggacggaaacttcctctacgtgtgggggggctacgtgggaaatcctcattgacgattcaatttgttgaaggccaa

SEQ ID NO: 21201 - DNA, 96 bp, Homo sapiens
ggagaagatggcggtctccacaggtggcagttaaaatgaagcagtacaaagatgaacttttggcctcttgtttgacctttcttctgtccttgccac

SEQ ID NO: 21202 - DNA, 82 bp, Homo sapiens
ttcgtcatgttcttcgcgccctggtgtggatgaggtcaccattgtcaacattttgaccaaccgcagcaatgcacagagacag

SEQ ID NO: 21203 - DNA, 75 bp, Homo sapiens
agctctacccagaggaactgctgattgaccatcagcaacccctataccacccgacctaaccgtcggggtgatact

SEQ ID NO: 21204 - DNA, 90 bp, Homo sapiens
cacaaggattcttttcaatacatcctaaaacagacagtgacaataccctcccctcccttgggctggacccctctctacagctaggagcca

SEQ ID NO: 21205 - DNA, 90 bp, Homo sapiens
cctgtcttcagatcttcacagcacagttcctgggaaggtggagccaccagcctctccttggggaagatgatgacgacgatgaatgtgggg

SEQ ID NO: 21206 - DNA, 100 bp, Homo sapiens
gttcccggggcagatccaggttcagatggagctaacacccattatggagattaaccacttttcatcaggtttttaacttaagtcgtgaggaatacaacgg

SEQ ID NO: 21207 - DNA, 75 bp, Homo sapiens
ctgcccagacggctcacctgtgcgggatggaacaaaagtctctgaaattctgaaatagccctctaacatcagaag

SEQ ID NO: 21208 - DNA, 87 bp, Homo sapiens
aatgaacccacatgcctctaccaatggacagctctcagtccacactcccaaaagggaaaggttgtttacattcagagctctatcaat

SEQ ID NO: 21209 - DNA, 83 bp, Homo sapiens
cgagagcaacaaagcaggcgactacagccacgtgaaggctttgatttgttggagaaactgttaccagaaaaacaggtcccgat

SEQ ID NO: 21210 - DNA, 100 bp, Homo sapiens
ccttcagtcacctaacctgcaggcctgtgatacttgggctgtgatcctctagagccagcttggactcacatcattctatggggttgaagacaactcattc

SEQ ID NO: 21211 - DNA, 74 bp, Homo sapiens
ttttggcctggcttgtttgcaaagggacttctccacggcattctttaacagcatccccctctcgggctccctgg

SEQ ID NO: 21212 - DNA, 100 bp, Homo sapiens
gaaaacctcacagattcactccagtcaccttctgctccccatcatgcagtagttcaaaagcggaaaagcattgctgtatcctatcatgtacagcacggac

SEQ ID NO: 21213 - DNA, 98 bp, Homo sapiens
gacatccgcattgaaggagagaattacctccctcaaccaatatatagcaattttccagattattcaaagtatcaggatgggcatgtgaagtgactgac

SEQ ID NO: 21214 - DNA, 75 bp, Homo sapiens
aataccttactgtgggagacttagaagattgcctactgaataagagacggtgctgagataggatcatgaaggaag

SEQ ID NO: 21215 - DNA, 90 bp, Homo sapiens
tgtcctgtaatcgctattgacagctttaggcatatgtatgtgtttggagacttcaaagatgtattggcaaacttgaagataaatcttttg

SEQ ID NO: 21216 - DNA, 90 bp, Homo sapiens
cttcttcgtcctgatacatatattgggtcagtggagccattgacgcagctcgagatgctgctgtgcagaagattgagactattatcaaag

SEQ ID NO: 21217 - DNA, 76 bp, Homo sapiens
tgctgggcctctgctgcgtcctgctgaccttcggccacaagggcagccattactcagcactgcactgaccttggga

SEQ ID NO: 21218 - DNA, 100 bp, Homo sapiens
gtttgcagatcgggagcgcaaggtcgccctcaaggccatgatcaaaacgtgtcctgtcagaagaacagatccgcctgaagaaactgaagcggcaagagga

SEQ ID NO: 21219 - DNA, 82 bp, Homo sapiens
cgaggtggagtcggagctgggacgatgccttcaattaagttgcagagttctgatggagagatatttgaagttgatgtggaaa

SEQ ID NO: 21220 - DNA, 126 bp, Homo sapiens
agcaaacgtctacactgtacatgctttttattacaagactacggagcataggaggaaaattcatcatctggtgaaggaatacgactccatctcccggctggaccagtggctcaccaccatgctgct

SEQ ID NO: 21221 - DNA, 83 bp, Homo sapiens
gattcctgcatttctgaagatctcaagatctggactactgttgaaaaaatttccagtgaggagcccagcagccggggccgccc

SEQ ID NO: 21222 - DNA, 100 bp, Homo sapiens
cttcctcagcctgctcaacgtgaagatgatgaggatgaagacctttatgatgatccacttctacttattaaataatcctccatgaaatgatggaagaaat

SEQ ID NO: 21223 - DNA, 50 bp, Homo sapiens
ctctacttagctcagcaattcttaccttatccaattctggtacagcagtt

SEQ ID NO: 21224 - DNA, 100 bp, Homo sapiens
ctgcagtccatgcaccagtttcgccaggacacaggagtggctttggagagatatcatcccctgtaatccgggaggcagaggtgacacggactgcacggaa

SEQ ID NO: 21225 - DNA, 75 bp, Homo sapiens
ttggaaccgtgtttggcagcttgatcattggctatgccaggatgattgccgccgtggacacagactccccccgag

SEQ ID NO: 21226 - DNA, 90 bp, Homo sapiens
cggtagccctccttgcgcctccgattcccaggggttgagcattcatgatggtacctggaagtcagcaatttatggttttggagatcagag

SEQ ID NO: 21227 - DNA, 100 bp, Homo sapiens
cagccttcagcttttggcagcatgaaagttagcagtactccaaagattcaggtttactcacgtcatccagcagagaatggaaagtcaaatttcctgaatt

SEQ ID NO: 21228 - DNA, 82 bp, Homo sapiens
cttatatgatagagaaacttaccctgatgatccatgctttccatcaagagtccctgtgtctaatgtgaatctagagatccgg

SEQ ID NO: 21229 - DNA, 98 bp, Homo sapiens
cggggcaggggcggaggcggaggcagaggtggaggcgctttgaaagggagtgcatccgccccaacccttttccccctcgtctcctgtgagaattcccc

SEQ ID NO: 21230 - DNA, 100 bp, Homo sapiens
ctgaatctttgtgtttggctgcccaggctcgcctcgactccaaatggttgaaaacagatatacaggtccaacacctctacaccttgctgcacaggcttgc

SEQ ID NO: 21231 - DNA, 75 bp, Homo sapiens
attctaacgacgagccgtgttgaaacttctttttggcgagctttcctgcccggcctgaagttcgaggtcatcagc

SEQ ID NO: 21232 - DNA, 100 bp, Homo sapiens
cccgcggccagtgcgggtggctggctttgccattagcgggggcctttcctgaggacggcgtacggagtgtgggactatcggacaaaacctttctgctgca

SEQ ID NO: 21233 - DNA, 82 bp, Homo sapiens
cggtttgtgaaagcttctgcagttgaatgcggaggaccaaacccagggccttgctgccgccatgactgaggaatcagaggag

SEQ ID NO: 21234 - DNA, 101 bp, Homo sapiens
cggctgccggcccccgctctgccctggtacttaaagctttcaccaaaacacccagaatcaaatactgctggaatggacatctttgccaaattctctgcata

SEQ ID NO: 21235 - DNA, 100 bp, Homo sapiens
ctcaaggcctgagtagccggtaacaaacgagggttcccgggattggaccgacgcagccatgaaatgtggattttcagaactttattcatggcaaagagaa

SEQ ID NO: 21236 - DNA, 83 bp, Homo sapiens
ccggagctgggcgcggattcgccgaggcaccgaggcactcagaggaggacccgtgcatctcttccgactctcgggcaagtgct

SEQ ID NO: 21237 - DNA, 59 bp, Homo sapiens
aaaagttcaatctggaaacatcaatgctgccaagcatcagaagagctaacaattgctgg

SEQ ID NO: 21238 - DNA, 100 bp, Homo sapiens
gggaaggcgcctgaagaggacgaagaatttctacaagtgtgaaagaattagaaaacttcaggaacttgttacagaatattcattaaagaaaacaagctga

SEQ ID NO: 21239 - DNA, 100 bp, Homo sapiens
gcaaggatgtgatgccagaggtcaacaaggttctggacaagatgaagtctttctgccagtcagactggttcttcagtgacgaagaggacaagggagagag

SEQ ID NO: 21240 - DNA, 74 bp, Homo sapiens
agcgcccagaggcgagccctggtggaggaagagatgaggaaaatgaagctcgggctggttaactgacttgctca

SEQ ID NO: 21241 - DNA, 75 bp, Homo sapiens
ctcaccacccctatccagacggctgcccttcaagtaccagtcaagtctggcaccatctttgacaacttcctcatc

SEQ ID NO: 21242 - DNA, 100 bp, Homo sapiens
cccatcttttcccagctgtacctggaagctgagcagcagcttgccgctctagaagttggagtgcttagtgcagttggtgagagcgggagccacactcaac

SEQ ID NO: 21243 - DNA, 75 bp, Homo sapiens
ctgtgtggactcggagaaacgtctctaattaacagaagatggcaaagcccagccacagcagctatgtccttcagc

SEQ ID NO: 21244 - DNA, 90 bp, Homo sapiens
aggagaggcttgagcgtgagcacttctggaagatcattaatgccttccgctactacggacaaggagccccaaactgtctcacagtcctca

SEQ ID NO: 21245 - DNA, 50 bp, Homo sapiens
ccctgacacccggcatgaccagttgatcttacagaagcatgggaaaccac

SEQ ID NO: 21246 - DNA, 100 bp, Homo sapiens
ggaggaggcagtggcgctcggcgtgggtctgtgcaacaatggcttcatgcaccacgatgaggaaaatgaagctcgggctggttaactgacttgctcagcg

SEQ ID NO: 21247 - DNA, 100 bp, Homo sapiens
ctgggagataatagtgaggacgctgatgaaataattcagtgtgacaattgtggcattacagtccatgaaggcttatccagaatcagatcacagctaaggg

SEQ ID NO: 21248 - DNA, 74 bp, Homo sapiens
tcccaattccttctaacttgttcgtgccaaccccagatgcctttgataatgatttgatgcacaggactctgaag

SEQ ID NO: 21249 - DNA, 75 bp, Homo sapiens
cttaagagaggatcgcccaatccacatgcttttccaggtgccttagctggaccaattattgtggagccacatgtc

SEQ ID NO: 21250 - DNA, 100 bp, Homo sapiens
ctccatcgattccgtggctgttctgcggggcatccagaaggtggcgatgttggtccaagggaactgggtggtgaagaggcagtggagtgggagtgaagaa

SEQ ID NO: 21251 - DNA, 120 bp, Homo sapiens
atcacctgtctggagcaaggaaaagatccctggaatatgaagagacacagtatggtagccacacccccagatatgattctataacagactcttccagaaatgatatgaagaggaaatttg

SEQ ID NO: 21252 - DNA, 50 bp, Homo sapiens
cccagtcttccgaaatgcggtgctcaggctttatcctgtggataaacgca

SEQ ID NO: 21253 - DNA, 50 bp, Homo sapiens
taggagtgggcttttctagatcacatgggtctaaaattcccaggactcca

SEQ ID NO: 21254 - DNA, 102 bp, Homo sapiens
gaaataattgaagagaagcagaggccagctgtttttgaggatcctgctccacagagaatgctctgcacccgttgatacacgttggtcgtcattgcctccgag

SEQ ID NO: 21255 - DNA, 74 bp, Homo sapiens
aaaagctgtggaaggctctggataaggaccagtacctgcccaggaaactgtatccctctgaagaagatatgatc

SEQ ID NO: 21256 - DNA, 74 bp, Homo sapiens
caggcgggccagtgcggcaaccagatcggcgccaaggcatggaagaggagatggttcgtgttacgcagtggccg

SEQ ID NO: 21257 - DNA, 82 bp, Homo sapiens
gatccgggagcacgtcatctccatcgaggagcctggagacacaggccccatccttcccaatggggacacttcagggagcggc

SEQ ID NO: 21258 - DNA, 87 bp, Homo sapiens
tgtttgcctctggttcagctcatacaacagcttcttaggttgctgttgaagaaatctggttgcagaacaccacggattgaattggaa

SEQ ID NO: 21259 - DNA, 75 bp, Homo sapiens
ccaagttgaaaatggacgagtaatcgcctgctttgattcattgaaagccaccccagcagacatgtttgccaaggc

SEQ ID NO: 21260 - DNA, 100 bp, Homo sapiens
gaagggacagaggacctggatggggagctcctccccacgccttcggcccacccctctgtggtcatggaacgttcactcacagggtacgctcatggagaga

SEQ ID NO: 21261 - DNA, 82 bp, Homo sapiens
ccctggttaccctcaggcaaagttgtatccaggaaaatcattgttgcagtcattggagaaatcgatgaagaaacagattctg

SEQ ID NO: 21262 - DNA, 88 bp, Homo sapiens
catgctggccaagaagatcatcattaaggacggaggcacggatcttgacattggtgccaagaacgtgaagctttacgtcaacagaaac

SEQ ID NO: 21263 - DNA, 100 bp, Homo sapiens
gctgacagtggctgacctcgtgttcccgtggaccttaaaggctttgatccaggagagaaatactttcataacacatcatggggtgatgtttctctctggg

SEQ ID NO: 21264 - DNA, 51 bp, Homo sapiens
cccatgctgtgctgttctaatcatagcccacaggcggttttgtgagctgct

SEQ ID NO: 21265 - DNA, 100 bp, Homo sapiens
attttcttcccaggaagctcctctcgctccccggccgcccacccccagcctgggtccatccaagctgaatgatcgcgctgactcaagaagaagcctttgg

SEQ ID NO: 21266 - DNA, 75 bp, Homo sapiens
tcatgcaaagacatcagctacttaagcgccacgagaaggtggaggccctgctggcatccgaagattatggcaaag

SEQ ID NO: 21267 - DNA, 75 bp, Homo sapiens
ctgaagctgggcatctggggcgtggccataatataattgtgataatgtaataaaatcaggaaacattacctgaag

SEQ ID NO: 21268 - DNA, 75 bp, Homo sapiens
atcatcatcatcgccacctctgtccgaaagtgatgctacccgtggcgttttcaccggctgcgtcccattcagtct

SEQ ID NO: 21269 - DNA, 82 bp, Homo sapiens
tggagcctcagttggaagcagccgatccagcctgcggagcctgtggggcagtccacaggtcctggctaccctgggaagagac

SEQ ID NO: 21270 - DNA, 100 bp, Homo sapiens
catgatccaggaggaggagtgggaccgcgacctgctcctggacccagcctgggagaagcagcagaggaagaatacttcaaacattgtgcagaaaactgag

SEQ ID NO: 21271 - DNA, 83 bp, Homo sapiens
tggctcttgccctcatcctggttctggaatcctcagttcaagcgtgtgaaggcaaagaagaatgctgctccattcagaagtga

SEQ ID NO: 21272 - DNA, 49 bp, Homo sapiens
gtttcctggacccattccgactcaggtccttctggcactcctctggtgg

SEQ ID NO: 21273 - DNA, 75 bp, Homo sapiens
caaccagatgaggaagtacaactttgagggaatgggtactgttcaaaaaggaatgccccacaagtgttaccatgg

SEQ ID NO: 21274 - DNA, 100 bp, Homo sapiens
gggccaccctgaggaaggaccagcgggacgcctgcatcaaggaggccattctcttgagctccaagagtcaggatcgcaagtcagaaagcaaagaaaagag

SEQ ID NO: 21275 - DNA, 101 bp, Homo sapiens
ctgcaggatggtgcacgtagccaggctgctgctgctgctcctcactttcttcctccgcacggatgctgagaattgaaaaggaagatcaggccaaccccaaa

SEQ ID NO: 21276 - DNA, 83 bp, Homo sapiens
ggaagagactcggggccccccagcctccgccaacccaggggactcgggcaagggtgccgaagatagacaagaggcacacagag

SEQ ID NO: 21277 - DNA, 51 bp, Homo sapiens
acacagcctcgctggaggcagtttctggcctctgagcccaagctaagccat

SEQ ID NO: 21278 - DNA, 74 bp, Homo sapiens
ttttgatgaacaatattgaacgctatcttaagggtatgttagagcccaccaaggaaccactgaaaccactttct

SEQ ID NO: 21279 - DNA, 90 bp, Homo sapiens
ggtttgacgcacacggcaccaaactattgcttccaagtatgatcatcaggcagaagaagatcttcgcaattggatagaagaggtgacagg

SEQ ID NO: 21280 - DNA, 80 bp, Homo sapiens
attggacacgggaacatcattacaagacagacagtctccagggaggacgaccccccaaagacacacgtgacccaccaccc

SEQ ID NO: 21281 - DNA, 90 bp, Homo sapiens
gccgggacgccatgtccatggaggaccccttctttgtggtgaaagggtcagggatgttggaagctggagtagacaggattatttctcagg

SEQ ID NO: 21282 - DNA, 100 bp, Homo sapiens
cgcagcgctgccatggagcccagcagcaagggtgcggaggcagcaaatgttacaggtcctggtggtgttccagttcaaggcagtaaatatgcagcagacc

SEQ ID NO: 21283 - DNA, 73 bp, Homo sapiens
ctacaagttcctgcagttcgcttacttcaaggaaaccagggtgacagaggagacaaaggcgcggcaggagcag

SEQ ID NO: 21284 - DNA, 76 bp, Homo sapiens
gactgtcttgggcagcatgcagtgctttctggaggaggaagatgactatctctttgatgatcctctgccaatacct

SEQ ID NO: 21285 - DNA, 90 bp, Homo sapiens
ccggcgtctccttctatgtgctgtgtccggacaacggctgcggcgacaattttccgatacggaagatgtgtgcattgtagagagattgtt

SEQ ID NO: 21286 - DNA, 95 bp, Homo sapiens
agaatttgagcctctgctgaattggatgaaagataaagcccttaaggacaagcttagcagtgtctgcaaaaacgaatcttttcctacaacctgtt

SEQ ID NO: 21287 - DNA, 100 bp, Homo sapiens
atatcaaaatgccagtcaactccagtggacctgattgggtaactgtgattcccaggagaataaaagcattaaagggcagtatttaaagtcagttggcaag

SEQ ID NO: 21288 - DNA, 78 bp, Homo sapiens
atgcagttgtaacagcaatggccagctgggcagctgtcatcccctgactggagttctaggcacagacagggtggagca

SEQ ID NO: 21289 - DNA, 74 bp, Homo sapiens
aaaaaatggaagccgaccctgatggtcagcagcctgaaaagtggaagagaaagccaatacccacctcctcttgg

SEQ ID NO: 21290 - DNA, 51 bp, Homo sapiens
cctcaatctccttttccttggctaccccgctggagagcgaggtggcttcaa

SEQ ID NO: 21291 - DNA, 75 bp, Homo sapiens
gataccacgaaagaatctggatgtcatgaaggaagcaatggttcaggttcttcagatagatcctgaagttacaga

SEQ ID NO: 21292 - DNA, 75 bp, Homo sapiens
ggaggccggagagggtctttcacttgtgctgcagataactgttcccaggaaaaaaaggaggaaatcctggaaaat

SEQ ID NO: 21293 - DNA, 74 bp, Homo sapiens
ggggctgtcggccgcggggcggaggcactcgcgcgggggtttgtcagggagccactggtgatgtggatggggca

SEQ ID NO: 21294 - DNA, 90 bp, Homo sapiens
agaatatggagacgtcggtatatatgtatacttagcaggatgcagtgggtcaggttcatgtcgctttagttattcagaccccagcatcat

SEQ ID NO: 21295 - DNA, 100 bp, Homo sapiens
gaaactcaagatccccatggacaacaaggaggtggtctatgttgcccgaaacccaaaggacgtggcggtctcctactaccatttccaccgtatggaaaag

SEQ ID NO: 21296 - DNA, 75 bp, Homo sapiens
taagtgtttcgaaaatgtgtgtgaattggatttgatcttccatatggataagttgtggaagctgatcgaggaagc

SEQ ID NO: 21297 - DNA, 74 bp, Homo sapiens
ccgggttgggctgtgacgctgctgctggggtcagtggtacgtaaatggggtgaattattttactgacctgtgga

SEQ ID NO: 21298 - DNA, 100 bp, Homo sapiens
cttgtttgtggatcgctgtgatcgtcacttgggaagcccgtcagcctgagctacagatgcccatgccgattcttcgaaagccatgttgccagagccaacg

SEQ ID NO: 21299 - DNA, 75 bp, Homo sapiens
caggtcttctgtgaggaatctggattgtcacctttgctgcaaaaaattacggaaacagcacttcttctcagtctc

SEQ ID NO: 21300 - DNA, 100 bp, Homo sapiens
aaaaaacagcagatggctcgagaatacagagagaaaattgagacggagctaagagatatctgcaatgatgtactggaggaacagcacagcatgctgggct

SEQ ID NO: 21301 - DNA, 100 bp, Homo sapiens
caaaatttgtctgcaaacctggagccagaaacattaccgtcatattccacccattactaagatggaccaatcttacaaaccagatgaaaatgaagttcga

SEQ ID NO: 21302 - DNA, 75 bp, Homo sapiens
agccaagttccccaacggctccccgtcgtcctggtgctgcagcgggggggccctcagcctcttggccttgaacgg

SEQ ID NO: 21303 - DNA, 80 bp, Homo sapiens
taaggatcacattccaagggaaactgatatgaagttccgcagctctctgtacttgctcatggagaccctcaatgcgacga

SEQ ID NO: 21304 - DNA, 101 bp, Homo sapiens
cttcatcttcatcgccggcggcagcttctcacgggacaacggaggggatgcggcctccaatcttctttataggtggtaggcagctccctcctcttcgtgca

SEQ ID NO: 21305 - DNA, 100 bp, Homo sapiens
tgactgtccagagcctggaactgtgcccacaccagaagccatcagcagcaaggtgttttattccaaacgtctatgctgctttgttcactgcagctcttgt

SEQ ID NO: 21306 - DNA, 76 bp, Homo sapiens
tgcttagttatatccagcgattggttcaaatccacgttgatacaatgaagattgaagaatggggcccatttgactt

SEQ ID NO: 21307 - DNA, 98 bp, Homo sapiens
ggcagttgcaaaatattcaggagaccgtcgttgccttgtatttccagagaacagaagcagctgacacaggatgatgatactgatgcggttgagattgc

SEQ ID NO: 21308 - DNA, 80 bp, Homo sapiens
cagaagctactggctgggtccctgggtcaggagaggctcacggatcaggaaataggggatgggaaaggccttgacatggc

SEQ ID NO: 21309 - DNA, 98 bp, Homo sapiens
gagcaccccccacaatggagcccaaatggggtcctcctgagcccagaagacgaggaggagctcacagcaccaggtgggagaaggagaagcacgaagac

SEQ ID NO: 21310 - DNA, 97 bp, Homo sapiens
gcagcccaacttccagcaggacaagacatatctgaagagatggattaagaatgctttggattaaggattgtggagcacatttcaatcattttaggat

SEQ ID NO: 21311 - DNA, 83 bp, Homo sapiens
gcggcggggctgaggcggccgcggggcccgagcgcagaattcagaaggagctggcggacatcactttagaccctccacctaat

SEQ ID NO: 21312 - DNA, 90 bp, Homo sapiens
ccgcactctctcgatgagtcggagaagtcccgtggaacttgcagaaatctgtgccaagagtgagcgttacattggcactgaaggaggagg

SEQ ID NO: 21313 - DNA, 100 bp, Homo sapiens
gtgacagcaatcagctggcctggtttgatactgacctgtaaatcatcctttaggagtcagtggatcggtggggaaaatgctgcttaccctgggccctggg

SEQ ID NO: 21314 - DNA, 100 bp, Homo sapiens
cagcgtggacagcggcgctcccggcggggcggccccggggggacccggcttccgcgcctccgcttacaaacacgcagatggcaagaagattgatggcagg

SEQ ID NO: 21315 - DNA, 100 bp, Homo sapiens
gcctggacccctactattgcaacaaggtgctgactccagcacagatcaagtcaatttgtcaggcaattctggactctgggaagcagtatgccataaagaa

SEQ ID NO: 21316 - DNA, 51 bp, Homo sapiens
tttaacaatagatcaagctagtgacttgaatctgatattgatgctgctgct

SEQ ID NO: 21317 - DNA, 100 bp, Homo sapiens
tcatgttcgccttcaacctgctcttctggcgctaagctgcaacgaaaacgacgcagagcacctggaccgtgaccagccatacccgagcagccagaagacc

SEQ ID NO: 21318 - DNA, 82 bp, Homo sapiens
ggcggagctggtggaggccaaagtgtggacactgccagcggctgcagccgacttggaatgacctgggagacaaatacaacag

SEQ ID NO: 21319 - DNA, 74 bp, Homo sapiens
cttggctgaccttgagtgcagctccccctataagcctcggcctccacaggtaaacctcacactggttggcagaa

SEQ ID NO: 21320 - DNA, 83 bp, Homo sapiens
attaccatggcgaggagtctctgtccgggggcctggctaaggaaaccctattacctccagcacagctaactttggagacctac

SEQ ID NO: 21321 - DNA, 75 bp, Homo sapiens
agtaaatgtagagtcattaacaaggagcatgtactggccgcagcaaagaggcaaggaactgctccaccgccaatg

SEQ ID NO: 21322 - DNA, 90 bp, Homo sapiens
cctgaagtcggtgtctgctgcgttcacggcaggattcggttaggttctgccggagacttccatttggcctcaatgtgaaattaaagtaga

SEQ ID NO: 21323 - DNA, 100 bp, Homo sapiens
atcagacagaacagttaatcctcaatttaagcctgatctaacccctagaaacaggtcatcgtattgaggaagttcctgaacttcctttggtagttgaaga

SEQ ID NO: 21324 - DNA, 82 bp, Homo sapiens
gtggccaaagaccttaggagagacgagcagccttcagggagcgtggagacaggttttacacatccataagtagacctttttg

SEQ ID NO: 21325 - DNA, 83 bp, Homo sapiens
atttaagagagctctggacaagctggaatgcatccaagagaatccctcaacatgctgacactaccccaagcagtccttcacca

SEQ ID NO: 21326 - DNA, 100 bp, Homo sapiens
agtctgcagtttgtaatcgaaattcacggaacagtcaatcaccttctgctgcttggatgggtggatttggtgctcagcctccccaaggacaagctcctcc

SEQ ID NO: 21327 - DNA, 75 bp, Homo sapiens
tagagaatgagatagccgtcctgagaaaaacaccaccgatagccacaccgaagagttctcccatttgctggttcc

SEQ ID NO: 21328 - DNA, 100 bp, Homo sapiens
cgagagggcatcgtggccccactgcctggagagtggaaaccatgattatttactggcaagatgagcaggattaccatgaaagaaaagtccagatggactg

SEQ ID NO: 21329 - DNA, 82 bp, Homo sapiens
aggaagagccgggcagtccctggagcgggccaggtgagaagccctaccactgcaactgggacggctgcggctggaagtttgc

SEQ ID NO: 21330 - DNA, 98 bp, Homo sapiens
ccgcgctgagcgagaggaacttcggaacctgcacttcttccccccagagtatggaggctgggacatctcgtcgctgaacctggccgaggcgatgcggc

SEQ ID NO: 21331 - DNA, 75 bp, Homo sapiens
gaaatttctacacctacccattggtctaaacttgatccaaagacaatgaagcatgttcagctcttgacacaaatc

SEQ ID NO: 21332 - DNA, 82 bp, Homo sapiens
gaacagttccccctggtgcagggagtggccatatagcagatttagtggagggtttggtgccagagactaccgacaaagtagc

SEQ ID NO: 21333 - DNA, 82 bp, Homo sapiens
ttttttcctgtatgaagcggttggcaccactgaagtgaccgaatgagattctgaaggaagatttccattaggtaatttgttt

SEQ ID NO: 21334 - DNA, 146 bp, Homo sapiens
actaccttcagattatcacagatatacagagttgtccatggaaacggcaagcagaagaatatgcaaattttaggtatgcagaatctgtgggagcaaaacattatcatacttcagccaaacagaacaaaggaattgaggaactcttt

SEQ ID NO: 21335 - DNA, 98 bp, Homo sapiens
aagtcgacggcgccggcggctcctgcaagagtgagccatggagctacgtgtggggaacaagtaccgcctgggacggaagatcgggagcgggtccttcg

SEQ ID NO: 21336 - DNA, 49 bp, Homo sapiens
caagagagcctttcctgctgcttcttagcctactcagtgtgaagacaac

SEQ ID NO: 21337 - DNA, 100 bp, Homo sapiens
gaaactggcggctgctggtagttccatgctgtctgttcagacttcagcttggtgcatttggctttatgtcccgagttgccctacaagcagagaagatgaa

SEQ ID NO: 21338 - DNA, 100 bp, Homo sapiens
taaggatgactgaaaacatcctggaatcaaatagtgttacggcaacaagacctctgcatgttgctgcccgaaatgggctaacaatggtggttcaggaact

SEQ ID NO: 21339 - DNA, 83 bp, Homo sapiens
cccaatggctctgccccggaagggcctgcatccccaggctcccattgcagagtgggcaggatcttaagacccgataggtgcag

SEQ ID NO: 21340 - DNA, 87 bp, Homo sapiens
aagatcaaagatgccaagaaaccctgacagagctccggcagaaagcaggccatttgggacccttcctcccaggcccccagggcagga

SEQ ID NO: 21341 - DNA, 101 bp, Homo sapiens
atcttcgagcaagaaactaataataataattccagcttctacacaggagcagtgaggagaatgaataccttccaagaccagagtggcagctccagtaatag

SEQ ID NO: 21342 - DNA, 75 bp, Homo sapiens
gcacaccattggcaaaactgtggagtatctgcactcacaggggctgtccctacctggctcgcaagctgacccttg

SEQ ID NO: 21343 - DNA, 100 bp, Homo sapiens
ttggattggcatcccaacaacgttttgctggcagcaggatcatgtgacttcaaatgcagaagctatggagatattttgcatagaatgaaggatctctgca

SEQ ID NO: 21344 - DNA, 100 bp, Homo sapiens
ggaagagcaaagctgtcctaggccaaccagagattcatctttcatgcagtgacatgttgataaaaaatgatggagtcctaagcagacttaaagccaagaa

SEQ ID NO: 21345 - DNA, 83 bp, Homo sapiens
cctcaaggatgcccggtccccatcaccggcacacattgtcacctgcctagagctggaacgttacctccagagcgagccctgct

SEQ ID NO: 21346 - DNA, 100 bp, Homo sapiens
tcacctttcaaggagtcctgtgatccatcactcggattggcaggacctggggccaaaagccaaggtctataatgacggatctatactacctcagtcagac

SEQ ID NO: 21347 - DNA, 75 bp, Homo sapiens
tggaccttccggagcttctcagaagacagagggttttcttttgagagacggggtttcaccatgttagccaggatg

SEQ ID NO: 21348 - DNA, 49 bp, Homo sapiens
ggatagctccaaactgggatatagcagcccgacggccatggaggctgaa

SEQ ID NO: 21349 - DNA, 74 bp, Homo sapiens
aaaacgactaccggcagctcgagaaggagctgcagggccaggtggggaacgccaagcacaacgtgcatgtcatg

SEQ ID NO: 21350 - DNA, 90 bp, Homo sapiens
ccgggaggccaacgggatcgtggagtgcgggccctgccagaagaatactcccccagttgcaagaggcgcaggaccgtggaagacttcaac

SEQ ID NO: 21351 - DNA, 82 bp, Homo sapiens
cacatccctgctcatctcacctatgggaagctgctagctctaacagtcagcccaaggccaaccccactgtcactctgttccc

SEQ ID NO: 21352 - DNA, 83 bp, Homo sapiens
tgcccacgtcatcctgaacgacatcaccgaggagtgtaggcccccatcgtccctcattgtgtcccggcatggatatccggaac

SEQ ID NO: 21353 - DNA, 83 bp, Homo sapiens
cttagaattttaagatacttcaggtgcagatcccaagtctgtagtatgtgcattcttcaagcaaggacagtgtactaaaggag

SEQ ID NO: 21354 - DNA, 100 bp, Homo sapiens
gacaccagcttcagtggcctgtcgttggaagagtacaagctgatcctgtccacagatgtggaagatgtgaaatttgtcatcaattatgactaccctaact

SEQ ID NO: 21355 - DNA, 100 bp, Homo sapiens
cctcccgattagctgggactacaggtggggatgcattccaaaggaactcagacagcaaaggaagagatggaaatggatccaaagcctgacttagattcag

SEQ ID NO: 21356 - DNA, 100 bp, Homo sapiens
gaagaacaatcagcagaagatgcagaagatgggcctccagaactcctgaggaattcagaaaagcagctcagcaacaggaagaacaagaagaaaaggagga

SEQ ID NO: 21357 - DNA, 83 bp, Homo sapiens
tcttctcaccatcgttggcctgattctccccaccagagacaatgcagatcttcgtgaagactctgactggtaagaccatcacc

SEQ ID NO: 21358 - DNA, 83 bp, Homo sapiens
gcagatcgcagaggcagtggagtttcttcacagtaaaggactgatgcacagggacctcaaggaatgtctgaatctgaacaggc

SEQ ID NO: 21359 - DNA, 114 bp, Homo sapiens
gttggccaagctctcggaggagatctcggctccagtttcggagcggatggattcagtggtcctgagccttctgaagttaggcttctgcctggtggtggggatcctgacatcaag

SEQ ID NO: 21360 - DNA, 114 bp, Homo sapiens
gagcagagggaaagggataggagaaggatgtggactgcagtgctgcagtgccagtgttttccaagcagtgaagcacttgccgtgttgaactgaatgcactactggagaatgttc

SEQ ID NO: 21361 - DNA, 73 bp, Homo sapiens
agcattctcctggccattgcccttctggaaggaggcaacaccaccatccaggagatcaatgatctgttggtta

SEQ ID NO: 21362 - DNA, 99 bp, Homo sapiens
tatgatataggacatgctgtaatatggatcaccgccatgatggcttatctaattaactgtgtttggaactgctataaatacatcaacaaccgaaacgtg

SEQ ID NO: 21363 - DNA, 75 bp, Homo sapiens
ttccgttgccggtgccggcctagcgtcctggaattacttcaatcaagtggctcctgcacgtgcgccggctcctgc

SEQ ID NO: 21364 - DNA, 75 bp, Homo sapiens
ttccaaggaagaccccaagttcaaggaactggtcaagagtttggagcctcttccatcaagtggacctgattttgg

SEQ ID NO: 21365 - DNA, 74 bp, Homo sapiens
gaacagaaaactgcatttgacaagggctgtggcagaaattctcaggagcagcatgccttgaagcactatctgac

SEQ ID NO: 21366 - DNA, 100 bp, Homo sapiens
cctggctcctggtggctccagcagcagacaagttggatggcttgaggactggtactaaaaggaaacgtgactgggaggccattgccagcagaatggagga

SEQ ID NO: 21367 - DNA, 74 bp, Homo sapiens
gagtcgtccggagccgctgcgcggaaatctactttcttcaatgtgttaaccaatagtcaggcttcagcagaaaa

SEQ ID NO: 21368 - DNA, 98 bp, Homo sapiens
tccaacctcacccacccggggaacaagatcaacctcctcggcttcttgggccttgtccactgccttccctgcaaagatggagtctcgctctgtcaccc

SEQ ID NO: 21369 - DNA, 100 bp, Homo sapiens
gggcaagggcgagatcctggagagcctgcaggacggcgcggcagagtccccgtacgcctacagtaacggtgcacagatgtattcataaaggaagacatta

SEQ ID NO: 21370 - DNA, 82 bp, Homo sapiens
gtttttcggatcatgtctggtggctccgcggattataacagaaatgagccgtcagactgctacagcattacctaccggtacc

SEQ ID NO: 21371 - DNA, 100 bp, Homo sapiens
ctgaaggccgaggccaagatggcggtgctgtcaggggttggtgccatctacatccgtcgccggccccgtgtgcgtgtggaggccctgcagagtggagggg

SEQ ID NO: 21372 - DNA, 82 bp, Homo sapiens
ggaggagagcagctcctcactgtcaagcacgagctgcggactgggtgaaggttgccgaactgtccccctggctggacatgtg

SEQ ID NO: 21373 - DNA, 100 bp, Homo sapiens
tgtggtatctcactattcgatctggaaaaggacttgcatattataagtgatttgaagatattaaagctagaaattggaactagaaaatcaaaagaattca

SEQ ID NO: 21374 - DNA, 99 bp, Homo sapiens
ggaattaagaaaacagagcgacgagcaagaagcagcccaaagtcgaatgattcagacttgcaagaaacatcctctaccaccttgatgaaaagacaagcc

SEQ ID NO: 21375 - DNA, 80 bp, Homo sapiens
acgtgaaccagatcgggagtggcaccatggacctgcccttccaggctgttactgaggcggagacacgggtgatgattggc

SEQ ID NO: 21376 - DNA, 99 bp, Homo sapiens
tcaggtataataatgttctgcagtgaaaagaaattgcgtgagtaaacatcagtctccaaagataactacatcccttcttcccatcaacaatggctccaa

SEQ ID NO: 21377 - DNA, 75 bp, Homo sapiens
gcaccatggccagcaccatttccggtatggacctgtctgccaatcaggacgaggagaccgaccaggagaccttcc

SEQ ID NO: 21378 - DNA, 83 bp, Homo sapiens
caagatggtgctgtcccagagacaacgagatgaactggtaagcttgatgattaccaggaacgaatgaacaaaggggaaaggct

SEQ ID NO: 21379 - DNA, 100 bp, Homo sapiens
ctagctattgccttattttttctcatggatgttcttcttcgagtatttgtagaaggcctctggaataaccccattccctgcgacatggcccagcacctga

SEQ ID NO: 21380 - DNA, 60 bp, Homo sapiens
agagcctagcacctcttatactgatatggagtcgggtggtacagttttgagtaccaactg

SEQ ID NO: 21381 - DNA, 76 bp, Homo sapiens
cgccgacctcttccactccgaggaaatcaaggttgcagagaacacatcttagaagatgaaaaacctgaatctatca

SEQ ID NO: 21382 - DNA, 75 bp, Homo sapiens
ccgagatacagcagtctggttgccaagggtctccagccacctgcccttcccgagaagagagagctctgggccttc

SEQ ID NO: 21383 - DNA, 50 bp, Homo sapiens
gaaaaacggcctcgtagagtcaacagtgttctaagaacggaagcatctgg

SEQ ID NO: 21384 - DNA, 98 bp, Homo sapiens
ctcgccaaagccgctctgggcaaggtgaccaagaatatggcccaggtgaccaaagccctggacaaggccctgagcaccatggacctgcagaaggtctc

SEQ ID NO: 21385 - DNA, 80 bp, Homo sapiens
tcgggaagcgtcgggattaggtgaaaagctagagccggtgcaggccacgcagaacaagacagggaagtatgtgccgccga

SEQ ID NO: 21386 - DNA, 100 bp, Homo sapiens
ggtgctagtggctggacttgacctggaaagctacctctgaacagtgcagatgagatttatgagctacgtgtaaccggacgtacccaggatgagattttat

SEQ ID NO: 21387 - DNA, 101 bp, Homo sapiens
agcttctccgcctggctgcactgcgtgtgtgtggtgggcttcgacctggagctgggccaggccgtggagatatgatgccagcaaagggatggaaagtctag

SEQ ID NO: 21388 - DNA, 97 bp, Homo sapiens
tccggagcgcctagccctaccggactacgagtatctggcaacatggccaatctttcctaagctgctcagcttacaagaaaaggaatcatactgctaa

SEQ ID NO: 21389 - DNA, 82 bp, Homo sapiens
gtcgcccaggagtcatcggacgccagaatctgccacgccgcaatgaagagcttcttacagtgaaagcaaagtaggtcgagtc

SEQ ID NO: 21390 - DNA, 100 bp, Homo sapiens
caaaggcactggaggattgagctaggtgggcagaaaagagcacgtcactggtgtaccgcctgccccagtcgtgggtggggcccaaactgccctggaaact

SEQ ID NO: 21391 - DNA, 83 bp, Homo sapiens
cggtcgagccggcctgcggcagccggtaccagcagctagagaccgttggatggcagcttaaccttcagatggctcactctgct

SEQ ID NO: 21392 - DNA, 75 bp, Homo sapiens
cgcgcgcctgtagctcgcgggcctcgcagatctcacattcttgaaggtggcattgaagagcactaagatcggaag

SEQ ID NO: 21393 - DNA, 90 bp, Homo sapiens
ggcgccgcccgggtgtccccgcggcgcaggaggcggtggagcgcagagcgggcgagcgcgagaaagcatgggattatggcaaccacagaa

SEQ ID NO: 21394 - DNA, 90 bp, Homo sapiens
accgctgcagccgctggctgaccaacagaatcctggatttgagtctgtcctttgaaagcatctctgctagagttcccacttccaaacccc

SEQ ID NO: 21395 - DNA, 50 bp, Homo sapiens
gaaggttgcagttacaggtaactgatgttctcagtgcagctgagtcttgg

SEQ ID NO: 21396 - DNA, 99 bp, Homo sapiens
gtcctctaccatgcccgggagatccaggtctatgttaacaatgaatgggcaaccagtgttggggaaggagggagctttggagaacttgctttgatttat

SEQ ID NO: 21397 - DNA, 98 bp, Homo sapiens
cgaggctgccgttcagcacccgtcgagctggtaagcatccgtggcattcaagacgaagatccccctgacgcccagctcctgaggctggataacatgct

SEQ ID NO: 21398 - DNA, 74 bp, Homo sapiens
gcggattaaagctaaagacatagttcctggtgatattgtagaaattgctgattccaaatctatgcaagacggct

SEQ ID NO: 21399 - DNA, 82 bp, Homo sapiens
aaacaaattattgacggtcaaggtatttcatgccgagggggatatgagactttctactcggaatatcctgagtgttgcgtgg

SEQ ID NO: 21400 - DNA, 99 bp, Homo sapiens
actgcctatgcaacgctgggcatgaggagcggagcggagaatgccaaggtcccgaggaggtagaaatcaagtgccccttgaatcacattgcttgccttg

SEQ ID NO: 21401 - DNA, 75 bp, Homo sapiens
gaggcattgaagctgctgctgagcccgggaggtgaaaattatctcagtgaacgaggatgtcactcttagatcagc

SEQ ID NO: 21402 - DNA, 90 bp, Homo sapiens
gggttcaaacagagtgaccttgacgtctgtatgacaattaatggacttgaaactgctgagttgtcactcagcccagtccatcagtttctc

SEQ ID NO: 21403 - DNA, 85 bp, Homo sapiens
tgagcaggcccggggagggtggttaccgctgaggagctgcagtctctgtcaagttgtgcggtctgaaagtagaagtggatatgga

SEQ ID NO: 21404 - DNA, 83 bp, Homo sapiens
agcagtcagctgcagcctctcccaacctgactgcttcacaggtggtagacttgctgctggctcgaggtgcaaataaagaacat

SEQ ID NO: 21405 - DNA, 101 bp, Homo sapiens
ccgcagccgcagccccctgctccggaggctggtgcagcttgtcaaggtggctttggagaaaagtctggcaactgtggagacccagaacccatctttttccc

SEQ ID NO: 21406 - DNA, 100 bp, Homo sapiens
aagaaccatgactgtattcaggaaggcacatgaactgaagcttctgtcagaatgccaatacaagcagttgatgtctctgcccacccacgcaacccagact

SEQ ID NO: 21407 - DNA, 80 bp, Homo sapiens
gatatcaggaaaaggtttgaatttccaaattctcttatccaatcacagctctatgtgaagaggtgctttggcatacatca

SEQ ID NO: 21408 - DNA, 100 bp, Homo sapiens
caaagatgcatgttttgcatgtcctttcttgtgtgatcgaaagagtcaacatgcagacatatctgaagagatggattaagaatgctttggattaaggatt

SEQ ID NO: 21409 - DNA, 90 bp, Homo sapiens
gttggaccttccggagcttctcagaagacagagggttttcttttgagacccctttgctgatgcaagtaagggtgatgacctgcttcctgc

SEQ ID NO: 21410 - DNA, 100 bp, Homo sapiens
actgtgattcaccaactggacaaggctttggcaaagctggggattggccagctgactgctcaggaagtaaaatcgaccaccgctgaaacttcacttctac

SEQ ID NO: 21411 - DNA, 75 bp, Homo sapiens
tgctggaagggcccaacgagacagcgcaagcaccaggaaatccgagccatgagaagtcagctcaaaaagatcgag

SEQ ID NO: 21412 - DNA, 100 bp, Homo sapiens
ctggaactcgcgcaggtcctgcccccagatactctgcccaaccgcacggtcaccctgcattgaacctggccacatcccaggtaccgtgaacatccccttc

SEQ ID NO: 21413 - DNA, 50 bp, Homo sapiens
agtttctacctgtatcacccaagactggcattgctcgggtaccacttgct

SEQ ID NO: 21414 - DNA, 74 bp, Homo sapiens
tgaagcagctcccgcgaggaccacccggcatgttatgttacccagagaactttccaaacaagtacctaaaactc

SEQ ID NO: 21415 - DNA, 100 bp, Homo sapiens
ccagagcccctcgcggagggagcggcggccgagttctccagcctgctgcgcaggataaaaggcaaactcttcacctgatgcgtctgttactagagtggag

SEQ ID NO: 21416 - DNA, 100 bp, Homo sapiens
cagagctgaggaatcaatatagaggctgcagggagctggcctgcccatggagagcgccatcctgcacgggaagctgggcgagcatgagaaggcgctgcat

SEQ ID NO: 21417 - DNA, 74 bp, Homo sapiens
cacactggctatcattgatccaggtgtcttcagtgccctgggtttgcctgtgacccaatgcccactgggactga

SEQ ID NO: 21418 - DNA, 78 bp, Homo sapiens
gcagttcatcttcctccctgtgtactttccatttgccttcctggggctacaggggaagaattgaaagtgaaggcatac

SEQ ID NO: 21419 - DNA, 116 bp, Homo sapiens
gtggccttagctgtgctcgcgctactctctctttctggcctggaggctatccagcatgaggacggggacttggttgccttttccagtgacgaggaattgacaatggccatgtccta

SEQ ID NO: 21420 - DNA, 139 bp, Homo sapiens
actgccttgagtctcattttgtttccctctggaaaccacatgtgtaccttgtttgcaacagtatgggttcgatacaagaggctgttttcctagcgtggcttgctgcctttggtaagaacatgtcgtccatcttgccatt

SEQ ID NO: 21421 - DNA, 50 bp, Homo sapiens
gggaactcaaacagcagatgcaggcacgtggactccctttaatccagtga

SEQ ID NO: 21422 - DNA, 51 bp, Homo sapiens
caaaaactatgaatggagacatgagggtgctggagaatctggtaaaagcac

SEQ ID NO: 21423 - DNA, 75 bp, Homo sapiens
tctagtctttccgcttcttgaatttctctctgtaaaggagacccaacatgagtgaagtttcctgcaagaaacggg

SEQ ID NO: 21424 - DNA, 76 bp, Homo sapiens
gaaagccccagacggaaagagctacttgctgagtggttatcactaggctaaaactggacaaagaccgcaaaaagat

SEQ ID NO: 21425 - DNA, 75 bp, Homo sapiens
gagttcaagaagaacactccagagttggttagtctgctgctaattggaattgctgcgtggggcattggcttcggg

SEQ ID NO: 21426 - DNA, 100 bp, Homo sapiens
agcgggtcaggctcttgctagatcagcaccggaggtggaagactgttactggctgaccaacaaagttcctatcaaaagacccagcacaggtcttctcatg

SEQ ID NO: 21427 - DNA, 100 bp, Homo sapiens
tgggtttgaacggaatgctggagtcagtggaagacggagctggtcggcccgaagtgttttacctcaatcatatatccacacaagtgcttctcttgacatt

SEQ ID NO: 21428 - DNA, 100 bp, Homo sapiens
aaaatatcggagaataatttctttctcgctgatcgcctaacttctactgacgaagcttggaagttgcagaaggggccggtgatgttcagggatgtttcca

SEQ ID NO: 21429 - DNA, 101 bp, Homo sapiens
tggagttcttacaacatggcagacattgacaaatacacctgtaagatcggaatggagtgaacttcaaagtcaggaacgatctgaacaaaaaaagtctgaag

SEQ ID NO: 21430 - DNA, 50 bp, Homo sapiens
aagatggcgactgtcgaaccgaatagcattgaagaacttgatggtgtcct

SEQ ID NO: 21431 - DNA, 100 bp, Homo sapiens
ctgcacgtagcccggcgctcggcatggctctcctggtgctcgtctgaacagcagaagaagcaacaggaggctgagaaactgcatcgacaagaaaggaaaa

SEQ ID NO: 21432 - DNA, 100 bp, Homo sapiens
ggggctggggctgtggctgcgccgccggccatcgactttcccgccgagggcccggaccccgaatatgacgagctgtaggtaaaacttgcctactgatcag

SEQ ID NO: 21433 - DNA, 96 bp, Homo sapiens
ccaagagcggcgaggaggcgctcatcatcccccccgacgccgtcgcggtggactgcaagacttctgagaagttccagaaaataaatcagatggtat

SEQ ID NO: 21434 - DNA, 49 bp, Homo sapiens
tgagcaggtggcagaagatgcgaggtctgcggggtttccgagaggctcg

SEQ ID NO: 21435 - DNA, 82 bp, Homo sapiens
tgataacacactcagcatcactaaagagaagaagaagttggatgggataccgagattaaggatgatgtgattgaagaatgta

SEQ ID NO: 21436 - DNA, 100 bp, Homo sapiens
gtttggaattgatgatcaagatttccaggtacttgaagaagcagaagctcaacatttatatcagtccatcttgcctgatatggtgaaaattgcactctgt

SEQ ID NO: 21437 - DNA, 100 bp, Homo sapiens
gaagggtttcagaacacttctgggaatccgatgtttctttctcagcaaaatagaggagaagcttacccctcttccagaagataatagtatgaatgtggat

SEQ ID NO: 21438 - DNA, 100 bp, Homo sapiens
tggaattgaaccatgggattcaggagtgacatcaggattggagcccacccacctttgggttcctgttggacatcgatggagtgcttgtgcggggccacag

SEQ ID NO: 21439 - DNA, 113 bp, Homo sapiens
tacaccgagagagtgaggagccagacgacaagcacacactatggcgctgaaacggattaataagggacaggagagagtggcaagagtacgtttatcaagcagatgagaatcat

SEQ ID NO: 21440 - DNA, 83 bp, Homo sapiens
gctgctggcgctctggctgtgctgcgcgacccccgcgcatgctcaccatggatgatgatatcgccgcgctcgtcgtcgacaac

SEQ ID NO: 21441 - DNA, 51 bp, Homo sapiens
cgatggaggagctgagcgctgatgaggtttgctgagaagcacaactttgca

SEQ ID NO: 21442 - DNA, 97 bp, Homo sapiens
caatatcggcattctgtgctacgaaggtgggatgtgtgtgggctgaaattccgagctgcggttgtgcatgagaatacacccttcgtggtaccccatc

SEQ ID NO: 21443 - DNA, 75 bp, Homo sapiens
cctcccactgcaaaaaggcctgggttttacacatccataagtagacctttttggagcctcaccagccaattcaat

SEQ ID NO: 21444 - DNA, 99 bp, Homo sapiens
ggctgccaggatgttcagcttcgaaggcgacttcaagacgcggcccaaggtgtcccttggcggcgcgagcaggaaggatgggagcaaagtgtttacggc

SEQ ID NO: 21445 - DNA, 90 bp, Homo sapiens
tgacgctgctggaggaaacacctcaggacacggcctacaacaccaagagccctccagaatacccatcatatagcccctgaggtggcatgg

SEQ ID NO: 21446 - DNA, 100 bp, Homo sapiens
cctggccaccgactcctacaaggatattagaaatggctactccccagtcaattttcatctttgcaatctgcattttaatgataacagaattaattctggc

SEQ ID NO: 21447 - DNA, 74 bp, Homo sapiens
acggctccccgtcgtcctggtgctgcagcggtgaaaggtgtagcagtcactcggcctacacccacagcatcgac

SEQ ID NO: 21448 - DNA, 75 bp, Homo sapiens
ctgggccgagaccattccgtatggagagccggcttccaaactacaaaaactttaaaggcacgattcaagaacttg

SEQ ID NO: 21449 - DNA, 100 bp, Homo sapiens
gacaggccccaaattgtctgcaccaaactccatcccatggaagtggctgtttggggcgactgctgttgccttggggggtgtggcactctctgtggtcatc

SEQ ID NO: 21450 - DNA, 90 bp, Homo sapiens
cttcaagtactattgaacctgcagaagcccagagtgcctcttcagaccttcctcagaacacctacatctggacagtcagtatctacttgc

SEQ ID NO: 21451 - DNA, 97 bp, Homo sapiens
ctggaccgcctcgtctttgcaccggccttcctcatgttgttcttcctcatcatgaactttctggaggtacgcaataactgtttggtattttgatgca

SEQ ID NO: 21452 - DNA, 127 bp, Homo sapiens
gggaaatgcatgtgcaaggcaggatatgaagagaaaaatggcacctgtcaagtaccttccactggaagaatctcaaacagcgctacttactcaggatcagtggcaccagccaactcagctttgggac

SEQ ID NO: 21453 - DNA, 98 bp, Homo sapiens
ttcgccgagccgcaggagagacacgctgggccgaccccagagaggcgctggacagatacacaatcatcatcttactagttctctgtgttgctcgctaa

SEQ ID NO: 21454 - DNA, 74 bp, Homo sapiens
tgaaagcgctgatggacaaccccacgctctatctagaaaaatacgccctcttggactcagaggaagagaatgac

SEQ ID NO: 21455 - DNA, 98 bp, Homo sapiens
cggcgggaccatggagctcagagcgcagccccggcgccggcggcgggaccgcggaccgggaacctcagaacctgttctggatccacagcaaatccaag

SEQ ID NO: 21456 - DNA, 51 bp, Homo sapiens
caagatacattttcagccataccaatcagacggagtcttgctctgttgccc

SEQ ID NO: 21457 - DNA, 83 bp, Homo sapiens
tgacaaaacttcaagccaaacatcaagcagaatgtgatttgcttgaagatatgagcaattctgtggtgttcttggtcacacat

SEQ ID NO: 21458 - DNA, 75 bp, Homo sapiens
aagaggattgcacggaggagctctttgacttcttgcatgcgagggaccattgctacggcaagaagaagctgaaat

SEQ ID NO: 21459 - DNA, 51 bp, Homo sapiens
cgccaccggccgcttctgtcctcgaatcatttgctgtttcaaatagagaac

SEQ ID NO: 21460 - DNA, 75 bp, Homo sapiens
ccgggcgctgcggccgggcgactgcgaagactttgtgtggacagtaatgacctcacgtttccgattgcctgctgg

SEQ ID NO: 21461 - DNA, 75 bp, Homo sapiens
ctgggtgcagcttctctagctggccttgctgttgggttgaaaaataccggccacagaccctgaatgatctcattt

SEQ ID NO: 21462 - DNA, 90 bp, Homo sapiens
catggcccccgagctgctgcagggctcctatgggacagcagcggatgtgttcaggccctgccctgggagaagccctgccacacgtcgtgc

SEQ ID NO: 21463 - DNA, 73 bp, Homo sapiens
tacaaggggtgcccgagcggctgctggggacggcggggaccggcactaagtgaccgcttcagcggtgagatcc

SEQ ID NO: 21464 - DNA, 111 bp, Homo sapiens
agaggattggaggtgtcagtgttaaaggaacctctacaacgaaggtgaagccacggaagataagagtgcctggtgaagaatgtgatgggatcactagcatgtctgcggaga

SEQ ID NO: 21465 - DNA, 100 bp, Homo sapiens
cgatgaggcatacgctgaggagtttggcaacgagacgtggggcgtaacaaaggatggcccagaaggagaactcctacccctggccctacggccgacagac

SEQ ID NO: 21466 - DNA, 100 bp, Homo sapiens
cccgtctgtcgcccgaggcggccgccgctgcaccttcaccgcgtacccgggacccgcccgcccgcgggaggcatgctggaagatggactgccctccaatg

SEQ ID NO: 21467 - DNA, 73 bp, Homo sapiens
agctactgtactggctattggaaggaggagattctgaagataaggagaaaccaaagcccaaaccccggccatc

SEQ ID NO: 21468 - DNA, 75 bp, Homo sapiens
ggagcggacgtcggcttctccccgcgggagcccccagcatgggaatactttcaagtcatcccaaatatggttcca

SEQ ID NO: 21469 - DNA, 80 bp, Homo sapiens
agcattgcaagaaattgttattcttccttctctgaggcctgaggattctcaaagttggattggtggaaacaatgaaccat

SEQ ID NO: 21470 - DNA, 83 bp, Homo sapiens
cggcgtgtgcgccgagcgctactcgcaggaggtcttcgggggatatgagactttctactcggaatatcctgagtgttgcgtgg

SEQ ID NO: 21471 - DNA, 75 bp, Homo sapiens
ggccgttgttggtcgagctggcgggtcccgcgggccaggccgtggaggaaccactcgttttgactattattttat

SEQ ID NO: 21472 - DNA, 100 bp, Homo sapiens
aggatttccaagtgatttcttccaaagcacaggaatctcactctgttaaagctggtctgttctaactgagtgtatcgcattaagttcaaggagagctttg

SEQ ID NO: 21473 - DNA, 101 bp, Homo sapiens
tgtggagcgcttctttaagggctacgggaagatcctggaggtggatctgaagaacggatggactagaggcttttaccagatttcttaaaactgaattcagt

SEQ ID NO: 21474 - DNA, 90 bp, Homo sapiens
cgagaagctccagatggcgtcttccgtgggcaacgtggccgacagcacagggcacggtgcaccctgtgaccactgtcagcagtagcgacg

SEQ ID NO: 21475 - DNA, 101 bp, Homo sapiens
agcttccaagaatcggttggtgagaccagctcgcagagtgtggttgtagctgtggacaggtagtaaaggcttttgtcgttctaaatcctgattacaagtca

SEQ ID NO: 21476 - DNA, 90 bp, Homo sapiens
tccatcaaaccctgagagctttattaccagacatgatctttcagccgggtgggcttggactgggcgtgctccatggcagagatcctgcgg

SEQ ID NO: 21477 - DNA, 93 bp, Homo sapiens
gtcctctacaatgaggagcgctacgggaacatcaccttgcccatgtctcacgcgggtctagatgttgatggaatatatcgagttagtggcaat

SEQ ID NO: 21478 - DNA, 101 bp, Homo sapiens
atttacctgggtgagacagcttgagccccatcgtggattccaagacatccctgctgagagagccaaggtggaacctaacttcttgtggaacaagtgttgcc

SEQ ID NO: 21479 - DNA, 74 bp, Homo sapiens
cagtacccactgactttgccaccttcccttcatcagccttcctcagggcatcccaggatttggaattcagctgt

SEQ ID NO: 21480 - DNA, 96 bp, Homo sapiens
cagccggaccgtcacccgctatcctgccaactctatcgtggtcgtaggaggctgtcctgtctgcaggtattttgaaggtggcgtctcatctgtcta

SEQ ID NO: 21481 - DNA, 100 bp, Homo sapiens
cgcccgccaccctgcgctgccgccgctctgaggagttaaaggcccgatgagagaaagggaaagttaaggatgctggagcagaacaatggatttctctttc

SEQ ID NO: 21482 - DNA, 88 bp, Homo sapiens
cgcgagcggcgagccggagcgcggagcccggctcccgcaccatggaggaggacgacagctacgcttgctgagcgagagcgagaagcgg

SEQ ID NO: 21483 - DNA, 82 bp, Homo sapiens
ctttcatgcagtgacatgttgataaaaaatgatgggtatttgtggtgcagcagattcccaacagtaacctcctcctcctggt

SEQ ID NO: 21484 - DNA, 90 bp, Homo sapiens
aacattcagacaaaattggagagactgccatgaagcaagtagtaaacctattgatggcaattttgctgactgtggaagtgactcatccaa

SEQ ID NO: 21485 - DNA, 112 bp, Homo sapiens
ccgcgcgcagggcctgcagcgggagctggacggcgagcgcgagcggcgcgagaaaatggagaaggaggagacaacccgggagctgctgctgcccaactggcagggtagtggc

SEQ ID NO: 21486 - DNA, 100 bp, Homo sapiens
aagtgaaccgcggcgacaagtacatcgccaagtttcagggagaagacacggtcgtgatcgcggaacatcatcttcagcgggctatttcagcacagcaggt

SEQ ID NO: 21487 - DNA, 74 bp, Homo sapiens
ggcttactgctgatgctagactgttatggtcaccaggcagcagggattggaaaccaggcaacaggaattggaca

SEQ ID NO: 21488 - DNA, 82 bp, Homo sapiens
tcctcctggccatgcaccgtttcctagcaacagggatgagagtccaatgaaagcaaacttccttcaaaacatgatagaagac

SEQ ID NO: 21489 - DNA, 88 bp, Homo sapiens
tctcaccaccagtctcttctctgctcccatcccagatctcaaagtgtttgagcgtgagggagtacagctgaatctgtctttcattcga

SEQ ID NO: 21490 - DNA, 100 bp, Homo sapiens
tcggatgatgccttcaatactacctttatttccaccatagatagacgatcagctgaacactctcttgaaggagttccagctaacagaggagaacactaag

SEQ ID NO: 21491 - DNA, 74 bp, Homo sapiens
agcagccctttcctgagcaagcggtctctgagtcggagtccactccccaggaattccattgtttgaaactcaac

SEQ ID NO: 21492 - DNA, 101 bp, Homo sapiens
gtctccatccccgaccgccctcttctgtcttggtgctccatacttgcttgcagtgcctacgtggctctggctttgggtgataacctcatggctttgaatca

SEQ ID NO: 21493 - DNA, 90 bp, Homo sapiens
atatcaagaggaggagttgttgatccatcttcggttgtgaatccggcccggaatgcagccaccccttagagcaaccccccttgctgctcg

SEQ ID NO: 21494 - DNA, 83 bp, Homo sapiens
tctgcaaccaagcacctgaaacagcagtgaagcagccgacacgagtcgttgttcataaaacagcttttgaaagttgagagcac

SEQ ID NO: 21495 - DNA, 89 bp, Homo sapiens
gaatcaaagtcaggccttgtgaaaccagacagcaacagaagctcctgaggagccctccacccagtatctccacatcacagaggccgaag

SEQ ID NO: 21496 - DNA, 96 bp, Homo sapiens
agagctgtgcctcccagcaccacagtccttctgcagtccctcgtccagccacccccagccatcctgttggcctcccgggagctggtccgcagcaag

SEQ ID NO: 21497 - DNA, 75 bp, Homo sapiens
caccaccaccacagagtctgtggaagaggtggttcgagactgggctggcttagatgaagatgaagatgcacatgt

SEQ ID NO: 21498 - DNA, 100 bp, Homo sapiens
gggtgccgcagggtcgggctggcgcgaccctcggatgtggcaaaatctggcaaaggcagagaccaaacttcatacctcaaactctggggggcggcgggag

SEQ ID NO: 21499 - DNA, 83 bp, Homo sapiens
ctatttattttacctcagtataacattagcgtgcctacagcaggatgacccctccggcgaaggtgtcctgccctcggcccgcg

SEQ ID NO: 21500 - DNA, 80 bp, Homo sapiens
accctgacatcgtccgatctgtcatcaatacctcaggggtgaatgtgatgctgaggaagattgctgtggctgcagcgtcc

SEQ ID NO: 21501 - DNA, 50 bp, Homo sapiens
ccgctctgagggcgcctgctcaggcctccggtgtggctgtctctgatggt

SEQ ID NO: 21502 - DNA, 100 bp, Homo sapiens
cttcctgtacagcctgcaaaactgctctggaagcaaacaccatctctacagcctcagtaaggcccgcccaggaggagcagtcgatgacgcccccagggaa

SEQ ID NO: 21503 - DNA, 83 bp, Homo sapiens
cctgcagaaggtctctggagacatcttcagcagatgatgaaggagcaactcccattaaaaggcggcgtgttagcagtgatgag

SEQ ID NO: 21504 - DNA, 75 bp, Homo sapiens
cccaggtgtaagcgcagaaagcaggcgaacccgcggcgcaataacgaggccacaagaggaagctgaatgaagagg

SEQ ID NO: 21505 - DNA, 80 bp, Homo sapiens
ggtgccctcaacatctctcagagacgaaaggaaggattacggccaggagatacaaccagcactttctgtggtactcctaa

SEQ ID NO: 21506 - DNA, 100 bp, Homo sapiens
cacagtatggtagccacacccccaggcattgtgtggctgctcaattaatgtaccaacactggatggaagaaacatacctatgtcagtaaatgatattgtg

SEQ ID NO: 21507 - DNA, 98 bp, Homo sapiens
tgatgcagcaggcatcatccgctatgcaattgggattaaaaggagcccaagccccatctcatcctagcacaccctcctccactgtcctggcagtagca

SEQ ID NO: 21508 - DNA, 101 bp, Homo sapiens
ggaccatctggatgacttggtggtggagtgtagagatatagttggcaacctcactgagttagaatcagagcaagacactaagggcgactaccagaaagcgc

SEQ ID NO: 21509 - DNA, 98 bp, Homo sapiens
gaagaaagctatctagggacgagatctagaatcaactgagagagatgcttaaaaatcaccagttactttaatgagcgggatccacagcaccattgttt

SEQ ID NO: 21510 - DNA, 90 bp, Homo sapiens
ctgcacgtcttcaccttcggcagccggctgtacgcacacaccatcgcaggtgaatgaaaactttgccattgatttgatagcagagcagcc

SEQ ID NO: 21511 - DNA, 96 bp, Homo sapiens
gtcaaacgcagaaggactgcctcactgagcaaccaagagatttgattgccttatgtgacaagcccaagatctgtgacagttggagctcaaactagg

SEQ ID NO: 21512 - DNA, 75 bp, Homo sapiens
tgtggagggcctggtacaagggaatgtcacaagcacactgtggaggaagatgcagagtcagaagatgaagaggag

SEQ ID NO: 21513 - DNA, 100 bp, Homo sapiens
cacgtacctcaacaaagccatcccggacactcgcctcaccatcaagaagtacctggacgtgaagtttgagtacctggccccgtctgaggtctggcagtca

SEQ ID NO: 21514 - DNA, 116 bp, Homo sapiens
tccctgtgtgatgcttttgatatctggggccaagggacaatggtcaccgtctcttcagccctgcgcttgctccacatcaggccccaggagctgccagcatgtaccagcctgccctg

SEQ ID NO: 21515 - DNA, 117 bp, Homo sapiens
accgccagatcaacctggagctctacgcctcctacgtttacctgtccatggcagaagctcctcctggggtagagacagatcttattgatgttggattcacagatgatgtgaagaaag

SEQ ID NO: 21516 - DNA, 100 bp, Homo sapiens
gtttgaaactctttggaaatcatgggattcatactatagtaaagctttagggaccattgcaatttagagatgtggccatagaattctctctggaggagtg

SEQ ID NO: 21517 - DNA, 100 bp, Homo sapiens
ggctgctattgtatatcacactaaagattgaagaagagatgttggctttgcagaatgagcgcacagaacgaatacgaagcctgttggaacgtcaagccag

SEQ ID NO: 21518 - DNA, 87 bp, Homo sapiens
ccggcccgcgcccttgcccctcggccgggcggacggcgaggattaaatccaccacacagggtgaaatctatctccatgacaacattc

SEQ ID NO: 21519 - DNA, 83 bp, Homo sapiens
tgcagagatccaagatggcagattcaatctttttaagctttgaccgccattgaaggcacagcacatggggagccctgccactt

SEQ ID NO: 21520 - DNA, 98 bp, Homo sapiens
tggggagtggctaaagtatcaactatcaacttttcttgatgctggttctgtgaattcattccagttggcttttgagtggatacgtgcagtgagatcat

SEQ ID NO: 21521 - DNA, 100 bp, Homo sapiens
gggaagatggcggcggcgcaggaggcggacggggcccgcagcgccgtggtggcggccgggggaggcagctccggtcagttgtgctgcatggaaacaacct

SEQ ID NO: 21522 - DNA, 90 bp, Homo sapiens
tcaaaaacaaaattctgaactcaggacttggcaagtgattttacaacgagatgctgctctccatagggatgctcatgctgtcagccacac

SEQ ID NO: 21523 - DNA, 50 bp, Homo sapiens
atcactgggagcaaatatccagaacaggatggagaacctgttcatcaacc

SEQ ID NO: 21524 - DNA, 105 bp, Homo sapiens
ctcccaaaccaccacagattcactattgtgatgtttgtaagatcagctgtgctggaccacagggttacacatcattttggaatgactgtatatcatctggattac

SEQ ID NO: 21525 - DNA, 98 bp, Homo sapiens
tgtaatgttcaggccatggaagaaatgatgatggaaatgaagtataataccaagaaagccccacttgtggaatcccccaaagaaggtaaagggagcaa

SEQ ID NO: 21526 - DNA, 106 bp, Homo sapiens
tggagcctctggtcctgctggtccccgaggcccccctggtccccctggccctcctggacctccaggtgtaagcggtggtggttatgactttggttacgatggagac

SEQ ID NO: 21527 - DNA, 90 bp, Homo sapiens
ttgatcatctttgcctgggaagttgaatgataaagccagaagaaagcatgctttctgatcattgtgccgtgagcgatgtggagatgcagg

SEQ ID NO: 21528 - DNA, 97 bp, Homo sapiens
cgggggcggaggtgccagcgatcccgaggacaggtctgggggcatgccgccgatgactcaggcgccccgcattatgcaccacatgccgggccagccg

SEQ ID NO: 21529 - DNA, 98 bp, Homo sapiens
aacaaattcacttggaacaattgtcagcagagaagccaaacttcagtttgcctggtggtgattccactgaagcaactgccaaaccaaagagaagtttt

SEQ ID NO: 21530 - DNA, 100 bp, Homo sapiens
gccccgtgtcctgcaggtattgggagatccacagctaagacaccgggacctcctggaagccaaaaatggctttgatgacagtagggaaagaaccatttcc

SEQ ID NO: 21531 - DNA, 100 bp, Homo sapiens
cttatgcatacacgggtaacttggcaatgaatgacagcactgtagaacagctttatgaaacagcttgcttcctacaggtctccatcatcaccagttccag

SEQ ID NO: 21532 - DNA, 75 bp, Homo sapiens
ggagcaggacgccgggcactgctgatgctgctttcgctggggattcagagcattcttcactccagaataatgagc

SEQ ID NO: 21533 - DNA, 100 bp, Homo sapiens
ggggaaaaagacatcaacaacaatgtggagaaagccccctgtgccacctccaggatattttgctcatcaacctcattatagaacatatgatttgtgatac

SEQ ID NO: 21534 - DNA, 101 bp, Homo sapiens
gggagggagccgcaggcgcagacccacccgccatgaagccccccgcaggttcgtgctggccgtgggcagcgccgtctttgatgccatgttcaacgggggaa

SEQ ID NO: 21535 - DNA, 100 bp, Homo sapiens
caaagagatcagagaccagggctcctgtggctcctgctggattcgacacctcttagaggctgcaatcccagagagagttgaagagatccctcctgaagtt

SEQ ID NO: 21536 - DNA, 82 bp, Homo sapiens
cgcggccctgggagctggaggaaccgcggatgatcggctgaatgtaacagaggaactaacgtccaacgacaagacgaggatt

SEQ ID NO: 21537 - DNA, 100 bp, Homo sapiens
aagagggggccctcccccctcctaggcgggagggggggtggtgcgcacgcccccgaggacgcagtttggtcagatgaagactgggtggagaagtttgctg

SEQ ID NO: 21538 - DNA, 75 bp, Homo sapiens
agctagaggggagatagcaagattctggagtctggaaagccttcacttggtgggaggcgaaagtgcaacaagggg

SEQ ID NO: 21539 - DNA, 75 bp, Homo sapiens
ccgagatcagccacgcagagtcctgccttcctttggcgttttgctgctgacatcatctccgttttggccatgacc

SEQ ID NO: 21540 - DNA, 90 bp, Homo sapiens
ctccatcaacctgaaggagatcaacctgaggccgcagatgtcccagaaccactcacgaattcttgtttggtgcccttgctgaactggttg

SEQ ID NO: 21541 - DNA, 100 bp, Homo sapiens
cgacgcagtcagctgcgtgattcccgtgattgcgttacaagctttgtctccttcgacttggagtctttgtccaggacgctgcagatctgggacacggccg

SEQ ID NO: 21542 - DNA, 50 bp, Homo sapiens
agtagatgatgatgtagcagaagatattgatgatgttaagaagttcaaac

SEQ ID NO: 21543 - DNA, 75 bp, Homo sapiens
tgtgctcgcgctactctctctttctggcctggaggctatccagcccaacacaagccatcagccccatgctcagct

SEQ ID NO: 21544 - DNA, 101 bp, Homo sapiens
gagtgcggcttcttcttgttgggggactcccagccttccgcgcgtccggaggaggagaagcggcggcgccgggaagcagggcactgtttgaagaagcaaac

SEQ ID NO: 21545 - DNA, 75 bp, Homo sapiens
caggaactcggcagaggagaaattcagacggctcccgaggtttcctgtgcctggtccccgaggaagccaagacct

SEQ ID NO: 21546 - DNA, 100 bp, Homo sapiens
gccggttgcgccacccgaggacaaggttcttcctcaagttcttcctcaaatgcaaccagaactgcctgaagaatgcggggaatcccagagacatgcgccg

SEQ ID NO: 21547 - DNA, 75 bp, Homo sapiens
acacgaagagctgccgtcgctgcagagaccccgctatggctctgacacagcccttggcactgatgatgtatatga

SEQ ID NO: 21548 - DNA, 97 bp, Homo sapiens
aataagattgaggaatttcttgaagaagtcttatgccctcccaaatcgcagacctcggccttgcctcctttaagatgtggagcaaactgaataatga

SEQ ID NO: 21549 - DNA, 80 bp, Homo sapiens
actggcaggagcagattccaaaggcacaggaagaagcttgcaggagatacagcagcgacatggattagccaattccattt

SEQ ID NO: 21550 - DNA, 100 bp, Homo sapiens
gaaatgattgaatctggtgttatcaacttaaaagatgccacctctaagatgatcacggaagccttggcccaaggtgggatgcacataagagcccggttcc

SEQ ID NO: 21551 - DNA, 90 bp, Homo sapiens
agttcaccctcttcaagaaggaggtatgcggtgctttgtggtcagctggctgagcatgagagcatccagaggcgcatccagagtggcttt

SEQ ID NO: 21552 - DNA, 82 bp, Homo sapiens
tcctctatctcaatgtggctcccagccggtactttagagccaccaggaagatcaaggagccagggccaccctcacgttgcct

SEQ ID NO: 21553 - DNA, 83 bp, Homo sapiens
caggagtcctgaccagagagcagtggtattggaaggaactggccctgggcctctggaggcagcagtattctggcagaatttgg

SEQ ID NO: 21554 - DNA, 50 bp, Homo sapiens
gtctctggaggaattcaatgatgtgctgctgatactttggctgtgaggca

SEQ ID NO: 21555 - DNA, 75 bp, Homo sapiens
aggcggcgcggcggccactgggcgcagcacccagagtccccagggagacacttaagggaaattaaactgcagagt

SEQ ID NO: 21556 - DNA, 75 bp, Homo sapiens
acgagtaccacgccaccaccgagaccgtcattagcatggcccaggagaggactggtgattgcagctggaagtgcc

SEQ ID NO: 21557 - DNA, 89 bp, Homo sapiens
ccaatgctgaccaaggaggagcctgttccagaactgctggaagctgaggtaatttcatctgtgccaaagcctccagaggacaagccaga

SEQ ID NO: 21558 - DNA, 50 bp, Homo sapiens
tgggaatctggagcttcagtaacaggggataaaaacattcagatggcaga

SEQ ID NO: 21559 - DNA, 97 bp, Homo sapiens
tctcactgacttcaagaatgaagccacggacccttgcggtgtcatggagaaactccagctgggcccagagattctgcagcgggaaaatccaaggctt

SEQ ID NO: 21560 - DNA, 83 bp, Homo sapiens
ccagccataacccaggagtaacatcaggtgttggagcgggccggagagaagtagagtgggctgcgaggagaaggaaacaggcc

SEQ ID NO: 21561 - DNA, 50 bp, Homo sapiens
tgctgcccgcgctcgccgcacgagaacactatgtggctgccgtgtaagag

SEQ ID NO: 21562 - DNA, 101 bp, Homo sapiens
gtgtgatttcagtggaataaatggcgtccaaagtcacagatgctatagtctggtatcaaaagaagttgccttgttgaaggggatgctaaagaagaaatact

SEQ ID NO: 21563 - DNA, 82 bp, Homo sapiens
cgagcgcggccgcggacgaagatggcgaccgccatgtacttggagcactatctggacagatgatcggctgaatgtaacagag

SEQ ID NO: 21564 - DNA, 98 bp, Homo sapiens
ttccatttgttatcccacgacccatccttgaagaaggacacagagtctgggatctaataattcagtcattttggatggactaaaaagaagacagaatt

SEQ ID NO: 21565 - DNA, 75 bp, Homo sapiens
cctgccctccccggccccggggtgcaccccgcaaggcctcaggagtgcaagtagctgatgaagtatgtcgcattt

SEQ ID NO: 21566 - DNA, 100 bp, Homo sapiens
aagaatacatcaagattctgaatctggtgatgaacttagcagcagctccactgaacagataagggccaagtcctgtatctgccatgtctgtggcgtccac

SEQ ID NO: 21567 - DNA, 100 bp, Homo sapiens
ggaagagccggggccgtggctgacatggagcagagtacccaaaggcaagtggaacagctctaatggggttgaagaaaaggagacttgggtggaagaggat

SEQ ID NO: 21568 - DNA, 98 bp, Homo sapiens
cctccctctccactcccatcttcagggtactgctataaccagaatttggtagaaaaaggatttacttgttggggccctcttgataaaaagagatgtgg

SEQ ID NO: 21569 - DNA, 100 bp, Homo sapiens
tagagctcctgagccacgagtgattgaatgcatcaaattgcaatttggaggagaggcagcacaagcagaagcctgggcctggctagcagccaatcagctc

SEQ ID NO: 21570 - DNA, 100 bp, Homo sapiens
gcaggcgggtgggctgccggcggtggactcgtcggagccgcgggcggtcagccatgcctgatggagctctggacacagctgtctgcgctgacgaagtggg

SEQ ID NO: 21571 - DNA, 90 bp, Homo sapiens
ggaggctgggaagtccaagatcaaggcgtcagaagattcattgtctggtggggaagaaaacatgacagaaacagatgccttctataaaag

SEQ ID NO: 21572 - DNA, 50 bp, Homo sapiens
atggtagctgggatgttagggctcagtgcacttgcaggaaagacatggtg

SEQ ID NO: 21573 - DNA, 101 bp, Homo sapiens
agaaggaagaggtgtttgaaaaggataacaaagccattgacctttgccgattgtgttggggacgaacttcctttaggatgggaaaccgtatatgataaaca

SEQ ID NO: 21574 - DNA, 106 bp, Homo sapiens
taagaagaggtcccaatcccccactctttccgccctaatggaggtctccagtttcgggcgccctgcgtccggcagaggaggcgagcatcccgctcaggtgatgagg

SEQ ID NO: 21575 - DNA, 100 bp, Homo sapiens
cctactacgagatcctagacgtgccgcgaagtgcgtccgctgatgacatcaagaaggcgagcacacgtgtgttctgcatagcatcgtgggctgggggagc

SEQ ID NO: 21576 - DNA, 83 bp, Homo sapiens
ccggactacaaggtcgcctacgtgcagctgggatgcgctggatgccctgggcctgaagcgctactgctgccgccggatgctgc

SEQ ID NO: 21577 - DNA, 74 bp, Homo sapiens
gtggtctactctgatgtcaatcttgagggctagataacggaggagatgatggatcaggcaaatgataaaaaagt

SEQ ID NO: 21578 - DNA, 99 bp, Homo sapiens
agtatgagaagtacagggagcgagagctggagaagctgggattggagattccacccaaacttgctggtcactgggagtacgctggggaggaggaggagg

SEQ ID NO: 21579 - DNA, 75 bp, Homo sapiens
gttagcatgctttctccagctgccctatcacctgccagctcatcacaaagttaatttggagtggcccctggagtc

SEQ ID NO: 21580 - DNA, 99 bp, Homo sapiens
agagatgtgggaatgggggccgagccaattgtgatctcactgatgatgtgaagaaggagaaagagaaggagccagagaaacttgacaaactggagaact

SEQ ID NO: 21581 - DNA, 90 bp, Homo sapiens
cagtgggaccgcaagctgagcgagctgtcagagcccggggacggcgaggccctcatgtaccacacgagatacgaagactatggaatgact

SEQ ID NO: 21582 - DNA, 90 bp, Homo sapiens
gttgggagtgatggatggacagcccgaggagccttcaacacctggtacagtggtcagttcccctagcatctccactcctccaattgttcc

SEQ ID NO: 21583 - DNA, 98 bp, Homo sapiens
ctcctaccccggcaccatcttctcctgcgacgacttctacatcctgggcagtgggctggtcagcaatctgaagatggtcttacggagcctagtagagt

SEQ ID NO: 21584 - DNA, 97 bp, Homo sapiens
gcgaggaggaggaggaagaggaggtggagcgggagatcgccatcctgaagctcatcgaacacccacatgtcctcaagctccacgacgtctacgagaa

SEQ ID NO: 21585 - DNA, 100 bp, Homo sapiens
acgatcatattgatggttgaaatagcttcttggacacttaatgattgttggcaagaaatgtgctgctgatctgggcctgaataagggttatcgaatggtg

SEQ ID NO: 21586 - DNA, 100 bp, Homo sapiens
ctagtctttccgcttcttgaatttctctctgtaaaggaggttatgatggagggtggtcgcagcaaagggtttggttttgtatgtttctcctccccagaag

SEQ ID NO: 21587 - DNA, 76 bp, Homo sapiens
ttcagctacatattctgccttttcaacactacacagtagagacggggtttcaccgtgttagccaggatggtctcga

SEQ ID NO: 21588 - DNA, 90 bp, Homo sapiens
ctcaagttcatggagccggtgaccatgcaggaatctgggaccttcgcctttcggaccccaaagttcgcaggacagatggcggctctgtgt

SEQ ID NO: 21589 - DNA, 90 bp, Homo sapiens
gatggacttccagaaccacctgggcagctgcttggtggagccagtgaacgtggtggacaatggagatggcacacacacagtaacctacac

SEQ ID NO: 21590 - DNA, 100 bp, Homo sapiens
gcgcttccggatcgggggcaagcggaaggtgatgcccaagatggaccaggagtcgatagcagcagttggtgacgagatggcactcagaaacggcgttgac

SEQ ID NO: 21591 - DNA, 100 bp, Homo sapiens
ccacatcgctgacttggctggcaactctgaagtcatcctgccagtcccggctaaaactggacaaagaccgcaaaaagatcctcgaacggaaagccaaatc

SEQ ID NO: 21592 - DNA, 50 bp, Homo sapiens
tcagccttcccagtagctggaactacagcactgaccgaggcctgtaagca

SEQ ID NO: 21593 - DNA, 50 bp, Homo sapiens
tacagcaagaaagaccatcaagtttaccaaccagaatccgtagaagctag

SEQ ID NO: 21594 - DNA, 100 bp, Homo sapiens
cggaaactggagcaggagaagctctccggtgtggtgaagagcgtccaccggcggctccgcaagaagtaccgagaaggttgtcttttggaaatgcaggttt

SEQ ID NO: 21595 - DNA, 100 bp, Homo sapiens
gcccggcggcgggacccaggcggttgaggctggtcagatagcaaagccattgtggatgggaacctgaagctcatcttgggtctggtgtggacgctgatcc

SEQ ID NO: 21596 - DNA, 100 bp, Homo sapiens
cggcgagggccggaatctcgaggctggagcagccctacttcagcgccaacgcccagttcttccaggcgctgagccagtgcccctcgctgcagcgcctgtg

SEQ ID NO: 21597 - DNA, 73 bp, Homo sapiens
atgacacaaaagttggcactgataaatggcccaaggaaggtgtcttgctgcaggtaactaatgaagaagtggt

SEQ ID NO: 21598 - DNA, 90 bp, Homo sapiens
gtctcctccagtagacggtacagcgaaggcagagagttcaggaagaggagatcccagaactggagattgacgtggatgagctcctggaca

SEQ ID NO: 21599 - DNA, 51 bp, Homo sapiens
aggtggcggcggcgggaagatgtcctggctataagtcaccatggcacagca

SEQ ID NO: 21600 - DNA, 98 bp, Homo sapiens
tgatcacctgcctggagcaacgaaaagagccctggaatgtgaagagacaggaggcagcagacggacatccagatgtagatgagtgtgcccaagggcta

SEQ ID NO: 21601 - DNA, 83 bp, Homo sapiens
cggcggagaggaaccggtggcatcgtctcccgagcctgctcctgccgccgaggtctccgatgatgacctcgacccatccttta

SEQ ID NO: 21602 - DNA, 101 bp, Homo sapiens
ctggcatcctctctctcagttgtcgtttctctcctgctaattcctgaaggcgccaggaactccgagagcttcggctgctccagaaagaagagcatcggaac

SEQ ID NO: 21603 - DNA, 100 bp, Homo sapiens
tgtcctggttgagggtctccagggttctttggggcccgagggttatatcctgtgttgtgacctcatggtttaagtgggaataaagatgagtataagcagt

SEQ ID NO: 21604 - DNA, 100 bp, Homo sapiens
cggcacatgccatatgctcagccgggatacctatgagtgcacctgtcaagtcgggtttacaggtactccaaagattcaggtttactcacgtcatccagca

SEQ ID NO: 21605 - DNA, 75 bp, Homo sapiens
gtttcacaatctcagaattccaggtgaaaagaacggaggggagcccgatgacgctgaactagtaaggctcagtaa

SEQ ID NO: 21606 - DNA, 99 bp, Homo sapiens
ccaagctccccggtgcacaaggcagaactggagaaggatttgcatgcagccactgttaacccggaccccagtttaaaagagtttgaaggagcaacccta

SEQ ID NO: 21607 - DNA, 143 bp, Homo sapiens
gaagtcatgtctcctcctgcagtttacagataagcggttccagcctgtccacgacctcacaataggggctatctgatgggttagagtgcctttgagaagaaatcagtggatactggatttgctcctgtcaatgaagttttaaa

SEQ ID NO: 21608 - DNA, 100 bp, Homo sapiens
accggttgcaaatttccaaaaaggagagtaaaataattaatgagtcaaggtctcaggagagacagaaggtctcctctgagcctccggcctccataagacc

SEQ ID NO: 21609 - DNA, 83 bp, Homo sapiens
cggacatgctcagggctgcggccgcccgaagaggagagagcgcgggcctctaggaaggccactgcagaacaaattagacttgc

SEQ ID NO: 21610 - DNA, 101 bp, Homo sapiens
gaggaaggtcccttatgagccctggatttatggtaataagcccatctggttttactgcttcaccatatgaagaacgatatgtggtaccccaaattatctct

SEQ ID NO: 21611 - DNA, 102 bp, Homo sapiens
acacgggcgagaagccctacgagtgcaacatctgcaaggtccgcttcaccaggtcatcatcagatttgaaatatttaaagtggatacaaaactatttcagca

SEQ ID NO: 21612 - DNA, 75 bp, Homo sapiens
agctacaaaccatactaaattattccatttgcaacttatccccaacaggacagtgataccaccaagaagaagaag

SEQ ID NO: 21613 - DNA, 74 bp, Homo sapiens
atgagcgacagcggcgagcagaactacggcgagcggcttccaaacagtttcataatgaggtcctgaaggcccac

SEQ ID NO: 21614 - DNA, 100 bp, Homo sapiens
gctgggcctgcaggtctctgtcgagcagcggacgccggtctctgttccgcaggatgaaggggcttgttccctgcaactaccttgaaccagttgagctgcg

SEQ ID NO: 21615 - DNA, 96 bp, Homo sapiens
cttttgcacgagaacatggactcatcttcatggaaacgtctgctaagactgcttccaatgtagaagagtttggatttaggtggcgagtagaaaaag

SEQ ID NO: 21616 - DNA, 95 bp, Homo sapiens
tgtgggccgccgtcggcagcaagaacagagagagaggtggacagatctgagagatactgagggcaagtgtccagagaatggctgggatgaaagta

SEQ ID NO: 21617 - DNA, 81 bp, Homo sapiens
tgcagatgcagtgtggctctggatagcaccttatggacagaacccagcgggtgccgcttctccacccgaggcttccacctc

SEQ ID NO: 21618 - DNA, 80 bp, Homo sapiens
cgcagatgttgtcaaggtggcctaccaggaggccaggggtgtcgccatggatgggcaacactccagattcagcctcagac

SEQ ID NO: 21619 - DNA, 96 bp, Homo sapiens
tcaggctccttctaaatggccaaggataagtctacttttcttccacgtaacaaccacaggatagatgacattcattttctaagaaacaaaatcttg

SEQ ID NO: 21620 - DNA, 98 bp, Homo sapiens
gagaagagatcacagaaacgtgaggatcaagaagccggactacaaggtcgcctacgtgcagctggaatactcccccagttgcaagaggcgcaggaccg

SEQ ID NO: 21621 - DNA, 85 bp, Homo sapiens
agcaactggtcagagtggacagattgctttccgtgccaggacaaaaagcacaatcctggaggaagagaaggctcagcaagaagag

SEQ ID NO: 21622 - DNA, 90 bp, Homo sapiens
agttgcagaaaagtatccagattttaaaggtgggagatgagggagcaggccacttcgtgaagatggtgcacaacgggatagagtatgggg

SEQ ID NO: 21623 - DNA, 101 bp, Homo sapiens
gaaggtcttgagattctaagtgggaatcatttcaggatgtacagttacccagcacgtgtacctcctcctcctcctattgctcgggctgtagtgccctcgaa

SEQ ID NO: 21624 - DNA, 115 bp, Homo sapiens
ctgctggaggagttctatgcagggggctggcattaccaggacataggggtgagcccctccagactccgaataggagatcaagagtttgattcattgcctgctttactggaattct

SEQ ID NO: 21625 - DNA, 82 bp, Homo sapiens
ggatttgttaaggattccaagtaactcttatttgatattcctctttaatggcgtataagttacctgtggaggatgtccaccc

SEQ ID NO: 21626 - DNA, 99 bp, Homo sapiens
gtcggacgtgggcgaggggcggggtgtctggactggaacctctgggcccacgtgaccctggcagcaaccccaacaaacgccagaggcagccccctctcc

SEQ ID NO: 21627 - DNA, 96 bp, Homo sapiens
tgtgctctcaaactttactttgcctcatttgaggagtgggaacaggcttcggcgaacacaaagcaatacgagaattggagacccaaccagccagac

SEQ ID NO: 21628 - DNA, 80 bp, Homo sapiens
gttcctggaccgtgagagcatcaagctcgtgtccatcgcgtttgcctcagcatggagggcggggccgcggcagccacccc

SEQ ID NO: 21629 - DNA, 96 bp, Homo sapiens
taaacaagagatttccacagaagattgacgtgagtgaattcagatataactcaagcttgttagagggctttttaaaaataaaaagttgattccgtg

SEQ ID NO: 21630 - DNA, 100 bp, Homo sapiens
gccgggaccggaaagtccgtgacttgcaagaggcagatctggaccttttgagaggccttcacagagcttcaagccaaagttattgacactcaacagaagg

SEQ ID NO: 21631 - DNA, 74 bp, Homo sapiens
cccagggcggacagcagcctcgggtgcaatcctggagccccccagtgaggggcttcctgaagaatgagaaggac

SEQ ID NO: 21632 - DNA, 75 bp, Homo sapiens
cttcgcgtcccctgcaccatgagctggggcaccgagctctggagtctcattctgttaccaggctggaatgcagtg

SEQ ID NO: 21633 - DNA, 100 bp, Homo sapiens
atcactggctcacatgcagtcgctggaagaaagttcagtggtgctcactctcagtcatcaaatatacttggtgcttgaaaaactgaagaaggaagacgct

SEQ ID NO: 21634 - DNA, 75 bp, Homo sapiens
acccaggaaagggacatctgctcctccaaggcagagcggctcccccctttcggtctgaaggggcgtctcgattac

SEQ ID NO: 21635 - DNA, 75 bp, Homo sapiens
ggttccccctccctcagcttccgccccaaaagctctcctacaagcttgtgtgccctgtaaccagtatgtatggta

SEQ ID NO: 21636 - DNA, 100 bp, Homo sapiens
ctcattgttaagcacaagttcacgaaagcctacaaaagtgtggagaggttccttcaggaggatcagggaggcagcgtccatggagcaaaaggaatgccag

SEQ ID NO: 21637 - DNA, 100 bp, Homo sapiens
gttcaggacccccgagtgcagaatgagggctcctggaactcttatgtggattataagatattcctccatctgctggtgaagaatattcagctggaggatg

SEQ ID NO: 21638 - DNA, 75 bp, Homo sapiens
tttaattgaagctggaaagcttggacttaacatggctctctatgctgacgtcggtggaaaacaattccctgtcac

SEQ ID NO: 21639 - DNA, 101 bp, Homo sapiens
agcgactagggctcgggcgccggcgagatgcctttgttcaccgccaaccccttcgagcaagacgtgggacatggatttgattgacatactttggaggcaag

SEQ ID NO: 21640 - DNA, 75 bp, Homo sapiens
ctgccatttccaggccttctggcagtcctttgagaaacaaggttttcattccggtactcctgctgcttccttcaa

SEQ ID NO: 21641 - DNA, 112 bp, Homo sapiens
cgcggtagcgaaggccgccgaacctgcctggctagccggcgacttgagtgacgaacaatgcagatcttcgtgaagactctgactggtaagaccatcaccctcgaggttgagc

SEQ ID NO: 21642 - DNA, 80 bp, Homo sapiens
aagaaaccgctgaggcttatttgggaaagaaggcctgtctccactaactctggaccctaaaacagctcacccaaatctgg

SEQ ID NO: 21643 - DNA, 120 bp, Homo sapiens
gatccagatcgggatttacgtggagatcaagcgcagcgatggtttattacccagaactctttgtctgggtcagtcaagaaccatttccaaacaaggacatggagggaaggcttcctaagg

SEQ ID NO: 21644 - DNA, 100 bp, Homo sapiens
tgagtagagcctgggggagagtggatccaggtgaagggggcagagatatggaatgtgcagatgtcccactattaactccaagcagcaaagaaatgatgtc

SEQ ID NO: 21645 - DNA, 74 bp, Homo sapiens
cataaggagctgacagacaagctcgaggtgtgggcaagagcagtttactgttgcgttttgcagacaacactttc

SEQ ID NO: 21646 - DNA, 138 bp, Homo sapiens
atacactgctgatgaacaatgccagatcctttttgggccattggcttctttttgtcaggagatgcagctcactaccctgggaaatcttacaccttcaagcactgtgtttttctgctgtgatatgcaggaaaggttcag

SEQ ID NO: 21647 - DNA, 135 bp, Homo sapiens
ccgagacagacagcatactgaagtggtttgcaacatccttcttctggataacactgtacaagctttcaaagtcaatataatatccctgttcacttttgccgttggagtcaatatctgcttaggattcactgcaca

SEQ ID NO: 21648 - DNA, 51 bp, Homo sapiens
agagccgtgttcggggagtctttcaggctttatgtacagaccgagatcttc

SEQ ID NO: 21649 - DNA, 99 bp, Homo sapiens
aaagaaaagaatacattcctgattacctgccacccattgtgtcttctcaagaagaacatgggcctggaattgatatattcacacctggtaaacctggag

SEQ ID NO: 21650 - DNA, 82 bp, Homo sapiens
caaaattcgatttgcaaatcattcagtgaatcccaactgttatgccaaagtatgaggttgatgagctacgccgaaagaagga

SEQ ID NO: 21651 - DNA, 98 bp, Homo sapiens
ggctactgttttccaatcctcaggcttaccactcttctctcatggatcctgataccaaactcatcggaaacatggcactgttgcctatcagaagtcaa

SEQ ID NO: 21652 - DNA, 98 bp, Homo sapiens
taggaacccagaagaggactgatcatttcttgcagctctaaaaaccatggctcgggttggatggcaagcatgtggtgtttggcaaagtgaaagaaggc

SEQ ID NO: 21653 - DNA, 88 bp, Homo sapiens
ggagcggctcacggcggaggacgacgcgctcaaccagatcgcgcgggagcttcctgcctgacacagctcacttcaagaagtgcacaat

SEQ ID NO: 21654 - DNA, 103 bp, Homo sapiens
gatcgagaccatcctggctaacatgtttgtctttgtcagcgccacgtgagacacctacaacgagatgccttaagccagctcatgaatggccccatcagaaaga

SEQ ID NO: 21655 - DNA, 75 bp, Homo sapiens
ggaaatgtacagaaagaagtctcatcttcctttgaccacgttatcaaggaggtccaaagaggactggtgatctac

SEQ ID NO: 21656 - DNA, 90 bp, Homo sapiens
cgatggcttcagacagcatatttgagtcatttccttcgtacccacagtgcttcatgagagcttcagtgcgatcaaagttctacgtgcgag

SEQ ID NO: 21657 - DNA, 88 bp, Homo sapiens
cagagagaaggcatagactcccaggaaggaattttacagaagctacagagaagtgttgagcaagaagaaaataaatggaaagttaagg

SEQ ID NO: 21658 - DNA, 75 bp, Homo sapiens
ggggcagtgctcacatttctgggcaggatgacgcggcatggcaagaactgcaccgcaggggccgtctacacctac

SEQ ID NO: 21659 - DNA, 101 bp, Homo sapiens
ggcgacgctggctgcagggacccggtgacagcgtgagaggttcgcagagcctggtctccaagtcctctcctaagaagcctcgtggacgtaacatcttcaag

SEQ ID NO: 21660 - DNA, 75 bp, Homo sapiens
tttattttcctcaccactgaatctacaggcatgctcagtccctggctgcgctgcaggcttactctcactggttag

SEQ ID NO: 21661 - DNA, 98 bp, Homo sapiens
gacgccatgaaagctgccatggccctggagaaaaagctgaaccagactctgtgcacatcgaagatgccgaggctgtggagcagctgcgagaagctctg

SEQ ID NO: 21662 - DNA, 98 bp, Homo sapiens
agatcttctcaggggccagctcaccaaagtgcaggcaaagctctcaggttgattcttcaccacactgaaaccattaggaaaaatccttgtggttaaca

SEQ ID NO: 21663 - DNA, 75 bp, Homo sapiens
acccgagaacgtgcgggaagagaagatcatcgagcatttcaaacggtcctcagccctcgctctcgctggcggagc

SEQ ID NO: 21664 - DNA, 100 bp, Homo sapiens
tcgctgggagagaggtacctctccttttccctctccctttccctaagcccgacttaaatctctgcaatggctaacgaagcttatccttgtccgtgtgaca

SEQ ID NO: 21665 - DNA, 100 bp, Homo sapiens
ctttgtgatgttggcagttgaaccgaccatcagcttatacaagacatccaggcagaaattgatgcccacaatgacatatttaaaagcattgacggaaaca

SEQ ID NO: 21666 - DNA, 110 bp, Homo sapiens
agaactcgtcatgctctttgtagcgtggtgcttctgttgctcacaggtgaatctggattgggaaagtcgacattaatcaactcattattcctcacagatttgtattctcc

SEQ ID NO: 21667 - DNA, 51 bp, Homo sapiens
gacagccagccaccacaatgaaagccaatgttttcagttgcaccaagctta

SEQ ID NO: 21668 - DNA, 73 bp, Homo sapiens
tcggacagatgaagctccccaaggagctgcaggtttccaatacttatctacaggaatcgccatgaccccagct

SEQ ID NO: 21669 - DNA, 75 bp, Homo sapiens
gccatcgattgttggtgccagttggaaagaaccttttccagaggcattgaaacttcagcaggatgtaaggaaaag

SEQ ID NO: 21670 - DNA, 82 bp, Homo sapiens
taactaactggttcaccttcctcttgtataagttcctcaaggtgagaagccctaccactgcaactgggacggctgcggctgg

SEQ ID NO: 21671 - DNA, 75 bp, Homo sapiens
tctctttcctgtttacctccagtgtcccttcttccacatgaaaaggataaggctttcaacagacctcacatcttt

SEQ ID NO: 21672 - DNA, 75 bp, Homo sapiens
gcctatatgaagtctttgagaaagagagaaaaggaacagttccgtaagctctttattggtggcttaagctttgaa

SEQ ID NO: 21673 - DNA, 83 bp, Homo sapiens
tgggatctttgtcctttgggatttctgaacttcagaaagccagtgttgatggctgggttttacatatgtggctccatctgtac

SEQ ID NO: 21674 - DNA, 80 bp, Homo sapiens
cttcctatcacgggcactagtgtggctctcctgttccagcaattgggacactcaatcacttgtcggaagtccctcaaccc

SEQ ID NO: 21675 - DNA, 100 bp, Homo sapiens
aaataagctatatactttggttacctatgtacctgttaccactttcaaaaagattcgtcagcgaactgcagctcaaagaaacctttctccaacaccagca

SEQ ID NO: 21676 - DNA, 75 bp, Homo sapiens
ataattttcctcacacacagttacttgccaagacgattgaagagctggcgttacagcccaaagatgatattgtag

SEQ ID NO: 21677 - DNA, 93 bp, Homo sapiens
ggagacgtcggttgagcggcggcgaacatgcgcttttgacacattggaggtttggtgcacctcgatttggaggaagtagggcagggcccttat

SEQ ID NO: 21678 - DNA, 74 bp, Homo sapiens
gagactctcaacgggggaatcaccgacatgctcacagctaatggcagcattagccgctgttgggcctcctaatc

SEQ ID NO: 21679 - DNA, 51 bp, Homo sapiens
gaacacagccagtgtgaatgcagttagagatgtttatgattacttccgagc

SEQ ID NO: 21680 - DNA, 75 bp, Homo sapiens
gatgaacctctctgaggaggttgacttggaagactatctccatccagttcctggtgtacaggcgcagcaccgccg

SEQ ID NO: 21681 - DNA, 80 bp, Homo sapiens
cttacatcgatgaccttggacacctccatgttatggacacggtctttcttattcagaagcccctgaatgtgacagtgatc

SEQ ID NO: 21682 - DNA, 74 bp, Homo sapiens
tcagtcagaagaaggctgctattgaaagagagtatgcacagggcccaccagctctgagcagatcatgaagacag

SEQ ID NO: 21683 - DNA, 100 bp, Homo sapiens
tttgaagacttgctagttaggattttattactggcagcatgtatatcttttaatgtggaggctgtggacccacgaggtcgaacattattgcatcttgctg

SEQ ID NO: 21684 - DNA, 100 bp, Homo sapiens
ggctgccctccgagtcagagacatcctttctcgtactaaagagggagtgggctcccctaaactggggcctggaaaaggccctctgcccgaggagatgctc

SEQ ID NO: 21685 - DNA, 99 bp, Homo sapiens
ggggccctggatgagggggaagggcctcaaagccagaagccacacacagcaccttgacttgcatgagcagggagttccagtgcgaggacggggaggcct

SEQ ID NO: 21686 - DNA, 90 bp, Homo sapiens
cgcccctccaagccacagatcatctttggattcttccccagaagcttcaagttttcggctttgtgagaaaccttaccatcaaacacgatg

SEQ ID NO: 21687 - DNA, 90 bp, Homo sapiens
cgcaactcggcagcctccacccaccggcccaccctacatttagcgcatcatgtgatccggttttcggctttgtgagaaaccttaccatca

SEQ ID NO: 21688 - DNA, 90 bp, Homo sapiens
accagacccaggactgtgtgcagagttcccggacagattgaagtgctaagaggctttctaggctatgtgaaggcattggggctgtgaatg

SEQ ID NO: 21689 - DNA, 100 bp, Homo sapiens
ctttaatattcctgccatcacaaaagctggacaagcgaaggattacggggcgctgaaagacatcgtgatcaacgcaaacccggcctcccctcccctctcc

SEQ ID NO: 21690 - DNA, 50 bp, Homo sapiens
acaggagaaaagccgtttgtggaatgggtactgttcaaaaaggaatgccc

SEQ ID NO: 21691 - DNA, 98 bp, Homo sapiens
ccccctggtcctctgccctcgcgccccgctagggccagggtttgaaagtattcttgaagggctgtttggacctgcattattaaaagatctcagtttat

SEQ ID NO: 21692 - DNA, 74 bp, Homo sapiens
gaaccctgaagtcggtgtctgctgcgttcacggcaggattcggttaggttactcactataaacaatatccaccc

SEQ ID NO: 21693 - DNA, 100 bp, Homo sapiens
gccgtccagcagatggcggatgccctgcagtacctgcagaaggtctctggagacatcttcagcaggagcctgcaggcctgaaccagggtgatgctgaaga

SEQ ID NO: 21694 - DNA, 75 bp, Homo sapiens
tcaaggacacggtctacaccgacttcgacgattctgcttctcagaagatgcactattatagatactctaacgcca

SEQ ID NO: 21695 - DNA, 100 bp, Homo sapiens
ccccttcagtgacccaaagaaggcaattgaaggaacagactaaaaatcgtgtcctggaaggaaactacaggtactaccagggattttcagtctgaagaag

SEQ ID NO: 21696 - DNA, 76 bp, Homo sapiens
aatggaacatacgggcaagtttataagagtcctgtgaagataaatcagattagcttggatgaaagtggagagcaca

SEQ ID NO: 21697 - DNA, 51 bp, Homo sapiens
ggggacccttcctctgttgaaggaccaggctggaccagaccctgagtgtgc

SEQ ID NO: 21698 - DNA, 100 bp, Homo sapiens
gagaacagcagcagcgccgggggtattgccgagtgcttcgtgcagaggatgtccctggtagatttgggaaagaagcttttagaagcggcacgagcaggtc

SEQ ID NO: 21699 - DNA, 100 bp, Homo sapiens
atggctgggcccgcgtggatctctaaggttgtcttgctcttcccaaattgaatttgcagtttttgactcttcatgactacctgctaaggaactttaacct

SEQ ID NO: 21700 - DNA, 101 bp, Homo sapiens
attcctggaaaaagaagtccaagaagcaaaaaagggactgctaagaagataccaccagatggactagaggcttttaccagatttcttaaaactgaattcag

SEQ ID NO: 21701 - DNA, 82 bp, Homo sapiens
agaagaaaaactacctgtggtaggaattggaaagcatctgtgtggtatggcaacaggcgtttgcaatggctgctactgtgaa

SEQ ID NO: 21702 - DNA, 83 bp, Homo sapiens
cttgaacattccgaaactgtcaagattggcaaggagattgtaagaacaacgctcttgtaccaggaaccattcaagtaaatggc

SEQ ID NO: 21703 - DNA, 51 bp, Homo sapiens
gctaaaagtctgacccctgatatggcaggatggtggctggcaaagtgttga

SEQ ID NO: 21704 - DNA, 100 bp, Homo sapiens
ctgaaacagaaattctggaacacctatatggcggaagcccggctcgctgcaaaacgggcggcccgcgcggaggctcgcgagatccgcatgaaggagctgg

SEQ ID NO: 21705 - DNA, 75 bp, Homo sapiens
agagatttattcgtaatgcgactcaaagctgcacggcagtctgtttatgaggtacccttgctggtgccagggctc

SEQ ID NO: 21706 - DNA, 100 bp, Homo sapiens
gtcgtgatgctcctctgcccccccggcaagacctcaacgcccctgacctctatatccccagacagagaaaagtgacagtttcagctaggacgaacaggag

SEQ ID NO: 21707 - DNA, 83 bp, Homo sapiens
ccgccctggccatctaccatgtggtcgtgtacaacgtgggactctgcatttgtctgtttgatatcaccaaactggaggatgcc

SEQ ID NO: 21708 - DNA, 75 bp, Homo sapiens
ccacgagcgggcgctgctggatgccgagcgcctcaagcgcgaggtttttctattgggaaagctactgatcggatg

SEQ ID NO: 21709 - DNA, 101 bp, Homo sapiens
ctccgtcgattaaagagccatctgtggtgccaattgaagagatgttcgacaagcagcaggcgaacaccatcttctggagcccccaaggacagttcgtggtg

SEQ ID NO: 21710 - DNA, 75 bp, Homo sapiens
cccagcactcccagctgcgcagggcctgccaggtggcgctcggtttattttcttgaaaaggctccaggcttcggc

SEQ ID NO: 21711 - DNA, 98 bp, Homo sapiens
ctgacttcttttgccaattaggtcacttcaacctcttgttggaagattattcaaaagggttctgagcaaggttcaaccagtcaagaacaggccttatc

SEQ ID NO: 21712 - DNA, 96 bp, Homo sapiens
ctcatggaggctgagcatttattcaggctgtgggtgagcgtggaggatgctcagatgcacaccgtcaccatctggctcacagtgcgccctgatatg

SEQ ID NO: 21713 - DNA, 98 bp, Homo sapiens
cgcagtgccggaacactgtggcggccatcgaggagagctccttaataagcatttatagtcagtttttggcagcaatagaatcactaaaggcattctgg

SEQ ID NO: 21714 - DNA, 95 bp, Homo sapiens
ataaggatctggcatgtttctacacaacaaaacattcatggagggggaaattttaggtgatgggcaagtcagaaagtcagatggatataactgat

SEQ ID NO: 21715 - DNA, 83 bp, Homo sapiens
cctggagcaggagtatgccatgcagtgcagctggcaggaagatgcagacactcgggttcatgacgctctcgatattcctgtgc

SEQ ID NO: 21716 - DNA, 82 bp, Homo sapiens
gccgcggcggcagcagcagtgagagtttgggatatgagattgaaaatgacgactcggaattttcctgagagagaagtaccct

SEQ ID NO: 21717 - DNA, 50 bp, Homo sapiens
gatgcagaagaagccaaaaacattctggaggcagaggaggtggacacggt

SEQ ID NO: 21718 - DNA, 98 bp, Homo sapiens
ctggacagcatcagcatcatcgacacccccgggatcctgtctggagagaagcagcggatcagcagagctatcatggtgaacttacttcagattgtgcg

SEQ ID NO: 21719 - DNA, 90 bp, Homo sapiens
cggcagcaaggaggatgcggcccagtttgccgccggcatggccagtgccctagaggcgttggaagccgtggtccttcagcatatctctgt

SEQ ID NO: 21720 - DNA, 51 bp, Homo sapiens
cagcgcccggcgttggccacctacaggtaaatcagggatttcttcttggtt

SEQ ID NO: 21721 - DNA, 100 bp, Homo sapiens
gatgttctgagattgcatcaggatattaatgattataaccggagattctcagggcaacccagatctttatcaggaactgttgccgttattacatcagatg

SEQ ID NO: 21722 - DNA, 75 bp, Homo sapiens
gtggaaaggaagctgcacaggaagccgtgaaactgctatcagaggactcctgaaacctggagagctacctgctgt

SEQ ID NO: 21723 - DNA, 100 bp, Homo sapiens
gccggcagggtccctgcgctgctgctctgcctggctgtgtgccaaccacgatgcaaacatggtgaatgtatcgggccaaacaagtgcaagtgtcatcctg

SEQ ID NO: 21724 - DNA, 100 bp, Homo sapiens
ctgcaggcttccagaaaaaaacaggagatcagtgagctagcagcagagaagccttcctggaaaaggatcgccccaggacattcgacatgcactcactgga

SEQ ID NO: 21725 - DNA, 98 bp, Homo sapiens
cgggcatgcagacggttaaatgattttgctagtacagttcgtatcctagaggttgttaaggacaaagcagttccaattccagagaaaatgagtgaatg

SEQ ID NO: 21726 - DNA, 71 bp, Homo sapiens
cgacgatagcgaggtcacctttgcattgcactcaggcggtggaagaagatatccccatagcgaaagaacgg

SEQ ID NO: 21727 - DNA, 101 bp, Homo sapiens
tcagagcaccaaaacacactggaaacaaacagtatttctactggaaaaaccattttcagttaaagcagctatcagttgagggatttgcagttgataaaatg

SEQ ID NO: 21728 - DNA, 75 bp, Homo sapiens
agaaatatttcaaatacagtaatgaaagtaaagcagatcctgggcagaaggacagttttagaagacgacagaaag

SEQ ID NO: 21729 - DNA, 100 bp, Homo sapiens
ttcgggctgacgctgctgctcgccgcgctgcgcccttcggccgcctacttcgggcctcatgcattgtgcgtcagcagcaatgtttatggtgaaaaatggc

SEQ ID NO: 21730 - DNA, 100 bp, Homo sapiens
ggtactttgtatctcagttaaagaagatgaagaagtcttcaggggagattgtctactgtgggcaggattccagacagcattggaaaagacatagaaaagg

SEQ ID NO: 21731 - DNA, 100 bp, Homo sapiens
ctgctatctgccacgggaaagaggagagtccatggagaagtggcagaccaggaaaatgcaacatggcagcagcaatggaaacagaacagctgggtgttga

SEQ ID NO: 21732 - DNA, 75 bp, Homo sapiens
tcccgagactacggtgtgctgttagaaggttctggtcttgcactaagcctgatgtgtgagaagcggatattggcg

SEQ ID NO: 21733 - DNA, 75 bp, Homo sapiens
tgcgactggcaatcagcttcctgcgaacacacaagctcctctcctcagtctgcaaaatgaatgttcaccgtcgat

SEQ ID NO: 21734 - DNA, 76 bp, Homo sapiens
acaaactacccattttcttttttggaactcatgagacgagaagatggtataaactggtccatcagtgacaaagaca

SEQ ID NO: 21735 - DNA, 100 bp, Homo sapiens
cggcgctggggcccccagaagtgatcgctcagctggagaacgcggctaaagttctgatgagtggcagaatttagtgacatttggaagcttttcaaacatg

SEQ ID NO: 21736 - DNA, 98 bp, Homo sapiens
aattggcaagagtggagacaaagagatgagcagctctccacacaaggagatgcaagtcaggtgattgggcctcttactgaaggacagagaagaaatgt

SEQ ID NO: 21737 - DNA, 107 bp, Homo sapiens
aggaccagatgataccatgaagagaagtttacaggccctctattgccaactgttaatgttccttgcctgtatctccccttggttcaatagctaccagatttttggaa

SEQ ID NO: 21738 - DNA, 97 bp, Homo sapiens
ggctccatgagatgcacatcaaatacatgggcagccacatccctgaagactggagcgctcagcctgccacggaagactggtctgcagctcccactgc

SEQ ID NO: 21739 - DNA, 75 bp, Homo sapiens
gtttttgttggtggaatcaactgccttcaccaaaatccactatcccagaggagagaacacgtcttacaggatgga

SEQ ID NO: 21740 - DNA, 100 bp, Homo sapiens
cggaagatcgtcgccacctggatgctggagacggccgaagccctgcagcccacgctacagccggagatgcagctcgagcacggggccatccagattcagt

SEQ ID NO: 21741 - DNA, 90 bp, Homo sapiens
ctcgtcgacatgagtgatgtggaggaaaacaacttcgagggcagaacctgtcatttactccatcctttatagtgatgctacaggacgaag

SEQ ID NO: 21742 - DNA, 100 bp, Homo sapiens
atttgagaaatatggaaaggcaggcgaagtcttcattcataaggataaaggatttggctttatccgcttgcctgggttactaggtgtctttcagaagctg

SEQ ID NO: 21743 - DNA, 74 bp, Homo sapiens
ggcttccaggcgcactaccgcgaaaactgattgggaggtagctattaaaagtattaataaaaagaacttgtcaa

SEQ ID NO: 21744 - DNA, 76 bp, Homo sapiens
ggaggcccgacgcgactgggcccctcagtaagactttgaccccgacgcaggcttcagtgattgccgcggatcagaa

SEQ ID NO: 21745 - DNA, 75 bp, Homo sapiens
ggtgtcggcgcgggagcagcacttccacagccaagtgcgggagtccacggtgcgagacaagaagcttctcaatga

SEQ ID NO: 21746 - DNA, 82 bp, Homo sapiens
agccgcgcagccctcggagcacggttttaaaatcaaagatgggaaaatcggagaaaattgcccttccccatggccagcttgt

SEQ ID NO: 21747 - DNA, 100 bp, Homo sapiens
gcgttctgatgtcgtgcccatgacagcagctactcagctgcttaagctggcccacaagtacagaccagagacaaagcaagagaagaagcagagactgttg

SEQ ID NO: 21748 - DNA, 118 bp, Homo sapiens
ccagccagccccgacggcgccatgcggggtccgagcggggctctgtggctgctcctggctctgcgcaccgggcgccctgcgtccggcagaggaggcgagcatcccgctcaggtgatga

SEQ ID NO: 21749 - DNA, 75 bp, Homo sapiens
ctagaatgcatcagtgcccttgtggcgaatggggctcacgtcgaccagaaacgtttgagcatctttttatcaagc

SEQ ID NO: 21750 - DNA, 83 bp, Homo sapiens
ttttgggtcttcttcttaatcccatatctggacatctggaacatccatggcatcacgttgggtggtttccatttagaccgagg

SEQ ID NO: 21751 - DNA, 90 bp, Homo sapiens
gatccacagctaagacgccgggactccctggaaacctagaaatggttggtcagcacattgtctcaagtagccttttgatgtcactgtggc

SEQ ID NO: 21752 - DNA, 101 bp, Homo sapiens
ctctacagactccaaaaggcccttttcagggcccccaaactgtcacagaaagagctgttaacacttcctagataacggatagttttgaggcagctgtgcca

SEQ ID NO: 21753 - DNA, 101 bp, Homo sapiens
tgttcagttacaagagaaactttatgtgcctgtaaaagaatacccagatattgagaggatccagaatccagatctctggaatagctaccaggcaaagaaaa

SEQ ID NO: 21754 - DNA, 100 bp, Homo sapiens
caaaaatttggacattgaccccaaactgcaagaatacctcggcaaattccgacgtcttgaagacttccgagtagatgagcagatccggggtagagggaaa

SEQ ID NO: 21755 - DNA, 80 bp, Homo sapiens
gaccaccatcaacaatgagtacaactaccgctgctggaccacaaaccgctgccagaaaaacaatgcagatcttcgtgaag

SEQ ID NO: 21756 - DNA, 101 bp, Homo sapiens
ccgcaggtcccggatgttgcggacagtatgaggcaagcgcagggggacggggaccagcagctgtcgccgccgctctcaggtactatcttggtcgtcggatg

SEQ ID NO: 21757 - DNA, 74 bp, Homo sapiens
atccatcctttgaagaccaccaggtgcaggtgatggtcctaccagtgtgtctgttgaggtcacccgtcctaaag

SEQ ID NO: 21758 - DNA, 101 bp, Homo sapiens
cgattatcttcatattttgaaacaggaccctgatgctcccataagacagaaaatgccccttgatgatctggatagagaagatgaagttagattactcaaat

SEQ ID NO: 21759 - DNA, 103 bp, Homo sapiens
ggtggcattacgtagaatccattgatcctgtcactgtcagtataaactcatggattgaactgattgagaggatccagaatccagatctctggaatagctacca

SEQ ID NO: 21760 - DNA, 100 bp, Homo sapiens
cagcttttgatatctaggaggactcttctctcccaaactgcacagactgccaaggctgggggcaacatatctgtatcaaaagaggaagcttggaaaccgg

SEQ ID NO: 21761 - DNA, 111 bp, Homo sapiens
catgtacagtcagaatattcctgttcctactacagttcctgttcctactccagggaaatttagatggtctattgatcaactagctgtaataaatcctgtagaaatagaccc

SEQ ID NO: 21762 - DNA, 101 bp, Homo sapiens
ctgcaggacatctgcaatgatgttctgaagccagctgaagatgagtggggtaaaaccccagacgccatgaaagctgccatggccctggagaaaaagctgaa

SEQ ID NO: 21763 - DNA, 100 bp, Homo sapiens
tatcgccctcctcaccttccacatctactgcttttacgtctatggagccagggcggcgactggcggcgcgatggacctgaccgggctcctgctggacgaa

SEQ ID NO: 21764 - DNA, 82 bp, Homo sapiens
aagactttgatgtggagtccaaatttgaaaggccacggcatatgcctccaaggacggggtcctcactgaggccatgatggac

SEQ ID NO: 21765 - DNA, 115 bp, Homo sapiens
gaagtagcaaaggcaagaaggcaacgacgttccatctgtggaaggacctaccaaccagacaggggcaagtgtccgagtggtgaatcagctacttacagagatggatggtctggaa

SEQ ID NO: 21766 - DNA, 125 bp, Homo sapiens
agacgatctgcacttcgcattttggcattgacatttaattttagggtcctttatatagaagggagagtaggacaaagcagttccaattccagagaaaatgagtgaatgggcacctcgacctcccc

SEQ ID NO: 21767 - DNA, 75 bp, Homo sapiens
gccgtgctcgtcgggcccccttcgggagttcctgggcttcccgatggactcgagtttttactatgtgagcatccc

SEQ ID NO: 21768 - DNA, 100 bp, Homo sapiens
ggaaaaccccgaaaacgcaagaagcgtgaggaggaaaggcaagctctgactctgaggttggaggcagaacagcagcggtgctgtgtcctgcaggaagagc

SEQ ID NO: 21769 - DNA, 88 bp, Homo sapiens
acaattccatttggggaccagagatggacggtcactcagcctatggaggagaagaaactgaggcctggaatttgattaactcattcaa

SEQ ID NO: 21770 - DNA, 101 bp, Homo sapiens
ctacacaagtggagctccttttcctccacctaccttcccgagaaaatcctgccttgcttcgttgggcctatgcaagaacaataaatgtctatcctaatttc

SEQ ID NO: 21771 - DNA, 98 bp, Homo sapiens
gtcgaccctgacctgtacacactcttgtttggagagagtgtgttgaatgatgcagtggccatagtccttacatactcatgtgctcctcggtgcagaag

SEQ ID NO: 21772 - DNA, 75 bp, Homo sapiens
tggttcggtgcttctccactctgcagtggctcttccgcttggacatcaggcttcttctcatatcggtaattccac

SEQ ID NO: 21773 - DNA, 80 bp, Homo sapiens
aatttcagtgactgaattaaaaggtgtcaagaagctcagaatgcgctttgaacttcaagattcaggaagctctctacttc

SEQ ID NO: 21774 - DNA, 75 bp, Homo sapiens
aatttcggtagccatggcacaagaatatatgttttacctcaatcatatatccacacaagtgcttctcttgacatt

SEQ ID NO: 21775 - DNA, 50 bp, Homo sapiens
ctcccttcgccaaactcttcattttctctagaccctcctggatgacttcc

SEQ ID NO: 21776 - DNA, 50 bp, Homo sapiens
ccgggtggtcccattcatatcaggatgcctccattgcacacagattccac

SEQ ID NO: 21777 - DNA, 80 bp, Homo sapiens
ccgggggaggcgacgctaagttgctgatcgtggcggaacgtcaaggtcgtgggaaataaaaggcagttctacacagactg

SEQ ID NO: 21778 - DNA, 100 bp, Homo sapiens
tcaggctccgccccctgcatgtctttgttggcaaacagttctgggggtcgtccgatcctgcaggttagcgtccccaaaatgaaacataagccaaccaggc

SEQ ID NO: 21779 - DNA, 75 bp, Homo sapiens
cagagagccacatctaccgcgagggctgcatggagaaggtgcaggcgtggctgcaggagaacctgggcatcatcc

SEQ ID NO: 21780 - DNA, 108 bp, Homo sapiens
ccgcagtatcatgctggccaagaagatcatcattaaggacggaggcacggattttttatcaagcagaaatgcatcgaacaacgagaatcaagatcactgagctaaatc

SEQ ID NO: 21781 - DNA, 89 bp, Homo sapiens
tcagtatcatcattccaagaagcggtatccaagctgttttatcgaaagtgcgcatgggagggagttttatgcctatgtaatcagtgcag

SEQ ID NO: 21782 - DNA, 83 bp, Homo sapiens
aatatttaagaaagaagatgttaactttcagtctgaccagtgcacaggacttcagggcttcctggtgttccacagctttggtg

SEQ ID NO: 21783 - DNA, 95 bp, Homo sapiens
gctccaagatgagccaagtagcccccagcctgtcagccctaattggggaagcggatatgggccctcacattttccaaacctgtccatctgctaac

SEQ ID NO: 21784 - DNA, 80 bp, Homo sapiens
cgggttcaagcgattctcctgcctcagcctccacagtagttgggattacagttatctccagaagaagaagagaaaaggag

SEQ ID NO: 21785 - DNA, 100 bp, Homo sapiens
gggcgctccgcgcccccggatgctgcaggtctctgttctaggatgtcccgacccagtggtgcatgagatcgcctatcagtacggaaaaaatgtaggaata

SEQ ID NO: 21786 - DNA, 83 bp, Homo sapiens
gaaacttccccttccggcgaccgcggacgacgtgaccagaagtcccgccgcttaaaggagtttatgtggccgaggcagacaag

SEQ ID NO: 21787 - DNA, 100 bp, Homo sapiens
gcgggaaagacaccacacattgcgcagtcgggaccatcgccggagcctgaggacacttctctgtcgtcacagttagaggtggggctggtgtccgagcact

SEQ ID NO: 21788 - DNA, 100 bp, Homo sapiens
attcaggatatacggtgcaccttggcaacagcattattgagaaaagcccttacagaagagtgtggccgtaggtcagctattcacagtagtgaatcatctt

SEQ ID NO: 21789 - DNA, 82 bp, Homo sapiens
ctggacatggaggagaaggtccgcttcaaggaaccctactctggaaactgtcagtcccagggcactggggagggctgaggcc

SEQ ID NO: 21790 - DNA, 83 bp, Homo sapiens
gtttgtgggccagctgccctctgaggagatggtcatgacagcggagctggagtttgttcagatcatcatcatcgtggtggtga

SEQ ID NO: 21791 - DNA, 75 bp, Homo sapiens
gatgggcatctattacattccaggtacagccaaagaccggagctttggagagatgaagtttaaacagtgtcctac

SEQ ID NO: 21792 - DNA, 101 bp, Homo sapiens
atgcaatttttacatcaccaacaggtgaagaaaacctcatgaatagcaatcacagagactcggagagcatcactggtagcacaggcggagtgcagcggagg

SEQ ID NO: 21793 - DNA, 73 bp, Homo sapiens
agctgggtcctgatgaaagcaaacagaaatttgtgctcaaaacccccaagaaagctgacttcatgagaccgag

SEQ ID NO: 21794 - DNA, 75 bp, Homo sapiens
aaaacatggggattggaattcgttgacgaaggatcagagattggtgtattcgggcagactgcttcccgatcatct

SEQ ID NO: 21795 - DNA, 88 bp, Homo sapiens
acagaaaaataaactcaaggagcctgggggaggttcgtttcgatgaaggactcgctcatcaaccttcagaacggcatcaggtcccgcg

SEQ ID NO: 21796 - DNA, 100 bp, Homo sapiens
ttctgtatgttcttcgccattatattcagttatttgctggtataaaggatggagaaagcctgcagctctttgaacaaagttctcgctctgcgcataaaca

SEQ ID NO: 21797 - DNA, 100 bp, Homo sapiens
tccaagttgacggacaggaggcgaaatgtgcaaatgtttatggaacccagcccttgctgacatctacacagagcacgcccatcaggtggtggtggccaag

SEQ ID NO: 21798 - DNA, 100 bp, Homo sapiens
gggaggagcgacccgggatgttcagtctgatggccagttgctgcggctggttcaagcggtggcgggagcctgtcagaccccatatcatgtgaacctcctc

SEQ ID NO: 21799 - DNA, 90 bp, Homo sapiens
tcctgcaccgccaccggcccgacctcatcaagtacagatgaagctcaggttccccaaggaaatattgaccaggttgctgttgtggccatc

SEQ ID NO: 21800 - DNA, 101 bp, Homo sapiens
caggctcagatcagtggccgaggccccagaggtggctgagcatcggagtggagttcgtggggaactgcgtggtgctctttgctgcactatttgccgtcatc

SEQ ID NO: 21801 - DNA, 75 bp, Homo sapiens
tagctaatgaccgtggttcccactgagattaatggaaagtggagtggtcagagtgctggaggatgtggaaatttc

SEQ ID NO: 21802 - DNA, 83 bp, Homo sapiens
tacctagatctgagaaggactttcaggatagaacatgcttcctgcctgacacagctcacttcaagaagtgcacaatgtcagaa

SEQ ID NO: 21803 - DNA, 90 bp, Homo sapiens
ttccccatggccttcctcctcgctttgtgatgcaggtgaacttccacagcccccggagtggccagaggtgctgggctgcacggacccagg

SEQ ID NO: 21804 - DNA, 100 bp, Homo sapiens
gatgaatggcggcatgaaggaaacgctcagcctcactgtagatgccaagacagagactgcggtcttcaaaagggtggttctcttcccaaagtggaagcca

SEQ ID NO: 21805 - DNA, 83 bp, Homo sapiens
gaccaggtcaaccttttaaaggctgggacttttgaggaagcagttcaggtacttttgaagcattctgcagatgttaatgctcg

SEQ ID NO: 21806 - DNA, 83 bp, Homo sapiens
cctgtgggtgctgggcctctgctgcgtcctgctgaccttcgatccaggatgagaagactgataaaagaagaagctagctgaac

SEQ ID NO: 21807 - DNA, 74 bp, Homo sapiens
cttaatgaactcagtgtcccccccgcaagcattgttgcaagagaaacatgatgaaagtattgagggggcatcag

SEQ ID NO: 21808 - DNA, 100 bp, Homo sapiens
attcacttaagaaaactcagcctgagaatggtctcggcgcggaagatggccggcggcgtggacggccccatcgggatcccgttccccgaccacagcagcg

SEQ ID NO: 21809 - DNA, 96 bp, Homo sapiens
cctcctccgggaccctccccttggaccgagccgatcgccgcggggcagttcgggccggctgtcctggcgcgaaatatggctacacacacctttctg

SEQ ID NO: 21810 - DNA, 50 bp, Homo sapiens
cctgtgcaggtgaggacaggccagctggagcccagatttcaagttttgag

SEQ ID NO: 21811 - DNA, 82 bp, Homo sapiens
gctttacccgactctttgggccgttatctcacgacttcgcaggtgagcagtaacggaaatcagccccgtttattcctcccag

SEQ ID NO: 21812 - DNA, 76 bp, Homo sapiens
tctcattgtcataatgtaaaacctcctgttcggtaaacagaatctggtgattatgggtaagaagacctggttctcc

SEQ ID NO: 21813 - DNA, 98 bp, Homo sapiens
agacacctagtccttccgatggaagcactagacaaagttcacctgaggtatcctccatgaaatgtgggatccttccaatttctcaagagtctcttctt

SEQ ID NO: 21814 - DNA, 75 bp, Homo sapiens
atgagcagattggttagtgaaggaactgtggctgcaccatctgtcttcatcttcccgccatctgatgagcagttg

SEQ ID NO: 21815 - DNA, 50 bp, Homo sapiens
gtcagtttttccgctttctcacgagggtgaggtggctttgaccccgggtt

SEQ ID NO: 21816 - DNA, 100 bp, Homo sapiens
agcaggaacagggagagagtagggacagcgactgggagacgcgctccacagaaacccggactgagaggcagcgagaggacagagtttcactcttgttgcc

SEQ ID NO: 21817 - DNA, 87 bp, Homo sapiens
ccccggccgcgcgttgctgctgctgccggtcgagcagaggctgggaggcggcagaatgcagccagaggagggcacaggctggctgct

SEQ ID NO: 21818 - DNA, 90 bp, Homo sapiens
gcgccacctggagagaggccgcgtcctgggcagagctcctgccccggagccgggccctggcgaggcaggaatggccccgaggcctccgac

SEQ ID NO: 21819 - DNA, 82 bp, Homo sapiens
tgtctacatcattatggaactggtttcaggctgttgaaaatcctacagctacagagattcaagatgtatgttcagcagttgg

SEQ ID NO: 21820 - DNA, 75 bp, Homo sapiens
ctgcttaattccctttccttaggaggaaatggagagcctactgggatatggatgtctgacaacttaggacaagtg

SEQ ID NO: 21821 - DNA, 100 bp, Homo sapiens
caacaatatctgtggagttggagtagcatacaactccaaggttgcaggtatgttcgcaattcgtgctgatcatgattttgtagtacaggaagacttcatg

SEQ ID NO: 21822 - DNA, 75 bp, Homo sapiens
ctcattgattcaggtgacacctattattttggagctattgacctgttgtattggcgggacatcaagcagacgggc

SEQ ID NO: 21823 - DNA, 100 bp, Homo sapiens
gctgaactgagcgtatgtgccacgccgcccaggagacccctctgctgcaccacttcatggacatggagaaagagcgagagactctgcaggcctggaagga

SEQ ID NO: 21824 - DNA, 51 bp, Homo sapiens
gctgaatgtcaaatctgaggagcaggtacctgcacatgttgttctttgtca

SEQ ID NO: 21825 - DNA, 90 bp, Homo sapiens
gtaattccagcgagtcgacttcccatcctgagttgggtgtgtccgcagccggccaggtggtatccctgaaggtgtggctgattgacgaca

SEQ ID NO: 21826 - DNA, 82 bp, Homo sapiens
cagggacagcgacttccttgcagcctcttctccggcttccttcaaaatgtctactgttcacgaaatcctgtgcaagctcagc

SEQ ID NO: 21827 - DNA, 50 bp, Homo sapiens
cccatgctgagcgcctctcacacaggccgctacctgtctgaggaacccga

SEQ ID NO: 21828 - DNA, 100 bp, Homo sapiens
agcctggatgcggaccatgcccccttgcagcagttctttgtagtgatggagcactgcctcaaacatgggctgaaagatggcgtcccatgtagagtgccgt

SEQ ID NO: 21829 - DNA, 96 bp, Homo sapiens
ggccaattgaatgtgaggtcatcaaggaaaacatccatcatattgatgatgtctttctacctaaagatattgacctagacagtgtggatatggatg

SEQ ID NO: 21830 - DNA, 100 bp, Homo sapiens
gaactggcaccagtgggggatggagatgtagttgctgacatccaggatcgaatccagaccttcaacaagcttgtgggaaagtttagccagtccatctttc

SEQ ID NO: 21831 - DNA, 87 bp, Homo sapiens
cgcgggggagctgcgacgcgcaagggctgcggagccgcgggccggcgagcgcgtcgccaccatgtttgtttcgacgccggaccgcgt

SEQ ID NO: 21832 - DNA, 100 bp, Homo sapiens
cgaggtgcacattggaggcgtgatgcttaagctggtggagaaactcggtactactgagcgagtgtgcttgatccagggaacggttgaagcactgaatgca

SEQ ID NO: 21833 - DNA, 71 bp, Homo sapiens
aacagcccactggaagcctccaccttggaatggtcggtgagctggtaaaggttacgaagattaatgtgagt

SEQ ID NO: 21834 - DNA, 80 bp, Homo sapiens
acgacgggttggggatggcgtgcagcgcaaccacgagacggccttccaagatcctgggtgtttggctgacctacagatac

SEQ ID NO: 21835 - DNA, 100 bp, Homo sapiens
gtgctgtcagccctgtgtggtcaacgaatactactacaggaagaagtgcgagtccattgtggagccaaagccgccacatgaaatgaagatcacctctgcc

SEQ ID NO: 21836 - DNA, 83 bp, Homo sapiens
cttgcacctgtcccaactgtaaagaaggtggtggaaggtgtctttccgatagccgttcctggtgagacatcctctttatataa

SEQ ID NO: 21837 - DNA, 100 bp, Homo sapiens
tcggctgtcacagtatcctaatgaaaatcttcacagtgctgttactaaagcctgcctttccagaggccacaagaggaagctgaatgaagaggacgccgcc

SEQ ID NO: 21838 - DNA, 75 bp, Homo sapiens
tgaagagtgaggagaccatagctgcacagccaggaagctcttcgtgtggtgaagatcttacagaaccttgatccg

SEQ ID NO: 21839 - DNA, 100 bp, Homo sapiens
ctgggagacgcacagctaagatgccaggacatcctggaagctgggaaaagattcagaatggacagtttagaagaacctcagaaaaaagtctttaaggctc

SEQ ID NO: 21840 - DNA, 82 bp, Homo sapiens
agagaatgcctatgagtacttcaccaagattgccaccaggaactgtggctgcaccatctgtcttcatcttcccgccatctga

SEQ ID NO: 21841 - DNA, 75 bp, Homo sapiens
ataagaaaggtgatattgtagacatcaagatatttggttcccgggtaagagttgactctacagcaaaggttgcag

SEQ ID NO: 21842 - DNA, 100 bp, Homo sapiens
gccggggaggcagcgcgggatcccagcctcaggcgtgcgcggacggtgtgcgggggtattgaatggacaagtttgactagttttctttcttttgctacct

SEQ ID NO: 21843 - DNA, 80 bp, Homo sapiens
ctttccccgtcagcatcccagccgtgctcacgcgatgccctcctagctagccgtcacgggatggagggcttcatggactc

SEQ ID NO: 21844 - DNA, 75 bp, Homo sapiens
tcctgctcatgaacgagtactacaggcaagaaaaactttgactgcagataaattggagcatttgaaatctcagct

SEQ ID NO: 21845 - DNA, 50 bp, Homo sapiens
cttcccatcaccatcacagagagcgatggagactgcattgcttattgatc

SEQ ID NO: 21846 - DNA, 97 bp, Homo sapiens
tgtgggccatggcagcgacctgcggaaggtggagggcacccaccatgtcaatgtgaaccccaacttctcggctgtgggacagatgatgtctaccatg

SEQ ID NO: 21847 - DNA, 83 bp, Homo sapiens
tcactttcggcggagggaccaaggtggagatcaaacgtgctggagaatctggtaaaagcaccattgtgaagcagatgaggatc

SEQ ID NO: 21848 - DNA, 98 bp, Homo sapiens
cgccgccggccctcggtgcgcccggccgcctgcacccccaggatccctgctgccttggtgatcccgggctgacagccagagagcacagcggctcagct

SEQ ID NO: 21849 - DNA, 90 bp, Homo sapiens
aaagctctctacacatttgaaggcctccagccagctgtcccggggttcggccacgacgccccgaggtgtcctgcacacgttcagtccgtc

SEQ ID NO: 21850 - DNA, 100 bp, Homo sapiens
cagtgagcaccttttggcccaatgaatatcaggtagaaattgagaagctggattaccatcattatctgcctctgttttttgatgggctttgtgaaatgac

SEQ ID NO: 21851 - DNA, 82 bp, Homo sapiens
actgtgaaaagaaatgtggaaactgctctctcacggttcattgtcggatcctccaaatattgctggcttaagtcatttttgt

SEQ ID NO: 21852 - DNA, 100 bp, Homo sapiens
tgcttcgtggcccggcaccgttccgcggacgtgctcgttggtgacaaagttcctgctgatataaggttaacttccatcaaatctaccacactaagagttg

SEQ ID NO: 21853 - DNA, 75 bp, Homo sapiens
caggaggccttccgcacccgggaaaatggtgatttctttgctaacatggtagtagatgctgtacttgctattaaa

SEQ ID NO: 21854 - DNA, 83 bp, Homo sapiens
cttgaacagactagaaattgcaccacagatatatgggttgaatggaagttggatacactttgtgacttgtacgagacactgac

SEQ ID NO: 21855 - DNA, 87 bp, Homo sapiens
gaccaacttctttggcaagtggacattttactggctcaagtgcccaaatgtgagtctgcaaaagctgccagaacagtggctatggag

SEQ ID NO: 21856 - DNA, 98 bp, Homo sapiens
accattcagatgggatctttccggatcaatccagatggcagccagtcagtggtggagtttgatgaaggccggaacaactttgaaggggaggtcaccaa

SEQ ID NO: 21857 - DNA, 100 bp, Homo sapiens
ttctccctttcttctgtggataagctggaacagatctatgaatgcagtgaaaggtgtagcagtcactcggcctacacccacagcatcgaccttgtgaacc

SEQ ID NO: 21858 - DNA, 95 bp, Homo sapiens
aggctcggagcgcggcacggagacggcggcagcgctggactaggtggcaggacagattgattcactttggagctgtaagtactgatgtattaggg

SEQ ID NO: 21859 - DNA, 98 bp, Homo sapiens
acggccagtggggaaggggcggaagcagccagagcctctggagaaacccagcactccagccagaaggacctccgtaatatggccaagatacacccagg

SEQ ID NO: 21860 - DNA, 98 bp, Homo sapiens
ttcttccctgggctggtgaagtacatgaactcagggccggttgtggccatggctctgaagagtgttgtactctatgttatcctggctccttttgacaa

SEQ ID NO: 21861 - DNA, 95 bp, Homo sapiens
ccacattcaggggaaccgcctcaccgttctgcccccagaactaggaagacaactgttagttttgtggcttactgctgctccacccagtgtctgca

SEQ ID NO: 21862 - DNA, 75 bp, Homo sapiens
ctgaggcggaggctgacgaggaggcggatcccccggcgtcaggttcttctgtgtggcagttcagaatgatggatc

SEQ ID NO: 21863 - DNA, 100 bp, Homo sapiens
gcaaaccccttcaaaacccaagaagaaacagaattcaaaaggacttgctccttctgtggtgaaatgacaatggatgctctgttggctcgattgaaacttc

SEQ ID NO: 21864 - DNA, 115 bp, Homo sapiens
cggcagcggcggtggcggtggctgagcagaggacccggcgggcggcctcgcgggtcaggatgagacttctgtgagcagcgaggattttgatatgagcgactccacatggatgtca

SEQ ID NO: 21865 - DNA, 98 bp, Homo sapiens
ccagggaaccaggggtccgggctagagctggagtcgtgagcgcgcgcccgccccgctctgggaggaccgcgagatagtattgaagccagccttgaggc

SEQ ID NO: 21866 - DNA, 100 bp, Homo sapiens
caaggatttccaagtgatttcttccaaagcacaggaatctcactctgttaaagctggtctgttctaactgagcaagttccaaatgcacataaggattggg

SEQ ID NO: 21867 - DNA, 76 bp, Homo sapiens
gtgctggaaaggaatgaggagttacagagggccgagaaggacaggatcagactcgagccttacgcagacccttatt

SEQ ID NO: 21868 - DNA, 98 bp, Homo sapiens
caacacgtgcccctacgtgcacaacatcacccgcaaggcagagaagaggcgatggcggcgatggcatctctcggcgccctggcgctgctcctgctgtc

SEQ ID NO: 21869 - DNA, 83 bp, Homo sapiens
gaaagatccaaaacaagtggctgcggccgtcgcccaggagtcatcggacgccagaatctgggcagcgggtggcatgagacgtg

SEQ ID NO: 21870 - DNA, 75 bp, Homo sapiens
gttgattatgccagccagatgcagatatcaatgatgtcaaacggctgaaacctggctacttagaagctactgtgg

SEQ ID NO: 21871 - DNA, 100 bp, Homo sapiens
caaaggaccagtctgcagagggatcctgtggctggaagcgaggaggctccacacggccgttgcagctaccgcagccaggctggtctcaaactcctgacct

SEQ ID NO: 21872 - DNA, 82 bp, Homo sapiens
agtagctgtaatagaatgccagcaaccagaagcagacttatacaggtttccacttgagcggcacagtgacagaacctgcaat

SEQ ID NO: 21873 - DNA, 100 bp, Homo sapiens
ctgggaacagtgaatggtgggccgcagcattggcatgatgggccaggggtcccacagtcagccataatggcaggtgaagaaattaatgaagactatccag

SEQ ID NO: 21874 - DNA, 100 bp, Homo sapiens
aatgttctttactactaagcaccgttggtatcctcatggacgtggtaggaggactcctgtctgctcatctgctctccaagaaggctggggtggaagtaga

SEQ ID NO: 21875 - DNA, 100 bp, Homo sapiens
agccaggcctgctgcccagtttgagctctgggaagaagaggagcaggccgggacgcccaccgccccaggaccaaattaccatcacagggtacgaaaagaa

SEQ ID NO: 21876 - DNA, 131 bp, Homo sapiens
ccagaagatggaggaagctgtaccgtgccaacggccacctcttccaagccaagcgctttaacaggtattggatgaacgaatatacctcatccattggaattggagtttttcattcaggaattgaagtctat

SEQ ID NO: 21877 - DNA, 80 bp, Homo sapiens
accgagtgacacgcaggagcttcgggacagcctgtgtgggcaagagcagtttactgttgcgttttgcagacaacactttc

SEQ ID NO: 21878 - DNA, 82 bp, Homo sapiens
ccgaggagtagtcgctggagtccgcgcctccctggcaaattgtggctactaatttgccccctgaagatcaagatggctctgg

SEQ ID NO: 21879 - DNA, 100 bp, Homo sapiens
gggggagggcggagctggcgcggcccctagctttctccttctggtgtggggcccgaggttatgggtgctacatgtgtgctttcagagcagtagtgtgagg

SEQ ID NO: 21880 - DNA, 98 bp, Homo sapiens
aggcaccgacgtcatcatgctgaccaccaatcagatccgtaaggccagaacacaaagcgtgaatccggaagaaaagttcaatctggaaacatcaatgc

SEQ ID NO: 21881 - DNA, 100 bp, Homo sapiens
ctgcaatcgcttgggagagctcctgggccacccctcctttcaggtcaaggtgaaagaacttgtcctggacaacagtcggtcgaatgaaggcaaactcgaa

SEQ ID NO: 21882 - DNA, 51 bp, Homo sapiens
tagtacagtcgccaactgatgtctacagtggggttgcccagactctcaaga

SEQ ID NO: 21883 - DNA, 82 bp, Homo sapiens
gaagaccaagtacctgcagatcctgacctctctgatgagatggatcggtgtgcatcaccttcgaccaggccaacctgaccgt

SEQ ID NO: 21884 - DNA, 100 bp, Homo sapiens
cggcggcagcggggtccgggtccggagcgccacagatgaccagtgtcccagtgaaggaacgagtgaaggtgtctcagaactggagactggggcgctgccg

SEQ ID NO: 21885 - DNA, 100 bp, Homo sapiens
cgcggcgcgcccgccctgcagctgcccaagcactcttttgaaacagatggtcaccatgtttagatattagcagtcccgtatgtgcatgtctgcatttgaa

SEQ ID NO: 21886 - DNA, 82 bp, Homo sapiens
attcatgagaatgaaactgccacacatcttccagagctagatacactttcatcagaaagagccagatccttcataacttggc

SEQ ID NO: 21887 - DNA, 100 bp, Homo sapiens
gagataccttactcggaagattggctttgaggcagtcatgaggattcggtgcaccaaaggtcttaacccatatttaactttgaacacctctggtagtgga

SEQ ID NO: 21888 - DNA, 119 bp, Homo sapiens
cgaagtctgcttctgcttccaaaggagaaccgcagtgaaagggtccaaattccaagcctgtagtgtccttcattgctggtttaactgctcctcctgggagaagaatgggtcatgccggg

SEQ ID NO: 21889 - DNA, 100 bp, Homo sapiens
ggagcaccgagctcgcggcacggtaggaggtactctctgaagatggcagaagctcaccaagctgtggcctttcagttcacggtcactccggacgggattg

SEQ ID NO: 21890 - DNA, 92 bp, Homo sapiens
ggcgttcaagcgaaaacatgaccgctgagcccatgagggagtgcatccgccccaacccttttccccctcgtctcctgtgagaattccccgtc

SEQ ID NO: 21891 - DNA, 100 bp, Homo sapiens
actatggtaccggccacctgatgtgcttcttggttcctcggagtactcaacacagattgacatgtggattgtcaccagacctgcaatctatggagcagat

SEQ ID NO: 21892 - DNA, 74 bp, Homo sapiens
cgagtctgtgcaaagcctcctgcttcagtggacacgcatgtgcacagaatcgccaacaggctgaggtggaccaa

SEQ ID NO: 21893 - DNA, 75 bp, Homo sapiens
catatttcctacatctgagacatgggaaatatatggcatcgagagtaaacatgaggttacgatcctgggaggact

SEQ ID NO: 21894 - DNA, 82 bp, Homo sapiens
tcaccaacacggccggactgcagaagctggcggacattatccagatcctgactgctgtcatggcgtgccctctggagaaggc

SEQ ID NO: 21895 - DNA, 50 bp, Homo sapiens
cacagaggatgatgctgactttgatgaagatgtgccgtttgggggtgcta

SEQ ID NO: 21896 - DNA, 100 bp, Homo sapiens
ctcgagctgcgagagtcttggctcccagccggcggcggctcggccgcccagcgtggactccttgtccagatttgctgctgcttccaggagaagtggagca

SEQ ID NO: 21897 - DNA, 97 bp, Homo sapiens
cggcagatcctcaggggcaagtacagttactctggggaggaagagctggacatccgcccaaaggtatcgtctcttctgggaaagctcgtcagctaca

SEQ ID NO: 21898 - DNA, 100 bp, Homo sapiens
ctggacccagagagcatcttcgagatgatggagatcatcacgaagtatgtatatgagctcctggaaaaggattgtaatttgaaaaaagtatctattccag

SEQ ID NO: 21899 - DNA, 75 bp, Homo sapiens
tactggcaagactgcaacaccccaacaggtcatcactccccaaaatggacgttaccaaatagattccgatgttct

SEQ ID NO: 21900 - DNA, 97 bp, Homo sapiens
gtaaaggttccttaaattcccgaagggcaagaagttaaccaagtaaaacagcatcggaacaccagaaatttggagagcttgtaatgaccaaagaatc

SEQ ID NO: 21901 - DNA, 75 bp, Homo sapiens
tctccctgccctccttcaagattgacttctcggaatggaaggatgacgagctgcatcttcctcccgtgaggctgg

SEQ ID NO: 21902 - DNA, 100 bp, Homo sapiens
tgagactgatccttcactagtgcaacacggaggtagtcacgtttcccggaaatccgaacacttgagtgtcagaccacagactgcgttggaagaaaacgag

SEQ ID NO: 21903 - DNA, 75 bp, Homo sapiens
ggagcatgtagggtcccagacctttgtcaatccacatgtgtcatccttccaagcacccaccaaggctccggatgt

SEQ ID NO: 21904 - DNA, 100 bp, Homo sapiens
tggtttgatactgacctgtaaatcatcctttagggtttggattcaggatttgttcctagtgtccaagattttgataagaaacttacagaagctgatgctt

SEQ ID NO: 21905 - DNA, 87 bp, Homo sapiens
caacgctctgctgcccgctgtgagggaaaagtgttctaagaacggaagcatctgggctggatggaatttagcatcaagcagagtccc

SEQ ID NO: 21906 - DNA, 100 bp, Homo sapiens
tgaagctgcttctgatttttataggaagggagttgatttactcctagaaggtgttcaagatgccacttcaaatgaacaacaagagcttttctgtcagaag

SEQ ID NO: 21907 - DNA, 89 bp, Homo sapiens
cttgtgctcgttgtcgccgcggtcctgctgttgcagatataatttctacagtagaatttaatcattctggagaattactagcaacagga

SEQ ID NO: 21908 - DNA, 51 bp, Homo sapiens
cttcctcccttcgctcgcaccatgctgtgagccgtgagctttgaggcggtg

SEQ ID NO: 21909 - DNA, 100 bp, Homo sapiens
agatttgcatgcagcggttcattaaaatcgatggcaaggtccgaactgatataacctaccctgctggattcatgggtaatagcctgcagctggtgttttg

SEQ ID NO: 21910 - DNA, 98 bp, Homo sapiens
aagaagattatgacagattacgccccctatcctatccgcaaacagtgctatgacaagcgtctgtggcctcgaatggacctgagccggcggaagtcact

SEQ ID NO: 21911 - DNA, 97 bp, Homo sapiens
cactgaccctctgagccacagcagcaacagcagctcagagctccttttctgggcagtggagggactatagctccatcatctttttcttctcgaggac

SEQ ID NO: 21912 - DNA, 132 bp, Homo sapiens
gaggccgactccaccctggctggaggaactgggtgctcctgcccgctggcccctcgcgcgtgaggatctatctcaggcaatggcgaactgagcaataaggaatttgtttccatcatgaagcaacggctgatg

SEQ ID NO: 21913 - DNA, 82 bp, Homo sapiens
aaatatacgacacatccaggagtttattggagcgcagactgatggcgcaaaggcatgacctgcaggggaagctgcagctacg

SEQ ID NO: 21914 - DNA, 75 bp, Homo sapiens
gaaacacaaagccggctacgcgctgcgaggtctgaatttcctgctgctgttcacaaagatgctttttatctttaa

SEQ ID NO: 21915 - DNA, 100 bp, Homo sapiens
cagcagaatttgtatagagatgtgatgttggagaactacagaaacctggtctccctagcaggttacgggcaggacttgagtggcttcggacagggcttct

SEQ ID NO: 21916 - DNA, 51 bp, Homo sapiens
tgtcatccacttcgcccaacctccagggaactcaaagttggcattcccgtc

SEQ ID NO: 21917 - DNA, 111 bp, Homo sapiens
gcagcggttggaggcttcgcccggctttgcagcggggacttcggcggcggcgcctcaggcacctcggcccgggtgtggacactgccagcggctgcagccgacttggaatga

SEQ ID NO: 21918 - DNA, 83 bp, Homo sapiens
ctcaagaagaagaagttgcgaaggatccccaacggggaggccaacgtgaagaagtggctatggaccgccccctgcaggaagag

SEQ ID NO: 21919 - DNA, 75 bp, Homo sapiens
cagcgaggggctcggagaggtgctcggattctcgtagctgtgccgggtgttgctctcttgccattcgtggatgag

SEQ ID NO: 21920 - DNA, 100 bp, Homo sapiens
gatcttgcaagatggagggctgcaggtggtggaaaagcagaaccttagcaaagaggagctgatagcggagctgcagacatcggcaccatcatgcgcgtgg

SEQ ID NO: 21921 - DNA, 100 bp, Homo sapiens
tccggttccttggtgtcatccagccttagcaaaccagagggtggttctcttcccaaagtggaagccaaattcatcaattatgtgaagaattgcttccgga

SEQ ID NO: 21922 - DNA, 85 bp, Homo sapiens
acgccgtgacaactttcgtttccctctgagggaattgggaggtcggcggccccaaaaatattctctaagccgctttcatcatggg

SEQ ID NO: 21923 - DNA, 100 bp, Homo sapiens
tttattggcattatcgtcatccttgtgcagaaacttcagtctccagacatgggaggcaatgagtccagcatctacttagcgtctctacagccaacttgag

SEQ ID NO: 21924 - DNA, 75 bp, Homo sapiens
tgaatgtactcatgtagcaaatttctcagaaactggcgatggaatatgagaggagccctctggaaagaaaaggac

SEQ ID NO: 21925 - DNA, 100 bp, Homo sapiens
tggcacttcattggccacctacagaaacaaaatgtcaacaaattgatggcattcccatggtttggcatggacatcggtggaacgctggttaaattggtgt

SEQ ID NO: 21926 - DNA, 50 bp, Homo sapiens
gcccccttcagtcgcagcctcactctagtgaataccagggcctggtgaag

SEQ ID NO: 21927 - DNA, 74 bp, Homo sapiens
ctggtagcccccacccctctccgtccatggccccagatgacacttcagggagatacttcaggggattaccggaa

SEQ ID NO: 21928 - DNA, 97 bp, Homo sapiens
atatcttgaaaagctgccagaaagcaaatcagccggcaccaggagcagttcatccagatgctgaacgagccccctggggagctggcggacatctcag

SEQ ID NO: 21929 - DNA, 146 bp, Homo sapiens
gatttcgttcggcgtgttgagcagcgaaagatcctactggacatgtcagtgtcctttcacacccatgtgaaagagtttttcacagcatatggtcctgattatgtgctggaaatcacgccaagctgccggccagaccgcaatgagcc

SEQ ID NO: 21930 - DNA, 74 bp, Homo sapiens
cttagcagcgcgcggagaagaacggggagccaggccgacgcccccaacccatccctcatcccagagactgatgc

SEQ ID NO: 21931 - DNA, 100 bp, Homo sapiens
gctgagaggagaggcgcccccggggacgattatgctgggagacgaagctgccttgttagagcagaaggaacttctgagtaattggtatcatttcctagtg

SEQ ID NO: 21932 - DNA, 100 bp, Homo sapiens
ccaggagaaattcggtggactgagagatggctattatatccaaggaaaactcctccttaacttggtagatcatactgaagtggtcagagatttaactttt

SEQ ID NO: 21933 - DNA, 90 bp, Homo sapiens
ttcagaagctggtcgccgccggcaggtacctgtgccgggtggaggagatgcgccagtccctgagaattatcgcacagtgtctaaacaaga

SEQ ID NO: 21934 - DNA, 100 bp, Homo sapiens
actccattcaagagcagcattcataaatttccagcgccctcacaaagccaatgctgaggagatgaccaagtaccacagcgatgactacattaaattcttg

SEQ ID NO: 21935 - DNA, 98 bp, Homo sapiens
aagagagctctgtctggaccccaaggaaaactgggtgcagagggttgtggagaagtttttgaagaggcttgaagccacagtgcatggccagaaccagc

SEQ ID NO: 21936 - DNA, 100 bp, Homo sapiens
tggccctgctggaggagctctggggggagagcaaggacctgctgtttatcttgacagcgaagtacaatgcctgcatcctggagtataaacagagtggcga

SEQ ID NO: 21937 - DNA, 73 bp, Homo sapiens
gcttcagaagaccgaagcgttcgtatctggaaggtgcacattcaggttcccgagcacaaacatcaagataacg

SEQ ID NO: 21938 - DNA, 100 bp, Homo sapiens
ctgattttggctgacatggcagatgtctacaaattacttgttcagctgaaagtttctcatataatggcagcaaaggctgtagcaaatacaatgagaacat

SEQ ID NO: 21939 - DNA, 100 bp, Homo sapiens
ggggctggagcccacctgctttgagaagagcaatgacattgggggcctgtggaaattttcaccagtagacaagatttgactctggaggtgacgtctgagc

SEQ ID NO: 21940 - DNA, 82 bp, Homo sapiens
tggggtgatgatgctgaccctgagtcccagtgagaatctgaggacaccgatgaactcttcttggcttcctgggagccctatg

SEQ ID NO: 21941 - DNA, 75 bp, Homo sapiens
cgagtgaccgagaccgcggccgggaccgaggatgcggattatatcagtgccgatgagctggcccaagtggaacag

SEQ ID NO: 21942 - DNA, 83 bp, Homo sapiens
gacaaccaggcggagagagaaagtgaggctggtgttggtttgcaaaggggatgttcgtctaaccccagaagactttgctagag

SEQ ID NO: 21943 - DNA, 106 bp, Homo sapiens
cgcacggcttggcagcccagcgggacccagggagaaacaggggggcgagaagagaaacaggtgctggagaatctggtaaaagcaccattgtgaagcagatgaggat

SEQ ID NO: 21944 - DNA, 74 bp, Homo sapiens
gatttactttcccatccgtgactcctggaatgcagggtcacctctgtccagtcagccagtcttaatcaccgtcc

SEQ ID NO: 21945 - DNA, 99 bp, Homo sapiens
cttattcatcagtttgttgtgcttgtcaagatcaggtgcaggcctggggtagtctcctgtctggacagagaagagaaaaatgcaggacactggctcagt

SEQ ID NO: 21946 - DNA, 96 bp, Homo sapiens
ccggtaggagctgtaatcaattgtgctgacaacacagtttgcagaatttgatcagatcatgaagtctgaccctgaccacttagcagagttggttaa

SEQ ID NO: 21947 - DNA, 83 bp, Homo sapiens
cgaggccctcatgtaccacacggcataagggccatgtgttctgaaattattttgaggcaagaagttttgaaagatggtttcca

SEQ ID NO: 21948 - DNA, 96 bp, Homo sapiens
tcaggccagtcgcctccaggccaagagggatccttcacccgtgtctgatcctctggaccttctccatctacctggagtcagtggccatcttgccgc

SEQ ID NO: 21949 - DNA, 75 bp, Homo sapiens
cggagggtcttcatcgctgaggttcccataataggtctacatgttcaagtgcgtgtggcggtgctacagattgat

SEQ ID NO: 21950 - DNA, 95 bp, Homo sapiens
cgctacacctgtttggctacgaatcccagcggctcagacacaacatctgctgaggtgttcattgaagggaaacttcgtggcttgcatgacagcta

SEQ ID NO: 21951 - DNA, 48 bp, Homo sapiens
gaggccctcaggagtgtcaaggccgagcatcatggcagaacaggatgt

SEQ ID NO: 21952 - DNA, 100 bp, Homo sapiens
accggagcctggcgcagcctccctctattaccagaagccttgaagaaccaatgtactgatgtggggattaaagagggtccactttccccagcacaaacct

SEQ ID NO: 21953 - DNA, 100 bp, Homo sapiens
gggagaggaggggccgctgtccctgcggccagtgctggatgcggggacccagcgcagaagcagcgccagctgggagtgtccactcgccttccaccagcat

SEQ ID NO: 21954 - DNA, 95 bp, Homo sapiens
tgtaaagtgaccctcttagatggcaccgaatacagctgtgacctggaggcaagaaacctattggaattcgagacttaattaatgaagctttgcat

SEQ ID NO: 21955 - DNA, 97 bp, Homo sapiens
tgcagcggaggcggaagcaggactcggggcacttgggttctcattatgacttgctatgtcgccttgaatgttttgaaaaatggttacttatcactgt

SEQ ID NO: 21956 - DNA, 83 bp, Homo sapiens
gaaagatctaccttctggaagctactactacgtggtgcttggaaagaagagccgaatgcacataaggtcgccagcccaccctc

SEQ ID NO: 21957 - DNA, 80 bp, Homo sapiens
catcatcctcatcatcatcataggtgctggagaatctggtaaaagcaccattgtgaagcagatgaggatcctgcatgtta

SEQ ID NO: 21958 - DNA, 101 bp, Homo sapiens
tgggaattgctgaattagaactgcagaggttcctctacagcaagcctaatagtcccagtgaatattgtttttatgtggatagtgatatggtcaatgaattc

SEQ ID NO: 21959 - DNA, 75 bp, Homo sapiens
catcccagccatcacctggatttacctgttttctgggagcttcgaagttcttcctgtccaagatccggtcccacg

SEQ ID NO: 21960 - DNA, 100 bp, Homo sapiens
cttaaagccatcttccaggaagtgcatgtacaggagtctcgctctcagtcaaaatctccaacgggaactcctgctcgtgtaaaatcggagagcaggtcag

SEQ ID NO: 21961 - DNA, 50 bp, Homo sapiens
ccagcacagcaaattctccaaaatgtcagagatatgaaaatccatctgga

SEQ ID NO: 21962 - DNA, 100 bp, Homo sapiens
cgcggcggcaccatgcaggtcaccctgaagaccctccagcagcagaccttcaagatagacattgaccccgaggagacgatccaccgtgggcgccctgctg

SEQ ID NO: 21963 - DNA, 100 bp, Homo sapiens
caggaggaggaatgtgaagtagaaagtgaacagcagagaatttcaaaggaccttgctaatatctgtaagacggcagctacagcaggcatcattggctggg

SEQ ID NO: 21964 - DNA, 100 bp, Homo sapiens
tggcatccctagctccagccgcaatgccattaccagttcctacagctccactcgaggcatctcacagacagaagcattaaaatgcgtggctcaggctagc

SEQ ID NO: 21965 - DNA, 90 bp, Homo sapiens
cccgggcaacgatcggaactcggacacgagaagcgtctgcaccgtttgaacctgctgcagtctcatccccaggaagtgatgtacttccaa

SEQ ID NO: 21966 - DNA, 100 bp, Homo sapiens
atgttggtagaaaaagcaagagtttgttatatagcagttcgagaacttgtcttggacaattgcaaatcaaatgatggaaaaattgagggcttaacagctg

SEQ ID NO: 21967 - DNA, 83 bp, Homo sapiens
gaagaagagcatgatcggcatgtccaccaagacctgcctagagctggaacgttacctccagagcgagccctgctatgtttcag

SEQ ID NO: 21968 - DNA, 101 bp, Homo sapiens
tgcccacccagatgccagtagtgcccgccccacccgcatgctctttgtcactccccggcggcagcacgaaagtaccataacaagttgaaatcatcgcagaa

SEQ ID NO: 21969 - DNA, 75 bp, Homo sapiens
ggatgaaggtgaagaagatgaagatgatgatgaaggggaggaaggagaggaggatgaaattttgaacagatcacc

SEQ ID NO: 21970 - DNA, 75 bp, Homo sapiens
gttcagaccaagaattcactgcaacaaggcctccaactttaagaaggcaaacatggcatcaagttctcagcgaaa

SEQ ID NO: 21971 - DNA, 75 bp, Homo sapiens
tgagctgcgaggaaaatggcggcgggagaaaatgatgcatcctgttgccagcagtaatccagctttctgtgggcc

SEQ ID NO: 21972 - DNA, 130 bp, Homo sapiens
cgcaggttcttctctgtgtacctgcgcaggaagtcgcgctccaagagctccagcctgagccggctcgagaaaatggacccaagtggggtcaaagtgctggaaacagcagaggacatccaggagaggcggc

SEQ ID NO: 21973 - DNA, 75 bp, Homo sapiens
taccagatcaacgtcctccgggaccggagtcagaaccctccgcagagtaaaggctttgaagacaagattcccaaa

SEQ ID NO: 21974 - DNA, 90 bp, Homo sapiens
cagcttgtgagcaccctggagaagaagcagcgcaagtttgaccaggggccagcagcctcccccgatgggtcgtcagcaacgagggtgcct

SEQ ID NO: 21975 - DNA, 83 bp, Homo sapiens
ctggcgggtgccctggctaccatggaccatcctgctggtcagcactgcggctgacatgaagacatcttatccatcctcactgc

SEQ ID NO: 21976 - DNA, 90 bp, Homo sapiens
ccccttccacgtcatccgcatcaacaagatgttgtcctgtgctggggctgacagaagtcattgtattcaaagaagaataagcaagaaaga

SEQ ID NO: 21977 - DNA, 90 bp, Homo sapiens
ggcaaagagaagagaagacgacccaccattttgatcatgcctagtcacaggtggccaccgagtactaaattcacttgggaataaaagaaa

SEQ ID NO: 21978 - DNA, 50 bp, Homo sapiens
ggccctttcaacctgccaaggcttgctctttcaccatgcctggatcactt

SEQ ID NO: 21979 - DNA, 100 bp, Homo sapiens
ataatgtcatcagcctcgagtttagccacaccaggctggagaatatggtgcagaggccctccacggttccatgcctctgcagcggtgcctcatgtttgct

SEQ ID NO: 21980 - DNA, 100 bp, Homo sapiens
tggagatgatgcttgtaacttgacgagctttcgaccagctactctcacagtgacaaatttttttaagcaggaaaggaaacagattcattgtctgtctgag

SEQ ID NO: 21981 - DNA, 90 bp, Homo sapiens
gcgattaatgataaaatttcatggagaagaaggccttgactacggaggggttgccagaataggaaggagattcgcttgctttgcacagag

SEQ ID NO: 21982 - DNA, 82 bp, Homo sapiens
gtcgtccgttctctcaggctcccgttcagggtctcccttgatctgagaatggctacctctcgatatgagccagtggctgaaa

SEQ ID NO: 21983 - DNA, 101 bp, Homo sapiens
agacggcggcagcagcggcattcagacgcagaagaaacatgtccttcattcaccaggctgagctttcacagtgcagtggttggtacgggactaaatgtgag

SEQ ID NO: 21984 - DNA, 100 bp, Homo sapiens
tgcccactgaggagtccaacatcaccatgcaggatcagttcttaagagcagccccggtaactggaggaatgggagccgttttgatgagaaaaatgggctg

SEQ ID NO: 21985 - DNA, 75 bp, Homo sapiens
acaggacccgctttctaccattaagaatgatatggaacctagcaaagctgttccactgaatgcatctaagcaaga

SEQ ID NO: 21986 - DNA, 91 bp, Homo sapiens
ataaatctgttactttcctacagagatatccagaatttctagaagtggatgaatacccagaacatattaaaaacttggtgcagaaagagag

SEQ ID NO: 21987 - DNA, 82 bp, Homo sapiens
ggaagcaggactgcgccgcgtcttcctcaaggtcgcaatggaagaagagatcgccgcgctggtcattgacaatggctccggc

SEQ ID NO: 21988 - DNA, 75 bp, Homo sapiens
gacatgataacgtggatacttcagcttcttggacacttaatgattgttggcaagaaatgtgctgctgatctgggc

SEQ ID NO: 21989 - DNA, 100 bp, Homo sapiens
cagagttgctcatggaggtgcacggaaatgggaagaggcccagtccagagaggtgtgcctaccgcatgttgccgctgctgtttctgctgggacgtctgac

SEQ ID NO: 21990 - DNA, 100 bp, Homo sapiens
cggagcggagacgggagtattatgaaaagatcgtgtggaaaatgtaactatccaactggatttggaagcagaattccattttactcatctcataatgact

SEQ ID NO: 21991 - DNA, 51 bp, Homo sapiens
atgtcgatcttggacgagcctggagaggtcacttcatcctggcccaggtac

SEQ ID NO: 21992 - DNA, 100 bp, Homo sapiens
ctccatctggttcgaagtctcagcggtattctggtgcttatggtgcctcagaaaccaatagagccatggcgactccctctgctgccttcgaggcccttat

SEQ ID NO: 21993 - DNA, 90 bp, Homo sapiens
tggaaaaatgctggacaaattgagatgtcagaagaggccaagtgatggaaatagtggattaatggcaaaaaagcaaaagcgtaccccaaa

SEQ ID NO: 21994 - DNA, 83 bp, Homo sapiens
ctgagcttggcctcggcgtcctcggagaaattcggaataccaggaacttaacttacatagaccctgatgccctcaaagagctc

SEQ ID NO: 21995 - DNA, 98 bp, Homo sapiens
ggagaatgagctgcagaagatgacccgggggcagactctgttgacgttcagggatgtggccatagaattctccctggaggagtggaaatgcctggacc

SEQ ID NO: 21996 - DNA, 75 bp, Homo sapiens
tgatgggctatttgggtgatacccagtgcagtgaactgcaggtttggtgcacctcgatttggaggaagtagggca

SEQ ID NO: 21997 - DNA, 98 bp, Homo sapiens
atgagcattgcaatccctctgggagtcaccacatcagatacatcctactcagatatggctgctggatcagagtttcggtctaagtaccacccagatga

SEQ ID NO: 21998 - DNA, 89 bp, Homo sapiens
gagcccggcgcaggtgaccggcgcgcgggagcgctacggccccaacgaaactggcgatggaatatgagaggagccctctggaaagaaaa

SEQ ID NO: 21999 - DNA, 87 bp, Homo sapiens
gatgatccaccagcggttccatcctacacttggggggatatgagactttctactcggaatatcctgagtgttgcgtggatgtaaaac

SEQ ID NO: 22000 - DNA, 100 bp, Homo sapiens
ctggattgctgcaaggctgagggacgagaacgagatgcacaaagcagggtcatcagaagcctctcgattcaaaagatgataataccgaaaaacactgccc

SEQ ID NO: 22001 - DNA, 99 bp, Homo sapiens
tgtgtgcggctgttgcctggacgtttgtccaatccacgttgacatttgagggatcacagcgtgtggatgacgtagctttgccaaagacttagaagctaa

SEQ ID NO: 22002 - DNA, 100 bp, Homo sapiens
gtttgttgctattgttagaaagctatgacagagactccactttcaatgtgtttgtgggaaaaggacagctgatcacagggatggaccaggctcttgttgg

SEQ ID NO: 22003 - DNA, 75 bp, Homo sapiens
ctcctcgagaaaagattttctattacttcagcaacagtccttcaaagggttcttgatggtgctagacattcccca

SEQ ID NO: 22004 - DNA, 75 bp, Homo sapiens
gcagagcaagcgcggggaaccaaggagacgctcctggcactgcagggtatgagtattatagaacaattagaccct

SEQ ID NO: 22005 - DNA, 100 bp, Homo sapiens
ggcggcgcggcccggggtgtcagtgtggaggagactgaggtccctgtgcgttttattgcgacctgccggtgggaactttgtctccgagtcggagcagcat

SEQ ID NO: 22006 - DNA, 100 bp, Homo sapiens
ccacgagctgccacacggcctgcactctgcgctttgagctactgggctgtgagctgaacggaacagttgatacgccatctctacaagaaagaatacaagc

SEQ ID NO: 22007 - DNA, 92 bp, Homo sapiens
ctctctggcctttgtgggcaccaaaagtggcaagctgaagaagagctcagagttctacagagtcaccactgaacaatatcagaaagctgctg

SEQ ID NO: 22008 - DNA, 100 bp, Homo sapiens
gaagatccttcaaaattaaaagaggagcagcatggcatttcagtcactggtttgcagagtccaggtttctaagcatgaattgaggaacagaagaagcaga

SEQ ID NO: 22009 - DNA, 75 bp, Homo sapiens
atatgcccaggaagcggtgaagaaaggatccaccgcgcacctgaaattcttagaggttgtgcctatggacctgag

SEQ ID NO: 22010 - DNA, 90 bp, Homo sapiens
cgacccagggcccgcgggccaggagagcgctcggcgggaatgttccggagaatcacagcagctgccactaggctgttccgcagtgatggc

SEQ ID NO: 22011 - DNA, 87 bp, Homo sapiens
gcttgaggggctgcgtgaggcgcggaggcagacaactgggcggagttaatggaagtcaaccatgatgacaaagtggtcaccaccgaa

SEQ ID NO: 22012 - DNA, 75 bp, Homo sapiens
ctggtggccatcagcaagcccaggtctatggtggtttctcagtattcaagtctgctttctccaatgagtgtaaat

SEQ ID NO: 22013 - DNA, 100 bp, Homo sapiens
gacgcaagatggcggacagtgcggaactaaaggtacatgtgaagattttttggcagcttagcgtggaaaccattgatcaccctgctctcatttctacctg

SEQ ID NO: 22014 - DNA, 83 bp, Homo sapiens
tggggttggtgtgattagcttcgcagtctggaaagctttaggagttcacagtggtgaaaatgggatggaggattgtgtcatgg

SEQ ID NO: 22015 - DNA, 83 bp, Homo sapiens
gggaagccggcggaccgcgtcctgcgccggagcagggaaacagtgcttcttagtcctacgtcagcagcagtttaatgtccagg

SEQ ID NO: 22016 - DNA, 100 bp, Homo sapiens
ttcattgatgtactcctgctgagcaagtatccgtaccgtcctgacgttttgaaacaatacagatgccttcccttgtagcagttttcagcctcctctaccc

SEQ ID NO: 22017 - DNA, 98 bp, Homo sapiens
gaggcgatccgctggcgctagtctgaccctccgccaggcaaaaggaaggagcttggtttgatccgcaaacctgcctcgttcatgaccagcatctgcga

SEQ ID NO: 22018 - DNA, 100 bp, Homo sapiens
tcgttatgaaaggacagataccggtgagataacatcctacatcactgaagatgatgtggtctacagaccaggagaaagaacacccaggttaatgcctgat

SEQ ID NO: 22019 - DNA, 75 bp, Homo sapiens
ctgacaactgcctttactactttgagtataccacggtccacctaatcatcctgtgaaagtggtttctctatggaa

SEQ ID NO: 22020 - DNA, 74 bp, Homo sapiens
gaataccggcctgaaactggttcttgggtgtttaagatcacaagatttctgttgtgaaggatgtggctctgcca

SEQ ID NO: 22021 - DNA, 50 bp, Homo sapiens
cagctgtgaaaaaagccatttccgaagttgtggaagatatcaataagcgc

SEQ ID NO: 22022 - DNA, 82 bp, Homo sapiens
cgaaggtttttgctgcgccaacgcagtgaccgaaggctccgctcacgcccggtacctggagtagaacagaaaaattattatg

SEQ ID NO: 22023 - DNA, 75 bp, Homo sapiens
cgactacctacgctggatcctgtgtgtgtaggagatgttttgtggtctttgcaacccttgtggtcattgtggcct

SEQ ID NO: 22024 - DNA, 100 bp, Homo sapiens
gccctcctgccgtcgagatcgccgccgacgccgctgctgtggccgctgctgctgctgctgctcctggaaaccgagcagcccgacggccatggaggctgaa

SEQ ID NO: 22025 - DNA, 75 bp, Homo sapiens
ggggcagtccgcgagccccgcactctctcgatgagtcggagaagtcccggctctctaaatacgtacagattctgc

SEQ ID NO: 22026 - DNA, 100 bp, Homo sapiens
tcggtcctatacaaggagtatgctgaagatgacaacatctatcaacagaagatcaagcccaccttgggacaccttgactccaagcccagcagtaagtcca

SEQ ID NO: 22027 - DNA, 75 bp, Homo sapiens
acttgtaccttgtccccagcgacgccttgctaacaaaggggggtacatggtatggagtagacatcaacaacgagg

SEQ ID NO: 22028 - DNA, 100 bp, Homo sapiens
cgccagtacaagatcccagactggttcttgaacagacagaaggatgtaaaggatggaaaatacagccaggtgatgaaacttatcaggacatatttcgtga

SEQ ID NO: 22029 - DNA, 50 bp, Homo sapiens
aaaactggaaggcattctgaagtacacgtccacacacgttcctgttgggg

SEQ ID NO: 22030 - DNA, 100 bp, Homo sapiens
gttatgaggcagagcctaagagaactatggcaacatcaggtgactgtcccagaagtgaatcgcaggtaattatgaggaattagaaaactcaggagataca

SEQ ID NO: 22031 - DNA, 80 bp, Homo sapiens
accccgaggagccctgttccaaagcctcctggaccgtccaagaaacaatgcagatcttcgtgaagactctgactggtaag

SEQ ID NO: 22032 - DNA, 51 bp, Homo sapiens
gatgttaacaaatgtgagattgccagctggaatcacgcctttaagaatcag

SEQ ID NO: 22033 - DNA, 100 bp, Homo sapiens
cctcatctcatcagctcaagccatcctccctaccttagcctcccgattatctgggaccacaggattctttctactaatccagatacttgttgaagtgctg

SEQ ID NO: 22034 - DNA, 76 bp, Homo sapiens
cgacaagccgctggcagccgcggatctcaccgccgctcagggggcactatggcagacaaagttaggaggcagaggc

SEQ ID NO: 22035 - DNA, 99 bp, Homo sapiens
gaaaaagccaagagactgcttttgagtgacatttatttagcagctagtaacttcacttatttcaggctctttcgacgtgtagcagcagctttgccggga

SEQ ID NO: 22036 - DNA, 90 bp, Homo sapiens
ttgtaaagaaaacaatagtagtgggcaatgtgtccaaccaggtgattggtgaaaacactaaacaaccctgagcccagggccaacccctac

SEQ ID NO: 22037 - DNA, 75 bp, Homo sapiens
tagagtcttcctgcccaacaaacagaggacagtgttcctcagcactttgtttgcccccttaaactttgtcatgga

SEQ ID NO: 22038 - DNA, 100 bp, Homo sapiens
tgcaaggacagggcaggagaagaggaacctgcaaaggaagaaatgttggctatttggcgatgagaggtggtgaacagtgaccatactggtatacaacact

SEQ ID NO: 22039 - DNA, 100 bp, Homo sapiens
ttccttggggatacaaacacaccttgaaccagattgatgaagtaaaggtgtggcctcaggctcagcaacagcctcaccaaggactccatgaatatcaaag

SEQ ID NO: 22040 - DNA, 82 bp, Homo sapiens
ggtggttgttggcgtgtccctgcagcgaaggatcctgcatcaagatggtgctcatgtggaccagtggtgacgccttcaagac

SEQ ID NO: 22041 - DNA, 74 bp, Homo sapiens
gccgtggtggaaactttggtggaagaggaggcccaggcatatgcagatgacaacagcttattgttcatggagac

SEQ ID NO: 22042 - DNA, 100 bp, Homo sapiens
ccaagatgtctgacatggaggatgatttcatgtgcgatgatgaggaggactacgacctgatatgaagaagctgaagtccggaaaaaacttgaggaaaaag

SEQ ID NO: 22043 - DNA, 89 bp, Homo sapiens
gacctttgtgcgctcgcagaccacccaagggggtggcaccgagagccgaccagtccttcgctacagcaaggaacagaggccaaccacac

SEQ ID NO: 22044 - DNA, 82 bp, Homo sapiens
tttattccacgaggaggagtacctggaaattagtgctgttccctcgtcacaccaatgccagtgctcgagacaacaccatcaa

SEQ ID NO: 22045 - DNA, 90 bp, Homo sapiens
ctttttgaggatgaacttcatgatcatggagtttcaagcctgagtgtgaagattacattagatcagcaacagttcttcacagaggaagaa

SEQ ID NO: 22046 - DNA, 75 bp, Homo sapiens
cccttccgggaagccatagctctgcatgttgtgggttggagagaggatgcctttggcaacttccacggatcatgg

SEQ ID NO: 22047 - DNA, 82 bp, Homo sapiens
gtcaagcgaagccttgaaaaagctgccctgagacggtgtcccgccgaaaggtgtgagttcttgatacgaatgaaaggccaag

SEQ ID NO: 22048 - DNA, 75 bp, Homo sapiens
atttatgtcatcaagaagaatgacgatggaatgcttctagtcacaacagacacccttggccatgactttcatgtc

SEQ ID NO: 22049 - DNA, 100 bp, Homo sapiens
tcgagggtaactgccagaggtcccaggtggcccgagattccagcaagattatggaagagcatagctacatacaaaaggagctagatttacaaaatggtag

SEQ ID NO: 22050 - DNA, 100 bp, Homo sapiens
atattccgtggtgtatctgtacagcagtttcctcatccctgcagctgtgtttgaacaggaactcaacagaggcaattattatcccgactgcaaatcgacc

SEQ ID NO: 22051 - DNA, 100 bp, Homo sapiens
tgacagcgacttggcaatatttattgctgtcattattctcagtggaggttccagtgggatgggagcttatcacggaaaacatagttttgatactttttct

SEQ ID NO: 22052 - DNA, 82 bp, Homo sapiens
tcccggacggtacttctgccactgctgctccgtggagatcgtcccgcgcctgccgaacatccagtcatggataaaaatgagc

SEQ ID NO: 22053 - DNA, 74 bp, Homo sapiens
accagagcaccccctgggacagcgccacattcgccggattcaagtccagcatccagcggccaagtccatgatcg

SEQ ID NO: 22054 - DNA, 75 bp, Homo sapiens
gcatgcggcagctggcccagacgggcagcttgggacggttttaaaatcaaagatgggaaaatcggagaaaattgc

SEQ ID NO: 22055 - DNA, 90 bp, Homo sapiens
gaggctgctgttctaactcgctcccaggcttcagtgtcatttgaggacgtgactgtggacttcagcaaggaggagtggcagcacttggac

SEQ ID NO: 22056 - DNA, 90 bp, Homo sapiens
gaggcctttgactggtccccagtggtgacctatgtgtgtgatcttgaagggaacaggactatctcagcaaaaactcatcatcaggctgtt

SEQ ID NO: 22057 - DNA, 75 bp, Homo sapiens
tcatgtattgaagaattccaatcccagttcatttttgagtctaccatggctcaagaatctcccaaaaattcagca

SEQ ID NO: 22058 - DNA, 96 bp, Homo sapiens
cctcattggttgagtcagtgagttgcgtgtctgcaagagagcatcctatctgacattgtggatatcaagcctgccaatatggaagagctaacagag

SEQ ID NO: 22059 - DNA, 100 bp, Homo sapiens
gaacggcatgtcatctttgccaggactgatgcagatgcccctcctccaccagaggactgggaggagcatgtcaacaggtgctggcccaggccctgactcc

SEQ ID NO: 22060 - DNA, 50 bp, Homo sapiens
aagatccagtagctggagatataaaagtcaagtatcatcacgtgggcaaa

SEQ ID NO: 22061 - DNA, 80 bp, Homo sapiens
agaagaagttgcgaaggatccccaacggggaggccaacgtgaagaagattttttatcaagcagaaatgcatcgaacaacg

SEQ ID NO: 22062 - DNA, 83 bp, Homo sapiens
ggaggtggcagccatctccttctcgagccctgctgcagagcctccggctgggatagccgccccccgtgggggcgatgcggaca

SEQ ID NO: 22063 - DNA, 83 bp, Homo sapiens
caaaaatccagaagtacaagcagtctggtgacttaagagattaaaattaatttggttgctgttggttctgaacaaataatgag

SEQ ID NO: 22064 - DNA, 75 bp, Homo sapiens
gcacacattactctgcgtacaaaacgattgaacaccagattgcagttcaggacgacatagacagcctaaacccag

SEQ ID NO: 22065 - DNA, 75 bp, Homo sapiens
tttcctgcttttggtttccctggcaggggttgaactgtggagtgtgtgggtgcgttgtagaagacaagaactcaa

SEQ ID NO: 22066 - DNA, 83 bp, Homo sapiens
ggccaccgcctccagcttgccaccaaagacctgcgactttgctcagggactggtgattgcagctggaagtgcccatgaccgag

SEQ ID NO: 22067 - DNA, 50 bp, Homo sapiens
tgctgaccttgtgtgtcactgcgggtgaaggacttaactaagtacttgga

SEQ ID NO: 22068 - DNA, 90 bp, Homo sapiens
cacaccagacctacggagggagctggaaattcctgacgttcattgatctggatatctatagagaaatggggtttggtcactatgaagaag

SEQ ID NO: 22069 - DNA, 51 bp, Homo sapiens
ggaaaacttgctgcggttgctcaagagtgtctataaatgtgatttcctgaa

SEQ ID NO: 22070 - DNA, 100 bp, Homo sapiens
ggacttccaatatgagaatgccaacatgtggttcaagaaccttgacaagctcatccggctggtaaatgcgcaggtgatgttctgcaccctgaacacccac

SEQ ID NO: 22071 - DNA, 52 bp, Homo sapiens
actggacgcatttttatacataggatgcccgaatgctagcgagccagaacat

SEQ ID NO: 22072 - DNA, 75 bp, Homo sapiens
aagagctgacacccctatcagaggagagattaaacagattctagaaaatgaacttcagatacctgtgtccaaaat

SEQ ID NO: 22073 - DNA, 82 bp, Homo sapiens
ccctggagcctcagttggaagcagccgatccagcctgcggagcctgtggggcagagtatggtgtttgcgaaaacttgcggaa

SEQ ID NO: 22074 - DNA, 100 bp, Homo sapiens
gcggcaatgtgagctacgtgaagacgtctccatttacgctacttcctgaagaataaggtcagccctgatttgtgcaatgaggacggactcacagccctac

SEQ ID NO: 22075 - DNA, 75 bp, Homo sapiens
tctatagtttccagatggctctaacctcagtggattaagttgtcatcattctgggaagaaaaaaaaaacattaat

SEQ ID NO: 22076 - DNA, 98 bp, Homo sapiens
tgttcaaggacaaaggtggcccagaattttccagtgccctgaaaaataattctctctggcccaaaatccgggttccattaaaagttgtgaggactgct

SEQ ID NO: 22077 - DNA, 90 bp, Homo sapiens
ctgagctcgaggcccggctggcgcacctgggcgtgcagatatgggacacagcaggacaggaacggttccagtctctcggtgtggccttct

SEQ ID NO: 22078 - DNA, 75 bp, Homo sapiens
gttttgccagtcacctctcaactgtgtgccaaagtatcgtcagtgaagcaggagcatcaatctacagtgtcagcc

SEQ ID NO: 22079 - DNA, 100 bp, Homo sapiens
gaaccatgtctccatccccgaccgccctcttctgtcttggatttctctctgatcaaacggacagttcaggactcagaatctaaggatgaatgttcaccgt

SEQ ID NO: 22080 - DNA, 100 bp, Homo sapiens
tgatgggatagcgttgcaaatccttaaaagagtcttaacgcctcgtcacgtgttcaatatgctaaagaagtatgtccgcgcagaacagaaggacagacag

SEQ ID NO: 22081 - DNA, 74 bp, Homo sapiens
gcctctgcctggcgttgctttgcctgggcggtgcggacaagcgcctgcggtggaacggcacatgtgtgatgggg

SEQ ID NO: 22082 - DNA, 75 bp, Homo sapiens
gtgagcactgggggtggtgccagtttggagctcctggaaggttgagggcaagaactccatcatcctgaccttcag

SEQ ID NO: 22083 - DNA, 60 bp, Homo sapiens
agtgagcaagtgaagaccaatattcaacaggcatttccctgaaacctgggctcttgaaga

SEQ ID NO: 22084 - DNA, 75 bp, Homo sapiens
gaagacagcggagaggagagcggtgcggaggactgagcccagaatgtgaccgtggacgaggtcatcggcgcctac

SEQ ID NO: 22085 - DNA, 99 bp, Homo sapiens
ggatcaaggagcaagtagtgggaaaatgacaccatctactgggtggacatgggcctgagcacgatcagccgggccaagcgggaccagacgtggcgtgaa

SEQ ID NO: 22086 - DNA, 106 bp, Homo sapiens
atattcctaaggaattgatttcccttcacattaaagaagatttgtgcagtagagatcagagagttgtgacatctgaggaccaagttcaagaagggactaaagtgct

SEQ ID NO: 22087 - DNA, 80 bp, Homo sapiens
cttggagaagaacacaccagatccatcggcccccgtgagggtgcggaggcagcaaatgttacaggtcctggtggtgttcc

SEQ ID NO: 22088 - DNA, 74 bp, Homo sapiens
gtggactccttcggcagtccacccaccgccgccgcctcccaggacttgagcagccccagccagtacgacacagg

SEQ ID NO: 22089 - DNA, 83 bp, Homo sapiens
ctgatcatcctgctgggcttcgtccagatcgggaagggcactgccgccctgcactgtagcagatgcctaaataaagtgtggag

SEQ ID NO: 22090 - DNA, 102 bp, Homo sapiens
cgccatgctccacttcagcttctttgtcaccataggagacatggacgaagccttcaaatccatcaagctcatcaaaagaacccttaggagaaatcttgagag

SEQ ID NO: 22091 - DNA, 100 bp, Homo sapiens
aagaggaacacagaactggagacccttttggctaaactcatccaaacctgtcaacatgttgaagttgcagatatcaagaaagtcaacaacttcatcagag

SEQ ID NO: 22092 - DNA, 100 bp, Homo sapiens
gctcaaaatgacaactccaagctacagattccaatacctcattccctaagacttcaccatgagtacaggtttgcagattccgccagcagcacagcaagct

SEQ ID NO: 22093 - DNA, 100 bp, Homo sapiens
ctcgtggcgagagaaggaaaatgcgcgtcccgggcgcgggcccggcagccatggcggtggaaggaggaatgaaatgtgtgaagttcttgctctacgtcct

SEQ ID NO: 22094 - DNA, 83 bp, Homo sapiens
ggcaaaaatcccatctaccgcaactctcagttcgagagtaaagactacatgaggaaataattgacttttataacttcatgtcc

SEQ ID NO: 22095 - DNA, 100 bp, Homo sapiens
ccggtgttcccgcgctttatcaagattatcgagcacagacgcagtcttcagcaaggaagtgctgggaacgccctggagtgaacccaggaagatgcctgca

SEQ ID NO: 22096 - DNA, 100 bp, Homo sapiens
gttttgaccaatccagtgtgcacagaggtaggagaaaaaattgcccttagccgaagagttgaaaaacactggcggagctgctgctcaagaggtcatcaaa

SEQ ID NO: 22097 - DNA, 87 bp, Homo sapiens
agtataatccagcaggcaaccaaagatggccaggccatgttatgggatctcaacgaaggcaaacacctttacacgctagatggtggg

SEQ ID NO: 22098 - DNA, 82 bp, Homo sapiens
aaggatggtccagaattcacttttactaccccaaagtttgtacctggagtagaacagaaaaattattatgtctgtgttccct

SEQ ID NO: 22099 - DNA, 75 bp, Homo sapiens
tgaggatgatggtagattgccaggacttggcgatgtacatcaatgaagttaaacgggacaaggagaccttgagga

SEQ ID NO: 22100 - DNA, 75 bp, Homo sapiens
gttccaatgagacagggcacaccaaactccatctggttccaggcagagggtggttatgtgctgtaccctcagatc

SEQ ID NO: 22101 - DNA, 100 bp, Homo sapiens
ccctgaagcccaccggtccccaacgcatcatgccagggagccaagcgtcctgcccggcccaaatccagtttgctgatgacatgcaggagttcaccaaatt

SEQ ID NO: 22102 - DNA, 120 bp, Homo sapiens
cgtcttgcactaccagcaggctctcaccagcgcacagttgcagcaacacgccgcgttcattccaacaggtatgagaaagtgccagtcatcttggttgggaacaaagtggacctggaaagt

SEQ ID NO: 22103 - DNA, 83 bp, Homo sapiens
tcagaagaacttgtacagagatgtgatgttggagaactatagcaatctggttttcttggacagtgggagtagctcaccgttac

SEQ ID NO: 22104 - DNA, 87 bp, Homo sapiens
tccgtgggcagcattggcgaccagcgcttcacgattgggaaaatgaggtacgttagtgttcgcgattttaaaggcaaagtgctaatt

SEQ ID NO: 22105 - DNA, 83 bp, Homo sapiens
gaagaccattcagatgggatctttccggatcaatccagatggcagccagtcagtggtggagaaatggactcggcactactgcg

SEQ ID NO: 22106 - DNA, 83 bp, Homo sapiens
gacccattgcacttcagtatctcaggcggcaccctgtccccgaggaggggaccatgacacattgagaagctgatgtctcctcg

SEQ ID NO: 22107 - DNA, 83 bp, Homo sapiens
gaggacacccggacacctggaagctgggaaatgcacttgcacctcctgcgccgccgccccccatccaaggatatgccttcaag

SEQ ID NO: 22108 - DNA, 100 bp, Homo sapiens
taggtaccatccctgacctggtcctcatgctgccgaggctgttgctgttgatctgtgggagaaacacatctcatctttcctaaaaaagcttcagtggagc

SEQ ID NO: 22109 - DNA, 98 bp, Homo sapiens
ccgaaacctagccccggacgagaagcgcagcaacgtgcggtgggaccacgagagcgtcattgctagaatcgtggatggaagcagattcactgagttca

SEQ ID NO: 22110 - DNA, 75 bp, Homo sapiens
cctacggtgtcccaaatcaatgcggagttcgtgacccagtcccatgaagctgaggtcttgaagcagctggctgag

SEQ ID NO: 22111 - DNA, 80 bp, Homo sapiens
ttctacaaatattggagaaaacgcctaataggttgaagaagattcgaaactggaggctatgtggtggtaatgcctaaaaa

SEQ ID NO: 22112 - DNA, 75 bp, Homo sapiens
ctgaattccaagaaatgagtctcttggaaagggaaaggaaacagattcattgtctgtctgaggatgagttaagtt

SEQ ID NO: 22113 - DNA, 90 bp, Homo sapiens
gcgggagctcgggccgaggcttgaggagaccaagtgggaggtgtgtgagatcatcgagagccccctctttctgaagttgaaccctatgac

SEQ ID NO: 22114 - DNA, 83 bp, Homo sapiens
cgacccagggcccgcgggccaggagagcgctcggcggccaacaagtcccaaatttggaaaagctgactcatatgaaaagctgg

SEQ ID NO: 22115 - DNA, 51 bp, Homo sapiens
aataagtcagatgactttctgtttgactatattgtggagtatgactatgat

SEQ ID NO: 22116 - DNA, 50 bp, Homo sapiens
cagatgtgcaacaaagtgcgatggttatcaatactctggctgaccatcat

SEQ ID NO: 22117 - DNA, 98 bp, Homo sapiens
accttactcggaagattggctttgaggcagtcatgaggattcggtgcaccaaagtggatccaaacttctacagcaaaaacttacttcttttaggaaag

SEQ ID NO: 22118 - DNA, 96 bp, Homo sapiens
ctccagtctctaacgttttagaaaatcataacaagcggttctctaccctgtaaagacctgaaagatgtctgaaaattccagtgacagtgattcatc

SEQ ID NO: 22119 - DNA, 50 bp, Homo sapiens
ggctagaacaatcattacggatcgaaggcgaacgctgttggagaagctgt

SEQ ID NO: 22120 - DNA, 100 bp, Homo sapiens
gtgaagcaagaaagcatttaaaagaagagacacaattacgattggtggaggaagctaaacaagaattacaggaagttgttgaattcttgaaaaatccaca

SEQ ID NO: 22121 - DNA, 76 bp, Homo sapiens
atcatctgtaaacctgataacactgcatgaaatgttagagttttcagcattgcaaataacaatctcagctactggg

SEQ ID NO: 22122 - DNA, 105 bp, Homo sapiens
tcagaagcatgtgtcttccccagctctgcagccacatactatccgtttgttcaggaaccaccagtgacagaatcgtaaagctgaaaattgaaatcatgaaagtag

SEQ ID NO: 22123 - DNA, 76 bp, Homo sapiens
ctgggtttgaattgtgcggtttcagctttgccactggctgtgtggtgaatgggggagacgtgcggtgctcctgcaa

SEQ ID NO: 22124 - DNA, 83 bp, Homo sapiens
gggcgcccttcccctggatacggtcactttctacaagatggacggggagtccgaggaggagcaggagtccgtggacaccgggg

SEQ ID NO: 22125 - DNA, 101 bp, Homo sapiens
ctgtgggcagaaaaatacaaagttggaagcaataccaaacagtggcatggaccacacccagcggaaaacatacatatgatagttgagaaagacacatattc

SEQ ID NO: 22126 - DNA, 51 bp, Homo sapiens
gctccgtggtgctctatgaccccctggcattgggatcccgtggcagttgca

SEQ ID NO: 22127 - DNA, 99 bp, Homo sapiens
agaatttgagtggcctaagaatatgatgccgtctagttttgccatgaagacttcacagagaatgcagttgtcttgacttcaggtctgtctgttctgttg

SEQ ID NO: 22128 - DNA, 100 bp, Homo sapiens
ctggcggcggcgggtcaggagcagccgcagcgacggcggcgacagcaggtgagaagccctaccactgcaactgggacggctgcggctggaagtttgcgcg

SEQ ID NO: 22129 - DNA, 82 bp, Homo sapiens
agcacttctcctcgacaccggtgctgttctcggaatcctatctagagcttacagctaccagagattcactgactgctataag

SEQ ID NO: 22130 - DNA, 98 bp, Homo sapiens
gccgctgggcctgcaggtctctgtcgagcagcggacgccggtctctgttccgcaggatgagctgagctcaatgtgcagcaatggatgacgacagcctg

SEQ ID NO: 22131 - DNA, 50 bp, Homo sapiens
gctcacctgtgcgggatggaacaaaagttttcaaaccagaagaactacga

SEQ ID NO: 22132 - DNA, 50 bp, Homo sapiens
gaagacagccatcatttgaaagaatgagaagactttgggacatttcatga

SEQ ID NO: 22133 - DNA, 50 bp, Homo sapiens
ctcgtggccagcttggccaagatcgcggtggtgtctgtggatgggcggcc

SEQ ID NO: 22134 - DNA, 98 bp, Homo sapiens
aaagtttggctgcgcgggttcccccgaagttcaggaggatcccttttcccccagaaattactcaatgctgaaacctctcaaagtggtattagagacgc

SEQ ID NO: 22135 - DNA, 98 bp, Homo sapiens
ttggccgcgcggcctcgggaacggcccaggtccccgcccgcaggtcccgggcaggatgaactggacctcacagacaaacacagagaagccatgtttgc

SEQ ID NO: 22136 - DNA, 100 bp, Homo sapiens
aagagtgagcgagcggacccgcgatggctgataggaagatgtcttcaggaaatgctaaaattgggcaccctgcccccaacttcaaagccacagctgttat

SEQ ID NO: 22137 - DNA, 100 bp, Homo sapiens
cggaagtaccgcgagcaaggagcgcggaatcggggagcgtccggagctagctggatcctctaggcagacttgcacacctacccctgtggagcgtgcaccc

SEQ ID NO: 22138 - DNA, 98 bp, Homo sapiens
ttcctaaaccagaagaggaggttgcccagaagaaaaagatcatccagcccctcttagaacttgaccaaaatagaagtaaattaaagttgtacattgga

SEQ ID NO: 22139 - DNA, 100 bp, Homo sapiens
gccctctcgcttcctgacgctcctggcgcatctggtggtcgtcatcaccttattctggtcccggttgagtgatgtctcttccccaagatcaataacttcg

SEQ ID NO: 22140 - DNA, 101 bp, Homo sapiens
ggtgatgtcaaagagaactatcttgaaacatttatttccagtccaaagatttttcgggattgtcaccctacgaaaggaagagactgaagaacatatcagaa

SEQ ID NO: 22141 - DNA, 75 bp, Homo sapiens
gcatttggactttatccagtcacacctgcggaggttctgccttcagttggcctggacaatgctggaaagacaacc

SEQ ID NO: 22142 - DNA, 100 bp, Homo sapiens
gggacatccgccatgctccaaacaacttggcctcagcatatagcactttctacattgtgggtttaatattatcaatgcagataccttttgtgggattcca

SEQ ID NO: 22143 - DNA, 100 bp, Homo sapiens
gttatgtgcagtcctttacagcaatcacaacagaatgggccgccacaaaccccatttggccctcaaacagatagaaaactacctgctacgaaatcacgag

SEQ ID NO: 22144 - DNA, 75 bp, Homo sapiens
ctgaggagtcgccgccgccccgagtcccggacaacgtctgacatgagccgagtgttctgctcacactgtgggaac

SEQ ID NO: 22145 - DNA, 101 bp, Homo sapiens
ggaagattccagaagtgaagaagtcgaggagcagaccacggtggcttcgttaggagacggaagaaatagccatggagggtgcggaaggggaagccgaggag

SEQ ID NO: 22146 - DNA, 75 bp, Homo sapiens
tgccgtccatggagccatgcgtgtgctgacagcaacatcggcaagtatagacagaagcgctcccttagaaatagg

SEQ ID NO: 22147 - DNA, 118 bp, Homo sapiens
ctggccaacctgctgctggaggaggataacaagttttgtgcagattgccagtctaaaggtggtccattatggctgacatgcaaaatctggtagaaagattggagagggcagtgggccg

SEQ ID NO: 22148 - DNA, 96 bp, Homo sapiens
gttataagaccatttatttctttggagacaaaactatgccaaaatgagccgtcagactgctacagcattacctaccggtacctcgaagtgtccacc

SEQ ID NO: 22149 - DNA, 98 bp, Homo sapiens
cagcctcccaagtagttgggattacaggaaaactcctccttaacttggtagatcatactgaagtggtcagagatttaacttttgctccagatggaagc

SEQ ID NO: 22150 - DNA, 100 bp, Homo sapiens
agtgtcctacgtaaaggagtattggaatgatgtgttcagcttttcgctgtggcctgcagtttttaggcaacattgcctcacggaatgaagattcccagtc

SEQ ID NO: 22151 - DNA, 100 bp, Homo sapiens
ttacatgcatgagtgcttcgagagggtgttctgcgagctcaagtggagaaaagaggatggagctgtagttacaccctccagacctttaggggacacccta

SEQ ID NO: 22152 - DNA, 100 bp, Homo sapiens
gggagatccacagctaagacgccaggacccactggaagcctagaaatgacactggtgaagacatttgaagtatgtgatcttcctgttcgagctgcaaagt

SEQ ID NO: 22153 - DNA, 127 bp, Homo sapiens
ggacgggaaagacctgctcgccttggatgccttttccagtgactccattccactctttgaagccttcagaagataattattcggaaaagaagtgttggtcttgtggcttcgtttattagagacacag

SEQ ID NO: 22154 - DNA, 82 bp, Homo sapiens
gcgggagctggacggcgagcgcgagcggcgcgagaaagaatcggtgagtttcaaggatgtggctgtggacttcacccaggag

SEQ ID NO: 22155 - DNA, 100 bp, Homo sapiens
gccacctgctgcatgtcctgaaagtagacttaggctgcacatcggaggaaaactcgagaaagcatgggattatggcaaccacagaatctcagtagtacaa

SEQ ID NO: 22156 - DNA, 98 bp, Homo sapiens
cccggacatctgctttatatttctctcagaccattcccatcagtgagcattacagttctgccggaggcctctccagattgtgatgcactgggagcaag

SEQ ID NO: 22157 - DNA, 83 bp, Homo sapiens
ctccactttcgccagcccgtgccgcgagcgcggcctgcaggagagatggctccgaagtcaaaaaagaaggggcaccccgggag

SEQ ID NO: 22158 - DNA, 90 bp, Homo sapiens
ccgcggtccgccctcccgtgcgtccgtctgccggtgagcccgcccgcccgccggcccagctatggcattgctggttctaccaacgtgaca

SEQ ID NO: 22159 - DNA, 98 bp, Homo sapiens
gtgaatatggccgtgatcgtgcccaaagaggagggcgtcatcagcgtctccgaggacagccagaactgtgtagatgcgtaccccactttcctcgctgt

SEQ ID NO: 22160 - DNA, 88 bp, Homo sapiens
gctttttgaattactttgttatgcagaaagtgttttcctttggaatatggataaatacaccatgatacggaaactagaaggacatcac

SEQ ID NO: 22161 - DNA, 100 bp, Homo sapiens
ggagatggtgggcttcctccccgccaccaagaagcatgagaaagatcagtctaaagaaaaggagaagaaagtgaaaaaaacaattccttcctgggctacc

SEQ ID NO: 22162 - DNA, 51 bp, Homo sapiens
gctgcagatacgagtggacaatgtttgaaagatgtatggtgatcttgaaac

SEQ ID NO: 22163 - DNA, 75 bp, Homo sapiens
caacccctacaacttattcctgtccggagacagcctaaggtcctcactgggctttgtggccctcgtgctgagcac

SEQ ID NO: 22164 - DNA, 100 bp, Homo sapiens
ggcacttggagtccggacatctgaaacttgtgctcaggagctgtcccaggaaatcaaggcttttctgactggcgtagaccccattctgggccaccaactc

SEQ ID NO: 22165 - DNA, 96 bp, Homo sapiens
tgagtgaccatgcagcaaaagaaggagggtcctctcagtgattaagtgggacttctcctcttgcatgcctgaatgcaatgcttcacacaaactcca

SEQ ID NO: 22166 - DNA, 58 bp, Homo sapiens
ctggccctggactacctctgcagattatcaaacagtgccaagtgattttgaatttttt

SEQ ID NO: 22167 - DNA, 100 bp, Homo sapiens
gggcaagacgggttcagttcgtcatggggctgtttggaaagacccaggagaagccgcccaaagaactgattgaaaaggccaaacctattaaatgtggaac

SEQ ID NO: 22168 - DNA, 100 bp, Homo sapiens
ccccctgcacctcctagtctggaaaaacgactaccggcagctcgagaaggagctgcagggccaggctctgacgcccgctctgcggcttcggtgtttgaac

SEQ ID NO: 22169 - DNA, 100 bp, Homo sapiens
tgaatggcaactgctctgacactgaggtggaaaggctgcagaggatcctggaaggggaagggaatcaagaagcagggaaggaactgaaagctggagagct

SEQ ID NO: 22170 - DNA, 82 bp, Homo sapiens
ctttctgacaacaaactcgaagactggcatgaggaacttccagcaccattacttgatgataaatgtaaaaaggaatttgatg

SEQ ID NO: 22171 - DNA, 100 bp, Homo sapiens
gagagaggagagaaaatgtccactggacctctgtccagccatcgtcagccagtggcagcaggagtccaaagagaaggtggtgtccctcctgctgtcccac

SEQ ID NO: 22172 - DNA, 83 bp, Homo sapiens
cgacacacaaagaatagagttgagcctgtgggacacttcgggccaagatcaaggctcgagatcttcgcgggaagaagaaggag

SEQ ID NO: 22173 - DNA, 90 bp, Homo sapiens
gttggatttcggagagggcgagggccaccacctgcagcacatcagcgaccgcgagatgcccgaagtggttccccctggaagtcctgggcc

SEQ ID NO: 22174 - DNA, 96 bp, Homo sapiens
cggggtagtttgtagggacgcagctctccacgtgcgcgactgcgaggctggacgctacgggctcctggaaaggagatgcacgaaggagagagagtg

SEQ ID NO: 22175 - DNA, 98 bp, Homo sapiens
gatcacacgcgccggctgctgctactactaccactttgggctgatggcaactgaccatcatcaaagaggggatgctgaccaaacagaacaattcattc

SEQ ID NO: 22176 - DNA, 101 bp, Homo sapiens
aagctcgaaggcttggtggccggggccagtccaacacggatgataccatcggggaccttaagaagctgattgcagcccaaactggtacccgttggaacaag

SEQ ID NO: 22177 - DNA, 75 bp, Homo sapiens
tactactctgaggggcttagaaattaacagggacccccgcagcaaacacaagtttaagatccacacgtactccag

SEQ ID NO: 22178 - DNA, 75 bp, Homo sapiens
ctgccatccagcagcgagccattctaccttgtatcaagggttgctacgatttctgcaaacggagacaaagaaatt

SEQ ID NO: 22179 - DNA, 100 bp, Homo sapiens
agctggaggccaagcagaaggcccggaagaaagaggagcggcagagcctgctggaggcagaggagtcgtttgaatttgtggtggtgtccctcactgggca

SEQ ID NO: 22180 - DNA, 98 bp, Homo sapiens
ttccccgcaaatgactggtcacgcgggactgaacaccgcacaggcaggaggcatggccaaggtttgcctgcaatgagatttcattctctacatttaaa

SEQ ID NO: 22181 - DNA, 75 bp, Homo sapiens
tcatcaatgctgaggagcagacgagtggccaggcttctggggctgactcaactgtgaaaatgcctcgtgtaaaag

SEQ ID NO: 22182 - DNA, 100 bp, Homo sapiens
caggcttgtccatctgtaacttcattaagttatataagtttggagagacagtttctattgttttttggacagacacttggagaccagaaagcttctttga

SEQ ID NO: 22183 - DNA, 100 bp, Homo sapiens
ctgacagatcggaacctgaatctggaagagaaagtgcgcgagttgagggagactgtgggagacttggaagctaaagccaagcaggaaaaggtgtctgctc

SEQ ID NO: 22184 - DNA, 98 bp, Homo sapiens
ttgaggcccttcttgtgtatctggagaaaatagaggtactccaaagattcaggtttactcacgtcatccagcagagaatggaaagtcaaatttcctga

SEQ ID NO: 22185 - DNA, 97 bp, Homo sapiens
acgagctggcgaagatgggcgacccggatctcctggaagtgttggcggaggaaggaaatgggtcctgatgaatatgaagagatggaagaagaggagg

SEQ ID NO: 22186 - DNA, 95 bp, Homo sapiens
cagcgtctccttcccgttctccaggttctcacaccatgcaggtgatgtatggctgcgacgtggggcccgacgggcgcttcctccgcgggtatgaa

SEQ ID NO: 22187 - DNA, 100 bp, Homo sapiens
gatcgccacctaccgcagcctgctcgagggccaggacgccaagctgacagcgtttgtcacaaaatgctttggccaagctcagaaattcatcttcattgat

SEQ ID NO: 22188 - DNA, 90 bp, Homo sapiens
caggcctagccctaggggtcaaaatgtggggcctgggccccctgcccagacaggttatcaatagtctggctgtctatcgtcatcgtgaga

SEQ ID NO: 22189 - DNA, 99 bp, Homo sapiens
gggtactttgttggaccctcgtcaatctctttcgaagccattcagtcctcaatctccttttccttggctacccgtggattttatccaaagccaagaaag

SEQ ID NO: 22190 - DNA, 101 bp, Homo sapiens
gagagaggcaccgggatcgtgaccgagaccgtgaccgagagcgtgaccgagagcgcgaatatcgtcatcgttagaaggtcctctggtgatgttcttgagac

SEQ ID NO: 22191 - DNA, 82 bp, Homo sapiens
ggaaacaagctcctacttccagaaaaagtgctcctgggactccaggataccaggaaaatgtttataggaggccttagctggg

SEQ ID NO: 22192 - DNA, 107 bp, Homo sapiens
gatgagcacctggacacccctaaaccatcagctattgaatgaccggatatttgttcagtcgaatcaaggtgaagaggaaacaacaagaatttcatattttactttta

SEQ ID NO: 22193 - DNA, 99 bp, Homo sapiens
tctattactgtattatcaccaccccagatgacctggaggggaaaaatgaggactcagtggaactgctggtgttggtgtgtggattctcatgccatataa

SEQ ID NO: 22194 - DNA, 50 bp, Homo sapiens
agatagagcagctcctggatcccagccgcttctctgtggacattgactcg

SEQ ID NO: 22195 - DNA, 100 bp, Homo sapiens
caccagtgccctggatgcaaacagccagttacaggtaaccaatggtcaaggtgaaaataagatgaaaaatttacctgtgcctgtctatctcagacctctg

SEQ ID NO: 22196 - DNA, 100 bp, Homo sapiens
gattaactcattcaaggttacccagttggtggtgtaactgtcacactccctcaggcaggaccatggaacacagcatctttggtcttcaatcagtcccctt

SEQ ID NO: 22197 - DNA, 151 bp, Homo sapiens
gccgtacaaatgccagctctgcccctatgccagccgcaactccagccagctcaccgtccacctgcgatctcacacggtaccctcttatatatggactgattcttattccctgctggtgttctctagtttgcctaagtagaatttacatggg

SEQ ID NO: 22198 - DNA, 75 bp, Homo sapiens
ccggactccgggccgcaggcagtcccgcggcagcaggatcacaggtcaaaatgcagatcttcgtgaaaaccctta

SEQ ID NO: 22199 - DNA, 100 bp, Homo sapiens
caacacttcaccctctcgcctcgggtctcgggggccgctctgggatcccggccaccagcaattgtccgccaagccctataccaagtcctgttttggggcg

SEQ ID NO: 22200 - DNA, 122 bp, Homo sapiens
ccagtactacgtgtacttcggcaccgtccgcgactgctatgagggtactccaaagattcaggtttactcacgtcatccagcagagaatggaaagtcaaatttcctgaattgctatgtgtctg

SEQ ID NO: 22201 - DNA, 75 bp, Homo sapiens
tgactcttgcgccgccgccttccacccggagggctttgttcgcgggggtcacagctctcatggctgcagctagcg

SEQ ID NO: 22202 - DNA, 99 bp, Homo sapiens
cttgtggaactgaacttagctcgacggggctgaccgctctggcccagggtggcaagcaccggaagcaccccggcggccgcggtaatgctggtggtctgc

SEQ ID NO: 22203 - DNA, 73 bp, Homo sapiens
ggacgcgacgcgccccgcctcccccgtccggtccctctctccacggtaagggcaaacggggattcagcgtccg

SEQ ID NO: 22204 - DNA, 90 bp, Homo sapiens
cttggaaaatactcagtttcctgcttactgcttcattatggattatacaggttgtttacattcagagctctatcaataagaggaatacat

SEQ ID NO: 22205 - DNA, 100 bp, Homo sapiens
tgctgtctctgctgctgcttctgggtcctgctgtcccccaggagaaccaagatggtttcatgtccttagcaagctactgagtttcatggcacctattgac

SEQ ID NO: 22206 - DNA, 75 bp, Homo sapiens
ccaggtcaccggcagcccaggcgcagtgagaaagatcagtctaaagaaaaggagaagaaagtgaaaaaaacaatt

SEQ ID NO: 22207 - DNA, 100 bp, Homo sapiens
gcggaacatccggaggctgggaaatggatcacagaagaactgcagcttcctggggagcagtttcacctccacaggcatcgcttcatactcctcactgtca

SEQ ID NO: 22208 - DNA, 120 bp, Homo sapiens
ctcccacaatgtgactactttgactactggggccagggaaccctggtcaccgtctcctcagactcctgccaccttatgcttgtcaccaacccttctcctccaaatctgatacaccagact

SEQ ID NO: 22209 - DNA, 74 bp, Homo sapiens
agtgttctgctttcatggagttcacagaagagtcgaggaggagtctcgctctcagtcaaaatctccaacgggaa

SEQ ID NO: 22210 - DNA, 90 bp, Homo sapiens
ccccgcagcgccccgcagagcagtcgagatctgccgacaccccaggccatcgagccccaggccatcgtgcagcaggtcccagcccccagt

SEQ ID NO: 22211 - DNA, 99 bp, Homo sapiens
ccttatctggacacgtgcaggctgaggctggaagtcatccacaacaaacacaaaaattggaagaaattaaagagaatgcacaggacaccatgagacaga

SEQ ID NO: 22212 - DNA, 100 bp, Homo sapiens
ctgacggttaatgaaggagaaatcatcacaatcacaaatccgtctaccctgatgggagagtctgcatttccatcctccacgcgccaggcgatgaccccat

SEQ ID NO: 22213 - DNA, 75 bp, Homo sapiens
ctaaagcaccagtaaaatatggtgaactcattgtcttaggatggggtcgaggatttggtcttttgggttccattt

SEQ ID NO: 22214 - DNA, 100 bp, Homo sapiens
aagagcgacccgcagaaggcggtggaccagccgcgccagattcagtatttcctgcagaggcggccgtcgatgaagaccctgtttgtggacagctacagtg

SEQ ID NO: 22215 - DNA, 75 bp, Homo sapiens
gctgaggggcttgcctgaagcgaggggtgctgtccctggacaccaacatcacaaaccaggtgaataagctgaacc

SEQ ID NO: 22216 - DNA, 74 bp, Homo sapiens
caaccgcagagctttggggccgtcttgagtggtttgtggtcaaacatgtgttgacatcaaggacaacgtggtgg

SEQ ID NO: 22217 - DNA, 119 bp, Homo sapiens
gcgaaacccaagccgccgcgtaggagcgtgcgttcgggccctcttctcccacctgttcgataacatgcctggacatttccagcagaggaggtcttggtgtgtcttctagtactgacggg

SEQ ID NO: 22218 - DNA, 75 bp, Homo sapiens
ttccccatgttctacaccaccagtcaagggatttgtatcgttgtgcccgtgtcagctcctggggagatcttttac

SEQ ID NO: 22219 - DNA, 75 bp, Homo sapiens
ggccaatgttggtgctggcaaaaaggattttttatcaagcagaaatgcatcgaacaacgagaatcaagatcactg

SEQ ID NO: 22220 - DNA, 74 bp, Homo sapiens
gcagcatgagcgaaagctacacgctggagggtgtccgcaatgttgccagtgtctgtctgcagattggctaccca

SEQ ID NO: 22221 - DNA, 50 bp, Homo sapiens
gaagaaatgaggacatatcagtatcgatctttgtagaatttgatggctgt

SEQ ID NO: 22222 - DNA, 82 bp, Homo sapiens
aggaaagaaatgatcgacaagtgggaagaccgatgggaatggttaagactgagttttaaaatcaaagatgggaaaatcggag

SEQ ID NO: 22223 - DNA, 83 bp, Homo sapiens
acaatttcttcttccaaaatcctcggattctctacttctgctgtgctgggactctggtgcccccaaccctgggcatcctcagg

SEQ ID NO: 22224 - DNA, 100 bp, Homo sapiens
aggactgctggccttcctggtgaagcctctggaatagccaggtctggctgggtcggcacaacctgtttgagcctgaagacacaggccagagggtccctgt

SEQ ID NO: 22225 - DNA, 100 bp, Homo sapiens
gggattgtgaccccaggaattgtaggtcaaggtgaagatgttcttaaagggtcccagattacgtatgttacaggtgtagaaggggacgacgttgtttcta

SEQ ID NO: 22226 - DNA, 83 bp, Homo sapiens
ggaaaggatgacatatttttggacctgaaacagaaattctggaacacctatatggaaaaccaattctgtgtcctcggaggacc

SEQ ID NO: 22227 - DNA, 98 bp, Homo sapiens
ttccctgcaaccagtgtgggccaggcatggagttgtctaaggatcacagaagtgaggccaagatgcccatgtcaccagagccagaagaaaggctccta

SEQ ID NO: 22228 - DNA, 100 bp, Homo sapiens
caggaaccagctcgggggccaactctgaggagtccactgcagcagccccccgaatccaagcccaacttcacccctctcgccatcttggcccatgttctcg

SEQ ID NO: 22229 - DNA, 100 bp, Homo sapiens
ccggagaccccgaaaacggaagcgcagggagaaggaagaggtgtttgaaaagggttattttggagctgttggagcactccttgagctgttgaagatcccg

SEQ ID NO: 22230 - DNA, 90 bp, Homo sapiens
tgcgcggagaaggggtccgagggcagtctgtgtcaaacgcagtgtgaagcctcagtttaggtcatctggtggttcagaacactcaacaga

SEQ ID NO: 22231 - DNA, 100 bp, Homo sapiens
aaggagccattatttatgtcatcaagaagaatgacgatgttggaggagagcagattagtgccattggaaggggcatatgtgtgttgctgggtatttccct

SEQ ID NO: 22232 - DNA, 90 bp, Homo sapiens
ctttagtgaaatgggctaataatgctggcaaagtggaaaaatgtgcgggcccttggaagaaaatcctcgctgtgtccaggctgaggcggg

SEQ ID NO: 22233 - DNA, 96 bp, Homo sapiens
aataacctttgacaagattttcaatcagaaaattgattgttagaaacggatagtaagtctttaagatctgtaaatgggtcaagaagaaacagtggc

SEQ ID NO: 22234 - DNA, 75 bp, Homo sapiens
aagggaggttcacctgcagcgagtgtgcctcaggatcaactcactatcctgaaggtccattctcccaagaagagg

SEQ ID NO: 22235 - DNA, 74 bp, Homo sapiens
ggcccacgccagacacgacgtctggcaggaacctcggcctcagaggttattgcagctgactgcaaaagggtcac

SEQ ID NO: 22236 - DNA, 100 bp, Homo sapiens
cttcaattcagcatcaccagcccccatgcagcagatcctgaaggacacagccctgcagaaagtgaagcgtggccagagctgcctggagccctgcctgcgc

SEQ ID NO: 22237 - DNA, 82 bp, Homo sapiens
ctcaacgacgcggacatggtcatgagctttgtgaacctggcacgtcgcgtttggaaaaattatctcccagcaattaatggga

SEQ ID NO: 22238 - DNA, 102 bp, Homo sapiens
cgtgtgcccaggccctgaggtgggccggacctgggagtggcaggaaacccagcgtttgctggcagaaccagttcctggcatcaaagccgaaccagatgagag

SEQ ID NO: 22239 - DNA, 90 bp, Homo sapiens
ctcccggccctctcgcgctgcactgtctctccgacgcaagactgtcccggcccggcaggaaatccaaatctcctcccaaagtgcccattg

SEQ ID NO: 22240 - DNA, 74 bp, Homo sapiens
tttgtgcaggacaccgacatggaacagggactcactgggggtgcccaaggaccaagtccttgacactgtctacc

SEQ ID NO: 22241 - DNA, 100 bp, Homo sapiens
tatgggatgtggtatgataccagcaactggtctattatatcatttaaaccacatggctatctaaagagggatgatggcgccacttcctcagtttcggcac

SEQ ID NO: 22242 - DNA, 75 bp, Homo sapiens
agggagggaaggagacggagactgagtacttcgctgctctgaaaagaatggtttgtcattcattgaaacttcggc

SEQ ID NO: 22243 - DNA, 100 bp, Homo sapiens
agtacttgaccctgtattttgggagtcgaacggataggtgacctcacagtgactcaagctaccacttactgttgattgtgacgaaatgccagctgaggca

SEQ ID NO: 22244 - DNA, 50 bp, Homo sapiens
cgccactgccgcaggaggcgtgaggtctggcgggaatttcctgaccggtt

SEQ ID NO: 22245 - DNA, 82 bp, Homo sapiens
agcagcttccaagagaaccaatggaatggagaaggtccagatggctgtggaggccaagtttgtccaggacaccctgaaagga

SEQ ID NO: 22246 - DNA, 101 bp, Homo sapiens
gggaccccagcccctctccagctcgaaatcgattctccttttacaaatgcaggaatgggatctaatctaaatctgttaggtgaaattgagtgtgatgccag

SEQ ID NO: 22247 - DNA, 80 bp, Homo sapiens
aaagactgttgagtatgctccatgtagatcacgagctcgagtatatttagcttgccgggatgtggaaaagggggaattgg

SEQ ID NO: 22248 - DNA, 74 bp, Homo sapiens
atgcaatgcatttttacctgttagggaatgtgccataccgaatccgtgtgcggctgtccagaaaacgtaatgag

SEQ ID NO: 22249 - DNA, 82 bp, Homo sapiens
cgagatcaggcctgaccgggataagctccaggagtacaagcgcaagctagccagagtttccctggtgcgcaaagaactcagg

SEQ ID NO: 22250 - DNA, 93 bp, Homo sapiens
gccctggagagaggagagaaaatgtccactggacctctgtccagatacctttgtctggatatggaggaacaagcaatcttattttggaaggcg

SEQ ID NO: 22251 - DNA, 100 bp, Homo sapiens
cagaggtagtcggacctttcccgctggcgcgcagcctcagctaggctggcgcccatgcggctctacacgctctccaagcgccactttgtcctcgtgtttg

SEQ ID NO: 22252 - DNA, 100 bp, Homo sapiens
agagtgcctatgagagtggcctgatgccttacacgaattacacatttgatttcaaggtgtgcaactgaggaacatggctcaagaaactaatcacagccaa

SEQ ID NO: 22253 - DNA, 74 bp, Homo sapiens
gtgagcgatataccattttgcaccagagtaatcaagtcagaggattatatgacttttatctgcctagagaagaa

SEQ ID NO: 22254 - DNA, 90 bp, Homo sapiens
caaccagctcacgcacacaggcatggccttcctgggcatgacactggattatctccgagaagaagctgaagaggaggcggaagccggagt

SEQ ID NO: 22255 - DNA, 74 bp, Homo sapiens
ctcccgcacggagcagcagttccatcccgaggctttactgcagatggtgcgtgacgagagccaccagatcctgg

SEQ ID NO: 22256 - DNA, 74 bp, Homo sapiens
catgcctactctgtgaccggggccaagcaggacagtggggggtggacgcccatcatctgggctgcagagcacaa

SEQ ID NO: 22257 - DNA, 75 bp, Homo sapiens
cgagggagccccaatttcacaccaggggacatgctgcctatagttctgcagttaacatcctccttggccatggca

SEQ ID NO: 22258 - DNA, 100 bp, Homo sapiens
tgagcaaagagtactgggactgtctcgagggcaagaagagcaagcacggtcttagtcctgggtaacaagcgagaccttccgggagcattggatgagaagg

SEQ ID NO: 22259 - DNA, 83 bp, Homo sapiens
cgtcctccaggaggcatctcacaacgtccccaaccagagttccgagtcacttgctgggttgtgagtcccggcccagcccctcc

SEQ ID NO: 22260 - DNA, 74 bp, Homo sapiens
tgagatccaagtctctacagttaactggcaaagaaggtgctggatagtttactagtccagtatggagtggtgga

SEQ ID NO: 22261 - DNA, 78 bp, Homo sapiens
ctctgtggcgacttcatctggggcgtcgtgcgcaaaggcctgcagtgcgcgcgtgccttggcatctcccaatggggtg

SEQ ID NO: 22262 - DNA, 75 bp, Homo sapiens
tggcagccaatgaaaaggccgttcatgcagacttttttaacgcgattattggagccggaattggtggcacttcag

SEQ ID NO: 22263 - DNA, 87 bp, Homo sapiens
cagagcctgcagtcccacacgatgccatggacaatattaccaggcagaaccaattctacgatacccaagtcatcaaacaagaaaacg

SEQ ID NO: 22264 - DNA, 152 bp, Homo sapiens
cggctacctggagcagcctggaggtgaggcgatgatcgagtacatcgtgcagcagtgcgcgctgccccccgagcaggagctgatgaggaggacgagacccccagctgcttgtggctgcccctgaggtccctggaagggcccagcctgcctga

SEQ ID NO: 22265 - DNA, 101 bp, Homo sapiens
gaagtctggactttttgaccagtgccaaattcttatggagtgctcagattgctgacctacagcagaagctgctggatgcagaaagtgaagacagaccaaaa

SEQ ID NO: 22266 - DNA, 83 bp, Homo sapiens
acgcacgagtattacccctatctcagcagtgatggggagagccatagcggcatcattcttaacaaagaagttaaatattggtg

SEQ ID NO: 22267 - DNA, 83 bp, Homo sapiens
gggaccagcagctgtcgccgccgctctcaggcagaggctcgtctgcttgaggaacaacgaagagttcaggtttaccttcatga

SEQ ID NO: 22268 - DNA, 117 bp, Homo sapiens
caatgatggctttgtacggcttagaggacttccctttggatgtagcaaggaagaaattgttcagttcttctcagaatgcagtaatagtggccttgtcttcaaaatcatgggatgtag

SEQ ID NO: 22269 - DNA, 100 bp, Homo sapiens
tgggaaggtggagccaccagcctctccttgggagaagatgtcaaccggacactagaaggtggaaggaaacctcttcattatgcagcagattgtgggcagc

SEQ ID NO: 22270 - DNA, 74 bp, Homo sapiens
ctgacctatcagtatcggcagaacattcctgcttccgagttgccagggatgatggcgccacttcctcagtttcg

SEQ ID NO: 22271 - DNA, 75 bp, Homo sapiens
gcttcctgcgcatcgtctgcaagaccgcgaggcgagacctcttgtgagtgaagatggcagagaggacgtgaccag

SEQ ID NO: 22272 - DNA, 87 bp, Homo sapiens
aagttagtggattaaaatctcccaagaggaatgacaaacaaccagctcttcagcaatggctgccatccggaagaaactggtgattgt

SEQ ID NO: 22273 - DNA, 98 bp, Homo sapiens
tccacatggcctacaacgtcatcacgccctttctcttgctcaaggaatttgctgacacaatatcttccgcctggtgctgggcatatcctaagaactta

SEQ ID NO: 22274 - DNA, 99 bp, Homo sapiens
tgcgctgcgcactcgagcctggcgggccggcacggtgcgggccatgagcggggcggtgccccaggacctagcggtggaagatggtatcttgaagttgag

SEQ ID NO: 22275 - DNA, 98 bp, Homo sapiens
caagagcagcttccgcgagatgctccagaaagagctgaaccacatgctgtcggatgtgggctctcttgatgagaagatgaagagcttggatgtgaatc

SEQ ID NO: 22276 - DNA, 96 bp, Homo sapiens
gtattagaaaagaattttattaaatctggcaccactttcaaggatgatgactttgagttcactggcagccacctgacagtaaggaatggctactcg

SEQ ID NO: 22277 - DNA, 82 bp, Homo sapiens
atgctaatacagaaagctaaatcaaggtgtacaggtttctgctgatgtactccacggttctgtgcagctattacaattcagc

SEQ ID NO: 22278 - DNA, 100 bp, Homo sapiens
gcgggcgggagaacggaaaactcccaacttcctgataaatttgcgcctcattttggtaagcggaaaaacaaaagagttcctgttttctcctaacgattct

SEQ ID NO: 22279 - DNA, 87 bp, Homo sapiens
cagggccggctaccactgcggctactgcgattccaaggagggcaaagcgtcctgcgtgtaatgttcaagctcagaaatgccttatgt

SEQ ID NO: 22280 - DNA, 89 bp, Homo sapiens
tgggaacatgacgcaggtgcaggtgtctcttctcgccctggcggggaaggattttttatcaagcagaaatgcatcgaacaacgagaatc

SEQ ID NO: 22281 - DNA, 83 bp, Homo sapiens
atggccgtgccctggggctgagccctcagcccgacctgctgaatttcaagaaaggctggctgactaagcagtatgaggacggc

SEQ ID NO: 22282 - DNA, 100 bp, Homo sapiens
aatttatacaaggagaagcactggatccaaagcatgtctgcaacccagccattttcaggaggagttggatttgtcttctagttctcagatgtctcccctt

SEQ ID NO: 22283 - DNA, 97 bp, Homo sapiens
cctttccagattcgtggttgagctgcagcagagggagcttgccttgaaggacaagaacagcgccgtcaccagcagggttcatagtggcgtcatgcac

SEQ ID NO: 22284 - DNA, 98 bp, Homo sapiens
ctgggaagctggcgtgggcaggccagctgtacctggcctggagctccagagaattaaagatggtggtgttattgactcagttaaaacaatctgtgttg

SEQ ID NO: 22285 - DNA, 90 bp, Homo sapiens
gatcgtaaagaagttgccaaatttgaagcagaacgatcaaaagccaagtggcaaacggtgaatttcttcagctcgggtcaaaagaaaatg

SEQ ID NO: 22286 - DNA, 88 bp, Homo sapiens
ttggcggtccctgtgacctgtggagacacggccagatctgccctccaatatgatgatatgttagtggtacccattattgagaatacac

SEQ ID NO: 22287 - DNA, 121 bp, Homo sapiens
ggatattcagttgcacatccccacatcaatgcactgccaatgaatcttgtggaagaagaatgaagttgctgattatgaagctacaacattttccatcttctataacaacactctgttcctg

SEQ ID NO: 22288 - DNA, 100 bp, Homo sapiens
cgacctctcacagaaactatatgccaccatggagaagcataaagaggtgacagagctgaatgaacctctctccaatgaagatcgaaatctcctctctgtg

SEQ ID NO: 22289 - DNA, 100 bp, Homo sapiens
gcctcctaagtagctgggaccacaggtggatacattgcaaatagcctagcaatcatgacagatgcacttcatatgttaactgacctaagcgccatcatac

SEQ ID NO: 22290 - DNA, 100 bp, Homo sapiens
cggccaggccgtgcgccggcctttggtcgcctccgtgggcctcaatgttcgatcctttggtacagaagacagaccgacagatcgtccaataccacctcga

SEQ ID NO: 22291 - DNA, 82 bp, Homo sapiens
tcgagagacctgcgtacattcggggtgccagaaggaaagcataggtctggagcccggcactgtggtcataacagagcaggca

SEQ ID NO: 22292 - DNA, 83 bp, Homo sapiens
tgagggaatggattttgacaccatggatatagatttggtggttgtgtcaaaccgattggtgacatctccatgctgtattgtca

SEQ ID NO: 22293 - DNA, 100 bp, Homo sapiens
cgtcgctgttgctgccgccatacgcgctctccctgtttaggtatgacctggacgcgtgtgacattcaagaaaaatacccggatttatttcaagtgaacct

SEQ ID NO: 22294 - DNA, 76 bp, Homo sapiens
gaggggctggaacacctcgccaaagcagagaaataaaacgatggaaagaactttctaaggaagacttatctcctgc

SEQ ID NO: 22295 - DNA, 109 bp, Homo sapiens
ggacagcttaggaccagaagcctttcgcggagaaaaggctgacatgcccgtcctatatgacagatgtgatgccagcatagctagactttctgcagagcacaaaacgacc

SEQ ID NO: 22296 - DNA, 100 bp, Homo sapiens
caaggattctcgctgtgacagagacaacaccgagtatgagaatactatactggcaattgctggagaagattttgcaattgttgcttctgatactcgattg

SEQ ID NO: 22297 - DNA, 75 bp, Homo sapiens
cgaaggaaaacccgctctctgcctgaccggacacccttccatacctctgcctttcttggggacattgccctggac

SEQ ID NO: 22298 - DNA, 100 bp, Homo sapiens
gcgtatccgcactgtccagcccaagcctgactatggtgagggtcccgatgtcctggtgtacagcttggactttggtgggcatctgcggatgataaagcga

SEQ ID NO: 22299 - DNA, 73 bp, Homo sapiens
ccagtatatcctgcgtgagttcaaggtcacggatgcccggattcctgtctgactaaagggacctcaaaaagga

SEQ ID NO: 22300 - DNA, 100 bp, Homo sapiens
cggacctgcggcccgacgaggaagttttctactgtaaagtcaccaacgagatcttccgccactacgaccgagagacacacaagattgcagtattttatgt

SEQ ID NO: 22301 - DNA, 110 bp, Homo sapiens
cggcgcggcgctggcgctgccggagctgtcgacccggcctggcgccggactaggtgtcgtgaaaactacccctaaaagccaaaatgggaaaggaaaagactcatatcaac

SEQ ID NO: 22302 - DNA, 51 bp, Homo sapiens
ccaaactcctcattcctgatgatttcaagccacccacacagaatatgccta

SEQ ID NO: 22303 - DNA, 100 bp, Homo sapiens
gcgacacacgggccaaatatcgagagggacgacggcctcgtgctgtgaaggggcatggtctgcatgggataggagaaactgtccatgtcccatttccatt

SEQ ID NO: 22304 - DNA, 48 bp, Homo sapiens
ccctcaacagagaggttgagcaacgagcttgacatgatttccacaagg

SEQ ID NO: 22305 - DNA, 96 bp, Homo sapiens
gtctcctgcccgcagctccgcgccgccccaggtgctggagaatctggtaaaagcaccattgtgaagcagatgaggatcctgcatgttaatgggttt

SEQ ID NO: 22306 - DNA, 98 bp, Homo sapiens
gcatcgacagcagtggcagaaacgtcaggccgtagccgaagcctcggaaggagcggcccacggcaaaggtcaaacatgtgttgacatcaaggacaacg

SEQ ID NO: 22307 - DNA, 90 bp, Homo sapiens
ggcggattccagccccgagcgggacagcgcggcggggagcgacgaaacactatgtggctgccgtgtaagagtggaactgtcgaatggtga

SEQ ID NO: 22308 - DNA, 74 bp, Homo sapiens
gagagacctccatggtccatgaactcaaccgtcttacctatttgatgaagatgtcttttgaaaggtgtactgca

SEQ ID NO: 22309 - DNA, 50 bp, Homo sapiens
cagtcaataggaagtacgagttaggtgatttcaaatcggagaagtccaac

SEQ ID NO: 22310 - DNA, 83 bp, Homo sapiens
cacgcgggcgagcggctgtgtggatgtcggcgaagccgcgggcgaggagcacgtgaattgcctctgcttacgttcaggccctg

SEQ ID NO: 22311 - DNA, 90 bp, Homo sapiens
atgacaatgatctctaccgatgggaagtccttattattggccctccagatacactttatttctcttcagcaacgggtagcagaattggaa

SEQ ID NO: 22312 - DNA, 113 bp, Homo sapiens
ttgaggaagagcgagccagcgcccggagcaagcggagctcccccaagagccggaaagcaaacggggattcagcgtccgatcctttggaacagggactcacgtgaagcttccag

SEQ ID NO: 22313 - DNA, 82 bp, Homo sapiens
tacttcaaggataagggcgacagcaacagctctgccggctggaaggtgacaccttgtttgtggctggctgcgggaagttcta

SEQ ID NO: 22314 - DNA, 100 bp, Homo sapiens
gcggcggcggcagcgggtcttgggtcctccgagagcagcagcggaatcagtgacattcaaagatgtgtctgtggacttcacccaggaagaatggtaccat

SEQ ID NO: 22315 - DNA, 100 bp, Homo sapiens
tcgactttaatgtctccttgcaggatcacttcaaccgtgctggtatagaggactctaagaagtggggcatgctgtttctggtgaaccagctgtttaaaat

SEQ ID NO: 22316 - DNA, 75 bp, Homo sapiens
aattacaggaatcttctctcattgggtttctacgataaagacagttcagggtggagttctagcaaagataaggat

SEQ ID NO: 22317 - DNA, 100 bp, Homo sapiens
atagaacttacaccatgcgggtgctgttcccaggaattgaagaccaccctgtcctccgggaccttgaggaatgtggacccccctgtctggtacgacaccg

SEQ ID NO: 22318 - DNA, 100 bp, Homo sapiens
cctgcggcgagttgtttaccctttggaaaagctgttgacatctcataaacggctggttatgaaagacagtgcagctggcttattagctgtaatggcccag

SEQ ID NO: 22319 - DNA, 75 bp, Homo sapiens
aaatgtccatccagttgggagctatgagtcctctgaaatgaacagcatagcccagaggcagagctacacaaccat

SEQ ID NO: 22320 - DNA, 100 bp, Homo sapiens
cccccctccctaccgcccctgtcccgccggggagcggcggcggccttggactttgctgtctttcctcgcggagacaggacacaactcagatgggaagttc

SEQ ID NO: 22321 - DNA, 97 bp, Homo sapiens
cagcatgtcggtggcggggctgaagaagcagttctacaaggcgagccagggccgccttcaacaacaacgtgagcgtggcctacgagtgcctgagcgc

SEQ ID NO: 22322 - DNA, 75 bp, Homo sapiens
gctccgtcgtggaagcaggactgcgccgcgtcttcctcaaggtctgccatcatggatgttctcgcagaagcaaat

SEQ ID NO: 22323 - DNA, 74 bp, Homo sapiens
gggcatccgcacccgctctaagtcagccaaaagaatttgcagcaccatcaacagatgcccctgataaaggatac

SEQ ID NO: 22324 - DNA, 100 bp, Homo sapiens
tttaatccagctactctacctctaacacagtacctgttaacaacgtggaatttaaatgaccttttatcaagatggataaacgcaagtttcccagtgctgg

SEQ ID NO: 22325 - DNA, 88 bp, Homo sapiens
cggagtgtggtacttctcctagttgcagtcaggcttcatacgctattgtcctgcccgactttccttatcccagttgattgtgcagaat

SEQ ID NO: 22326 - DNA, 75 bp, Homo sapiens
ctcccaaaaggagaaacagctagttgtggaaagtaaaaatgtagccctaccaaaaggaactattgtactggcttc

SEQ ID NO: 22327 - DNA, 98 bp, Homo sapiens
aagcttaggaccacccaccatgcctatccaggagtgtgaggaagaggctgtctgtgtcattatgtgtgcgtcggtcaagtataatatccggggtcctg

SEQ ID NO: 22328 - DNA, 100 bp, Homo sapiens
actttcaacacaaagaataagcttactgcaagattggaggtggacacaaaggaagaggcagccagacagctacttcagcgtcctcaacgcattcatcgac

SEQ ID NO: 22329 - DNA, 75 bp, Homo sapiens
tccggcccccgagcacgccggccccgcgcgcgcctcgaggccgagtcaaggaagggatgagaccatgcagcctgc

SEQ ID NO: 22330 - DNA, 90 bp, Homo sapiens
actgaagattggaatgaagatgaccttttggagagcgagacgatcaacaggtgtttatccagaaagttgttcccatcaccaacaaactat

SEQ ID NO: 22331 - DNA, 100 bp, Homo sapiens
ggcgcaaagattgcttgaagaaatccatgccatgaagggtggttctcttcccaaagtggaagccaaattcatcaattatgtgaagaattgcttccggatg

SEQ ID NO: 22332 - DNA, 74 bp, Homo sapiens
gcggaggcagaggtggaggcgctttgaaagggaagcagtttaagtgcacggtgtgtgactacacagcggcccag

SEQ ID NO: 22333 - DNA, 100 bp, Homo sapiens
tacgattccgggccctccttcgacttcccagcggaatctccctggaaaaggagacatgaatgtctgcaatgatacttcctgacaagaagttgatacaaga

SEQ ID NO: 22334 - DNA, 90 bp, Homo sapiens
catcagtatatctggatcatcaggaaacctcgacctgtctcccagttggttgcacagcaggttactcagcagtttgtgcctcctacacag

SEQ ID NO: 22335 - DNA, 100 bp, Homo sapiens
gaccttaaaatacccgcaacagccccttcgtcccaatactaaggctcgtacgtctgcatcgattatcttacgtggggcaaatgatttcatgtgtgatgag

SEQ ID NO: 22336 - DNA, 83 bp, Homo sapiens
ctgggatcccggccaccagcaattgtccggtatagtcgtctccccctccaccacggcaagtcctgcagagggaaccagctctg

SEQ ID NO: 22337 - DNA, 139 bp, Homo sapiens
gcaggttttaaatcaagatttaacattccaacacataaaaattatttatccaacagctcctcccagcctttctgagaaaagtctacagcattctttctctgcaggttctcttaactacagtgacttcaacagttttttt

SEQ ID NO: 22338 - DNA, 98 bp, Homo sapiens
ccgtcccgtccgacagccaggcccgggagaagtggccctcatgacactgacgctcttcccggtccggctcctggttgccgctgccatgatgctgctgg

SEQ ID NO: 22339 - DNA, 50 bp, Homo sapiens
ggcctgatagccgccatctgtgcaggctgccaggagatagcagaggaatt

SEQ ID NO: 22340 - DNA, 82 bp, Homo sapiens
cggccctgtgggcctgggagctgcctctgaggaacacgccgcaggccaccagcccctcgggttccaagatgcagctactgga

SEQ ID NO: 22341 - DNA, 90 bp, Homo sapiens
caacaacaccacaataatccacagccaagggtgaggatccacgacctccgcagtggtaacatcgccctgtcgctctccgcccatcagctc

SEQ ID NO: 22342 - DNA, 82 bp, Homo sapiens
aaccctggtcaccgtctcctcaggtaatgtgaggctacaggagatgatggcaacaatgtgccaggaacgtggagcccggctt

SEQ ID NO: 22343 - DNA, 83 bp, Homo sapiens
ctcctaagcctgcacagccgcggcggcagcagcagtgagagtgtaaatgagcaaagatggatcaggaaggtgggggagatggg

SEQ ID NO: 22344 - DNA, 75 bp, Homo sapiens
ggagttcaagaagaacactccagagatggtggatgcttccaaaagcatcgaagctgtccatgaggacatccgcgt

SEQ ID NO: 22345 - DNA, 51 bp, Homo sapiens
tgtgggacgggtttagcggcagcctcttcgatttgcctgaagacctggata

SEQ ID NO: 22346 - DNA, 100 bp, Homo sapiens
tatcactcaagagactcttcatttagattggattctgaatatcagatgtgttcagagcaacattgttttgttgacacaagcatttagaagaaagtttgtg

SEQ ID NO: 22347 - DNA, 74 bp, Homo sapiens
cctcagtctcccgagtagctgggactttagcatcaagcagcggcttcgcagcggctcagccagccccatggaac

SEQ ID NO: 22348 - DNA, 51 bp, Homo sapiens
gagatccgctcgcgcgccgaagcatttgacattgtgcagcaaagaaatggt

SEQ ID NO: 22349 - DNA, 99 bp, Homo sapiens
tgcgaaggtcccagcgcgtctgagaacggaactgtggaaggtgcatcagtgaagaaatggaccaatgtgtataatcatggaatctccttgctaaccatc

SEQ ID NO: 22350 - DNA, 73 bp, Homo sapiens
tgatggtctggtagaaacaccaacaggatacattgaaaggatttgcagatttacagaatggctgcacattaat

SEQ ID NO: 22351 - DNA, 82 bp, Homo sapiens
gtaccacagccgcgcgctgcaggtggtgcgcgcccgcaagcaggtgcaccagggacctgtccctctgtcctacacggtcacc

SEQ ID NO: 22352 - DNA, 100 bp, Homo sapiens
accccggtacatctgaaagccgggaaatgcacatttcagttggactgcgatgcagttcttcagctcttcattgaaacgctgctccacaacacaaatgccg

SEQ ID NO: 22353 - DNA, 75 bp, Homo sapiens
tacaaaggagagtttaaacagccaaaacagttcattcatattcagcgctctcgaacagtgtggcctgatgaaact

SEQ ID NO: 22354 - DNA, 100 bp, Homo sapiens
gaagaaaaatggtactcggaagaattaaagaaggaattagaaaaatatcaagggctgcagcagcaagtttaacttgtggccctaaagaactggaaaccca

SEQ ID NO: 22355 - DNA, 49 bp, Homo sapiens
tgtgctcttggtgaggaagttgagaaggcacaatccctgtggaatccag

SEQ ID NO: 22356 - DNA, 87 bp, Homo sapiens
cttcagctccagctccgctctcttcggctgccccaatccccggcagctctctcagggagactcatgcatctgtatgccgtgtgcgtg

SEQ ID NO: 22357 - DNA, 90 bp, Homo sapiens
cctctgcttcaatgtgggccgggagctgtacttctatatctacaagggggtccgcaaggagagattcacccaggatacacaacctcacta

SEQ ID NO: 22358 - DNA, 100 bp, Homo sapiens
tttgagtggtggttcccaggaattataggagcaggtctgatggcgaggattaaatccaccacacagggtgaaatctatctccatgacaacattcacacaa

SEQ ID NO: 22359 - DNA, 82 bp, Homo sapiens
aagaaggtctggttagaccccaatgagaccaatgaaatcgccaatgccaactcccggatgctgagaacttgctggagtcaca

SEQ ID NO: 22360 - DNA, 83 bp, Homo sapiens
cgcccggccaagctatcttctcgctagcagtgtcctcagcctgcgggggctgcgtggaggtggactcggagaccgaggccgtg

SEQ ID NO: 22361 - DNA, 89 bp, Homo sapiens
ccagacctacccgggcgaagcgggcgagcggtggtttggacgccggcggagacgcgggcgagatatgtgtcacaaagatgtctacacgg

SEQ ID NO: 22362 - DNA, 100 bp, Homo sapiens
cagattcgcagtggtcgcttcttctccttgcgggccaatccgagcctacatccttgcccacaaggatgccatccagctctggaggacgctcatgggaccc

SEQ ID NO: 22363 - DNA, 98 bp, Homo sapiens
tgtgtttagtgcctgtcgaatgccccccagccaccagctcgaccacagcaagctcctgggggttcgggggtgattaaagctggctttgcaggagacca

SEQ ID NO: 22364 - DNA, 53 bp, Homo sapiens
gccatctggccctggtgaggtgaagctgcagaagctcctcctggccacatcct

SEQ ID NO: 22365 - DNA, 83 bp, Homo sapiens
tcattaagagcttggaggcggcccgcggacaatgcagatcttcgtgaagactctgactggtaagaccatcaccctcgaggttg

SEQ ID NO: 22366 - DNA, 100 bp, Homo sapiens
ccaggttagcatcccgcagtcgtgcgagcagtgcctctcctatatctggctcatggacaaggccctgctctgcagcgaccattaaaaatctcaagtgacg

SEQ ID NO: 22367 - DNA, 92 bp, Homo sapiens
tcggcagcggctccttcggagacatctatctcgtgaagatagtgatccggggagacaggaacacgggcaagacagcgctgtggcaccgcctg

SEQ ID NO: 22368 - DNA, 75 bp, Homo sapiens
gtggagctagagaatctgctgggagaattctccatcaagatgaaagttacttggacataggagaaatcaagaaaa

SEQ ID NO: 22369 - DNA, 97 bp, Homo sapiens
ctgttggaaagcggctgcgtagacaacgtcctgcaagtcgtgctggagcagctgctcccagagctcaccgggctgctcagcctcctggaccacgagt

SEQ ID NO: 22370 - DNA, 100 bp, Homo sapiens
acctgctgcacccacgaatctgcccacccctcctgtaacccagcctgtttcacttcttggtggataagattgtggaccagctgcagcagttaatgcaggt

SEQ ID NO: 22371 - DNA, 75 bp, Homo sapiens
ggaacctctggagtattacaggagatttctggatgtggaaccatcttcacctgctgcccttgccggcctgcgccc

SEQ ID NO: 22372 - DNA, 82 bp, Homo sapiens
cgcgggcactgctttccactcggctcctgtcgtccgttctctcaggctcccgttcaggaatactcccccagttgcaagaggc

SEQ ID NO: 22373 - DNA, 100 bp, Homo sapiens
ggatgtttcctgaaatgtccatccacttatccagacccaatggaacatcagcaatgcttctgattgtcctgtgaagtgaagtatgatcggacagcctctt

SEQ ID NO: 22374 - DNA, 83 bp, Homo sapiens
ggagaaaaggcttcttccatcccagggtacaacagaacagattctgtgattagaaatgcactcggtgatggaaagagagccac

SEQ ID NO: 22375 - DNA, 90 bp, Homo sapiens
cattggagtgcttcattaccacgagataggcaatacgaaagcttcctgtcagcgtttttgagtctgtcattgatataatcaatggagagg

SEQ ID NO: 22376 - DNA, 50 bp, Homo sapiens
cggactcttcttcgccttcgaggaattatggggagagcggaatggacgct

SEQ ID NO: 22377 - DNA, 89 bp, Homo sapiens
gagaaggatgagctatgacttgctaaacaatctgttggtgtcaggcccttgaaaggaaaaattctgcaattccatcagagttgaatgaa

SEQ ID NO: 22378 - DNA, 75 bp, Homo sapiens
aatctcttctccctccccttcttgggaagaaggagaaagggccaacccctgaagaagcaatacagaaactgaagg

SEQ ID NO: 22379 - DNA, 90 bp, Homo sapiens
aaaacaagcagcttctgcacgacgcactggcccaggacctgcacaagggcaagtgtccagagaatggctgggatgaaagtacacttgaac

SEQ ID NO: 22380 - DNA, 49 bp, Homo sapiens
aacgagatcttccgccactacgagtgccggggacacgggcggcaagccg

SEQ ID NO: 22381 - DNA, 105 bp, Homo sapiens
ccttgtcctgggggctcaccagcaacagtatcgggaagacttatttcaggcagatctgtgcatgggactgcagggcttcctcatcttccacagctttgggggcgg

SEQ ID NO: 22382 - DNA, 98 bp, Homo sapiens
aaactgatagtgccgtcagacttgtccacatccccacagccaaagtggaacaggtgaagttcgatgccacatccatgcatgtcaagcctcaggtggct

SEQ ID NO: 22383 - DNA, 75 bp, Homo sapiens
caaccatagcccagtgccaatgcatcttctgtactctggtttttagaacttcagccataaaaatgggcagaattt

SEQ ID NO: 22384 - DNA, 75 bp, Homo sapiens
ttgtcaacttcctcttcagtcatcagtgaattacatgaatgacagtcttcgaaccaatgtgtttgttcgatttca

SEQ ID NO: 22385 - DNA, 75 bp, Homo sapiens
aaccagtcacccaagtgcattgcctttggaaacgaggttattcttaatgattccgaagagcaagaggagatgaga

SEQ ID NO: 22386 - DNA, 96 bp, Homo sapiens
acagttgtgagattcccttgcaaatttacatacgagaatggcttgtgaaatcatgcctctgcaaaggcttctttggcagaaacagataaaatcact

SEQ ID NO: 22387 - DNA, 100 bp, Homo sapiens
gctgtatggaccttactggcaccaaccccggcagtatgagcagtaagtacaaggtggactgtgcatgcctcaaagaaaacccagagtgccctgttctaaa

SEQ ID NO: 22388 - DNA, 50 bp, Homo sapiens
cttctgttaaggattctcagaagaatgagagaatggcttactacacctcc

SEQ ID NO: 22389 - DNA, 88 bp, Homo sapiens
aatgctaccctgctttttctggtgtcctgaacctggaagttgtgctttttaagcatcgagagtaaacatgaggttacgatcctgggag

SEQ ID NO: 22390 - DNA, 50 bp, Homo sapiens
cgacgggggagacggagccccagagctctgaggaacatgaatacagtgat

SEQ ID NO: 22391 - DNA, 98 bp, Homo sapiens
agagagcacgctgcgacggctgcaccatatccagatagccacgggggccatcaagtaaacggagttccctctcgaagtccaagattagttgcttctgg

SEQ ID NO: 22392 - DNA, 101 bp, Homo sapiens
agggttttgcaaaatacatggaacttatcgctgttaatgctacatatccagagctgcaatttgcaccagccgtggatgttgttgctattggtcttatgtca

SEQ ID NO: 22393 - DNA, 101 bp, Homo sapiens
ccccaactccctactcgacccaggaagtccagctggcctcacctctcaattccaccaggaagaataaaggtgactattatatggttaaaaagattttggag

SEQ ID NO: 22394 - DNA, 100 bp, Homo sapiens
cggccaggggctacgacccttgggatctgccctccgctcagctcgagcttccctcgtggccgacggaacaatgaaggtgcccctgggcgctgggattgct

SEQ ID NO: 22395 - DNA, 51 bp, Homo sapiens
tggattccagtgggcccgacagcgcaacagacgtgccaccttgcttagcgc

SEQ ID NO: 22396 - DNA, 100 bp, Homo sapiens
aaaaaggccctggaggtggaggagtccaactcagaggacgaggcctccttcaagtccgagctggtcagtgagaaggtcggaggggccgaggggaccaagc

SEQ ID NO: 22397 - DNA, 128 bp, Homo sapiens
ccggttatgaaaggattactggcgccgcaaaacaccttcctggacaccatcgccacccgttttgacggaacactgatatcagtatcaagataaaagtttggaatgggagaaaaattctcaaagcctga

SEQ ID NO: 22398 - DNA, 100 bp, Homo sapiens
agtcggtcaggaagcccgcgcgcaacagccatgggaagagagctgtggtaggctatgaagatgggaccatcaggatttgggacctgaagcagggaagccc

SEQ ID NO: 22399 - DNA, 95 bp, Homo sapiens
ggtcccgcgctgctcttccctgagagtgaactttccatccggataggtagagctgggcttctttcagggaacctcagaacctgttctggatccac

SEQ ID NO: 22400 - DNA, 90 bp, Homo sapiens
gtgccttccgcgcacctcagtggtacctgcacctgtctggcctgggcgccagcgcggctgcaggccaagattttctaccctagcaaggat

SEQ ID NO: 22401 - DNA, 50 bp, Homo sapiens
tatggactccagttatgcaaaaagaggaacgtgttgtgggctttcacgta

SEQ ID NO: 22402 - DNA, 50 bp, Homo sapiens
gcggcagcgctggacacccagcctccagtactatactggcaattgctgga

SEQ ID NO: 22403 - DNA, 75 bp, Homo sapiens
agaagtggcctaaaacttcggcgttggggggggccctcagcctcttggccttgaacgggctgttcatcttgattc

SEQ ID NO: 22404 - DNA, 74 bp, Homo sapiens
ctgtatatggctgcgccccaaatcaggccaaccgggacgctgtgctgagcaggatacctgaacacaagagtgac

SEQ ID NO: 22405 - DNA, 100 bp, Homo sapiens
gtgacgccgagagccagagagatgtcggatttcgacagtaacccgtttgccgacccggatctcaacaatcccttcaaggactgcaatgtgccgatcttag

SEQ ID NO: 22406 - DNA, 76 bp, Homo sapiens
tctccgaggcgcagaagtggattgaggtcaccgaggaggagcccagctccaaccacacggtcatgatccaggagac

SEQ ID NO: 22407 - DNA, 100 bp, Homo sapiens
ccaatggccacctttcctgtgccatatgatttgcctccagaactgtatggaagtaaaggaatgggtcgggaagttgagaatcttatattagaaaatacac

SEQ ID NO: 22408 - DNA, 108 bp, Homo sapiens
gcgctggagcaggagcggggccggaactggagccgaggcgcaggtggcgctgggaacttgctactaccagcaccatgccctaccaatatccagcactgaccccggagc

SEQ ID NO: 22409 - DNA, 100 bp, Homo sapiens
gaacgcagtcgtgaacttcagaaggaggttgaccagagagtcacttatttcagcaattcaaggtgatattgaagaagctaagaaacgactagagttacca

SEQ ID NO: 22410 - DNA, 83 bp, Homo sapiens
aacggcaaagttttgcagatcttcaacaagaggacccaggagaaattcgccctcaaaaaaactttagaaactgttcctttgga

SEQ ID NO: 22411 - DNA, 102 bp, Homo sapiens
cttcggaggggaaggctgaggaaaggtcagagtggtgctgggaacaactgggccaaggggcactacacagaaggcgcggagctggtggactcggtgctggat

SEQ ID NO: 22412 - DNA, 100 bp, Homo sapiens
acaattacttggactagtttatatgaaatttgtggaacgccaatctgaattgccaacgcaaagcaaagcgagcttccccagtattctcagtgacccagac

SEQ ID NO: 22413 - DNA, 100 bp, Homo sapiens
gctattcaaagaacaactaactttgaggggtttcttgcaaaacgcttctccggctgcaccctgaccgatgggaccctgtctacgagaacgaagaccagct

SEQ ID NO: 22414 - DNA, 100 bp, Homo sapiens
cacgttcttaatgtatctatagtctgcctgatgccacaaaggagtccagctgcccacaaagaatccagctttgacattattttgtcaggtttagtcccag

SEQ ID NO: 22415 - DNA, 88 bp, Homo sapiens
aatttctgcccagatagtgtctgcagctggtcagagtactgatcggctactatcaacagaacctcatgaggaagtacctaatattctt

SEQ ID NO: 22416 - DNA, 95 bp, Homo sapiens
cctgcagtacctgcagaaggtctctggagacatcttcagcagcaagagtgagccatggagctacgtgtggggaacaagtaccgcctgggacggaa

SEQ ID NO: 22417 - DNA, 100 bp, Homo sapiens
ggatggctaccacggccgagctcttcgagatgtaaaaaaagattggtctgaccatgctctctggtgggaaaagaagagaacttggcttctgaagacacat

SEQ ID NO: 22418 - DNA, 83 bp, Homo sapiens
ctccaggttcacctcctcctcctccaggaatcccagtcagaagttccagcctgccactgttctctgatgccatgccagcacca

SEQ ID NO: 22419 - DNA, 51 bp, Homo sapiens
ggaggtatgcctggactgggccaggtggtgttcccactgatgaagagcagg

SEQ ID NO: 22420 - DNA, 90 bp, Homo sapiens
gcggggtgcgccggcagaggatccagtgttcaccatcctggccccggaagggtcctgagaacattatctgtagctgtatctccccatgtg

SEQ ID NO: 22421 - DNA, 83 bp, Homo sapiens
gcgacctgagaccagtggtcatcgatgggagcaacgtggccatgagggatcatagacggtatttctatgtaaacgaacagtcg

SEQ ID NO: 22422 - DNA, 90 bp, Homo sapiens
agctgttgtgcatccagaggtggaattggggcccggactgcaagatggaggaaggcgggaacctaggaggcctgattaagatggtccatc

SEQ ID NO: 22423 - DNA, 147 bp, Homo sapiens
gcctcaccgccctcagccagaagggctacgccagcggcgtcgagaggaccatcctgggtgctggccctgtgctggagatgcctttgaagatgagaaacccccaaagaagagccttctctccaaagtttcacaaggaaagaggaaaag

SEQ ID NO: 22424 - DNA, 100 bp, Homo sapiens
aaagcacaaagcatggagaccctccctccagggtcaggagacaaacaaccagtcggcctcccccagcagggggcagacccaagccccagcccaagcccaa

SEQ ID NO: 22425 - DNA, 100 bp, Homo sapiens
ttctagacattcgtcgaagaaaaaaggaacttattgatgacattgaggttatctaccttgcctgctcctatgccacagtgtacctgatctacctgaaatt

SEQ ID NO: 22426 - DNA, 83 bp, Homo sapiens
cctgggtccacgccgagggcaggacgaacttcaccagttgatattcactgatggactccaaagaatcattaactcctggtaga

SEQ ID NO: 22427 - DNA, 75 bp, Homo sapiens
ggccgaacgatgtgcgagaactgcgcagacctggtggaggtgttaaatgaaagcctgcactgcccaaagtcttgg

SEQ ID NO: 22428 - DNA, 100 bp, Homo sapiens
tgatcgagaggatctggtgtaccaggcgaagctggccgagcaggctgagcgatacgacgtttgcctgagaatacagatcaacccacagaacaaagcggat

SEQ ID NO: 22429 - DNA, 75 bp, Homo sapiens
ggctcatgcgggatttcaagcggtgtggacactgccagcggctgcagccgacttggaatgacctgggagacaaat

SEQ ID NO: 22430 - DNA, 88 bp, Homo sapiens
tcatttgatgaagagcatagacatgcaatgaatgaactaggtggagccttttgccagcttgaccgaggccgtgcggagctcagttccc

SEQ ID NO: 22431 - DNA, 100 bp, Homo sapiens
attgtgagggaagaaacaagaggagagtgtacagtgtgagataatcagctacatagaagtacccacttatgaaacagatatatcctctacacaacttcag

SEQ ID NO: 22432 - DNA, 75 bp, Homo sapiens
cgcgcccggccggcccggagcaccgagctcgcggcacggtaggagtattctaccttgtaaatactgttatttgta

SEQ ID NO: 22433 - DNA, 88 bp, Homo sapiens
acaaaggaaaacgaggaaagtcccaggatgactactgtgtcaagtaattatgaggaattagaaaactcaggagatacaactgtggaat

SEQ ID NO: 22434 - DNA, 99 bp, Homo sapiens
ggcatttccagcccgcccacccagatctctggaaacatggctacagaacatgttaatggaaatggtactgaagagcccatggatactacttctgcagtt

SEQ ID NO: 22435 - DNA, 51 bp, Homo sapiens
gttttgtcttcctgtatgacacagacagggatgtccagaaggcttcttggg

SEQ ID NO: 22436 - DNA, 115 bp, Homo sapiens
ccggcggcggctgagccgcgctgcgcagccgacgcgggaatgaagcgggcgctgggcagatattggctccaataattgtggatactatgacttacaagcagtactaacacaccag

SEQ ID NO: 22437 - DNA, 100 bp, Homo sapiens
gccgctggtgatgacaagaaagatatggctcgtggacagcagaaaattcagtctcagcagaaaaatgccaaaaagcaagctggacaaaagaagaaacaag

SEQ ID NO: 22438 - DNA, 75 bp, Homo sapiens
gccgggaagcgagccgcgacccgagctggacatggtctgctatacagctcagactctcgtccgaatcctctcaca

SEQ ID NO: 22439 - DNA, 82 bp, Homo sapiens
ctcaactcagacatcttctggaagccccaggaggctgtgcagggccacgcccagatttcttctaccgctgcttccctgatgg

SEQ ID NO: 22440 - DNA, 51 bp, Homo sapiens
ctgcagccgcacctggccaaggtatggaagctccaaaaggaaagataccag

SEQ ID NO: 22441 - DNA, 89 bp, Homo sapiens
ggttacagctgtttccacgtgcggtgctcgtcgggagtgatcacctaccctacagggactttgaacatgtcggggatcgccctcagcag

SEQ ID NO: 22442 - DNA, 100 bp, Homo sapiens
gccggcgatccactcccggctgttcccccggagataatgagcttcagtccccaagatctgcgaagacgtttgtgggtgatttttccaggagaagaaggtt

SEQ ID NO: 22443 - DNA, 97 bp, Homo sapiens
cattggagtcacaatcaaagaactggatctttatctggcttactttgtccacactccgggttgttcctcaaagtcattcaagctgtactcgccgaag

SEQ ID NO: 22444 - DNA, 96 bp, Homo sapiens
gtcccgttaacgtctctgttagttcagagaaacactttgtgctactctgtggggctttggaaaagcatgttaaatgtgatattagggaagatgcaa

SEQ ID NO: 22445 - DNA, 100 bp, Homo sapiens
ccggggtgtaataatgttaactgagtactttgccagacgtttatcaaaatggggctgctgtcttctttcacttgtagtgacgagtttagctcattgagac

SEQ ID NO: 22446 - DNA, 75 bp, Homo sapiens
aggacccagaggaaacccagccgcttctggggcctcctggcggcaggcaaaacaacgagtggatgagaaacccag

SEQ ID NO: 22447 - DNA, 75 bp, Homo sapiens
gctttgctctctcttctgccatctgataataggtgctggagaatctggtaaaagcaccattgtgaagcagatgag

SEQ ID NO: 22448 - DNA, 98 bp, Homo sapiens
tcctaagactcagcactgttgcggggaactgatgactcggttgtttctgaagatcgacttaatgaaactgaactgacagatttagaaggccaacaaga

SEQ ID NO: 22449 - DNA, 50 bp, Homo sapiens
ctttctctcctgcctgggcaagcctcgaacggaaagatgctgaaggatgg

SEQ ID NO: 22450 - DNA, 80 bp, Homo sapiens
agggaacgtggtcggaggccgattcgacacagacaaggtatagtcgtctccccctccaccacggcaagtcctgcagaggg

SEQ ID NO: 22451 - DNA, 100 bp, Homo sapiens
aagcgaaacccaaggctccgccgcccagcctgactgactgcattggcacgcccagagcatgttccagatcccagagtttgagccgagtgagcaggaagac

SEQ ID NO: 22452 - DNA, 82 bp, Homo sapiens
aatatctgtcttcggtggactccttcggcagtccacccaccgccgccgcctcccagggacccagaccccaggaggcctcacc

SEQ ID NO: 22453 - DNA, 131 bp, Homo sapiens
gaacggctggcccagccaatcctggagctgctgttgcagcacttgttccccaaacaagtgctcctacattctgtactatactggcaattgctggagaagattttgcaattgttgcttctgatactcgattg

SEQ ID NO: 22454 - DNA, 84 bp, Homo sapiens
tgcagcgggagctggacggcgagcgcgagcggcgcgagaaaagacacctatggctgccgatgaaggctcagcagagaaacaggc

SEQ ID NO: 22455 - DNA, 51 bp, Homo sapiens
ggcttgcagcccagttgacccggtatcaacttgaactgaaggatgactaca

SEQ ID NO: 22456 - DNA, 82 bp, Homo sapiens
ctcccgccggccccaaagacgctaaacgtgccctactctgccccgggggagagggaaatcgtggaacacatggtccagcact

SEQ ID NO: 22457 - DNA, 83 bp, Homo sapiens
actgtttgtgagccaccaaaaccacagtgttctttgcctcaagacccagctattgttcagggtaagagtaaagtctccaccag

SEQ ID NO: 22458 - DNA, 75 bp, Homo sapiens
agatctcagtacagtagaagctctgatgcttgctctgtcaaggcacagcctattgtctcctttgctcagtgtgac

SEQ ID NO: 22459 - DNA, 75 bp, Homo sapiens
cagctggtggaggcgatagacgagtatcagattacctggagtagaacagaaaaattattatgtctgtgttccctt

SEQ ID NO: 22460 - DNA, 96 bp, Homo sapiens
gggagagcaaacttggctcagcccaatattacagtgacagagagaaacacagaaaactggatgatcacaggagtagagatcacaggtcaaatttgg

SEQ ID NO: 22461 - DNA, 82 bp, Homo sapiens
aacgcttcgctggccatttaggagctctgctcaaagccagacggtatttaacagactcccgacaaaaagcagaatgatcagc

SEQ ID NO: 22462 - DNA, 49 bp, Homo sapiens
ggggactggccacggcgctgctaggtttttcgttggaatatacgttgca

SEQ ID NO: 22463 - DNA, 83 bp, Homo sapiens
gtttttcggatcatgtctggtggctccgcggattataacaggtgtcccgacccaggctaagcttgagcatggctgagcaggag

SEQ ID NO: 22464 - DNA, 101 bp, Homo sapiens
gtggagccttcactatgggtgtcatcggtggcggagtcttccaggccatcaagggtttccgcaatgcccctgttcctgaactctttgcttccggaatccgg

SEQ ID NO: 22465 - DNA, 82 bp, Homo sapiens
aagggagaaatccgaaaacaggcactggaccacttcaatgcagatgggtctgaggggcatagaaggaaaaactggaaagtga

SEQ ID NO: 22466 - DNA, 100 bp, Homo sapiens
tacgccaaaggggagcaaagccgggctcggcccgaggcccccaggacctccatctcccaatgttggagacacctgaaagaccccgccgtggcatcccagg

SEQ ID NO: 22467 - DNA, 100 bp, Homo sapiens
tcccttgcaaatttacatacgagaatggcttgtgaaatcatgcctctgcaaagatccaaaaggtaattctggcacttggagactatatgggagccacttg

SEQ ID NO: 22468 - DNA, 82 bp, Homo sapiens
ctgggcatgagaccccttctcccaggaggggagtgtactaatggtcacttgatgtgcgctggctgttttatccacctactag

SEQ ID NO: 22469 - DNA, 90 bp, Homo sapiens
cccgagaaggtggacgtgctggtgtctgagtggatggggacctgcctgctggtacactgaggaggggacggctccgtcttcacattgtgc

SEQ ID NO: 22470 - DNA, 99 bp, Homo sapiens
tgggagacgacagaccgtttgtgtgcaatgccccgggctgtggacaggtcccgcggcagtgctggtggccatggttcccgtagccagaaggagttgccc

SEQ ID NO: 22471 - DNA, 75 bp, Homo sapiens
aatagggtctggcttcttttctgaagtgttcaagttaattggccttggtcctcacagctccaaaaagaaacagga

SEQ ID NO: 22472 - DNA, 98 bp, Homo sapiens
gtcccgtgctggcagtcatcctcatcatcctcattgtcatcgccatcctcttgttcaaaaggaaatccccatttggaagtacagaaagaaagactcct

SEQ ID NO: 22473 - DNA, 82 bp, Homo sapiens
aagaagcagctggacccgctcaccatctacggcatccggtgatttttagactctgaggagcagttggagctaatccacatta

SEQ ID NO: 22474 - DNA, 102 bp, Homo sapiens
gccctgtgcccctgaagaagcgcggatacgatgtcaccaggaaccctcatctcaacaaggctttgatgaactaggtggacttctcaaaccaacagtggcctc

SEQ ID NO: 22475 - DNA, 116 bp, Homo sapiens
tggatgattcgtatctaagactctgggacactcctgaagtcgggaaatggactaccgaccagactcccggaaatcatgttggtaggatcccagtctttttcgcctggagggcccaa

SEQ ID NO: 22476 - DNA, 83 bp, Homo sapiens
ggactttgcagaaaggcttcactacccttatcccggagagctgacaatgatgaatctcaggggatatgagactttctactcgg

SEQ ID NO: 22477 - DNA, 88 bp, Homo sapiens
ccagaggtggtacaattaaggatgactgaaaacatcctggaatcaaatagtgttacggcaacaagatgaagagttatcttaaggatca

SEQ ID NO: 22478 - DNA, 50 bp, Homo sapiens
cttgatgctttaatacagaaccagcatgctgccaggatatcgcagatgaa

SEQ ID NO: 22479 - DNA, 50 bp, Homo sapiens
tgccaaagcagctcattcacatacagctacatgggctgtgttgaagtgct

SEQ ID NO: 22480 - DNA, 49 bp, Homo sapiens
ctctactccaacaaccctggggtgtctactatgaaccatcctgtactca

SEQ ID NO: 22481 - DNA, 108 bp, Homo sapiens
gaaagaggtgatcaacaaagaggactttgtggcactggagaggcttacccaggggatggacattcagtggggcaatgtgtatgtgaagtgcccatcaattgctgcagc

SEQ ID NO: 22482 - DNA, 75 bp, Homo sapiens
ttgaatttcatctgtctgtgggaattgtaagcaagccaatggagatcttcgtggatgatgagacgaagttgacgc

SEQ ID NO: 22483 - DNA, 75 bp, Homo sapiens
tcctggggaacttcgttctgcacggggcccactcagctctgcaccagggaacccagctgagttcgtcgtgaacac

SEQ ID NO: 22484 - DNA, 101 bp, Homo sapiens
cttacaacatggcagacattgacaacactattcctgatcagagaactccagttgcttcaacacacagtatcagtagtgcagccaccccagatcgaatccgc

SEQ ID NO: 22485 - DNA, 98 bp, Homo sapiens
gaaaaagaagttcatcagattcaaggaggtgttcttccctggacgccatggtgttccctgcacttgggtgtggaccatcttcttcttctccctgggct

SEQ ID NO: 22486 - DNA, 97 bp, Homo sapiens
gaagatgaagaccagagaaaccctgcaaaggagtccctagagacacctagtaatggtgtcatggagaaactccagctgggcccagagattctgcagc

SEQ ID NO: 22487 - DNA, 134 bp, Homo sapiens
aaaacagctacaactatatgaaattcatggagctcagaaaattgctgatggagtggtaaaaagaacgtattctcatggtacttacagagctggcccaatgagacaaataagcttggtgggagcagttgatgaag

SEQ ID NO: 22488 - DNA, 97 bp, Homo sapiens
tggagtttcaaatcctgctctactcacagccgcaccctttgcatatctctacctacttgtgcataattcagcatccagcagaggaagacaaaatgtt

SEQ ID NO: 22489 - DNA, 83 bp, Homo sapiens
ctggttccgagatgggaaaaagtgcctgaagacgtacactggccacaagaatgagaaatactgcatatttgccaatttctctg

SEQ ID NO: 22490 - DNA, 100 bp, Homo sapiens
cgagatgtccggctgcagcagcaagtcccatcggaggacctccctgccctgtataccgagggaacagttggtgagtttgtaagtgatgcccttctcgttc

SEQ ID NO: 22491 - DNA, 82 bp, Homo sapiens
ccgaagctacagactacagatcgggcactttctgtgtctagagttgcatgctgagaatttgaaaaatgaagatgatgtagac

SEQ ID NO: 22492 - DNA, 82 bp, Homo sapiens
cgaaccaatgccactcagctttgaggaaaagccagtttatatccaagacttagatgaggagctatcgaaaaaccttgaactg

SEQ ID NO: 22493 - DNA, 75 bp, Homo sapiens
gggatcctagcacggcgcccatcttacaggataatgaagagttgacaattagttgcccagtgcctgcagatgagc

SEQ ID NO: 22494 - DNA, 90 bp, Homo sapiens
gccataaggaagccaccatggagcttctccgagtgaaggaccgggccatcgagctggagcggaatccgccctccccgccttctccggatg

SEQ ID NO: 22495 - DNA, 100 bp, Homo sapiens
ctctgtctcgctcagaggagatgcaccggctcacggaaaatgtctataaggagcacgtgaattgcctctgcttacgttcaggccctgtcctaaacccagc

SEQ ID NO: 22496 - DNA, 82 bp, Homo sapiens
tctgagccgactgcggtggtcaagagatgtgcacccccgccaatacccctgctacaccccccaacttccctgacgctctcac

SEQ ID NO: 22497 - DNA, 75 bp, Homo sapiens
cctgagctgtgcaaccaatcagagtccagtggagaagagggaaggcccgcgaggggcgcagccccaccaggtggg

SEQ ID NO: 22498 - DNA, 100 bp, Homo sapiens
cttcagattatgcagtgcatccaatgagccctgtaggcagattttctgaatttccagatcccatgtggggttcagattatgtgcagttgtcaaggacacc

SEQ ID NO: 22499 - DNA, 90 bp, Homo sapiens
accacatgcaaacatacaagcagtctcacctcaggatcccctgccgtggtctgtctgcccactgaatggtaaccacacgggctacgatga

SEQ ID NO: 22500 - DNA, 82 bp, Homo sapiens
gaaatcagggagctcttaacccagtttgaaacgtaactggttccctgaccaggtatcacctcttctgggctcaagatggaca

SEQ ID NO: 22501 - DNA, 51 bp, Homo sapiens
gccaccccgcgggatacgcctcagcgcggaacttgcttgctagaaaacaaa

SEQ ID NO: 22502 - DNA, 50 bp, Homo sapiens
agatcccccacgtggtgcggctcaagactccgtgggaaggaggcttgttt

SEQ ID NO: 22503 - DNA, 80 bp, Homo sapiens
cctggagctgggtcccaggaatgtgctgctgttcctgcaggacaagggtggagccagccatcctgagacgtccgtacagc

SEQ ID NO: 22504 - DNA, 90 bp, Homo sapiens
cgggatctgagttcgacttcattgtcagaatttcgctaaggagtttgtgatcagtgatcggaaggagctggaggaagatttcatcaagag

SEQ ID NO: 22505 - DNA, 100 bp, Homo sapiens
cagagacatgagatggtagccaacccctcagttgattatggaagattcccacaagagtaccacgtcagagacagcacctcaacctggttcagcagttcag

SEQ ID NO: 22506 - DNA, 50 bp, Homo sapiens
tctaaataggcagtttttatttagccacagttgaggctattgaggctgaa

SEQ ID NO: 22507 - DNA, 100 bp, Homo sapiens
cctctcctgcctgcgctggtcctcagcaccagagtttccaggatggcttctgcatcaacttctaaatataattcacactccttggagaatgagtctatta

SEQ ID NO: 22508 - DNA, 98 bp, Homo sapiens
aaaggctgtctctagacagcagtcttgtgggatcatgtaccgcaagtcctgtgcatcatcagcggcctgtctcatcgcctctgccgggtaccagtcct

SEQ ID NO: 22509 - DNA, 100 bp, Homo sapiens
agtctgcggaagtggtgacccgtgggacgcggctgagacaggaactttatattgctgttggaatatctggagccatccaacatttagctgggatgaaaga

SEQ ID NO: 22510 - DNA, 95 bp, Homo sapiens
ttgtggcttaaactcttggcatttggctttgcctttctggacacagaagtatttgtgacagttggtacgccttattacatgtctccagagagaat

SEQ ID NO: 22511 - DNA, 96 bp, Homo sapiens
aagctgcgccacattgtggatgaggtcaatggattaataagacatatctgaagagatggattaagaatgctttggattaaggattgtggagcacat

SEQ ID NO: 22512 - DNA, 87 bp, Homo sapiens
agatgggcatctattacattccaaaatcaatgtggactgaacataaatcacctgatggaaggacttactactacaacactgaaacca

SEQ ID NO: 22513 - DNA, 96 bp, Homo sapiens
cttctatctgtgcagccacgcaggcatccaggaacaggagtacagctgtgtagtaaagatgccttctggtgaatttgcacgtatatgccgagatct

SEQ ID NO: 22514 - DNA, 100 bp, Homo sapiens
atttcacctgaagaagcttgggaactcctgccaaaaattgtagcacttctcacattgcaatgattgtgttcaattagaccttcaggacctctccaagaag

SEQ ID NO: 22515 - DNA, 100 bp, Homo sapiens
gcgggagctgaaactgcgccatcgtcactgtcggcggccatgacaccgctcgtctcccgcctgagtcgtctgtggattcccaaatgctggaaaatcctct

SEQ ID NO: 22516 - DNA, 75 bp, Homo sapiens
tgtctactgatcatctacctgatggtggagttggcatgaacttaacagcagcagatactgtgatttttgttgaca

SEQ ID NO: 22517 - DNA, 82 bp, Homo sapiens
gaagaaccaggccgtgtgccatgactacgacatccacttctaccccaccttccgggaacaagatcactcaaggtgaaggata

SEQ ID NO: 22518 - DNA, 51 bp, Homo sapiens
ctcagagttcctcaaagttgcagaggaaaatgtttcaacgtgcgcaagagt

SEQ ID NO: 22519 - DNA, 74 bp, Homo sapiens
acccgccggcccgcgggtctacttcctcaaagatgtgaagttcatttccaatccgccctccatggtggcagcgg

SEQ ID NO: 22520 - DNA, 83 bp, Homo sapiens
tggggtgagaccctcacttcatccgcagcctcgtcttacagcgtgactgcaaagaaaaagacttttgttttgcaaaagaaaag

SEQ ID NO: 22521 - DNA, 100 bp, Homo sapiens
gtggatagaaataaatatcaaattcacattccattgcctcctaagattgacccaacagttaccatgatgcaggtggtgaacatcccgtccttcattgtcc

SEQ ID NO: 22522 - DNA, 101 bp, Homo sapiens
gtgatcataggagaaaaccatttcagtcgacctgataaaaagcaacgtatggtaaatattgaaaactccaggcatcgaaaacaagagcagaagcaccttca

SEQ ID NO: 22523 - DNA, 83 bp, Homo sapiens
cgacaagccgctggcagccgcggatctcaccgccgctcagggatgaccgagtgggagacagcagcaccagcggtggcagagac

SEQ ID NO: 22524 - DNA, 82 bp, Homo sapiens
caaggtcctgaggtctaagagcttactcaatgagattgagagtatctatgatgagggcatatcgatgcatttacttcaaaac

SEQ ID NO: 22525 - DNA, 98 bp, Homo sapiens
ggacatcacgggctataaaccagctcctggagatctggcatatcccgataagttagtcatgatggaggaattggcagcaatgaaacagattctcgtta

SEQ ID NO: 22526 - DNA, 82 bp, Homo sapiens
gcagatcctgacctctctgatgagatggatcggaccaagaatcgccttcagccctgtctggtgcatccttggcagaaagtga

SEQ ID NO: 22527 - DNA, 82 bp, Homo sapiens
tccccagctctgcagccacatactatccgtttgttcaggaaccaccagtgacagagaatcattgtagtcaatcattttccag

SEQ ID NO: 22528 - DNA, 50 bp, Homo sapiens
cttcctggactcctgagcagaggttccagaatctcagcttttacctggac

SEQ ID NO: 22529 - DNA, 74 bp, Homo sapiens
catctttgaactactgccggagcttctgccaggtactgctataaccagaatttggtagaaaaaggatttacttg

SEQ ID NO: 22530 - DNA, 101 bp, Homo sapiens
tgatgatggaaatgaagtataataccaagaaagccccacttgtatggaagctccaaaaggaaagataccagattgatcttgatcacctctgcctccccagc

SEQ ID NO: 22531 - DNA, 100 bp, Homo sapiens
ccaactgggaaggcatcctggggctggcctatgctgagattgccagggaccctgatgctcccataagacagaaaatgccccttgatgatctggatagaga

SEQ ID NO: 22532 - DNA, 100 bp, Homo sapiens
ccccggctccatcgacctcaaggacatcaacttccggccgcagatgtcccaggacactggggttgggaaatcaagcatcgtgtgtcgatttgtccaggat

SEQ ID NO: 22533 - DNA, 82 bp, Homo sapiens
ttcgttgtgccagcgactaaaaagaggtgccaagtcctgccctgccaacttcttggcagctgccgacgacaaactcagtggg

SEQ ID NO: 22534 - DNA, 74 bp, Homo sapiens
ctgcaacaaccacaaacaaaaagcctggccagctatatgttctcctttcagccaagacctttcaccagtgcagg

SEQ ID NO: 22535 - DNA, 75 bp, Homo sapiens
aagttcgagcactaatatttaagaaagaagatgttaactttcaggtggtggaagatggatatgaattttttgcta

SEQ ID NO: 22536 - DNA, 83 bp, Homo sapiens
tgcacggtgcgggaccacgtccactgcttgggtgtcatcaatcttacagaagaagtgctgtgggtcaaagtgaatataaacat

SEQ ID NO: 22537 - DNA, 115 bp, Homo sapiens
tttaataaatcttcctgccaattcaacaatcaaaaagaaagctgctgttatcatcatggctgtagaggttgatggaaatcacaatcttctgacaaagctttctctggaagaggaa

SEQ ID NO: 22538 - DNA, 100 bp, Homo sapiens
ggccacctggagtgacccccacaaggccaagactatgctgaaccgaatcccacttggcaagtttgctgatgcttctcaggcagcatgaagaagaaataag

SEQ ID NO: 22539 - DNA, 83 bp, Homo sapiens
cggcggcagcggggtccgggtccggagcgccacacacccaccaaggctccggatgtgttccccatcatatcagggtgcagaca

SEQ ID NO: 22540 - DNA, 75 bp, Homo sapiens
gggaaagaccttgatcccaacaatgttatcattgagcaccaccaggaccagctgatcattccagcccacagcaat

SEQ ID NO: 22541 - DNA, 98 bp, Homo sapiens
ctggatgagcagtttgaacctcagaagactctgttcatccagtgcgatgtggctgaccagcaacaactgagagccatccagtccaatggatcagatgg

SEQ ID NO: 22542 - DNA, 100 bp, Homo sapiens
agatacaaacatgtggagcagaatggtgagaagtttgtgttatttctcaaactctgaggctgcggagttcacacattgaaatctgtcatctttttcagag

SEQ ID NO: 22543 - DNA, 83 bp, Homo sapiens
tccgggtgaaagcctactaccgcggacctgcctagagctggaacgttacctccagagcgagccctgctatgtttcagcctcag

SEQ ID NO: 22544 - DNA, 83 bp, Homo sapiens
cccggaaaggccggaagcggccgggctggatcaggatgaggacgagattgaggagctgcgggccgagatgctggagatgcggg

SEQ ID NO: 22545 - DNA, 83 bp, Homo sapiens
cctccactccgtcccccgcgggtctgctctgtgtgccatggacgggttgttgatcattatgaaaatcctagaaacgtggggtc

SEQ ID NO: 22546 - DNA, 86 bp, Homo sapiens
ccggggtggtggggacagaggtggctttggccctggcaagatggattccagcgctggaggagctgacctttgacccgagctctgcg

SEQ ID NO: 22547 - DNA, 97 bp, Homo sapiens
gagaatgtcatcaagcagcacattcaagatgtcctggcgtccgcaataccgtagctccaagttccggaatgtctacgggaaggtggccaaccgggag

SEQ ID NO: 22548 - DNA, 95 bp, Homo sapiens
taaagaaaacacttgatcctgatcctgccatccgacgtccaggcaagtcttgcagaaatccacagcaatatgtgggtaagaaatggtctgcaaat

SEQ ID NO: 22549 - DNA, 113 bp, Homo sapiens
cacgctgcgggcccgggccatggccgccgccgatgccgaggctactgcagcactggggtgtcagttgttggtccgacccagaacgcttcagttctgctctgcaaggatatata

SEQ ID NO: 22550 - DNA, 115 bp, Homo sapiens
tatgaagcatcattagaatatgtctttaaaattcaagaggtccaagaaaaaaagaagtttgaatttgttgaaccgacctctgtgagtgaaagccttcagagggaagctgctaaga

SEQ ID NO: 22551 - DNA, 100 bp, Homo sapiens
ggcttaattcatcagcattgccaaatgggggcagaaggcatggagggaggtgcttcaggaaacctgcattctcgaaaacttgttagctttacattgtcag

SEQ ID NO: 22552 - DNA, 80 bp, Homo sapiens
aaactcttgttcccctttaggggagctctttgaccatggctgtgactctctttccacagaacagctttgctgagccatca

SEQ ID NO: 22553 - DNA, 100 bp, Homo sapiens
gtaatggtggatgaagttgttcattgtttgtcaccacaaaaaggacagggtatgcagaagttggctagtcaatacctgaagagagattggcctggagtaa

SEQ ID NO: 22554 - DNA, 100 bp, Homo sapiens
ctgaaccggctcacagcctgctccctcgtgcttctgggccacatcttctatgtgctgggaaaccacaggttccagggtcacccccgagaggacaacaggc

SEQ ID NO: 22555 - DNA, 100 bp, Homo sapiens
ggccggctgcgaagacgcggtgggccgcccctccggaccacagccgctttgtcaactgtgtgcgattctctcctgatgggaacagatttgccacagccag

SEQ ID NO: 22556 - DNA, 100 bp, Homo sapiens
tctactgcacactgggcagaagatgcctctgattggtctgggtacctggaagagtgagcctggtcagccttccttgaatccagaagctggcaaacagcat

SEQ ID NO: 22557 - DNA, 100 bp, Homo sapiens
ttgtaccgcataactgaagccactaagacgtctataggatcgggtgaaccaccaaccggcaattgaaagctgcacagcctgaaattacctttattcaatt

SEQ ID NO: 22558 - DNA, 98 bp, Homo sapiens
ggaggcgttggagcgcggaaatctggaaccgggatggcgacgtctacactgagtcggaggcgaagattctggacaatcaggaagtccaagccacaatg

SEQ ID NO: 22559 - DNA, 90 bp, Homo sapiens
gcggccagcgcgggcgcggccggagaccgtggggcccccggttgccgccccctcggggaccccagggagagccaggacctcctggacaac

SEQ ID NO: 22560 - DNA, 95 bp, Homo sapiens
gcacatcgtggtggtcggatttcaccacaagaagggctgccagacctaatctgggagcctgcaagtgacaacagcctttgcggtccttagacagc

SEQ ID NO: 22561 - DNA, 82 bp, Homo sapiens
ggcaaactgtcagaaaagagtagcctgggctgtctggaaatctgaggtcatgatgatgggcagcgcccgagtggcggagctg

SEQ ID NO: 22562 - DNA, 101 bp, Homo sapiens
gctcactcccttaatctgtccgtctagaggtttggcttctacaaaccaaggtatcgtcagatcctggaaaaagccattcagttatctggagcagaacaact

SEQ ID NO: 22563 - DNA, 83 bp, Homo sapiens
ttcaaagatgtgagagagaaaagtgagtttattctgaagagcatccaggtgactgctacattgagaaacttggttgattcatc

SEQ ID NO: 22564 - DNA, 87 bp, Homo sapiens
tttaatggaaaatcgcttggttaaaacctgacacttttaacaggttgactatagtcaatggggccaatggagccaagtgtatggaaa

SEQ ID NO: 22565 - DNA, 90 bp, Homo sapiens
atagtactacattttgccgcacaaacacatgtagtgccatttttgtgacaaggcctttatgaaccaagcttttctacaaagtcacattca

SEQ ID NO: 22566 - DNA, 98 bp, Homo sapiens
ggcccctgaagttggcactgcagcagacagctccctgggcaccaggcagctaacagatatctaacagtgatacgccttcaccaccacctggtttgtca

SEQ ID NO: 22567 - DNA, 83 bp, Homo sapiens
aaaaactcaggcttcgccacctgcgtgcaaagaactgtggctgcaccatctgtcttcatcttcccgccatctgatgagcagtt

SEQ ID NO: 22568 - DNA, 82 bp, Homo sapiens
gacgcggggccatgtgcaggaccctaacgacaggcgcctccggcccatttacggctttatcctgtggataaacgcagagtga

SEQ ID NO: 22569 - DNA, 100 bp, Homo sapiens
gacaaatcctagcgaatttttggagcatctccacccaggaacctcgccatccagaaaacgtgctggccaaagcgctctatgacaatgtggccgagtcccc

SEQ ID NO: 22570 - DNA, 75 bp, Homo sapiens
cagggacaaagagatctggacagaatcgccggacaggtggcagtgctccttttggacttttctctaggtttggcg

SEQ ID NO: 22571 - DNA, 100 bp, Homo sapiens
gaccagtttaaggctcacagcgggcgccgcgtgaatgagggaataaacattcgcagaaccagtaagagcaaagccttctagacaagctcagtggaatctg

SEQ ID NO: 22572 - DNA, 100 bp, Homo sapiens
ggacggaagacccctggctctataagctgaattatggcagcccagtcaagattctgctctctttgctgaactcggttatttcacagacactgatgagctg

SEQ ID NO: 22573 - DNA, 74 bp, Homo sapiens
ctgaattatggcagcccagtcaagaatttcttcaggttgaattacctagaagtttgtcactgacttgtgttcct

SEQ ID NO: 22574 - DNA, 100 bp, Homo sapiens
tgggtcctgcggctgcccccgggcagcaagggggaggcccccaagggaacgatcagcgttggagtagatgccaccgacctttttgatcgctatgatgagg

SEQ ID NO: 22575 - DNA, 51 bp, Homo sapiens
ctcagctacgaggaggcgctgaggagaggaaaagcttttgacatcacctat

SEQ ID NO: 22576 - DNA, 89 bp, Homo sapiens
atcaaacagctatggtgatgattagagacatactaatgtacatggtattaatctctggagaagacacatccacagttagcactttcttc

SEQ ID NO: 22577 - DNA, 97 bp, Homo sapiens
gcgcgcggggaacgggctgctcatgacaccctgctacacggccaatttcgtggccccggaggtgggccttcaccttgatcatcatctcctcctacac

SEQ ID NO: 22578 - DNA, 115 bp, Homo sapiens
atcatataaacaagacagggacatcgcacttctggatttaatcaacttttttatccagtgttcaggatgtcgaggtttgcgaggagcgatcgcatttgccttagctattcggaac

SEQ ID NO: 22579 - DNA, 90 bp, Homo sapiens
cgccgacgcctcagccgcttggggcccgcacggaccctctacttcaggggatatgagactttctactcggaatatcctgagtgttgcgtg

SEQ ID NO: 22580 - DNA, 90 bp, Homo sapiens
tgtggagctgcgaggacacactgtgatcctgcacgcccagcccgggctccaggtggctatggaccgccccctgcaggaagaggagccccc

SEQ ID NO: 22581 - DNA, 75 bp, Homo sapiens
agaacagctgtggaaagaagttgcaaaacactgggtttctctggaaacccccctggtaagtgtggaggaggcggg

SEQ ID NO: 22582 - DNA, 100 bp, Homo sapiens
ccagggagagcaaggcgcgcggcgactccgggtaaaccagacttgaatacaacattgccaattagacaaacagcatcaattttcaaacaaccggtaacca

SEQ ID NO: 22583 - DNA, 90 bp, Homo sapiens
gtgtctccaatgacaaacgagatgtaaaagtgtcactgtgtttctaagcatgaattgaggaacagaagaagcagagcagatgatcggagc

SEQ ID NO: 22584 - DNA, 75 bp, Homo sapiens
atgctcaagagtgctaatttaggtatcacaaagtcgtgaagaaaggaaaggccaagaaagccctaaaagagtttg

SEQ ID NO: 22585 - DNA, 100 bp, Homo sapiens
aacttaatccacagcaagctcccttatatacagttgaatttctgaatgaaaagctggaaaaaagggaggctcagttattatctcttagtaaggaaaaagc

SEQ ID NO: 22586 - DNA, 98 bp, Homo sapiens
cttcagtgcgcaggaagtggggcagctgcgggcgctgcgtgccgtgttccggagccagcagcagactgtcagcatcaataaggccattaatacgcagg

SEQ ID NO: 22587 - DNA, 98 bp, Homo sapiens
gaggccctggcagccttgcacgtgacggaagaaaaaatgctgggcatcttggtgcagcacaaagtccggagtggcgtctcgggcatcgtgggcatgga

SEQ ID NO: 22588 - DNA, 96 bp, Homo sapiens
ctggcctccgctcgggcctccacacgggcctccgaagagctgccgcgacgcccggcccgcagggcagattgtgccggctgcggaagagatatcaag

SEQ ID NO: 22589 - DNA, 100 bp, Homo sapiens
tacaactaccgctgctggaccacaaaccgctgccagaaaaatcccgtaccagctttggatctcggacagcaactccagctcaaagtgcagcgcctgcacg

SEQ ID NO: 22590 - DNA, 82 bp, Homo sapiens
gtgaagctcaagttgctactcgggacgctgcacctcccgcgccgcacggtggacgagggtgtccgtgccgctgctgaagacg

SEQ ID NO: 22591 - DNA, 102 bp, Homo sapiens
gtatagcttctgacagtggagacactggcattggaacttcctgttctgatagcgtggaagagtccagcctctgatgaagcaggagagaaagaagccaagtct

SEQ ID NO: 22592 - DNA, 100 bp, Homo sapiens
aatgcttcatgtattgagcaaaataaagaaaatcagagttttgaaaatgaaactgatgagacgacaactgcatcacgttgggtggtttccatttagaccg

SEQ ID NO: 22593 - DNA, 100 bp, Homo sapiens
ggccgctcaaagccgggagatcgactgtttgagcccggaagcgcagaagctgggaagagaaggaacggtggatccgtgccaagtacgagcagaagctctt

SEQ ID NO: 22594 - DNA, 100 bp, Homo sapiens
ccctggcggtgctagaagaccggttccagccgaacatgacggtttgtgaaatggctgctgacatttctgaatccagcggggctgactgcaaaggagaccc

SEQ ID NO: 22595 - DNA, 98 bp, Homo sapiens
aagaatcgccttcagccctgtctggtgcatccttggcagaaagtgaggaggaaaacacccccattacccatctctgacagttagagccgatatcactg

SEQ ID NO: 22596 - DNA, 50 bp, Homo sapiens
acagtatttactgagagctcatcaggtacagagccttcatttttattttg

SEQ ID NO: 22597 - DNA, 82 bp, Homo sapiens
atttccttctgcctgctgcccgatttctatttgactggcaatagtctggcctgtctccactaactctggaccctaaaacagc

SEQ ID NO: 22598 - DNA, 100 bp, Homo sapiens
acctgggctgggaacccgcggtggagcgggacacgaacgtgttggaatcgaagcctcttaaaatggcagatgacttggacttcgagacaggagatgcagg

SEQ ID NO: 22599 - DNA, 51 bp, Homo sapiens
catgagacagtagtcaaatactcaggtgagaatgagatggtgatcatgaga

SEQ ID NO: 22600 - DNA, 83 bp, Homo sapiens
gtggacatcacggacatccagaaggtttggtgcacctcgatttggaggaagtagggcagggcccttatctggaaagaagtttg

SEQ ID NO: 22601 - DNA, 100 bp, Homo sapiens
gatctgtgcctccaaccagcagagagggattgagcttcattgaactcaacagagccaacatttcatagcaccatggttttccgcagagcagacaagaatg

SEQ ID NO: 22602 - DNA, 90 bp, Homo sapiens
cggacctgcggactagcgaacccggagttggatggatttattgctcgaaactgggccaatcaaagatcagctttgggaagtgctcttgat

SEQ ID NO: 22603 - DNA, 100 bp, Homo sapiens
ccccagcttggcgtcctgagaaatgggtaatactgaacaacctgtccaaactagcaagattggacttggaagaagagagtatcagagtttacaacatcgc

SEQ ID NO: 22604 - DNA, 99 bp, Homo sapiens
aaggagctccagaaagaacttcaagaacagatgtcccgtggtgatccatttaaggattgctgcatggtgctgaaccattgccatattatactgctgccc

SEQ ID NO: 22605 - DNA, 111 bp, Homo sapiens
agtcttcccgcgtccgccgattcctcctccttggtcgccgcgtccttggctggcgtacccaacatgagtgaagtttcctgcaagaaacgggacgactatttggaatggcca

SEQ ID NO: 22606 - DNA, 74 bp, Homo sapiens
cgacgcaagatggcagccaccacgggctcggcacacagcaagaaggaggccatcagcaaactgggaagaggacc

SEQ ID NO: 22607 - DNA, 74 bp, Homo sapiens
gattccaagtaactcttatttggtaaagaatctcatttggacacattgagtcgggcacaactgacccaactttt

SEQ ID NO: 22608 - DNA, 111 bp, Homo sapiens
gagcagttccgggagctgctggaggctcgcggcgccggctgctctagcgagcagttcgaggagctcctcaaaactctaccctttcccaagataccccagaggaagacccca

SEQ ID NO: 22609 - DNA, 75 bp, Homo sapiens
gaaatgagactccctcagatccagtgataattgacaggaaggtaaaccagaagctctttgggttgaagaaagatt

SEQ ID NO: 22610 - DNA, 50 bp, Homo sapiens
cttcaacattaagtcctgagaaagctcaagttcatgtggggaaacctgac

SEQ ID NO: 22611 - DNA, 100 bp, Homo sapiens
taagctgaaggaaactgctgaaaacagcctcaagaaaccagtaacagattgtgttatttcaattgggaaaatgaggtacgttagtgttcgcgattttaaa

SEQ ID NO: 22612 - DNA, 74 bp, Homo sapiens
aagaagaatcttctggtcacaatgcttattctccttcgagaactcatagaacggaagaccagctccttggatcc

SEQ ID NO: 22613 - DNA, 90 bp, Homo sapiens
tcctccttcccttctgtgagctatgtctcaggaaacccagcgtttgctggcagaaccagttcctggcatcaaagccgaaccagatgagag

SEQ ID NO: 22614 - DNA, 74 bp, Homo sapiens
cccctccgccccgacccgggccccgcggccctcgatgaggaagaagccatggatttaataaatagagaaacaat

SEQ ID NO: 22615 - DNA, 100 bp, Homo sapiens
agacggtcatctcgagtagcgacgacgactccatcgtgctctatgactgccaggagggcaagtgcagcggaactgctgcctgacgctctgcaacttcagc

SEQ ID NO: 22616 - DNA, 100 bp, Homo sapiens
ttaactacacagaattcacgcagtttctccagctgataggaagatgtcttcaggaaatgctaaaattgggcaccctgcccccaacttcaaagccacagct

SEQ ID NO: 22617 - DNA, 75 bp, Homo sapiens
cctactgcaatctactgcactcgaggaagccttggctcaagctttctggattgacatcaagcgcatggatgaccc

SEQ ID NO: 22618 - DNA, 100 bp, Homo sapiens
gctgctcagcgccaggcatcagctgggaagctggcgtgggcaggccagctgtacctggcctggagctccagatcacaagatttctgttgtgaaggatgtg

SEQ ID NO: 22619 - DNA, 50 bp, Homo sapiens
ccgagcctttgatttgagtggggaaccttctgagaagcactgattatgac

SEQ ID NO: 22620 - DNA, 100 bp, Homo sapiens
aagaactgccttcatccatcaccgggagcaagtgtggaagagatgcatcaacatttgcattggcatcaacaaaagtcagaattcccgggaacttgaacag

SEQ ID NO: 22621 - DNA, 75 bp, Homo sapiens
cgcggtgggtcctcgcttgcagttcagcgaccacgttggcagatgcactacctgaacactcccctgccaaaacct

SEQ ID NO: 22622 - DNA, 75 bp, Homo sapiens
gccgaaccgagccggggcgccgggagctattgggacctgcggtggctgacaagattttgaaaaagaaagaatacc

SEQ ID NO: 22623 - DNA, 75 bp, Homo sapiens
caacttgatgatcaagagggcatttcgtgaccaagaatatggcccaggtgaccaaagccctggacaaggccctga

SEQ ID NO: 22624 - DNA, 101 bp, Homo sapiens
ctgctgccgctgccgccctgagtcactgcctgcgcagctccggccgcctggctccccatactagtcgccgttaatgaaggagttcccccttctgagtatgt

SEQ ID NO: 22625 - DNA, 82 bp, Homo sapiens
agggtgtacaaatacccctttgaattaattatggctcacccccccaggcagcagcagcagttttcatctctggatgacaagc

SEQ ID NO: 22626 - DNA, 100 bp, Homo sapiens
tcttctcggtcaaacctttttgaagatgcaacgagtgcacttgggttttaaccaagaagatctggaagaagaaaaaggtgaaacacaggtaaaagaagca

SEQ ID NO: 22627 - DNA, 100 bp, Homo sapiens
gcagggcaacctggacccctgtgccttgtatgcatctgagaaagaaatactcgacgcttttgacaaaatgtgctcgaagctgccgaagtccctgtcggaa

SEQ ID NO: 22628 - DNA, 83 bp, Homo sapiens
ccgtctgctggccatcgtggcagacctctacgagcaggagcagtacagtctggcgaaattgatattgtgaatcacaagacagg

SEQ ID NO: 22629 - DNA, 97 bp, Homo sapiens
ggcaaaggcaaaggcggctcgggagattcagccgtgaagcaagtgcagatagatggccttgactacaaatccctccaggatatcattgccatcctgg

SEQ ID NO: 22630 - DNA, 100 bp, Homo sapiens
ctttttgtggtgattgtgatgtttgcctggtctatagttggtcaaaaggctgagtttcaaattctggataatgtagactcaacgggagagttgatagtga

SEQ ID NO: 22631 - DNA, 75 bp, Homo sapiens
gttggggcggcctggctccctcaggtccttgaatgggcaagagggcacatgaagtacggcgtcctccacattcac

SEQ ID NO: 22632 - DNA, 50 bp, Homo sapiens
ggagatatggcgcaactgcggcgcgttctgactcctcaggagcaaaaaac

SEQ ID NO: 22633 - DNA, 100 bp, Homo sapiens
caacagactgagcgcgtccaggcctgacagctctgcggctcgggccctgaggtccccagtctatgtgaggatctcctgtcttctgttgaccagccactga

SEQ ID NO: 22634 - DNA, 100 bp, Homo sapiens
gatcccttctctgatttgctgtcagccatgaacggatggatgtgatgcctgctagccaaaaggcccatgaagagcatcatgcttttgaaggtggacgtgg

SEQ ID NO: 22635 - DNA, 82 bp, Homo sapiens
tcgcttgaaaagactgggcttgtccttgctggtgcatgcgtcgtcggcctctgggcagcagatgagttttgatcatcctgag

SEQ ID NO: 22636 - DNA, 128 bp, Homo sapiens
tcagtgacactattggacaaagggtggatgaaattgatgctgctattcagagatcacaacagccagagactgctgctactttgaaacgtacgatagaggccctgatggacagaggagcaatagtgagg

SEQ ID NO: 22637 - DNA, 97 bp, Homo sapiens
gctgagtaagccgggcacggcggccgagctgcggcagagcgtgtctgaggtggtgcgcggctccgtgctcctgctatcggcaggaccctcatccccc

SEQ ID NO: 22638 - DNA, 118 bp, Homo sapiens
aagagagtccagttcggagtcctgagtccggatgaactggtggacatcttcaataaggagctactgctaatccccatccacctggaggtgcattggtccctcatctctgttgatgtga

SEQ ID NO: 22639 - DNA, 74 bp, Homo sapiens
tctgttcttatgacctttccacaacttggaccagttcagcctattccttgttatggaggagatgtataagaaag

SEQ ID NO: 22640 - DNA, 100 bp, Homo sapiens
gccgaccgcccgcacatccgtcgggcaatttgtgtatggtgattggtggagccaacctcggtcgtgttggtgtgatcaccaacagggaaagacatcctgg

SEQ ID NO: 22641 - DNA, 98 bp, Homo sapiens
gggccacgcacctcgtcaccaaggccaaggcgaccacccctacgagtgtgagttctgtggcagctgcttccgggatgagagcacactcaagagccaca

SEQ ID NO: 22642 - DNA, 90 bp, Homo sapiens
aaccaacgcctggctcggagcagcagcctctgaggactttccttatcccagttgattgtgcagaatacactgcctgtcgcttgtcttcta

SEQ ID NO: 22643 - DNA, 83 bp, Homo sapiens
cttctcaatcttggaacagcacccccttctttaagttggaagctgaaggtgttcctgaagtatctgaaaaatatgaaattagc

SEQ ID NO: 22644 - DNA, 76 bp, Homo sapiens
cccaactcaagcaaaaccggagatgaatatgacagatacctagcatctagcaaaataatggcagctgcttaccttg

SEQ ID NO: 22645 - DNA, 100 bp, Homo sapiens
ctggctcaggaacagggacagcacctcatcccctggatgggggaccacaagatcctcatcgacagagcggttccgccaccccagccgcagatgtttggtg

SEQ ID NO: 22646 - DNA, 100 bp, Homo sapiens
agagaatgggggcaggagctctagccatctgtactatctgttatagtccctgggtcaagacaacaatttttataccttcgtcgtggttcagaaaggagtc

SEQ ID NO: 22647 - DNA, 112 bp, Homo sapiens
cgagaccccgtcggacccatggtttccagtgcagcgcggagtgggcgatgccagcgtgccagtgccggtggtggtgtgcacattgagccccggtatagacagttcccccagc

SEQ ID NO: 22648 - DNA, 80 bp, Homo sapiens
atttgctagtaacgtcatggaggatgaacgacagggacagtatggaaattaccagcagtgaaaaagtacttacattccag

SEQ ID NO: 22649 - DNA, 75 bp, Homo sapiens
aaggtgcttccggaaagcttcaagatgtgttttcgcattataacaaggacctgttgacagagcactgcacagaag

SEQ ID NO: 22650 - DNA, 90 bp, Homo sapiens
catggccccaggacccccacgtgtgaagcccctggcgcccactcaaccttcgagaaggtccgttcaagataccggggagaccacgacgct

SEQ ID NO: 22651 - DNA, 90 bp, Homo sapiens
gagaccttgagggatatctttcttcactcctcttcacttcttcagaagcagtatatctcaactcagttttgcggaggacatttctgctga

SEQ ID NO: 22652 - DNA, 95 bp, Homo sapiens
cggctgcgctcctggcagaaggctgtcttctactgcgggcccagagccatggctatctcctcttcctcctgcgaactgcccctggtggctgtgtg

SEQ ID NO: 22653 - DNA, 99 bp, Homo sapiens
tgtatctggagctgggagacaagcccgcgcccaacaccttctatgtagagtttgctctccaaagctcggggaattgattccagctctgttaaactccgg

SEQ ID NO: 22654 - DNA, 90 bp, Homo sapiens
catgggaccgagtggactcatttaccgaggaggactcgggccctgcgagagtaaacatcagtctccaaagataactacatcccttcttcc

SEQ ID NO: 22655 - DNA, 82 bp, Homo sapiens
tttgggcagacagcccatggcacaggtgatcacgaacaaaggtattggcagaagattttggttgatagacaggcaaaactta

SEQ ID NO: 22656 - DNA, 101 bp, Homo sapiens
gaacacagtagtggaagatgtaaagcaatatttcgagcagtttggcaaggtcaatgtgacggtggactacattagaccagccagcccagccacagagacag

SEQ ID NO: 22657 - DNA, 100 bp, Homo sapiens
atgaaggaggatggaagggcaggacgaggtgtcggcgcgggagcagcacttccacagccaagtgcgggagtccacgcgatgtcaccatttctacctgcca

SEQ ID NO: 22658 - DNA, 80 bp, Homo sapiens
cgtctgcatggcccactgcatccgcctggcgctcatccgcttccacgtcaaggtgcagcagtaccgcgtcgccatgactg

SEQ ID NO: 22659 - DNA, 89 bp, Homo sapiens
acaacgcgagtcggcgcgcgggacgaaggctaggcagctggaagagaaagaccgagtgctaaagaagcaggatgcattctacaaagaac

SEQ ID NO: 22660 - DNA, 90 bp, Homo sapiens
cctacaacaagttctccatcaagtccgacgtctgggtgtctgcactgcttggggaggaagatgaagaggcactgcattatttgaccagag

SEQ ID NO: 22661 - DNA, 83 bp, Homo sapiens
aacagcccgcccgaccccgtcccgaccctggccgccccgagcggagcctggaggattttttatcaagcagaaatgcatcgaac

SEQ ID NO: 22662 - DNA, 74 bp, Homo sapiens
taccgttgaccgctcctccaactaaccatcgctccccaagtagggagaagaagagagctcgttgggaggaagaa

SEQ ID NO: 22663 - DNA, 97 bp, Homo sapiens
agttggcaggagcatgggcttcggaggcctatagcccgcagtttccacctggatgtttgaggttgtgtagatgtggccggcacccttgagagtggag

SEQ ID NO: 22664 - DNA, 97 bp, Homo sapiens
tggcattcaaatcctagcactctgggagaggcacattgcaagcaacccgtgccttgatggtggttggcatcctcctgggagtgatagcaatctttgt

SEQ ID NO: 22665 - DNA, 97 bp, Homo sapiens
caatatcctctgtggagaacacccccccatggaggcgaggtagagttggggtcgcagacggtcctaaaatctctacacttgccaaaaaacaacagtc

SEQ ID NO: 22666 - DNA, 82 bp, Homo sapiens
gcggcgggtacggcggccccgcgcagcccccggccgcagcgcaggcagcccagcagaactgaagcgctgcggcatggcgcgc

SEQ ID NO: 22667 - DNA, 83 bp, Homo sapiens
atcagctgttgcatcttgcttctgagcaaggtagttttgatggtcatggaggcggagcagaccaagaccaggagcgagctggt

SEQ ID NO: 22668 - DNA, 90 bp, Homo sapiens
ataaagatgaagtgcttaattcaaggtcacacaatgtcggggatggacctccagatttccttactgaactcccccactggaaaggattct

SEQ ID NO: 22669 - DNA, 100 bp, Homo sapiens
atcggggacccgctgatcttccagctcccctcacccaacgtcgtgttttaaaatcaaagatgggaaaatcggagaaaattgcccttccccatggccagct

SEQ ID NO: 22670 - DNA, 119 bp, Homo sapiens
gcccggccacctctgagaagggagacgacgctgctgggtccgctgagcggggcgacccgaggaaaggggactaccacaggtatctggcagaatttgccacaggaaacgacaggaaggag

SEQ ID NO: 22671 - DNA, 96 bp, Homo sapiens
gagagtgaggagccagacgacaagcacacactatggcgctgaaacggattaataaggttcctatatgatagtggactcttcagatcacgaccctgg

SEQ ID NO: 22672 - DNA, 98 bp, Homo sapiens
gcccatcgacatcctggagatgctgagcagagccaaggatgagtatgagagggccataggaaaaggatacagagtagagtttcatgaacctgaaactt

SEQ ID NO: 22673 - DNA, 97 bp, Homo sapiens
aggacgctagctgttgcacctgttcctccctgcgcgtaagtgatttgcgtcatgtggattgggtgaagtcatatttgaacatttggagtgaacttca

SEQ ID NO: 22674 - DNA, 75 bp, Homo sapiens
cttcgactatgcagagacatgagatggtagccaacccctcaggaactgtggctgcaccatctgtcttcatcttcc

SEQ ID NO: 22675 - DNA, 101 bp, Homo sapiens
gaatggttggcaagtcgaacaaagtcagctttctccaatctttctacatcccagatttggatttaggtggcgagtagaaaaagaagtaatttcaggaaaag

SEQ ID NO: 22676 - DNA, 82 bp, Homo sapiens
caacccccagcggcttaagccatggcgttctggaggacacgtgccggcggcaggacttcaacccctgtgaatatgatctgaa

SEQ ID NO: 22677 - DNA, 50 bp, Homo sapiens
gttggacttaacgtatttcttgagtcgtgagagagagagagaaagacgta

SEQ ID NO: 22678 - DNA, 50 bp, Homo sapiens
cttagggagagcctgtgagagctgctatgatgaacaggaagcggtgcagg

SEQ ID NO: 22679 - DNA, 100 bp, Homo sapiens
gttttctcctgatcaagaaaatcatccatctaaagcaccagtaaaatatggtgaactcattgtcttaggaattcaaagaagctttttcactatttgacaa

SEQ ID NO: 22680 - DNA, 98 bp, Homo sapiens
tccgctgctcttgtgacgttgtggagatggggagcgtcctggggctgtgctccatggcgagctggattttctaccctagcaaggatggtacgaagatt

SEQ ID NO: 22681 - DNA, 87 bp, Homo sapiens
ggctaccatggaccatcctgctggtcagcactgcggctggttggtcaaagaaaaagtgatgtatgaaaaagaggcaaaacaacaaga

SEQ ID NO: 22682 - DNA, 100 bp, Homo sapiens
tgtaagccggcctttgtcagagccatcatggattttacaatcaggcgttgaatgtaggccgaaagcacatcctgaatgtgacatcgctgaaaattgtaat

SEQ ID NO: 22683 - DNA, 74 bp, Homo sapiens
ccagcgtggcggccgcgctctcttccaggacatcaagacgaggacctattaaacttggaatggctaaaatcacg

SEQ ID NO: 22684 - DNA, 100 bp, Homo sapiens
aggtggccgaggcatatgaagtgctgtctgacagatgctggtggactgtgtgcccctggtggaggtggacgacatgatgatcatgggcaagaagcctgac

SEQ ID NO: 22685 - DNA, 95 bp, Homo sapiens
ttccagcccgacgagcttgttttgtcccggactcggaaggacttttgactagatctgctcaggaaacagtcaagcattctgatttattttcttca

SEQ ID NO: 22686 - DNA, 83 bp, Homo sapiens
ggtcggcggcggggcgaccgcgagctcgggatacgctcttcgaagtccgcagacagattatgagggacaagccaagaaactcc

SEQ ID NO: 22687 - DNA, 75 bp, Homo sapiens
cgtggctgtggagaaggcgctccggggcgaagcagcactttaggaggccaagtcaggaggagcgcatgagcccag

SEQ ID NO: 22688 - DNA, 97 bp, Homo sapiens
cctatccaagtagcctgctgtcgcccagccgcggcctgtttaaagaagaaaacccgtatgctagatttgaaaacaactaaagcgctccagcacatca

SEQ ID NO: 22689 - DNA, 100 bp, Homo sapiens
ctgcagcccgggcggctgccgagaaggagggaggggaaacacaaagccggctacgcgctgcgagaaaatgacagatggcgagacctggacaggaaatgcc

SEQ ID NO: 22690 - DNA, 82 bp, Homo sapiens
aagattaggatcaaggatagacaaggcatgtgagcagcagtgacagagtgggcaagccttaccgtggcgtaaagcctgtttt

SEQ ID NO: 22691 - DNA, 75 bp, Homo sapiens
ccagaaggctgacaagctccatgagccttcaataccccaggtcccaaactacaggctgtcgatgacgatcccaga

SEQ ID NO: 22692 - DNA, 100 bp, Homo sapiens
atatggatgtgattcgtgccctcctcatcttcctagagaagcgtttgcacaaggagaccaagacacattccaccccagtggggggtcccataccactcat

SEQ ID NO: 22693 - DNA, 75 bp, Homo sapiens
cgctaccggaaggccatcgccaaggtatgatctcgtgaaatcttgagagaaactgaatgacgaatgaaactattg

SEQ ID NO: 22694 - DNA, 75 bp, Homo sapiens
caacctcaagatagcggagctgaagctgcgggaggcccccagccccgaagctcttcgtgggcggtcttgactgga

SEQ ID NO: 22695 - DNA, 96 bp, Homo sapiens
gatgcaaaccaagagaccgtttttgaaaacattgccaaaccagttgctgggagttcaaaagaatgctgaaccgggagctgacacacctctcagaga

SEQ ID NO: 22696 - DNA, 74 bp, Homo sapiens
acatctacaaccttcgatctcctgacgagtcagtcatatcatttggatcaaaaaatagaacaatcggagttgca

SEQ ID NO: 22697 - DNA, 82 bp, Homo sapiens
gtggaagacggagctggtcggcccgaaggacccgtgcatctcttccgactctcgggcaagtgcttcagcctggtggagtcca

SEQ ID NO: 22698 - DNA, 80 bp, Homo sapiens
actgatgactggagaggatggctactatttcaccaatctgttggtagctggcagtgttgtgatggcttttgaagaagtat

SEQ ID NO: 22699 - DNA, 50 bp, Homo sapiens
tgagtgtaatgttcacggcgtttgcattgatacttatccgctttttcccc

SEQ ID NO: 22700 - DNA, 83 bp, Homo sapiens
cacccctgcactatgcagctacatcagacacagatggcaacaaggacacccaggcccattattttcctccagcctccatggac

SEQ ID NO: 22701 - DNA, 100 bp, Homo sapiens
aggaccgcttgaagcctgaatgcagtactgaagaactgctttcaattctaagtgtcccttcaccgatgttgtcaccaccaacctaaagcttggcaacccg

SEQ ID NO: 22702 - DNA, 121 bp, Homo sapiens
tgacgagtggctggataacatggagtcgggcaagatggcgcctcccaagaacgctccgagagatgccttggtcttgtcatctcctaatcagcagaaggaaaagaaagtcagggatgcacag

SEQ ID NO: 22703 - DNA, 75 bp, Homo sapiens
ggatttcaaagcgattattgatggagtcgaaagtgttagtcgttttggtttcagaagatgatttctctaaattac

SEQ ID NO: 22704 - DNA, 98 bp, Homo sapiens
ggttgcagaaaatcctcactctgagtacggtctcacagacaacgttgagtagtcgtgaaaggtgccaaattggcagaggctcacgtttcttctcttta

SEQ ID NO: 22705 - DNA, 82 bp, Homo sapiens
agggcttccactgattctacattatgtttcttgcagaacataaattattaggaaacattaaaaatgtggccaagacagctaa

SEQ ID NO: 22706 - DNA, 75 bp, Homo sapiens
ctttgctggacagatgaagagtgacttgtttctggatgattctaagagttaccgtgcagacggtctacgtgcagc

SEQ ID NO: 22707 - DNA, 75 bp, Homo sapiens
caagtccaaaccgaataggattaggagtcctaagcagacttaaagccaagaaaataagaagaggaaagagagagg

SEQ ID NO: 22708 - DNA, 50 bp, Homo sapiens
gagcgtctccggctgcacagcgctcaggtctgccatcatggatgttctcg

SEQ ID NO: 22709 - DNA, 49 bp, Homo sapiens
tccacgtggattctccagacgagagaattcagaaggagctggcggacat

SEQ ID NO: 22710 - DNA, 75 bp, Homo sapiens
agcaaggaaataggatttaaccgctctctgcctcccaggatatcctaaacctgaggaaggaatacttgacagttt

SEQ ID NO: 22711 - DNA, 71 bp, Homo sapiens
cttgggtcctccgagagcagcagcggactatcctattaagtgtaatctcactgcttaatgagcccaacacc

SEQ ID NO: 22712 - DNA, 82 bp, Homo sapiens
gtgcaaaacaggactggctgatactacatattccagatggaggaagaacgtgcaaaacgtgaggagctagagcgaatactgg

SEQ ID NO: 22713 - DNA, 80 bp, Homo sapiens
aggacagtgaaaaagttccgagcttgttaactgattatattctgaaaggagaccagttttgattttaaatgttctcaatc

SEQ ID NO: 22714 - DNA, 100 bp, Homo sapiens
cgcgttcctatggacagacgcacagacacctgcaggtgctggagaatctggtaaaagcaccattgtgaagcagatgaggatcctgcatgttaatgggttt

SEQ ID NO: 22715 - DNA, 98 bp, Homo sapiens
gctgctctttccactcggctggcctctgcgcctttctctcatcccggtccttggatgtggctgtgttgcccaagctattctcagtcgaggacgttttg

SEQ ID NO: 22716 - DNA, 100 bp, Homo sapiens
ccagcgtgctcaggtcggcggaggagaaggtattgttgcagcatctggcagtgagactgaggatgaggacagcatggacattcccttggacctttcttca

SEQ ID NO: 22717 - DNA, 80 bp, Homo sapiens
ttaaagaggaagtccctggacacagagtcactccagggcatcatgctggtctacgacatcaccaacgagaagtccttcga

SEQ ID NO: 22718 - DNA, 75 bp, Homo sapiens
acgctgtgcacgagggtctcggcctcgcggtgcagacgaagttatacggaagcgtctcctcattgatggagatgg

SEQ ID NO: 22719 - DNA, 100 bp, Homo sapiens
agattgacattgaacctacagacaagagagaagaagaaggaggttcctgctgtgccagaaacccttaagaaaaagcgaaggaatttcgcagagctgaaga

SEQ ID NO: 22720 - DNA, 83 bp, Homo sapiens
tcggcctctgcaggcttgccgaagaagggagggaaggatggagacgctgaaggataagaccctgcaggagctggaggagttgc

SEQ ID NO: 22721 - DNA, 83 bp, Homo sapiens
acaacttggttcaatgggtagcctcaccatgaaatcacagcttcagatcactgatcggcttcaccaccgaccctcggatggcc

SEQ ID NO: 22722 - DNA, 96 bp, Homo sapiens
cctacctcggccctggcctgaccccggcggccctgcccgcccctccctccagcctaggaagcacctaattcttgtgggcaaaggagccatggaaga

SEQ ID NO: 22723 - DNA, 100 bp, Homo sapiens
ctcctagaaattccccccgaagaagactcccccacatctgggttgtgaactaaaggccgacaaagattatcactttaaggtggataatgatgaaaatgag

SEQ ID NO: 22724 - DNA, 82 bp, Homo sapiens
cactgtggagtacatcacccgctacatcgccagtctgaagcaggtctctgagcggcccctgatgttcctgttggacactcct

SEQ ID NO: 22725 - DNA, 90 bp, Homo sapiens
cggggacacagagattattatgacaggccatttcataattctgaatcatgtctgataacggagaactggaagataagcctccagcacctc

SEQ ID NO: 22726 - DNA, 73 bp, Homo sapiens
actatgtccgaggatacatccttcaggccggtctaattgaagccaacggagaactcaaggtcttcatagacca

SEQ ID NO: 22727 - DNA, 100 bp, Homo sapiens
acagctaagatgtcaggacatcctggaagctgggaaaggattactgatctctcattacccaactatctgatggcatcttcggttggactgcttcctaccc

SEQ ID NO: 22728 - DNA, 90 bp, Homo sapiens
cctcagaagacctcctgtcctatgaggccctccccatggctttaggccctctactggtctatccgcagcgagaagctcgagtgggccgtg

SEQ ID NO: 22729 - DNA, 75 bp, Homo sapiens
ctacattcgtctactgataaagaacaagccgaaaggaagccacgtggagatgaccaggatagtgaaaagtcaaaa

SEQ ID NO: 22730 - DNA, 100 bp, Homo sapiens
gccacccaccatggccgcagaccagcgcccgaaggccgacacgctggccctgaggcaacggctcatcaggaggaagagcaagcaggccctgagggactat

SEQ ID NO: 22731 - DNA, 100 bp, Homo sapiens
gcttggtttcgggatctcggtgctgcagacggcgagacctcctgcacagcccgagcgggaagaagttccgcagcaagccgcagctggcgcgctacctggg

SEQ ID NO: 22732 - DNA, 101 bp, Homo sapiens
aatgttcttaacccagaagtagctgaatgtgttactccattgctgaggagtggttaatgttgaagaaggaaaatgcggaagtcgtcatttgacaagtttta

SEQ ID NO: 22733 - DNA, 100 bp, Homo sapiens
ggtgctgctggttagtgtgctctgagggagggtccgagccagccgctgttttgccggaggagcccctcaggccgtaagaatgattgatgttggctgatat

SEQ ID NO: 22734 - DNA, 100 bp, Homo sapiens
ctctattgcgcagctcgctgccgtgcgtttaacccaggcgaggaggaggaggagaaaattcccccagattcgggcagggctttgttcgcgggggtcacag

SEQ ID NO: 22735 - DNA, 76 bp, Homo sapiens
atggacatggacatgagccccctgaggccccagaactatcttttcgaagctccaccatgaggcgaggtggatggag

SEQ ID NO: 22736 - DNA, 82 bp, Homo sapiens
cctcagcaggagcctgttctcatcaccatggcaacagataacgaaggaggcccaacttcattcaataaggagcctgacggat

SEQ ID NO: 22737 - DNA, 75 bp, Homo sapiens
cgttgctggaccgggacgcacgctcagctgaggaggacccccaaaggtaccgaggagaaggcattgtatatggga

SEQ ID NO: 22738 - DNA, 90 bp, Homo sapiens
gggagaatccgaggaatcttctgcacagcttttatcaaaatacaactcaaacctagctactccaatagcaattaaagcagtgccacccag

SEQ ID NO: 22739 - DNA, 74 bp, Homo sapiens
ggtgcaagaggaacatgagaatgggcttccccaaggatttattgacattgctacttgagtgtgaacagttacct

SEQ ID NO: 22740 - DNA, 74 bp, Homo sapiens
attcagagtatatataccattagattcatttctggcttccagtcctgaaaatgattaggaagaagcaaatggac

SEQ ID NO: 22741 - DNA, 100 bp, Homo sapiens
ctttgtggtgcacaagcggtgccatgaatttgtcacattctcctgccctggcgctgacaagggtccagcctccgatgtatctctgcattagccagattgg

SEQ ID NO: 22742 - DNA, 136 bp, Homo sapiens
ttaatggcttatttggcaggtgccaaatatacgggttatctatgccgcagcaacacagtcctcatctgtaaagacaatctgcacatcgtgctgccacacgaggcttcattcgttatggctggcgctggggttggag

SEQ ID NO: 22743 - DNA, 100 bp, Homo sapiens
tgccaagttcggctcaataagcgcaaggaatacatgtatgaccctcaatttggcgatgccttctggaacagcagcaaatacgggatggtgacgtacctgc

SEQ ID NO: 22744 - DNA, 98 bp, Homo sapiens
tcggaaaccggtagcgcttgcagcatgactggtgaattttcagctcgtttccttttgaagctgcccgtagatttcagcaatatccccacataccttct

SEQ ID NO: 22745 - DNA, 74 bp, Homo sapiens
tggtactaatggccaactcaagtgggacttcccctctcgcatgcctcaatgctatgctacattccaattcaaga

SEQ ID NO: 22746 - DNA, 100 bp, Homo sapiens
agctggcgcagcccacgctcatgatcgacttcctcacccgcgcctgcgacctcgccagaaggtcagtttgaaagatcgtgtcttctccagcccccgaggc

SEQ ID NO: 22747 - DNA, 75 bp, Homo sapiens
gcagcaccaaggaccagcaattcaaaacccagcttagactagaaagtctagaagacacacacataatgaaggggg

SEQ ID NO: 22748 - DNA, 82 bp, Homo sapiens
atgttaaatcagctggagaaggagaagtggagaagaaatcagtcagccgcagcaatgaagttggagcagaggctgaaaacac

SEQ ID NO: 22749 - DNA, 87 bp, Homo sapiens
caggaccacagcggcaaggtctccaagtcccagctcaagaaattcattgagtttgaagatgctctggaacaagagaagaaagagctg

SEQ ID NO: 22750 - DNA, 74 bp, Homo sapiens
gctgagtggtttttcggatcatgtctggtggctccgcggattataacaggcaatgatagtaagaaatgctaaag

SEQ ID NO: 22751 - DNA, 75 bp, Homo sapiens
agccgaaaaaggcagcagcgaagggcgatgctggatcttttcttgtctgaatgttatgaggcttccattcatgaa

SEQ ID NO: 22752 - DNA, 75 bp, Homo sapiens
cacgcacctacttccagagaacgaaaatgagctggaaaagttcatccactcaggaaacatcctactggtagatgg

SEQ ID NO: 22753 - DNA, 115 bp, Homo sapiens
ccgagtcgtgtcagcaagaacgctcctgccagtacctgcagatgccttcaattaagttgcagagttctgatggagagatatttgaagttgatgtggaaattgccaaacaatctgt

SEQ ID NO: 22754 - DNA, 50 bp, Homo sapiens
gcggagtcggggctcctgacgaccatggtgaatccgggcagcagctcgca

SEQ ID NO: 22755 - DNA, 78 bp, Homo sapiens
tctctccatcccttccgaggcccgacttcgtgattgcctcaccatcctatccatgccattctgctattcctcatgctg

SEQ ID NO: 22756 - DNA, 83 bp, Homo sapiens
cggatgagtacgataccgaagcgggctgtgtgccccttctccacccagagacatggctccttactatgaagccttgtgcaaat

SEQ ID NO: 22757 - DNA, 96 bp, Homo sapiens
tgacactgaaaacaattcatctcaaacgggataaagttcacattcctggtgccatctacctctcaatcaaattcgactctcagtgcaacacagagg

SEQ ID NO: 22758 - DNA, 82 bp, Homo sapiens
aagagaggcttttgcagagtcactcaggacaagcttgaaggccatcaccatcgaggctgagccaagagctgatggcagccgc

SEQ ID NO: 22759 - DNA, 74 bp, Homo sapiens
ttcttgtttgtggatcgctgtgatcgtcacttgttctgcagaatcagaagatttggcagtacatttatatccag

SEQ ID NO: 22760 - DNA, 100 bp, Homo sapiens
tccagggccctgcgccttgctccttttgtctaccttcttctgatccagacagataaactcatcctgaaagtcgctgttgttctcctgctgagcaagaatg

SEQ ID NO: 22761 - DNA, 86 bp, Homo sapiens
tcgggctgcaggagaagatggcggtctccacagagcctgccttctggtacaagatgcctgtggaatgttcggtgaagtgcacttgg

SEQ ID NO: 22762 - DNA, 100 bp, Homo sapiens
tcagcatcactggattatgttataatgtggaacctggatgaatgtagagagaaagtacttcaagccaaaggtcattccaaatgctatatgtggaatttgt

SEQ ID NO: 22763 - DNA, 100 bp, Homo sapiens
ttcactcgcttagaccttcctactggtgatggccagccatcccttgaaccccctatggctgctgcttttgatgatcaagttccagatgatcctcagtgag

SEQ ID NO: 22764 - DNA, 99 bp, Homo sapiens
ctgcgctctgcccggcgagtcgggctctggaggaaaagaaaggtgcaagttcttcagtctgactgagacaccagaggattacactatcattgtcgatga

SEQ ID NO: 22765 - DNA, 101 bp, Homo sapiens
cggcgatcctgggctgcgggcaaggcggccgcattgacaggaagattgagttccccctgcctgatgaaaagacgaagaagcgcatctttcagattcacaca

SEQ ID NO: 22766 - DNA, 100 bp, Homo sapiens
gtggacgtcgtggtgggaggacactccaacacatttctttacacaggcagttgtgaaaaacttcaggacaaaaatgtttcatttaaggacttgtgctgct

SEQ ID NO: 22767 - DNA, 100 bp, Homo sapiens
ggagcctctctcctctgcaacctgataggatttggctacccagcctacatctcgtttctaagcatgaattgaggaacagaagaagcagagcagatgatcg

SEQ ID NO: 22768 - DNA, 100 bp, Homo sapiens
tggaggatctgataatcaagtgattcactgggaaatagaggataatcaggtatgctgccccacaaaaccaagcgaggccaggccgctctggaccgtctca

SEQ ID NO: 22769 - DNA, 74 bp, Homo sapiens
tgccttcatcgagtacgaacacgagcgagacatgcactgtttggtgcacctcgatttggaggaagtagggcagg

SEQ ID NO: 22770 - DNA, 90 bp, Homo sapiens
agaactatagcaatctggttttcttggccatgaagctcatgactgctctggtgaatgttgccttaaacctcagtattcatcaggataata

SEQ ID NO: 22771 - DNA, 51 bp, Homo sapiens
gtgaagaccaatattcaacaggcaaaacaggaccttgccctgtcactcagg

SEQ ID NO: 22772 - DNA, 74 bp, Homo sapiens
gccgctgctacctgcagcgccgtgtggcacgacacaaaaatcagcgtggtgatggtggatgaggcacacgaaag

SEQ ID NO: 22773 - DNA, 98 bp, Homo sapiens
gctggactctctgcgggagaggctgcagcggaggcggaagcaggactcggggcacttggcgcttctctgaagtagctttggaaagtagagaagaaaat

SEQ ID NO: 22774 - DNA, 90 bp, Homo sapiens
tttacaagttattttctcttcttctgaaaaagagatcttgctagtgtcagcagtgggatacctgcgcttgaaggacatcatccaccgtga

SEQ ID NO: 22775 - DNA, 100 bp, Homo sapiens
caacttcctccagaaactttggcgacaatgttggcctgtctgcaagcttgtgcagggtctgttgcggttctcccacttttccataagcagaacaagaacc

SEQ ID NO: 22776 - DNA, 100 bp, Homo sapiens
atcccaaatcggaagtgaattcggattgtttgctgggctgaagaagatgcagagcagcctgaagctggtggactgtatcatcgaggtccacgatgcccgg

SEQ ID NO: 22777 - DNA, 83 bp, Homo sapiens
cgttcggccaagggaccaaggtggaaatcaaacgtgatgctactaggaggtggagcctttgggaggtgattagttcatgaaag

SEQ ID NO: 22778 - DNA, 83 bp, Homo sapiens
cgggaggtgttcgagaacgaccccgagacggggctatcaaggactcacaaactgcatgatggccgccctgccggaggacactg

SEQ ID NO: 22779 - DNA, 117 bp, Homo sapiens
agtatccagcctatattgttacaattttttttcaagaactgccgtcttctttgcctgcactaatggtgacttaagagattaaaattaatttggttgctgttggttctgaacaaataa

SEQ ID NO: 22780 - DNA, 90 bp, Homo sapiens
tttaatacaagaaatgagaacacaaaggcattctgcagtacaaacaaaggagcggcaccacacaaaggtgcagtaccagctcaagtcgga

SEQ ID NO: 22781 - DNA, 75 bp, Homo sapiens
tttggctttgcctttctggacacagaagtatttgtgacagtgaatgaactcattcttaaacagaagcaaagattt

SEQ ID NO: 22782 - DNA, 74 bp, Homo sapiens
tatgaaagtgcagaagactcggaatgaggactcttgtgaagatatgagttgtggagaggagagtctcagcagct

SEQ ID NO: 22783 - DNA, 100 bp, Homo sapiens
acagtgacagcacaggtcacagtaaggccaaaaatgtgcatactcacagagttagagagagggatggtgaaagtgaagtcactgcttttgctgtcttgga

SEQ ID NO: 22784 - DNA, 100 bp, Homo sapiens
gggcgaaggacacccgcaggaactcggcagaggagaaattcagacggctcccgaggatatgaggccccaggattcctggcgaggtcctcctccccttttc

SEQ ID NO: 22785 - DNA, 100 bp, Homo sapiens
ctgactgagagctccctcaagcccacagataggagggaccccgtgctggtgtgcagggccatgtgtgctatggtcctggacattggcgagtgcctgacag

SEQ ID NO: 22786 - DNA, 95 bp, Homo sapiens
caagaagaatctctgatgtctgtcctgagccttccgtttcaccagtgatcattaaagaatgggcagcttacaaaggaaagtctcctcaaaccccg

SEQ ID NO: 22787 - DNA, 98 bp, Homo sapiens
acatcaagttaaatttggtcaacaaaatccacgtcaggggccacctacagatgctcctgcagtggacacagcagaacaagtctatatctcttccctgg

SEQ ID NO: 22788 - DNA, 101 bp, Homo sapiens
cactgaagatgaagcaaggcccaatgacccaggcgccctgatgatattgggacctgctggtatatccttctttctggttccgtgttcatcaaggaatccat

SEQ ID NO: 22789 - DNA, 90 bp, Homo sapiens
tgaaaatattattgcaatctatgagaaagccattctggcaggggctcagattgatcagggaccatgaaaagaaacttgtgcttcaccgaa

SEQ ID NO: 22790 - DNA, 100 bp, Homo sapiens
gttgccatccagggagtgaaaacagggttgtatatagccatgaatggagaaggttacctctacccatcaaaaatgatgcggtcatccgttttccacatgt

SEQ ID NO: 22791 - DNA, 142 bp, Homo sapiens
ctccatggcagcagcgcgggccagagcgcagcgccgagcgcggcccgggcgccatcgagccttggcggcggacgtgcagggtgaggtggctttgaccccgggttgcccggccagcacgaccgaggaggtggctggacagctg

SEQ ID NO: 22792 - DNA, 105 bp, Homo sapiens
ctcagttggaagcagccgatccagcctgcggagcctgtggggcagcgcccgggggctggagaaggccaggcagcagctgcaggaggagctccggcaggtcagcgg

SEQ ID NO: 22793 - DNA, 140 bp, Homo sapiens
cttagatcttgtggccaagagttcagaccgtggcgaagtggagagtgacatgcagttggatggcggtgactgcgtgggcgaggacatcctagacaggagctcggagctgatctacactggggagatggcctggatctacc

SEQ ID NO: 22794 - DNA, 125 bp, Homo sapiens
tggacgacgggtttgtgagcctggactcgccctcctatgtcctgtacagggtgtttcccgaccagtccctgggcgccaactagagtatggactgaccaggtacctggatggagacctgagctgga

SEQ ID NO: 22795 - DNA, 98 bp, Homo sapiens
gtggagttgggccctgcaggaaggacggacttcaggggcaggtggcacaagatctctgtaaagtagcaggcatagcaaaagttctggtggctcagcat

SEQ ID NO: 22796 - DNA, 100 bp, Homo sapiens
tgggaaggaaaaacagaatcagctgttccctgcgaaagggcccatgcagaatctccaccatgtgtagacaacctaaaaagtgacatcggtgataaaggga

SEQ ID NO: 22797 - DNA, 80 bp, Homo sapiens
ggggcggccacggtgatgagccgggcctggcggacgcggcgccatcgcagtcaggtttggtgcacctcgatttggaggaa

SEQ ID NO: 22798 - DNA, 91 bp, Homo sapiens
cagtgagtccagctcctctgacagcgaagactccgaaacaggtgagaagccctaccactgcaactgggacggctgcggctggaagtttgcg

SEQ ID NO: 22799 - DNA, 100 bp, Homo sapiens
ccagccgaccttgagctccaggagttcgtctcttacgtctgcggaagtgcagctgcctcagttcttagcgcaggaacgtcaaggtcgtgggaaataaaag

SEQ ID NO: 22800 - DNA, 100 bp, Homo sapiens
ttcttgtggatattatggctaataacacaacaagtttagggagtccatggccagaaaacttttgggtcactgtgtgcccagtattctgcagacaaacgag

SEQ ID NO: 22801 - DNA, 90 bp, Homo sapiens
gagcattttccgcagaggcctggtcaaggtggctcagaccacaggtattatgactctgtccccctttgatcaaatgaagactgcctccaa

SEQ ID NO: 22802 - DNA, 139 bp, Homo sapiens
ctggaccctgcccagcagaatttgtatagagatgtgatgttggagaactacagaaacctggtctccctaggagacgaaaccagacagagggtcaagtttacagatgaccgtgtctgcaagagtcaccttctggactgct

SEQ ID NO: 22803 - DNA, 51 bp, Homo sapiens
agtatccttggggcactgtgcagggttggatggcaagcatgtggtgtttgg

SEQ ID NO: 22804 - DNA, 83 bp, Homo sapiens
tgtttcgtagcagagaacagctctttgcatccggagagtggacaagaaacatatctttctgaagccatgaagctgacacagtc

SEQ ID NO: 22805 - DNA, 74 bp, Homo sapiens
tgtgcggattggcatcggaaaccacaacagcaaaccagtttaccggacatttctcttgggaagttgtgcatctg

SEQ ID NO: 22806 - DNA, 75 bp, Homo sapiens
agagtggccagtttggggatgtgggcttcaacccctatgaggtctccaggaaaagttgggctttcaacattcaag

SEQ ID NO: 22807 - DNA, 100 bp, Homo sapiens
ctggccatagggattggaaccctgatctacgggcactggagcataatgaagtggaaccgtgagcgcagctttctgtatgagcccaatagccaagggtaca

SEQ ID NO: 22808 - DNA, 97 bp, Homo sapiens
tatagaaagaaatgagcagctttggataatgacgacagcaacccgaagacagggaaatttagtggaagagaaagccaatacccacctcctcttgggc

SEQ ID NO: 22809 - DNA, 82 bp, Homo sapiens
gaggaggctggagtgggcgcggaggcgaccgccatggcgttcctcaaactccgtgaccagcctgtgggccaaagctgaccaa

SEQ ID NO: 22810 - DNA, 94 bp, Homo sapiens
ccatgaatgaggagtacgacgtgatcgtgctgggcaccggcctgacgcatttatgacattaacagagaacaggactatgtcaagaattctgagg

SEQ ID NO: 22811 - DNA, 75 bp, Homo sapiens
cagatgacctggaggggaaaaatgaggactcagtggaactgctggtgttgggccggaagctgagaggaaaagcct

SEQ ID NO: 22812 - DNA, 75 bp, Homo sapiens
acagcatcggcagcaagcctctgcaaatctgggacaaaaaggctcttgtcaggatggtgaagctgttcatcggaa

SEQ ID NO: 22813 - DNA, 100 bp, Homo sapiens
aacttcctgtagctcagataatacaccagatcatgcaacagatgagtgaccaccgctacgacaaactcactgtgcctgatgacatagcagcaaactgtat

SEQ ID NO: 22814 - DNA, 98 bp, Homo sapiens
caatgagaccaatgaaatcgccaatgccaactccctgatgctggagctagaatgagaagatgtgacttgagggccattgctccccagaaatgatcctg

SEQ ID NO: 22815 - DNA, 100 bp, Homo sapiens
gagacatgggagacccggggtcggaggaaatagctcgtctgctggccctggaggaggctaccctgagtaccgatctgcagcagggttatgcccttaaaag

SEQ ID NO: 22816 - DNA, 98 bp, Homo sapiens
cctgaccccgccattctcttccacacctgccacagtgtaggccaggctaacctggccgtgtggctgtccatgatcggcctggcccagtactacaaggt

SEQ ID NO: 22817 - DNA, 100 bp, Homo sapiens
agaagccgacgttcgagaggaagattcttacctctttgatctcgacaataaggtggtaacgtggacctggaaagccaagcagaggggaagaaggaggtgg

SEQ ID NO: 22818 - DNA, 51 bp, Homo sapiens
cgcctcctcgcagcagcgccatggtcagccatgtcatctgagcctccccca

SEQ ID NO: 22819 - DNA, 88 bp, Homo sapiens
gtctgagccctgcgacagcctggacagcaactcagatgtgctggtggacggacagccatgtgaccgcgaggctgtggcggcctgccag

SEQ ID NO: 22820 - DNA, 75 bp, Homo sapiens
attcttccctctttatgtttttcaagggacggatacaacgactagagtttcagaagctatctcctgagcagtgtg

SEQ ID NO: 22821 - DNA, 100 bp, Homo sapiens
aaagacagagagccatgagactttcccgagaattgcagctgagtatgctcgaaatagttcatccagggttacagctgaagtaaagcacaacatcaccaac

SEQ ID NO: 22822 - DNA, 87 bp, Homo sapiens
ccccaccatgtcagacgcagccgtagacaccagctccgaaatcaccaccaagttctggatgagatcaatccccagtctgttgttacg

SEQ ID NO: 22823 - DNA, 75 bp, Homo sapiens
gtggtggtggtggaggtccaggagaaggttccggagctcccgctcaggccgcttaagcctgcatggagatatccg

SEQ ID NO: 22824 - DNA, 74 bp, Homo sapiens
cactctcaacattgacaaattgaaaatagaaactgctcaggagcagcatccagttggacttccccgaaccacag

SEQ ID NO: 22825 - DNA, 125 bp, Homo sapiens
gtctactctgtcgctcttgtgccctagcaccccgagaaccgtcagtttgagccagatggcaaatgaagaggattcttccagttctctagtgaaggatcacctttttcagcaagagacagttgtta

SEQ ID NO: 22826 - DNA, 100 bp, Homo sapiens
caccacctaccttcagattcttgaccaaaatgtggcaccccaacatttatgaggcaaagtgtttcatggatttcaaagctggaggcgccttatgtcacat

SEQ ID NO: 22827 - DNA, 90 bp, Homo sapiens
tgcggaagtagcagtccggtcctagggactagcaggccctgagtaaccagcagaaggcggtgctgatgagcgagcgggtgatgggcaccg

SEQ ID NO: 22828 - DNA, 80 bp, Homo sapiens
gtagcaaatgagatgaaccatcttcctgcacacagccaaagtctgcaaagacaggtgatttggcttctgcacagttagga

SEQ ID NO: 22829 - DNA, 100 bp, Homo sapiens
tattcattaaagaaaataatgggaaggaagaagtatccaagatcttaccaatatatttgagtccttcctgcctcagttattggcctatcctaaccccata

SEQ ID NO: 22830 - DNA, 82 bp, Homo sapiens
tatgtattccctggggatggcgcatcacacaccaaagagcctggagacacaggccccatccttcccaatggggacacttcag

SEQ ID NO: 22831 - DNA, 90 bp, Homo sapiens
ccccagaaccggtcgaaaaccgtgtatgagggattcatctcggctcagataagcgtgtggaaaattggcctctgatgcagtctccttggc

SEQ ID NO: 22832 - DNA, 95 bp, Homo sapiens
cgcggggcggtcggctgcggtggcggcgtttggatgattgtctctcggcggcggagtcggttttataggatcacattgacaaaagtaccatggag

SEQ ID NO: 22833 - DNA, 100 bp, Homo sapiens
gaaagaatagaacttggacgatgtattggagaaggccaatttggagatgtacatcaaggcatttatatgagtccatttgggaatacctgctactgcaatt

SEQ ID NO: 22834 - DNA, 100 bp, Homo sapiens
gttagcagaaccatccaccaacataagtttcccattggtcactgtacacttggaaaacggggatctgatgagcttctttcttctggcatcattaacggac

SEQ ID NO: 22835 - DNA, 50 bp, Homo sapiens
gcaatgtcagcatcaccagcaccacatgttactatactggcaattgctgg

SEQ ID NO: 22836 - DNA, 100 bp, Homo sapiens
gcacaggatccggagctggagcccccagtctgttctctggggaggcagtaaggggccgtggagctggcctcggcctcggcatcgggagaggctggacttc

SEQ ID NO: 22837 - DNA, 98 bp, Homo sapiens
tgtggagaggcatactccaaggaccaagattagacctgtgcacattcaggttcccgagcacaaacatcaagataacgttcactgccctgtccagcgag

SEQ ID NO: 22838 - DNA, 149 bp, Homo sapiens
ctgattacctgtctggagcaaggaaaagagccctggaatatgaagagacatgagatggtagctaaacatttaggcatagcccttttgtacctgcagttgtaccgggtcacatgtgaccaaacctacctgctccgatccctggattacgt

SEQ ID NO: 22839 - DNA, 97 bp, Homo sapiens
aaaatacagccaagatcttggcaaagcttctccctcagtatttagaccaggtaagtggaggtatacttcgaatttttccagaaggcaaagcccagtt

SEQ ID NO: 22840 - DNA, 100 bp, Homo sapiens
ttccctgaatttctctctttgggaggaggaagggacaccgagggaccaaagggcggacagtcattttgtttactcattcagccctgttgcaggtcccaat

SEQ ID NO: 22841 - DNA, 100 bp, Homo sapiens
gctaaagctgtttctgaatgagacccaaacgcagggacccttgaacatctgtgaagaaatgactattctgcatggaggcttcttgctggccgagcagctg

SEQ ID NO: 22842 - DNA, 97 bp, Homo sapiens
tcgtttcttcctgcctttgggccgtcaggcagttggttgggacccgctccaaccctcgggaatgactctactaatgatggggtcagcagatgctctt

SEQ ID NO: 22843 - DNA, 73 bp, Homo sapiens
agacgtcctggagatctcaatgcaggtttccagtggtagcaatgggtgtgctgaagtgggtggattggactgt

SEQ ID NO: 22844 - DNA, 75 bp, Homo sapiens
ctaatttgaaccatgtttggattgaagccgcctctgtattacttaccagcaaacggggattcagcgtccgatcct

SEQ ID NO: 22845 - DNA, 74 bp, Homo sapiens
agcagagatggggatacagctgattgttcaagacaaggagtcgttcgaagcattcagcaaacaatggcaaggca

SEQ ID NO: 22846 - DNA, 88 bp, Homo sapiens
tagaccggagctgttcctattgggccatcttggctccaccaccctggaaggtgggagtcaatcattttgacaagtctcctgaaaggaa

SEQ ID NO: 22847 - DNA, 100 bp, Homo sapiens
gttctgcacctcaggagggaattcagcctcagtgatgtccatgagattctctaaccatggcacaggtagagaaacgtggaggtttgctccggaaatcttc

SEQ ID NO: 22848 - DNA, 74 bp, Homo sapiens
agagcccccttcagtcgcagcctcactctaggcctccaagcagcccggaggctggggctgaggacagcatagac

SEQ ID NO: 22849 - DNA, 98 bp, Homo sapiens
cgcagcgggggtggcgctgggagcaacgggagtgtcctggacccagctgagcgggcggtcattcgcatcgcagaaacgcttcgttaagggactcaggc

SEQ ID NO: 22850 - DNA, 100 bp, Homo sapiens
ttggaaaacaccacttttaagtatcttacaggagaacagactgaaaaaatgtggcagcgcctgaaaggaatggctggccctgctgggcttcctggtgctg

SEQ ID NO: 22851 - DNA, 75 bp, Homo sapiens
caagatcgagttcatcgggcagatcggaaattcgaaatgagtcccatgactatcctcatagagtggccaagtttc

SEQ ID NO: 22852 - DNA, 100 bp, Homo sapiens
ggtgaatttccatgtcaacatagtcctggcctgttcctgaacttcctgggaagtcaaccttcttcggcacctcagatgagttcattgagaagcgacgaca

SEQ ID NO: 22853 - DNA, 80 bp, Homo sapiens
cttagccaggaggagtaattcactggtgatttggggaactggtcagctctttcaagctcagcaagacctactacatcgaa

SEQ ID NO: 22854 - DNA, 100 bp, Homo sapiens
aagctgaagagtgttgtcactagcatttttggtgtgaaaaatacagagctggctgtcttccatgatgaaacaggtatttaacagactcccgacaaaaagc

SEQ ID NO: 22855 - DNA, 75 bp, Homo sapiens
ataccaagaaagccccacttggtgttcgaaatccgcaccactgatgacctcactgaggcctggctccaagaaaag

SEQ ID NO: 22856 - DNA, 90 bp, Homo sapiens
gttccggcccgaggacaccgactaccagcagggtgagaactctgtctcagtcgacgggaagtgcagtgactccacgctactgagcaactt

SEQ ID NO: 22857 - DNA, 96 bp, Homo sapiens
ctgtcaagaaggtgccggtggtgcgagtcttcggagcgaccccggcaggctgctctttggcgtaaattgcaatcgattagggatcgtttctcagaa

SEQ ID NO: 22858 - DNA, 87 bp, Homo sapiens
aagcttgcctccgcaaggacttgtgtactcagcaatgccgactgcctacaacactgacatccacgacagcgatggcagttccagcag

SEQ ID NO: 22859 - DNA, 98 bp, Homo sapiens
ggaacagttgttgcagcaagcgattcaggcggtgacagtgatcctccattaaagcgtagcctggcacagaggctagggaagaaagttgaagctccaga

SEQ ID NO: 22860 - DNA, 75 bp, Homo sapiens
ccgccgctttgccgacgtcctggtgcaccgcctcctggctgccgcgttaggctgaaaggttccctgagtcgaggt

SEQ ID NO: 22861 - DNA, 100 bp, Homo sapiens
aacccgaagaagaaaggattcgttacagccagagattgcttctgcagaaagccgtcattacacctgattttgaaaaaaaccactgtgttccaccatatag

SEQ ID NO: 22862 - DNA, 100 bp, Homo sapiens
gttgcagctaggccagcggctcggcggtgagatcgtcagcgctgactccatgcaggacctgaaggagaagaaggagaaggtggaggagaaggcaagccgg

SEQ ID NO: 22863 - DNA, 100 bp, Homo sapiens
catcatcgaggagacccagctcttccaggactttgagccagtccagaccctgctgctgtcttcaaagaagattcttcgctgctgctgccttaccgccgag

SEQ ID NO: 22864 - DNA, 95 bp, Homo sapiens
atgtgttactatcgctttggacaggtttacacagaagccacgggctacattgagagacctcagctgattcgagcaaaagtgccaattgtgaagtt

SEQ ID NO: 22865 - DNA, 51 bp, Homo sapiens
cacctcaactagaacgcaaaagacttcattagaggggtggtagactcggag

SEQ ID NO: 22866 - DNA, 100 bp, Homo sapiens
ttgacttggaaaacatcatctttcgaaaccttatgcttgtcaaattccaggatgtaccaaacgctacacagacccaagttccctaagaaagcatgtgaag

SEQ ID NO: 22867 - DNA, 100 bp, Homo sapiens
acctaaagcctgactggggcaagtttggcctgtcactgctcctcatcctcctgagccgtggtgaagacctacagagttcagaccctgctacagaatcaac

SEQ ID NO: 22868 - DNA, 83 bp, Homo sapiens
aaggcgtgggagatgaggaggatgaggatgaaatcattgtccccaagaagaagttttctggatatgccgcagaaggatccgtg

SEQ ID NO: 22869 - DNA, 82 bp, Homo sapiens
ccgacaaggcgttcaagcgaaaacatgaccgctgagcccatgaggaaactactaaagttcctggggaagcaaagtagaattt

SEQ ID NO: 22870 - DNA, 75 bp, Homo sapiens
gtatctggtgaagtggaaaggatggcccccaaatacctggagtagaacagaaaaattattatgtctgtgttccct

SEQ ID NO: 22871 - DNA, 75 bp, Homo sapiens
aaatagtggcaggtgacagtctgcatgtgcagttttcaggttaccatgccagcaatgattccttttgagtttctg

SEQ ID NO: 22872 - DNA, 107 bp, Homo sapiens
cgggctgtgagcaagaggaagctgcagcccacccgggcagccctcaccctgggtgtgctgatctgcaaaccctggacacaatgcagccaattgagaggaaaagacag

SEQ ID NO: 22873 - DNA, 90 bp, Homo sapiens
tgctcctctatgctggacatcaaatttccaggcttctcgtcagtgcctcgcaggatggtaaacttatcatctgggacagctacaccacca

SEQ ID NO: 22874 - DNA, 100 bp, Homo sapiens
cgaggaggcctccatgatggaagacgtggggatgcaggatgtccatttcaacgagggctttgttcgcgggggtcacagctctcatggctgcagctagcgt

SEQ ID NO: 22875 - DNA, 98 bp, Homo sapiens
actggtaacaataagatctgtggttggaattatgaatgtccaaagtttgaagaggatggagatgaagatgaggaagctgagtcagctacgggcaagcg

SEQ ID NO: 22876 - DNA, 83 bp, Homo sapiens
cctctgcaacccaggcgtcttccagtccacagctacggagccgagatggctctgagtacctgatccagcacgactcggaggcc

SEQ ID NO: 22877 - DNA, 75 bp, Homo sapiens
tgaatatgtggctttggtggatggggtattcttgaaccaggtcatgctccaaatattggaggtggacacaaagga

SEQ ID NO: 22878 - DNA, 100 bp, Homo sapiens
cgctcctggccccgcgcgggcggacggcggaggcgcctcccagctggtggaagttaaaggccccaatgatcgtctttcacataagcagatgatctggctg

SEQ ID NO: 22879 - DNA, 100 bp, Homo sapiens
gggagaaagaggaatgggcctggcctgtgggcagattgcttccaagtatgatcatcaggcagaagaagatcttcgcaattggatagaagaggtgacaggc

SEQ ID NO: 22880 - DNA, 101 bp, Homo sapiens
gtctggacatctgggtgaagttttaataagaatttctctgcaaagaatgtccaaaaattcatattcacattgatcgtatcgacaaaaaagatgtcccagaa

SEQ ID NO: 22881 - DNA, 75 bp, Homo sapiens
cgaatgctccgatgtgcagcccaagctctgggcccgctacggacgtggtgggtcctctggtgcgaaattccggat

SEQ ID NO: 22882 - DNA, 100 bp, Homo sapiens
tgcaggggctttcaggctacagtctccttcattcctaaagcaggtcctgaggcaagaatttgcctttgcctgtaatcaagggcgagccgggcagccaagg

SEQ ID NO: 22883 - DNA, 75 bp, Homo sapiens
ctctgcaaggtggtgttccagtggcaaacagctgtataaactcttgtaaacaggcagattccccaggcgacggct

SEQ ID NO: 22884 - DNA, 74 bp, Homo sapiens
gtgacgggagcaatgctgacctcggtttcctggacccattccgactcaggcacgcacagaggctgggctgcggt

SEQ ID NO: 22885 - DNA, 75 bp, Homo sapiens
tccccgtcgtcctggtgctgcagcggattttttatcaagcagaaatgcatcgaacaacgagaatcaagatcactg

SEQ ID NO: 22886 - DNA, 100 bp, Homo sapiens
gtttttcttcctgtgcctgaacctctctttcgcttttgtggaactactctacggcatctggagcaactgcaaaaccgctgagttcttgagcaaactgaac

SEQ ID NO: 22887 - DNA, 100 bp, Homo sapiens
gattgcctgacccaggcctgctcggccctcacagggaccgtataatagacgctggccccaaaggaaactactctcgatttatgaatcacagctgccagcc

SEQ ID NO: 22888 - DNA, 89 bp, Homo sapiens
ctatttttttgtggagacttgctgagcaggttggatggcaagcatgtggtgtttggcaaagtgaaagaaggcatgaatattgtggaggc

SEQ ID NO: 22889 - DNA, 99 bp, Homo sapiens
cacctatgatattcagtctttcacagatacagatatttgaatggtggtacttccataagcatggcacatcttttattgagcaagtatctgtaagccatt

SEQ ID NO: 22890 - DNA, 75 bp, Homo sapiens
agtaaattgaaaattggtggtgtgtcttcagttaatgagagacctattgacttgatcctgctccctcggtgtctg

SEQ ID NO: 22891 - DNA, 88 bp, Homo sapiens
tgtgtcccacttcatctttaataagggcccacccaatgctaatgaagactacagagaagcttcttcttgtgccgtgaacctcgttttg

SEQ ID NO: 22892 - DNA, 100 bp, Homo sapiens
tacaatgccagcgccaagttctactgtgtctccttcttctaccacatgtacgggaaacacatcggtggtcagaaggcgcgagttgtgtttgctgagctgg

SEQ ID NO: 22893 - DNA, 98 bp, Homo sapiens
tcctcagaacagaacaacaacagctatgaaaccaaaaccccaaatcttcgaatgtcagagaagaaatgttccctcccaggcccaatacttcaaagcat

SEQ ID NO: 22894 - DNA, 100 bp, Homo sapiens
ctaaaacagtatgaaataaacgccactcctaaaggctggtcctgccactgggacaggtgctggagaatctggtaaaagcaccattgtgaagcagatgagg

SEQ ID NO: 22895 - DNA, 82 bp, Homo sapiens
catcaaccagcaggaggactccagcgaggtgagccaccagctgggcagcatcatggacctcttcaccaccagcctggccctt

SEQ ID NO: 22896 - DNA, 82 bp, Homo sapiens
aaagattgaagttcaacgcacttataacaacatatgagatcctcttgaaagataagacaatgcagatcttcgtgaagactct

SEQ ID NO: 22897 - DNA, 82 bp, Homo sapiens
ctggcgcggcttttggcggcctttctgctcctcgcggcccagggaaagcaggcaggatgggagagtcgccgatagaaccacc

SEQ ID NO: 22898 - DNA, 58 bp, Homo sapiens
atcttcgacttgagcgaagttttatgcaagactgcagagagatcctgcttcccatgat

SEQ ID NO: 22899 - DNA, 101 bp, Homo sapiens
agtttgaggacttctggaggcccccgtcaccctccgcgtctccagctcaaactggaggattataaggatcgcctgaaaagtggagagcatcttaatccaga

SEQ ID NO: 22900 - DNA, 76 bp, Homo sapiens
accactattaaacttctcaatgaaactagagacatgttggaaaggtctgacggtaactgctgtaaaagactcagga

SEQ ID NO: 22901 - DNA, 78 bp, Homo sapiens
ttcagtgtgaaaggccacgtgaagatgctgcggctgggtgtcaaattgagaaccaggtagatccccaccacctacagt

SEQ ID NO: 22902 - DNA, 51 bp, Homo sapiens
catttaagtcaccagacacagatgatgactttgagttcactggcagccacc

SEQ ID NO: 22903 - DNA, 82 bp, Homo sapiens
aagaaataatggcaaataacttttccttggagagtcataacatatcactgactggttacccatgcagttgttactgtaccag

SEQ ID NO: 22904 - DNA, 51 bp, Homo sapiens
aaataagcgttccttccgagaaaaacaggttgaatcatgtagctgctggtc

SEQ ID NO: 22905 - DNA, 98 bp, Homo sapiens
cagaagggccaccccgacctccaagggcagcctgatacctttgtctggatatggaggaacaagcaatcttattttggaaggcgttaaaaaattatctg

SEQ ID NO: 22906 - DNA, 78 bp, Homo sapiens
cgggacccggttccccggcccacagtgggggtgtgcaaacccgagagaactgggctgctactgaagaggagaacagcc

SEQ ID NO: 22907 - DNA, 101 bp, Homo sapiens
tttctggaaagaccgatatctgctcctctgccaggcccagctgctggtctatgagaatgaggtgggcatcaactaccagcccccgaccgtggtccccgggg

SEQ ID NO: 22908 - DNA, 100 bp, Homo sapiens
ggagagacggaggaggccgagaccggagcgccgctcgccgcagacttacttccccggctcagcagggaaagctgccaaggggccaagggatgagctgggg

SEQ ID NO: 22909 - DNA, 80 bp, Homo sapiens
aggcagacagcgagtggcgacgattggctgagaagaccaaagagcaagtgacaaatgttggaggagcagtggtgacgggt

SEQ ID NO: 22910 - DNA, 100 bp, Homo sapiens
gaggggctccggctggtctgtggtgagacaggcatggtacattgtgatacagcagttggaacaccggattatatatcacctgaggttctgaaatcacaag

SEQ ID NO: 22911 - DNA, 74 bp, Homo sapiens
cggccaaacggccagacgccgacgtcgaccagcagagactggtacaaactgttttgaagccagttcatcataag

SEQ ID NO: 22912 - DNA, 83 bp, Homo sapiens
agagagtccgggagcccgagcttgaggtactccaaagattcaggtttactcacgtcatccagcagagaatggaaagtcaaatt

SEQ ID NO: 22913 - DNA, 100 bp, Homo sapiens
cagttacttccactcaagaatcgtaggccaggctgatggagagctgaacattactcttccagaagagattttgtggaagtataatactttgtcattatga

SEQ ID NO: 22914 - DNA, 100 bp, Homo sapiens
aacaccaacatcgatgggcggcggaaaatagcctttgccatcactgccattaaggtctgggaggggctgaacgtggtgaagacaggccgagtgatgcttg

SEQ ID NO: 22915 - DNA, 83 bp, Homo sapiens
ggccccgcagaaaatgagaatggagccctaaagtccagttgcctgtgtccctggagtgttacacagtgcctcctgaagacaac

SEQ ID NO: 22916 - DNA, 101 bp, Homo sapiens
tgcgctgggggccggggcgcgtcgcagaatggggaatgcatcagcaacccccacacccccctccagatcagccatggatgccaccaacaccaggcccaatg

SEQ ID NO: 22917 - DNA, 109 bp, Homo sapiens
atttgccgattttgttggcatcgaattcgcactgatgaaaatgggctttgtcctgcatgtagaaagggtgctgataagactgtgaaaggcccagatggactgaccgcct

SEQ ID NO: 22918 - DNA, 100 bp, Homo sapiens
ctcctctccttccagctcaacctcaagaccaacaccgtcatcaactggttccacaactacagggaggctgtgctgcccaagcttcacctggatgaggact

SEQ ID NO: 22919 - DNA, 100 bp, Homo sapiens
ccgcggagctcgggcggccggcgcggaggcgcagaatccgcatttgctgtgatgagttgaatctcttagtgccgttctgcaatgccgagactgacaaggc

SEQ ID NO: 22920 - DNA, 55 bp, Homo sapiens
ctgatcctccacttcagagaacagggtgagctctttcacctaggagggccccttg

SEQ ID NO: 22921 - DNA, 98 bp, Homo sapiens
gaacgggcggaagcagagtctgggggagctcatcggcactctgaacgcggccaaggtgccggccgacaccgattatggattggatatgtctacttctg

SEQ ID NO: 22922 - DNA, 83 bp, Homo sapiens
cttttggaccgtgcccctttccggggggagcgccgtgccgtccctgcagtgacaccgaggtgctcctagccgtctgcaccagc

SEQ ID NO: 22923 - DNA, 83 bp, Homo sapiens
ccccttccgggagcctagatcctgtgctttactctgaagactcggcagtcagggcgacagcaagaatgccaagaagaagaaca

SEQ ID NO: 22924 - DNA, 100 bp, Homo sapiens
gtgtatgaacccagggcactgtggggacagggcgacgtgtgtccaggcgtttgccgggggggccctcagcctcttggccttgaacgggctgttcatcttg

SEQ ID NO: 22925 - DNA, 99 bp, Homo sapiens
cacgctcggaggacagctcctgcctgcagcttccagacccagcctggacagtttttgacggtgcagtcttgctatatggtgtgagaaatggctgtagga

SEQ ID NO: 22926 - DNA, 83 bp, Homo sapiens
gcaggacagcgccttcctcaacgacgcggacatggtcatgagctttgtgaacctgggccctgggaggagcggggacactgagg

SEQ ID NO: 22927 - DNA, 100 bp, Homo sapiens
actgcagcaactttgacaaaactggaagaatttcgcagtaagacagcaacagactctggacattaatgtgaaggccccagccctgatgacaaaggcagtg

SEQ ID NO: 22928 - DNA, 74 bp, Homo sapiens
tcaaagtgctgggactacaggtgtgagccaccgtacccagcctcgaagctatgtcttctcattacactgaagac

SEQ ID NO: 22929 - DNA, 100 bp, Homo sapiens
atgactgtgagctcatgttgcaggctaatgtaatgcttgaatatgatattgatgaagctcaggcattgttggaaaagaatttatcgactgccacaaagaa

SEQ ID NO: 22930 - DNA, 76 bp, Homo sapiens
tgacatttaattttagggtcctttatatagaagggagagtagaagaacatgtgatcatccaggccgagttctatct

SEQ ID NO: 22931 - DNA, 83 bp, Homo sapiens
atggtcatgagctttgtgaacctggaaatcaggacctttgatatttaggaaaactatgtttaactctacagatatcaagttat

SEQ ID NO: 22932 - DNA, 100 bp, Homo sapiens
ctgcgcagcctcttcgagcgccgcggacgcgtcatcgagtgtgacgtggtgaaaggacactcatgaggaccatgatacttccactgagaatacagacgag

SEQ ID NO: 22933 - DNA, 82 bp, Homo sapiens
aaaattggagatacagctggatgtatgaaccctgctctgaaaacactctttaacgaatttggaatgatgggagatcatacaa

SEQ ID NO: 22934 - DNA, 100 bp, Homo sapiens
atgcattgaaattcttaatgacatggtatggaagtataacattgttacactggacagattaattctctgcctgctgctgaccagaatgtcatcatggctg

SEQ ID NO: 22935 - DNA, 100 bp, Homo sapiens
gcttcagaattgattgtatatacatacttcttttctgcctcagaagaagtggttcctgaggttcaaaccttgtactactcagctgatcacaagctgcttg

SEQ ID NO: 22936 - DNA, 82 bp, Homo sapiens
gccgctgtgtggttgcaacggagataaattcccggaaccgcgattcggcgtgtcagcaggagcattggtttgaaaaggccct

SEQ ID NO: 22937 - DNA, 98 bp, Homo sapiens
cgttattgaagacatcaagggaaaatggggtgaggaagattttgaagacaatcgtcacttatacagaatcatttgctgtttcaaatagagaactgtgc

SEQ ID NO: 22938 - DNA, 98 bp, Homo sapiens
tgcctggcgcgatacaaaaatgtggagctgatcagaataatgttcagcatcaaccccctggagaacctgaaggtgtacatcagcagtcggcctcccct

SEQ ID NO: 22939 - DNA, 100 bp, Homo sapiens
ctggacagtccaagatcaaggtgcctgcatctggcgtctagtgtggaccctattcctggtttgcagaaataagcgggttttgaaaacaaaaaaaagaagg

SEQ ID NO: 22940 - DNA, 90 bp, Homo sapiens
agtgaccaattcccttggtcaaagaagtgaccaaaaagtcatctacatttcaggaatgagcacacctggctcctctccacagcaccgccc

SEQ ID NO: 22941 - DNA, 80 bp, Homo sapiens
cttacatgccatggccttctacgttgtgaaaatgatcaatgagctgagcaatgttcctgttcctgtcatgctaatgccag

SEQ ID NO: 22942 - DNA, 100 bp, Homo sapiens
cgccgcgccggaggggcccagtgtggacggggccaccggctggagcggatcccacacctccggaccgagggacgcggtaaactgtttcacgttagacctg

SEQ ID NO: 22943 - DNA, 97 bp, Homo sapiens
ctcacatatcagagggcattatgaacgaattctcaacccctacaacttattcctgtccggagacagcctaaggggaaatcctcattgacgattcaat

SEQ ID NO: 22944 - DNA, 98 bp, Homo sapiens
ccaccgccaccggaacccgagaccgagtcagaacccgagtgctgcttggcggcgagggctctggctgagaacatggccaatgacattgatgagctcat

SEQ ID NO: 22945 - DNA, 75 bp, Homo sapiens
agagaagtgcccgaggagagttaacagagtaaacatcagtctccaaagataactacatcccttcttcccatcaac

SEQ ID NO: 22946 - DNA, 75 bp, Homo sapiens
aggacatcttgaccatcttcaagcgcctccgctcggtgcccactaacaaggtggagaacgccggggccatcggcc

SEQ ID NO: 22947 - DNA, 80 bp, Homo sapiens
cttgggttttttgtggcttccttcgttattggagccaggcctacaccccaggagaaaagccttacagatgctcatgggaa

SEQ ID NO: 22948 - DNA, 100 bp, Homo sapiens
ggagaaggatgacaccggagtttgacgaagaggtggtttttgagacagtacctgtaatgagaaacagtaaagaaaacagactaagaggaaacaaagcgtt

SEQ ID NO: 22949 - DNA, 51 bp, Homo sapiens
cgcagtggtcgcttcttctccttgtgaaagcccctcagggaaaaaaccaga

SEQ ID NO: 22950 - DNA, 75 bp, Homo sapiens
ccgcggcatccgtaaccacaaggaggacgaggtggaacacctgcagcaggagactgctgctctgaaaaagcaaat

SEQ ID NO: 22951 - DNA, 48 bp, Homo sapiens
ctggctgtgctcatatacacctggacccggtcagcccaaggagcaggg

SEQ ID NO: 22952 - DNA, 100 bp, Homo sapiens
ggcctgccacatggcccagggccgctgggaggccgctgagggcctgctgcaggaggcgctagacaagggctgtggtgtcagtgctgggctcctggctgca

SEQ ID NO: 22953 - DNA, 100 bp, Homo sapiens
atcagttcttgatcctgatgagttcttctcaccactaaatccaatacgagttcatattgatattggagctgatggcagagccacaggagaagcagatgta

SEQ ID NO: 22954 - DNA, 74 bp, Homo sapiens
ccctggagggggcagtcccgggagaacctgcggcggccggagcgaacttggtcctgatgtctgaccatggagat

SEQ ID NO: 22955 - DNA, 100 bp, Homo sapiens
atcgtatcagatggcagacatacatcatttaaaggttcacagccatgaatgaaccacagtgcttctacaacgagtccattgccttcttttataaccgaag

SEQ ID NO: 22956 - DNA, 83 bp, Homo sapiens
ataagaagcacctggatgagacatttgctacagcatcccacattaagtcaacgactatcaagatctccacttagggaagtggg

SEQ ID NO: 22957 - DNA, 82 bp, Homo sapiens
ctgacattagctcccactttcaagaagcaatagacttcattgccattgacctcatcaacaacctgctgcaggtgaagatgcg

SEQ ID NO: 22958 - DNA, 100 bp, Homo sapiens
acagaacctgacagaatggatagaaattttaaagactgttgtgaacagggatgtacctaatttacattacttcgttcagaaccatttcacaagtgcaaga

SEQ ID NO: 22959 - DNA, 104 bp, Homo sapiens
ctggacaaagacgcttattatcggcgagtgaagagactgtacagcaattggcggaatcggtcgaggtggacggtttggccgtaaaggtgtggctattaacatgg

SEQ ID NO: 22960 - DNA, 75 bp, Homo sapiens
aattttgctaactttgcacatttcaacagtcatgcaggaaggtgggagtcaatcattttgacaagtctcctgaaa

SEQ ID NO: 22961 - DNA, 100 bp, Homo sapiens
gaaccaggacaaaacagctgctttcttaatagcgctgtacaggttttatggcaggaattcttcctatgttcatggtggagtagatgctagtggaaagccc

SEQ ID NO: 22962 - DNA, 82 bp, Homo sapiens
tgcagcgggagctggacggcgagcgcgagcggcgcgagaaagtgctgggcgtcctcttctttgccatagcctgcttcttata

SEQ ID NO: 22963 - DNA, 75 bp, Homo sapiens
cgaggagaactactccgtgacctggtacatcgccgagttctgatgaaaactttcggaagagaaagttgcctgtgg

SEQ ID NO: 22964 - DNA, 112 bp, Homo sapiens
cagttttgctgaccttattcaccatgacttatcaggcgatatgaaaggtgaggtctatccatttggcatcgttgggatggccaacaaaggggattgcctgcagaaaggggag

SEQ ID NO: 22965 - DNA, 100 bp, Homo sapiens
acgctgccagtttgcacagcagcaggacgtggtgggtcctctggtgcgaaattccggatttccttgggtcttccggtaggagctgtaatcaattgtgctg

SEQ ID NO: 22966 - DNA, 98 bp, Homo sapiens
gtgcaacttgttatatgaatgcagtcttccagcagctgtatatgcaacctgggctccctgagacaaatttacatgtattggagaccagaccagaagcc

SEQ ID NO: 22967 - DNA, 100 bp, Homo sapiens
ctcgagggcaagaagagcaagcacgaagtcacctgcaccggtgcccgtgacgtacgagctgcccacactgtataggacggaggactattttcctgtggac

SEQ ID NO: 22968 - DNA, 98 bp, Homo sapiens
tgggctacagttagagtctgaagttgttaccaatggtgaaactacatgttcagaaagtgacagagttagtccttgataattgcctgtgtgtcaatggg

SEQ ID NO: 22969 - DNA, 75 bp, Homo sapiens
gcttcctggcctgggcgctccggtggcggcggagcagtggtctcggaaagagggtcgtggtcccgcacggatgcg

SEQ ID NO: 22970 - DNA, 100 bp, Homo sapiens
ccgggatcgtgaccgagaccgtgaccgagagcgtgaccgagagcgcgaatatcgtcatcgttagaagttgcacactgacaagaaacagatcagtgttggg

SEQ ID NO: 22971 - DNA, 100 bp, Homo sapiens
tttcttggacagcattgcagccaggagcttaaaaggttgggcccgaaggcatcctgcagaacggggctgtggacgacagtgtagccaagaccagccagtt

SEQ ID NO: 22972 - DNA, 100 bp, Homo sapiens
cacctactcctgccgcgtgggcgaggactctgtggacttccggctccgcgtctctgttgagaagctgatgtctcctcgacttccaactggaaccttgaac

SEQ ID NO: 22973 - DNA, 100 bp, Homo sapiens
cccagctgccctcccgggaggctgcctgcctgcttacctgcgagccatcgatgtgaagatcctgcagcagctggtgaccttgaatgagggcatcgaggca

SEQ ID NO: 22974 - DNA, 95 bp, Homo sapiens
gacaagaagacgtccaatctgagcgtgctgcggacggcgctgcggtacatccagggtgctttcttctgcgacctggtactcatctacctcatcaa

SEQ ID NO: 22975 - DNA, 75 bp, Homo sapiens
tcctcctcctcccatggacaatgcatgccctcgttatcttgaaaagtaataaaagactagtggccttagtgccca

SEQ ID NO: 22976 - DNA, 83 bp, Homo sapiens
gtcagccttcccagtagctgggaccacagcttaagtgagagctttttcatggtgaaaggcgcagccctcttcttacaacaggg

SEQ ID NO: 22977 - DNA, 95 bp, Homo sapiens
cgagctgcggctcggacgccagcggacacgcgggcgagacttcccaagtaagaagcggaagaggagccgctggaaccaagacacaatggaacaga

SEQ ID NO: 22978 - DNA, 74 bp, Homo sapiens
aaactgaaaacacaaagcaaccttcaaagagctgccataaacccaaagggtcaaggaggaggtcaagttggcct

SEQ ID NO: 22979 - DNA, 74 bp, Homo sapiens
ttgaaaagtagttaatggcagtggtggtatgaagttggattggatgctgctggcaagacaaccattctgtataa

SEQ ID NO: 22980 - DNA, 100 bp, Homo sapiens
ccggaatcccgcgcgctgcccacgattcgcttctgagatccctgaatattgccgagccttagaagagaatgaaatatctgagcactgttttgatttgatt

SEQ ID NO: 22981 - DNA, 98 bp, Homo sapiens
gtgtcgtggtggtcattaagcggagatccggctgctcccggcagatcggcttctcctttgtacgacccaagctctgtgccttctctggcctctattac

SEQ ID NO: 22982 - DNA, 82 bp, Homo sapiens
agaaagcccacatcaacctggtgagcatgagtcaagacactgaagttagaagtcgggtcgtggggggaagtcttcgaggtgc

SEQ ID NO: 22983 - DNA, 75 bp, Homo sapiens
ttttctgccatgaatttgcattcaggactcagggagtacacacttaccagagccatgggaccacaccaccaccac

SEQ ID NO: 22984 - DNA, 100 bp, Homo sapiens
atggctagcaggaatgcttactgttgcgtggttcgttattaacaggagtggctgtaaggtgaagaagcatgaaactcagtctctcgccctggatgcatgt

SEQ ID NO: 22985 - DNA, 51 bp, Homo sapiens
gtctgggtgaagcccctctgttcccgatactgaacggctgtattcagtggt

SEQ ID NO: 22986 - DNA, 100 bp, Homo sapiens
agtgcctgatcctgcaacacgagcatggcatggccccgcaggtcttcacccaggccctggagtgcatgcgcaggtctctaattaacagaagatggcaaag

SEQ ID NO: 22987 - DNA, 100 bp, Homo sapiens
gtcctgcacctcagcttctcccattccgggtaccagttcgcgtcctgctccaaggactgcactgtgaagacctccgtgtttactccagcctatggatccg

SEQ ID NO: 22988 - DNA, 100 bp, Homo sapiens
agccccttgtcagccagggctgaacccccgcaggaaatgtaccttctccgaatgcacctttaaagcgggtattagcctatacaggctgttttagtcgaat

SEQ ID NO: 22989 - DNA, 100 bp, Homo sapiens
tgggacggagcctgacctcttacttcctgtggagtacaggggctcaggtccaggtggcaggggatatgctacccaactcaactgagcgggccatcactat

SEQ ID NO: 22990 - DNA, 113 bp, Homo sapiens
cgagaacgtgtcggtcattgcctggggcctctccctggagcgttcttcaccaaaggacatggatgaaaatgaaagcaaccagtctctgatgacaagcagccaatatcctaaag

SEQ ID NO: 22991 - DNA, 89 bp, Homo sapiens
ctggtccacggagtgtatgaccacaaacagccatcaagggtgagaactctgtctcagtcgacgggaagtgcagtgactccacgctactg

SEQ ID NO: 22992 - DNA, 90 bp, Homo sapiens
tgaaatccaaaggtgaatcttttggttggtgattttgatgatagccacaaagcaagcaggatccccataggcactgagatagaagggatg

SEQ ID NO: 22993 - DNA, 100 bp, Homo sapiens
cgggcgccggggcggctgccgacggcgggactggtttcacagattccttggtgtctttctccgctgagattttgtcacggacactatgtgaaccccttgt

SEQ ID NO: 22994 - DNA, 82 bp, Homo sapiens
tcacttccctgtactctcatcgctctcggcctccgacacgctcatgatggagcagtccaagaagtcctccctcatggtggcc

SEQ ID NO: 22995 - DNA, 81 bp, Homo sapiens
ccgcgctgaggctgcggaccgggcccggcgggattagcaggtttggtgcacctcgatttggaggaagtagggcagggccct

SEQ ID NO: 22996 - DNA, 51 bp, Homo sapiens
aattcaggaaggactattctcattaaggttatacattggctcttcaaagac

SEQ ID NO: 22997 - DNA, 85 bp, Homo sapiens
gccgcctcgtcaacaggaacttagctcttttctccatggaatccttctgtacatgatgaagccagagaaaagatgctgactcaga

SEQ ID NO: 22998 - DNA, 75 bp, Homo sapiens
gccgatagtgaaattgaagaaaacatggtagagtggctaagaaggaattaaggaatttgcaagagcaaatgaagg

SEQ ID NO: 22999 - DNA, 100 bp, Homo sapiens
ggcctgtatcaccagaggagattagacgtagcagattagattgcaacacctgctcggtataccgtgactttgggaggaacatctgtcactgtgaagtatc

SEQ ID NO: 23000 - DNA, 111 bp, Homo sapiens
aatgagtctggaaaactgggccaaagcagtgaaacgctccatgaattggcaacatttcatttgttgcatttccagtttccaataccaactcacctacaaagattttaccaa

SEQ ID NO: 23001 - DNA, 86 bp, Homo sapiens
tcagcctcccgagtggctgggactacagatggtggagttaccttaggaatggtgcttttatgtgaagctgctacctctgacatgga

SEQ ID NO: 23002 - DNA, 82 bp, Homo sapiens
gagatctcctgtgctgcgaccactgcccggctgccttccacctccagtgctgcagcccctgtcaaagggaacaggaagcagt

SEQ ID NO: 23003 - DNA, 100 bp, Homo sapiens
aagaaaatcttcgaagacttttcaactcgcagggcaatgacattaaagtcactgctgagagcactggtgaacatgcctcctcactaccgctacctttgca

SEQ ID NO: 23004 - DNA, 74 bp, Homo sapiens
gtgaccacccctgaagaaattgcacaggttgccaaggaaagtgtactgcagttttacccgaaagctaatatcgt

SEQ ID NO: 23005 - DNA, 124 bp, Homo sapiens
ctttgtgtcctgagatcaaatggcacttcattggccacctacagaaacaaaatgtcaacaaattgatggagtcttttattcaaaacttcagcgttctctatagtcccttgaaaaggcatctcat

SEQ ID NO: 23006 - DNA, 100 bp, Homo sapiens
gtggaggacgccttccgctacatggcccaagggaagcacattggcaaagtcgtcgtgcaggatggggaatttagcatggatcttcgtaccaagagcaccg

SEQ ID NO: 23007 - DNA, 80 bp, Homo sapiens
cttcaagaacaagggccgcgatgtggaaacctcctgccccccgaggtctgcagtctcctgaacccagcagccatctacgc

SEQ ID NO: 23008 - DNA, 71 bp, Homo sapiens
gagaaccgtcagtttgagccagatggatgaaacaggcgcctatttaatcgacagagaccccacctactttg

SEQ ID NO: 23009 - DNA, 90 bp, Homo sapiens
gcctgtgccacccattgaatttggagtcagtccaaaagtccagtgcacgtgccaacattacactgtcagggaagaagcgcagaaaactcc

SEQ ID NO: 23010 - DNA, 74 bp, Homo sapiens
aacatgactaaaaagaagcgggagaatctgggcgtcgctctagagattcacagtctgagaatgaggcttcacca

SEQ ID NO: 23011 - DNA, 50 bp, Homo sapiens
tgtggctgggataagagaggccctggctacagcatgctggccatagggat

SEQ ID NO: 23012 - DNA, 82 bp, Homo sapiens
cgaggaggcgcgggaggtgttcgagaacgaccccgagacgagttgcatgctgagaatttgaaaaatgaagatgatgtagaca

SEQ ID NO: 23013 - DNA, 83 bp, Homo sapiens
tggaggaggcgccgcgcggccagggagccagcgggaggccgcgcctggcagacaatgcagatcttcgtgaagactctgactgg

SEQ ID NO: 23014 - DNA, 83 bp, Homo sapiens
gctattttgcccagcccgtcatgaagggaacggcaggagcagctgatgggatatcggaagagagggccgaagcccaaaccgct

SEQ ID NO: 23015 - DNA, 78 bp, Homo sapiens
aaaaaagtaaactctattcagatggttacagtctctagcttcgccatgtacatggcccttccgtgtacatggatgggc

SEQ ID NO: 23016 - DNA, 100 bp, Homo sapiens
gacaacatgtcccaacattacatcccatctctgctggatgaaccgaatcctaacagtccagccaatagccaggcagcacagctttatcaggaaaacaaac

SEQ ID NO: 23017 - DNA, 83 bp, Homo sapiens
gacatggtgggactctcagcgacctgggaaagcaagacaatgcagatcttcgtgaagactctgactggtaagaccatcaccct

SEQ ID NO: 23018 - DNA, 82 bp, Homo sapiens
aggactccaaaatggcgtcagttggtgagtgtccggccccaggagccgtgtaaagccagtggaatatagtcagatgtacagt

SEQ ID NO: 23019 - DNA, 74 bp, Homo sapiens
gaacaggtctctttgggcagaccaatactggatttggtgctgttggttcggaaccagcacctatgacagaagat

SEQ ID NO: 23020 - DNA, 74 bp, Homo sapiens
agagggttggaggcaaagttccgaatagggatgaggcatacgtgttatctaaatgatctggatagaatatccca

SEQ ID NO: 23021 - DNA, 74 bp, Homo sapiens
cccggagaacaccttgcccactcccatggtcctgcagagggtatttgtggtgcagcagattcccaacagtaacc

SEQ ID NO: 23022 - DNA, 90 bp, Homo sapiens
gttggggttgtggggtcgcgtcagtgcggagacagcggtgtcctgcgcgtcttcgggtacttggaaaaatggacaaggattgtgaaatga

SEQ ID NO: 23023 - DNA, 100 bp, Homo sapiens
ggagccactgccccacgcgcccgcggcccgcgcgccgagtgctgggcctaaaggagataacatttatgaatggagatcaactatacttggtccaccgggt

SEQ ID NO: 23024 - DNA, 51 bp, Homo sapiens
cagtttcgggaggagttcaacgtgaacagctgctttgtgaagccagcacag

SEQ ID NO: 23025 - DNA, 98 bp, Homo sapiens
gcatcctctgaagcagattaagccatgtcaaaatctgccgtgaagatatccttggacttactctccaatcccctctgtgagcaagaccaggaccttct

SEQ ID NO: 23026 - DNA, 98 bp, Homo sapiens
attaatgctgctaagacatccatgtcttccaaaatcattggaatctatacacagaatgggattttacatatgctggacagaaataagagaatcaagcc

SEQ ID NO: 23027 - DNA, 100 bp, Homo sapiens
gccgagagccgcggctccgtgtttctggaaagtgacagcaggtatcgagaaccttccctgcgaacttcagaggaacttccagctgatgcgagagctggac

SEQ ID NO: 23028 - DNA, 82 bp, Homo sapiens
cggcagtccacccaccgccgccgcctcccagactggaaagctacccttgaggagaataggttgaattctgaaaaagatcgag

SEQ ID NO: 23029 - DNA, 75 bp, Homo sapiens
cacctagaactggattgtgcggggaccacttctataagagaaacaagaacctgccacctgaggaacagatgattt

SEQ ID NO: 23030 - DNA, 100 bp, Homo sapiens
ttgcaattcatcactttgaaaagttcagaagtttatcaatgaagaccgactgccacacttgcttctctacggtcccccagggacaggcaagacatctacc

SEQ ID NO: 23031 - DNA, 74 bp, Homo sapiens
gtcgccgccgccaccatgcccaagagaaagatgtgcactcccagcaacacccctgccacgccgcccaacttccc

SEQ ID NO: 23032 - DNA, 100 bp, Homo sapiens
atcgcgggggtggaggacatcgacatccaggcgaactcggcctatcgctaccctccgaagtccgggactttgaacatgtcggggatcgccctcagcagac

SEQ ID NO: 23033 - DNA, 100 bp, Homo sapiens
cttttatgagaagctttataatagtggctgacaagattttgaaaaagaaagaataccctctttatataaatcaaacctgccatagagttactgtttctcc

SEQ ID NO: 23034 - DNA, 100 bp, Homo sapiens
cagtggacgggacctgcagttccttcttcgagaaaccaagcatcaacaaagagagcattgtggatgtagaaggtgttgtgagaaaagtgaatcagaaaat

SEQ ID NO: 23035 - DNA, 100 bp, Homo sapiens
ggtaacacttgttacatgaatgccacagttcagtgtattcgttctgtgcctgaactcaaagatgcccttaaaagatggatgcatctggaccctcagatag

SEQ ID NO: 23036 - DNA, 100 bp, Homo sapiens
cagaagcaaaagccttgatagcatggatttctgtgagctcactgactcacaccacccggcaagaactgctcactacggctccctgccccagaagtcacac

SEQ ID NO: 23037 - DNA, 100 bp, Homo sapiens
atcctgcggcagaagccgagttcaacatcctcctggccaccgactcctacaaggccacccagaggagaaggccaccccgcctggaggcacaggccatgag

SEQ ID NO: 23038 - DNA, 90 bp, Homo sapiens
tcctcccaccgcagcctcacaggtagctgggattacaggccgccatggcatcagatgaaggcaaactttttgttggagggctgagttttg

SEQ ID NO: 23039 - DNA, 90 bp, Homo sapiens
aggcagccccaatgcaaacgaaccacccctggtgtttgttgggaaaggaattacctttgacaggagaaactcccatgtatggaatcccac

SEQ ID NO: 23040 - DNA, 49 bp, Homo sapiens
gctgacgtcgcaaaaaaattggataggaatatggagccattgatgatgt

SEQ ID NO: 23041 - DNA, 96 bp, Homo sapiens
acattatggcaagaagggcgctgttttcgacaggtgtgcaggtttcggcacatggagattgatcttggaactgcagttggctttttgctaccacca

SEQ ID NO: 23042 - DNA, 80 bp, Homo sapiens
atgtcacaaaagcggatgttgaaaagatggcagttgaattcctgcatgaactgaatgttccatttttcaaagttggatct

SEQ ID NO: 23043 - DNA, 100 bp, Homo sapiens
agacagctgcaagctgaaaagtgcctgcaatttgccatttatttgtaataagaacagggaagttgggaaacctcacggctccttgcaatgaaaaatgtag

SEQ ID NO: 23044 - DNA, 100 bp, Homo sapiens
catcagccaggagcagatgaatgagttccgggcctccttcaaccactttgaccgggtctcctctgagcctccggcctccataagacccaaaacagatgac

SEQ ID NO: 23045 - DNA, 75 bp, Homo sapiens
cggccggactgggaagatggacgcagtacgaggatgtcgtccaggaaagattgtgcagatgactgaagcagaagt

SEQ ID NO: 23046 - DNA, 90 bp, Homo sapiens
cacagaggatgatgctgactttgatgaagatgagtgagagtggagaattggacaaaaattgatttttgatctctgaattgtggtttttag

SEQ ID NO: 23047 - DNA, 50 bp, Homo sapiens
gtccactctggccttccagcagagacagggtctccctctgtcacccgggc

SEQ ID NO: 23048 - DNA, 100 bp, Homo sapiens
cgcagcctcgcgcccgccgccgcccgtccccaggtggtgctgtgggtcggcctgggcgtcctggtggtgagcactgtcaccacactgtctgtgagcgagg

SEQ ID NO: 23049 - DNA, 98 bp, Homo sapiens
gcacaccccaggagagaggactggggtcccaggagtaggaggaggtcatggtattcccgggcctgcgtctgagccgtgaagccttcctcaccacggcc

SEQ ID NO: 23050 - DNA, 87 bp, Homo sapiens
atccgctacgagggcatcctctacaccatcgacaccgaaaactccaccgtagcccttgccaaagtactatactggcaattgctggag

SEQ ID NO: 23051 - DNA, 100 bp, Homo sapiens
agaagggaagactggtcagaactcaccctgagagagacctgactttcctgagagctctcaaaggtctatggccctgtgttcactctgtattttggcctga

SEQ ID NO: 23052 - DNA, 100 bp, Homo sapiens
tggaaacaactttgaggatgagccacctttattagaagaatgtgacagtgatgataacatgggtgccaaaaatacttcaataggagaagaatttatatcc

SEQ ID NO: 23053 - DNA, 82 bp, Homo sapiens
cgggccccctcgccgctgccccgggaaggaggatgtgaacctgaagatgccccggaacaaccagctgctgcacttcgccttc

SEQ ID NO: 23054 - DNA, 74 bp, Homo sapiens
gtagataatcagccagaagaattagtgcgtagtgctgaagatgacactcttgcactcctgtaatgagcctggca

SEQ ID NO: 23055 - DNA, 101 bp, Homo sapiens
agaaaagggctatgaacgattaaaagaagaactcgcaaaagctcagaggacaaatcttcctattttcaagctgaaagaatctactgttagaagaagataca

SEQ ID NO: 23056 - DNA, 100 bp, Homo sapiens
aaaatgttatcgcctttatacagactacacttgctgctttgaaggatgaagttgtatctgttgaaaatgaactctcagaattgcaagaagtagaaaaaaa

SEQ ID NO: 23057 - DNA, 90 bp, Homo sapiens
aaccgaggcacggacaacatcaccgtgaggcagggggacacagccatcctcagaccaggtccagggaacagtcaccatccggaacatcag

SEQ ID NO: 23058 - DNA, 50 bp, Homo sapiens
agggcagagcaggaggccccccgaggtgcagcttcaagcttaggaccacc

SEQ ID NO: 23059 - DNA, 74 bp, Homo sapiens
cacagtgggggtgtgcaaacccgagagaactgggcctcccagaagttcctgccgaatcgtcttcgtcacccccg

SEQ ID NO: 23060 - DNA, 80 bp, Homo sapiens
caaagaacccaaaggatgcatctttttggattcctgtacaggagtggtgcagggaagtctgttagaactgctgtgctgat

SEQ ID NO: 23061 - DNA, 74 bp, Homo sapiens
ttgtgccctagcaccccgagaaccgtcagtttgagccagatggtacatgagaagctggggtcagagctgccagg

SEQ ID NO: 23062 - DNA, 100 bp, Homo sapiens
atcggctctgctgaagagcctgcgggttggagatggactagaggcttttaccagatttcttaaaactgaattcagtgaagaaaatattgaattttggata

SEQ ID NO: 23063 - DNA, 77 bp, Homo sapiens
ggcgagtttccgatttaaagctgagctgcgaggaaaatggcggcgggagacttgtgtatgcggatacctgcttcagt

SEQ ID NO: 23064 - DNA, 98 bp, Homo sapiens
tggtccggaagcacatcaacagagcgggcaattgaaggaacagactaaaaatcgtgtcctggaaggaaactacaggtactaccagggattttcagtct

SEQ ID NO: 23065 - DNA, 113 bp, Homo sapiens
tttgtgactcacaatctgtcttttgatgaaatcaacaaagcctttgaactgatgcattctggaaagaggcaaagggaaacagttggaagagaaaatggtacagcagttacaag

SEQ ID NO: 23066 - DNA, 87 bp, Homo sapiens
ccctggtagcggcgctgttgctgggctcggcgtgctgcggtgtgatgaatgcagactctgctaccattttggctgtttggatcctcc

SEQ ID NO: 23067 - DNA, 112 bp, Homo sapiens
aaagagggggacaaaatcaatgaaggtgacctaattgcagagggccaggaaggaatactgggagaatcttcggatagcctcaggccggccatacaacccttcaatgtcaaag

SEQ ID NO: 23068 - DNA, 100 bp, Homo sapiens
tacaaaactcacaccgacagcatcaaatagcccatggctggagcagcctgaggtgcagctgctgctgcagacagtcatcaatgtactcctcccaccgcgg

SEQ ID NO: 23069 - DNA, 88 bp, Homo sapiens
ggaaaaagcccacaaagaaactgtggaacaacttcaggccttcaatcaagcaggggcagggccgtacagtgaacttgtcctttgccag

SEQ ID NO: 23070 - DNA, 75 bp, Homo sapiens
tccctgatccccacacctacatcaaaactccggtccggggatcccgagctgtcctgcagctgtaccctgagaact

SEQ ID NO: 23071 - DNA, 99 bp, Homo sapiens
caaccagtctattgttgtcagtggagagagtggtgctggaaagcttcccgccagaaagccctgagcctagtaagctgtttcgcggggggcgtctttttg

SEQ ID NO: 23072 - DNA, 75 bp, Homo sapiens
catgttggtccaaatcaagtcaagctactgggcaaccctatgaacaatacgcaaagatgattttcatggagctca

SEQ ID NO: 23073 - DNA, 101 bp, Homo sapiens
gagaagtttctggtcactccccaggattatgcgcgcttagcctgcgacgcttatgattagagccaacaatttgaaatggcctgctcacctgatgcagtcgt

SEQ ID NO: 23074 - DNA, 75 bp, Homo sapiens
cgattcttgaagttgaagaaaaggattcactccttctccagttgcacagccacacccttcagctggccttaatgt

SEQ ID NO: 23075 - DNA, 80 bp, Homo sapiens
ctggggatggcgcatcacacaccaaaggtgtctgacttccagcaactgctggcctgtgccagggtgcaagctgagcactg

SEQ ID NO: 23076 - DNA, 74 bp, Homo sapiens
agtgggagaggagaagagatgctggcgtgaagggggtccagtgtataaagtgacatggaatccattttgtcatg

SEQ ID NO: 23077 - DNA, 80 bp, Homo sapiens
gagcaaggggcttacgcagaaggacctggccacgaggatgccttctccgggacagattggatgttggagaaaatggattt

SEQ ID NO: 23078 - DNA, 75 bp, Homo sapiens
tcaccgaggcctcaattctgggatttggcagctttgctgtgaaagcccaaactcggtgaaatacctggagtgctc

SEQ ID NO: 23079 - DNA, 75 bp, Homo sapiens
ccaacttttgcatttcccatgtgtatcctgtgaccattctatctgggtactatactggcaattgctggagaagat

SEQ ID NO: 23080 - DNA, 75 bp, Homo sapiens
gtgttatgatgcccttcgaaaaatgatcaactattgaccatataggttttttgcatgtctgacacccatgactcc

SEQ ID NO: 23081 - DNA, 51 bp, Homo sapiens
actctgttggatcagaaggtcaagctatcatggtgaacttacttcagattg

SEQ ID NO: 23082 - DNA, 74 bp, Homo sapiens
aaatttacatgtattggagaccagaccagaagcccttctgaattaaggaatcccactgtaagatggggttatgt

SEQ ID NO: 23083 - DNA, 115 bp, Homo sapiens
ctaccccttgtcatgcagggtgtgagcagggctgagatgggcaccgcggatctggggccgtcctcagccgctcctgacatcactggccataaacggagtgagaacaagaatgaag

SEQ ID NO: 23084 - DNA, 100 bp, Homo sapiens
gtggaatgcaagtctgccgatgaagatgtcattaaggttgcacgttttcaaaaaatacctaatggtgaaaatgagacaatgattcctgtattgacatcaa

SEQ ID NO: 23085 - DNA, 80 bp, Homo sapiens
cgcgcttatcgtgcggccagtccggcgctggcgccgcgtggcagtggggagagcgacttgcagttgtggaggtacagtgt

SEQ ID NO: 23086 - DNA, 99 bp, Homo sapiens
tcggcactaggcagcggaggagcccgaccgacccgagcctgccttctggtacaagatgcctgtggaatgttcggtgaagtgcacttggagttcaccatg

SEQ ID NO: 23087 - DNA, 100 bp, Homo sapiens
gggggcctcaaacgtggagatcaactcctctctgttaatggagtggatgaaatctttgacatggtaaaaccaaaggatcctttgaaaatctctcttcagg

SEQ ID NO: 23088 - DNA, 51 bp, Homo sapiens
ggacatcgatggcaccacctatgcaggcatccgtgtcattctggaccttac

SEQ ID NO: 23089 - DNA, 100 bp, Homo sapiens
cagagagcatgaaagctttcatatccaaagtctcaacccacaagggagcagagctgcctcggcagagtggcatgattccgactggatactctcagtgcca

SEQ ID NO: 23090 - DNA, 78 bp, Homo sapiens
gttcagggatcgctttgatggttatgtattccttgacaataaaggacagtctcatcgaactcaaggaatcttcagcaa

SEQ ID NO: 23091 - DNA, 101 bp, Homo sapiens
ttggcttctttgtgaaattgatccatattcctattaataacatcattgtaacactcctatgccaccttcaccagctgtacaagtgcagggccagcctaaca

SEQ ID NO: 23092 - DNA, 100 bp, Homo sapiens
tcttctgctgggaggttggggtctctgggagctctgcagcatgttggcagataaattgaacatgactccagaagaagctgaaaggtggattgtaaatttg

SEQ ID NO: 23093 - DNA, 100 bp, Homo sapiens
ctcatcgatcacctccacaactgcccttccttccacctgagcagcatcgaggtgctcatcctggacgaggctgacagagcttgggaaagtcgaggtgacg

SEQ ID NO: 23094 - DNA, 74 bp, Homo sapiens
cggcctcgcctgagctccgggggtcgtcgccccgcaggatacagctgagatttattaatccattgaaaaattta

SEQ ID NO: 23095 - DNA, 90 bp, Homo sapiens
ctggcagctttacaggagcgacttgacaatgtccctcacaccccttccagctacatcgaaacctgctctgttaaaagcgaaaatgaaaca

SEQ ID NO: 23096 - DNA, 75 bp, Homo sapiens
gacaggcctcatcgtctcctaattatgaaggacccttacactctttggagaaatacgaatgtgctttaaagcgag

SEQ ID NO: 23097 - DNA, 90 bp, Homo sapiens
gtgaaaattctatctgtgtgggtttcaagagagactactacctaataaggaggtgctgatactcaaagaaggtttaagttgtctgatctc

SEQ ID NO: 23098 - DNA, 95 bp, Homo sapiens
gtctacagtgttctcgacttcgtcgctgaatcctcactatggatgggctcattgaggacattaagcatcggcggtattatgagaagccatgccgc

SEQ ID NO: 23099 - DNA, 100 bp, Homo sapiens
atgtcgtcagtaatgcctggaatgatgatgtctcatatgtctcaggcttccatgcagcctgccttaccggttaccactaatgtcacctggggcattcagc

SEQ ID NO: 23100 - DNA, 95 bp, Homo sapiens
tggcccggaaacaggaggacgctgatcaccagttcctcttaggaaccggtgaacctcagggggcccattgcacatccaggtgtgaaactgcggtg

SEQ ID NO: 23101 - DNA, 83 bp, Homo sapiens
cgtgggcaagtcggcgctcaccatccagttcatccagggtgaaaagttcggaccctttgctggagagaagagaatgcctgaag

SEQ ID NO: 23102 - DNA, 78 bp, Homo sapiens
cggcgcggggaccgctgtgctctcggggacggcaaaacagaacagaaaggcggagataaaaagaggggtgttaaaaga

SEQ ID NO: 23103 - DNA, 113 bp, Homo sapiens
agtaccactgcccacattcctggttgctggagggagcctggccttcggaacgctcctctgcattgccattgttctgaggaactgactcagcacaagaagacagcttcgactcc

SEQ ID NO: 23104 - DNA, 99 bp, Homo sapiens
ctttccagttcttcttacccagggcttagaaagtaacgattttgaaatgctaaattacagtgctgtggataccaatccactttctctgtatgtcatgca

SEQ ID NO: 23105 - DNA, 82 bp, Homo sapiens
tggaattctcctgcctgcgggtctttaaagactgagctgggagtgtccactcgccttccaccagcatggcaacgtcttcaca

SEQ ID NO: 23106 - DNA, 83 bp, Homo sapiens
gtgtaatacatcatgaactgcaggttggctagagatttactacatccgtccttggaagaggaaaagaaaaaacataaaaagaa

SEQ ID NO: 23107 - DNA, 100 bp, Homo sapiens
aaggcggtttcccgctcgcagagagccggcttgcagtatgtccgtggttcagaccctgtattaaagcttttggacgacaatgggaacattgctgaagaac

SEQ ID NO: 23108 - DNA, 90 bp, Homo sapiens
tttattctcccatagcatgtggacacattcagctaacgtattttagcaggtggagtgaggttgaagattcctgtgacagcgatgccatag

SEQ ID NO: 23109 - DNA, 100 bp, Homo sapiens
gcaggacttggaggtggagcaggccctgactccaggccgaagaacagttgagaattgttgaagaacaaagaaagattcatgaggaaaggatgaaactaga

SEQ ID NO: 23110 - DNA, 83 bp, Homo sapiens
cagattcgcagtggtcgcttcttctccttggttcttcttgcaaaacggaaactggatggaaaattttatgctgtcaaagtgtt

SEQ ID NO: 23111 - DNA, 116 bp, Homo sapiens
tggactgtgctctcaaactttactttgcctcatttgaggagtgggaacaggcttcggcgaacacaaagaatgttggctcaattaagaaacatcagggagataaattcaacccagtg

SEQ ID NO: 23112 - DNA, 98 bp, Homo sapiens
gcgcggatgtcggtgttcctggggccagggctgatcccttatccaacatggttctaaccttcagtactaaagaagatgcagtttcctttgcagaaaaa

SEQ ID NO: 23113 - DNA, 102 bp, Homo sapiens
cctttacctgtggaggcaacactggccaagaagaggaaaggtgctggagaatctggtaaaagcaccattgtgaagcagatgaggatcctgcatgttaatggg

SEQ ID NO: 23114 - DNA, 100 bp, Homo sapiens
ctattccaaatgttctcagatggctgataatggagaaagatcacagcagtgttccaagttctaaagagggatcaaaggaagcagttccaggtactggtag

SEQ ID NO: 23115 - DNA, 100 bp, Homo sapiens
accagagaaggtgaaacgatcatcgagctaaaatatcgtgttgcattgcagtgtcgagatggctatgaaccctgtgtaaatgaaggaatgtgtgttacct

SEQ ID NO: 23116 - DNA, 95 bp, Homo sapiens
gtgaccccaggctttttatggctgtgagacacgttaaaatttcagggtatgagcacattcttttagaacctgacccagtaccagcatatgctctg

SEQ ID NO: 23117 - DNA, 74 bp, Homo sapiens
cccagaagtagctgaatgtgttactccattgctgaggagtgggatcaacgagcaagggctgtatcgaattgtgg

SEQ ID NO: 23118 - DNA, 80 bp, Homo sapiens
agcaatttaaagatcctctccaagcgcggggtgtcctgtcctcgccatgaggccgcagcaggcgccggtgtccggaaagg

SEQ ID NO: 23119 - DNA, 100 bp, Homo sapiens
cctgtatctcaaagggctggcggtgcgacggtgagagggactgcccagacggatctgacgaggcccctgagattttttgtcccgctggctggaagcctgg

SEQ ID NO: 23120 - DNA, 87 bp, Homo sapiens
aattgggcgagggcacaaaataaccacttaccccttctcaccgaggaagagcgggagaaaggtctggctcttgctgattgaattcct

SEQ ID NO: 23121 - DNA, 75 bp, Homo sapiens
cctcttcttagttgatgatttagttgattctctgaaggtcttagtggtgcaatggctagtataagcgtgcgttcg

SEQ ID NO: 23122 - DNA, 106 bp, Homo sapiens
gctcatcgagtccattgagggcaagcagggcaagccccgcctgaagccccccttccccgcagacgtggggtgattctgggggtccacttgtctgtaatggtgtgct

SEQ ID NO: 23123 - DNA, 97 bp, Homo sapiens
ccccggcccacagtgggggtgtgcaaacccgagagaactgggctgcagaagatgtcaatgttactttcgaagatcaacaaaagataaacaaatttgc

SEQ ID NO: 23124 - DNA, 105 bp, Homo sapiens
agcactatttgaaacttttatctcatctggcttggcgcctgaggttctcccattagacgaagttatacggaagcgtctcctcattgatggagatggtgctggaga

SEQ ID NO: 23125 - DNA, 75 bp, Homo sapiens
cctggatgggactgtctatgatgtcatgtttgtcagcacagacctgcctagagctggaacgttacctccagagcg

SEQ ID NO: 23126 - DNA, 100 bp, Homo sapiens
tggcatttcagtcactggtttgcagagtccaggttgcagtgtaggattttggaagtcctccctccatcacatcaaaatggttttgctaatggacatgtta

SEQ ID NO: 23127 - DNA, 75 bp, Homo sapiens
gccgagcggcgacggaccgcgagatcgtaaagctgaaaattgaaatcatgaaagtagacaggactaaactgaaga

SEQ ID NO: 23128 - DNA, 101 bp, Homo sapiens
cggcgtgctactgagttcggccggtccgagtcactgtgcgtcgcctgggcccgttcctggtcttctcccccagggatctgcaaagacttggagaacttcaa

SEQ ID NO: 23129 - DNA, 75 bp, Homo sapiens
ggaggattacccctctggcaagaagcgtgcggggaccgatggtgtgctgctctggttggtgaagaccagcctctt

SEQ ID NO: 23130 - DNA, 83 bp, Homo sapiens
cttctggaagcctcctgacttgaactagaccttgggttacgttatatataggattcgtgttcgccgtggtggccgaaaacgcc

SEQ ID NO: 23131 - DNA, 82 bp, Homo sapiens
aagcgtcgggattaggtgaaagttttgaacgaagaatgtgatcagaactggtacaaggcagagcttaatggaaaagacggct

SEQ ID NO: 23132 - DNA, 100 bp, Homo sapiens
cggtggctcccaagaagtccgagacacgcgaatgagtccctggaacgccagatgcgtgaaatggaagagaactttgccgttgaagctgctaactaccaag

SEQ ID NO: 23133 - DNA, 75 bp, Homo sapiens
gtcaagttgccggtggaattggcccaggatgacagctggagaatggagtcaggccttgctgtctctaaccctgat

SEQ ID NO: 23134 - DNA, 75 bp, Homo sapiens
attcttatagccattcttatagttgtaaggagcatattaatgaaaagtgccataaactgaaaaaccaaacatgag

SEQ ID NO: 23135 - DNA, 108 bp, Homo sapiens
ccattgtacccagagtgcagagccgcctttccagcatgcaggggctgctcagtatgacctgtcagcctctacattctctcctgacggaagagtttttcaagttgaata

SEQ ID NO: 23136 - DNA, 100 bp, Homo sapiens
aagggatgttgctgaacagttggagaagatctatgggtcagacagaattggacaggccttcagtatttggcatcacctttacatggagcacaaagatgat

SEQ ID NO: 23137 - DNA, 75 bp, Homo sapiens
cccggcctctccagggccccagggccccagcaccaagattatgtttgagaccttcaacaccccggccatgtacgt

SEQ ID NO: 23138 - DNA, 100 bp, Homo sapiens
atatgctgaccttggcaaagctgccagagatattttcaacaaaggatttgattacgtgtgaaaatgaacttgtgcaaacccaaccccatgctgataatcc

SEQ ID NO: 23139 - DNA, 95 bp, Homo sapiens
aagctgttgtctcagggagcacagaagactatacctgggaaaatcatgggttctccctggtgaacagactttattctgacattggacatcttctt

SEQ ID NO: 23140 - DNA, 75 bp, Homo sapiens
ggtacctccaggaaatgtgctaggtagttcctgaaatgactgagatattgaagaaaaaatgaatcaggatcatgc

SEQ ID NO: 23141 - DNA, 100 bp, Homo sapiens
ttgttattggagaaacatgcagattatatcgcatcctatggctcaaagaaagatgattatgtgattgaaatctctgaatatcgaacccagctctatgaat

SEQ ID NO: 23142 - DNA, 87 bp, Homo sapiens
aggcgaagacaagagagctcattggagagtagttatcttgatggaattagaagttttgaagtcagctgaagcagttggagtgaagat

SEQ ID NO: 23143 - DNA, 98 bp, Homo sapiens
cctcatcgattcctacgagtcttctagcttcatgttcctggtgtttgacctgcatctatcatttcccgtaaaaaagaagccaaagctgaggaacttca

SEQ ID NO: 23144 - DNA, 89 bp, Homo sapiens
gagaaaggaagcaggcccgttggaagtggttgtgctctgaaaattggaaaaccaagaaggttttgatgttttgtgtgacgccacctgaa

SEQ ID NO: 23145 - DNA, 100 bp, Homo sapiens
atgctgcctgtgtgtcccccaggggcaggggggctgcctcctccacaattggactaaatgctcttccttcagaggattatccggggcatctactcaatga

SEQ ID NO: 23146 - DNA, 76 bp, Homo sapiens
ctgagcagcttgctggggaagctccgtggaggaggaagtccggaggtatggcgtgagtcccgagaacattatcctc

SEQ ID NO: 23147 - DNA, 82 bp, Homo sapiens
tacatcaacacgaaccatgaggacttcatcgggtttgccaactccaggtttacaccctgtacctggtggagtgttcccagtc

SEQ ID NO: 23148 - DNA, 74 bp, Homo sapiens
cggtgggcagtcctagtccgaggtgccaccgtggaaggacagaatggatatggactgtttaatgttgacctttg

SEQ ID NO: 23149 - DNA, 90 bp, Homo sapiens
agaatatatcacccataatcggaatgtgatcacagagcctatttacccagaagtagtccatatgtcactgtgtgcccagtattctgcaga

SEQ ID NO: 23150 - DNA, 90 bp, Homo sapiens
acctcggcctcttcctgttgcaccaggttcttcgaaaactgaagcagatgttgaacaacaagcctccaggttaaatcctgttttgaatat

SEQ ID NO: 23151 - DNA, 101 bp, Homo sapiens
gcacgtctgctcggagatcatttgggagatccaagagattcagtatcactcgctcccttgatgatcttgagatatctcccggggccaattcagcatctcta

SEQ ID NO: 23152 - DNA, 100 bp, Homo sapiens
gccagaccaggaacccaccagaaggaaccaattccggacacataacaagcagcagtgaggacaccaaagaactgataaatttcaaacggaagagagtggc

SEQ ID NO: 23153 - DNA, 75 bp, Homo sapiens
gatgagctgctcaccatcatccagatcactggcgatacatctacccactggtgtgtgctttctttgtggccctgc

SEQ ID NO: 23154 - DNA, 100 bp, Homo sapiens
accgaagatgatttctactgccccgtctgtcaggaggtgctcaaaacgcccgtgcggaccacggcctgtcagcacgtagtatgccaagatggaaggaagc

SEQ ID NO: 23155 - DNA, 90 bp, Homo sapiens
gggcagaatacagagatatggaatcagtttgccaaggcacgagtaacaagctcacgcagttgggcacttttgaagatcattttctcagcc

SEQ ID NO: 23156 - DNA, 82 bp, Homo sapiens
acctctaacacagtggaaaggaaccgttctggatcaggaatgcccaattcttctggactcatgaaccgtcgtgatgccattg

SEQ ID NO: 23157 - DNA, 103 bp, Homo sapiens
tgtcagacgcagccgtagacaccagctccgaaatcaccaccaagaccatggtgaatccgggcagcagctcgcagccgcccccggtgacggccggctccctctc

SEQ ID NO: 23158 - DNA, 75 bp, Homo sapiens
cggcaagaacggggacctgcccaggccgccgctcaggaatgaattcagatggagtctcgccctgtcacccaggct

SEQ ID NO: 23159 - DNA, 83 bp, Homo sapiens
cgacatgttgcttttcgtggagtggctagaaagtttgaaatggtggggagaggggatgctgatctcggcagttgtagcttctt

SEQ ID NO: 23160 - DNA, 100 bp, Homo sapiens
atcctcacctcgaaattcctgaggcgctgggagccgcaccacctaacgctggccgacaacagcctggcgtccgccacggaaggaatcgtgtctcctagtg

SEQ ID NO: 23161 - DNA, 75 bp, Homo sapiens
tcatctggaattttgccgatttcatgactaaccagttttgtttcgacgccggaccgcgtaagagacgatgatgtt

SEQ ID NO: 23162 - DNA, 74 bp, Homo sapiens
tctgggcgttcatgatcctggccagcctgctcatcgcctactgcacgattattggagccggaattggtggcact

SEQ ID NO: 23163 - DNA, 83 bp, Homo sapiens
cccctcctcctggcaatgcaggccttccagaaacctttgccaaaggtgttactgcggaaatgcaaaacttagtccatcggcgg

SEQ ID NO: 23164 - DNA, 100 bp, Homo sapiens
ctgcgctatgccctgctgtagtcacaggagctgtagagaggaccccggtacatctgaaagccgggaaatggatgctccagaccttgtatgattacttctg

SEQ ID NO: 23165 - DNA, 83 bp, Homo sapiens
cacggagacggcggcagcgctggactaggtggcagatgacggagcagcggaaacgcaggcaacgcctaggctttgtggatgtc

SEQ ID NO: 23166 - DNA, 100 bp, Homo sapiens
caacttcttcgccaaattaaagttttacaagatttaacctgtcatcaagacctgggattttggtgggtttggattcaggatttgttcctagtgtccaaga

SEQ ID NO: 23167 - DNA, 75 bp, Homo sapiens
tgaaaccaaatactgctattaaggacgcagtatcaacgtaaaatctgctggtcttgtgggaagacagggacctca

SEQ ID NO: 23168 - DNA, 100 bp, Homo sapiens
ggaaaaggagatgcagaaaatgaatccatacaagattgatataggcgcagtatattctcacagagaaccaccaaactgttttccacagaggctgcatcaa

SEQ ID NO: 23169 - DNA, 50 bp, Homo sapiens
ttcagtgatatcattaagtccagatctggggatttttgacatcttgtgaa

SEQ ID NO: 23170 - DNA, 51 bp, Homo sapiens
gttgcagtgttggagctaaacaaaacaagctatcgatcagggaagatctcc

SEQ ID NO: 23171 - DNA, 91 bp, Homo sapiens
gtggatctggattctaaggcaacacttccttgaagaaacaagcttacagtgtctttctcgagaagcaggtggaaacatgagcattcagttt

SEQ ID NO: 23172 - DNA, 74 bp, Homo sapiens
agactccaatcaccggcatttttggtggacacatcaggtgatggcatcagctgagaagggaaggaagcccatgt

SEQ ID NO: 23173 - DNA, 90 bp, Homo sapiens
aaaagatctaaagtcacccggcggccaaaggccagtgactaccaacgtttggaccagaagggattaatgaaaatcaagttccatcctcag

SEQ ID NO: 23174 - DNA, 83 bp, Homo sapiens
gcaccatgccgctcctaagcctgcacagccgcggcggcagcagcagtgagaggacctgaagaagtacggggctaccactgtgg

SEQ ID NO: 23175 - DNA, 82 bp, Homo sapiens
agtgactgtcaggtcgatcatatgccgccatggcatcagatgaaggcaaactttttgttggagggctgagttttgacaccaa

SEQ ID NO: 23176 - DNA, 100 bp, Homo sapiens
cgagacgcgcagcgccggcgcccgggagacccaggaggagcccgcaggacggctgtcctcagcgaggggccgtgcacccgctcctgagcagcgccatggg

SEQ ID NO: 23177 - DNA, 75 bp, Homo sapiens
gagacaggaggcagtagccaaacacccagagtgcctggtgaagaatgtgatgggatcactagcatgtctgcggag

SEQ ID NO: 23178 - DNA, 76 bp, Homo sapiens
ctgggcccctgcgctcaggaggccttcaccctctgctctggagtacaggggctcaggtccaggtggcaggggatat

SEQ ID NO: 23179 - DNA, 95 bp, Homo sapiens
cggagacctacctgcggcgtcggcagctgctgctccgaggaccgccgggagagcctgcccacctccccaccctggacgccgggcgcgtcccggcc

SEQ ID NO: 23180 - DNA, 82 bp, Homo sapiens
atcctgccgtccttctccactttcgccagcccgtgccgcgagcgcggcctgcaggaggtccaaccgtgactgccagatcgac

SEQ ID NO: 23181 - DNA, 98 bp, Homo sapiens
ctccggccagtgcgtgcaggcctttgaaacacatgaatctgacatcaacagtgtccggaaaggtctgggttcctaagcagaagccactggatcctgtg

SEQ ID NO: 23182 - DNA, 90 bp, Homo sapiens
ggcttggcagatgccagtggatccatacaactgctccgcctggtggaatctgagaccgtacgcgtccagggcaatgacatctcacaccgg

SEQ ID NO: 23183 - DNA, 82 bp, Homo sapiens
gttaatgcagggcttggcacgatacgtgttccagtcagcaacagtatcaaagtgctctattttgggcagataaagtagcttc

SEQ ID NO: 23184 - DNA, 96 bp, Homo sapiens
gcagatggccttgtttttggacaaaatgccctataaggactgccaggcaataatgaaggttcttttactgaaggatgcgaaggaagatgactgtgg

SEQ ID NO: 23185 - DNA, 83 bp, Homo sapiens
agcgtggatgccctgaagaagtgtgagcatgacccccatgtgctcctggccgtggccaactggcaggggccgcctgaagtggg

SEQ ID NO: 23186 - DNA, 98 bp, Homo sapiens
catacagcaacttagcgaagctgccggtgaagatgcctttctgagaaaagtctacagcattctttctctgcaggttctcttaactacagtgacttcaa

SEQ ID NO: 23187 - DNA, 100 bp, Homo sapiens
accatttacctcaaccaaccgcatctcaacaaattccgcgacaaccagatcaggaatgaccatacctgaagaagacgctgatgtgggacaaggcagtaaa

SEQ ID NO: 23188 - DNA, 101 bp, Homo sapiens
ggcgatggaaagctgcgctttcaaggctgcgctggcctgcgtgggaggtccctcgtctgagctggctcactcgcccaccaacagcgggaagaagctctttg

SEQ ID NO: 23189 - DNA, 50 bp, Homo sapiens
caaaaagctccgcaacaagatagcagggccctggccaacgtcaacattgg

SEQ ID NO: 23190 - DNA, 83 bp, Homo sapiens
ggcgggtggaggttcgagcgctgttctcgctccggagccgctgcacatttcgatgatatcatcaagttgaatcgaaaggaagg

SEQ ID NO: 23191 - DNA, 100 bp, Homo sapiens
gggccgcaccgacaccatccgctcggcttccatggactcactcacctttgtcaaggccatggatgactccagcgtcacgaaagagtctcgctctgttgcc

SEQ ID NO: 23192 - DNA, 76 bp, Homo sapiens
gtcgtggccaagggctgtggaactgtttctgtgattcagggccttagaaaatttacgtgtatacctgtgtgagaaa

SEQ ID NO: 23193 - DNA, 98 bp, Homo sapiens
tgtcagccatgaacggatggatgtgatgcctgctagccaaaagggttaattatagaaaatgccaagtaggaaatttgccgatggtgaagtggtaagag

SEQ ID NO: 23194 - DNA, 51 bp, Homo sapiens
aattagattacagcgatggggacacagaagactattcttgttcagtcctgg

SEQ ID NO: 23195 - DNA, 90 bp, Homo sapiens
ggacacttcaggctatggccagagcagctattcttcttatggccagagccagaacagagaagatgtgtgaagaatcggcatcctttgacc

SEQ ID NO: 23196 - DNA, 100 bp, Homo sapiens
actagggctcgggcgccggcgagatgcctttgttcaccgccaaccccttcgagcaagacgtggagctaacacatgagtttctacaaatattggagaaaac

SEQ ID NO: 23197 - DNA, 100 bp, Homo sapiens
ataactgatgatgtgcgggttcaggaggtacccaaactgaaggccctgaaaaccagaatcagcaacctgcccacagtgaagaagtttctacagcctggca

SEQ ID NO: 23198 - DNA, 96 bp, Homo sapiens
cgccgctgccgctgccgctgccgcacctccgtagctgactcgtaagactttgaccccgacgcaggcttcagtgattgccgcggatcagaagcctga

SEQ ID NO: 23199 - DNA, 100 bp, Homo sapiens
ggttccagctgcagcacgtggacgctgactcggaagtgcagtctctcagcaaacctgctgggcgacagcggactcagatgccttctggaatgtctgccgc

SEQ ID NO: 23200 - DNA, 100 bp, Homo sapiens
aagacttcaaagaaacattaagaacttggatcccattcacctgaggcacccgaagaagagaccatccatatttccaggtgttggggcgatgtttcctgac

SEQ ID NO: 23201 - DNA, 100 bp, Homo sapiens
gtaatggcaatgtgaaatcagataaacttaggcgtatttgggagcccacatacacgaacaggatctggacttggcacatttcttttaaaggtgcttgaag

SEQ ID NO: 23202 - DNA, 82 bp, Homo sapiens
ttttatttttccccaattcagcagagaatattttcaagggggcttccccgggcgctgcctggacaggcctgcctgcgtgctg

SEQ ID NO: 23203 - DNA, 153 bp, Homo sapiens
aggctcctgggtggcatggcgctcctgctcctccaggcgctgcccagccccttgtcagccagggctgaacccccgcaggaactagcggaattactggaggaagaaaaactaagttgtgtgccagtgctcatctttgctaataagcaggatttg

SEQ ID NO: 23204 - DNA, 75 bp, Homo sapiens
tgaagaagatgaacaagcgccagggcagccgatgaagtgcaaccttcacatgaatgggaatgttatcacctcaga

SEQ ID NO: 23205 - DNA, 87 bp, Homo sapiens
gcaaaagttcatctccttctgcatccttaactgagaatgagatcgagacgctccctccggagctcttccagtgccggaagctgcggg

SEQ ID NO: 23206 - DNA, 101 bp, Homo sapiens
ccgaggggcttcataccagctgaagagcgacaagccgctggcagccgcggatctcaccgccgctcagggtgaccagaagtcagcagcttcccagaagcccc

SEQ ID NO: 23207 - DNA, 90 bp, Homo sapiens
atggattcccaaggagaacagcttcttctcctggggctgggaatacagcaaggaaggggacaggtcactctacatgacatgatcctgaaa

SEQ ID NO: 23208 - DNA, 48 bp, Homo sapiens
agatgaagggcaagggccaaaatgatgatacttgccagaactaataca

SEQ ID NO: 23209 - DNA, 88 bp, Homo sapiens
aggccttcaagtgcatgatgtgcgatgtgcggaagggcacctccacccgttttggaaagacatcgttgatgataatgaagttcgtgac

SEQ ID NO: 23210 - DNA, 88 bp, Homo sapiens
gttcttgcctcaggccagtcgcctccaggccaagagggatccttcacccgtgtctggtgctgactctggctgcccaggagctgtctag

SEQ ID NO: 23211 - DNA, 100 bp, Homo sapiens
taccagaacggaagcctctggtccctgcccagcgaccagctggagctcgttgccacgggccgacggtcgcaaggtcctacggtcaagcatccgggagttt

SEQ ID NO: 23212 - DNA, 90 bp, Homo sapiens
ctttttgcgagctttccgagtgccaggcgccggccggctgcgaagacgcggtgggccgcccctccgccagagactgctgctactttgaaa

SEQ ID NO: 23213 - DNA, 100 bp, Homo sapiens
cgcacacgctcggcgctgcgatccgcgcatataacgatcacagaactgtgtggtgcaaagcgggttggttattttggtccaacacagttttacattgccc

SEQ ID NO: 23214 - DNA, 75 bp, Homo sapiens
tatacttctgcccggaccctgctggctatcctgcgcctttccactgctctggttgtagctgccatcagatgccgg

SEQ ID NO: 23215 - DNA, 100 bp, Homo sapiens
aggccgtggtcagccgcttcgacgagcagcaaaaccgctgagttcttgagcaaactgaacacagaatcgccagacagaagtgcctgtcaaagtgctgttt

SEQ ID NO: 23216 - DNA, 100 bp, Homo sapiens
agatgtcggatttcgacagtaacccgtttgccgacccggatctcaacaatcccttcaagggtgatcagcccatgacctaaacctccagacaaaataaaac

SEQ ID NO: 23217 - DNA, 96 bp, Homo sapiens
catgacacaaaagctgataccagagctatacagctgctattaggcagatgctacaactgtggtggccttgatcatcatgctaaggaatgtagtcta

SEQ ID NO: 23218 - DNA, 50 bp, Homo sapiens
cagactcgtgggggaaaggctggggacccccggagaccctacccaactga

SEQ ID NO: 23219 - DNA, 100 bp, Homo sapiens
cttcgattgaagcacatcgaccggcgacagcagccaggagtcatgagcgacagcggcgagcagaactacggcgagcgggggttcatgtgggatgtggctg

SEQ ID NO: 23220 - DNA, 100 bp, Homo sapiens
cctgaccatggacgacattcgaaggatggaagaagagacgaagagacagctggatgaagagtggaagctggacacactatgtgacttgtatgaaaccctg

SEQ ID NO: 23221 - DNA, 101 bp, Homo sapiens
cggtcctggtaacccccctgggcgcccttggagtaccgttcggggcccatcttctggctgctggtcaagagccccgagctggccgcccagcccagcacata

SEQ ID NO: 23222 - DNA, 88 bp, Homo sapiens
cagttggaaagaaccttttccagctgtgtggttccaggtgctggtgccgtggaagtggcaatggcagaagccctgattaaacataagc

SEQ ID NO: 23223 - DNA, 71 bp, Homo sapiens
agattggatggatgcacaatcggagacaaaggcttgaccactatgctatcatcaagtttccgctgaccact

SEQ ID NO: 23224 - DNA, 83 bp, Homo sapiens
gtcggagtgaggaagaggaagaagaggatgaagatgtggatctggcccaggtccttatgtcgtcagaagatcgagaagctcag

SEQ ID NO: 23225 - DNA, 98 bp, Homo sapiens
cagaacccggccacgctgctgcacatccatcgctggacttatctacgctgtagggggcctcaactcagcagcactctacccagaccctcccggcccca

SEQ ID NO: 23226 - DNA, 82 bp, Homo sapiens
gagaaacctcgtggcctggtctccattatttgagatgagttacatcttggagattgcagtccccctcctgaagagtccagcc

SEQ ID NO: 23227 - DNA, 100 bp, Homo sapiens
gtggaggggccggacgtccggtgtgtgtgagcacagcaaagagaatcttatgaccccctccaacatgggagtaatctttgggcccaccctgatgagagct

SEQ ID NO: 23228 - DNA, 128 bp, Homo sapiens
ttggagaaaatttgcctcaaagcgagtctcaaaggtgttcctggatttgctaaaccaggtggacaggtgaaatgtcagtatatctctgctgtggataaagttatatttgtggatgattatgcagtagg

SEQ ID NO: 23229 - DNA, 82 bp, Homo sapiens
gcccggatgggaccaccagagtgctgactgaatgtgggcccagttggcgtcattctgctttgacctaaacattcccatctga

SEQ ID NO: 23230 - DNA, 100 bp, Homo sapiens
ctcagcatggatatccaggtgctgagccaggagcagcagcctttctgtgcagaggccaagaccgttttgcccaagaaggagaaaatgaagctgaggcgtg

SEQ ID NO: 23231 - DNA, 75 bp, Homo sapiens
ccaagaggaggacagttcgctacacagcaatgcatcgagaattaaacaaccaccatgtcgagcaaaaaggcaaag

SEQ ID NO: 23232 - DNA, 83 bp, Homo sapiens
gagagtgcgatggggaatccaacagaattctgcaacacagtcactcctggcggcaaaccaaacaaaaccagagtcatctgggg

SEQ ID NO: 23233 - DNA, 75 bp, Homo sapiens
gaaacgttttccaatcgggtcatcattaatgagcattgctgctacaccttcttcctgtccaagatccggtcccac

SEQ ID NO: 23234 - DNA, 82 bp, Homo sapiens
gacaaggagggcatgatcaacctcgtcatgtcctacgcggcccagggccccggccagtgcccagccccgctgggagacccgg

SEQ ID NO: 23235 - DNA, 97 bp, Homo sapiens
ggccggccggtgccagcacctttcggcttctgagacggcggcagcagcggcattcagctcctctccaccaaactgccatattgccgtgagaatgtgt

SEQ ID NO: 23236 - DNA, 75 bp, Homo sapiens
ctgcactggtacacgggcgagggcatggacgagatggagttcaccgaggccttggccattgagcagaacctgggc

SEQ ID NO: 23237 - DNA, 75 bp, Homo sapiens
cagtacaacgatcccaaccgccgagggctcatcgctcatatctggtgttagtcggccagatgaggtgctcgagtg

SEQ ID NO: 23238 - DNA, 83 bp, Homo sapiens
tgttcttaacccagaagtagctgaatgtgttactccattgctgaggagtggtattatacctgaagaaccttagccctcgggtg

SEQ ID NO: 23239 - DNA, 88 bp, Homo sapiens
aaaccagtggccacagcatctttgtctagccccagtgcaggaggagatgttaaagtaacccatcttgcaggacgacattgaagattgg

SEQ ID NO: 23240 - DNA, 101 bp, Homo sapiens
caaaactgctaaacagaaaaggagaactataattctaggaagtggtcacaaaggaaaagctactattagaattgttggcctttaccagagtttgatccaag

SEQ ID NO: 23241 - DNA, 101 bp, Homo sapiens
agcttttggggtcgcccggccgccgctattacagtcttcccccgcatcagaaggaatgggtaccacagaccatgtcatcgtcctggcgtccacgaaccgag

SEQ ID NO: 23242 - DNA, 133 bp, Homo sapiens
attaatagactatgattggtgtgaagatgatttatcaacaggtgctgctactccccgaacatcacagctaagaagaaatttcctgacttgtttgtcttcttggaagattcctcctcatgtctcaaaatcttcc

SEQ ID NO: 23243 - DNA, 83 bp, Homo sapiens
ctcgaacggctcccacagccgggcgttgggggaaaggcgtttactgaagcatttgaaagggaactaagaagacataaagttca

SEQ ID NO: 23244 - DNA, 83 bp, Homo sapiens
gtttcaactgctgtattgcagaacagcctcagcctacaatgcagatcttcgtgaagactctgactggtaagaccatcaccctc

SEQ ID NO: 23245 - DNA, 100 bp, Homo sapiens
cggttcacagactgctgcttgtgtgttgccggccaggaattccaggctcacaaggctatcttagcaggccctccgaaccaccacagccagtcgactctga

SEQ ID NO: 23246 - DNA, 101 bp, Homo sapiens
acagccagttcccagctgtggaacacacaggcaaatacgccatgcgagacctagtccacaggcttccaggagggaacaacagcaacaacactgcaagcaag

SEQ ID NO: 23247 - DNA, 90 bp, Homo sapiens
ggaactattacggatgtggagaaatgccacgtcattttgctgcaaagctggataaatacatgtatatgtgaatgaaaactttgccattga

SEQ ID NO: 23248 - DNA, 90 bp, Homo sapiens
ggccgagcccaccgctgccccacaccccgtgctgaagcaggcctccagcttcacacccccagcttcagggggtcctcggctgccttcgat

SEQ ID NO: 23249 - DNA, 50 bp, Homo sapiens
agggacgccaccttctaacagagtcgatagcagcagttggtgacgagatg

SEQ ID NO: 23250 - DNA, 75 bp, Homo sapiens
gcttcccgtacagcctgcagaactccacccagagcttcacggccccacggacaaaccaggacatccctgctcctg

SEQ ID NO: 23251 - DNA, 75 bp, Homo sapiens
cggggcgccgctggcaggagcgcttggggatcctccaaggagctcctgcccaggggactggacatcaagcaggag

SEQ ID NO: 23252 - DNA, 101 bp, Homo sapiens
tgacaccggagtttgacgaagaggtggtttttgagatgaacagactagccactttgcattgactggaaacaatggcatttacagaaagagtcaacagcagt

SEQ ID NO: 23253 - DNA, 50 bp, Homo sapiens
cggccgggccctcgagacggggacgtgcaccaggtggcggagcgggtgga

SEQ ID NO: 23254 - DNA, 100 bp, Homo sapiens
gagggcgccttcaaggagaagtagcatattatgctccatgtggaaagaaacttaggcagtaccctgaagtaataaaggcagttatttggcagaaaagcag

SEQ ID NO: 23255 - DNA, 90 bp, Homo sapiens
cagattcgcagtggtcgcttcttctccttgtttcttaaacaattaggtctacatcctaactggcaattcgttgatgtatatggaatggat

SEQ ID NO: 23256 - DNA, 147 bp, Homo sapiens
cccacattaggatggtgaaccagcagctactagggagaagtctgcaagatgtcaagggccaagaagtcccagtgggtgtttgtgtgggaaaagggctaccaggaaactgactccgtggtcagctccgttacgaccaaggtcaagggc

SEQ ID NO: 23257 - DNA, 120 bp, Homo sapiens
gagtaacttggccaggctggccccgagcggaactggagaaagctgagggtgctggagaatctggtaaaagcaccattgtgaagcagatgaggatcctgcatgttaatgggtttaatggag

SEQ ID NO: 23258 - DNA, 101 bp, Homo sapiens
gccaattcgtcgcggcggcggtggagatcgcaggtcgctcagaacctgatgatttggaaacagaaattctacaagagccaagtggaacaaacaaagatgag

SEQ ID NO: 23259 - DNA, 100 bp, Homo sapiens
atttcccccgcttctatgtcctgtacacaatcttcatgaaaggcatctccttggaaacaatgccatctttgaatgtgagagataaacctagtttcagcat

SEQ ID NO: 23260 - DNA, 87 bp, Homo sapiens
gggatctcggtgctgcagacggcgagacctcctgcacaggaggatctcctgatgcagtccagcaaagaactttcacatgtggacctc

SEQ ID NO: 23261 - DNA, 98 bp, Homo sapiens
cggagcagccggggtcggagcgggtaaacctagcctttaagcaacctggaaagaggctagaacaccaaggaattagaattgaatttgtaggtcaaatt

SEQ ID NO: 23262 - DNA, 101 bp, Homo sapiens
agcgcatgcaacagaagtatgaggccagccgggaggacatctacaagcggggctcacgagcagctaaatgtgaaacatgaaccactccagctcatccagcc

SEQ ID NO: 23263 - DNA, 50 bp, Homo sapiens
cagctgctgagttctcggtgaagctagtgtcagcagtgggatacctgcgc

SEQ ID NO: 23264 - DNA, 75 bp, Homo sapiens
gcctccatggtgtcagagcaaggagaagctgttggcttgggcactgtttaaaggaaagttccgagaaggcatcga

SEQ ID NO: 23265 - DNA, 75 bp, Homo sapiens
cagcattctatcatggaaggaggagatgaagggcaagggccaaaatgatggcgaagctggtccgttacatttgta

SEQ ID NO: 23266 - DNA, 82 bp, Homo sapiens
cgacgtcatcatgctgaccaccaatcagatccgtaaggttaatttggagtggcccctggagtcagtttcctacaccatccga

SEQ ID NO: 23267 - DNA, 100 bp, Homo sapiens
cagagcaggagaagctgagcctttctggacagaccaacctgtcagtgctgcaagattggcagccaccatttgcatgtgatgttgataaacttcattttac

SEQ ID NO: 23268 - DNA, 82 bp, Homo sapiens
atattgctgttggaatatctggagccatccaacatttagctgggatgaaagacagcaagattgttagcactgctagagtttg

SEQ ID NO: 23269 - DNA, 90 bp, Homo sapiens
ctgagctggttgccggggcaggggcggaggcggaggcagaggtggaggcgctttgaaaggtgagggcctgggacagacgcagcagactgg

SEQ ID NO: 23270 - DNA, 82 bp, Homo sapiens
cagaagaagacgaagaagcagaagcgtctgctcaggttgcagcaggagagagagtgaagacatttccacctggacacctgac

SEQ ID NO: 23271 - DNA, 74 bp, Homo sapiens
taaaagcacagttttaagagagttaatgtccatcagtgtgttggcagtttctgcttggatgagggactacctaa

SEQ ID NO: 23272 - DNA, 48 bp, Homo sapiens
ggcgctgaaacggattaataagggcgccctgcgtccggcagaggaggc

SEQ ID NO: 23273 - DNA, 82 bp, Homo sapiens
ggttcagactcttggagccagaagctacatgacccctaaacggtatcatgatattagctggtttgacatcaagtcatttgtg

SEQ ID NO: 23274 - DNA, 75 bp, Homo sapiens
gcgggccgctccgacggcggtccatcctgcacaaaagctgtgagccgctttcactctccttttattgtagaaaat

SEQ ID NO: 23275 - DNA, 90 bp, Homo sapiens
gagctgaccaggaagacctactggctgccagaggaacccgaccagaacctgtccagccctgaggaggtgttccactctggccactcccgc

SEQ ID NO: 23276 - DNA, 75 bp, Homo sapiens
gcacttcattggccacctacagaaacaaaatgtcaacaaattgatgggatggcagaatagctgtgaaggcatgtg

SEQ ID NO: 23277 - DNA, 83 bp, Homo sapiens
cccaatgggaccctggaggaatgtcagcaccagaccaagtcccgcagcccccggaagccaatagactccctcagggactctcg

SEQ ID NO: 23278 - DNA, 83 bp, Homo sapiens
cgctgctggtggccaagaccaaggcctctccagggaaatcctcattgacgattcaatttgttgaaggccaatttgtggactcc

SEQ ID NO: 23279 - DNA, 80 bp, Homo sapiens
ctccgaatggagccatcccccttcggcgacgtctcctcccgcctcaccacaggtggataattactgtaccttcctcatgg

SEQ ID NO: 23280 - DNA, 82 bp, Homo sapiens
tgaagagcgacaagccgctggcagccgcggatctcaccgccgctcagggtatgaaataatgtactcttgctggagaaccgat

SEQ ID NO: 23281 - DNA, 82 bp, Homo sapiens
aaggagacgcgggagcggagcatgtcggagacgggcactgctgctgcccctgggggtggcctgacggagcaagagctgatgg

SEQ ID NO: 23282 - DNA, 74 bp, Homo sapiens
ccaggatctcgggctcggaacgagactgcacggagagctcaaaggatggctactgacatgcagaggaagagaag

SEQ ID NO: 23283 - DNA, 74 bp, Homo sapiens
tcaggcacaccaaccagcaggaccagggctgttgcagatataactggtgaagatgaggtcatactggagtagga

SEQ ID NO: 23284 - DNA, 95 bp, Homo sapiens
cgatagccggaacaagcatgagatcattcgctgcttgaaagcttttatgaacaacaaggatgttttagaagaatgtatgtctcttcccaagctat

SEQ ID NO: 23285 - DNA, 82 bp, Homo sapiens
aacaaatgctgctgctatgaatatgggtcgaccattccaaaaaaatcgcttcctgcctgacacagctcacttcaagaagtgc

SEQ ID NO: 23286 - DNA, 83 bp, Homo sapiens
aagaggaggaagtaaatcgagttagtcagatccccgtcgaggtcaagatcaagatccaggtctatttcacgaccaagaagcag

SEQ ID NO: 23287 - DNA, 90 bp, Homo sapiens
gagaaacattgagaagatgcttggagaggccttggggaacccacaagagactgaacattcttcacgatctgaaaggaaaagaagagattc

SEQ ID NO: 23288 - DNA, 75 bp, Homo sapiens
ggaattgatgatcaagatttccaggtatgaaaatgaaagtcttcagaatggaaggaagtcaactgaatttccaag

SEQ ID NO: 23289 - DNA, 82 bp, Homo sapiens
atctgaacggccaggactgctcgcttctgctgacggccacaggtgcgcgcggagccatggttatcatgtcggagttcagcgc

SEQ ID NO: 23290 - DNA, 135 bp, Homo sapiens
catcctggtccaaacatgaaagaattcccaacatcaagattgattgaaacatattcaatggggacaatgactcattcttcccaggacactggttcttgtggcattcaggaagatggaaagctttatgtggtggat

SEQ ID NO: 23291 - DNA, 90 bp, Homo sapiens
gcagcatcggcatgctctatctgtactgccggcacctcaaccagatgaggaagtacaactttgaggtgctcttacagcctgttccaagtg

SEQ ID NO: 23292 - DNA, 82 bp, Homo sapiens
gggacgcaacacgcttagcggcttctcctcagcccacatgggcagtcacgcccgctcccaaaagacttcaggcattgggcgc

SEQ ID NO: 23293 - DNA, 100 bp, Homo sapiens
gtagtaaccccgagtctgcggaagtggtgacccgtgggacgcggctgagacaggcctgcactgcccaaagtcttggaaacttgctggatatgatgtaccg

SEQ ID NO: 23294 - DNA, 83 bp, Homo sapiens
ccttggtcaaatgatgcaaccctgcagcatgttttaatgagtgactggcatgccagatttcctggagaagctgcacatggcca

SEQ ID NO: 23295 - DNA, 83 bp, Homo sapiens
tccccatcttcggcatgtccttcgcctgccagtcacgcaaacatgcagatctttgtgaagaccctcactggcaaaaccatcac

SEQ ID NO: 23296 - DNA, 50 bp, Homo sapiens
tgctgttcaaaaaagtccctaaaggatacaatgtctctttgctatatgac

SEQ ID NO: 23297 - DNA, 96 bp, Homo sapiens
tgaatcggaacctgcaatttaccaagacctgtacacacattacatagatcacccctgacctgctacctcggccgccccggttgcttctattggtca

SEQ ID NO: 23298 - DNA, 88 bp, Homo sapiens
ccaccaacagtttctgtgtcccacttcatctttaataaggcagtggagctactgctgtggttcaggcagccctatgcaaacccaggca

SEQ ID NO: 23299 - DNA, 100 bp, Homo sapiens
tattttcttcctgcccctcgttgatgagagcattcgaagtgacctcagcagggcatccaggttcggctttccagtttggcagcagcactacaaatttcaa

SEQ ID NO: 23300 - DNA, 50 bp, Homo sapiens
atcgtggagtgcgggccctgccagaatttgacaagtatgcgcccaagctg

SEQ ID NO: 23301 - DNA, 74 bp, Homo sapiens
actaccctgactacagctggagcgcccagaggcgagccctggtggaggaagagacacctagctcccctgtttga

SEQ ID NO: 23302 - DNA, 50 bp, Homo sapiens
ccggaccttcatcaccattggagacagagctggtacagaaggcagagctg

SEQ ID NO: 23303 - DNA, 90 bp, Homo sapiens
tcaaaagagcttctctccagagtagaaagtgaaattggagcgatttgaaattccaatcaaggttcgattaagcccagagccatggacccc

SEQ ID NO: 23304 - DNA, 101 bp, Homo sapiens
tggataccaaggaagagaagaaggaacggaaacaaagttattttgctcgcacacgacggttctgccctttatattaatcgagatgaggacatcgcaccatc

SEQ ID NO: 23305 - DNA, 75 bp, Homo sapiens
tcacgatcttcatcacgctcatcctccccctcaagttcaaggtctaggtccagttgtggacatcggatacccaag

SEQ ID NO: 23306 - DNA, 112 bp, Homo sapiens
tccatcacccaccaacaacaccacaataatccacagccaagcagaatcaaattggatatccccaaccttatggccagtggggccagtggtatggaaatgcacaacaaattgg

SEQ ID NO: 23307 - DNA, 82 bp, Homo sapiens
tcagaacctcaagcttttcaggcatcctcatataattaaactccgttggacataccagatggtcgaagagctccacttcctg

SEQ ID NO: 23308 - DNA, 75 bp, Homo sapiens
tcgaaaaagaaccgcgcgggaagccccagcccgcagccctcgggggtgaaggaatacgactccatctcccggctg

SEQ ID NO: 23309 - DNA, 100 bp, Homo sapiens
gtgggcggcattctttgccacaggatcgtttggctcatcatcggtggctgttattttttcattttggaaaaaatgaaaattcaaatgatcctgagctgaa

SEQ ID NO: 23310 - DNA, 90 bp, Homo sapiens
acttgggaacgaggggtgaagcggcccaggtgagggcaacatgagtgagaatgaggaagaggaaatttctcagcaagaaggcagtgggga

SEQ ID NO: 23311 - DNA, 122 bp, Homo sapiens
agtcacgtttaatttgagtaaaggagcatgtagctcatccggagcaacatcttccaagtcaagggagcacaatacttgggaacctgagaaaaacttggattgccctgagctaatttctgaat

SEQ ID NO: 23312 - DNA, 75 bp, Homo sapiens
tgatggagaaggatgagctatgacttgctaaacaatctgttgtgtggcaaaggagcagagaactttgacaagttc

SEQ ID NO: 23313 - DNA, 99 bp, Homo sapiens
gaggctgatcagaactatcagaactacatcttaagggctaccaagtcaggattgttacccccaccacctgcgctccctccaagaccttgtccatcacag

SEQ ID NO: 23314 - DNA, 50 bp, Homo sapiens
cagctgtgaaaaaagccatttccgaagatgaacacaatgacgtacagaag

SEQ ID NO: 23315 - DNA, 96 bp, Homo sapiens
caaaatgaggaaattctgtatgttcttcgccattatattcagtgtctttctcgagaagcaggtggaaacatgagcattcagtttcttggtacagtg

SEQ ID NO: 23316 - DNA, 100 bp, Homo sapiens
aaaaggcctaagaattttggcattggctacagcatgctggccatagggattggaaccctgatctacgggcactggagcataatgaagtggaaccgtgagc

SEQ ID NO: 23317 - DNA, 104 bp, Homo sapiens
tctttggcatcactgcagctagtaatttgccttctggattagttctccggggtgctgcaccagtgtcacattttggcctctgagatggtccatttcattcatca

SEQ ID NO: 23318 - DNA, 51 bp, Homo sapiens
gacatcacgtggaggcggccccagaacctaaaggcagacccagaagagctt

SEQ ID NO: 23319 - DNA, 82 bp, Homo sapiens
tccactgcctgtggaactccaggctatgtcgatcctggccaatttggagcaaggcttagcagaagacggcggcatgagcagc

SEQ ID NO: 23320 - DNA, 100 bp, Homo sapiens
cgcaaagcggggacccagaccctggagcctcagttggaagcagccgatccagcctgcggagcctgtggggcaggactatacaggctccaacccaagttcc

SEQ ID NO: 23321 - DNA, 82 bp, Homo sapiens
ttcaatgttccaggcttgtacattgctgtgcaggtacactgcatcagcacagaatttactccacggaagcacggaggtgaaa

SEQ ID NO: 23322 - DNA, 102 bp, Homo sapiens
gtccacctctgcatctccaagcccgaacgccccatgaagttcctccgggagcacttcgagaagctggagaagatcctgaacatggaggatgaccagaactgg

SEQ ID NO: 23323 - DNA, 74 bp, Homo sapiens
tttatgacatcggagaggagctggggagacccctgagccccttccagtgctgcctgaggtgccctctacctgtg

SEQ ID NO: 23324 - DNA, 100 bp, Homo sapiens
gctggatgccgtgatctccagcgccggcctcctcagtgcgaagaagctgcagccgcacctggccaagggttgcccccaagtttcctggcagtgtgtgata

SEQ ID NO: 23325 - DNA, 75 bp, Homo sapiens
agaaaccaaagggcaggcacggcagcaaacgcctgaggtttgttacagaaggagaaagtggcagttgaagcattt

SEQ ID NO: 23326 - DNA, 75 bp, Homo sapiens
ctcaaagcgcatattatgctacatgaaaaggaagaggtgatagaaattgaagatgcttcacccaccaagtgtcca

SEQ ID NO: 23327 - DNA, 100 bp, Homo sapiens
gcagctgaactgagcgtatgtgccacgccgcccaggagacccctctgctgcaccacttcatgtatgtaccaaaccaaagccgtcatcattgcaatgatca

SEQ ID NO: 23328 - DNA, 50 bp, Homo sapiens
attctggtgcttatggtgcctcaggtaactataactacccaatattgcag

SEQ ID NO: 23329 - DNA, 98 bp, Homo sapiens
gctgtgccgcaccgaggcgagcaggagcagggaacagagttgacgggcgccgacctgaaggactgcgtcagcaacaacagcctgagcagcaatgccag

SEQ ID NO: 23330 - DNA, 76 bp, Homo sapiens
ccaaagaaaagatacttctgcaatcctggacatgaaatggaagaagaatttggtgttgatgattcttattctgaac

SEQ ID NO: 23331 - DNA, 99 bp, Homo sapiens
atgattgacagacttgaaaaagccagttctaatcagccacaccatatcctggtggatttaaatgtttcacctgtgaaaaggcagcagacaattatgagt

SEQ ID NO: 23332 - DNA, 73 bp, Homo sapiens
cagaatgagcccctgccagagaggctggaggtaactcgggaccaaatgaagatgtttatacagcaggaattta

SEQ ID NO: 23333 - DNA, 100 bp, Homo sapiens
ttctccatgccgggattcctgtttaagaacagtatcaaggagagtaacaacatggtggtgcctgccatgcagctcgccagcaagatcccggacatgtcgg

SEQ ID NO: 23334 - DNA, 98 bp, Homo sapiens
cggtctggctccagaacaactcttcttcatagttacgttatactgcccctgcattgttggtattgaaaggggtgaagccagccagttttgacaaagta

SEQ ID NO: 23335 - DNA, 88 bp, Homo sapiens
tgggacccaccgctgccctcagctccgagtccagggcgagcaacatggctgacaaggccaagcctgccaaagctgccaacaggacgcc

SEQ ID NO: 23336 - DNA, 98 bp, Homo sapiens
agctggaggccaagcagaaggcccggaagaaagaggagcggcagagcctgctgggtacatgtcccagagcaagcacacggaggcccgggagctcatgt

SEQ ID NO: 23337 - DNA, 100 bp, Homo sapiens
cccatcacgtgccacatttgcttggggaagcgtcacactgctcagctccgcgaagagttgctgaaacttccctgccctgaaggcttggatcctgacactg

SEQ ID NO: 23338 - DNA, 100 bp, Homo sapiens
ctttcagcttcagcctgctcaagaactgcagcattgcagccgccaagacggcgggaggcagcaccgggctcttgatggacttggcagccaatgaaaaggc

SEQ ID NO: 23339 - DNA, 82 bp, Homo sapiens
ttcgcccgggtcctcctagaaattccccccgaagaagactcccccacatctggattgcagagggaatggcatacatcgagcg

SEQ ID NO: 23340 - DNA, 75 bp, Homo sapiens
ggccatggccgccgccgatgccgagcccaagaagatgaaaggattgttcttgttgacaacaaatgtaagtgtgcc

SEQ ID NO: 23341 - DNA, 83 bp, Homo sapiens
gcgtgggggaccggctgttggcggagacgtctcccacaacctgctccgggcgctggacgttgggctcctggcgaacctctcgg

SEQ ID NO: 23342 - DNA, 82 bp, Homo sapiens
ctcaagtgtccatcttgcagtccttgtttggagagttgtcactcagcccagtccatcagtttctcagcccagtacttctcag

SEQ ID NO: 23343 - DNA, 82 bp, Homo sapiens
cctggaggctgctaacctcttccagagcttactcacatagcatattggtatatcaaaatgaaatgcaaggaaccaaaaataa

SEQ ID NO: 23344 - DNA, 74 bp, Homo sapiens
gtgattttgatttatcacatttctggagcaagtacactgagatctgtatctgtggacctgaatgttgatccctc

SEQ ID NO: 23345 - DNA, 100 bp, Homo sapiens
ctgcagcagcccctggcgccctcgggcctcacgctgaagtccgaggcccttcgcaactggcaaggaatagccaggtctggctgggtcggcacaacctgtt

SEQ ID NO: 23346 - DNA, 90 bp, Homo sapiens
gggctgagtaccgcggcgggcgcgagcgaggcgccctagacatcttctccctcccttgcctcagatgatagtatttctgctgcaagtact

SEQ ID NO: 23347 - DNA, 87 bp, Homo sapiens
gctgcccgcctgccgccgcccgcctccgcctgccttctgccgccggccggcgcgtcgtccccacagcttccccgggcgctgcctgga

SEQ ID NO: 23348 - DNA, 82 bp, Homo sapiens
acggcatgatgagttctgagctacggaggaaccctcatttcctcaaaagaactgtggctgcaccatctgtcttcatcttccc

SEQ ID NO: 23349 - DNA, 100 bp, Homo sapiens
cagaaacaaaatgtcaacaaattgatggttgcagataataatgaagatgttgatggtgatggtgttcatgaaataacaagccgagatagcccggtttatc

SEQ ID NO: 23350 - DNA, 60 bp, Homo sapiens
ttgaagctggcagtctggttccagcatgaatctagagaaacattattgggatttaatatg

SEQ ID NO: 23351 - DNA, 100 bp, Homo sapiens
cgtgtcagaccagttctatcgctacaagatgccccgtctgattgccaagtcgcaatgtatctgctgagcaaaaagatgaaaacaaagaagcaaagcctcg

SEQ ID NO: 23352 - DNA, 75 bp, Homo sapiens
cgcagtggtcgcttcttctccttgaatgccagaggattcaacatgagcatacctatgcctgggcatccagtgaac

SEQ ID NO: 23353 - DNA, 98 bp, Homo sapiens
attccgtttaaggcagccctgcggttggagctgaaggagtgcccaggctgcggatggaggaaggacgtgctcgggagaaggtgaagatgggagagaag

SEQ ID NO: 23354 - DNA, 80 bp, Homo sapiens
caggactcctctatctcctccagtgtttggtgtataaaacagaccaagctcaagatgtaaagaagattgagaaattccac

SEQ ID NO: 23355 - DNA, 100 bp, Homo sapiens
cagcccccgtaacctgcgcgctgccctagggcccggccgacccgcggcccggttgttggtgtggagtggaagatgaggcggcaccttctaagcagagtat

SEQ ID NO: 23356 - DNA, 101 bp, Homo sapiens
tgcgtgcaagatgctggaagcactgaaattacctctcagcaagaagccaccgcagagcaagagaacaaacggtatgaaaatgaatatgaaagggcccgaag

SEQ ID NO: 23357 - DNA, 75 bp, Homo sapiens
tgaaatcaatcagttcttgggacccgtggaaaaattcttcactgaagaggagtacagttgtgaatttggctccgc

SEQ ID NO: 23358 - DNA, 75 bp, Homo sapiens
caagaagatttccagcctggaccaactggtggaaggacggacatataatgatctgaaccaatatccagtgtttcc

SEQ ID NO: 23359 - DNA, 83 bp, Homo sapiens
ccggcttcggagcgggagtgttcgttgtgccagcgactaaaaagaggataccatacttgcagagctccttcagatacataaag

SEQ ID NO: 23360 - DNA, 98 bp, Homo sapiens
tggagtgcttcattaccacgagataggcaatacgaaaggtatctgctgtgcgtttcagtcaacaatacagcttgtgttcgacaatattccttgatgac

SEQ ID NO: 23361 - DNA, 51 bp, Homo sapiens
aaaaaagttgccaagagcaagtcaaatgctacagcctgctgtcgaggcctt

SEQ ID NO: 23362 - DNA, 100 bp, Homo sapiens
ctcaagtgcaattcaagatatccgaaggttcaattatgtggtcaaagttttggtatcaaggttatgctggttcctaaaaagaactgggcagagttcctct

SEQ ID NO: 23363 - DNA, 90 bp, Homo sapiens
ccgcccgcctcgcccgccgtgagcgcccggagcggtccgcgagccaccgaggcccagtggtacaggagctgcagcaggccatctccaagc

SEQ ID NO: 23364 - DNA, 82 bp, Homo sapiens
agcccccgcgcgcccggccggcccggagcaccgagctcgcggcacggtaggagggggggccctcagcctcttggccttgaac

SEQ ID NO: 23365 - DNA, 100 bp, Homo sapiens
tccattccagaaccatggcccaatttgtccgtaaccttgtggagaagaccccggcgctggtgaacgattaacgtgacagtgtcaggtggacccacagcca

SEQ ID NO: 23366 - DNA, 90 bp, Homo sapiens
cccttctgctgaggcccagagacctgagcagctctgcaaggttctaacagcttgccttgcgccatggactggcagccagacgagcagggc

SEQ ID NO: 23367 - DNA, 80 bp, Homo sapiens
acttcacactgcagaactgggttctggactttgggcgtcccattgccatgggcactgtgttggcactcactgaaaataac

SEQ ID NO: 23368 - DNA, 50 bp, Homo sapiens
ctctgatccatcagttaaccacgttccagctaccactgccacgtgtaccc

SEQ ID NO: 23369 - DNA, 96 bp, Homo sapiens
agttcaccagtggtgaaaaggagcaggtagatgagtggacagttgaaacggttgaggaatcacccttcggtcatcgtgcagcctgggaagagacct

SEQ ID NO: 23370 - DNA, 75 bp, Homo sapiens
ctacagggaagtgcatcacatgtcagggaagtttaattagcattgacagcacctgtacagagatgggcaattttg

SEQ ID NO: 23371 - DNA, 99 bp, Homo sapiens
tgaccaatgctttccacccacaaagattgaacgacatgccatgtactgcaatggtctgatggaggaagatacagccccaacaagcgaggcccacccacg

SEQ ID NO: 23372 - DNA, 98 bp, Homo sapiens
ggaagagtcagcagagcaaccagagttctactacgatgagtttggtttccgtgtgtacaaggaagctctgctctacaagcctgtggaccgtgtgacga

SEQ ID NO: 23373 - DNA, 75 bp, Homo sapiens
cgcgcagccagccttgggaagcccaggcccgggaccgtggcgcttcgagagattcgtcgttatcagaagtcgacc

SEQ ID NO: 23374 - DNA, 75 bp, Homo sapiens
gctgatccagataatgaggatgcaacaggttaatttggagtggcccctggagtcagtttcctacaccatccgagg

SEQ ID NO: 23375 - DNA, 99 bp, Homo sapiens
gttgtgaacctcacaggcaggctaaacaaggatctcaaagatttcatgagacaagctggggaagtaacgtttgcggatgcacaccgacctaaattaaat

SEQ ID NO: 23376 - DNA, 102 bp, Homo sapiens
cccagaccctggagcctcagttggaagcagccgatccagcctgcggagcctgtggggcagaaaccatgggatgggtgacacgtctatcaagtttgaagtggt

SEQ ID NO: 23377 - DNA, 100 bp, Homo sapiens
aagacagcagccacatcattgctttatgtgattttcagctgaactctcatctctcaacactggcaaatattcataagatctaccacacccttaataagct

SEQ ID NO: 23378 - DNA, 83 bp, Homo sapiens
attgatctgaggactataataccttgggatgtggacacaatttgtaaggttcacaatattcttgcagaaatggtgatgggggg

SEQ ID NO: 23379 - DNA, 100 bp, Homo sapiens
gcgatcaaggccaagtatccgccagtcaataggaagtacgagtatcatgacaagatgtttaagatgagtgaaaagatattactcctgtgtgttggagagg

SEQ ID NO: 23380 - DNA, 98 bp, Homo sapiens
tactaagaactacctgagctacctgacagccccggattattctgcctttgaaatgtgttcagagcaacattgttttgttgacacaagcatttagaaga

SEQ ID NO: 23381 - DNA, 75 bp, Homo sapiens
gtggtgcacccagaggccggggaccttgccaaccctcccaagaagttcagagcatcagaggctccttgaaatgct

SEQ ID NO: 23382 - DNA, 76 bp, Homo sapiens
gcaaaggcaggggaggaagccacctcgagcagatataatttctacagtagaatttaatcattctggagaattacta

SEQ ID NO: 23383 - DNA, 95 bp, Homo sapiens
gatgaccctccttcagctaaggcagccattgactggtttgatggaaaaattgatgggacacttgggtgttgtattgtatgagtatttgggtgaag

SEQ ID NO: 23384 - DNA, 73 bp, Homo sapiens
tgtcccaggactcctctatctcctccagattaatctaatagctcctcctcggtatgtaatgactacgacaacc

SEQ ID NO: 23385 - DNA, 100 bp, Homo sapiens
ggagaatcttcaagaacttcctcgcactgtgacatgtctgatcccttgctcccatccctgcagcatgaacaaggttgaagctccattcataccaaagttt

SEQ ID NO: 23386 - DNA, 100 bp, Homo sapiens
agtgagtctcctgaggaccatctcagaggccccgggatcacccgaacagtggtaaattcactccagcagcaacctcaggctgcatccccttcagtaccag

SEQ ID NO: 23387 - DNA, 100 bp, Homo sapiens
tgaagctgaaactctctgcacaaagaatcctggttttgacttcagtggagcagaaatctcaggaaactacactaaaggtggaccagatttctcaaacctt

SEQ ID NO: 23388 - DNA, 75 bp, Homo sapiens
gaccagaggaactcagccctgattgcgcatataatcaagtttcacagagcttctaaagcaaacaagaagccagtt

SEQ ID NO: 23389 - DNA, 92 bp, Homo sapiens
ggcagagtgctgatgtgaaaaataccacgacaaaaccaccctagtgctggagaatctggtaaaagcaccattgtgaagcagatgaggatcct

SEQ ID NO: 23390 - DNA, 83 bp, Homo sapiens
gttccccggctcgcggggcccggcgaagggcagtctgcgctcctcagaccaccggcaggtgaacagcctgatgcagaccgagg

SEQ ID NO: 23391 - DNA, 100 bp, Homo sapiens
cctgaccacttcctgtgtctgtgggagcactgtgaggcaactcatgcagcaattccagaaccccgacttcccacccgaagtagaggaacaggatgccagc

SEQ ID NO: 23392 - DNA, 88 bp, Homo sapiens
ctccaagatgatttgatgaaggtcctgaacgagctctactcggttgaagctccattcataccaaagtttagaggctctggagatacca

SEQ ID NO: 23393 - DNA, 90 bp, Homo sapiens
agccccttcgtctccccagcacccactctctgggggcaggtgggcccggtgacagccgcagggccgtaggcagccatggcgcccagccgg

SEQ ID NO: 23394 - DNA, 76 bp, Homo sapiens
ccctcagaccccttccttccaaaggcgtggtgatggtggatgaggcacacgaaaggaccctacacacagacattct

SEQ ID NO: 23395 - DNA, 50 bp, Homo sapiens
tttgagcggactcccttttaagtactttgccagacgtttatcaaaatggg

SEQ ID NO: 23396 - DNA, 100 bp, Homo sapiens
caccaagcattattctcctaacggtggcttcccacacttctgactcggacgttccttccggtgtcactgaggtggtcgtgaagctctttgactctgatcc

SEQ ID NO: 23397 - DNA, 88 bp, Homo sapiens
gatcctccagaaagaatcaaccatgctgacaccttgattttggacttctcgccactagaactgaaaccacccctactcctaatccccc

SEQ ID NO: 23398 - DNA, 75 bp, Homo sapiens
ccaagcctgacacagagcctaacagaagttgtttgatgtgtgcacagtgtcacgaacagacagagaaaccaaact

SEQ ID NO: 23399 - DNA, 75 bp, Homo sapiens
aagcctgatctaacccctagaaacagctaaggcaggaacggatccaaattcagcagcttgggctgcttattacgc

SEQ ID NO: 23400 - DNA, 50 bp, Homo sapiens
gaagaaagccagggcctatggcagagagtgctccaagctcccgaagccga

SEQ ID NO: 23401 - DNA, 100 bp, Homo sapiens
cagaatcctttagcagtgggtcccaggacgtgcaccagaaaagagacgcaaacatgcagatctttgtgaagaccctcactggcaaaaccatcacccttga

SEQ ID NO: 23402 - DNA, 100 bp, Homo sapiens
tgatgatttcgtagagtgtttgcttcggcagaaaacggcaattaagttggaatatgcaaggttggttaagttggcccaagaagacaccccaccagaaacc

SEQ ID NO: 23403 - DNA, 83 bp, Homo sapiens
cagctggcggagctggagctggagctctcggaggcccagctcaacattggcaatgtgctccctgtgggcaccatgcctgaggg

SEQ ID NO: 23404 - DNA, 88 bp, Homo sapiens
ggacagcagaactaaagaaagctttaaaagaaaaagaaaacagattattattgcaacaaaggcccttgcttgtgattggtggttcctc

SEQ ID NO: 23405 - DNA, 98 bp, Homo sapiens
cggctactgccgcttcagttctcccggtgtggccacgagtcgggtgtgatgaatgcagactctgctaccattttggctgtttggatcctcctttgaaa

SEQ ID NO: 23406 - DNA, 89 bp, Homo sapiens
tgatacccaagaaacatatatcccagatttctgtggcagaagatgatgatgaaagtgcatggattccgtgaaggaacaacacctaaacc

SEQ ID NO: 23407 - DNA, 96 bp, Homo sapiens
tttaaatatctggtctctcacttcaggaaaatctactgccatagttcacatacagctaaatggagtgaaggtacctgagcgcaggaaccatggtct

SEQ ID NO: 23408 - DNA, 74 bp, Homo sapiens
tccttcaagctgcccccgcacatcagcctgcaaatgccgggtctaagttgtagattttatcaacacaaatttcc

SEQ ID NO: 23409 - DNA, 51 bp, Homo sapiens
gcacataaggaaattagtggagatatggctcgtggacagcagaaaattcag

SEQ ID NO: 23410 - DNA, 94 bp, Homo sapiens
aaagagccgagcacgcgggtctgtcatcatgtcgcgttacgggcggtacggaggaggtcaaaatgcagatcttcgtgaaaacccttaccggcaa

SEQ ID NO: 23411 - DNA, 87 bp, Homo sapiens
aacccacaggtgcatttcacagcactctgggcgaaaattggatgtgaaaatgaagccagaccgagatgtccctggtagatttgggaa

SEQ ID NO: 23412 - DNA, 97 bp, Homo sapiens
tccttacctgtttttccagctcacccactgccagcagaggctctccctgcatgtcctatccaggccacctgtgaggctgcttccaaggaggaaaaca

SEQ ID NO: 23413 - DNA, 100 bp, Homo sapiens
gctggaggagccgccgagcggagacccgggagcaggagctgggcctaggtctgcgccctggtgctggagaatctggtaaaagcaccattgtgaagcagat

SEQ ID NO: 23414 - DNA, 84 bp, Homo sapiens
ctcgtcagcactgactttcagctatggaatcgagctgcctgagaactggacagacacgcgggagacgctgctggaggggatgct

SEQ ID NO: 23415 - DNA, 75 bp, Homo sapiens
acttgctcgactgagagactcagagggcagtgatgactgttcggaaatgtgtgatggagaagagcgccaggaagc

SEQ ID NO: 23416 - DNA, 90 bp, Homo sapiens
caagaggctaactccacccttcaacccaaatgtggagagcgacttgcagttgtggaggtacagtgtgaacggctgaggatgctctaccgg

SEQ ID NO: 23417 - DNA, 82 bp, Homo sapiens
agggcctgcagcgggagctggacggcgagcgcgagcggcgcgagaaaatggagttttaacattgaatgcggagaacactaat

SEQ ID NO: 23418 - DNA, 89 bp, Homo sapiens
ttcaacagcaatttcgaaacctgtagggtttggagaagagtttgacgaggatggcacagtgttcgacggccgccccatagagtccctgt

SEQ ID NO: 23419 - DNA, 90 bp, Homo sapiens
aagcacctgcacctcagagtaaagctgctggacaacaccatggaaatatttgacattgagcttagcagtgtctgcaaaaacgaatctttt

SEQ ID NO: 23420 - DNA, 51 bp, Homo sapiens
ggcaggggttgaactgtggagtgtgtgggttattcagcttctcaaggctgg

SEQ ID NO: 23421 - DNA, 99 bp, Homo sapiens
gggagcgatgttgatctcaggaagcacaaagggaccttcctagctctgactgaaccacggagttctctgattatcagaattaccttgtaaatagctgtg

SEQ ID NO: 23422 - DNA, 97 bp, Homo sapiens
gagaagtcaaatggagagtatgctcatcagtggctatgcactcaactgtgtggtgggatcccagggtgctaaaatgatgtattttctggacaagtca

SEQ ID NO: 23423 - DNA, 83 bp, Homo sapiens
cactgctttccactcggctcctgtcgtccgttctctcaggctcccgttcagccttatgccagcctggaccatcttggaggcag

SEQ ID NO: 23424 - DNA, 82 bp, Homo sapiens
ccgcgacggacgcaagatggcgacggcgaccatagctctcgttttaaaatcaaagatgggaaaatcggagaaaattgccctt

SEQ ID NO: 23425 - DNA, 100 bp, Homo sapiens
aacctctacaacgaaggtgaagccacggaagataaggagaggctcaattatattgggccagaagaatttgttcaggcgttcgtgcagaaggaccctttgg

SEQ ID NO: 23426 - DNA, 74 bp, Homo sapiens
ccttccagctgtttgaccgaacaggaaggaaaatcacctcggcagtgtttgaaggaaggatactgcaactcttt

SEQ ID NO: 23427 - DNA, 100 bp, Homo sapiens
tgacaagtgcagacagcagcttcatgatattactgtaccgttagaagtttttgaatttccattttgacagtgccagcagaggaaccaggaacttttgctg

SEQ ID NO: 23428 - DNA, 75 bp, Homo sapiens
gtgggaggtggagcgggcggagctgcagattcgcattctcaagtctccacaagaggtaaaacctggtgaaaagca

SEQ ID NO: 23429 - DNA, 100 bp, Homo sapiens
attgacttctcagtgtacaacgccaacattaacctgttctgtgtggtcagtggtggtatctccatcaaggcttctgcaaatatggacctcatgagggctg

SEQ ID NO: 23430 - DNA, 98 bp, Homo sapiens
atctcccctggggactttcctgattgccagaaaatgcagtccagggaccttgacccagcccctctcagcagacgcttcatgataggaaggactgaaaa

SEQ ID NO: 23431 - DNA, 96 bp, Homo sapiens
ccattgcagcttccagacaacaggtatccatgtttctaaaggacaaagttcagaataataacggtcgctttgtgttgccggtgtccgggcctgttc

SEQ ID NO: 23432 - DNA, 71 bp, Homo sapiens
catcgcgtctctccacagagccatccagcgagtggtggacttgctttgtgaagagacagttcatgaacaag

SEQ ID NO: 23433 - DNA, 51 bp, Homo sapiens
atgcacttgttgcagaaacagccaagtgtgtcccagatgcctgtggccgag

SEQ ID NO: 23434 - DNA, 82 bp, Homo sapiens
ccctggagcctcagttggaagcagccgatccagcctgcggagcctgtggggcaggtttcagaagcaggcaacaggaacaaga

SEQ ID NO: 23435 - DNA, 88 bp, Homo sapiens
acctctcaccgcgcatgtttggagtggaagatagatgataagcctgtaaaaattgacaagtgggatggatcagctgtgaaaaactctt

SEQ ID NO: 23436 - DNA, 90 bp, Homo sapiens
ggaattttgaagtacaccgtggtgacattgtatcattggttgaaattggagcgatttgaaattccaatcaaggttcgattaagcccagag

SEQ ID NO: 23437 - DNA, 75 bp, Homo sapiens
cttcgcctcctaatccctagccactatgtccctctccaagatcctggatgtggccagtttggaggtgctgaacga

SEQ ID NO: 23438 - DNA, 95 bp, Homo sapiens
ccagtatacatttcccaacacccgccaccagcagactgaaatcgccaagagattgaatacgatttgtgcacaagtcatcccatttctgtctcagg

SEQ ID NO: 23439 - DNA, 100 bp, Homo sapiens
cagcgatgagaagagctgtgagggagtgacccacgtctgcgatcccagtgtcaagtttggctgcaaggactcaggaggagctgacaagcacaagtgtgga

SEQ ID NO: 23440 - DNA, 90 bp, Homo sapiens
taagctgaataaagctgttttggaactgtcaggtacctcaaagcacggatgtttccagtcctaaagattagtgtcacagggttggacccc

SEQ ID NO: 23441 - DNA, 75 bp, Homo sapiens
cgcctcgtgtgactgatggcagccacggagactgcagctcgacaggagtggttgggataattcttcactattcca

SEQ ID NO: 23442 - DNA, 100 bp, Homo sapiens
ccgctggctcagccgcaagtacccgtccatcatagtcaactgcgtggaagagaagaatgaagtggagctgggggagctgcttctgtcactgaattatctc

SEQ ID NO: 23443 - DNA, 100 bp, Homo sapiens
gcgaaattggtcattctcgctaacaactgcccagctttgagatcacaatgaggacctagggcatctgtctgctgacgccccctggcctgcagtgaccatg

SEQ ID NO: 23444 - DNA, 99 bp, Homo sapiens
tggcaaaaagctaccacctgccagtctgaagcaccgagatgggtttgaagaagatctctgcctacatgaagtccagccaattcctccgaggtcttttgt

SEQ ID NO: 23445 - DNA, 98 bp, Homo sapiens
ggagagggagtgatgtcttccagactcggtgctgtacccgccatcaggatcctcatgaccagccaaagagaagaagaattaggaagcataaatcaaag

SEQ ID NO: 23446 - DNA, 90 bp, Homo sapiens
cacgggtgaatgctgctaaaaacaagactggggctgctcccatcattgatgtggtgcgatcgggttacattccgaaaagcaaatgggaga

SEQ ID NO: 23447 - DNA, 51 bp, Homo sapiens
ggggagcagaaggactcggacacagtgaagatagtgatccggggagacagg

SEQ ID NO: 23448 - DNA, 75 bp, Homo sapiens
gggtggtgcacacagaacaacaaggtgttgatgccgccggacgggtcctgatgaagaagctgttgtggatcttgg

SEQ ID NO: 23449 - DNA, 75 bp, Homo sapiens
ctggaaattgcgctggaccgtcgccttgctcctcgccgcggcggggactgcagagcaagaaagctttctgctcag

SEQ ID NO: 23450 - DNA, 82 bp, Homo sapiens
ctggagcctcagttggaagcagccgatccagcctgcggagcctgtggggcaggggaaggctactggccggaaagcgccgctg

SEQ ID NO: 23451 - DNA, 100 bp, Homo sapiens
agccctggtggagctgaaggttgcaggggagttgctggaagccatcaaacgtgactttggttcctttgacaagtttaaggagaagctgacggctgcatct

SEQ ID NO: 23452 - DNA, 88 bp, Homo sapiens
ccgggccccgcgctccgccccggcctagggccttgccccgggagcccgcgagggcattgctcatcgtgatctgaaaccagaaaatata

SEQ ID NO: 23453 - DNA, 100 bp, Homo sapiens
ataacttgatctgtgatgaatcagatgtcaaagacttagcttttaaattaaaaaggaagctattcaccattgaggtctcttgtggctcagagcataattt

SEQ ID NO: 23454 - DNA, 95 bp, Homo sapiens
ggaatttgattaactcattcaaggttacccagttggaatactctgaagatagtaactccgagccaaatgtggatttggaaaatcagtactataat

SEQ ID NO: 23455 - DNA, 75 bp, Homo sapiens
gagaatcagtcaggtggccctttgggagtggacagcccatctgctgggacccgagtgtatagccctccagagtgg

SEQ ID NO: 23456 - DNA, 119 bp, Homo sapiens
cataggtcccggttggtagagggtttgagtccgcatcgccacagctgaaggctgcgagggactaagagcagagaaacaatgtgatgagaaccattcatggggtgggagagatgatgacc

SEQ ID NO: 23457 - DNA, 102 bp, Homo sapiens
cttagctcagcaattcttaccttccacaatggtgcgcatgaatgtcctggcagatgctctcaagagtatcaacaatgccgaaaagagaggcaaacgccaggt

SEQ ID NO: 23458 - DNA, 100 bp, Homo sapiens
cagccttctgagcagctgggattatgaaggggtggcctgcccctccacatctgtgggatatctcatcagcggtcacagagatctcagcatcatcaaggac

SEQ ID NO: 23459 - DNA, 50 bp, Homo sapiens
cggagcagaacggattgcagggctgtcctgtataagggagaacacaccct

SEQ ID NO: 23460 - DNA, 97 bp, Homo sapiens
attagcaatttaaagatcctctccaagctttgaggaaggcggcaggagaaagtgtggccagtactggcctttagaaaaagactctcggatccgattt

SEQ ID NO: 23461 - DNA, 80 bp, Homo sapiens
catcaaaaatagtgatagctttgataagttgtcaatagggtgactggaaatttcaagcatgcatctcctattctgccaat

SEQ ID NO: 23462 - DNA, 50 bp, Homo sapiens
cacttcctgagctcagaaacacgcagggccatgatgatgacagcctgcga

SEQ ID NO: 23463 - DNA, 82 bp, Homo sapiens
caccgccctctggccgttgcctcaccgggttttgggatttgagattgacgcggtgaactctgtccagttttcaaaccacaca

SEQ ID NO: 23464 - DNA, 90 bp, Homo sapiens
ctcctctgaccctgtggagatgcggaggctcaactaccagaccccaggttgtactcgtaaaacaaggatcatcgatgttgtctacaatgc

SEQ ID NO: 23465 - DNA, 100 bp, Homo sapiens
ctggttagtgtgctctgagggagggtccgagccagccgctgttttgccggaggagcccctcaggccatgaggacggggacttggttgccttttccagtga

SEQ ID NO: 23466 - DNA, 75 bp, Homo sapiens
atcaatgttagcagatagccagcccatacaagatcgtgactagaaggctgggaaaaaaggcttattatatctgac

SEQ ID NO: 23467 - DNA, 100 bp, Homo sapiens
ctctccgccccccaggaggggcgagagggagccgcagctgatgtcagtgggagattttgataagatctggcgagaacactgtgaggatgaagaaactctt

SEQ ID NO: 23468 - DNA, 90 bp, Homo sapiens
agggattgagcttcattgaactcaacagagccaacatttcatagcaccatggttttcttccgccgtctgtgacagcttcttgatctgtcc

SEQ ID NO: 23469 - DNA, 80 bp, Homo sapiens
gtcagacgcagccgtagacaccagctccgaaatcaccaccaagcggggatctgacgagcttttctctacttgtgtcacta

SEQ ID NO: 23470 - DNA, 82 bp, Homo sapiens
cttggcaaaatcgagcgggccattgagacaagaggagcagcagcggcaccgcccctcaccctggagggtcctgtacaatctc

SEQ ID NO: 23471 - DNA, 103 bp, Homo sapiens
aattttacccaagaccaggaactcctgctgcaaaaatggaacaagttccagcacaagtggttttaaaatcaaagatgggaaaatcggagaaaattgcccttcc

SEQ ID NO: 23472 - DNA, 75 bp, Homo sapiens
aaatttgtgatggtatcatctcttataaagatgcccttggaaatcacccgtagctttatccagaaccgagatggg

SEQ ID NO: 23473 - DNA, 100 bp, Homo sapiens
ctgccactgcgggggcaagacgaaggtctcctctgagcctccggcctccataagacccaaaacagatgacacctcttcccagtcccccgcgccttccgaa

SEQ ID NO: 23474 - DNA, 75 bp, Homo sapiens
aggcggagagtgacggagtcggcgagcccccgcggcgacaggaattcattgaagagttgctgtctcccccttttg

SEQ ID NO: 23475 - DNA, 100 bp, Homo sapiens
gaaaaacggaggcgaaaggaacagaggtgtccctgggcttacctcagcaaccgacagcgccgcttctctatcctcgggggccccatcctgggcacgtcgg

SEQ ID NO: 23476 - DNA, 75 bp, Homo sapiens
cggcgttttctccttcggaacgggagcgtctaggagatagtggagcaaaccatgcggaggaggcagcggcgagag

SEQ ID NO: 23477 - DNA, 100 bp, Homo sapiens
ccgagggcgagacacgcctgggcccaggtgtggcgtctctgtccccatctggttttagaagctccaccatgaggcgaggtggatggaggaagcgagctga

SEQ ID NO: 23478 - DNA, 83 bp, Homo sapiens
gggcggcttcctggcctgggcgctccggtggcggcggagatgtcaagccctccaacatcctagtcaactcccgtggggagatc

SEQ ID NO: 23479 - DNA, 98 bp, Homo sapiens
tgtcttcggtggactccttcggcagtccacccaccgccgccgcctcccagtcaccttcaggccattcagaggaggaaagagaggggaatatgaagtca

SEQ ID NO: 23480 - DNA, 76 bp, Homo sapiens
ggggagcgcccccggcgcgatgcccttcaggaaagcaagagtgagccatggagctacgtgtggggaacaagtaccg

SEQ ID NO: 23481 - DNA, 100 bp, Homo sapiens
ataattacatctgcaaagaccttatttccaggagtctccccaggacagtgctatcacccgggatattaaccgaacattcccagcccatgactactttaag

SEQ ID NO: 23482 - DNA, 100 bp, Homo sapiens
ggcagaggtctcctttgagaaggagacccaggagaacaaactggtgtgcatgatgcagcacctgaggtccactgcgacgcctagcccgtcccctcatgct

SEQ ID NO: 23483 - DNA, 48 bp, Homo sapiens
acacaacttgaaagtacctacagactacttgttgaacggatctttgct

SEQ ID NO: 23484 - DNA, 75 bp, Homo sapiens
gtgtaatctcattccatcttcattcatgactccagacagaacaactctgctcatggtgattacatgcaaaataac

SEQ ID NO: 23485 - DNA, 98 bp, Homo sapiens
aagttacacaacactggcgggcgactgccgcctttttaccctgtggcctttcccatccaggcgtccagagggaacttgctactaccagcaccatgccc

SEQ ID NO: 23486 - DNA, 121 bp, Homo sapiens
gcgaggctagggaggacctcacttccccggggtgtaataatgttaactgaggatttaagtgccctgtatgctcaaaatttgtatcctcagatgaaatggatttgcatcttgtaatgtgttt

SEQ ID NO: 23487 - DNA, 75 bp, Homo sapiens
tttggttgaggtttcacgctagaaggtggctcaggggctttgttatgcacctaaagccatattggaagctccaga

SEQ ID NO: 23488 - DNA, 75 bp, Homo sapiens
tttggtttacagttggctgatgattccacagataacccacattggttggatggtacaaaaagcatcaaaaagcaa

SEQ ID NO: 23489 - DNA, 120 bp, Homo sapiens
gcggtgcgcactgcgggcgcatccctgccccggcgccgtccgtgcccgcgggacctgacagccgggtcagagatctgccgacaccccaggccatcgagccccaggccatcgtgcagcagg

SEQ ID NO: 23490 - DNA, 100 bp, Homo sapiens
atcctgggttgacaattctacacaaggagagttctaaagttcctgttgcttcagacaatggatgagcaatcacaaggaatgcaagggccacctgttcctc

SEQ ID NO: 23491 - DNA, 51 bp, Homo sapiens
gaagcgagggatggaggttgtgcagaaatggatgaaaagaggctgctggat

SEQ ID NO: 23492 - DNA, 75 bp, Homo sapiens
ggcgcgaagaggctggactcggattcgttgcctgaggtgcagcggaactgctgcctgacgctctgcaacttcagc

SEQ ID NO: 23493 - DNA, 100 bp, Homo sapiens
tgtggcccacatcgtggtggaggcggcctctctggcagcagacatcagccacgcatctgaccttgttgctgccagccttgccctggctctgaatggcgtc

SEQ ID NO: 23494 - DNA, 132 bp, Homo sapiens
aagttaaataaattgcagaagttacttattcttttaagaggtctgcctggttctgggaaaacaacattgtctcggggcctttacaacaactaaacggacaggcattccagccccacgggaattttcagtaac

SEQ ID NO: 23495 - DNA, 90 bp, Homo sapiens
aatgtctgccgaaatgttcaagtttaccaaaagagaggcaccgctggaacactaatgaggacaggcgacactaacaggtgaagatctcgg

SEQ ID NO: 23496 - DNA, 100 bp, Homo sapiens
gacttgccatcaagctgccggatgatcagatcccaaaggtgattatcctgaaccatccaggccaaataagcgccggctatgcccctgtattggattgcca

SEQ ID NO: 23497 - DNA, 87 bp, Homo sapiens
agcagccttggtattacagggtcttcatgcactctgtcaagctgagaaatgcatcttctgcagacaccgggttaagagggtctctgg

SEQ ID NO: 23498 - DNA, 75 bp, Homo sapiens
cggcctcttgacactcccaggcagcacagatagacggatcctcaagtatcatcacgtgggcaaactgctgaagga

SEQ ID NO: 23499 - DNA, 99 bp, Homo sapiens
gaagtcggtgtttggagaaaaggactcagaaaagggttgttgttaccaacttgaatggtcacaccgcccgagtcaattgcatacagtggatttgtaaac

SEQ ID NO: 23500 - DNA, 119 bp, Homo sapiens
ctggcatttctcaagaaccagctggaaagcctgcagcggcgtgtagaagacgaagtcaacagtggagtgggccagcctgccttgtacttcatgcaggttgaacagaaatgttttctgag

SEQ ID NO: 23501 - DNA, 75 bp, Homo sapiens
ccactcgagacatcacttctgttcttcaaatctgaacatcaatgatgtactagggaactactcattgactcttgt

SEQ ID NO: 23502 - DNA, 83 bp, Homo sapiens
gggaaactaggtcgatggtcggcggcgcccggatgggcagctgagctcggagcccaagatcctcttctcctacaaatgccaag

SEQ ID NO: 23503 - DNA, 75 bp, Homo sapiens
cctactcacagataggaattgaaggtgatgctgaacacagagcggctgatcaagcatgcggtgcaggagaggctg

SEQ ID NO: 23504 - DNA, 100 bp, Homo sapiens
gccaagggcgcagattctttctgtacgcttgccttgcgccatggactggcagccagacgagcagggcctgcagcaggtcctgcagctgctcaaagactca

SEQ ID NO: 23505 - DNA, 83 bp, Homo sapiens
tcctgcccatggcggtggccgagctgtacacgcagggcgaactttctgaccaagtatacaactacccagagggcctaggagaa

SEQ ID NO: 23506 - DNA, 101 bp, Homo sapiens
acgtttggaatccggagcgcttggatctcaggttgctgttgaagaaatctggttgcagaacaccacggattgaattggaagagatgggaccctcattggat

SEQ ID NO: 23507 - DNA, 82 bp, Homo sapiens
ctgctcggggcctgaggcctcgaagaccccagcccaagcccccagaacaagttgaaatcatcgcagaaggataaagttcgtc

SEQ ID NO: 23508 - DNA, 76 bp, Homo sapiens
aaaagaatgtagaatgaggatagaagagaggaaatcccaacatttaacagtgggtaattccagaattgattggcca

SEQ ID NO: 23509 - DNA, 100 bp, Homo sapiens
ctgccgtggccgcccggctgccgggagccgacagcttcgcgccgggattgatttccagagacttatgttacttgaggaagacaccaagaaggcaaagaaa

SEQ ID NO: 23510 - DNA, 83 bp, Homo sapiens
agacaaggagctcagtgacctcctggacttcagcatgctcagctcacctatgaaccccgtcagcagcagcgaggacatcaagc

SEQ ID NO: 23511 - DNA, 74 bp, Homo sapiens
agcgcactaaatcgtctccaaggtgaggggaagtggcttcgaaacattgactattaccgtttagatggttccac

SEQ ID NO: 23512 - DNA, 100 bp, Homo sapiens
gccctgagtgaatacccagaaaatttcatccccatggctgggggttatggagtgatgggtgacgatggttctattgattatactgttcacgaagcctgga

SEQ ID NO: 23513 - DNA, 75 bp, Homo sapiens
ggcgctggaggagcgaggcagctgtactaggactgggaacgggtcatcagatttcgggacgtcctacaccaagct

SEQ ID NO: 23514 - DNA, 100 bp, Homo sapiens
cctactcagaagaacttgtacagagatgtgatgttggagaactatagcaatctggttttcttggcttccgcaggttcactcgatccaacagtgtgacgac

SEQ ID NO: 23515 - DNA, 82 bp, Homo sapiens
gcctattatgcccagacaagtccccagggaatgccacagcatcctccagcacctcagatggagtgaaggtacctgagcgcag

SEQ ID NO: 23516 - DNA, 101 bp, Homo sapiens
attagctaaagctgtaatttctaaacatccaggaacagaactagacagtacggatggtgccaaagtttttagtaaacaaccaggaagaatccaaagagtag

SEQ ID NO: 23517 - DNA, 100 bp, Homo sapiens
acagcctgaaaaatccccctccgtgctaactgttccaggactggctggacaatggcccagaacaagctattcaacaagatcctcaaagccctgcagtctg

SEQ ID NO: 23518 - DNA, 100 bp, Homo sapiens
gaagctggaggtcaacgaggccgagctgctgcggcgccgcaactttaaagtcatgatctaccaggtgtgaaccgacacttccacatgatttgtattcggg

SEQ ID NO: 23519 - DNA, 100 bp, Homo sapiens
tgtcacctccaacaacatccgcgagatcgaggcatttgggcagtccttctccatccaccggaaggttgctgaagatggagagactcgggaggaaacgctt

SEQ ID NO: 23520 - DNA, 74 bp, Homo sapiens
caggagtgccactatggtggcagcatacctgattcaggtgggatatgagcctcttcctccaacaataggacgaa

SEQ ID NO: 23521 - DNA, 100 bp, Homo sapiens
cagttcgctgtccgcgccggctcccaccccggcccgaccccgacccggcccggtcaggccccatactcagaccatggtgaatccgggcagcagctcgcag

SEQ ID NO: 23522 - DNA, 100 bp, Homo sapiens
ctgctgctgctgcccgccgcccttctgctccacgaggagcacagccgggccgctgcgaagatgccttcaattaagttgcagagttctgatggagagatat

SEQ ID NO: 23523 - DNA, 138 bp, Homo sapiens
taactgtggggtgctgaatggcaatggcacaaagttctctcgatcagggcatacatctttcttcgacaaaggttggaatcgaagcctcttaaaatggcagatgacttggacttcgagacaggagatgcaggggcctca

SEQ ID NO: 23524 - DNA, 110 bp, Homo sapiens
aaactgggaacagacaaagaaacactctccttctgccacatttgttttgagctaaatattgagggcaattaagttggaatatgcaaggttggttaagttggcccaagaag

SEQ ID NO: 23525 - DNA, 75 bp, Homo sapiens
tgtgcgctcgatccagcaccatggggaagcgggacaatcgggtgtgaactgaattcaaagctgcaagatactttg

SEQ ID NO: 23526 - DNA, 75 bp, Homo sapiens
ccgggaacccttgccgctgctgtcctgcgaccccaagcagataaggagtcaggccagggcgggatgacactcatt

SEQ ID NO: 23527 - DNA, 50 bp, Homo sapiens
aggatgtgagcaacacgggaccggtcctaggcctacttacaagcctccag

SEQ ID NO: 23528 - DNA, 100 bp, Homo sapiens
cacctcctcgccagcagccgtccggagccagccaacgagcggttttataggatcacattgacaaaagtaccatggagttttatgagtcagcatattttat

SEQ ID NO: 23529 - DNA, 76 bp, Homo sapiens
cttcctcattatcagaaattaaagcacacagatccaggtagtctctgctagtaatgagccccttgcctttgcttcc

SEQ ID NO: 23530 - DNA, 90 bp, Homo sapiens
ctgggggtcagcacggaggggactggagctggagagtgactgtagagcctcaggccaagtataaggagcgagggacggtcttggctgagg

SEQ ID NO: 23531 - DNA, 95 bp, Homo sapiens
ctgacagttcctggctgcggtgtccgcggactggctggggagtgatgacagacactgacgaatgcctagggactccctgtcagcagagatgtaaa

SEQ ID NO: 23532 - DNA, 85 bp, Homo sapiens
ggctggcaacgaaaatgagcctcgcgaggccgacaagagccacccggagcagggaactctaatgatccaggacaaagaagttacc

SEQ ID NO: 23533 - DNA, 101 bp, Homo sapiens
actgaaaatagataccaaagaaaagaaagagaaaaagcagaaagtagatgaagatgagattcagaagatgcaggaaatcctcattgacgattcaatttgtt

SEQ ID NO: 23534 - DNA, 75 bp, Homo sapiens
ttggatggctgcttgtcgcaatattgtcttcttcgctttagacaaaatccaactcaagtcggaacagctcttcag

SEQ ID NO: 23535 - DNA, 102 bp, Homo sapiens
tttgatattgaatatttcagaaaagatccaagaccattcttcaagtttgcaaaggctgccgcgggcggacacgccagaggaggaggccggggaatggccgcg

SEQ ID NO: 23536 - DNA, 82 bp, Homo sapiens
caacataccattaggatcttaccgggagaaacacatctcatctttcctaaaaaagcttcagtggagcagctgcaaaaaattc

SEQ ID NO: 23537 - DNA, 100 bp, Homo sapiens
tggcggagcagacctactcgtggagcagtacatttttatccatcagtgtgtgcaactgatgtggatgaagaagaagcagcagttctgcatcagtgatgtc

SEQ ID NO: 23538 - DNA, 75 bp, Homo sapiens
ttttacttcaagcaggggctgatttagcatttattgaaatggcaaccacagaggatgctcaggccgcagtggatt

SEQ ID NO: 23539 - DNA, 83 bp, Homo sapiens
ggaagagcaatccgttgcccatttgatcgacaagtaacagacctagggtcatcgagcagctcggtgggaagcagctggtcatg

SEQ ID NO: 23540 - DNA, 90 bp, Homo sapiens
ggagaatagaccctctgtccaggcagcattaaaacttaagcagagaatgtgatcaatgggcaggactacgaagtgatgatgcagattgac

SEQ ID NO: 23541 - DNA, 74 bp, Homo sapiens
gggcaggcgggcagctgtgcccgggcggcacggccagacacgatgaggcgagtggtacgacagagcaagtttcg

SEQ ID NO: 23542 - DNA, 90 bp, Homo sapiens
gggaaatctggtgtatgttgtcaactatccaaaaggcacctacaaaggcagcacctaagcaaaagattgtgaagcctgtgaaagtttcag

SEQ ID NO: 23543 - DNA, 100 bp, Homo sapiens
gttccaggaagtgaacaagtccaagaggaccttctgattagtccacagtcttcctctatagaaatacctcagggactttttcagcgtgatgctccagtcc

SEQ ID NO: 23544 - DNA, 100 bp, Homo sapiens
ttgtcacctcgaattgagcaggcaaacttgaagataaatcttttgactccagctctttagaggatctaaagtgaccttgatggacagtggaagaaatcac

SEQ ID NO: 23545 - DNA, 101 bp, Homo sapiens
cttggtttaaagatttcttacctgtggacacaagcaacaacaatggtcgtattaagcagttacgatcagatcgttcaattagaccgctctttccagctggc

SEQ ID NO: 23546 - DNA, 90 bp, Homo sapiens
cagcgacaggccgctgcaattgccaacaggggcaagtgtccgagtggtgaatcagctacttacagagatggatggtctggaagcacgcca

SEQ ID NO: 23547 - DNA, 100 bp, Homo sapiens
gcacagatggaggtggagcaataccgcagagagcgagagcacgaattccagagcaagcagcaggcggcaacatttcatttgttgcatttccagtttccaa

SEQ ID NO: 23548 - DNA, 83 bp, Homo sapiens
gaaatgtcttgaaagaggcacgcatttttgacagcactgccagtgaaagatgtagaagataaacctgaacaacaaaccagaac

SEQ ID NO: 23549 - DNA, 95 bp, Homo sapiens
gacagatttgtggtttgtgtcagtcagcttgcattcagtcgtgatcttttagcaagtcagaatgaagatttggttcgatacaagaggctgttttc

SEQ ID NO: 23550 - DNA, 75 bp, Homo sapiens
cttttactgagaatcttgctgaagagctcaagaaggatatggagtaatagtactaaatcccaatgaaaactatat

SEQ ID NO: 23551 - DNA, 87 bp, Homo sapiens
gacgacgacgacgaggaagaggaggtttctgaggattttttatcaagcagaaatgcatcgaacaacgagaatcaagatcactgagct

SEQ ID NO: 23552 - DNA, 75 bp, Homo sapiens
tgggcagagactactaagcggaaaacatcttcagatggtaccttgttatcccataactttggtatcctgaaatct

SEQ ID NO: 23553 - DNA, 120 bp, Homo sapiens
cggaaagcagatccgtggttccctgcagactggcaggagcagattccaaaggcacaggaagaagcttgcagatgagttttgatcatcctgagaaaaatgggccttggcctgcagacccaa

SEQ ID NO: 23554 - DNA, 100 bp, Homo sapiens
gactattctccgggagccgtccgtgtcaccgccggaacctggcgcagatctcagtcatagtggattggcagatcattatgaaaattcccactggggacag

SEQ ID NO: 23555 - DNA, 50 bp, Homo sapiens
ggcgaatggggctcacgtcgactccatcaagtatgatggtgaaggatgaa

SEQ ID NO: 23556 - DNA, 76 bp, Homo sapiens
gccacagaagttgctgctgacgctctgggtgaagaatggaagcggatggtggttcctgctgccctcaaggtcgtgc

SEQ ID NO: 23557 - DNA, 90 bp, Homo sapiens
gacggctcacctgtgcgggatggaacaaaagatctgccgacaccccaggccatcgagccccaggccatcgtgcagcaggtcccagccccc

SEQ ID NO: 23558 - DNA, 100 bp, Homo sapiens
cacagccagaatggggaggaggagcctgagtcctattttgtaacggattatgatccaaccattgaagattcttacacaaagcagtgtgtgatagatgaca

SEQ ID NO: 23559 - DNA, 100 bp, Homo sapiens
tctgcccccggagattgtgcctgccaccctacgccgtagccgtccagagactggcaggcctcggcctaaagaaattgcatctgatggtctcaagggtcgt

SEQ ID NO: 23560 - DNA, 100 bp, Homo sapiens
cagagtctgcaagaaaacttcatcctagaccaagtgataaactgaaccctaaaacaattaatccgacgttggaacttgccaggaatccagcaatgatgca

SEQ ID NO: 23561 - DNA, 100 bp, Homo sapiens
ctttgatattgatgtgaacgcctctgtgtttgaaacaaacattcgaggtcgggtcacaaatcttcgaagagtgacatatgttgttttagatgaagcagac

SEQ ID NO: 23562 - DNA, 90 bp, Homo sapiens
ggcagcactgccaggtggagcattgccggcagcgaggagctcgaggccatgagcagatataccagcccagtgaacccagctgtcttcccc

SEQ ID NO: 23563 - DNA, 82 bp, Homo sapiens
gggtggaatcttaaaaattaatgaagagcatcggcggggtgccattcaggcagcctgcttctgcaaagtggtacgatcgaag

SEQ ID NO: 23564 - DNA, 101 bp, Homo sapiens
agccatagcatgggagtaagtcagttcacctggtgtgtgcctttgccaccttagcaaccgataagcggatatgtcacagatctaagcagcagggatttaat

SEQ ID NO: 23565 - DNA, 101 bp, Homo sapiens
aaaataaactgcttgaacatcctttgactggttagccagatcctggccaacgtcttcctctacctgtgcgccatcgctgtgggcatcatgtcctactacat

SEQ ID NO: 23566 - DNA, 100 bp, Homo sapiens
aatcaaggaatgtagaaatcaggatcctgctcacactaaaatatgaaccacaaacacacagagaaacaacctgttcaccactcctgggtgcatgattgag

SEQ ID NO: 23567 - DNA, 100 bp, Homo sapiens
taagctcaagtcgcatcttactagtgaagtattctgccaatgaagaccatatttgaagatgttagtggttttggtgcctggcatcgaagatggtgtgttc

SEQ ID NO: 23568 - DNA, 51 bp, Homo sapiens
ggcaacagagagatcactgcaaatcttgggactgttttacttaattggtca

SEQ ID NO: 23569 - DNA, 100 bp, Homo sapiens
ctgattcctgcggccgcggtctacgaagaccaagtgggcaagtttgattggttccatatacatctctataatcaagatagcctcattgcttgtgttctgc

SEQ ID NO: 23570 - DNA, 100 bp, Homo sapiens
agagggtcggcccagggcctccacccttgacagggcgaagctgtgctcaggcccgggctggacgcagagccagagctgtccccagaggagcagagggtcc

SEQ ID NO: 23571 - DNA, 74 bp, Homo sapiens
gagaccccggggccacccgcccgggcccccgacgcccggcccgcagtcaacaagtggaagaagctgtactcgac

SEQ ID NO: 23572 - DNA, 99 bp, Homo sapiens
gcgaggagctcagcatggtcatcctgctgccggatgacattgaggacgagtccacgggcctgaagaaggaactgaagctctcttcccacgaggaggcct

SEQ ID NO: 23573 - DNA, 100 bp, Homo sapiens
ccaaactttgaagtgggttcttctaggcagcttaagctttccatcaccaagaagtcttctccttcaggaatgaatgtgatttgaactcattcatgttgag

SEQ ID NO: 23574 - DNA, 75 bp, Homo sapiens
cttcgacttagccctgctccaggaatgggacctcgagtcactgtgccaagaaatatttttcttcatggccctgat

SEQ ID NO: 23575 - DNA, 97 bp, Homo sapiens
cctgagctttgagcggcgctaccatgtcactgacccctttatccggcggctgggcctggaagcagagctgcagcttatcacacagactttcagccac

SEQ ID NO: 23576 - DNA, 100 bp, Homo sapiens
ccggccttcatcgacatcagtgaagaagatcagacagttttaatggaccagtctcgcttccacgagctccagttgcagctggaacaactgaccatcctgg

SEQ ID NO: 23577 - DNA, 75 bp, Homo sapiens
tcgacgtcgtgatccagaagtccagagctgaggactgcctgtttgcaggctaaggtgattcaaactaaatcaacc

SEQ ID NO: 23578 - DNA, 100 bp, Homo sapiens
aagagaggagattgcagcagcgaaccaatcccaagggttctccaaaaaatgtggaatcctttgcatctatgctgagacattctcctcttacacagatggg

SEQ ID NO: 23579 - DNA, 100 bp, Homo sapiens
tttaaagaagcacaaaacaaaagtccattctgcacaaacctacttatctatagaggagatccaagaacccaagagtgcagtttcttttctcctgcctgaa

SEQ ID NO: 23580 - DNA, 82 bp, Homo sapiens
tctgttaacagactgcttttacacctacgtgtgaccaattcagtgaaaggaacgaatgcgattctctggacctgtttgggac

SEQ ID NO: 23581 - DNA, 49 bp, Homo sapiens
gcgtgacgaccgcattcgtggcagccctcaagggaacaaagccgatgac

SEQ ID NO: 23582 - DNA, 100 bp, Homo sapiens
gcagcccggaaatgtccggcaagatcgagaaagcaggatgttccctttctacagctgctggaggactggactgctactactactcctggctgtggcagtg

SEQ ID NO: 23583 - DNA, 82 bp, Homo sapiens
cccggccggggcctgcgggcgcccagagccgcgccgtccgcgccgcccgttctggtttacccaaggtccagcctagccccta

SEQ ID NO: 23584 - DNA, 80 bp, Homo sapiens
aacacacctactgggattccttgggcaatggtgaatttgaaaagggggtccactggacggggcctgagctacaacttcac

SEQ ID NO: 23585 - DNA, 100 bp, Homo sapiens
cagctgatgatttgtccctgtctgaagatattcttgggaattcatatctttccctttacttctctactggccagaaccctaagatctcccagcaagccct

SEQ ID NO: 23586 - DNA, 89 bp, Homo sapiens
ttttctgtgacgggagcaatgctgacctcggtttcctggacccattccgactcagaccaagatcactccatggatgaaatgacagctgt

SEQ ID NO: 23587 - DNA, 83 bp, Homo sapiens
ccgcccagcagccgcgcttcagccagagatggagtctcactgtattgcctaggctggtcttgaactcctgggatcaagtgaac

SEQ ID NO: 23588 - DNA, 100 bp, Homo sapiens
ttctgtttgcaacactgtacatcctctgccacatcttcctgacccgcttcaagaagcctgctgagttcaccacaggtcccgagcagccccgcccaacatg

SEQ ID NO: 23589 - DNA, 92 bp, Homo sapiens
aatacagctccatcagaggcttcctcagcaagcacagctcaggctcccaccccgtggccaggtacctaggctccgtggactaccgctacaac

SEQ ID NO: 23590 - DNA, 100 bp, Homo sapiens
agcaactgaatttctcaaacaaattcttaatggtgtttactacctgcactcccttcaaatcgcccactttgatcttaagcaaagtggaagatgctttcta

SEQ ID NO: 23591 - DNA, 82 bp, Homo sapiens
caaggagaagcagcgtgagctggtgaagctgcagcgccgccgggactccgactcttttgaaacagatggtcaccatgtttag

SEQ ID NO: 23592 - DNA, 100 bp, Homo sapiens
gaagagctacagaatatgctccaaagaagagagttgtggaaagtaaaaatgtagccctaccaaaaggaactattgtactggcttctccaggctggacaac

SEQ ID NO: 23593 - DNA, 98 bp, Homo sapiens
caacgagaccagttagaacgtaccaagagtagactggttatattctgggcactaaatgaaggcgtttctaggcaatttgattcgttcagagatggatt

SEQ ID NO: 23594 - DNA, 75 bp, Homo sapiens
ctccaagatgtagctaatgaccgtggttcccactgagggagctcactcagtgggtttgatgtggtggatgctggc

SEQ ID NO: 23595 - DNA, 50 bp, Homo sapiens
ctggttctggagtcgtgggagtaaaggtgcgggagtatgagttaagaaaa

SEQ ID NO: 23596 - DNA, 75 bp, Homo sapiens
ttcttctgtatagaaatgcaagctttggattggatgctgctggcaagacaaccattctgtataaactgaagttag

SEQ ID NO: 23597 - DNA, 80 bp, Homo sapiens
cgaggcccggctggcgcacctgggcgtgcaggtcatttcggggcagcagctgccaaaagtcaacaagaataagaattcaa

SEQ ID NO: 23598 - DNA, 100 bp, Homo sapiens
aggccggggaccaggacagtcgcgaggttcgagtgttgcagagcctgcggggcaagatctggttatatcctgtgttgtgacctcatggtttaagtgggaa

SEQ ID NO: 23599 - DNA, 82 bp, Homo sapiens
caccacgcccggggggacgctcttctccaccacaccgggagaccatggtgaatccgggcagcagctcgcagccgcccccggt

SEQ ID NO: 23600 - DNA, 83 bp, Homo sapiens
ctgagcctgctgcgccgtgccaggatgcacatccagctgcctgtggaggaaccgattgtgtccacagatgaggtcatcttccc

SEQ ID NO: 23601 - DNA, 75 bp, Homo sapiens
tcccagaaagagacctgattccaagtggaatttaagctatgaagaaggacatccctcacactctgaaacagatct

SEQ ID NO: 23602 - DNA, 101 bp, Homo sapiens
gccagcaaaacactcagctgcaagtccaaagccacaaggtctaacttcaaacttgtggctgttaattcaaaactctatgccatcggagggcaggccgtttc

SEQ ID NO: 23603 - DNA, 51 bp, Homo sapiens
ctgtcccagagacaacgagatgaactccggactactttagttctgtggcca

SEQ ID NO: 23604 - DNA, 100 bp, Homo sapiens
ccacctgaaggaccagtgtctgatcagctgctgcgtgctcagccccagagcaggtcagctgattagccaccttagttccatctgcaactttagttcccac

SEQ ID NO: 23605 - DNA, 96 bp, Homo sapiens
gcggccggaaactgagggagtttccccggggagcggccaaccacgacctgacggacaccacccgggcgggccaatgtgctttgtgaagcagctgga

SEQ ID NO: 23606 - DNA, 87 bp, Homo sapiens
ggactgatcaagaaacacagctagcactggaagaagtacgacatctatgagaagcaaaccaaggaggaaaccgactctgtagtgctg

SEQ ID NO: 23607 - DNA, 75 bp, Homo sapiens
ttttgcacttgtgcagaccgggcgagcagagtaagaagcagtttgtcagaggaatggctgtgaatggatgcctgg

SEQ ID NO: 23608 - DNA, 82 bp, Homo sapiens
ggctttcttggcctgatgctgaactctcgagggtttgaagatgccgcatttggattggatgaattccaaattctgcttgctt

SEQ ID NO: 23609 - DNA, 100 bp, Homo sapiens
ggacttggtgtgcattaacctgccgccgcccctcaccagacagatcgctgtcaaaaccctagtgcgacttcatgatagcatatcagaagagggctttcac

SEQ ID NO: 23610 - DNA, 75 bp, Homo sapiens
tcttctagtttctgaattatataatcagctgaaatttccagtaaagctctcaaaggtctatggccctgtgttcac

SEQ ID NO: 23611 - DNA, 101 bp, Homo sapiens
cctggaagaagaactcaagaatgttactaacaatctgaaatctctggaggctgcatctgaaaaggtcaagagcaatctgaatccaaatgcaaaggagtttg

SEQ ID NO: 23612 - DNA, 100 bp, Homo sapiens
gtttctgtccaggcaagggtgtgtgctgaatgactcaaggattttttgggctggtgggcttaaactggatggccggcagctcaaggttgacttggcggtg

SEQ ID NO: 23613 - DNA, 100 bp, Homo sapiens
cgcaggtggtgcttgtctgcagagtcatgacctggcaatttggttttgatgctgtgccagaaatcttctgacaatgagttactggaacttggaaaaaagg

SEQ ID NO: 23614 - DNA, 100 bp, Homo sapiens
tctgcttttggtaacatcctttcatgtaagggtaagggactgttctgaagaacctttccatttagtgatcaagatatggaagctgatttctgaaaatgct

SEQ ID NO: 23615 - DNA, 114 bp, Homo sapiens
cggggactcggcccacaaccaagccatggtgcactggtcgggacacaacagcagcctggaggagagcaggagtgttcagaagcaaatgaagatcctgcagaagaagcaagccca

SEQ ID NO: 23616 - DNA, 101 bp, Homo sapiens
atgtttagccaacccaaattaccttaattatggatatcagtattgacaaatagcaaagaagaggccctaaccatggccttccgtggagagcagagtgcggg

SEQ ID NO: 23617 - DNA, 96 bp, Homo sapiens
aaaaatgacatccagcgacaaggactttagcaattctgtggtgttcttggtcacacatttatggagtttctgaagggcagtggagattactgccag

SEQ ID NO: 23618 - DNA, 50 bp, Homo sapiens
attgaggcccgcacagcccagtccaggcagagcggcttgggtaaatccac

SEQ ID NO: 23619 - DNA, 101 bp, Homo sapiens
gggcagatgactgatcaagtggctgacctccgtgccagtacaagccagctgccatgttgtgagcacataccacatagctccatggagatgcccatgtgact

SEQ ID NO: 23620 - DNA, 98 bp, Homo sapiens
cgagttcatgagcacatatgtcatgatgttttttgctccactcaagcctgttagaatcaccatggaatacagctccagtgggaaggccactggagaag

SEQ ID NO: 23621 - DNA, 90 bp, Homo sapiens
catcgggatgaggaatgagcaagcgctgtcaaagctcgaaaaacagcagcagaggaaagaaaagaccagagctaagggaccttctgaatc

SEQ ID NO: 23622 - DNA, 76 bp, Homo sapiens
gaggacagtgtttctacctctccagacccaacactgaacctaccagatgtatttgggttggtcgtcctcccattgg

SEQ ID NO: 23623 - DNA, 74 bp, Homo sapiens
gcaagattggtgttagactgggattcagtcagagccagatttccacaagacggcaccctatgtcgtcactggca

SEQ ID NO: 23624 - DNA, 100 bp, Homo sapiens
tggggctattggactgacttttcttatgctgggatgtgccttagaggattatgggtgagcgacctgtgagagtttatgccgatggaatatttgacttatt

SEQ ID NO: 23625 - DNA, 100 bp, Homo sapiens
tagcaagtggccatggggagcctcagcggtctgcgcctggcagcaggaagaacacccaaacccaggaaagagataccctggaatacagcgaactgcatac

SEQ ID NO: 23626 - DNA, 83 bp, Homo sapiens
aatattcccatctcctgcctcctaatagctttgagggtctctagaagaaactgtcagtgccagtgaagaagaaaacgtgggac

SEQ ID NO: 23627 - DNA, 100 bp, Homo sapiens
aaacaagtggaaatcgcccagcgggagggggccaagtatgtgtcccacggcgccacaggaaaggtgacttcatggtcatgacgattttcttcaatgtgag

SEQ ID NO: 23628 - DNA, 74 bp, Homo sapiens
gatgcagcccggcaggccactcatgatcatgagtcccagttgatccaagcctcattatagtggttcaagccaaa

SEQ ID NO: 23629 - DNA, 74 bp, Homo sapiens
ggatttttggctgtatgttcagaagctaaaggttcctccagaagaaattaattatttaacacgaattcactaca

SEQ ID NO: 23630 - DNA, 82 bp, Homo sapiens
gctcaccatctacggcatccggtgtgcagcagtaccgcgtcgccatgactgccaaggactgctccatcatgattgcactgtc

SEQ ID NO: 23631 - DNA, 80 bp, Homo sapiens
tgaggtccagatgaaagagaagtttctggtcactccccaggattatgcgcgtaacaaatgtggcaattattttggatcta

SEQ ID NO: 23632 - DNA, 96 bp, Homo sapiens
taccagctgttcctggccgggctcatgcttgttaccggctccatcaacacgctctcggcaaaacccctgtaaaagagcccaacagtgaaaatgtag

SEQ ID NO: 23633 - DNA, 100 bp, Homo sapiens
cccgcgtccagcacctacgtcccgctgccgtcgccgccgccaccatgcccaagagaaagattacctggctggtgtttgcttgttctggagtgatcttctg

SEQ ID NO: 23634 - DNA, 60 bp, Homo sapiens
catcactttagaccctccacctaattgcagatcttactgtgccgagatcgctcacaatgt

SEQ ID NO: 23635 - DNA, 110 bp, Homo sapiens
tcaaccggcggagacactggcagggccagaaacgcgcgcagcgggggcgggagaggcatggctattgcaccttgggagaagcctttaatcggttagacttctcaagtgca

SEQ ID NO: 23636 - DNA, 73 bp, Homo sapiens
cggggcggccgggagggggcagtcctcgccggcgagttcagcgactgtgaggaatgtatccagctggagccga

SEQ ID NO: 23637 - DNA, 90 bp, Homo sapiens
cggttcttggtgcccctgggcatcaccaacatagccatcgacttcggggagcaggaatgtatcctgtcaggtataatgtcagtgaatggc

SEQ ID NO: 23638 - DNA, 75 bp, Homo sapiens
aatgcatgccaacattccagttttttaagaagggacaaaaggcgcggatcaagaagatcatgcagacggacgaag

SEQ ID NO: 23639 - DNA, 100 bp, Homo sapiens
aaaagcgcagaccacagttacatgtatggagaatggctggtctcctactcccagatgcatccgtgtcactatgccctttgccttctgtacgagagagaag

SEQ ID NO: 23640 - DNA, 100 bp, Homo sapiens
gccaagcttactcatgctatttccatttttactgaaggcatcttaatgatgaaaacgactttggttggcatcatcaagatacttggcatatcgaaatttt

SEQ ID NO: 23641 - DNA, 75 bp, Homo sapiens
tgtcaagcgaagccttgaaaaagctgccctgagacggtgtcccgccgaaagtgaatgatttgggaggggacttca

SEQ ID NO: 23642 - DNA, 82 bp, Homo sapiens
gggagatcccaggcggtgacagagtggagccatggctagagtgcccatgacgcttccggagacaaccctggaaacactgaag

SEQ ID NO: 23643 - DNA, 90 bp, Homo sapiens
agaaagcggcttatcgaacagagccgggagttcaagaagaacactccagaggtttctggtcctcataccgtgtggttgagtgaaatcaaa

SEQ ID NO: 23644 - DNA, 50 bp, Homo sapiens
caaagttcctacctgtgaagaagtgtgagttcttgatacgaatgaaaggc

SEQ ID NO: 23645 - DNA, 82 bp, Homo sapiens
ccaacaccccagatgcaagcgtggattgggcaggaaatccaaatctcctcccaaagtgcccattgtgattcaggacgatagc

SEQ ID NO: 23646 - DNA, 100 bp, Homo sapiens
catctgctttgatatgattgaagaagcatacatgacaaaatgtggccacagcttttgatgacctgtgtagaaaaagcaggaacagatgagaaaatgctta

SEQ ID NO: 23647 - DNA, 92 bp, Homo sapiens
ggaggacgcgcccgccaccgacatctactttgattttttatcaagcagaaatgcatcgaacaacgagaatcaagatcactgagctaaatccc

SEQ ID NO: 23648 - DNA, 82 bp, Homo sapiens
tgtaaccacctcacagattccagcttcggaacaagagaccctgaactcccccactggaaaggattctgaaagaaatgaagtc

SEQ ID NO: 23649 - DNA, 121 bp, Homo sapiens
tcccagcagcggacgagggaggtgccgccgtcgcccaggatgggctgggaatgaagcgatgtagccttttaagttgccaaggaaagtgtactgcagttttacccgaaagctaatatcgttg

SEQ ID NO: 23650 - DNA, 90 bp, Homo sapiens
cgaagagtccccccaagtctcctgaagaggaaggagcggtgtcctcttaagaaaatgatgctgagatgaatcgtcacctgtgtgtttggc

SEQ ID NO: 23651 - DNA, 82 bp, Homo sapiens
gccaccagtaccaggagcaccaggaatgcctccagcctttcatccgctgtagtttacaatgcagggatctggttgatgaagc

SEQ ID NO: 23652 - DNA, 100 bp, Homo sapiens
ggaatgccaggagcaggatctgcagaagacgcagggctcaagctgctacggaagaggcacataggaaatgacatcgtgacgatcatcttccaggagcctg

SEQ ID NO: 23653 - DNA, 50 bp, Homo sapiens
aattgggggagtggattacaagagtgatgtgcagctgatcaagactggag

SEQ ID NO: 23654 - DNA, 90 bp, Homo sapiens
cagtgtatagcctgcagcccccctctgcgctgagcggcggccagccggcagacccctgacctggagcagctggagccgtctttggaagat

SEQ ID NO: 23655 - DNA, 97 bp, Homo sapiens
ctcaaatctgatggactcaggacgttgcaatctgtgtggggaagagagctttggcactggtgcagcagtaccgcgtcgccatgactgccaaggactg

SEQ ID NO: 23656 - DNA, 102 bp, Homo sapiens
tttctataaacatggagaaccagaagaagacatagttggacttcaggccttccaagaaaggtgtgatccctcacatccacaaatctctgattggaaagaagg

SEQ ID NO: 23657 - DNA, 100 bp, Homo sapiens
tgagagtttgatcccaggctttcaatcaacccaaggtgatgcttttgctacgacctcattttctgctggaactgattcagaatggacagtttagaagaac

SEQ ID NO: 23658 - DNA, 90 bp, Homo sapiens
agcagaggaatctatacaaagaagtgatgctggagaattacaggaatcttctctcattgggtgctggagaatctggtaaaagcaccattg

SEQ ID NO: 23659 - DNA, 117 bp, Homo sapiens
ggggcaagagcccgcaggctaccttccccgggcaggggcgctcaacccaaccggctccagggcactgaattcagaaggagctggcggacatcactttagaccctccacctaattgca

SEQ ID NO: 23660 - DNA, 111 bp, Homo sapiens
acactgaagaagtagagtatttcaaccataaagacatcttaattgggcacgaaagagggggatatgagactttctactcggaatatcctgagtgttgcgtggatgtaaaac

SEQ ID NO: 23661 - DNA, 74 bp, Homo sapiens
ggccagcctggggcggccggccaggaaccacccgttaaggtactccaaagattcaggtttactcacgtcatcca

SEQ ID NO: 23662 - DNA, 75 bp, Homo sapiens
cttcagattgcatctgatgagaattataaagacccaaccaacttgcagctggttgtcttcttgcctgccctgtgt

SEQ ID NO: 23663 - DNA, 74 bp, Homo sapiens
gcgcacgggctcggccgccgcccctgccgaaaaatatgtcgtaactgcaagtgtggccaagaagagcatgatgt

SEQ ID NO: 23664 - DNA, 90 bp, Homo sapiens
gtgagatgtgcctttcatcttctgccatgattgtgaggcctccccacccacgcggaactgctgaagccgacgtagcttctctgaacagac

SEQ ID NO: 23665 - DNA, 75 bp, Homo sapiens
cgggagtattatgaaaagatcatggaggagatgtataagaaagctcatgctgctatacgagagaatccagtctat

SEQ ID NO: 23666 - DNA, 82 bp, Homo sapiens
aaataggatttaaccgctctctgcctcccagttcctgcggatggtggatgcctgtgccagcttcctcactgaagccttgaac

SEQ ID NO: 23667 - DNA, 75 bp, Homo sapiens
cggcggagaccctcgaagtgcgcaaacttgacactcaccctgaccgatctccagatcacactaagtttgtgggaa

SEQ ID NO: 23668 - DNA, 82 bp, Homo sapiens
caaggacttggcctccatggtgtcagagcaaggagaagctgttgcagcccctgtcaaagggaacaggaagcagtccacggag

SEQ ID NO: 23669 - DNA, 74 bp, Homo sapiens
tgatttagaaggaggttcaggctacggtgagccgaaggaagttaaaccgaatttaacagagagaattcaggact

SEQ ID NO: 23670 - DNA, 100 bp, Homo sapiens
ctcgatcgctgcccgccgccagcatgttgggcgccccggacgagagctccgtgcgggtggctgtcagaggtgtgctctgaacaagccgagacggggccgt

SEQ ID NO: 23671 - DNA, 50 bp, Homo sapiens
gaaacctggatctgcgatctgtttgtgatcaatacaactgctgatgagaa

SEQ ID NO: 23672 - DNA, 88 bp, Homo sapiens
cccccacgtccttcctgatgggctgccatctcgaccacttcgaagaagtcagcaaggttgtggcagcactgcctgaaggtatgagacc

SEQ ID NO: 23673 - DNA, 83 bp, Homo sapiens
tgtctagttgcaggaaaacaagctcagggcttccactgattctacattatgccatggtctgaaaaagttcttttcttgtcgtg

SEQ ID NO: 23674 - DNA, 75 bp, Homo sapiens
caggaattgagagtcacagaggaaggacagtggagtctggcatcttattgcaatggctgccatccggaagaaact

SEQ ID NO: 23675 - DNA, 100 bp, Homo sapiens
ataccgcagcaaaatagatgccaaatacaaaaagaagatcgagggaatggtcagaccggaaaggagaaacagtctaaactgcatgaaagtcctggtactg

SEQ ID NO: 23676 - DNA, 86 bp, Homo sapiens
agagatgtgatgttggagaactatagcaacttggtatcactagactatgaatcaaagttgagaccaagaaattatttctgaaaaag

SEQ ID NO: 23677 - DNA, 101 bp, Homo sapiens
ttgtatacactggaacagaatcaacccagaacggatagctccctcctggaaaaggacttaaccaccaccatgtcgagcaaaagaacaaagaccaagaccaa

SEQ ID NO: 23678 - DNA, 101 bp, Homo sapiens
gctttggaagattatccatgacactgttctgccctgctctgctctaacaacatttcctccagacaccattccagatcaactggtgccctctacgcccccga

SEQ ID NO: 23679 - DNA, 98 bp, Homo sapiens
aggaaatgccaaggcattctgtggaatgaaatattcatatgaattcagacctaccttcagtcaacaaagccaattattgacttatatgaagaaatggg

SEQ ID NO: 23680 - DNA, 100 bp, Homo sapiens
gatggctctgtgcaacggagactccaagtattggtaaaggttttcaaggtgtcatgaaaagatggggatttaaaggccagcctgctacgcatggtcaaac

SEQ ID NO: 23681 - DNA, 101 bp, Homo sapiens
tgtctcaattgaagaaagagcgttaagtgggcagaccaacatccacctcagcaaaaacttcttcctgacgaatcgcgccagggagcgctcagacaccttca

SEQ ID NO: 23682 - DNA, 99 bp, Homo sapiens
tgatgaagaagatccttcaaaattaaaagaggagcagcatggcatttcagtcactggtttgcagagtccagattgatctggatactattgatgtaagca

SEQ ID NO: 23683 - DNA, 100 bp, Homo sapiens
tttgttggcatcgaattcgcactgatgaaaatgggctttgtcctgcatgtagaaaggtttcgaccaaatactagagagctgtggtgttacaatgcggtgg

SEQ ID NO: 23684 - DNA, 119 bp, Homo sapiens
acctccagtaagggagggcaagaagatatgaacctgagccttcagtcaagaccctccagcttgcctgcctccatgaagaagtggactattctgagaaactgaagttcagtgatgatgaa

SEQ ID NO: 23685 - DNA, 100 bp, Homo sapiens
gttcggctttagagtgtggtgaagggtacttttcatggtgcatggaaggaaagccaatgcgcagagccctaatttgtttagaactgtaatatgcacagtt

SEQ ID NO: 23686 - DNA, 100 bp, Homo sapiens
gccgggtgctgggcacggtcccgcgaggcagttgcagtggtgcagaatggctgacctcagtcttgcagatgcattaacagaaccatctccagacattgag

SEQ ID NO: 23687 - DNA, 75 bp, Homo sapiens
agataacaaaagctgctcagagtctcaatgaacttgattacctctctagtgacccttcagctgttaaccctggtt

SEQ ID NO: 23688 - DNA, 83 bp, Homo sapiens
gcgccgcgggacctctccgggccatggacggagtctcactgtgttgcccaggctggagtgcagtggcgccatcttggctcact

SEQ ID NO: 23689 - DNA, 90 bp, Homo sapiens
agatatgctcccgaccctgtattagtgcggggtgccggccacatcactgttatattccagaagatattcttaagaatttagtagaggagc

SEQ ID NO: 23690 - DNA, 90 bp, Homo sapiens
cgcggggcagccgccgctcctccgggggttggattgagattgttggatgtgctgatcgttcctgttatgacctctcctgtcatgcacgag

SEQ ID NO: 23691 - DNA, 90 bp, Homo sapiens
actgttggcatagatattgtacctgctgtagaggactcatctgatgatgtgagaagagttcagaggagggagaaaaatcgtattgccgcc

SEQ ID NO: 23692 - DNA, 88 bp, Homo sapiens
gccttggtcctagcacccactcgagaattggctcagcagagatggggacttgcttggggtcttgctgcccaggctggtcttgaactcg

SEQ ID NO: 23693 - DNA, 101 bp, Homo sapiens
gttcaccatccatgcctacgtgggcttcaccatggacaagctggtgcagaacattgcgcggcagtcccctgcagagagctgtgacctgctgggtgacatcc

SEQ ID NO: 23694 - DNA, 90 bp, Homo sapiens
tttcgcccgggtcctcctagaaattccccccgaagaagactcccccacatctggcagaaaaatatggctcaggagactaaccagaccccg

SEQ ID NO: 23695 - DNA, 100 bp, Homo sapiens
tctcctgttcttatttgctttatatatcatgtgtgttcctcactcaggcaaagggcgttgtgaatacagctgtgtctgcagcagtccaagctgttcgggg

SEQ ID NO: 23696 - DNA, 74 bp, Homo sapiens
atttggaacaaaaaaaggagatgcctggcagccccgctctctgcaatgaggacggggacttggttgccttttcc

SEQ ID NO: 23697 - DNA, 82 bp, Homo sapiens
atcggaggtcttatacagccaggggatattattcggttgaccagaggagaccatgaaacgtatggtgcaatagccctacttt

SEQ ID NO: 23698 - DNA, 83 bp, Homo sapiens
cacttctctacatcccatctcaatcagaattactagattttctctcaaactacgaggactttgcctcccgggccaaactggca

SEQ ID NO: 23699 - DNA, 75 bp, Homo sapiens
catgaaggacctgagcctgacgcgggccgcgcggagccacccagagttccctcactgaagatctgagcatgaccc

SEQ ID NO: 23700 - DNA, 100 bp, Homo sapiens
ggacaagaacctgaccgagagggaggttcgttttaaaaatttagcatccagaccgtattctctacatgcccatggactttcctatgaaaaatcatcagag

SEQ ID NO: 23701 - DNA, 111 bp, Homo sapiens
ctcgtttcgggttccctagaaaaatctggacgtgtaaaaagaactcttaacggccgatgcagctcttccaaagctaagatgccttcaattaagttgcagagttctgatgga

SEQ ID NO: 23702 - DNA, 75 bp, Homo sapiens
ctggagggataaaacagctcgcagggaagatgaaagttacggattgagaggatccagaatccagatctctggaat

SEQ ID NO: 23703 - DNA, 120 bp, Homo sapiens
gtgcttttatattcatctcaaaaacaaaattctgaactcaggacttggcaatctctagtgatccctgaaaagttccagcatattttgcgagtactcaacaccaacatcgatgggcggcgg

SEQ ID NO: 23704 - DNA, 73 bp, Homo sapiens
aggagatctgatcctgattgcagaaccttccctgattacagaatcttgggtgggtttggaggatttgggacaa

SEQ ID NO: 23705 - DNA, 98 bp, Homo sapiens
gtgagcgccgggctccgtggggaggaagcgggggccaccaaggccaagtcctgtatctgccatgtctgtggcgtccacctcaacaggctgcattcctg

SEQ ID NO: 23706 - DNA, 83 bp, Homo sapiens
ttccctttggggagttaagttttccaggttgatgataattagaagcatgctttccactgaacttcccgacaacatttgttatg

SEQ ID NO: 23707 - DNA, 98 bp, Homo sapiens
ccctatggggcatacctatggctttattgacctcgactcccatgcggtgatgttctgcaccctgaacacccacaaagtggacatggacaagctcctgg

SEQ ID NO: 23708 - DNA, 82 bp, Homo sapiens
ctgctctcccagccgcgccagcctcctcactggcctgccccaggatcagaaatgtcaatatgactcaaaatatcgtgctgcc

SEQ ID NO: 23709 - DNA, 83 bp, Homo sapiens
gcttttgtggaactactctacggcatctggagcaactgggtgatgatgatgcttatctgtgtattcatgaagatcagactgtg

SEQ ID NO: 23710 - DNA, 75 bp, Homo sapiens
gaggagggcaagtttgtccggctgcgcaacaagtccaatgagataccgtggccagccagtgacagaaaaaagagt

SEQ ID NO: 23711 - DNA, 83 bp, Homo sapiens
caagtgtgtgcatctggctgttagaagaattcatgctcatccgggttgatgataattagaagcatgctttccactgaacttcc

SEQ ID NO: 23712 - DNA, 82 bp, Homo sapiens
caaatgtctgactctgactctcggactgagaaacgcaagtaaaggcatgacttcctggcaccacagggaaaatcgggtgcaa

SEQ ID NO: 23713 - DNA, 75 bp, Homo sapiens
agcagtcctaccatgtcagccttcccagtagctgggaccacagccaaagtggaacaggtgaagttcgatgccaca

SEQ ID NO: 23714 - DNA, 96 bp, Homo sapiens
gcacatacataactttggagagcaaagacatcaggtattgcattggaactgagtgaattgagaaataagacaaacagatttcaagagaatgctgtt

SEQ ID NO: 23715 - DNA, 100 bp, Homo sapiens
cggcggggccggggtccgcaaggccggagaaggccgccgggcccgggcatggtggtctggggcaacgcggaagcctaaaatgaccaatgtgtgatttcag

SEQ ID NO: 23716 - DNA, 100 bp, Homo sapiens
ggaagcttcaggtggagacagcccgaagttgtcgccgtgatcctgaaggcgctgacctacgacgagaagcggggtgcctgcagcgtgggcaccaacgtca

SEQ ID NO: 23717 - DNA, 83 bp, Homo sapiens
ggaaggtggagccaccagcctctccctgtttggtgccctggttgtcagatgttggaaagcagtaggacggaacatactcttcg

SEQ ID NO: 23718 - DNA, 101 bp, Homo sapiens
tccacaatggaaccaattgttttacagtctgttccacatgatcattgtaataagttacagccaagttctacttctgaatctatggatcaactactaaacaa

SEQ ID NO: 23719 - DNA, 98 bp, Homo sapiens
cgcaaagctactgcctggacggtggcgacatgtctaagaatgtgagccagtcacagatggcaaaattgaaccaacaaatggccaaaatgatggatcct

SEQ ID NO: 23720 - DNA, 100 bp, Homo sapiens
agcaggctgagcgatacgacgaatttcgctaaggagtttgtgatcagtgatcggaaggagctggaggaagatttcatcaagagcgagctgaagaaggcgg

SEQ ID NO: 23721 - DNA, 134 bp, Homo sapiens
acgaccaccggataattctttttatgtgcgaacatgtaacaagaatccaaagaaaacaaaatggtggtatcatggtcagtttgctgagaacgaaaccaatgaggtcaattttagagagataccttcacatgtgc

SEQ ID NO: 23722 - DNA, 90 bp, Homo sapiens
ctgcaaagatcctgggagaccaaggtgctgatcgtccacacgaatcacctcacttccctgcttcccaaatcctgcagcctcctgagtctg

SEQ ID NO: 23723 - DNA, 50 bp, Homo sapiens
ggccagcatgcccagccgcaccattgaggcagcttgccaactacaacttt

SEQ ID NO: 23724 - DNA, 100 bp, Homo sapiens
tgaaaaattcaagaagttgaaaaacgcttttcacgtcacctggagagatgcacaggttatgatggctttgtcaaatcacctgaatgctgtggagtccgag

SEQ ID NO: 23725 - DNA, 100 bp, Homo sapiens
ataagaagaagcaactgtacaaaccatggtaaaccagacttgaatacaacattgccaattagacaaacagcatcaattttcaaacaaccggtaaccaaag

SEQ ID NO: 23726 - DNA, 100 bp, Homo sapiens
cgcgaagatgcgaaaggtggttttgatcaccggggctagcaggaggaatgccagctcctgagcaggcctcattggtggaggaggggcaaccacagacccg

SEQ ID NO: 23727 - DNA, 83 bp, Homo sapiens
gaggtcgtccgggtgctgcaggcggttgtggactctctccaaggtgctggagaatctggtaaaagcaccattgtgaagcagat

SEQ ID NO: 23728 - DNA, 100 bp, Homo sapiens
ggcaaatccagacagaacctttgacttggtgttgaaagtgaaatgtcatgcctctgaaaatgaaggctctcaaaattagagagatgtgtaattgtccacc

SEQ ID NO: 23729 - DNA, 80 bp, Homo sapiens
gcggacatggtcatgagctttgtgaacctggcattttgaaagcgaagcagaagccgtagaatcagcggcgagcctgttga

SEQ ID NO: 23730 - DNA, 82 bp, Homo sapiens
ttggctgctgcaggagccattttagagaaacaaggctggccctgcggccccgccccataggggcagctcctggaagacaaaa

SEQ ID NO: 23731 - DNA, 100 bp, Homo sapiens
gccagatgacaatggccacaatgctcttcttgactgtccaagtgattgtccaggctcggcttggtgaaaagatttgcactcgttcatcatcttctccaac

SEQ ID NO: 23732 - DNA, 100 bp, Homo sapiens
gaagtggtgatgcaagaagtttctaggaaaggccggacaccaggggacggcaaaacagaacagaaaggcggagataaaaagaggggtgttaaaagaccac

SEQ ID NO: 23733 - DNA, 115 bp, Homo sapiens
ccgacccgagttatgcccaccctccaactttgcgacggaaatgtgtcatcgaaagccagacaatgcagatcttcgtgaagactctgactggtaagaccatcaccctcgaggttga

SEQ ID NO: 23734 - DNA, 90 bp, Homo sapiens
gggggccttggctgtaaggacccctaagggcgtcacctcctcctgtcgcctggccctcgccatgcagaccccgcgagcgtcccctccccg

SEQ ID NO: 23735 - DNA, 50 bp, Homo sapiens
caaatattatggatcctatctgaagtgtaaacaggaacatcgataagtag

SEQ ID NO: 23736 - DNA, 85 bp, Homo sapiens
tttcatggaaagagctttcacaggattcagcaaatgagacgagttgtactgctgtcacaggaaatggacgctggattacaagcat

SEQ ID NO: 23737 - DNA, 88 bp, Homo sapiens
gcgaaaggagctggtgcctgtgcaagttgttgagttctttattggtgaaaacatgaatccagatggcatggttgctctattggactac

SEQ ID NO: 23738 - DNA, 92 bp, Homo sapiens
ttgtgggagtctccgcgtcccgctcgctgggagagaggtgacttaagagattaaaattaatttggttgctgttggttctgaacaaataatga

SEQ ID NO: 23739 - DNA, 75 bp, Homo sapiens
gctttccagttgtttgacaagagtggaaatggagaggtgacatttgtgaaggtcatgccttttgccaacttgatg

SEQ ID NO: 23740 - DNA, 83 bp, Homo sapiens
ctcaatgaatggattgctgtgaacagcccagtgacgagcaccatccggaagtgaaggctgatgggtacgtggacaacctcgca

SEQ ID NO: 23741 - DNA, 50 bp, Homo sapiens
cgttactgaagcagccaaacactctattccctgaaaagcaaaggcctcat

SEQ ID NO: 23742 - DNA, 90 bp, Homo sapiens
cgcagcgccgtagagatcgctcccactcaggtcacaggtgtcccgacccaggctaagcttgagcatggctgagcaggagcccacagccga

SEQ ID NO: 23743 - DNA, 89 bp, Homo sapiens
ctggagtccattctccgccggcggttcacccaccagagtgatgtgtggagttatggccctgtcagccaggcctccccagggacctccag

SEQ ID NO: 23744 - DNA, 100 bp, Homo sapiens
gccgccagcccaaacaggcgtgtcacaggaagtgcccaccgcgtgccccgattggagaggggaccttctgcaggttgtgcaagaggcctttgaaaaagag

SEQ ID NO: 23745 - DNA, 100 bp, Homo sapiens
ttccttttccatcaacaggggcaaatcgaagtagagagcgaaaccatcttcaagttagcagcgtttattttacagatcgagacatgtaagcagcatcatg

SEQ ID NO: 23746 - DNA, 75 bp, Homo sapiens
ggttccccggcccacagtgggggtgtgcaaacccgagagaactggagtgttctgccagttctggataatccactg

SEQ ID NO: 23747 - DNA, 51 bp, Homo sapiens
ggctatcacctccagcgccaaaggtgatgtagtcaaggtgatcgtctccgt

SEQ ID NO: 23748 - DNA, 83 bp, Homo sapiens
cagcgacttccttgcagcctcttctccggctaatgcacaagctgagtgtggaagccccacccaaaatcctggtggagagatac

SEQ ID NO: 23749 - DNA, 99 bp, Homo sapiens
caaaggaggaaacagctggctaagctcatcattgttactgcttcatggttttcatcagtctcttcgagacctcagcagtgaacaaattcgccttggaga

SEQ ID NO: 23750 - DNA, 101 bp, Homo sapiens
gtttcaaatcctgctctactcacagcgttgtgttcctgactggctttggctatgtgtatgtggatgttgtacatcagtgtggcacagtcttcatcactgtg

SEQ ID NO: 23751 - DNA, 97 bp, Homo sapiens
caaaggggacactctgaagattattgagcggctggaccacctggagaatgtcatcaagcagcacattcaaggtaggaatgaattgatagccagatac

SEQ ID NO: 23752 - DNA, 100 bp, Homo sapiens
caggtattgggagatccacagctaagacaccgggacctcctggaagccaaaaatgatgtccgttccaaatgggagtatgacgaaagccatgtgatcactg

SEQ ID NO: 23753 - DNA, 97 bp, Homo sapiens
gccagacacgacgtctggcaggaacctcggcctcagaggactcgggcagccgcaagtagctcctccagcgccagcagccagcccagcagcaagcagc

SEQ ID NO: 23754 - DNA, 100 bp, Homo sapiens
gcatgactcacatcgtgcgggaagtcgacaggccgggatccaacacccttggtgcaggaggtgcaccagaacttctcagcttggtgttcccaggtggttc

SEQ ID NO: 23755 - DNA, 82 bp, Homo sapiens
aacgagaagcacagcaagaacatcacccagcgcggcaacgtcgccaagacctcgatgtgaagttcatttccaatccgccctc

SEQ ID NO: 23756 - DNA, 90 bp, Homo sapiens
caatccagtactgccaggccaacaggcatttttaaacaagatcctgggtgtttggctgacctacagatacaggaaccagaaagacccccg

SEQ ID NO: 23757 - DNA, 95 bp, Homo sapiens
atgagaggccagcaagggagctcctgacgtgggcatccccaccatcagatggtgcggggcagagggggactacaacgtcatggtgatggagctgc

SEQ ID NO: 23758 - DNA, 83 bp, Homo sapiens
ccgcagtatcatgctggccaagaagatcatcattaaggacggaggcacgacgaaaaccactattgctctgttgtatgatgaag

SEQ ID NO: 23759 - DNA, 97 bp, Homo sapiens
gcaggcggaaaccgtgtacagacgtccacacttaactgcgctggggccgcggtggtattgttgcagcatctggcagtgagactgaggatgaggacag

SEQ ID NO: 23760 - DNA, 75 bp, Homo sapiens
cctccagaaatcccctctccctcctggtacatccagacactgaaggaccacaggccccggatggtgtgggacagc

SEQ ID NO: 23761 - DNA, 75 bp, Homo sapiens
ccagcctgcgggatctgaagacctcaccaagagaacaccttctgcagtggggaccatgtgtcctggcacagccct

SEQ ID NO: 23762 - DNA, 83 bp, Homo sapiens
ctgaggcgggcgttttcttggatgaattgcttgctttggaggtaagtaaggaggtctctgtaccatggctcgtacaaagcaga

SEQ ID NO: 23763 - DNA, 78 bp, Homo sapiens
aaggttgttgaagaaataagaaggagaggtggaaaagcagtggccaactatgatgcagaagataaatgtgtaatagaa

SEQ ID NO: 23764 - DNA, 87 bp, Homo sapiens
ccgcggccctgcgaggtccgagggccctgggcgctgcctatggcacagccaagagcggtaccggcattgcggccatgtctgtcatgc

SEQ ID NO: 23765 - DNA, 100 bp, Homo sapiens
cggataccctgaagtcgggaaatgggcaactccaacaacattgccaccgtggacatctccgcaggcttcgtgggcttagacacctacgtggaaatcccag

SEQ ID NO: 23766 - DNA, 90 bp, Homo sapiens
ccgggccgggccatggccgcctcggagcggctgtacgagttgtggctgctctactacgcgcaggaccgtagcatcctgagacattttgaa

SEQ ID NO: 23767 - DNA, 95 bp, Homo sapiens
aaaagttgaatgatgtatttgatcctgattctacccaagtacatatgatttcagctgcaatggcagattcagccatccctgtggaaagtgacacc

SEQ ID NO: 23768 - DNA, 83 bp, Homo sapiens
gtttctgtccaaccagcagccatacccccagttcatggccaccgtggtgtataagagtgaagacatttccacctggacacctg

SEQ ID NO: 23769 - DNA, 82 bp, Homo sapiens
ttgcacgaaagctttcctaggccaaaaagaggttgaaatcacaaagattagacacctttttagataggtgttcttcagcacc

SEQ ID NO: 23770 - DNA, 100 bp, Homo sapiens
acgagagctgcgtgctctccctcaagttcgcctactgcggacctgatcccaaccttgaagaaagtcctaaaagaaaaaatattacatatgaggaattaag

SEQ ID NO: 23771 - DNA, 74 bp, Homo sapiens
gtatacacactggatgaagagcttcccaagagagtcaaatctagactgagtgcgatgacatggatcctgcggac

SEQ ID NO: 23772 - DNA, 100 bp, Homo sapiens
gaggcttcgagtgacccgggtgccgaggagcgggaagagttgctgggtgggtaattccagaattgattggccataccattgtcactgtattactgctcat

SEQ ID NO: 23773 - DNA, 100 bp, Homo sapiens
atttctttttcaactctacagcattcctttccttgaagtcttcgtttttaccttagtctcggcaacaacgaaagcttgacctcctgacgataaccagccc

SEQ ID NO: 23774 - DNA, 75 bp, Homo sapiens
gttaaggattccaagtaactcttatttggtggtcgtgtgatggtaacagatgctgacaggtcaatactatctcca

SEQ ID NO: 23775 - DNA, 90 bp, Homo sapiens
gagcccagcagctgtgggagccccgagaacgcctccagcggggatgacacagaagacttaattcagtgcacaaatgagatgaatgtgaac

SEQ ID NO: 23776 - DNA, 75 bp, Homo sapiens
gccacaccgtcttctggaacagttcaaatcccaagacttggatgttgtgggtgatggtatgcagtgtcctccttc

SEQ ID NO: 23777 - DNA, 100 bp, Homo sapiens
aagagcttctcctcatcaactggggatgattacagttcttcctaaaaaaggaagatgttaccgagtacttcagtgaattccttagtgcaggggaacggag

SEQ ID NO: 23778 - DNA, 82 bp, Homo sapiens
gctggtggaggaggagaaagagttttatggtgtgctttaagagccctgcagaaaaaacaaagatcattccactcagcctggg

SEQ ID NO: 23779 - DNA, 100 bp, Homo sapiens
tctggcccccggaaaacctaaccatgaagacttgaacttaatacagcaagaaagaccatcaagtttaccactaaagcttgctttcactctggaccacgag

SEQ ID NO: 23780 - DNA, 50 bp, Homo sapiens
aggccagtgagtgatcaagtgtctataggatcgggtgaaccaccaaccgg

SEQ ID NO: 23781 - DNA, 75 bp, Homo sapiens
aggacttcctgctcacagcccgacgaaaggatgccaaattcaccccagactatgtccctcctcttggaaactttg

SEQ ID NO: 23782 - DNA, 100 bp, Homo sapiens
gtggccgatgaatcacccaacatgctggtgtacagaaaggctgagtcatcactagagagtgggaagggcagcagcagcagagaatccaaaccctaaagct

SEQ ID NO: 23783 - DNA, 80 bp, Homo sapiens
attgctgtgggtgctgggacttcccgtccgcggcgtggaggagtgtgaacatggctacgcctcttcattcccgtccatgc

SEQ ID NO: 23784 - DNA, 75 bp, Homo sapiens
tgttattcatttctgtgcaaaacaggactggctgatactacgtattccagatgggaggagtctgctactagtctt

SEQ ID NO: 23785 - DNA, 89 bp, Homo sapiens
aggagactacctacactgaacagagccatgaagaacttggagaggtggccagtctgatcttggatataattcattatctaaagatgaag

SEQ ID NO: 23786 - DNA, 80 bp, Homo sapiens
aaagtctggcctcggcgccaagatcccagtcacaattatcaccgggtatttagcttaaagcttttcaagccaggccaaga

SEQ ID NO: 23787 - DNA, 100 bp, Homo sapiens
tcacctgtccttctacattttcgatagagacgttttccggagggattccatcataggtcccttcaccgatgttgtcaccaccaacctaaagcttggcaac

SEQ ID NO: 23788 - DNA, 75 bp, Homo sapiens
aaacacaacgatggatgaattcaggcaacatctacaggcaactggtatacagtttatgtaacttgatggaagaaa

SEQ ID NO: 23789 - DNA, 88 bp, Homo sapiens
gagccagacgacaagcacacactatggcgctgaaacggattaataaggtttctgctttgggacaaccatacatctaattccttaaagt

SEQ ID NO: 23790 - DNA, 87 bp, Homo sapiens
agcatggccgcgatctatgggggtgtagaggggtacagtctttgcccgctgcctgatttttcctctcatcgtgacgggccagcgaga

SEQ ID NO: 23791 - DNA, 80 bp, Homo sapiens
ttatcaaacccggtggaccatatgtagcgtccgtctccaagagagtatgaagagagtgcgtctgtagggcagggaagatg

SEQ ID NO: 23792 - DNA, 82 bp, Homo sapiens
cactggtctaatgttgggggcttaagtggaactgtggctgcaccatctgtcttcatcttcccgccatctgatgagcagttga

SEQ ID NO: 23793 - DNA, 90 bp, Homo sapiens
cgcgaattggagaaaaagttcagtgggaagcatgtcgtctttatcgctcagcttttcatgcaacacccaacacttataagcggaagaaca

SEQ ID NO: 23794 - DNA, 100 bp, Homo sapiens
tggactacccgatttttcgcttctcttcagggatgagtcatgtggtggtgaaaaatgaccctgaactggaccagcaggcattctgtgaaactttagaaga

SEQ ID NO: 23795 - DNA, 99 bp, Homo sapiens
tggagtcatcaatttgatctttcagataatttcatctctcagtttgatgaaggccggaacaactttgaaggggaggtcaccaaggagaacctgctggac

SEQ ID NO: 23796 - DNA, 100 bp, Homo sapiens
gctgtggcaaccgaaatgagactccctcagatccagtgataattgacagaaacctgtggatttttgtatctaagtttactgaatttgatgcaagaaaatt

SEQ ID NO: 23797 - DNA, 76 bp, Homo sapiens
cggcacttccggccggcggcggctgctccgggtgagcaggtctccaacctgtcccagtatttcagcccagcctcgg

SEQ ID NO: 23798 - DNA, 75 bp, Homo sapiens
cctggaccgccagcagcagtgagaaggtatggatcctggcgggagccagtcaacccctattatgtcaatgccggc

SEQ ID NO: 23799 - DNA, 101 bp, Homo sapiens
tcctgcctcaggtttatttgtacaaatagcacaggaggaccccgtggaattgcatcttctgcaggatgaaggagtctccgggaagccaacagtgttgtcag

SEQ ID NO: 23800 - DNA, 100 bp, Homo sapiens
gggaaaatctccccggtgactttcagggtacaggcatccttcacctgctattgttgcaagaacagtcagaattttacatacactactaactctggttaac

SEQ ID NO: 23801 - DNA, 97 bp, Homo sapiens
gcgcggcggacgcgcccgggacgcgcggcggcaccgggaggccgggccgagcggtacctactgtcaacaacgggaagtggaggccattactgaaggt

SEQ ID NO: 23802 - DNA, 100 bp, Homo sapiens
acgcccatcctggtctacctgcagtccatcttcgacagcaccgctgtcctgctggtcctcgagtacgactactacggggcttacgggagccgcgcgcacg

SEQ ID NO: 23803 - DNA, 100 bp, Homo sapiens
ctgcacagagcagattctgaaacttcttgacaatttgcttgcgcttataaggtacatcaggaacgtctctatcaagaatacaatttcagcaaggctgagg

SEQ ID NO: 23804 - DNA, 75 bp, Homo sapiens
cgctctccgcaccgcggcttaaatgatgtattttgtgatcgcagcgatgaaaggggacggcaaaacagaacagaa

SEQ ID NO: 23805 - DNA, 143 bp, Homo sapiens
gccgaaacctggaggcccggggggcccagctcccgtagggagccgtgggcgctcggtgcccgggccgggcagggaactctaatgatccaggacaaagaagttaccctggagtatgtatcaagcctggatttttggtactgcaa

SEQ ID NO: 23806 - DNA, 117 bp, Homo sapiens
gctcaaggaaacctttccaacacagatgtccaagctgccaaatcttctgtctacatggtggtctctcgccatctatagatacactggatcatatcagagcacttgatcgcctacaag

SEQ ID NO: 23807 - DNA, 52 bp, Homo sapiens
cagcagtcaagtatgtcccaaacgtctgtgattttcttccacccccacctcc

SEQ ID NO: 23808 - DNA, 101 bp, Homo sapiens
agcgccttcccacggagcagcactcttcaccctgcacagccttgttagggagaagatgtcaaccggacactagaaggtggaaggaaacctcttcattatgc

SEQ ID NO: 23809 - DNA, 50 bp, Homo sapiens
ctcgcagtgagtgttacagctcttaaggaaatgctgtctatgatttcttc

SEQ ID NO: 23810 - DNA, 76 bp, Homo sapiens
ggctcaagtgatcctcctgcctcagcctcccgagtacctgagattagcccagctgtctgtgatcctggaaacatac

SEQ ID NO: 23811 - DNA, 87 bp, Homo sapiens
aaagcgttggagaggtgttaccggaacggcggcgacaagggtgttcccgaactagagtggtgcctacaccaactaatgttacaattg

SEQ ID NO: 23812 - DNA, 75 bp, Homo sapiens
ccgccagctccaccatcaacatcaacacctccacctccaagttctatgtaggaggagctcaagtgctggcaacag

SEQ ID NO: 23813 - DNA, 82 bp, Homo sapiens
gtactgggatgtgatgatggagaactacagcaacttactctcactgggtttccacttcaagcgtgacccttttgcctgtggg

SEQ ID NO: 23814 - DNA, 88 bp, Homo sapiens
ctctcaaagcacccacacttcaggtgttcctgatccaagcagaaccctgttatttgaagagcctgagaaatcttatcccgtttacaaa

SEQ ID NO: 23815 - DNA, 74 bp, Homo sapiens
ttggggtcaatttgttgtatagctgagcaacaagctcaaccaaattggaagatctgagttatttagacgggcag

SEQ ID NO: 23816 - DNA, 50 bp, Homo sapiens
cgctgctgtcgctatggagacagggtcaaattattatgtgaccaaaaaaa

SEQ ID NO: 23817 - DNA, 90 bp, Homo sapiens
tgcgcagggctgcactgtctccgtctgcggcctgcagtaagcgggtgcagctctgtcatttccactctgctctgctgcacagaaggcaga

SEQ ID NO: 23818 - DNA, 100 bp, Homo sapiens
ggccgggcgcggcggcggcggcggtggaggagccggagcataatgctcttggagtttgacaaggagttgtctgtctttaaggacagactgtatgaactgg

SEQ ID NO: 23819 - DNA, 82 bp, Homo sapiens
aagactttcaggccctacctatactagctaggtcccccacggcccttcaggatgaaagctgcggtgctgaccttggccgtgc

SEQ ID NO: 23820 - DNA, 83 bp, Homo sapiens
ctcggaggcggcgggcggaggcggcggggactttgaacatgtcggggatcgccctcagcagactcgcccaggagaggaaagca

SEQ ID NO: 23821 - DNA, 100 bp, Homo sapiens
gcgccctgggacaaccacgtctccggccacggtgtcatggagaaactccagctgggcccagagattctgcagcgggaaaatccaaggcttatttatgcca

SEQ ID NO: 23822 - DNA, 80 bp, Homo sapiens
gttcgcctcagacgcggtggagccgccggagtctgagaagttcgaggtcaggaaaatggattggatggcaccaagagtgg

SEQ ID NO: 23823 - DNA, 100 bp, Homo sapiens
gcagaaatcaaattgaagagagcagttgaagaagtgaagaaattattggtacctgcaggactggaattgcatacagaagagaccaggcccttaaagacag

SEQ ID NO: 23824 - DNA, 98 bp, Homo sapiens
gcagggggaaagttacactccccgattcagccaacatgtcagtggcaatcggtaaacaccactctgccagcaaggacgctgctgctcggctggggccc

SEQ ID NO: 23825 - DNA, 118 bp, Homo sapiens
ctggcggctgctggtagttccatgctgtctgttcagacttcagcttggtgaagacgtattttagcagatgaagcactcaagctgggcattctagataaagttgtaaactcagacccgg

SEQ ID NO: 23826 - DNA, 75 bp, Homo sapiens
cggagctgcagtcggcactgctactgcgaagacagctggcagggcgaccattgacgaggtggagacggacgtggt

SEQ ID NO: 23827 - DNA, 100 bp, Homo sapiens
ggaactgctaccgatacatcaatggtaggaactcctctgatgtcctggtttatgttaccagcaatgacactacggatgtacagattatagtgtttccaga

SEQ ID NO: 23828 - DNA, 82 bp, Homo sapiens
gtctgccaccatcttcgacttgagcgaagttttatgcaagcaattctgtggtgttcttggtcacacatttatggagtttctg

SEQ ID NO: 23829 - DNA, 83 bp, Homo sapiens
gtctgcgagccaggattcccggcagcgtctatcccagactaccggggccctaatggagtgtggacactgcttcagaaagggag

SEQ ID NO: 23830 - DNA, 100 bp, Homo sapiens
aatggaggtggatggaacatagaacaaccttccattctaaaccaaagatttgaacatggaattcaatccttcagatcatcctcgggccagcacaatattc

SEQ ID NO: 23831 - DNA, 83 bp, Homo sapiens
gactttggaagtcgtcaggaatttgactctaggctgtgatcaatagccaggaatggactttgagccgctccattcctgaactg

SEQ ID NO: 23832 - DNA, 74 bp, Homo sapiens
atcattctgaacggggagaggaaaggtgatgcagaagatggggaagaatatgatgacccttttgctgggcctcc

SEQ ID NO: 23833 - DNA, 102 bp, Homo sapiens
ggagcacattgagaggtccaagatgcagcaggtcggaggaaacagccagaccgagagcagcctgccggggcggaggatgatcggctgaatgtaacagaggaa

SEQ ID NO: 23834 - DNA, 75 bp, Homo sapiens
cactttctgaagctcatgaagactgtgtaaataatatcagggctgacaggacaactggatcagtttcattaaaaa

SEQ ID NO: 23835 - DNA, 100 bp, Homo sapiens
ttcgtggtgaaggtccggggcttgccctggtcttgctcggccgatgaagtgcagaggtttttttctggaacagatggagtcggataactgttcaggagga

SEQ ID NO: 23836 - DNA, 83 bp, Homo sapiens
agccgccccgctccgcctcggcggggccagccggcgagtctaaacccaagagcgacaatgcagatcttcgtgaagactctgac

SEQ ID NO: 23837 - DNA, 100 bp, Homo sapiens
tggaccacaaactgaagcctttcattcctgattttatcccagctgtcggggatattgatgcattcttaaaggccccacaccccaccaaactccgtaccag

SEQ ID NO: 23838 - DNA, 75 bp, Homo sapiens
gagatcgaccaggacaccatcaaccgcatcatcaaggtcatgggcacagtgatttgcggcactggaatccctcag

SEQ ID NO: 23839 - DNA, 100 bp, Homo sapiens
ctttgaggaatccagcaagctagaagacctgttgcggaaggttcgcgccaaggagaccaggaagcgagcactcagcaggctagtcaccctgctgtggaat

SEQ ID NO: 23840 - DNA, 83 bp, Homo sapiens
gaaggatgggcggagaaagattctgccagaagaagaggcaaacaacatgggtgttggagtggttggaattatagagtgtaatt

SEQ ID NO: 23841 - DNA, 99 bp, Homo sapiens
ttatgtcagaaacacaaagcagcccaaccaaagggtctgccatcatggatgttctcgcagaagcaaatggcacctttgccttaaaccttttgaaaacgc

SEQ ID NO: 23842 - DNA, 75 bp, Homo sapiens
aacagctgttttgcagattggactacaaggttgctgctccaagatagccaaaatgtggaagcactgagaatgcag

SEQ ID NO: 23843 - DNA, 89 bp, Homo sapiens
cagcatgattcaactttgtagtaagcttcgaaatttgctacatgacaatgagctgtcagggctgacagatgaagagattgatatggcct

SEQ ID NO: 23844 - DNA, 100 bp, Homo sapiens
gtcgaatgaggcacctaaaaattgtataccgcagattcagtacgaggatgtcgtccaggaaagattgtgcagatgactgaagcagaagttcgaggcttat

SEQ ID NO: 23845 - DNA, 90 bp, Homo sapiens
atttgataacactggagatcagcaccaaatcccacagaggcatctgaggtgcagtagacattgttgcaatcatgatcggcaatctgaaag

SEQ ID NO: 23846 - DNA, 75 bp, Homo sapiens
tgaagttctaggcgtgcagagacatgcctcacccgaggatattaaaaaggcgccgactgaaccaagctaactcct

SEQ ID NO: 23847 - DNA, 75 bp, Homo sapiens
cgaacggctcccacagccgggcgttgggggaaaggagccaagccgccatggcctaccacagcttcctggtggagc

SEQ ID NO: 23848 - DNA, 98 bp, Homo sapiens
attcaggagaagctggctattgaggcagagagacgacgcattcaggagaagaaggatgaggttgcacagtggctcagagagtagacttggagccaggc

SEQ ID NO: 23849 - DNA, 100 bp, Homo sapiens
ctctataacccctaccgccacgttgcagtacctaccccagctaactggcagcagcatccttccagctttggataataagaagtactactgtgataccaag

SEQ ID NO: 23850 - DNA, 76 bp, Homo sapiens
ccggggcttgccctggtcttgctcggccgatgaagtgcagaggtttttttctggttggaagtgtatcctcccttct

SEQ ID NO: 23851 - DNA, 51 bp, Homo sapiens
cagcctcccaaagtgttgagattacagttaattgtgtgaggaacacgccgg

SEQ ID NO: 23852 - DNA, 91 bp, Homo sapiens
ctcctggcttcttacgccgtccaggccaagatattgaaatggattccaggcgtgtgcctcgagacaagctggcctgcatcaccaagtgcag

SEQ ID NO: 23853 - DNA, 100 bp, Homo sapiens
tggaaattgcactggaactgtctgattaaggcctatggcatgtctgcgttacctttaaatctgataaaaggcactagaagcgctgcttatgaacgtttgg

SEQ ID NO: 23854 - DNA, 87 bp, Homo sapiens
cccccaccgccgccccctccggcgtgttcatgcccccgggccttatgccagcctggaccatcttggaggcagtgtaggatcatggaa

SEQ ID NO: 23855 - DNA, 83 bp, Homo sapiens
gagagaccagcaaggaatccaaatgcatcattcagatgcaaggcaactcgaccaatgggccatcaactgagaaagaccttgac

SEQ ID NO: 23856 - DNA, 101 bp, Homo sapiens
ggcggccggcggcggctgcgggctgagcggcgagtttccgatttaaagctgagctgcgaggaaaatggcggcgggaggcatctaataggattcaggaatca

SEQ ID NO: 23857 - DNA, 75 bp, Homo sapiens
agtgaagctgcagaccttcgcgttggtgttggtattaggagatctgcacatcccacaccggtgcaacagtttgcc

SEQ ID NO: 23858 - DNA, 80 bp, Homo sapiens
gggctttcgcccgcggctcctgagggatcggtctcagccgcgcggacaatgcagatcttcgtgaagactctgactggtaa

SEQ ID NO: 23859 - DNA, 97 bp, Homo sapiens
ggatcatcctgatattgttgattcatttatgcaactcctggcacagactgcaaaattcaaaatggggctcaaggtattcgtttcatctacaccagag

SEQ ID NO: 23860 - DNA, 100 bp, Homo sapiens
gtggatgaagttgttcattgtttgtcaccacaaaaaggacaggctgatcagttgatgttcgctttgcattttgttcgaggcatgcatcctgaactttttc

SEQ ID NO: 23861 - DNA, 75 bp, Homo sapiens
cgtgaccgagagcgcgaatatcgtcatcgttagaagccggcattttgcacagaggccgtgtcttatgcggaatac

SEQ ID NO: 23862 - DNA, 100 bp, Homo sapiens
gccggctgctcctgctgaccctcgcgagtattgggaaagggtcgttgtggtgcatagacccagagtatagacaaaatctaattcaggctttgaaaaagac

SEQ ID NO: 23863 - DNA, 100 bp, Homo sapiens
aagagggactggacggctgagctgggcatccgacacgtactgctgaataatccagaatggctactctgatctatgttgataaggaaaatggagaaccagg

SEQ ID NO: 23864 - DNA, 74 bp, Homo sapiens
cgacttcggctcttgcctcaagctgcgggcagatggaacgagttgaagtattgataacaccaaggaactctatc

SEQ ID NO: 23865 - DNA, 75 bp, Homo sapiens
tctcttcctcctccaccgagtcgtgctctcgccccaacccgcgcgccagaacatccagtcatggataaaaatgag

SEQ ID NO: 23866 - DNA, 90 bp, Homo sapiens
ctcgcccctggcctcgcgggccgtgtctccggcatcatgtgtgacagaatgttgctgcgggatgtaaaagctcttaccctccactatgac

SEQ ID NO: 23867 - DNA, 100 bp, Homo sapiens
gccgcggaaaccgatctgcccgttgtgtttgtgaaacagagaaagataggcggccatggtccaaccttgaaggtattgaaattgttggcggagatgagtt

SEQ ID NO: 23868 - DNA, 80 bp, Homo sapiens
ccgagaaggccttttggctgagcgttcacgggccccgagcaggtgtggactggatgaacaaggtgatggcacgtttcgtg

SEQ ID NO: 23869 - DNA, 100 bp, Homo sapiens
aaaaaagtggctgctattgaagccctaaatgatggcatagaatgtcaagctaaccaggcgtccgctacttcagaagagtgtactgtcgcatggggagtct

SEQ ID NO: 23870 - DNA, 96 bp, Homo sapiens
gaaacaatggcatttacagaaagagtcaacagcagtggcaacaggagtgtacctcacagccttctaggatctccagagtggacaggaatctcactt

SEQ ID NO: 23871 - DNA, 76 bp, Homo sapiens
tcagtagccatgctcatgatcggcgtgtttggatgtactttacaggaactttccatcttacctactttttggactt

SEQ ID NO: 23872 - DNA, 75 bp, Homo sapiens
ctagaaattgcaccacagatatatgggttcatgcagcagaactgattaaaacagtggcatctcgctatgatgaat

SEQ ID NO: 23873 - DNA, 101 bp, Homo sapiens
gattctacttattcatcagtttgttgtgcttgtcaagatcaggtgagccggcctcatcctagtgactaccccctcctgatcctctttgtggtaggtggggt

SEQ ID NO: 23874 - DNA, 82 bp, Homo sapiens
ctctggccccgagatcagaatgccggactgatcctttgaaatactccagccatgactaaaagagaagcagaggagctgatag

SEQ ID NO: 23875 - DNA, 95 bp, Homo sapiens
gcggggcctgggccgccgctctcgctcctctggccaccgcccctgggaagcccttttggaaagcggaagaagtccctatagaaccatacaacatc

SEQ ID NO: 23876 - DNA, 100 bp, Homo sapiens
caggaagtgtcacacagcagtcaagtatgtcccaaacgtctcttcctgcctgacacagctcacttcaagaagtgcacaatgtcagaacgtggaattaagt

SEQ ID NO: 23877 - DNA, 95 bp, Homo sapiens
ggcagctggtttgcctcaccctggtctcagatgccatggacaatattaccaggcagaaccaattctacgatacccaagtcatcaaacaagaaaac

SEQ ID NO: 23878 - DNA, 74 bp, Homo sapiens
aaacatagagaggaactggagcaattgaagctgactactaaggagaataaggctgattcaccccaagagtggcc

SEQ ID NO: 23879 - DNA, 96 bp, Homo sapiens
ctggggcccccagaagtgatcgctcagctggagaacgcggctaaagttctgatgataggaaccaaggctttagccttctcaactcattgactggaa

SEQ ID NO: 23880 - DNA, 101 bp, Homo sapiens
aggaaacggcttcttcctcacttcgccgcctggtacaccaggggttggaaaaaccacactaggcaaagaacttgcgtcaaaatcaggactgaaatacatta

SEQ ID NO: 23881 - DNA, 100 bp, Homo sapiens
ggactctccattccagaaccatggcccaatttgtccgtaaccttgtggagaagaccccggcgctggtgaacggtgtcagagatggctgaagatgggagcg

SEQ ID NO: 23882 - DNA, 83 bp, Homo sapiens
caaagggctgtacctgaaatcctcgcagctggaggcagatatgacctgctggtgaaaggtgtagcagtcactcggcctacacc

SEQ ID NO: 23883 - DNA, 123 bp, Homo sapiens
acagaaaatcgtcttatagttgagaatttatcctcaagagtcagctggcaggcgcagttgtgtagcagttgagtaatgctggttagctgttaaggtggcgtgttgcagtgcagagtgcttggc

SEQ ID NO: 23884 - DNA, 91 bp, Homo sapiens
atcaagttcatcagcgagactctgcggcgcatggaggaggaggaggtgtccctggccagtgtccttccacctgtccacaagcatggggaac

SEQ ID NO: 23885 - DNA, 100 bp, Homo sapiens
ctcccgattagctgggattacagagcaactaagaggtctttcttggctctatgagaacctggtgggattcctgaagataaagtccacaaaaatgaagctc

SEQ ID NO: 23886 - DNA, 100 bp, Homo sapiens
agatggtacgcgttgctatacagaatctttggatatgtgcatcagtggtttatgccaagtaacagcttgcctgattgctgtggccaaaacagatggtgaa

SEQ ID NO: 23887 - DNA, 127 bp, Homo sapiens
gcccggtgcccgaggaggcagccaagctcgtagcctgccactccgtgcgtctctaattaacagaagatggcaaagcccagccacagcagctatgtccttcagcagctaaacaaccaaagagaatggg

SEQ ID NO: 23888 - DNA, 100 bp, Homo sapiens
aagcggagcgaggcagcattcgcctccatggcccactcgccggtggctgtccaagtgcctgggatgcaggattgtcagtggcttcgccccgaggagagct

SEQ ID NO: 23889 - DNA, 75 bp, Homo sapiens
acctccagtctataagcccaggaagccgtcttcgaactcaggagaagggcggctacttccctgagaatgtcaagg

SEQ ID NO: 23890 - DNA, 75 bp, Homo sapiens
cacagtatgtatggattgcagtagctacagtacatactgttccaaagaactactggttcagattttagctcttcc

SEQ ID NO: 23891 - DNA, 75 bp, Homo sapiens
ctgcagagaccccgctatggctggacttgccatgaggtgttgaagccttgtttcactgagttggagagactggac

SEQ ID NO: 23892 - DNA, 82 bp, Homo sapiens
caggtgttgtgtgtgggggtgcagctacccgtacagtgaggacgcccgccagggtgagcagtacatgaacacccggtgccca

SEQ ID NO: 23893 - DNA, 75 bp, Homo sapiens
gcagggtgaaccacagcaagttcatggtcacggagaaggcagcctacatagccctgggcgctgcctatggcacag

SEQ ID NO: 23894 - DNA, 98 bp, Homo sapiens
ggcatgtccgcttcgaccttcccccacaaggtcctagctggactgctgcaccttggcaatatccagtttgctgcctccgaggatgaagcccagccctg

SEQ ID NO: 23895 - DNA, 75 bp, Homo sapiens
gttctgaacgtctggctaaatacaaccagctcatgaggactccagtgggggtgactcatgtgcttctgaggagga

SEQ ID NO: 23896 - DNA, 50 bp, Homo sapiens
gagaccagcaccatggaggaggacaggttagagcagccagcgggtacaga

SEQ ID NO: 23897 - DNA, 128 bp, Homo sapiens
acaagagcttactggtgaaggaatgggacaagacccatctttatgcaaagccagcgttacagtaatgttccagctccatgatgcgttatctgggtctggaaacccaaaccctcaaggatggcctggcg

SEQ ID NO: 23898 - DNA, 75 bp, Homo sapiens
ggacgtgggcgtggtgggcgcccaaaccgtggcagcaggaccgacaagaatgagtccctggaacgccagatgcgt

SEQ ID NO: 23899 - DNA, 100 bp, Homo sapiens
tgagaagtctgtcctgaaggaagtcagccacccgttcctcatcaggctggtgataaaagaaaatgtggctgaagttacccgaagttcagcttgcagtgta

SEQ ID NO: 23900 - DNA, 90 bp, Homo sapiens
ggacaagacccatctttatgcaaagccagcgttacagtaatgttccagagaaagcttcttgctatctacctccaccatgatgaaagtgtg

SEQ ID NO: 23901 - DNA, 75 bp, Homo sapiens
cgggagtattatgaaaagatcgttctccgtctgatggttggggtacaggtgacagaagagcagctggagaacatc

SEQ ID NO: 23902 - DNA, 82 bp, Homo sapiens
gagcgcggtccctgtattggtctcctgctcctagagggtgtctgatgccatcaagtgttgcaggagaaacttcagtcttggc

SEQ ID NO: 23903 - DNA, 101 bp, Homo sapiens
ctgaaaacagatgagggcattgcctacaggccggattcagaagccagccagagcccacaatacagcttcgagtcattacctcagaagatttgtttaatctg

SEQ ID NO: 23904 - DNA, 50 bp, Homo sapiens
cgggcctccaaggaacttaagcaaagagatggagtcttgctctgttgccc

SEQ ID NO: 23905 - DNA, 100 bp, Homo sapiens
taaaactccagcgagatccgggccgtgaacgaaagcagtgacggaggagcttgtaccaccgattcatgatgttgctatcaaaagttgagaaattgtcaga

SEQ ID NO: 23906 - DNA, 100 bp, Homo sapiens
gagagagggaagtcgcctctgtgctcgcccacctgccgtttgctgtcattggcagcacagaagaactgaagataggcaacaagatgatgagggcgcggca

SEQ ID NO: 23907 - DNA, 75 bp, Homo sapiens
agattcagcagcgaacggaagctcctggaggtcagaggccctttcatcatcagatgccggtgcagctgacgacag

SEQ ID NO: 23908 - DNA, 90 bp, Homo sapiens
aaaaggcaacatcctgtcacaggccatgctctggcaaaaacggtgcaaatagctatgggcaacttggcctcggccataaggaagatgtgc

SEQ ID NO: 23909 - DNA, 90 bp, Homo sapiens
aggagagaggcgcctcctcgctcccgccaccgccggacttcaatgcccagtccccagctcgccagctgccctgcaggagtcattaaatca

SEQ ID NO: 23910 - DNA, 90 bp, Homo sapiens
cttcgatgtatctaaacttggcaccaagtatggtgtcgcttcttgctgctctcaagccctactccccatgcttctgcttctagcttgctg

SEQ ID NO: 23911 - DNA, 83 bp, Homo sapiens
ctcgctgtgagacatgtctgagactcctgctcagtgtagcattaaggagctcgaggccatgagcagatataccagcccagtga

SEQ ID NO: 23912 - DNA, 82 bp, Homo sapiens
catcgatggcctactggggataacattcatgcagaacatcagatataaagatgaagcgcagctgtataaagaagagcacctg

SEQ ID NO: 23913 - DNA, 75 bp, Homo sapiens
ctactgaccaagatcttgtcaagctgtgtcagccgttggatggcaagcatgtggtgtttggcaaagtgaaagaag

SEQ ID NO: 23914 - DNA, 99 bp, Homo sapiens
gagcacccgcctccgggcatcttcaactcaatcagccatgactgcctttgcactgtccatgctctcagcccaccacctcctccccctgccattgcagtg

SEQ ID NO: 23915 - DNA, 82 bp, Homo sapiens
cttcagatcttcacagcacagttcctgggaaggtggagccaccagcctctccttggattacagtttaaagacaatttctgtg

SEQ ID NO: 23916 - DNA, 75 bp, Homo sapiens
cagaaacagttaatagagatggaccgcggcaagggtgctgataagactgtgaaaggcccagatggactgaccgcc

SEQ ID NO: 23917 - DNA, 75 bp, Homo sapiens
atggatttcgttatatcccctttagaatatatcagtactatactggcaattgctggagaagattttgcaattgtt

SEQ ID NO: 23918 - DNA, 75 bp, Homo sapiens
gtgatcttcagaccccaggttctttgtttggtgccctggttgtcagatgttggaaagcagtaggacggaacatac

SEQ ID NO: 23919 - DNA, 100 bp, Homo sapiens
ggaggtgaatggcagcaaggtgggcccggacggcacaccctacgttaccgtgctcaagagccctgagggtagctatgacctcaactctaatgaccctgac

SEQ ID NO: 23920 - DNA, 108 bp, Homo sapiens
atcgcatctccccgacaaacaccacgagaattccgcagcccacacggtgccaagtcctgccctgccaacttcttggcagctgccgacgacaaactcagtgggttccag

SEQ ID NO: 23921 - DNA, 97 bp, Homo sapiens
tggacaaacagatatccagatgctaaaatggacccaatgaacatctgggatgacatcatcacaaatcgattttaggacagcaaattaatgactttac

SEQ ID NO: 23922 - DNA, 83 bp, Homo sapiens
gtgcccaacaagaaggggaccagacctagtcaccgacttggacttctcgccctttgatgacttcctcctggccacaggctcgg

SEQ ID NO: 23923 - DNA, 90 bp, Homo sapiens
ccgatttaaagctgagctgcgaggaaaatggcggcgggaggtgacaacatccgggaattcttgctgagcctcagatactttcgaatcttc

SEQ ID NO: 23924 - DNA, 98 bp, Homo sapiens
ggcgctctcgcttcagtcagtcgggccgcgccgcgcctcagctctggttctagtaaataccgcttgctgtgttttgatgttggtggctaagctcatcc

SEQ ID NO: 23925 - DNA, 83 bp, Homo sapiens
aatacagaacatcttctcagaggaggacttccggttataccgctctggattaatcgaattacagctgctagccaggaacatgg

SEQ ID NO: 23926 - DNA, 100 bp, Homo sapiens
gatcgaccgcaacttacgggaggacggggaaaaagcggccaaagaagtgaagctgctgctactcggtactccaaagattcaggtttactcacgtcatcca

SEQ ID NO: 23927 - DNA, 75 bp, Homo sapiens
cggtggaacgaggacgcggactgcgaaggcagatgccacttcaaatgaacaacaagagcttttctgtcagaagtt

SEQ ID NO: 23928 - DNA, 82 bp, Homo sapiens
cccagaaccatgtgccgagcccgctgcttttggagacacgcttcacatacactacacgacaggggcaagtgtccgagtggtg

SEQ ID NO: 23929 - DNA, 100 bp, Homo sapiens
cgggtgcctttgaaaatcaacgacaacttgagcacaggttgaatataagctgggattccaagtggacaatgttttggcaatggatatgccccaggtcaac

SEQ ID NO: 23930 - DNA, 51 bp, Homo sapiens
gcccgcgccaccatcttcggctgaaggcaattaagttggaatatgcaaggt

SEQ ID NO: 23931 - DNA, 101 bp, Homo sapiens
gaaaaagtctcctaaacagacaggctacggatggatatgtcaggaatgtgattcttcatcttccaaggttattatcaacccttactttgctaagcaagaaa

SEQ ID NO: 23932 - DNA, 100 bp, Homo sapiens
gcctggggctaccccgtgacccttcaggtgtaccatgggctgctgagcttcacggtgcatcccaagcccaagaggtgtgggcctcagcttcctctttgct

SEQ ID NO: 23933 - DNA, 100 bp, Homo sapiens
acggagcataggaggaaaattcatcatctgtcagggcgacccttgggcgctggagtacgcttgggactggggctgcgagtgagcaccagcgattggttcg

SEQ ID NO: 23934 - DNA, 50 bp, Homo sapiens
aggaccatcttgcctggagcaagggtgagaaggactggcagaaatacgag

SEQ ID NO: 23935 - DNA, 100 bp, Homo sapiens
gtccaagaaggctccctagtggacacgctgcaatctagtgacaaagtcgaaagatgtgggcgctatctccaactgtctttgcacttctgagtaagaatct

SEQ ID NO: 23936 - DNA, 75 bp, Homo sapiens
tgggccgacatgaagagctgccagatccaacaggacttaaccaccaccatgtcgagcaaaagaacaaagaccaag

SEQ ID NO: 23937 - DNA, 50 bp, Homo sapiens
gcagctgacctacatctcgaagggcctcggcttccctcacgatattgcag

SEQ ID NO: 23938 - DNA, 104 bp, Homo sapiens
cccatcatggacccagcctgggaggccccagagggtgtccccattgacgccatcatctttggtggccgcagacccaaagccttgcatcccagggatgaagccca

SEQ ID NO: 23939 - DNA, 100 bp, Homo sapiens
cagtgatggaccgtgctagtgacctgactgatgccttcgtggaggtgaaatgacaatggatgctctgttggctcgattgaaacttctgaatccagatgac

SEQ ID NO: 23940 - DNA, 105 bp, Homo sapiens
gaactttgtatatggaacactaaggatccttctcatcagatgaatgtgctaaaagtcttcgttggctctccgtgtggtctcaacctgcgtaacgtcttatggcat

SEQ ID NO: 23941 - DNA, 75 bp, Homo sapiens
cacgcgaagtggccgcatccgcaagaaagaagcttccggttctgaggtcctggaggtgccatttccctctctgtt

SEQ ID NO: 23942 - DNA, 90 bp, Homo sapiens
aacaaaaggtcccggaccccccggatctgacggggcgggacctggcgccaccttgcagaccctggaagctgtcctgaatttcaaatactc

SEQ ID NO: 23943 - DNA, 100 bp, Homo sapiens
ttgggaccaggatcacgacctccgcagggacaagaactgcgccaagagcctctctgcacccaagaaaacctcatttggctcgctgaaggatgaagaccgg

SEQ ID NO: 23944 - DNA, 89 bp, Homo sapiens
aaaaaagcagagaggagcggggagcaatgcaggtccttgaatgggcaagagggcacatgaagtacggcgtcctccacattcacggcctc

SEQ ID NO: 23945 - DNA, 112 bp, Homo sapiens
tggagtcggctggtcttagccctcagctgttgttggctaaaataaatgaagctgtagaatgcttactgtccctgaaggctcagtataaagaaaaaactgggaaggagtacat

SEQ ID NO: 23946 - DNA, 75 bp, Homo sapiens
tggccaagatattttcattatacagacaatacccaggtccgtgggctgctggacaccctggtgactgacctgatg

SEQ ID NO: 23947 - DNA, 100 bp, Homo sapiens
cttcccttacctcagcgcctttggggacctcgaccagaaccagtcatgactgtccaaagtatgataatcacatgagagtgctcgttgctacggatgtcat

SEQ ID NO: 23948 - DNA, 100 bp, Homo sapiens
caggccagagttgtgggccgccgtcggcagcaagaacagagagagaggtggacagatctgagagatactgagggccttttccgaattggggctggggcct

SEQ ID NO: 23949 - DNA, 100 bp, Homo sapiens
agaccgacttctttctctttaccctcattggcgcttctctcctgcagtccgcctctgggccctgccggcatgagaaacttagtaaagaagtatgaaccac

SEQ ID NO: 23950 - DNA, 100 bp, Homo sapiens
gagagactggaccagaccatgggcctgagcatcaggtactccaaagattcaggtttactcacgtcatccagcagagaatggaaagtcaaatttcctgaat

SEQ ID NO: 23951 - DNA, 101 bp, Homo sapiens
cctcctgactctgcctggcacagcctgtggccctggcctggttcgttccaccagtcataaaccagatgaaatctatggcatgattgaaagactatctcctg

SEQ ID NO: 23952 - DNA, 75 bp, Homo sapiens
tccagaagtccagagctgaggactgcctgtttgcaggagctcgaggccatgagcagatataccagcccagtgaac

SEQ ID NO: 23953 - DNA, 96 bp, Homo sapiens
atggcggaccgcttctcccgcttcaacgaagaccgagactttcaggaacttaagaagtatggagttaccacaatagtaagagtatgtgaagcaact

SEQ ID NO: 23954 - DNA, 75 bp, Homo sapiens
ctatgcagactgtttatctcagggaaatatcaaggtcgtaatgggaactggcatttcagctgggtttaacttgaa

SEQ ID NO: 23955 - DNA, 98 bp, Homo sapiens
gtggtcatggtcctggaggtggcaagaaggatgacaagagaccccactggcttttgccagcatcccaggctgcacagttatgactgacctgaaggatg

SEQ ID NO: 23956 - DNA, 85 bp, Homo sapiens
ccactgacctgggacagtgaatcgaaagaccacagcaagattctttcattcgtctcctcctagcctgggggaccaggctcgaact

SEQ ID NO: 23957 - DNA, 100 bp, Homo sapiens
tcatccaagctgtacagaagtcagaagaaggccatccattcaagacctaaactgccccttcctcgagggtctgtatatcacagagccaaagacaattcag

SEQ ID NO: 23958 - DNA, 100 bp, Homo sapiens
atgaagaagcgcctcttgatgcccagtaggggcctccgcccccgccgcggaccctccgcggtacacctttgcacccagcgtctccctcaacaagacggcc

SEQ ID NO: 23959 - DNA, 88 bp, Homo sapiens
atgactttgagccctaccttactggacagtcaaatcagtgcttagatgagtacgaagatgatgaagcagggcagaaagagcggaaacg

SEQ ID NO: 23960 - DNA, 50 bp, Homo sapiens
ccgggctgccccgcaggatcatcaaggttttaaaatcaaagatgggaaaa

SEQ ID NO: 23961 - DNA, 100 bp, Homo sapiens
cccgaagcggcggcggccgaggacggggacagcgacgacgcggaggcagagaagggaacgcccggcccagccccgcacaccagattaatattggttatta

SEQ ID NO: 23962 - DNA, 48 bp, Homo sapiens
acttgttgcagaaacagccaaggtccagcaagactatgaatctctgtt

SEQ ID NO: 23963 - DNA, 100 bp, Homo sapiens
cctgggagagggggcctagggcgtggagctatgggtcgtggcggaatcggtggtagaggttctccatggtggtacaggatggcatagtgaaggccctgaa

SEQ ID NO: 23964 - DNA, 75 bp, Homo sapiens
cccgcccgcccggcgaccagcaaggtatacataatcaatgtgacctggtctgactccacctcccagactatctac

SEQ ID NO: 23965 - DNA, 75 bp, Homo sapiens
tgggcgcgtcagaacaggcgctgcggctgatcatctccatcttcctggtttctaagctgactaaacaactaatgc

SEQ ID NO: 23966 - DNA, 100 bp, Homo sapiens
cctgcctctgcctgttcttctggaatgtcttgggggttttgatcctgtcactgtgagagagagtggtgctacaatcccctcattcatgaatataatcccc

SEQ ID NO: 23967 - DNA, 75 bp, Homo sapiens
ataagtttggacagttttgtacagtaggaagacaagcactttctcagaagcccgtggccctgctgacgagagaca

SEQ ID NO: 23968 - DNA, 109 bp, Homo sapiens
gtcgagttccctcctcctgcaccaaagggagccgccaccgtctggtgtctaaaccgcctcggtgctccactccagctacgagaactagtaaattgtcgttgggcagaag

SEQ ID NO: 23969 - DNA, 82 bp, Homo sapiens
tagcccgagcgaggatcatgaggcacgatgaaggatttgggggcagagcacttggcaggtcatgaaggggtccaacttctcg

SEQ ID NO: 23970 - DNA, 100 bp, Homo sapiens
ggcagactggtgacttcacttttgagtgcaactgccttccaggtagatttcgggcagacaacttgaacaagctgaagaacctatgcagcaagacaatcgg

SEQ ID NO: 23971 - DNA, 90 bp, Homo sapiens
ggaaggcagtggaaacctggtgctatacacaggagtggttcgggtatgtaactgctctgcgcctgacacgggcaacatggagctgctggt

SEQ ID NO: 23972 - DNA, 80 bp, Homo sapiens
ctagaagcattgctagaagcagcagctctctatcaatatcagctcacatcattgaaaagataattttgaagacatgtttt

SEQ ID NO: 23973 - DNA, 100 bp, Homo sapiens
atgaacagctgaccctacatgatgagaggtttgagaaggagggatttgttcgtgttgaccgagattatgtgctgaagtctgcagagctggcaaaagctgg

SEQ ID NO: 23974 - DNA, 83 bp, Homo sapiens
cttggactgagtcctgcaggacacaggtgagacatggaatccattaaaattgcattatcagttaagaaatgtacgggaacgat

SEQ ID NO: 23975 - DNA, 75 bp, Homo sapiens
tgaaaaagtatcgtcgagaagcctatcatcgttacagaatgtctgaaggggacagtgtgggagaatccgtccatg

SEQ ID NO: 23976 - DNA, 51 bp, Homo sapiens
atcgtcaagtgaagatctggcgcatgaatgatgtgggacctaggaaaaggc

SEQ ID NO: 23977 - DNA, 87 bp, Homo sapiens
actttgttgtcccggtcccagaccaccctcctccaccgtcgcctcccactgcaaaaaggcctggacttcgtgaagatgcatcaactg

SEQ ID NO: 23978 - DNA, 90 bp, Homo sapiens
cgccagccgtgggattaggcttcgccggctacgattgcggagccgcaaagacagcctggaaagtgacagctccacggccatcattcccca

SEQ ID NO: 23979 - DNA, 75 bp, Homo sapiens
tctactacgatgagtttggtttccgtgtgtacaaggaaggttggatggcaagcatgtggtgtttggcaaagtgaa

SEQ ID NO: 23980 - DNA, 73 bp, Homo sapiens
cttgctggatttgcattccttacaggtgcttctcgagtgtggggcgcagtggagggatgcaggtggtctccct

SEQ ID NO: 23981 - DNA, 82 bp, Homo sapiens
gagcggcggccgcgtccgcctcaaggcgcattacgggggggacccagacatggagctgcgggaagaagcctggtctccgggg

SEQ ID NO: 23982 - DNA, 100 bp, Homo sapiens
attgccttattttttctcatggatgttcttcttcgagtatttgtagaaggaaactggcgatggaatatgagaggagccctctggaaagaaaaggacagac

SEQ ID NO: 23983 - DNA, 51 bp, Homo sapiens
gcctggccgacgtggacaccaagctcattcttggaatcccagaacaggcct

SEQ ID NO: 23984 - DNA, 75 bp, Homo sapiens
ggcgtgtggaagaaatacagcctgacggtggccgtgaagaccttgaaggtttgcaatggtctggagcagccaagg

SEQ ID NO: 23985 - DNA, 90 bp, Homo sapiens
ctatggacagacgcacagacacctgcaggaaatcacattctgcctgatgaagatctggcttcctttcactggagtttacttggtccagaa

SEQ ID NO: 23986 - DNA, 90 bp, Homo sapiens
atctccaacagcgacctgagcgatcgcaccccctccctccctggcggagcccctgaaggagctgttcaggcagcaggaggccgtccgggg

SEQ ID NO: 23987 - DNA, 51 bp, Homo sapiens
ctccagcggtgcagaaactgaagaaggccaagatgctgaattatcagggac

SEQ ID NO: 23988 - DNA, 75 bp, Homo sapiens
cgcagtggtcgcttcttctccttgattgttaaaggaaatgggctggcaggaagacagtgaaaatgatgaaacatg

SEQ ID NO: 23989 - DNA, 75 bp, Homo sapiens
tctggatcacggatgtaggaagtggcagcaacatcacagatgctttcctaagccagaggaagtgtgagcccaaag

SEQ ID NO: 23990 - DNA, 50 bp, Homo sapiens
gcggctgcccggcccccgccgcggacaatgcagatcttcgtgaagactct

SEQ ID NO: 23991 - DNA, 98 bp, Homo sapiens
gaaagttcagcgacggcggcagcggccggagccgggccgggcagctagcagggcgcttcggggcaagttaaagtcttcagagccctgtatacgtttga

SEQ ID NO: 23992 - DNA, 83 bp, Homo sapiens
ggactcctcgcctggctcggaagcgtctgcttctgcgctttgcctgggagaggccctggtggcctcgttcctggcgcccggag

SEQ ID NO: 23993 - DNA, 50 bp, Homo sapiens
aaatcgtcaggggcggcggcaaaggactggtgattgcagctggaagtgcc

SEQ ID NO: 23994 - DNA, 100 bp, Homo sapiens
cacaataactgttgatcagaaaaccttccatttccaggatatcccgttgttacagcaccgtttgtagaagagggtgtcctgtcgctatggagtggctttg

SEQ ID NO: 23995 - DNA, 75 bp, Homo sapiens
caaaatccatatgaagaaccaccaaagttaccacgaagccggaagcagagtggtgggggaaaagtagctccagct

SEQ ID NO: 23996 - DNA, 100 bp, Homo sapiens
gcctgaacagagacagcgttccagacaaccaccccaccaagttcaaggtccagagcatccaggtccccaaccaggagttcggcttgagtgagaatgagcc

SEQ ID NO: 23997 - DNA, 100 bp, Homo sapiens
gatctcccaccttagcctcccaacctcaaggaataggttctcctagtgtctatcatgcagttatcgtcatctttttggagttttttgcttggggactatt

SEQ ID NO: 23998 - DNA, 86 bp, Homo sapiens
ctgtcttcggtggactccttcggcagtccacccaccgccgccgcctcccagggtcggcactcttcaccctcccgagccctgcccgt

SEQ ID NO: 23999 - DNA, 98 bp, Homo sapiens
gtcttctatcgctcccatcgtcatctttgcatccaaccgaggcaactgtgtcatcagtgtgctggatcgaaggggtattttgccactggaggaaagtg

SEQ ID NO: 24000 - DNA, 100 bp, Homo sapiens
cttctgcccggcgcttcggcccgggccgctcaggtgcagctctgcttatgataatgtcaacaaagttcgagtagctatcaagaaaatcagcccctttgag

SEQ ID NO: 24001 - DNA, 75 bp, Homo sapiens
gttaatgtggtctcccatgtctcatgcacggacacttgctagtatgttgagagaagttgagagaaaaaatgaaga

SEQ ID NO: 24002 - DNA, 100 bp, Homo sapiens
gcagactacatggcatctaccatagggctcagcaaagacccaaatatcgtcatagccaagatggatgccacagccaatgatgtgccttctccatatgaag

SEQ ID NO: 24003 - DNA, 126 bp, Homo sapiens
caagcccttccactacgaccggccctggcagcgcgccacagcccgcgaagccaacgagtgcgtggagataattgacgaccttgccaacctagtggagaacacagatgaaaaacttcgcaatgaaac

SEQ ID NO: 24004 - DNA, 98 bp, Homo sapiens
tttgatttgccctatgggatgagaacatcaggtctatgttaacaatgaatgggcaaccagtgttggggaaggagggagctttggagaacttgctttga

SEQ ID NO: 24005 - DNA, 100 bp, Homo sapiens
cgccgcggcccagcgagcggccctgatgcaggccatcaagtgtgtggtggtgggagacggcctccatccctgtgagatcactgccctgagccaatcccta

SEQ ID NO: 24006 - DNA, 75 bp, Homo sapiens
tgaacatcagtttacccaatctgcactgcgagttgggcagactgctgatcgagttcacctcacccatgcccctgg

SEQ ID NO: 24007 - DNA, 82 bp, Homo sapiens
gcacgcgggtctgtcatcatgtcgcgttacgggcggtacggaggagataatggcatcagctgctaaggaatttaaaatggac

SEQ ID NO: 24008 - DNA, 100 bp, Homo sapiens
cacacaaagacctcctcctccacaggggagacagagtacatagtggaatgtcatgggatcacccttcttccccagttcttgggcatgtaccggcttaatg

SEQ ID NO: 24009 - DNA, 99 bp, Homo sapiens
ccgtccagcagatggcggatgccctgcagtacctgcagaaggtctctggagacatcttcagcagaatagcctaacatggcagaccagagacagcgctca

SEQ ID NO: 24010 - DNA, 75 bp, Homo sapiens
tggcgatctacttcctctggcaggacccaacagactgcggtcccatggggcggaggctgaaaggagcccgtcgcc

SEQ ID NO: 24011 - DNA, 100 bp, Homo sapiens
cttacccaggagatgctagagaatgatcttctgcaaagccatgaactcatgcagctgcgttcctttgcctgcaacaggggtcaagatgagttttgcctga

SEQ ID NO: 24012 - DNA, 90 bp, Homo sapiens
tggtcaaatctctgcaggaatcagacagagtaaccagagagcacagagaaatgctggtgaaactggccaaacagaacaccaacaaggcca

SEQ ID NO: 24013 - DNA, 108 bp, Homo sapiens
tacggcacttggcgtaaagccgcttccctcaagagtaactacaacttagcagtgtctgcaaaaacgaatcttttcctacaacctgttaactgactggactgttggtaa

SEQ ID NO: 24014 - DNA, 73 bp, Homo sapiens
cagcgccggcctcctccgtgcggagaagaagctgcggccgcacctggccaagtgtaaagaactggccaagtcc

SEQ ID NO: 24015 - DNA, 100 bp, Homo sapiens
ctggcttcttcatctgggttgacttgagaaagaacctaaaggcagacccagaagagctttttacaaaactagagaaaattgggaagggctcctttggaga

SEQ ID NO: 24016 - DNA, 90 bp, Homo sapiens
attcagttacaaattcttgaggcacggtaccttccaagctcatcaacacctctgactttgagtggatccataaagaacccagccaacccg

SEQ ID NO: 24017 - DNA, 100 bp, Homo sapiens
tcgatggctgccgcggctacgctgaggctctccgctcaggtgactctcctattccatctgtttcttcgggatcatcttcacctctttcagccacttctgc

SEQ ID NO: 24018 - DNA, 75 bp, Homo sapiens
gccccaggtgtaagcgcagaaagcaggcgaacccgcggcgcaataacgtggatgattcaacagccacacaaagca

SEQ ID NO: 24019 - DNA, 75 bp, Homo sapiens
tgggaatttgcctgttacatgtaataagaagaaaaccatgagctgttttccaagagcttcatctccatggaagtg

SEQ ID NO: 24020 - DNA, 113 bp, Homo sapiens
atgccgtccgccttctctgtcagctctttccccgtcagcatcccagccgtgctcacgcttcggaaccaaaaagaagcttcccagagccggggccaggagccccaagcgccctc

SEQ ID NO: 24021 - DNA, 74 bp, Homo sapiens
gaaatgaagagttattctcaagctgtcacaggacttctgcagaaagccgtcattacacctgattttgaaaaaaa

SEQ ID NO: 24022 - DNA, 90 bp, Homo sapiens
ttcgactttgagtttacccacgtggagaagccgtatgagtcctacacagggcagaatgtgaagctacgatttttcgaaagaaagcagtgg

SEQ ID NO: 24023 - DNA, 74 bp, Homo sapiens
tgagacccggacagtggcagtgaaacagagtgttctgccagttctggataatccactgtccaagaaggttcgag

SEQ ID NO: 24024 - DNA, 75 bp, Homo sapiens
cacacctgccaagagagcccaggccgagttccccacctgcgattgcgtcggtggggaagaaaacatgacagaaac

SEQ ID NO: 24025 - DNA, 100 bp, Homo sapiens
gagctcctggaactttctcatcttttcagcatctcaaccctgtggaatcttttaactcccaagaatgccagctgatgaagaccgagaggccgcgacccaa

SEQ ID NO: 24026 - DNA, 119 bp, Homo sapiens
acaccaagatggcggacggcccggatgagtacgataccgaagcgggctgtgtgccccttctccacccagaggtcaaaatgcagatcttcgtgaaaacccttaccggcaagaccatcacc

SEQ ID NO: 24027 - DNA, 51 bp, Homo sapiens
cttcgctcgtactcgtgcgcctcgcttcgtttttggctttcacccccaacc

SEQ ID NO: 24028 - DNA, 100 bp, Homo sapiens
gttactgaaggaactggtgatattattaagcaacatggccaacgccctggccagcgccacttgcgagcgctgcaagggcggctttgcgcccgctgagaag

SEQ ID NO: 24029 - DNA, 120 bp, Homo sapiens
catggtgtggggttggtgtgattagcttcgcagtctggaaagctttaggagttcacagtttaagtgggcagaccaacatccacctcagcaaaaacttcttcctgacgaatcgcgccaggg

SEQ ID NO: 24030 - DNA, 98 bp, Homo sapiens
tggggccgccgcctgcggcctttgctgcgggcgccggcgctggcggccgtgccgggagaacccttaggagaaatcttgagagtggacagcaattgtga

SEQ ID NO: 24031 - DNA, 87 bp, Homo sapiens
gggaactgctgacgcttgatgagaaggacccacggcgtctgttcgaaggccagcggaagcctgccacctcctatgtgcggaccacca

SEQ ID NO: 24032 - DNA, 75 bp, Homo sapiens
gcaagaagcaccagttcaagtggccctcagggcatccccgttttcggtgaaaggtgtagcagtcactcggcctac

SEQ ID NO: 24033 - DNA, 100 bp, Homo sapiens
gagaaaatagcaaacgatccagacggcagggagtgcatcaaaggtgtgaacacagtattcctgtgcacacaatatttgacagctgccctgaagggaatgg

SEQ ID NO: 24034 - DNA, 82 bp, Homo sapiens
cagccgcaccatgccgctcctaagcctgcacagccgcggcggcagcagcagtgagagcccgcgggaggactcagactccagc

SEQ ID NO: 24035 - DNA, 98 bp, Homo sapiens
aaaaatccagaagtacaagcagtctggagaaaatgcagaagtctccatggacgtttccctggcttaccgtgatgacgcgtttgctgagtggactgaaa

SEQ ID NO: 24036 - DNA, 100 bp, Homo sapiens
agccctgggtagagcaagacaagtttgggaaggtgaagtttgctgtgctgcagacgctcccagttgaggataaaatcaggatcattgcacagaagatcta

SEQ ID NO: 24037 - DNA, 100 bp, Homo sapiens
cccacatcggggcagctgtatggcctggccagagaactctcggatgagatccaagtccagctctgcagccagatggaacagctggagcaagagaaccagc

SEQ ID NO: 24038 - DNA, 75 bp, Homo sapiens
tttccgtctggcggcagccatcaggagctggaagctatcaaagctcgagtcagggagatggaggaagaagctgag

SEQ ID NO: 24039 - DNA, 76 bp, Homo sapiens
ccagcccagctttgagtccctcatccgagctcagatgatggacttccaaaaccagaactaatatcctggattgaac

SEQ ID NO: 24040 - DNA, 100 bp, Homo sapiens
tctcatcaaaacaccagagcgactttcattagaaggagagcgacagcccaagtcaccagaggagaggagacgccgtgagcgggacgaccagatgtaccga

SEQ ID NO: 24041 - DNA, 111 bp, Homo sapiens
aaattcaaatcaaaagggacactgaaaagtcacaaactccttcacactgcagatgtatgaaaacccatggacaatcccgaatatgttgtcaatgacgagaattggcttggc

SEQ ID NO: 24042 - DNA, 75 bp, Homo sapiens
tccaaagccacccgttggacccaagccaggcatcatgacggtgatgtcagctctgtcggtggccccctccaaggc

SEQ ID NO: 24043 - DNA, 98 bp, Homo sapiens
gcggctgctccgggtgagcagggccggggtttgaagtctcacgcctacattcacagtgtccagtttagccaccatgttttcctcaacctccacaccct

SEQ ID NO: 24044 - DNA, 75 bp, Homo sapiens
catctaaaatacgaaggtttctggctgggtttctaagcatgaattgaggaacagaagaagcagagcagatgatcg

SEQ ID NO: 24045 - DNA, 101 bp, Homo sapiens
ccgaaagaaaccaccttctccagcagaacccgtttccccagtttgctgcttatgtgttcagaacctgctcctgcaagatgacgacgcccagtgctgagagg

SEQ ID NO: 24046 - DNA, 100 bp, Homo sapiens
ttactttctgacaatgcagcttctcttgcagtgcaggcagttatttggcagaaaagcagagtatcagatcacaagatggctctcatgtcagttctgggga

SEQ ID NO: 24047 - DNA, 74 bp, Homo sapiens
cttagccaagagtctgggtctccgggccaacctgaggtggaatgcagtagccctctgggcctgggatattgtgg

SEQ ID NO: 24048 - DNA, 90 bp, Homo sapiens
gaacttcgaaacgtgataagaagcacctggatgagacatttgctacagcatcccacattaagtcaacgcactgaagataaaataccctca

SEQ ID NO: 24049 - DNA, 90 bp, Homo sapiens
cattgggggcctgtggaaattttcagtgaactgtcacccctacaactcagcttgcaaccagccctggccaccagtttccccacactgagc

SEQ ID NO: 24050 - DNA, 82 bp, Homo sapiens
gctcttcctggactcctgagcagagaatgacagcccatatcaaggcggtgtattctttttgacaattcattttcctacagac

SEQ ID NO: 24051 - DNA, 83 bp, Homo sapiens
gacaaaatgcaaaaaaggaggccaaagactttgaaacaaagcttagcaggagaggagagccagagaagtgacagggaagctac

SEQ ID NO: 24052 - DNA, 89 bp, Homo sapiens
ggaaatctggatgccaaacgagattggggccatgccaaggactatgtggaggtctatgaaaattatcctacttatgatttaactgaaag

SEQ ID NO: 24053 - DNA, 100 bp, Homo sapiens
cggtaatgctggtggtctgcatcaccaccggatcaacttcgacaaatagtgacaaagaagctgaagatgggtggtggagagaggtataacattccagccc

SEQ ID NO: 24054 - DNA, 144 bp, Homo sapiens
ctcgccgccacagctttaggaaacacctctacctcctgcgaggcctcccgggctccgggaaaactacactggccagaattcaattcgtcataatctgtccctacacagcaagttcattcgtgtgcagaatgaaggaactggaaa

SEQ ID NO: 24055 - DNA, 82 bp, Homo sapiens
agcagggccttggaccccgcggcgcccctcggcctcggagcaacgagcgcagcgccgggggatatgagactttctactcgga

SEQ ID NO: 24056 - DNA, 90 bp, Homo sapiens
actcattgttaagcacaagttcacgaaagcctacaaaagtgtggagaggttccttcaggaggatcagagttgtggaaagtaaaaatgtag

SEQ ID NO: 24057 - DNA, 50 bp, Homo sapiens
acgaatacacctcaatgtctctggatgcagaaggctatcaacaggctgag

SEQ ID NO: 24058 - DNA, 100 bp, Homo sapiens
ggatttaacgaaggattgtgggaaatagaaaataacccaggagtaaagtttactggctaccaggcaatccacatggagactgatccccagaccatcagcg

SEQ ID NO: 24059 - DNA, 100 bp, Homo sapiens
ctcagagacctggctgtgcacattgcccatagcctcaggaacagtccagactggggaggtgtggtcatattacacagctcatatttgatgccgtgctcaa

SEQ ID NO: 24060 - DNA, 98 bp, Homo sapiens
gcagccaatgacggccccatgccccagacccgagagcacttattactggccagacagagttgccatataatgattactttgagtattttggaccagac

SEQ ID NO: 24061 - DNA, 140 bp, Homo sapiens
ctgactggtagaagcattcgtgcagacagggcaaagaaaatgggactggttgaccaactggtggaacccctggagatcccactggcattgttggtggtaggcctgggcgggggcagcctccccctctttgtccacgatca

SEQ ID NO: 24062 - DNA, 100 bp, Homo sapiens
ctaacatcagaagagtttgctaagcttgtgggaatgtctgtcctcctagccaaagaaagatgctgaaattttcttctaaggagaaatatcccttatttac

SEQ ID NO: 24063 - DNA, 90 bp, Homo sapiens
cggatgagttgcttttaggcttgctggcccgcggggctgtccaggcacgcgaggcccctcagggaaatcctcattgacgattcaatttgt

SEQ ID NO: 24064 - DNA, 75 bp, Homo sapiens
taatcctcaatttaagcctgatctaacccctagaaacaggaagaggatcacctagcccgggtagaagaggcaatc

SEQ ID NO: 24065 - DNA, 74 bp, Homo sapiens
cgctcatcaagcagcaggtccttaagaagaaggctgaagctgcacatcggattctggaaggcctggggccccag

SEQ ID NO: 24066 - DNA, 96 bp, Homo sapiens
cgcgggcaggagcctggcgaggatgcaccttcccctgccttggaaagatggtagtgaaaacctttatggatatggatcaggactcagaagatgaaa

SEQ ID NO: 24067 - DNA, 100 bp, Homo sapiens
gacccaggaggagaaggagctactggaagtcatcgggaaagggctgaccccacattggacaccgctgcatccatgtccatcacacaacacagctgccgtt

SEQ ID NO: 24068 - DNA, 51 bp, Homo sapiens
cgaatagattatcaaggaaggccatcaggcgtcgaccagaagattatgata

SEQ ID NO: 24069 - DNA, 100 bp, Homo sapiens
tcagtgagggtagctggtgcagaagccattttttaaacttaggtatttaagtactgaaagccaagaaggatcaagaaggtggagaagaaaagaaatctgt

SEQ ID NO: 24070 - DNA, 98 bp, Homo sapiens
ctggctgacggcaggctgtaccatcgccactgcttccggtttgtgggggagagaaaccttatttgtctccagacattctagaggagaagcactgtgaa

SEQ ID NO: 24071 - DNA, 91 bp, Homo sapiens
gctacctttgaccggcaggagctgcagcgcaatgtcatctccagcaggacggaagccttcccagtcctgcagccacctgcagactctcaca

SEQ ID NO: 24072 - DNA, 95 bp, Homo sapiens
tggcctccatcttcggcaccgagaaagacaagctggacggcagtctggaaacgaccaatgagatcttggactctgcctctcacgactgcccctta

SEQ ID NO: 24073 - DNA, 85 bp, Homo sapiens
gccagggaaccctggtcaccgtctcctcagactcggtgaaatacctggagtgctcagctctcacccagagaggcctgaaaaccgt

SEQ ID NO: 24074 - DNA, 101 bp, Homo sapiens
ggtgtcagtgttaaaggaacctctacaacgaaggtgaagccacggaagataagcaacatggccaacgccctggccagcgccacttgcgagcgctgcaaggg

SEQ ID NO: 24075 - DNA, 101 bp, Homo sapiens
tgctgggtccgctgagcggggcgacccgagaggcacatttgatatttatgtgaaatgtgatggtgttggaagatgtgttggtaactatgataatcgtggga

SEQ ID NO: 24076 - DNA, 100 bp, Homo sapiens
ccttcagaaacagtgctgaagcctttaaatgcagcatctgcgatgtgaggaaaggcacctccaccagggtatttgaagtataccatacaactgttttgaa

SEQ ID NO: 24077 - DNA, 100 bp, Homo sapiens
cccctagaccggtttttagtccattgactatgcagcctaatgtttcagatacaccacctccaccgccacctgtggaagaaccagtctttgatgagtctcc

SEQ ID NO: 24078 - DNA, 75 bp, Homo sapiens
cggatgaggagaccctggaagacaatctaagaattccatcgacagagaggagaaaatacatctggggaatttgcc

SEQ ID NO: 24079 - DNA, 75 bp, Homo sapiens
ctttgccttcctacaaacaggaaattacaaagaggccaagaagatcattgaggccagtactaaagtggaagtgga

SEQ ID NO: 24080 - DNA, 90 bp, Homo sapiens
tttccgccggggcatcgcgctgttggaaagcggctgcgtagacaacgtcctgcaagtcgatctgtgccatcattggcgggaccttcaccg

SEQ ID NO: 24081 - DNA, 90 bp, Homo sapiens
cattgagcaggctacagtccactccagcatgggtcggtgtacccgagagaactgcaagtaccttcaccctcctccacacttaaaaacgca

SEQ ID NO: 24082 - DNA, 83 bp, Homo sapiens
gctgatatgcaatgtcacttacaacattaatcagatactgcatttaagagcccaaatcttgtgacaaaactcacacatgccca

SEQ ID NO: 24083 - DNA, 126 bp, Homo sapiens
ctcgcccccacctgtggactctgaccgcaaacaaggagagcctactgagcagcctgagtgggaatggtcctcgtccgaagtgagaatgggcagttgttaatgattcctcagcaggccttggcccag

SEQ ID NO: 24084 - DNA, 90 bp, Homo sapiens
cggcaggctgaggagaaagcggcgcgcggagaatctgaattatccagaacagaaagttgtgactgttggacagttcaaaattggtctgat

SEQ ID NO: 24085 - DNA, 51 bp, Homo sapiens
ggaagcgtcgggattaggtgaaacatcatcggctggttcgtgcgaagcttc

SEQ ID NO: 24086 - DNA, 76 bp, Homo sapiens
ctcttgccaaaaacctttggacagtccaatgtcaacattgcccagcaagtgcctgacatttaccccggtaactgct

SEQ ID NO: 24087 - DNA, 100 bp, Homo sapiens
gctggttagtgtgctctgagggagggtccgagccagccgctgttttgccggaggagcccctcaggccgaaatacaactggagcacgcaaagcaagccttt

SEQ ID NO: 24088 - DNA, 83 bp, Homo sapiens
ggctgctgctcctctggactccccaaggtgagaagccctaccactgcaactgggacggctgcggctggaagtttgcgcgctca

SEQ ID NO: 24089 - DNA, 73 bp, Homo sapiens
actggctgtgtgctgccacaggccccagcatcaagatctggataggtgcagatggtcacaactccggagtacg

SEQ ID NO: 24090 - DNA, 100 bp, Homo sapiens
gacttacggtgtccattattatgcagtaaagatattttggagtgtatacaataatatccctcctgtgactagcctgcctttgagatgtagttatcattta

SEQ ID NO: 24091 - DNA, 100 bp, Homo sapiens
gtacatttcaagttggtcgcggcttgggctccgctttggggaggggcagcagtttctctgtttgaagaacataaggacatttctcacggcctgttgtgag

SEQ ID NO: 24092 - DNA, 75 bp, Homo sapiens
gaacacccagccagcagagtccagaatctatgatgaaatcctgcagtccaagacctatgaggaccagcacagcag

SEQ ID NO: 24093 - DNA, 100 bp, Homo sapiens
ctcggagatcatcacgtttgccgagtcaggtcagtttgctgagaacgaaaccaatgaggtcaattttagagagataccttcacatgtgctatcgaaagta

SEQ ID NO: 24094 - DNA, 85 bp, Homo sapiens
actgcactaccagaccaccaagcagaacctctggttggatggcaagcatgtggtgtttggcaaagtgaaagaaggcatgaatatt

SEQ ID NO: 24095 - DNA, 100 bp, Homo sapiens
gacagactcatggggaagggccaggtccagattgcaagttcacctgccactaccgctgccgcgcgctcgtctgcctggactgttgcgggccccgggacct

SEQ ID NO: 24096 - DNA, 101 bp, Homo sapiens
acccagacgtgcaacaaagtgcgatggatggcttaaattccttggtccttgatttagattttcctgctttgaggaaaaacaagaacatagataatttctta

SEQ ID NO: 24097 - DNA, 90 bp, Homo sapiens
cccagacttgggtgttacaggaacagtgtggcctctctggaactctgcagaccaactgccgtggactatacaggctccaacccaagttcc

SEQ ID NO: 24098 - DNA, 75 bp, Homo sapiens
aaagtcctctcgggagaagcagcgcctgttcccggggcagatccaggttcaggctgaccaactgactgaagagca

SEQ ID NO: 24099 - DNA, 74 bp, Homo sapiens
cccagccaggagaccctgaccaggaagcgggtctctgccagttccccaagttcaagcactgtcttcctgttggc

SEQ ID NO: 24100 - DNA, 83 bp, Homo sapiens
cgagcctccttcgccgcgccccacttgctcgtgcactttacacacatgaggtatcgagaaccttccctgcgaacttcagagga

SEQ ID NO: 24101 - DNA, 99 bp, Homo sapiens
gcagaactcgtgattgtcggggggaaagacatccagggctccttgcagacaggtgatttggcttctgcacagttaggaggagcaccaaaccgatgggag

SEQ ID NO: 24102 - DNA, 75 bp, Homo sapiens
cggagacctacctgcggcgtcggcagctgctgctccgagcaggagcgagaacccgagcagcgccatgagcaacac

SEQ ID NO: 24103 - DNA, 75 bp, Homo sapiens
gtggcatggatgattgcacttcactctggcgaccactttatcaagttcttcgctccgtggtgtggtcactgcaaa

SEQ ID NO: 24104 - DNA, 100 bp, Homo sapiens
cggccgctcaaagccgggagatcgactgtttgagcccggaagcgcagaagctgatgccatggacaatattaccaggcagaaccaattctacgatacccaa

SEQ ID NO: 24105 - DNA, 90 bp, Homo sapiens
gacaagatggacaccgcggaggaagaatgtgaaagatgttgcagaagtgttccagaagtggctgaagatagaaggaaaaaagtgccactg

SEQ ID NO: 24106 - DNA, 87 bp, Homo sapiens
ctccatggcacagctgctgacctgtgctgctcaaggcaacgaacactacacagagtaaacatcagtctccaaagataactacatccc

SEQ ID NO: 24107 - DNA, 78 bp, Homo sapiens
ttttcttctcaccatttctggccaaaactacaaacaagacttcgcagggtatctcccagagccccagctggtgtggcc

SEQ ID NO: 24108 - DNA, 53 bp, Homo sapiens
gtgatgtggaggaggaagagctcaggtggaaaaggagggagctgctctcaggc

SEQ ID NO: 24109 - DNA, 78 bp, Homo sapiens
cagttatgtgtgacagagcaggatttattcaagatactagccttatcctctatgagttgccgatatggagctgctgag

SEQ ID NO: 24110 - DNA, 50 bp, Homo sapiens
gccgtggccccgagggcggatccgaggaatgggacgcgagagataaagat

SEQ ID NO: 24111 - DNA, 74 bp, Homo sapiens
ccagggaaccctggtcaccgtctcctcagcattgtaggtttaacactcaatgtacaagaccggactgcacattc

SEQ ID NO: 24112 - DNA, 83 bp, Homo sapiens
cggcgctgagaggggctgcggccggagcgggcggctgagacaaaggcgacgctatgctaagaaggaatctgatcttaatggcg

SEQ ID NO: 24113 - DNA, 100 bp, Homo sapiens
gacggaccaccacaggatgtccggcgggaggcaggagctgaccatgccactgcctcggtacggctccgggcagcagccactgatcctgccccagtctatt

SEQ ID NO: 24114 - DNA, 101 bp, Homo sapiens
ttgtattgcaatcatggtgcagaaataccagtccccagtgagggtgtacaaatacccctttgaattaattatggctgtggcacaagatctctgtaaagtag

SEQ ID NO: 24115 - DNA, 75 bp, Homo sapiens
agaaagccgaggctggggctgggtcagcaaccgaattccagttttgtctttggtgcaacactaacaaggcttgtc

SEQ ID NO: 24116 - DNA, 90 bp, Homo sapiens
gttgcttcaaggacacagcttgcattggatgactacatggaggctttaacaagacttcacattactgtttctaaagcctacaaagttaac

SEQ ID NO: 24117 - DNA, 100 bp, Homo sapiens
tttggtcatgatatcactcctcagcttatccccaaatcacctgtttctggcccagcttattccagatcctgggaagactctgcctgaagcccttgattat

SEQ ID NO: 24118 - DNA, 75 bp, Homo sapiens
gaacggagtgtgcgacggattgggagagctacttcctcagccgagcccagagcctgtgtggccccgagcacagtg

SEQ ID NO: 24119 - DNA, 82 bp, Homo sapiens
gtcggaccccacaggcccacagagacagtgtactaatggtcacttgatgtgcgctggctgttttatccacctactagcagat

SEQ ID NO: 24120 - DNA, 82 bp, Homo sapiens
caggaagaacccatcgggcagctacacatcttgaaagagaagctcttcctgtgagatccgacgtatcctgaagggaaagtcc

SEQ ID NO: 24121 - DNA, 75 bp, Homo sapiens
tcgtctagacttgtgatctccaaaaacctcaaccagaaccctcggactttgctgcctaaattctatggactgtac

SEQ ID NO: 24122 - DNA, 100 bp, Homo sapiens
tgcacagtgctttccaggcccagcgggctttccttctgatggcctctcagtaccaacaaccccacgaggtaagaatgattgatgttggctgatattggag

SEQ ID NO: 24123 - DNA, 90 bp, Homo sapiens
cccaagtgtcctccactagcaacgatgttagttcttcagattttgaagaagggccgtcgaggaaaagatggaggagatgtataagaaagc

SEQ ID NO: 24124 - DNA, 75 bp, Homo sapiens
gtggcgggaaacgctgtttgaagcggattcatgatgttgctatcaaaagttgagaaattgtcagaagaaatcatg

SEQ ID NO: 24125 - DNA, 85 bp, Homo sapiens
atgtgcataaaattcaacccagctttcaaagtccagtcaaaatatcaggtggactattccataatagcatcacaagccggagcca

SEQ ID NO: 24126 - DNA, 96 bp, Homo sapiens
ctggcgggaccggtttggaagactttgccggcctgcaggtgctggagaatctggtaaaagcaccattgtgaagcagatgaggatcctgcatgttaa

SEQ ID NO: 24127 - DNA, 98 bp, Homo sapiens
atccatggaggagggtgcattctgggtgatgacatgggacttggaaaaacagtacagcttcttccagaccagctggtcttgcttctggagcatctctt

SEQ ID NO: 24128 - DNA, 100 bp, Homo sapiens
aaatccaggctggccaggagcacccggtgtcccagggcccaagggagaccctggattccagggcatgccttttcttaaacaattaggtctacatcctaac

SEQ ID NO: 24129 - DNA, 97 bp, Homo sapiens
ctcaacatgaacaactacaaaggctatgaaaagaagccctattgtaatgcgtaatggtttttacaaaggaccaaacagaaaaggaaatagatgaaat

SEQ ID NO: 24130 - DNA, 100 bp, Homo sapiens
ctccccttggtgaagagcctacttggcccctaccttgttttcatggcatccaccatcaatgggaaagtcgtggaaggcgctgacgctgtcccagaagagg

SEQ ID NO: 24131 - DNA, 100 bp, Homo sapiens
cagagtcttgctctgttgcccaggctggtctcgaattcccgacctcaggtaatccacctgccttggccccccaattataggtgtgagccacagcacccag

SEQ ID NO: 24132 - DNA, 100 bp, Homo sapiens
ttaaagtctctcttcaccctgccgtcatgtctaagtcagaggtaaaccggagcactgctcttctgaagagcttgtctgctgaacgtgaacgatgggaaaa

SEQ ID NO: 24133 - DNA, 100 bp, Homo sapiens
gacatcctctgcagccagaagaacaagaagtaggcattgaccccttgtccagttactctaacaagtctggagtgtacccgtgtaatgtggacaccacctc

SEQ ID NO: 24134 - DNA, 75 bp, Homo sapiens
ggattccaagtaactcttatttgctcaaatagctataactgtaccaaagacatggaagaaaccaaaagatcggac

SEQ ID NO: 24135 - DNA, 50 bp, Homo sapiens
atcactaccaagcttctgaccagaccctcctggatgacttccttctcacg

SEQ ID NO: 24136 - DNA, 103 bp, Homo sapiens
tggaaaacaccacttttaagtatcttacaggagaacagactgaaaaaatgtggcagcgcctgaaaggaatgatccttcaaaccaaaaatgtggtggaagaaag

SEQ ID NO: 24137 - DNA, 75 bp, Homo sapiens
gaaatgttcaagtttaccaaaagagaggcaccgctggaacactaatgagacaaatttacatgtattggagaccag

SEQ ID NO: 24138 - DNA, 88 bp, Homo sapiens
atacccacagtacggctggcagggtggacctcaggagcctcctaaaaccacagtttcctgcccggctctgaacacccccgcagacggc

SEQ ID NO: 24139 - DNA, 75 bp, Homo sapiens
gcagccagcacggccaaaccccctcctctgcctcgctccaacacagattcctggtcgggtggcttccagtggtct

SEQ ID NO: 24140 - DNA, 83 bp, Homo sapiens
ctcagcctcccgggtagctgggactacagatcatcaccgaccgacctggctttcatgatgagagtgccatctaccccgtgggc

SEQ ID NO: 24141 - DNA, 82 bp, Homo sapiens
ggctcacctggcggtgcccgaggagtagtcgctggagtccgcgcctccctggggcgaactttctgaccaagtatacaactac

SEQ ID NO: 24142 - DNA, 82 bp, Homo sapiens
caagaaggacgtcaacctcagcaagactgagaagatgaataccaagctgctattttacacttgaagagggagcacaaagaag

SEQ ID NO: 24143 - DNA, 75 bp, Homo sapiens
cccctgttgggaaatgattctactcggacagaggaagttcagagtcaagggtccagagaaggaggagaagttgag

SEQ ID NO: 24144 - DNA, 100 bp, Homo sapiens
tggaaaccagctgcgctgtcctaaatgtggcgacttgtgcacacatgtagagacctttgtatctatccagtcagttcgctgctattcccatgggtcacag

SEQ ID NO: 24145 - DNA, 75 bp, Homo sapiens
cggcgggaccggccgctgggtcccagcgagggctgagccgggcggtgggaggggtattccctcagcggatactac

SEQ ID NO: 24146 - DNA, 100 bp, Homo sapiens
ggaacctcaaattgcggcagcggaacctaaagtttcaggattgagaggatccagaatccagatctctggaatagctaccaggcaaagaaaaaaactatgg

SEQ ID NO: 24147 - DNA, 82 bp, Homo sapiens
atggtcggcggcgcccggatgggcagctgagtgcagggctcgcggcctggcaagaatgtacagctgacagagaacgagatcc

SEQ ID NO: 24148 - DNA, 100 bp, Homo sapiens
gaccctcaaacagcagtatgatgaactggaggctgagtacgacagcctcaaacaggagctggagcagctcaaagagggtttggaaatcccttgtctccag

SEQ ID NO: 24149 - DNA, 100 bp, Homo sapiens
cagcagttgagcgagcccgaggacatggagatggaaggtgtgagtcatcctgttctaaagcaagttgctgaacagtttctcaacatgaggggtgggcttg

SEQ ID NO: 24150 - DNA, 75 bp, Homo sapiens
acggcagggtctgaggtcatcggggatgtggacgaaggggccgacctcctaggcataatcaccagcaacacccgg

SEQ ID NO: 24151 - DNA, 100 bp, Homo sapiens
aaaactgggtgcagagggttgtggagaagtttttgaagagggaattccaaatgaaagctggagaataacaaagataaatgaacgatatgaactttgtgat

SEQ ID NO: 24152 - DNA, 100 bp, Homo sapiens
ctggaccctgcccagcagaatttgtatagagatgtgatgttggagaactacagaaacctggtctccctagcccttcagcatgccggcaaacacatggagg

SEQ ID NO: 24153 - DNA, 114 bp, Homo sapiens
ttcctataatagtcaagaaacctgtgtgatgactccttccccatgttctacaccaccagtcaagagagcagtcctacatggaaagtgttgtgacttttctgcaggatgttgtgc

SEQ ID NO: 24154 - DNA, 100 bp, Homo sapiens
aggcatgtttctgggacaaatgagattgcgcagtctctttgtggagaggacttgatcattaaaggaatcagcgttcatatatccaatgccgaacctaagc

SEQ ID NO: 24155 - DNA, 75 bp, Homo sapiens
ctggccatttaggagctctgctcaaagccagacgaacattgacatcaccaatttcagcagcagctggagcgatgg

SEQ ID NO: 24156 - DNA, 90 bp, Homo sapiens
gggaagacctgcgtcctttttcgtttttcggatgatgccttcaatactacctttatttccaccataggctaactatatgtcagaaagcat

SEQ ID NO: 24157 - DNA, 98 bp, Homo sapiens
tgcaccagagaaagaagcagcgattcctcagtaaacacatctctcaccgcggagatgtctttggtggacttgggaaagaggttgctagaagcagcaag

SEQ ID NO: 24158 - DNA, 82 bp, Homo sapiens
gccagtcataatagatttcgagacaacagtggccttctgatgaatactttaaaccgcctggacattagggcagcccggattc

SEQ ID NO: 24159 - DNA, 82 bp, Homo sapiens
ctgggtgtcgcgggccggccccgcggggagcgcccccggcgcgatgcccttcaggaaaggacaggctgcgggaggagctgca

SEQ ID NO: 24160 - DNA, 101 bp, Homo sapiens
ttgccgaaattatttgcgcatttcaagaagaacaacctaactccagatatctacctaattgattggctgcctgctgtttcccggggagatcatgaaacgag

SEQ ID NO: 24161 - DNA, 83 bp, Homo sapiens
tttcttgaagaagtcttatgccctcccaacatttgaagacacttcgtcacccttgcttgctaagatttttatcttgtactgtg

SEQ ID NO: 24162 - DNA, 101 bp, Homo sapiens
gatgattttgagcgtcgcagagaacttagaaggcaaaagagggaggagatgcgactcgaagcagaaaggtgttcttcagatgatgcagacgagaattgggg

SEQ ID NO: 24163 - DNA, 100 bp, Homo sapiens
gggaggatcagcctcctgagagctgccagcacgagtacacgagacaggattgagaaaggagagattcaaattgtgacttcagattcaaaggcaattaaag

SEQ ID NO: 24164 - DNA, 113 bp, Homo sapiens
gagagaaccaaatcacaataagtctttagctgcaggtgtgtgggcccaaagcagtgtccacaccagcaccagctacaactcagcagtcagctcctgccagcactacagcagtt

SEQ ID NO: 24165 - DNA, 95 bp, Homo sapiens
gcagggcagctggcctctgggcaccggcggcccctctgcctcgcggaaaagaaggacttcacggtgcgcgaggagctgcagcagcaggacgtgga

SEQ ID NO: 24166 - DNA, 100 bp, Homo sapiens
aggaaaggaaatgatgccatcgtagtagaacaatggactgttattgagggtggagagattcaaccagttagcgtgaaagttggagataaagttcttctcc

SEQ ID NO: 24167 - DNA, 74 bp, Homo sapiens
agggtctggaggagccttctcaagaacagagataagccaatggacacgtcagtgttatctgaagaaggaggaga

SEQ ID NO: 24168 - DNA, 90 bp, Homo sapiens
tgactgagagaaacccactgaagacgtctgcgtgagaatagagaccaccgagaggtcagcagaactggctgcagttagatcaccgagttc

SEQ ID NO: 24169 - DNA, 100 bp, Homo sapiens
ggaacggggctcccaggacctccactaatcaccagaacaaaatgtgcagctggctgtcccaactccttgattaaagagctccatcacttcaggattctgg

SEQ ID NO: 24170 - DNA, 110 bp, Homo sapiens
atcaaaactgccttcagaagcaaaagggcagctgcaatgactctccgcacggtattattgtcattgcaagcactattggcagctgcagagccagatgatccacaggatgc

SEQ ID NO: 24171 - DNA, 90 bp, Homo sapiens
gtcagtcgccagtcagtgttgtgtggaagccagaacatcgttctcaatggcaagtttgaagaaaacaggtctgaaacaaggtcttacccc

SEQ ID NO: 24172 - DNA, 83 bp, Homo sapiens
cccgcggagacccttcgagaaatctcgtctcgaccaagagctgaagctgatcggagcctcagggaacccagccagcacagcag

SEQ ID NO: 24173 - DNA, 130 bp, Homo sapiens
agcggaagcaacagtcggaggatgaaaagctgaagcgctgtacccggtgctaccgtgtgggctactgcaaccaatggcagtggcagcaccatgatgcaaaccaagaccttctcctcttcctcctcatcca

SEQ ID NO: 24174 - DNA, 83 bp, Homo sapiens
ataaatcccaaacttcttaacccctagaccggtttttagtccattgactatgcagcctaatgttggaggacgagtaagtcgtg

SEQ ID NO: 24175 - DNA, 80 bp, Homo sapiens
agctttgacaatacaggaaatgtttgtttttagaacttcagccataaaaatgggcagaattttccttgatcatatcggtg

SEQ ID NO: 24176 - DNA, 97 bp, Homo sapiens
ggagaatggcatgctggtgacggacagtgcagggaagcaactgcagaggcgaactctccagggcctgcagctggatctgcccctggaggaggagacg

SEQ ID NO: 24177 - DNA, 83 bp, Homo sapiens
caaagaggagctgatagcggagctgcagatgatgataattccgaagaaggcttccacactattcattcaggaaggcatgaata

SEQ ID NO: 24178 - DNA, 90 bp, Homo sapiens
ctcttggggctctacctctttttcaaaacaggtgatttggcttctgcacagttaggaggagcaccaaaccgatgggaggttttgtcagcc

SEQ ID NO: 24179 - DNA, 95 bp, Homo sapiens
aaaatacaaatcatggagccgctggggtcccttttgcctcagatactattttgaaggctgggccagtaataaaggtgaaaattccaaaagataag

SEQ ID NO: 24180 - DNA, 100 bp, Homo sapiens
gtgtgttgtttgggggcttctgcctcgccgccgcgggtgccacctcccgggacgctgcccacggcgtccccggtcgcgttattgccagtttccgaggaac

SEQ ID NO: 24181 - DNA, 97 bp, Homo sapiens
tccttctgcctcagtcccaattggctaggactgcaggcacacaccaccagacccagctaatggaaaatttgttggcagattgtttgcagggttgttt

SEQ ID NO: 24182 - DNA, 88 bp, Homo sapiens
tacctaccaccttagtcgtttatttcttccgagttagaaatcctacaaaggaccttactctttttgatcagaacaatgctgcaaaaaa

SEQ ID NO: 24183 - DNA, 97 bp, Homo sapiens
aaccggtatattgcaaataccgtagaggaggctgaaccgtctgagcccagaagtgctgaggtgacgaggaagcccaaggctgctgttccttctgtga

SEQ ID NO: 24184 - DNA, 90 bp, Homo sapiens
caaggggacgacagcgtcgttattgggatagttttgtgccagaataatatccataatcaggcccatatgaacagagtggtcacacacgag

SEQ ID NO: 24185 - DNA, 73 bp, Homo sapiens
tttgcctacatctcctcggttcccatcatgccttatccacctgccgctgtacctacaacaagaaaggggcctc

SEQ ID NO: 24186 - DNA, 100 bp, Homo sapiens
ttgtgaaggagggttggctgcacaaacgagctctgtgggcaccttcgcacgggccctggactgcagcagctccgtccgacagcccagcctgcacatgagc

SEQ ID NO: 24187 - DNA, 100 bp, Homo sapiens
ggatgggctggagacaacagaaacagaaacgattgtggaaacagttggattggatgctgctggcaagacaaccattctgtataaactgaagttaggggag

SEQ ID NO: 24188 - DNA, 83 bp, Homo sapiens
ctccactttcgccagcccgtgccgcgagcgcggcctgcaggaggtgtgggcaagagcagtttactgttgcgttttgcagacaa

SEQ ID NO: 24189 - DNA, 51 bp, Homo sapiens
ggatggagtgcctccaaaggttgctgagaggggtggtgcacttaagaaagg

SEQ ID NO: 24190 - DNA, 90 bp, Homo sapiens
gctctagcagaggaaaataagaacacagtggatgtcgagaacggtgcttctatggcaggatatgaaccatatttatttagagtcagaatg

SEQ ID NO: 24191 - DNA, 76 bp, Homo sapiens
cagcaggcggacgtggtcctggttctgcagcaggaggatggaaaaatatattcagggggaagagatgtaatagatt

SEQ ID NO: 24192 - DNA, 98 bp, Homo sapiens
aagcccagtgccctcaatggtacagaaatcacccaggataacccctccagcggcaaagccaggctctccccagcttagcagtgtctgcaaaaacgaat

SEQ ID NO: 24193 - DNA, 100 bp, Homo sapiens
ttatttactttcccatcaggtttcctgatgtgagcaggtaaacactacacgtgaagagtggtgaaagggaacattgattactgaagtgccctggagaggg

SEQ ID NO: 24194 - DNA, 75 bp, Homo sapiens
taaagcctctggaagaggtgaagttgggaaactgcggattgccaagtttcagcgttaaaaacaatggccagtcag

SEQ ID NO: 24195 - DNA, 100 bp, Homo sapiens
ctccatgaaggctactggcaggagcacatgagagagtttaaaattggtggtgaatggtggacatggatcgattataaccgcttccaggagctcatccagg

SEQ ID NO: 24196 - DNA, 83 bp, Homo sapiens
gtctcaatctctggaaaaacttcttgccaaccaaatgaccaaagacttgaccactcaaagtccagctccccagaacactgctc

SEQ ID NO: 24197 - DNA, 75 bp, Homo sapiens
tgaaaatttcaaagtaaaggatattattagaattctgccatgcaagttggatggcaagcatgtggtgtttggcaa

SEQ ID NO: 24198 - DNA, 98 bp, Homo sapiens
attaagccatcaaatgtggaacctatggaaaagggctcgaccacttactggatgagaacagagtgccggacctcgcacagatgtaccagctgttcagc

SEQ ID NO: 24199 - DNA, 75 bp, Homo sapiens
gaggtcgctccccatccactctcacaaggtatgatctcgtgaaaccttgagagaaactgaatgacgaatgaaact

SEQ ID NO: 24200 - DNA, 83 bp, Homo sapiens
ctgaaaatcctagggggtgttggactcttctttagctttacagaggtggatttgtttaaaaagagtcttctgttgattcctat

SEQ ID NO: 24201 - DNA, 100 bp, Homo sapiens
caaattcattcttgacctcatactgaacaagcaagaagttatgaaatggaatggatggggatataatgattctaaattcatcttcaataagaagggccaa

SEQ ID NO: 24202 - DNA, 83 bp, Homo sapiens
agatcaagcactggaaccgcttccgagacgtctgggaagatccgaggtatctcctggagaagccatctatgatgtcattgggg

SEQ ID NO: 24203 - DNA, 87 bp, Homo sapiens
attcagctggacagaggggtaatagagcaggcaacagctaaacatacagcttttgccacattccctaatgaaaaagcagctataaag

SEQ ID NO: 24204 - DNA, 101 bp, Homo sapiens
ggcccccagcatgggctcctctgtcaatgacgctttaaagagagataaagatgccatttatggctgcacagttggggatcttcaaaccaagatagatggct

SEQ ID NO: 24205 - DNA, 98 bp, Homo sapiens
aaaatgtgcaggtgctggacttactgagcgaactcaaggacgtgacggcgaaaaaggaccttgagctccgaagacgactaagctaccggagagccgcg

SEQ ID NO: 24206 - DNA, 82 bp, Homo sapiens
cgggtgccgaggagcgggaagagttgctggggatgaaacaggcgcctatttaatcgacagagaccccacctactttgggcct

SEQ ID NO: 24207 - DNA, 74 bp, Homo sapiens
gtgctaaagccctgcgggctggaggagttcctgcagaagcgtcttggctgcccacaagataatggctagctccc

SEQ ID NO: 24208 - DNA, 90 bp, Homo sapiens
gagagtttatcttccttcggcttaatgttcttcgtgagttctaggtctcgttccagatcatattctccagctcataacagagaaagaaac

SEQ ID NO: 24209 - DNA, 100 bp, Homo sapiens
gtcactttatctcctttaccttgtggaaatgatttcctcaggactccagattatctacaacactgatgagtctcttgcatggcaccaagaatgttaccaa

SEQ ID NO: 24210 - DNA, 82 bp, Homo sapiens
tttgtgcatgggagctaaaatagaactgtggctgcaccatctgtcttcatcttcccgccatctgatgagcagttgaaatctg

SEQ ID NO: 24211 - DNA, 100 bp, Homo sapiens
cggcggcggcagctccagcggaggccacaagtcctcctcttccgggtccgtgggcgagtcttcatctaagggaccaaggccaaacgtaccaagaaagtcg

SEQ ID NO: 24212 - DNA, 75 bp, Homo sapiens
agagagtgattgctcttgaaggagatattgtcagtgggagattttgataagatctggcgagaacactgtgaggat

SEQ ID NO: 24213 - DNA, 82 bp, Homo sapiens
aagagcatcttccgcattcatacagaaactggcaacatctggacccatctgcttggttaacatgccttatgtcatgatccca

SEQ ID NO: 24214 - DNA, 100 bp, Homo sapiens
catctggctgcagctggagctctgcgccatggccgtgctgctcaccaaagcaatgtgaggaaagtggaatgaacttggactttgaaggcaaactaacctg

SEQ ID NO: 24215 - DNA, 113 bp, Homo sapiens
gttgacacacctcatggtatatttgcagccagtactctatatgaacaatccgtctggatcacggatgtaggaagtggaggagatgttaaagtaacccatcttgcaggacgaca

SEQ ID NO: 24216 - DNA, 90 bp, Homo sapiens
acaagtacctttatgaaccagtgtatcccaagcaatggtggcttgctatccgggaaatggaacaggttatgttcgccacgtggacaaccc

SEQ ID NO: 24217 - DNA, 74 bp, Homo sapiens
caccaggccggcaggctgagaaaagcgagaccgcgtgcgaggaccggttcaagggcagcaggaaagacgagatc

SEQ ID NO: 24218 - DNA, 97 bp, Homo sapiens
aaatctgaacaaaaaattgcagttttggatacaatgtctctttgctatatgaccttgaaaatcttccggcatccaaggattccattgtgcatcaagc

SEQ ID NO: 24219 - DNA, 100 bp, Homo sapiens
agggctggtgggcgatgggcccgtggacatgcgcacctcacacagatgccatggacaatattaccaggcagaaccaattctacgatacccaagtcatcaa

SEQ ID NO: 24220 - DNA, 75 bp, Homo sapiens
caggattcttctttgcagcaaacctagaggatcaagacataatgggagcatttttagacaagccaaagatggaaa

SEQ ID NO: 24221 - DNA, 100 bp, Homo sapiens
gccacaggccaggatgggtggaagtgaaggaattttatcatgtgggcaacctgctgcaactggttctgcctggatggacagcctgaggaggtcccaccac

SEQ ID NO: 24222 - DNA, 80 bp, Homo sapiens
agccgctgcccgggccatccctcgaggaagtttcatcaggggtggctgctagagagacggcccaagctctgaaaacactg

SEQ ID NO: 24223 - DNA, 98 bp, Homo sapiens
gtggagactctgtccccggactgggagtttgaccgcgttgacgacggctcgcagaggtggcgctccaaccccctttgaccggaactatgggaccaagc

SEQ ID NO: 24224 - DNA, 88 bp, Homo sapiens
ttgctgagcacatcagtgatgaatgcaagaggcgtttctataagaattgtgtccgcagcggctacctctatgtgaccctcatctacaa

SEQ ID NO: 24225 - DNA, 100 bp, Homo sapiens
tcagtgacacaggacgcaactggaaacagtacaaacaagaagacagcatctgggattggcagccaccatttgcatgtgatgttgataaacttcattttac

SEQ ID NO: 24226 - DNA, 100 bp, Homo sapiens
gcggagcccagacctacccgggcgaagcgggcgagcggtggtttggacgccggcggagacgcgggcgagatctgactgcagccatgagcagcaatgagtg

SEQ ID NO: 24227 - DNA, 100 bp, Homo sapiens
ctccccggaaaccaccccaagcactggcaaagcaggggtccttgtaccatgagatggtggagacctttggcgacttggcctttggcgacatcttcctcca

SEQ ID NO: 24228 - DNA, 90 bp, Homo sapiens
atgtgcgagtccatagctgaagaggagcgccagatggtggaggaatacacttatttatgaagaggataagatcaatgccctcattaaagc

SEQ ID NO: 24229 - DNA, 100 bp, Homo sapiens
ggccgaacagccccgcgggaatgtcgacgaggagctgagagccctaatttgtttagaactgtaatatgcacagttaaaacaacttgtcctctcaggacct

SEQ ID NO: 24230 - DNA, 82 bp, Homo sapiens
taggatttaaccgctctctgcctcccagggggatatgagactttctactcggaatatcctgagtgttgcgtggatgtaaaac

SEQ ID NO: 24231 - DNA, 100 bp, Homo sapiens
gcttatcagagctctacttgggaaactacccactgctgaaactccccttgccaggaacaggacctgtggaattcaccacccctgtgaaggattactcgcc

SEQ ID NO: 24232 - DNA, 82 bp, Homo sapiens
ccccagctggaactccggccacagccagcatgcagccctgggcgctgcctatggcacagccaagagcggtaccggcattgcg

SEQ ID NO: 24233 - DNA, 90 bp, Homo sapiens
ggacagcattcagcagatggaaaacaattggttccctccgtcctatgaagcagccgagttcctgttctgggcttcgctgtgcatgaccca

SEQ ID NO: 24234 - DNA, 74 bp, Homo sapiens
aaactctgtgcctcaacaaccatttctaagtggaattgaaagatgttggccatcgtgatcagatggctgcagct

SEQ ID NO: 24235 - DNA, 75 bp, Homo sapiens
cgaatcatccacgcacctgcagctctgctgagagagtgcaagccgtgggattcttcaaacacctaaatgaaagtg

SEQ ID NO: 24236 - DNA, 75 bp, Homo sapiens
catccagctgcctcaaatcgtcgtagtgggaacgcaggactttctgaagaccttttcccccgatgtcttccggtt

SEQ ID NO: 24237 - DNA, 74 bp, Homo sapiens
aggaagctcaccttcgacgaggaagcttataaaaatgtggattgttcaagtttagaagaatacaacattgccgc

SEQ ID NO: 24238 - DNA, 82 bp, Homo sapiens
agcgatggttctgaactaagtgaagagacctcatggcctgcttttgaaagcactgccagtgaaagatgtagaagataaacct

SEQ ID NO: 24239 - DNA, 100 bp, Homo sapiens
ccaggagcaagaccaagaccgcaggaaggactggggccacgtggagctgctggagggttcgtgctggccgtgggcagcgccgtctttgatgccatgttca

SEQ ID NO: 24240 - DNA, 83 bp, Homo sapiens
gtcagcctgcagcctcgtcagactcggagacgtctgacagtgacgatgagctccctgtgctgtcaggaatctacaggacttgg

SEQ ID NO: 24241 - DNA, 82 bp, Homo sapiens
aggggacccaaacccaaaactttcctcctgaagcacatgattaagtaccggtacatcccgttcacacatgggaagagaaggt

SEQ ID NO: 24242 - DNA, 100 bp, Homo sapiens
cctgatgaagttcgagcactaatatttaagaaagaagatgttaactttcaggctcacagaacatttcctgcctgttgctcacactctgttgtccacagca

SEQ ID NO: 24243 - DNA, 80 bp, Homo sapiens
aaacagacttcattaaaattgaggagtttttagaacaaaccctggctcctccaagagccataagtgtgatccttggtgac

SEQ ID NO: 24244 - DNA, 75 bp, Homo sapiens
cgcgaccgtccgccagtcgtcccgagagatgggggtcttgctctgtcactccagctagagcacagtggtgcaatc

SEQ ID NO: 24245 - DNA, 117 bp, Homo sapiens
caccctctcgcctcgggtctcgggggccgctctgggatcccggccaccagcaattgtccgagaggagtctgcaatgccgagtggaggaaggaggaaccggagtgtgagcagtagctg

SEQ ID NO: 24246 - DNA, 101 bp, Homo sapiens
actggtgtctcctgcggaagggcagctgggcacgccttccagaccgagctctccagggcacaccgtattcagctctgagcggtctttgctagtgaggccaa

SEQ ID NO: 24247 - DNA, 100 bp, Homo sapiens
ctgataactcaggatttacttgaaatgaaaggagattccaacctacttcaggctttacaggaagtatggtgctggcatctgcttggcttctagagagtct

SEQ ID NO: 24248 - DNA, 100 bp, Homo sapiens
acaatggtgtgttgtttgaaaaccagctgcttcaaattggacttaagtctgaatttcggcagaatttagggtcctcaaggtcatagaaccccataacccc

SEQ ID NO: 24249 - DNA, 100 bp, Homo sapiens
ttgttggtctgctggtgggactcaatgttctcgatgccaatctctgcttgaaaggagaagacttggattctcaggtcacggtctagatcacattctcgat

SEQ ID NO: 24250 - DNA, 50 bp, Homo sapiens
gaaagggattctaactaccacttgctcagaggatggactcagacaagttc

SEQ ID NO: 24251 - DNA, 82 bp, Homo sapiens
cttctcctcggactccttgcttatggatcaggagtggaagctggacacactatgtgacttgtatgaaaccctgaccatcacc

SEQ ID NO: 24252 - DNA, 90 bp, Homo sapiens
gtccttacaaaaaatgatgaaaagggctgtcatctggttggatacttctctaagggcgacggcgctggaccgctataggctgcagaaggc

SEQ ID NO: 24253 - DNA, 93 bp, Homo sapiens
gtcgtgatccagaagtccagagctgaggactgcctgtttgcagggagaggctgtcgatgctgaggcacgagagaatttgctcctgctcctcca

SEQ ID NO: 24254 - DNA, 90 bp, Homo sapiens
caatgaacatctgggatgacatcatcacaaatcgaggaattcttcagttggataaagtggacgtcatacctgtgacagctatcaacttat

SEQ ID NO: 24255 - DNA, 100 bp, Homo sapiens
ccaccatgtccgtggccttcgcgtctgcccggccaagaggcaaaggggaggttacgcagcaaaccatccagaaggagttccccttggccattctcagggg

SEQ ID NO: 24256 - DNA, 80 bp, Homo sapiens
gccgaacgacaggacgttggggcggcctggctccctcagctctaatggtaccaagtgacaggttggctttactgtgactc

SEQ ID NO: 24257 - DNA, 80 bp, Homo sapiens
gctaaagacgggccattttccagacctcatccagatttagcccctccggcagtgttgttcccttgacagagagacacaga

SEQ ID NO: 24258 - DNA, 101 bp, Homo sapiens
ggaaaaatttccaagccagagtcatctgggtgctggagaatctggtaaaagcaccattgtgaagcagatgaggatcctgcatgttaatgggtttaatggag

SEQ ID NO: 24259 - DNA, 100 bp, Homo sapiens
gatcagggaccggctgctgcaggccatcgacccccagagcaacacgcatcttctctccagactgccgatcccagaaagccaggtgatcaccattaacccc

SEQ ID NO: 24260 - DNA, 87 bp, Homo sapiens
agcaggagcggggccggaactggagccgaggcgcaggtggcgctggccactgaggcggctcccagctgcgttggcgacatggccgac

SEQ ID NO: 24261 - DNA, 101 bp, Homo sapiens
gcctgatcgcgatggggacaaaggcgcaagtcgagaggaaactgttgtgcctcttcatattggcgatcctgttgtcttttcctccgcaaccatgtctgaca

SEQ ID NO: 24262 - DNA, 101 bp, Homo sapiens
cctaccctggccagatcacccagaacatgttgtgtgctggggatgagaagtacgggaaggattcctgccagggtgacagtgaggcttttccgtggcattgg

SEQ ID NO: 24263 - DNA, 100 bp, Homo sapiens
tcttgatctccgccaccgtcttcaggccagggttatatcctgtgttgtgacctcatggtttaagtgggaataaagatgagtataagcagtgatgaggtca

SEQ ID NO: 24264 - DNA, 83 bp, Homo sapiens
cgagcactaatatttaagaaagaagatgttaactttcagactatgtcttcagcagtggtgcagttatatgcagcagatcggaa

SEQ ID NO: 24265 - DNA, 98 bp, Homo sapiens
aagaaagtcagggggactgcaaaggccaatgttggtgctggcaaaaaggaggaagaagccagacgacagtcaggagctcagtatggctcttttccagg

SEQ ID NO: 24266 - DNA, 100 bp, Homo sapiens
cgggacggagcggccggggcctggggctgcctgccgggcggccgggcgcggcgagcccagttacatgggaataggactctcggctcaaggcgtcaacatg

SEQ ID NO: 24267 - DNA, 75 bp, Homo sapiens
gtttagccaacccaaattaccttaattgcacgcacagaggctgggctgcggtccagatgcgtttgctccatgaat

SEQ ID NO: 24268 - DNA, 100 bp, Homo sapiens
actggcggctgctgacaactgcctccgagaactcagccccgacatcgcccacctggcctcgctcaagcccgagaccgaggacgagaagaagcgctttgag

SEQ ID NO: 24269 - DNA, 50 bp, Homo sapiens
ctaggactctatgacacggccggacaggtatggcccatctcctgtacgct

SEQ ID NO: 24270 - DNA, 100 bp, Homo sapiens
tatcagagggcattatgaacgaattctcaacccctacaacttattcctgtccggagacagcctaaggaaatatggctacacacacctttctgcaggagag

SEQ ID NO: 24271 - DNA, 75 bp, Homo sapiens
cccacggccgcctccggagcccgacgcgcttcctgcagatttcacaaaactgcatcttactgacagtctccaccc

SEQ ID NO: 24272 - DNA, 96 bp, Homo sapiens
cccctctcaaaaccacctcctcctaccaaaatttggtttggagcgaccattctcagttaagggaagaaagtcggaggctggctttggctgcgaaaa

SEQ ID NO: 24273 - DNA, 83 bp, Homo sapiens
actgtcacagaaagagctgttaacacttcctagataacggttttgggaggtcatcagcgatgagcatgggatcgaccccacag

SEQ ID NO: 24274 - DNA, 90 bp, Homo sapiens
ggataaacttcgtgagcagctttccacttcagaaaatgccctgacagtgtggacaacagtgagtatatgcggaatggagacttcttaccc

SEQ ID NO: 24275 - DNA, 82 bp, Homo sapiens
gaacagcagagacacagagggcagtcatgagcacttgcacctcctgcgccgccgccccccatccaaggatatgccttcaagc

SEQ ID NO: 24276 - DNA, 75 bp, Homo sapiens
gccccgccatgaatgaggagtacgacgtgatcgtgctgggcaccggcctgacgagtccctgtgaagcaggaagag

SEQ ID NO: 24277 - DNA, 75 bp, Homo sapiens
gtacagagtaggagaagccagatcccagggcggacaacgagaagtcgtcaggtaccaccctcgggtgctctacat

SEQ ID NO: 24278 - DNA, 75 bp, Homo sapiens
cttctgtcagcctgcaactgagccaggattgaatacttggaccccaggtcagaagagatcaattctacagaaatt

SEQ ID NO: 24279 - DNA, 100 bp, Homo sapiens
ggggctccggctgggcggcagcgactgcagagtgaaaattgctaccaaggccaatccatggattgggaactccctgaagcctgacagtgtccgatcccag

SEQ ID NO: 24280 - DNA, 82 bp, Homo sapiens
cctggcgcgatgcgtcaagtacactgaaattcatcctgagatgaggttcctacaaacttgatgacttttgagtagaagcctg

SEQ ID NO: 24281 - DNA, 100 bp, Homo sapiens
gttcctttttgcgagctttccgagtgccaggcgccggccggctgcgaagacgcggtgggccgcccctccggcctgtataattcagtagacagctggatga

SEQ ID NO: 24282 - DNA, 75 bp, Homo sapiens
gggccccgggacctgggctgggaacccgcggtggagcgggacacgaacgtgatcatggaagggaagtggttgctg

SEQ ID NO: 24283 - DNA, 74 bp, Homo sapiens
gatttttcgggacattaccaaaccactcattttaggcagacctgttatcctaaactaggtgagtcagcttttgg

SEQ ID NO: 24284 - DNA, 109 bp, Homo sapiens
cggatggccccaggtgtaagcgcagaaagcaggcgaacccgcggcgcaataacgaataccctctaccatctgctttggtcagggtgccgctcgaggatttaaaagcaac

SEQ ID NO: 24285 - DNA, 75 bp, Homo sapiens
gccgagctgaggcggtcgcggccatgaagttacagaatgtctgaaggggacagtgtgggagaatccgtccatggg

SEQ ID NO: 24286 - DNA, 75 bp, Homo sapiens
cagaaatcacattggaccctcctcccaactgtagacagcccacctgaggatattgaccataaggactcatatctc

SEQ ID NO: 24287 - DNA, 100 bp, Homo sapiens
atcctcagcgaggtctccacccgctcgcgctccaagctccctgcggggaagaacgtgctactgctgggcccagaataaagagaccagtgttttagctgct

SEQ ID NO: 24288 - DNA, 90 bp, Homo sapiens
aaccccctcctgggctcctttcagcagccctccagctacttcctgcctgccatgccccagctgcaccaccaccgcctgtgctgatgcacc

SEQ ID NO: 24289 - DNA, 100 bp, Homo sapiens
gtgacagcacaggtcacagtaaggccaaaaatgtgcatactcacagagttagagagagggatggtgtgaatcagaaatcctgcaccatgagaagcagtac

SEQ ID NO: 24290 - DNA, 82 bp, Homo sapiens
cagacggcgagacctcctgcacagctcatgatggagcagtccaagaagtcctccctcatggtggcccgcagtattctcaaca

SEQ ID NO: 24291 - DNA, 75 bp, Homo sapiens
aaatacatggagcagaccagcagttatttgcagctatcatgtgaggtattctgagagaagcctcacaaagtgtat

SEQ ID NO: 24292 - DNA, 100 bp, Homo sapiens
ccacaacctccccctttccaatctggcaatcccagagttttccgtctgatgaaggttggccatttgcaaagtatcttggagcttgtggaagaatggtggc

SEQ ID NO: 24293 - DNA, 100 bp, Homo sapiens
actgggccctgtatataggagatggctacgtgatccatctggctcctccaaccagcacaggccagccagaagatgacactgagactacaggtttggaagg

SEQ ID NO: 24294 - DNA, 100 bp, Homo sapiens
agccagccgctgttttgccggaggagcccctcaggccaattgttcaggagacaacttttgatttgggaggagatattcatagtgggacagcattaccgac

SEQ ID NO: 24295 - DNA, 114 bp, Homo sapiens
gaaaaaacagcagatggctcgagaatacagagagaaaattgagacggagctaagagatatctgcaatgatgtactgactcagaaccgtgctgcatactatcctcctagccaaat

SEQ ID NO: 24296 - DNA, 100 bp, Homo sapiens
ctgtactgctccccaagaagactgagagtcaccacaaggccaagggttgcaaaagcttctcatttcagagagatgccaggatcctaagtgcctgccaaac

SEQ ID NO: 24297 - DNA, 75 bp, Homo sapiens
cagttcctgggaaggtggagccaccagcctctccttgggaccatggctaaacctcctggatcattagccagaagc

SEQ ID NO: 24298 - DNA, 100 bp, Homo sapiens
ccaacaacagggacagctcccaggagccagtcaaggttgtctgtctgtccatccactcaggacatctgcagctttagatccagctaaggatccatgctta

SEQ ID NO: 24299 - DNA, 100 bp, Homo sapiens
attcttctagaaccctataaatacttacttcagttaccagctgtcttgtcgacggtctcactgatgcctcttctgcattcaaagttcctcgacccgggcc

SEQ ID NO: 24300 - DNA, 100 bp, Homo sapiens
actagcggcggcgggagcggcgccgagaggccgtgcgggacgcgggcgccaggaccggccgaacgcagaggcccagctgtggtccctcaccagtattatg

SEQ ID NO: 24301 - DNA, 50 bp, Homo sapiens
ccttctttgtcgcagcgttccatgtctgtttctgtcgactgtggaccact

SEQ ID NO: 24302 - DNA, 139 bp, Homo sapiens
cgcgccgacctgcagcgcccggctgcctcgcactccgcctcccccggctcagcccccggccgcggcgggacccgaggtgctggagaatctggtaaaagcaccattgtgaagcagatgaggatcctgcatgttaatgggt

SEQ ID NO: 24303 - DNA, 100 bp, Homo sapiens
gaagccgatgtgtgagaagaccaccatcaacaatgagtacaactaccgctgctggaccacaaaccgctgccagaaaaacttgtgcaccatggacaatttt

SEQ ID NO: 24304 - DNA, 83 bp, Homo sapiens
cagaaatgcgcagagcaaacatctttcaaaggtttctctactcggacgaggtgcagattggcccggagacggtgatgaccacg

SEQ ID NO: 24305 - DNA, 100 bp, Homo sapiens
cacaatcgggcgcatcaagtggtcccttagggactggccctaacaacaaatgaggagaagccaagttctctgctttctgcagacagggcctcccctggat

SEQ ID NO: 24306 - DNA, 50 bp, Homo sapiens
agggacaccgagggaccaaagggcgttcgatatctcaatgcctatactgg

SEQ ID NO: 24307 - DNA, 95 bp, Homo sapiens
gacttcatggcagagctgtaccgggttttggaggctggcaagattgggatatttgagagtccaactggcacttcttcccatgcacaagatgatta

SEQ ID NO: 24308 - DNA, 100 bp, Homo sapiens
gctggcgttgtgaagaccatgacaggaggccgagcgcagagcattggcaggaggggcaaggtggaacaggtggatcagtacaagggaaagcgggatttgg

SEQ ID NO: 24309 - DNA, 100 bp, Homo sapiens
gtttatcagacatccttcgcttcatttattcaggtgaagaggaacagatgctgccatgaaaggggtttcctagaaagtggtgaagagaccatagcctaat

SEQ ID NO: 24310 - DNA, 100 bp, Homo sapiens
gaagaggtgggtgctcgccctggtcttcgggctgtcgctcgtctacttcctcagcagcaccttcaagcagccatgaagactttgaatttatttcaggaac

SEQ ID NO: 24311 - DNA, 90 bp, Homo sapiens
gcccgcccaactcccagcggagagcaaggtggtgaactggctagaagggcctggatcagaacaactaagagcccagtggggcattggaga

SEQ ID NO: 24312 - DNA, 95 bp, Homo sapiens
aactaaagcctttagtgcattctcctcatgctattgtgagtctccgggaccattatggcagtcaagtggacgggtgggcattcttctcctgtcct

SEQ ID NO: 24313 - DNA, 100 bp, Homo sapiens
agcaagaaagaaaattagagtgaatgtagttgcaccaggtatgtaggaaaccttcccagaatatttgactactcgcctttagatccaacacaagatttca

SEQ ID NO: 24314 - DNA, 75 bp, Homo sapiens
gcttatctctaggatccataagccccagtggaccacctgcatttgccgcccacccctccgagcagtcacggcagt

SEQ ID NO: 24315 - DNA, 82 bp, Homo sapiens
cctagcgcctggcctgcgcgccgctgcccgcgccacaggaaagatgaatgggagggctgattttcgagagccgaatgcagag

SEQ ID NO: 24316 - DNA, 82 bp, Homo sapiens
aagaaggaagtcatcatgggccggcctggaacaggcaatactgaacactgcgcagcttgcagaggtctcctggcagccctca

SEQ ID NO: 24317 - DNA, 75 bp, Homo sapiens
gctccagaaattatgttgaattccaaggtggaggccacaagcaggaaagaaaaggccaagcagaggcccctggcc

SEQ ID NO: 24318 - DNA, 75 bp, Homo sapiens
tgtggccagtgttgtcatggacaaggacaaggctggcatgtatgaagcagttaatgaagtttacaaagtacttat

SEQ ID NO: 24319 - DNA, 89 bp, Homo sapiens
caacccacctaactacggaaaacctgatcccaaaattattgaaaacactcgaaggctggagtcacatcagaagccgcgcagactatcac

SEQ ID NO: 24320 - DNA, 101 bp, Homo sapiens
gtttttcacatcatgaccaggattctggaagctacaaacagtttgtttttacctctgcctcctgctgcatatccccaccgtttgaatctcttttaccttgc

SEQ ID NO: 24321 - DNA, 75 bp, Homo sapiens
gactgctagagccgagcgaagcctccatacaacgctccgccgccgctgctgccgcgacccggactgcgcgccagc

SEQ ID NO: 24322 - DNA, 90 bp, Homo sapiens
gtggggccctgggcaccctgcaccagctgggcatcgtcgtcggcatcctcatcgcccaggtctcggcgcggaagatggccggcggcgtgg

SEQ ID NO: 24323 - DNA, 74 bp, Homo sapiens
ttttgaggacacttgtggagagctcgaattccagaatgatgaaattgtcttgagaatgccagactgtcatcaga

SEQ ID NO: 24324 - DNA, 100 bp, Homo sapiens
gacgatattgatattgaagcaatgcttgaggctccttacaagaagatgcaccttggtgtggagtcaaaagtacacatgctggatcaaaatatataagaac

SEQ ID NO: 24325 - DNA, 112 bp, Homo sapiens
ggaagatggcggcgccgctcatccccctctcccagcaggggcttgcttctgacatgtctgatgagcgcattcctgctgttgctcctggctattacaaggtgtcgctgtggaa

SEQ ID NO: 24326 - DNA, 100 bp, Homo sapiens
aaaaccctaagtctttgccatgttattcatttctgtgcaaaacaggactggctgatactacatattccagatggtccggggatcccgagctgtcctgcag

SEQ ID NO: 24327 - DNA, 100 bp, Homo sapiens
tccggaggtctacgtccctactgtctttgagaactatattgcggacattgaggtggacggcaagcagcagaacagccctgtggcccccacagcccagccc

SEQ ID NO: 24328 - DNA, 100 bp, Homo sapiens
tggggaaaaaggaccacatagtccatcgaagaagagtccttggaacaagcaactggctattgaaaagatgaggcctgcctgtgttaatacacctagtgag

SEQ ID NO: 24329 - DNA, 83 bp, Homo sapiens
gtcacacaatgtcggggatggacctccagatttccttactgagcctgtggggcccggatagtcagccgaccagaggaactgag

SEQ ID NO: 24330 - DNA, 50 bp, Homo sapiens
ctctacatagacgacaccctgacgagtggagactgctgcacggactctgg

SEQ ID NO: 24331 - DNA, 100 bp, Homo sapiens
ccacttgcagcatggagtcgcccgcctcgagccagcccgccagcatgccccagtccaaaggtgtttcccattaaacactaccaggacaaaatcaggcctt

SEQ ID NO: 24332 - DNA, 100 bp, Homo sapiens
tggtggaggacaggaacctgctggtgcctgtgggccaaagctgaccaactcccccaccgtcatcgtcatggtgggcctccccgcccggggcaagacctac

SEQ ID NO: 24333 - DNA, 75 bp, Homo sapiens
agcacttccggtcacgccatcgttgctgccttcttcgtcaagctcagcagtacaacgtaccccgtggttgtgaag

SEQ ID NO: 24334 - DNA, 82 bp, Homo sapiens
tgcataaacgaggcgcagcgggtgaaggaccgagtctcctgccattccgagcaggcctggtatgggtaatggtgtgaaggaa

SEQ ID NO: 24335 - DNA, 75 bp, Homo sapiens
ttgctcggccgatgaagtgcagaggtttttttctgcggtgaccacccgtcaggtgcgtaccattgtggaagaggt

SEQ ID NO: 24336 - DNA, 82 bp, Homo sapiens
ttcgccaaactgtggagcctcttctgtaaccaaggagccttcacgtaaatgggtccagtcatgcctcccagtaagaagccag

SEQ ID NO: 24337 - DNA, 164 bp, Homo sapiens
cggcggaggagctcagcaagctgcgccgcgccgcagtcggtcgtccgctggacaagcacgagggcgcgctcgagacgctcctgaggcgagtgttgtgtataaaggaagttgaaatcctgggccttatgtgtgtagactggcaatgtccatttgaagattttgta

SEQ ID NO: 24338 - DNA, 90 bp, Homo sapiens
tcccagtgggcgagctggacgctgtctctccaatcgtgaatgagaccctgcagttcctgtacagccggggccagcgggagctgagcgtgc

SEQ ID NO: 24339 - DNA, 100 bp, Homo sapiens
acacgcccactaaagcccagaagaatgtggctaccagcgaagcaacagggagctgccaccaccgtgtactgtgctgctgtcccagaactggagggtctgg

SEQ ID NO: 24340 - DNA, 101 bp, Homo sapiens
aggtgcacggcggcggcgcggagcgcgaggtggccctggagcggttccgcggctttgtggacatgtgtgtgcagcatatcccttctccaaaggtgggcgcc

SEQ ID NO: 24341 - DNA, 101 bp, Homo sapiens
cgtgtaccgctacccgcccaagtccggggctactgttcccgtagacaaagacgtcttcgaaaaacactcaacttcaagatgggtaacagacacaaattcac

SEQ ID NO: 24342 - DNA, 100 bp, Homo sapiens
gcctcaccagtgctccaggaagatatagacattgagggggtacagtcagaaggagcccagcgaagtgccaacacctaagagacctcggggccgaccaaag

SEQ ID NO: 24343 - DNA, 83 bp, Homo sapiens
ctttctactctgatcgctgggcctgtggttgagataagtcaccagctacggaaggatctcactctgtcaccaaggctggagtg

SEQ ID NO: 24344 - DNA, 74 bp, Homo sapiens
tgtacgagttgtggctgctctactacgcgcagagtaaagctaaaacattttgagaaatttcaggatacagcaga

SEQ ID NO: 24345 - DNA, 75 bp, Homo sapiens
ccgggggcagccgccatcggcagcgccagatggtcatcatgggccagtgctactacaacgagaccatcggcttct

SEQ ID NO: 24346 - DNA, 89 bp, Homo sapiens
attgacataaaacagttgatagcaaagaagataaagttgacagcagaggcagagccagagactgctgctactttgaaacgtacgataga

SEQ ID NO: 24347 - DNA, 95 bp, Homo sapiens
ccagaagatccagctttgttgaaaagcgaagccgttagtcccttaatacaaaggtgatctctagtaactaccagacctgtctcggccttctgatg

SEQ ID NO: 24348 - DNA, 97 bp, Homo sapiens
agtatgctcccctgctggaagtgaaggaactcctaaagggttattttggagctgttggagcactccttgagctgttgaagatcccgtgatcattacc

SEQ ID NO: 24349 - DNA, 75 bp, Homo sapiens
cctccttcgacttgccaggaaaggctctatgagagcaggtgatcgccatgatcaaaggcctgcaggtgctgatgg

SEQ ID NO: 24350 - DNA, 74 bp, Homo sapiens
agtccccccaagtctcctgaagaggaaggagcggtgtcctcttaagaaaatgcttactgcagagtgggtctggg

SEQ ID NO: 24351 - DNA, 74 bp, Homo sapiens
cagggcggagatttcatctcgaaacctggcggaagatgagaatgtgcctactgctcctgatcctccaagtcaac

SEQ ID NO: 24352 - DNA, 74 bp, Homo sapiens
gagatgcctggcagccccgctctctgcattgctgctgacacgccgaccgcctgctgcttcagctacacctcccg

SEQ ID NO: 24353 - DNA, 75 bp, Homo sapiens
ccttttgcgaaaaagtggatcaatattcggaagtcatatggaaatttttacaagcctgcctagggtagttaaaag

SEQ ID NO: 24354 - DNA, 100 bp, Homo sapiens
ggccactccagtgccaacagccaattctacagaaatgaccatggttgacacagagatgccattctggcccaccaactttgggatcagctccgtggatctc

SEQ ID NO: 24355 - DNA, 97 bp, Homo sapiens
agacgaattaaagggagattacacagaagcaaaagccttgatagcatggatttctgtgagctcactattagtatccaatggaattcgatccatcaaa

SEQ ID NO: 24356 - DNA, 75 bp, Homo sapiens
gtctccttcgacttggagtctttgtccaggacgggggatatgagactttctactcggaatatcctgagtgttgcg

SEQ ID NO: 24357 - DNA, 100 bp, Homo sapiens
cgacgagcaggtggcggcggctgcaggaggtttcagtcaggaagaacttctgaaaatctggaaggggctcttctactgcatgtgggtgcaggatgaaccc

SEQ ID NO: 24358 - DNA, 80 bp, Homo sapiens
tgtctcctgtgcccagccactggatggtggcgttgctgctgctgctctcagattatgccaagggctttggtggccagtat

SEQ ID NO: 24359 - DNA, 100 bp, Homo sapiens
cccggttccccggcccacagtgggggtgtgcaaacccgagagaactggttgctctaggtcgtaaccagcctttgaaaaaggagaaaccaaaatggaaaag

SEQ ID NO: 24360 - DNA, 98 bp, Homo sapiens
ggccgccgaggagcgggaggaggacgggaccccggcgcccccaccccatccccgggagctctgggaaaccaaggttttgcagtctaaagcaacagaag

SEQ ID NO: 24361 - DNA, 51 bp, Homo sapiens
caagaggcagttgcaacaactgcaagaagagacggggtttcaccacgttgg

SEQ ID NO: 24362 - DNA, 75 bp, Homo sapiens
aaattctggctcaggaagttgtccatcacttgatagtcctttggatggggcactgaaggctttgtggaactacct

SEQ ID NO: 24363 - DNA, 100 bp, Homo sapiens
tacctccatcaggaccccagatgtctgacagccctgtgtgacaccaagataagtaacgtacctgctctgcgaactggtgtctgacgacccccgctgccgc

SEQ ID NO: 24364 - DNA, 75 bp, Homo sapiens
cccatctgttacagttctgtgcataagaaggatctcaagaggtattaaactgacactgtcagctcttctggatgg

SEQ ID NO: 24365 - DNA, 100 bp, Homo sapiens
atgatttatttcctgaaccactacctgtatgacctgaaccacacgctgtacaatgtgcagagctgcgtttgacaagtatgcgcccaagctggacagcccc

SEQ ID NO: 24366 - DNA, 82 bp, Homo sapiens
cttggactgagtcctgcaggacacagttatttctcaaactctgaggctgcggagttcacacattgaaatctgtcatcttttt

SEQ ID NO: 24367 - DNA, 109 bp, Homo sapiens
ccacgtctacttcttccgggctgagagcaagtacacatttgaaaggcatagcgcgctggctaggactccagtaccgtgaagggaggcagtgagagcagacatctgtgcc

SEQ ID NO: 24368 - DNA, 97 bp, Homo sapiens
gaaaaatacaggaaagctatggagatgtctatggaatttgcaccaaattgaaaacatctcccaatgaagatgaggtggaggaccatcctgctacagt

SEQ ID NO: 24369 - DNA, 90 bp, Homo sapiens
cagtcatcacgtttgtggagattggagacatgtcatgctgcccaaggacatagccaagctggtccctaaaacccatctgatgtctgaatc

SEQ ID NO: 24370 - DNA, 88 bp, Homo sapiens
catcgactccagcgtgctctctcggaataagacagagggggggccctcagcctcttggccttgaacgggctgttcatcttgattcaca

SEQ ID NO: 24371 - DNA, 113 bp, Homo sapiens
gcgcactcggcggacgcaagggcggcggggagcacacggagcactgcaggcgccggcaattctgtggtgttcttggtcacacatttatggagtttctgaagggcagtggagat

SEQ ID NO: 24372 - DNA, 100 bp, Homo sapiens
cttctggaccagacgcctgcacagcacattaactgtgctgaatgctgtaggcagttgtaacgcaatgattgattacacagtacctaccgttatagcagag

SEQ ID NO: 24373 - DNA, 100 bp, Homo sapiens
agcgaggagctgagggaccctgaggctgaaccgtctgagcccagaagtgctgaggtgacgaggaagcccaaggctgctgttccttctgtgaacaagaggc

SEQ ID NO: 24374 - DNA, 98 bp, Homo sapiens
agtagatggacctcgggaacccagaaataaacaggggtcacatgacgacagaagccaagagggctgcaaagatggaaaagaagatgaaaattttgctt

SEQ ID NO: 24375 - DNA, 85 bp, Homo sapiens
catttcagatgtgattcatctaaagtaaaatgcccattcccatcaagaccagacaatggatttgtgaactatcctgcaaaaccaa

SEQ ID NO: 24376 - DNA, 100 bp, Homo sapiens
aaaacgcacaagccagaccctggcacgccccagcacacgagttacatggacacagaacagtatgaagaagcagtacgagactatgaaaaagtataccaga

SEQ ID NO: 24377 - DNA, 82 bp, Homo sapiens
tccgactgatccagctggtggtcctggtctacgtcatcggggttgtgagtcccggcccagcccctccacccccctgcccccc

SEQ ID NO: 24378 - DNA, 100 bp, Homo sapiens
gtaaatacacctttgaaagcacaattatttatcagtgtgagcctggctatgaactagagactgcttttcaggaagccttggacgctgcaggtgataaact

SEQ ID NO: 24379 - DNA, 100 bp, Homo sapiens
agatctccaagtttggatttgccataggcagcagctaccaagaaaccagcccctgaaaagaagcctgcagagaagaaacctactacagaggagaagaagc

SEQ ID NO: 24380 - DNA, 100 bp, Homo sapiens
caccagaaagcttcctgaccagaggtggagttggcatgaacttaacagcagcagatactgtgatttttgttgacagtgactttaatcctcagaatgactt

SEQ ID NO: 24381 - DNA, 100 bp, Homo sapiens
gagggccaccacctgcagcacatcagcgaccgcgagatgcccgaaggcgaggattaaatccaccacacagggtgaaatctatctccatgacaacattcac

SEQ ID NO: 24382 - DNA, 75 bp, Homo sapiens
aatggatagccctacacagatatttgagcatgtgttcctgaacaaacctgtaatggctttcggattggtaactct

SEQ ID NO: 24383 - DNA, 122 bp, Homo sapiens
tatcatcaataccgagataaattttccaaacacctgactctgtgtgtttttaccaaccatacaggatcccatggtccattattgcctttaccaagtcgttacagaatgggctctcgagatac

SEQ ID NO: 24384 - DNA, 75 bp, Homo sapiens
accatgcctttcacacatgtggtgtattttccacattggctttcttcatgtggtggagacactgccacttgctgt

SEQ ID NO: 24385 - DNA, 82 bp, Homo sapiens
gtttggagccccggagtggggtgtcggcgcctcattcgggtggagctgagccggagacagcaaattgtggctactaatttgc

SEQ ID NO: 24386 - DNA, 98 bp, Homo sapiens
tgcatttttatctctggtggctctgctacggcggcgcagaaatgaggcagaagcggaaaggcacgtgtggttctcaaatataggcattctgatgggaa

SEQ ID NO: 24387 - DNA, 98 bp, Homo sapiens
tgcgcctggataaataccctacgctgctcaaagagctcgagagacacatggagcaaaatctggtggaaagaagtctctagaagccaaaaagactggga

SEQ ID NO: 24388 - DNA, 105 bp, Homo sapiens
attatggataccaaggaagagaagaaggaacggaaacaaagttattttgctcgcttaaagcttttcaagccaggccaagaagctgtgaagtaccagggtcctcgg

SEQ ID NO: 24389 - DNA, 82 bp, Homo sapiens
gatccagcctgcggagcctgtggggcagactattgcccagaagaaaagatgtttggttttcacaagccaaagatgtaccgaa

SEQ ID NO: 24390 - DNA, 95 bp, Homo sapiens
agcctggatttcctcaaggtcccggaccagggagctgcagggaacgtcgtaaggaagctgaacggattgctcgagaaagagaggaactcagaagg

SEQ ID NO: 24391 - DNA, 83 bp, Homo sapiens
ctactctctctttctggcctggaggctatccagccaggttcaggagaagtggcacctggtggaggacctgtcgcgactgctgc

SEQ ID NO: 24392 - DNA, 83 bp, Homo sapiens
gcttgcttggagatcaggacgcaaagaaagacgagaatccaggacttgaatcgtatcttcccactttctgaggactactctgg

SEQ ID NO: 24393 - DNA, 110 bp, Homo sapiens
actggcccgccacagcgacgccggcgccgagggacaccgcagtatgaggcagagacaatgcagatcttcgtgaagactctgactggtaagaccatcaccctcgaggttga

SEQ ID NO: 24394 - DNA, 96 bp, Homo sapiens
ttggaaatggaacatacgggcaagtttataagaggatgatgtggacctggaagccctggtgaacgatatgaatgcatccctggagagcctgtactc

SEQ ID NO: 24395 - DNA, 90 bp, Homo sapiens
agaagcaggatgaactgaaacggattgccagagaattggcagaaggataaaagaatcagagtgtctcaacccttgacaagaggaccaagt

SEQ ID NO: 24396 - DNA, 100 bp, Homo sapiens
gggatagtcttggagaggagcaaaaacaggagcgggagatggagctgcggcggcaggccctggaggaggagcggcggaggcgtgagcaggtagaacggag

SEQ ID NO: 24397 - DNA, 75 bp, Homo sapiens
cccatcagaaacctccaccagtccaacttcagcttatcaggtacaaagacaggagactggcccagcacaagtcgg

SEQ ID NO: 24398 - DNA, 90 bp, Homo sapiens
gtactcgggaatccggcacaaggcactgggctacgtgctggacaggagtcgtaagaaagcagtgggagttgaagtcattgtcaagtgctt

SEQ ID NO: 24399 - DNA, 75 bp, Homo sapiens
ctttcttccagcttctgctgtccttctttgtggagagcaaggagccagcaccgctctttgaccttgccatgcttg

SEQ ID NO: 24400 - DNA, 76 bp, Homo sapiens
gcagaatctaatacagtccttggaagcagcgaataagaaagtgactgagaccgaagatgatagtgatagtgacagc

SEQ ID NO: 24401 - DNA, 100 bp, Homo sapiens
agcatctgctgcgaatctccggcctcggccacccatctgtcacccttggacagcgcccacacccttctagcacctcctgacagcagtgagaagatctgca

SEQ ID NO: 24402 - DNA, 100 bp, Homo sapiens
tgtctgtccccagagcctcagtttgtgcaggacaccgacatggaacagggactcactgggggcttggcttggactcatcgtcaacagcagcagcatcatc

SEQ ID NO: 24403 - DNA, 100 bp, Homo sapiens
ctggagacggcctgggtgctggcgaagcggaggccggagccaccttctgggtgaaccctcagttcaagatccggctggatgagacggatgacccggacga

SEQ ID NO: 24404 - DNA, 96 bp, Homo sapiens
cctgcgatactattatgacaaggacatgattattcaatgttgctctgaaatagcatctctgtttttgaatgataaagagccaacaccactatctga

SEQ ID NO: 24405 - DNA, 100 bp, Homo sapiens
gaaaaatgcagagctggagtcgtgtgtactgctccttggccaagaccctgtgttgggctatttgatgaaaggcctgtgtgaaaagcccctggcttctgct

SEQ ID NO: 24406 - DNA, 98 bp, Homo sapiens
gaggagcccgttgacactgacctcatctgggccaaaatgctgagttctaaggaggctgggatgcagcaccgaggcttcctcctcctcaccctcctcgc

SEQ ID NO: 24407 - DNA, 100 bp, Homo sapiens
tgggcccccactccatgtcggtgcccaccacacccaccctgggcttcagcactggcagcccccaggatgaagactccgggaaggctgacagcgacgtggc

SEQ ID NO: 24408 - DNA, 100 bp, Homo sapiens
tgaatatgcaatctcgaatgcggaagcctttgcagaaaaattgtccagagagctgcaggtgctagatgggatcatatctgaagatattagtgagctacaa

SEQ ID NO: 24409 - DNA, 100 bp, Homo sapiens
tcttcagttccaggaagatgcctttgggaagcatgtcaccaacccggccttcaccaaactccctggaggtacgacttgggagaaatggggtggaagaaat

SEQ ID NO: 24410 - DNA, 82 bp, Homo sapiens
cttgttcccccaaatgtctgactctgactctcggactgagaaacgcaaggttctcctgcgctgcccaacagcatggtgtatt

SEQ ID NO: 24411 - DNA, 75 bp, Homo sapiens
cagaatttcctgcgctgttccacctcattcaacttcaggacccttgaacatctgtgaagaaatgactattctgca

SEQ ID NO: 24412 - DNA, 75 bp, Homo sapiens
gttctgcggcacgggatggcggaggcgcctcctgtctcagaaatcatcctcatcctttgataactgtgcttgaac

SEQ ID NO: 24413 - DNA, 51 bp, Homo sapiens
aactaaaggctgactttccagacaacccaatggtaatgatagtaaaaaatt

SEQ ID NO: 24414 - DNA, 75 bp, Homo sapiens
ggccaagggaccaaggtggaaatcaaacaaagcacaggagtatggctacgaccagtcaatgatggctcgcttctg

SEQ ID NO: 24415 - DNA, 100 bp, Homo sapiens
ttgagattgctgcccgaaagaagcgaaattttattctggatcagatatttggatttgacctgcattttggaatttatctacacttaaaatgccaccagca

SEQ ID NO: 24416 - DNA, 50 bp, Homo sapiens
gacatcctggaagctgggaaatgggtggttctcttcccaaagtggaagcc

SEQ ID NO: 24417 - DNA, 90 bp, Homo sapiens
atttacactgtcacagcactgcccattggcaacgaacggctctgagagagaccgaactctgcaggtggaactggaaggggctcaggtgtt

SEQ ID NO: 24418 - DNA, 75 bp, Homo sapiens
cgtggcgctccctctctgccggcctcggcttcaggactatgagagtaaattgcaggccttgcagaagcaggttga

SEQ ID NO: 24419 - DNA, 90 bp, Homo sapiens
atgatattcagtggtgtttttctcaggtgaaaggagcagtagatgatgatgtagcagaaggctggagcattggatttgctaaaggagctt

SEQ ID NO: 24420 - DNA, 99 bp, Homo sapiens
cgcacggagaggtgcagctgggagccatgtggctagaaatcctcctcacttcagtgctgggctttgccatctactggttcatctcccgggacaaagagg

SEQ ID NO: 24421 - DNA, 100 bp, Homo sapiens
cagccgcccgaagagccaagagtcagtattccggccagcttcacgaagtcagagagtgtttaactgctgaagagatcttttcccttcatggcttttcaaa

SEQ ID NO: 24422 - DNA, 98 bp, Homo sapiens
ggctggcagggtggacctcaggagcctcctaaaaccacagctgcgcagttggacagcattggcttcagcataatcaggaaatgcatccatgctgtgga

SEQ ID NO: 24423 - DNA, 99 bp, Homo sapiens
cctcatgagctcagagcttgcccgccatagcaagcgagtccgcattgcccccaagaagcaaccgtgacaagtggtgcccgaccagggacctgaacgagg

SEQ ID NO: 24424 - DNA, 82 bp, Homo sapiens
ccatgcagtgtcctcctcagggagggcaggagagcctgaggagtggcggggccgccagtccagaacacatattacataatgg

SEQ ID NO: 24425 - DNA, 74 bp, Homo sapiens
gcgctggtctgctcccagccggccctgccctgggagaagccctgccacacgtcgtgcccacgctgagggcctgt

SEQ ID NO: 24426 - DNA, 100 bp, Homo sapiens
ggcgcggctgcccgaggccggcgaagccatgggcgccgggaccccgccgccgccgccgccgccgccgtctggccccagaacaagttgaaatcatcgcaga

SEQ ID NO: 24427 - DNA, 100 bp, Homo sapiens
caggagcgaccgtgaggacaggcttttgctctgcgacggctgcgatgcggggatgataatgaagataattcaaatgatgggacccagccatccaaaagga

SEQ ID NO: 24428 - DNA, 48 bp, Homo sapiens
ttctggagagcggggtgtggggaatgtatcctgtcaggtataatgtca

SEQ ID NO: 24429 - DNA, 88 bp, Homo sapiens
tcagtgtgggttccatcttacttgtcacgggcaagattcttgccaagagaattaatgtgcgtattgagcacattaagcactctaagag

SEQ ID NO: 24430 - DNA, 99 bp, Homo sapiens
cggattttctgttttcggaagttgctgggttcgttttattcagcggcagtggtgctttcccgaatctcagaatgccgttcctctacctggcatgaaatg

SEQ ID NO: 24431 - DNA, 90 bp, Homo sapiens
gcgctttgagctactgggctgtgagctgaacggcggaacatgttcccccatatgacgtggtgccctccatgcggcctgtggtgctggtgg

SEQ ID NO: 24432 - DNA, 101 bp, Homo sapiens
acaaaggaagacttgtaacctggagaagagaagagaagctgaatttggacgacagccagtgggaggacatccacgttgtcaccggagcactgaagatgttt

SEQ ID NO: 24433 - DNA, 74 bp, Homo sapiens
ctcgctgtggggcaatccgggcttgcagacgaggttgactctgccagaacaaacgttcatgggctactggacaa

SEQ ID NO: 24434 - DNA, 100 bp, Homo sapiens
cggactcaggctggggtctgcagtgcagcattaatgggccgctgacatgaatatggagtagttttctctagcaaaggtatctctcctaaatgtgtgatca

SEQ ID NO: 24435 - DNA, 100 bp, Homo sapiens
ccgtcccagtgccgggagcgcatcaaggacagaatgacttggaagataacggagcttcgaagcttctagcagaatatgaagtctttcgtcttcagctacc

SEQ ID NO: 24436 - DNA, 100 bp, Homo sapiens
gccaacgccttttcatgatcctctggcttaaaggagttaaatttaatgtgacaactgttgacatgaccagggaaagtacggtggccagactttaaccagg

SEQ ID NO: 24437 - DNA, 98 bp, Homo sapiens
ggatcctgtcgcacggcgtcacctccttctgccccaccctggtcacttccccaccggaggtttatcacaagccttttccccacgactctgaaagagga

SEQ ID NO: 24438 - DNA, 100 bp, Homo sapiens
tgatcaacagacatttaataacaatggctcaaattgatcaagcagatatgccagaactttttaacaacagtggctattcttttggaagcaggagcttttg

SEQ ID NO: 24439 - DNA, 50 bp, Homo sapiens
ctgagcctgacgcgggccgcgcggggtaacaagatgctcaactatagtgc

SEQ ID NO: 24440 - DNA, 100 bp, Homo sapiens
ttggtttgaattggctggcattggtacataaacatggacttaatggcattttggcagatgaaatgcggaacggaagccgccccttttcaacatgaatgca

SEQ ID NO: 24441 - DNA, 100 bp, Homo sapiens
gcgggcgccaggaccggccgaacgcagaggtatccgcccccagatcatgaacggccccctgcacccccgccccctggtggcgctgctggacggccgcgac

SEQ ID NO: 24442 - DNA, 101 bp, Homo sapiens
gcgaccaagatcaggaacctgccctggtctatcatctcatgaagaactgctgggagacagaggcgtcctttcgcccaaccttcgagaacctcatacccatt

SEQ ID NO: 24443 - DNA, 100 bp, Homo sapiens
gaaaactgggccaaagcagtgaaacgctccatgaattggtgaaaggtgtagcagtcactcggcctacacccacagcatcgaccttgtgaacccagcgacc

SEQ ID NO: 24444 - DNA, 100 bp, Homo sapiens
aaggaacagcattgccacattgcaagggggtagacgcttatactccaggtgtaaagaagacattccagtgtgagctttgcagttacacgtgtccacggcg

SEQ ID NO: 24445 - DNA, 75 bp, Homo sapiens
ctgtggaacttgcaaatcgaaggggcaagattcttgccaagagaattaatgtgcgtattgagcacattaagcact

SEQ ID NO: 24446 - DNA, 82 bp, Homo sapiens
cgagaggaacctctatgccgacatcgacgccgcctggcaggccctgcgcaccagtgtactaatggtcacttgatgtgcgctg

SEQ ID NO: 24447 - DNA, 95 bp, Homo sapiens
tgttcggccgcaagaagcagagccgcgtcacggagcaggacaaggccatcctgcgccgtgccgtccctgcagtgacaccgaggtgctcctagccg

SEQ ID NO: 24448 - DNA, 83 bp, Homo sapiens
caataaaatcgctgcctcccagctgtttggatcacagagaggtcatgcaagacaagataatctgccttccgaaaagagtgcag

SEQ ID NO: 24449 - DNA, 90 bp, Homo sapiens
agtaaccctcactggagaatccagaggaggccactgtctgcagctcccgtgaagatgtccactccagacccacccctgggcggaactcct

SEQ ID NO: 24450 - DNA, 96 bp, Homo sapiens
ccaggatgaacaacgtttccagctgggaattatggatgatgctgcagagtgcttttctgaagatgatgagaaactgaaaaagaggaaggagcgatt

SEQ ID NO: 24451 - DNA, 100 bp, Homo sapiens
agaattaacttctacaagaaaacttacaaacaaccccatctccagacaaaggccatgatccaaaggaaccagagcagttgagaaaactgtttattggtgg

SEQ ID NO: 24452 - DNA, 87 bp, Homo sapiens
aagggggaagtagagagataacaaaagctgctcagagtctcaatgaacttgtgggagattttgataagatctggcgagaacactgtg

SEQ ID NO: 24453 - DNA, 100 bp, Homo sapiens
ctcaaactttcttgtgtgcaactcttgttgcagcttatttctattgcctgcaattggaagacctattatgcaaggtactccaaagattcaggtttactca

SEQ ID NO: 24454 - DNA, 89 bp, Homo sapiens
agatgaagcaattgcacgagccaagcatatggaaatgtctctaaaagtgtgatctttagacagtgactgagtatggatcatttgaacga

SEQ ID NO: 24455 - DNA, 112 bp, Homo sapiens
tacgtgccaccaaagtgacaaagggggcctttggtgacatgcatggactagaggcttttaccagatttcttaaaactgaattcagtgaagaaaatattgaattttggatagc

SEQ ID NO: 24456 - DNA, 75 bp, Homo sapiens
gaagacggaggacgagctgcgggtgcggcacctggaggaggagaaccgaggtgctgtaaaatacctggagtgctc

SEQ ID NO: 24457 - DNA, 100 bp, Homo sapiens
aaaaccttccctttgaattacagagaaactttcagctcatgagggacctagaccaaagaacagagggagctttttggtgcggtccaggtgactcctctga

SEQ ID NO: 24458 - DNA, 82 bp, Homo sapiens
gtgcaggagctggccccgccgcccgccctaccccccaagcagcggcagctggatttgattgccttatgtgacaagcccaaga

SEQ ID NO: 24459 - DNA, 50 bp, Homo sapiens
tggtggcccacttttcctcctgccaggccctcgggaccaaggatcacgtc

SEQ ID NO: 24460 - DNA, 82 bp, Homo sapiens
ggctgttgctgcggagccaggaggggaagcgatggctgggcccgcgtggatctctaagtgtcaactgttagccacgcagatg

SEQ ID NO: 24461 - DNA, 102 bp, Homo sapiens
attccagcaagcggtagatgctgtcgaagagttcctcaggagagccaaagggaaagaccaggttctgtacagagtaatgagatgtgtgacggctgcaaacca

SEQ ID NO: 24462 - DNA, 100 bp, Homo sapiens
ggaagaatttccccagccctgtggatgctgcattccgtcaaggtcacaacagtgtctttctgatcaaggagctgccaaggccatgtctgttccatcatca

SEQ ID NO: 24463 - DNA, 75 bp, Homo sapiens
tggggatccgtcgcacacagcatctccaacagatgcctgaaaacttcatgcctcctgttcccatcacatcaccaa

SEQ ID NO: 24464 - DNA, 98 bp, Homo sapiens
ggggctgctctgaggaccgatgactcggaaagcgctcagaagaacgcttcgcccgttggtgctatccaaacatcatgtcaatggcaacagaacagtcg

SEQ ID NO: 24465 - DNA, 98 bp, Homo sapiens
tttaataagtcaagatgtacaatttgtagtaaattagcagagggtgagagtatggacaatttcaactggggagtgcgcagacgttctctggacagcct

SEQ ID NO: 24466 - DNA, 133 bp, Homo sapiens
ctcgtgaggaaactgccgccgctctgccacggtctgcccacccaacgcgaagacggtaacccgtgtgactttgactgggcccaagtctgttttggtggtctgagaggaaaaaagatgagcttctaaagttttg

SEQ ID NO: 24467 - DNA, 98 bp, Homo sapiens
attggtggtggggccagatcgacgatgaggagggatggtttcctgccagctttgtgaggatgggaaatttggaattaagccttcccagaggagaattt

SEQ ID NO: 24468 - DNA, 50 bp, Homo sapiens
ctcggaaaccggtagcgcttgcagcatgcagcctcccgcgacgatgcccc

SEQ ID NO: 24469 - DNA, 75 bp, Homo sapiens
gaaacattcatggtgtctcaagagaaaaaatccaccgaatgaaagaacggtcaaaatgcagatcttcgtgaaaac

SEQ ID NO: 24470 - DNA, 112 bp, Homo sapiens
ttgaagtggcctatcccaggacaggtggcactctttcagcaattgcttgttcagagctcttggtgatcaattggagggacactcacgaaatcatctcaagcacagacaggag

SEQ ID NO: 24471 - DNA, 98 bp, Homo sapiens
cttcacccagcatttcatccctcgtcgaaaggattggattggcatctttagacttcgtgctctgtctgatgatggagtatctgatcttgaagacccaa

SEQ ID NO: 24472 - DNA, 73 bp, Homo sapiens
aagaactggcttcgggaattttaccaggtcctggatgcctcatcccttagtttcaacaccagattgaaatggt

SEQ ID NO: 24473 - DNA, 117 bp, Homo sapiens
tggtttctttgctggagcacttgagccacgtgcatgaaccaaacccacttcgttcaagacaggtgtttaagcgagtggcaaaattctattcagaagaatgcaggccttgcttttatc

SEQ ID NO: 24474 - DNA, 75 bp, Homo sapiens
ccatgatgtccttcatcctcaacgccctcacctggtaactaggatttctacctcaaccgcgagacctatgcaagg

SEQ ID NO: 24475 - DNA, 75 bp, Homo sapiens
caacaccctgagtgcggatttctgctatgatgacagagggagacgtggtgggcggtccttcctgtgacacgaccc

SEQ ID NO: 24476 - DNA, 100 bp, Homo sapiens
taagaagcacctggatgagacatttgctacagcatcccacattaagtcaacggatcagtgaatgcttgtgaaaagacctcatttatgtttctgcggcaag

SEQ ID NO: 24477 - DNA, 75 bp, Homo sapiens
attctcgacctgctaacagaactggaccttttcgaaactgccagaggcatgcagcattggtgatggaaagccctt

SEQ ID NO: 24478 - DNA, 100 bp, Homo sapiens
agcgctgcggagattgggctagaggcggaggcctgggccacggcggaggcgctgggtactccaaagattcaggtttactcacgtcatccagcagagaatg

SEQ ID NO: 24479 - DNA, 100 bp, Homo sapiens
agttggaacaacatatctacacctctctaaaattgctgcctctggtggggaagtggaagaccccccacccaacctgccttactttgtacgacgctctcgg

SEQ ID NO: 24480 - DNA, 100 bp, Homo sapiens
ctcgaaggcagcacaggacctggaaaaattacatggttacacatcattttggaatgactgtatatcatctggattacgtggctgtatgttaattgaatta

SEQ ID NO: 24481 - DNA, 100 bp, Homo sapiens
caacagcagcagcaagttagtggattaaaatctcccaagaggaatgacaaacaaccagctcttcaggcagctgttgtgctgtgtatggacgtgggcttta

SEQ ID NO: 24482 - DNA, 98 bp, Homo sapiens
ggggcttgccctggtcttgctcggccgatgaagtgcagaggtttttttctggctgagtcatcactagagagtgggaagggcagcagcagcagagaatc

SEQ ID NO: 24483 - DNA, 101 bp, Homo sapiens
atgtttcagacagtccccgacacgtcgtcttacatcaaggtgtctgacttccagcaactgctggcctgtgccagggtgcaagctgagcactggagtggagt

SEQ ID NO: 24484 - DNA, 84 bp, Homo sapiens
ccaaagacctgcgactttgctcagacaatgcagatcttcgtgaagactctgactggtaagaccatcaccctcgaggttgagccc

SEQ ID NO: 24485 - DNA, 100 bp, Homo sapiens
cggagttctacgtgtcccccgaggatctggaggcacagctgcagtctgacgagaggggtggtccccaaaaagaaagagcgtaaggtggcttccgatgatg

SEQ ID NO: 24486 - DNA, 75 bp, Homo sapiens
tgaacggaatgctggagtcagtggaagacggagctggtcggcccgaaggacactcatgaggaccatgatacttcc

SEQ ID NO: 24487 - DNA, 74 bp, Homo sapiens
aggagtgcggccaccaagacttcaccacaatgggagcttgcctgattgtcaacccatcggcctggaccccagag

SEQ ID NO: 24488 - DNA, 74 bp, Homo sapiens
cgagttatgcccaccctccaactttgcgacggaaatgtgtcatcgaaagccagccccacagagcaggtgttgcc

SEQ ID NO: 24489 - DNA, 75 bp, Homo sapiens
gttaaggattccaagtaactcttatttgggtgttcctgaaaagccccatagtgattgagtcttcaaaaccaccga

SEQ ID NO: 24490 - DNA, 50 bp, Homo sapiens
aatctttccagggcagctcctgataagagaacatttccccagaggagctc

SEQ ID NO: 24491 - DNA, 83 bp, Homo sapiens
gtttgatgcgtcacactacgacagtgagaaaggagacaacaagggaggtgtcacagttttccatttagatcaacaacttcaag

SEQ ID NO: 24492 - DNA, 100 bp, Homo sapiens
aattttttctgggaactacaaacaaacgtgccaaaacagtggttttgcatatagatggccttgatgatacgatgacgaagatgatcctgcagaagctgaa

SEQ ID NO: 24493 - DNA, 109 bp, Homo sapiens
ctctatcagggtataaatcaactacctaatgttatacaggctctggaaaaacatgaagttgtgacttctcaccaggagatttggtttgggccaagatggagggttaccc

SEQ ID NO: 24494 - DNA, 100 bp, Homo sapiens
gtctttccgcttcttgaatttctctctgtaaaggagaggaatgttacggcatccggagtcatccctcagatttctctgatcatgggcccatgtgctggtg

SEQ ID NO: 24495 - DNA, 76 bp, Homo sapiens
atcaacttccggccgcagatgtcccagaaggtagaagatagcaccatgccgattcgtcgaactgtgaattctaccc

SEQ ID NO: 24496 - DNA, 100 bp, Homo sapiens
aagactgctattcgttgttgtaaggctctgacaggcattgatctaagtgtgtgcacacaatggttatggaggttttgatgactatggtggctataataat

SEQ ID NO: 24497 - DNA, 93 bp, Homo sapiens
aagtcgcgtgtctaggtgagtcgcggtgggtcctcgcttgcagttcagcgaccacggtggataagattgtggaccagctgcagcagttaatgc

SEQ ID NO: 24498 - DNA, 101 bp, Homo sapiens
aggctgacgtggagcggtacatcgcctcggtgcagggctccaccccgtcgcctcgacaggaaggagctgactgccgatgcacgggagctgaaaggggagct

SEQ ID NO: 24499 - DNA, 99 bp, Homo sapiens
cccggtgtgtgggccagcggagctccgccaatgttttcagttgcaccaagcttagccaccaatgcatcagcagccgcctttaatccctatctgggacct

SEQ ID NO: 24500 - DNA, 74 bp, Homo sapiens
gaatgctggaacgagttataggaagatgtagtccaacccacatcagcagcacttttcaggattagaagaggctg

SEQ ID NO: 24501 - DNA, 90 bp, Homo sapiens
cagtgacggaggagcttgtaccaccggtgctcatgtgactatcacggatcgaaaagtagcattagaatttcttaaatcaaacgttcaagc

SEQ ID NO: 24502 - DNA, 75 bp, Homo sapiens
gcaatcttcaggaaagtaagagggcacgggggcatcttgcatctaccccttacttggagcaaccttgaatggctg

SEQ ID NO: 24503 - DNA, 100 bp, Homo sapiens
ctacgtgttgtcggaagaccgccgggaggaccgacgtgcagaccaagatcactccatggatgaaatgacagctgtggtgaaaattgaaaaaggagttggt

SEQ ID NO: 24504 - DNA, 51 bp, Homo sapiens
ccggcctgggagaagcagcagagaaaggattacggggcgctgaaagacatc

SEQ ID NO: 24505 - DNA, 98 bp, Homo sapiens
ctggaaggaggcggaagccgacaagctgtccatttggtacgacgttggagggatcatagggaaatcctcattgacgattcaatttgttgaaggccaat

SEQ ID NO: 24506 - DNA, 82 bp, Homo sapiens
ccctgagtcactgcctgcgcagctccggccgcctggctccccatactagtcgccggccagaagcggactcctagaagagggg

SEQ ID NO: 24507 - DNA, 100 bp, Homo sapiens
cgagaagctgatcccatgactaaagtgcaggccgaactagatgagaccaaaatcattctgtttggatttaggtggcgagtagaaaaagaagtaatttcag

SEQ ID NO: 24508 - DNA, 51 bp, Homo sapiens
ttcaatccgctctactggaatgtgacttgtgcaccatggacaattttgctg

SEQ ID NO: 24509 - DNA, 115 bp, Homo sapiens
gcggggcccggggctccggcgcgcccggtgacggcggagaggcgccccccgcagcagggggggccctcagcctcttggccttgaacgggctgttcatcttgattcacaaacacaa

SEQ ID NO: 24510 - DNA, 97 bp, Homo sapiens
ggagatcgcggtggagcagcagctgggggcgcagccgctgcccttccccggcatggacaccgcgacaattccccaagcctgaaggaaatccggaacg

SEQ ID NO: 24511 - DNA, 87 bp, Homo sapiens
gtatcagaagacaatatcatgcaagtgtggcaaatgggttcttttcctatgactccatcaattccagctaatcctcccatggctttc

SEQ ID NO: 24512 - DNA, 98 bp, Homo sapiens
ggcgcgcagcacgcgcagtatgttgggccctaccggctggagaagacgctgggcaaggggcagacaggtggtcacttctttcatcgaaactccttgtc

SEQ ID NO: 24513 - DNA, 75 bp, Homo sapiens
gcctaggcattttgctgtctcctcctaatacgtgtctttctcgagaagcaggtggaaacatgagcattcagtttc

SEQ ID NO: 24514 - DNA, 90 bp, Homo sapiens
tcccaggaccctcttcgcgggcgattcgcgtagcctcaggttcatcatgcctagtggcgtataagaagaccccgccaccggtccctccac

SEQ ID NO: 24515 - DNA, 101 bp, Homo sapiens
gaccatcagtgagaaagtgctgacgaaggaagtggagctggacaggtgtcccgcatgagatgtctgcagaatgagacttacagtgcgctgagccctggcaa

SEQ ID NO: 24516 - DNA, 83 bp, Homo sapiens
ctgttcctggagacagaattacttttgatgctttcccaggcttgcagatgggtcaagggttgtggagagtggtcagaaaccag

SEQ ID NO: 24517 - DNA, 95 bp, Homo sapiens
gggaaccttcactaccctggtgggaggcccagagtacgtgcactgcctgctgagtatgggggaaattctctcaggaagccctgcatcttcccctc

SEQ ID NO: 24518 - DNA, 83 bp, Homo sapiens
gggttatctgcgaacacagtagtggaagatgtaaagcaatatttcgagcagtttggcaaggtgaaaggtgtagcagtcactcg

SEQ ID NO: 24519 - DNA, 100 bp, Homo sapiens
gcccgcccaccagttcgcccgtccccctgccccgttcacaatgaatactcccccagttgcaagaggcgcaggaccgtggaagacttcaacaaattctgca

SEQ ID NO: 24520 - DNA, 100 bp, Homo sapiens
cactgtccgccagacctgctgctgcttcaatgtccgcatcgcaaccaccgccctggccatctaccatgtggtaagaatgattgatgttggctgatattgg

SEQ ID NO: 24521 - DNA, 82 bp, Homo sapiens
acgcggtcgtcttcgtgtggcttctgcttagcacctggtgcacaggtgagaagccctaccactgcaactgggacggctgcgg

SEQ ID NO: 24522 - DNA, 50 bp, Homo sapiens
caaactgtccaaggctttggcagggtttttagatgcctgcgagaagggcc

SEQ ID NO: 24523 - DNA, 100 bp, Homo sapiens
aagatgtaaagaagactattcagaaaaagatgattgacgctgttaaagtattgcacaatcagctggtccttttccacaatgccattgccgcttactttgc

SEQ ID NO: 24524 - DNA, 90 bp, Homo sapiens
gttgaacatgtggaaggtgcgcgagctggtggacaaagcgttaagaatgtctgaggggtcaggcggtgctggcaagatggctgcacttga

SEQ ID NO: 24525 - DNA, 75 bp, Homo sapiens
gtcacactaattgccaacaacaatggtacatcaggaacgtctctatcaagaatacaatttcagcaaggctgaggg

SEQ ID NO: 24526 - DNA, 123 bp, Homo sapiens
agaacttcctgatctctctcgctgtgagacatgtctgagactcctgctcagtgtagcattaaggcaaggggctcaaatagtttacctctgctgagatctgtcttggacaaattaagtgctaat

SEQ ID NO: 24527 - DNA, 98 bp, Homo sapiens
catctatgactccaggtcttcagcacccacccaccgtggtacagatgatgattattctccaccgtctaagagaccaaaggccaatgagctaccgcagc

SEQ ID NO: 24528 - DNA, 82 bp, Homo sapiens
ggaggtgcccaaggtcagaaggaagcaccacacagaggttttaaaatcaaagatgggaaaatcggagaaaattgcccttccc

SEQ ID NO: 24529 - DNA, 83 bp, Homo sapiens
tgggcgacctcttccagaagctgggctcagtgctgtcagagagggactacgagagcctcgtcatgatgcgcatgcgccaggcg

SEQ ID NO: 24530 - DNA, 96 bp, Homo sapiens
ctccgggaagggcgagactggagcagagccgctgggcgccggagccgaggcgagcgccgcgcgcaccactgagcctggaaacctggccggcgtcag

SEQ ID NO: 24531 - DNA, 76 bp, Homo sapiens
ccaaggtcgcaaggccagcacggcccctggggcggagggtagatcatgccactaatcgtacccagtttggggagaa

SEQ ID NO: 24532 - DNA, 99 bp, Homo sapiens
aaatctgggaggttgaacttattaatgtgcagcggaactgctgcctgacgctctgcaacttcagcatccccgaggagctggaattccagtaccgccggg

SEQ ID NO: 24533 - DNA, 101 bp, Homo sapiens
gaggacagaatatgcaatcccttggctgaacgacttcacagagaatgcagttgtcttgacttcaggtctgtctgttctgttggcaagtaaatgcagtactg

SEQ ID NO: 24534 - DNA, 100 bp, Homo sapiens
ttcttcctcaataccagcgtaagggctatggcaggtttctcatcgatttcagtccaactggcccaccttcaacactccctctaagcacccagacctctag

SEQ ID NO: 24535 - DNA, 80 bp, Homo sapiens
ggttcgcgcccgccgacccgcgccctgctccctctcagcacctgggcggacggatattgtacctgtggatgcatcttatg

SEQ ID NO: 24536 - DNA, 100 bp, Homo sapiens
ttgattaaccacgacgtggtggagcccctctacatcgaggaaaccgaaacttcattgccccttcaatgtgggaatccagccagaccctattcttggacag

SEQ ID NO: 24537 - DNA, 100 bp, Homo sapiens
aagcattggcctggaaaatccacatcccaacaggctaaacaaggcagggtccaccaaaatatactaaatctgttctgaaaaagggagataaaaccaactt

SEQ ID NO: 24538 - DNA, 90 bp, Homo sapiens
gtggaagtcattaggaacaatggtgcaaggtgatggatgtggacacactgtactaggccctgagagtggaacccttacatccataaacta

SEQ ID NO: 24539 - DNA, 87 bp, Homo sapiens
ggagagactccttgggggtcgagcacataacggggttcgggtgtctcgtgtgtgaacatcacaggtgaatctggattgggaaagtcg

SEQ ID NO: 24540 - DNA, 100 bp, Homo sapiens
atgagtccagcttccctgacatcccaggggctgtaagtgccaacatgactgtgaagggattgagtgttgctatagtgggacccacgtttcaagatttggc

SEQ ID NO: 24541 - DNA, 75 bp, Homo sapiens
gaagaaatgatgatggaaatgaagtataataccaagaaagccccacttgatgactgtccaagtgcctccaaagtg

SEQ ID NO: 24542 - DNA, 119 bp, Homo sapiens
tgctctggacttgggaggctccgttgcctgctcccggagggagacgcgctgccgaggagaacccagcgggtgctggagaatctggtaaaagcaccattgtgaagcagatgaggatcctg

SEQ ID NO: 24543 - DNA, 75 bp, Homo sapiens
ctgcaacagtagcagatgccactgctgttcgtaatggtgacattctgaaagttcccaaacctgaacctataccag

SEQ ID NO: 24544 - DNA, 100 bp, Homo sapiens
tgcctagaccctgcccaacagaatttatatagagatgtgatgttggagaactacagaaacctcgtctccctggggcacggccgagcagatgaggactgtg

SEQ ID NO: 24545 - DNA, 75 bp, Homo sapiens
caggttgccttggaaaatgccaacgccgtgtctgaagcgttatcgaactccttccagatccagatcaagggatcg

SEQ ID NO: 24546 - DNA, 98 bp, Homo sapiens
tgactcggtgcagaggctgcaagtgctggagaacatcatggaaaacaacactcagtggctaatgaagggcttatttcaaaacctttgtccctcagttc

SEQ ID NO: 24547 - DNA, 100 bp, Homo sapiens
cttgactttcagagtatcttgtcgctgcagtggaactattggaaaggccttcactgcacaggatatgggccctcacattttccaaacctgtccatctgct

SEQ ID NO: 24548 - DNA, 100 bp, Homo sapiens
ggcgactctgtgcctcgctgaggggtgctgacggagcttgtgtccaagatgcgggacatgcagatggacaagacggagctgggctgcctgcgcgccatcg

SEQ ID NO: 24549 - DNA, 89 bp, Homo sapiens
aacttgccactgagcccccaggggactgtgcgaactgcagcttccttcaggcaaaagaagaactgaagctactaaaacttcctgggttc

SEQ ID NO: 24550 - DNA, 100 bp, Homo sapiens
gtcgccttccgctacttccgggagctctttgggatccggccagatgattacttgtcctcctgcccctgctcgagtcttgcagtgtgcggcccgacgccag

SEQ ID NO: 24551 - DNA, 74 bp, Homo sapiens
tgaacgccactttgtgtctctctgtcagaaatattcagccatcatcgtctacagactgccgtggacctggaaat

SEQ ID NO: 24552 - DNA, 100 bp, Homo sapiens
gacatttctgctgtatgcaagttttcacttatctcgaaagcctatcagcatagttaagaaaacctcggatcaattctcagctggtggcacaacaagtggc

SEQ ID NO: 24553 - DNA, 83 bp, Homo sapiens
gcgggagctggacggcgagcgcgagcggcgcgagaaagaaagatctaggagagagggagaaattgatgctgccagaaagaggg

SEQ ID NO: 24554 - DNA, 100 bp, Homo sapiens
ctggctgcggctgcgctccccgccgcccgcctgcgcctccggggccggccctgcaggagcgatctctctttgagtcggcatggaagaaggagaaggacat

SEQ ID NO: 24555 - DNA, 75 bp, Homo sapiens
gtatttcaagcattggtcttccaggtcttcctggtccaaagaattggagcgttattcagtatattaatgtcttat

SEQ ID NO: 24556 - DNA, 76 bp, Homo sapiens
atcaacaacagtttcctgcgcgaccacagctatgcgaccgaagattcaggcttcttcaggagaaagcaagtacact

SEQ ID NO: 24557 - DNA, 100 bp, Homo sapiens
caacagcacggcgtggcctctcagcctcggttttgctgttactgctcagtgtagtcacaccttgaataagaaatggaaaaccttgggatgttgataaagc

SEQ ID NO: 24558 - DNA, 100 bp, Homo sapiens
ttttcatggatgcccctgtttctggtgcatcgagagtaaacatgaggttacgatcctgggaggacttaatgaatttgtagtgaagttttatggaccacaa

SEQ ID NO: 24559 - DNA, 100 bp, Homo sapiens
taaccctgggctcagggtcagagcccagcctggggactatgtgctggtgaaggtgctgctacccccgtatgatgatgccactgtgaatggtgctgccaag

SEQ ID NO: 24560 - DNA, 90 bp, Homo sapiens
gggacagcgtcatcagggaatgtcagtgacttggcgcagactgtcaaaacctttgataaccttaagatatttcgacaagcaagagcaagc

SEQ ID NO: 24561 - DNA, 75 bp, Homo sapiens
tcgtcaatgtatacaacgatacccagcatagttgttgcccaaatctcttggtacagaatgtttttgtagaaacac

SEQ ID NO: 24562 - DNA, 75 bp, Homo sapiens
ctgcatgtggagctgccgtctcagcagccttggggagcagtactacaaagatgccatggagcagtgccacaatta

SEQ ID NO: 24563 - DNA, 98 bp, Homo sapiens
tcacccgggccagttttcaaggcgggctgtaactggtggcatttgtcccgggaccagatcctgataacttaagtgactctctcttttccggtgatgaa

SEQ ID NO: 24564 - DNA, 101 bp, Homo sapiens
ccacatcaagatacgagttccaaatgatgtccgagctcagcgatgaagccagcgagccggaactcctgaaccgcagcttgtccatgtggcacgggctcggg

SEQ ID NO: 24565 - DNA, 75 bp, Homo sapiens
ttacctgtgagatgtttcatcccaacagtcacggtctagatcacattctcgatccagaggaaggcgatactctcg

SEQ ID NO: 24566 - DNA, 98 bp, Homo sapiens
cgtgagcagaacgcccgccctggagcagttaggaccgaaggtctccggagagtcgccggcggtgccaggacgcagtcagccttcacctcaagcaggac

SEQ ID NO: 24567 - DNA, 88 bp, Homo sapiens
gcgcccgctgctcggtggcaggagggccggcggagcgccatggcctgcatcctgaagtggactgcccctgatggtgattattcataaa

SEQ ID NO: 24568 - DNA, 89 bp, Homo sapiens
ggaaaagcgagcgatcgagcgagcgcgcgcgcgaaaactccgggcagacccaagaaactcgagagatcttacatttccactataccaca

SEQ ID NO: 24569 - DNA, 82 bp, Homo sapiens
agggcctatggtggttccatgtgtgctaaatgtgttcgtgacaggtgattatcctgaaccatccaggccaaataagcgccgg

SEQ ID NO: 24570 - DNA, 80 bp, Homo sapiens
ctctttgcagaggaatattggacctcaatacctataacgtcgccaactgggtacatggaaaactcagtctcctacagcgc

SEQ ID NO: 24571 - DNA, 100 bp, Homo sapiens
gcggcggctggagcagcgctggggtttcggcctggaggagttgtacggcctggcactgcgcttcttcaaaggtctttctcctacatggacagctataacc

SEQ ID NO: 24572 - DNA, 75 bp, Homo sapiens
ccgattcctcctccttggtcgccgcgtccttggctggcgtgtatcagaagcatgtgcacacgtatcgcattctgc

SEQ ID NO: 24573 - DNA, 100 bp, Homo sapiens
cccgccgcttcctgctctgtctctacttggtgggcttcttgtgctgggcctaaaggagataacatttatgaatggagatcaactatacttggtccaccgg

SEQ ID NO: 24574 - DNA, 88 bp, Homo sapiens
gaaggcacagctcactccagcactacgtgaccagcacgttcctggagccgagagaatggtcaggtcttgccaagaaatattgctgttc

SEQ ID NO: 24575 - DNA, 100 bp, Homo sapiens
gaaagtccctaaaaatcacgagttcaggcgtctgagacttggtgggaacggaccttcctcttaggaaaccatttctggacggctaaagacctcaccgagg

SEQ ID NO: 24576 - DNA, 100 bp, Homo sapiens
gagaaggatgacaccggagtttgacgaagaggtggtttttgaggtgtcatggagaaactccagctgggcccagagattctgcagcgggaaaatccaaggc

SEQ ID NO: 24577 - DNA, 100 bp, Homo sapiens
ctcatccacaatgatttctccagtgctcatcttgttctcgagttttctctgccatgttgctattgcaggacggagacaaggtgcaacgctggttgataga

SEQ ID NO: 24578 - DNA, 74 bp, Homo sapiens
gctcctggtggcacccagtggcctgtactactgctccagcagtacccgcggctacgggaggagatggagcgcat

SEQ ID NO: 24579 - DNA, 130 bp, Homo sapiens
gacgaggcggaagaccgcgcgcagggcctgcagcgggagctggacggcgagcgcgagcggcgcgagaaagagcatcagatccatgctgctgctgactcggagccccacagcttggcacaggctctctcag

SEQ ID NO: 24580 - DNA, 100 bp, Homo sapiens
ctcatcccctggatgggggaccacaagatcctcatcgacagcttcctgcctgacacagctcacttcaagaagtgcacaatgtcagaacgtggaattaagt

SEQ ID NO: 24581 - DNA, 82 bp, Homo sapiens
cagttggaagcagccgatccagcctgcggagcctgtggggcaggattggattcagcatcaaaatacatctactcatattgag

SEQ ID NO: 24582 - DNA, 105 bp, Homo sapiens
atagaactgaggcactgaagagaatggcagatgcactggataactatgttattcgagtgggccgagtacattctatttgccgcgttgcttctggtcgtctgtgta

SEQ ID NO: 24583 - DNA, 75 bp, Homo sapiens
ctgggaaatcagggctccttcttaactaaagatatgattctataacagactcttccagaaatgatatgaagagga

SEQ ID NO: 24584 - DNA, 74 bp, Homo sapiens
agcgctcaggaatcatgggctatcaaaggtcacagaagatgtgaattcaagtatcaagacatttttttgtccca

SEQ ID NO: 24585 - DNA, 75 bp, Homo sapiens
agttccccaactcagagttttcactcttccaaagaaagatactaaaatgtctgatgatgctggtgacaccttagc

SEQ ID NO: 24586 - DNA, 75 bp, Homo sapiens
ggccccgatggccccgaccgcgtgctggagctcttcgacccacccaagaagatgcctctaatggaggagtttctg

SEQ ID NO: 24587 - DNA, 100 bp, Homo sapiens
atctaaaggaggttttaaacagtataacaggtggcaggtgccctacagaccattgagacctccctggctcagtacagcctcacccagctctgtgtgggct

SEQ ID NO: 24588 - DNA, 90 bp, Homo sapiens
gccatctatgactccaggtcttcagcacccacccaccgtggtacagagccctcatcctgcaagtctctcggaaacacctccctgagtggc

SEQ ID NO: 24589 - DNA, 82 bp, Homo sapiens
tctaccagggatggggtgtcagcggccctgggttggagcacagaggttcgatacaagaggctgttttcctagcgtggcttgc

SEQ ID NO: 24590 - DNA, 50 bp, Homo sapiens
gaaaacaacttcgagggcagatcaagaggtgttgccaaagattcacgaag

SEQ ID NO: 24591 - DNA, 76 bp, Homo sapiens
tgaatggaaagccagtaggacacgaaggtgtttattaaccttgcaagaactcttcaggcacatatggaagatctcg

SEQ ID NO: 24592 - DNA, 97 bp, Homo sapiens
agtgcacgctgtcggtggaaagcacagggcaagaatgcctggaggctgtggcccagaggctggagctgcgagagggctctgggtttgcagagagccg

SEQ ID NO: 24593 - DNA, 109 bp, Homo sapiens
cctggagcctcagttggaagcagccgatccagcctgcggagcctgtggggcaggttgcacactgggccacagaggatccagcaaggatgaagaaatggagcagcacaga

SEQ ID NO: 24594 - DNA, 90 bp, Homo sapiens
tcccacggagcagcactcttcaccctgcacagccttgttagtgccggtggtggtgtgcacattgagccccggtatagacagttcccccag

SEQ ID NO: 24595 - DNA, 100 bp, Homo sapiens
ggaaattaagcctttgcaatttgaaattatgattgacagacttgaaaaagccagttctaatcaggttgttattgatgccttcagattgatcaatgctaat

SEQ ID NO: 24596 - DNA, 87 bp, Homo sapiens
gctgcccgcacgccccgaccttccatcgtagatgaagactggcccatttgcagagcactccaaccagctgtggaacatcagcgccgt

SEQ ID NO: 24597 - DNA, 83 bp, Homo sapiens
ccagcggcaggaccagcgggcgggggcccacgagtaactaggatttctacctcaaccgcgagacctatgcaaggacggtgtgg

SEQ ID NO: 24598 - DNA, 100 bp, Homo sapiens
tctatcccaggaatacagctttgcattagaaaaagagccccatatattgcttatctcactcgttgtcgacaaggactacagaccacacaggctcacctgg

SEQ ID NO: 24599 - DNA, 101 bp, Homo sapiens
cctctcctcattcttattgttttattagggcaatttgtctcaataaaagcccaggaagaagacgaggatggacatggatttgattgacatactttggaggc

SEQ ID NO: 24600 - DNA, 75 bp, Homo sapiens
atggtggcagaaataccagaagtttgtgaatagcacaatggaagaagctggactttgtgggttaagagagaaagc

SEQ ID NO: 24601 - DNA, 90 bp, Homo sapiens
aattgagaaacaggcacacaagtgtgaggagttgctaaatgctcagcatgactatatgaaggaagaggaaggttttcctgaagatgaggc

SEQ ID NO: 24602 - DNA, 71 bp, Homo sapiens
caaagtgtaccagtcggcagcatggggatagctgggagtatggccaccctgctccacgatgcggtaatgaa

SEQ ID NO: 24603 - DNA, 74 bp, Homo sapiens
cagttcatcagccaccgattcccagaagatcatgatcccaccattggatagtgatgaggaagaagaagacactg

SEQ ID NO: 24604 - DNA, 87 bp, Homo sapiens
ggccgggaagcttctgcgagccctagcgctgcggccccgcttcctggcggccgggtcccagatgacttcctgaagccacagatcatc

SEQ ID NO: 24605 - DNA, 98 bp, Homo sapiens
cgtcagcgagccgtgagatgcgtggtccaccatcggtgacctcaccgcctcggttcgccctcagccgccccggcagcgcccggttaccacatggccaa

SEQ ID NO: 24606 - DNA, 100 bp, Homo sapiens
aatacttcatatttggcttcaatgtcatattttggatcatatctgaagatattagtgagctacaaaagaatcaaactacatctgtagccaaaattgcaca

SEQ ID NO: 24607 - DNA, 75 bp, Homo sapiens
aacagcagcgccgtcccgtccgacagccaggcccgggagaagtaaggggcctggataccaagaagtgactgctca

SEQ ID NO: 24608 - DNA, 100 bp, Homo sapiens
ctgcgctggccgggggcgcgggcggcggcgccggcaggaaggtccctgtgcgttttattgcgacctgccggtgggaactttgtctccgagtcggagcagc

SEQ ID NO: 24609 - DNA, 100 bp, Homo sapiens
ggctgccctctgcctggagaacttctcctcccaggttgtggaacgacacaacaagccggaagtggaagtcagctatcatggtgaacttacttcagattgt

SEQ ID NO: 24610 - DNA, 99 bp, Homo sapiens
ccgggtcatctccagatgctagggttatgggggactcgtgggggatgttagcgtgcctgtgcacggtgctctggcacctccctgcagtgccagctctca

SEQ ID NO: 24611 - DNA, 90 bp, Homo sapiens
atcgcccagctgtacatgatacaggatggagtgatggtgctcagcgcaacccaccggtacaagaagaagtacgtcaccaccttgttatac

SEQ ID NO: 24612 - DNA, 100 bp, Homo sapiens
aggcatgaggtgcagctggacatggaaccccagggctgcctggtggctgaggcggcttacagggagaacacagttggcctccaccgtttctgccccacag

SEQ ID NO: 24613 - DNA, 75 bp, Homo sapiens
aggaaaatttcgatattgaagtgtcaaaatccatagatggaaaagatggtggtgtttactagtgatcctcataaa

SEQ ID NO: 24614 - DNA, 98 bp, Homo sapiens
acaacattaatcagatactgcatttaaggggtgatccattcatgttgcagcagtctacaaatccagcaccaggaattctgggacctccacctccctca

SEQ ID NO: 24615 - DNA, 120 bp, Homo sapiens
accccaaaagaaggcttacagtttcagcctgctttgcagtcagggcctgagggaggacaagctctttggggctaccaaacagaagcagcaatgcctgttgtgtggccaacccttctggat

SEQ ID NO: 24616 - DNA, 73 bp, Homo sapiens
ggcagtggtggaaaagatccatgccaagccatctgtgagaaagacacactgcagtggaaggaaacacaaagag

SEQ ID NO: 24617 - DNA, 134 bp, Homo sapiens
ggttgcccagcatgcccactggcaggagagagggaactgacccacttgctcctaccagcttctgaagattttgcaaaccccctcatcctgcctggctctagtgggccgggctccacaagcgcagcagccgaccc

SEQ ID NO: 24618 - DNA, 100 bp, Homo sapiens
ttcattctggattggtggatctgaagtacaaaatattttccagatttacagagtaaatttgtggccaaagaaaatgaagtacagagtctgcatagtaagc

SEQ ID NO: 24619 - DNA, 102 bp, Homo sapiens
ccggagaccccgaaaacggaagcgcagggagaaggaagaggtgtttgaaaaggggggacacagcgattgccacgcgccattggaatgtccctggccaaggag

SEQ ID NO: 24620 - DNA, 100 bp, Homo sapiens
cagaaacctggctcctggctcctggctccctactcttctaaggatcgctgtcctgacagaagaggtatgcatcggtttggtcctataccccttggttcct

SEQ ID NO: 24621 - DNA, 75 bp, Homo sapiens
ggaccggcggcgctggaggagcgaggcagctgtactaggactgggaacggatgaggaaactgaggctcagagagg

SEQ ID NO: 24622 - DNA, 83 bp, Homo sapiens
aaaccccatttggccctcaaacaggaaagtacacaggaagatgctatgaaatttccatcttcccaatcttcccagccttccag

SEQ ID NO: 24623 - DNA, 75 bp, Homo sapiens
cagccttccacctggtatagtcagtacaagcgggggtccctggttgttcctggtcattgagtacgtcaacggcgg

SEQ ID NO: 24624 - DNA, 90 bp, Homo sapiens
tcttgttggtgcttcctcatgtattgaagaattccaatcccagttcatttttgtgtccctgttacctgagaatgacagatggaatgaaac

SEQ ID NO: 24625 - DNA, 100 bp, Homo sapiens
gcggatcctgctggtgggagaacggcactgtgtttagtcttgagtcagaggaggaggaataccctggaatcactgcagaagatagcaatgacatttacat

SEQ ID NO: 24626 - DNA, 100 bp, Homo sapiens
accacaatgttggtcttagtaaatgtgaaatcaaagttgcacaacccaaagaggtatataggcagcaacagcaacaacaaaaaggtggaagaggtgctgc

SEQ ID NO: 24627 - DNA, 100 bp, Homo sapiens
cgccggctacagcgggaagagcggttcctgcgtgaagaccagctgggagcccactgcctgctgccacctccaactccggccccctcaccatgcactccct

SEQ ID NO: 24628 - DNA, 90 bp, Homo sapiens
caaacgcttgtgcgagtaaatgtagagtcattaacaaggagcatgtactggccgcagcaaaggtgatctgtgaaaatggttcgctattca

SEQ ID NO: 24629 - DNA, 87 bp, Homo sapiens
gcatctttgtctagccccagtgcaggatgtatatacaaagacgatatctttatggtcgtatatcaatagccagctagacgagttttc

SEQ ID NO: 24630 - DNA, 90 bp, Homo sapiens
gaaggtccggggcttgccctggtcttgctcggccgatgaagtgcagaggtttttttctggggctgctttcttacctcatcattgataggc

SEQ ID NO: 24631 - DNA, 100 bp, Homo sapiens
atcactggtcgcactgagggtgaagtggcaggaggaggaggaggggctccggctggtctgtggtgaggggttgcacagtgccagcattcctgggatcctg

SEQ ID NO: 24632 - DNA, 75 bp, Homo sapiens
gaaattcgaaaacaaagagaacagcaagaaagatttcagcggttggtcaaagaaaaagtgatgtatgaaaaagag

SEQ ID NO: 24633 - DNA, 100 bp, Homo sapiens
cggcaggagaggaggctggccgagatcaaccgggtaactatggtggtggtgggaactataatgattttggaaattatagtggacaacagcaatcaaatta

SEQ ID NO: 24634 - DNA, 82 bp, Homo sapiens
caacgcatttttgagcctccacctcccaaaaaacagaatggagcaattggaagaaagctgttcaacggttttgtgtatagca

SEQ ID NO: 24635 - DNA, 98 bp, Homo sapiens
gggcagaggctagcgagcgagccccaggaccctgcggccgtgtctctgcccacgtcgagcgtgcccgagacccgagttggcgacaaacagcccacaat

SEQ ID NO: 24636 - DNA, 100 bp, Homo sapiens
ggaatgtggacagttactaatatctgaaaaccagaaggtggcagcgcaccataagtgcatggtgcccaaggaccaagtccttgacactgtctacctgttc

SEQ ID NO: 24637 - DNA, 75 bp, Homo sapiens
gacgccgccgctgcctcccgctgtgttccatgggaaccggtacaagcagactctatagtgctctcgccaagacac

SEQ ID NO: 24638 - DNA, 90 bp, Homo sapiens
aaggaaagacctcagagtgttctcagtctctgaaagaagatgaatttggctgagatttgtgataatgcaaagaaaggaagagaatatgcc

SEQ ID NO: 24639 - DNA, 110 bp, Homo sapiens
tttcaaaactggatatggccaggatgctatagcattgtcagtttagagatgtttatgattacttccgagctgtcctgcagcgtgatgaaagaagtgaacgagcttttaag

SEQ ID NO: 24640 - DNA, 97 bp, Homo sapiens
ggagtgctgggccgaggacagggcggcaggggtgacagtggggtccaggagagtctcaaaatcctaaggttatcaatactctggctgaccatcatca

SEQ ID NO: 24641 - DNA, 83 bp, Homo sapiens
tcgccctttccacctcgcggcagttcgaggctgaggggatctggcggtggagcgctaggatcagacgcccccgcgatgaccag

SEQ ID NO: 24642 - DNA, 82 bp, Homo sapiens
tggactccagttatgcaaaaagagccctattacttatgcctgggaaggtggaaaattgatatcagagaatgatgattttgaa

SEQ ID NO: 24643 - DNA, 74 bp, Homo sapiens
ccgcgtgcgccttgctcgcccgcagccccgagaccgcaggagggtttgcatttgtgtatgaagctcaagatgtg

SEQ ID NO: 24644 - DNA, 88 bp, Homo sapiens
gcaaacatagagaattctgggcttccacacaactccagtgctaactcaacaggaatgaagccaagagtgatgaaagaagctgtatcta

SEQ ID NO: 24645 - DNA, 101 bp, Homo sapiens
cttcttcagaggttacgagcaaagggaataaggaatccggatcattctagagctttaagttgcgacctttccttccccagcaataaactggtctctggaga

SEQ ID NO: 24646 - DNA, 96 bp, Homo sapiens
gatccggacgctggtgcagcgcatccaccagctgcaggctgagcgcgcgcagggcttccgccgactggaggacctgcgtggaagcctatgtgaagg

SEQ ID NO: 24647 - DNA, 100 bp, Homo sapiens
gtgccgggttccgatttcagcatcggggcagacaccgccctgaacactatcaccgacgcccggaggctgtttgatgtcctgcacgagcccttcttgaaag

SEQ ID NO: 24648 - DNA, 75 bp, Homo sapiens
cttgtttgcaaaatgaacagtatccataatgagatggcatcaacatcagataaaggtgcccaaggaagaaatgac

SEQ ID NO: 24649 - DNA, 52 bp, Homo sapiens
tggccaacctcttgtatgagaaacgagttcaacctggtcattgctatcatct

SEQ ID NO: 24650 - DNA, 100 bp, Homo sapiens
gcaagttgactaccaccagtggagtccaggatgagcgatttgaaattattaatgcaatttatgaacctacggaagaagaatgtgaatggaaaccagatga

SEQ ID NO: 24651 - DNA, 99 bp, Homo sapiens
gctcaccacaacctccgtctcccgggttcaagcgattctcctgcctcagcctcctgagtagctcggattacaggccaggactcagccagtcccatccgg

SEQ ID NO: 24652 - DNA, 90 bp, Homo sapiens
gtgcgatgccagtattgactgcaccacaactcattggtggcgatgccagtccctccactccagaggagaacgaaaccacgacaaccagcg

SEQ ID NO: 24653 - DNA, 83 bp, Homo sapiens
tgaagagcgacaagccgctggcagccgcggatctcaccgccgctcagggcgatcagtgggtgaccgcggctgcgagggacttt

SEQ ID NO: 24654 - DNA, 98 bp, Homo sapiens
gaggttttctctgaagaccgtgaagccactttcactttttgacagtaagagttgaagttggtgaagacattcatgatttaaacaccagatcctgaaag

SEQ ID NO: 24655 - DNA, 75 bp, Homo sapiens
ctatcattttctgttctacacacaaatcccttacattggccttcacagttgttgatcacatagcatggtcatcca

SEQ ID NO: 24656 - DNA, 100 bp, Homo sapiens
gttttaaatcaagatttaacattccaacacataaaaattatttatccaacagctcctcccaggtattgatgaagatgaccctactgctgatgataccagt

SEQ ID NO: 24657 - DNA, 100 bp, Homo sapiens
tggtgaggagatgaccctcaaacagttcctcgactattttaagggacctaatacctatcattgctgctctggaatataatcagtggttcacaaaactgtc

SEQ ID NO: 24658 - DNA, 96 bp, Homo sapiens
gatgaacccaacctagtgggtgtaatacatcatgaactgcagggagccagcattcgaacgttcactccattttattttctggtggagccggtggat

SEQ ID NO: 24659 - DNA, 90 bp, Homo sapiens
cctgggaagcagagtgtctggatggaacctgagctgggtctctgactcacttctgactttagattttaggtgatgggcaagtcagaaagt

SEQ ID NO: 24660 - DNA, 90 bp, Homo sapiens
tgggggagctaggccggcggcagtggtggtggcggcggcgcaagggtgagggcggccccagaaccccagacagagccttgctctgttgcc

SEQ ID NO: 24661 - DNA, 100 bp, Homo sapiens
cagcgcgggtcggagtctgggggttcgcgcccgccgacccgcgccctgctccctctcagcacctgggcggacggttattatcgcactgagagagataagg

SEQ ID NO: 24662 - DNA, 100 bp, Homo sapiens
caggggaaccgcctcaccgttctgcccccagaactaggctaagaaatggcatttcaaaaggcagtgaaagggacgattcttgttggaggaggtgctcttg

SEQ ID NO: 24663 - DNA, 82 bp, Homo sapiens
cgcgacccccggcaacccggagaaggtctacagagcggcctgcgccagcgacttcgagagctgtgcccaggagtgaacaacc

SEQ ID NO: 24664 - DNA, 98 bp, Homo sapiens
tttgctgttcgatctggtggagctactggcgtggtagttaaaggcccagatgataggaatcccatctcatttagataggaagccacaacggaggggag

SEQ ID NO: 24665 - DNA, 76 bp, Homo sapiens
gccacgtatgacactgccggtctcaccatgcccacagcaacactggacatggtcgcagttctaggggagaccacag

SEQ ID NO: 24666 - DNA, 90 bp, Homo sapiens
gagaaataaggacaaaagccaagaggaggacagttcgctacacagcaatgcatcgaggtcacagggattatggacccagaacagatgctg

SEQ ID NO: 24667 - DNA, 100 bp, Homo sapiens
cagagtcgccgccggcgtcggcgccgattcatgatgttgctatcaaaagttgagaaattgtcagaagaaatcatggagataatgcaaaatttaagtagta

SEQ ID NO: 24668 - DNA, 100 bp, Homo sapiens
ggagacaccctctgggggtcctctctgagtcaaatccagtgataattcgtgtccagtccccggatggagtgaagcggatcacagcaacaaagagagaaac

SEQ ID NO: 24669 - DNA, 83 bp, Homo sapiens
gaagagtcaagggcacagagagatgcaaagcgacctaaaattaggttgtggcagcactgcctgaaggtatgagaccagattct

SEQ ID NO: 24670 - DNA, 100 bp, Homo sapiens
caggagaccagctggtccaacgtcttctggctcatcccccctacagcccacaacctggagctgtacgagaattggctgctgtcagggaaacagggagaca

SEQ ID NO: 24671 - DNA, 74 bp, Homo sapiens
ctagaccggtttttagtccattgactatgcagcctaatggaaacgagcagatgaaagtggaaaactttgaagct

SEQ ID NO: 24672 - DNA, 102 bp, Homo sapiens
gtcagacgcagccgtagacaccagctccgaaatcaccaccaaggaaagatgaatgggagggctgattttcgagagccgaatgcagaggttccaagaccaatt

SEQ ID NO: 24673 - DNA, 102 bp, Homo sapiens
acccagaccctggagcctcagttggaagcagccgatccagcctgcggagcctgtggggcaggttccagcaacagatagaaatgctttaagttcactctgggg

SEQ ID NO: 24674 - DNA, 100 bp, Homo sapiens
cctgcatgtggagctgccgtctcagcaggtgctggagaatctggtaaaagcaccattgtgaagcagatgaggatcctgcatgttaatgggtttaatggag

SEQ ID NO: 24675 - DNA, 75 bp, Homo sapiens
aacccgccagcttggacatctggcactgcgagtccacgctcagcagcgggaaatcctcattgacgattcaatttg

SEQ ID NO: 24676 - DNA, 75 bp, Homo sapiens
cctggaattacttcaatcaagcatcgccgaatggaggctgtgcgactgcgaaaagagaaccagatctacagtgct

SEQ ID NO: 24677 - DNA, 98 bp, Homo sapiens
ggagtctctgtccgggggcctggctaaggaaaccctattacctccaggtactccaaagattcaggtttactcacgtcatccagcagagaatggaaagt

SEQ ID NO: 24678 - DNA, 100 bp, Homo sapiens
ctcctgctgctgtctttgtttgccggattagatccttccaagagccataagtgtgatccttggtgacaggtggaagaaaatgaagaatgaagagagaaga

SEQ ID NO: 24679 - DNA, 90 bp, Homo sapiens
agccctaccttactggacagtcaaatcaggaaacatggtagaatggtgcttacctcaagatattgaccttgaaggtgttgagttcaagtc

SEQ ID NO: 24680 - DNA, 83 bp, Homo sapiens
tgatacattggagaccattgctcctgctctattatcaagtcctaaattttggaatgattgtctcatcggcactaatgatctgg

SEQ ID NO: 24681 - DNA, 74 bp, Homo sapiens
attcagaaggagctagctgaaataacccttgatcctcctcctaattgcagatatttagcttcctgtggtatact

SEQ ID NO: 24682 - DNA, 101 bp, Homo sapiens
cggaccggcgtccccggcgcgaagaggctggactcggattcgttgcctgaggttgactttggcagaatatcatgaacaggaagaaattttcaaacttagac

SEQ ID NO: 24683 - DNA, 50 bp, Homo sapiens
aaagcatactgcgagccctgctacattgtcatcctccttggcctccagtg

SEQ ID NO: 24684 - DNA, 98 bp, Homo sapiens
aagaggaagaggaaagcaaaggagtcagggatggctcttcctcagtgtaaacaggaacatcgataagtagtgtaaaaacttgcacaatgaaatccgaa

SEQ ID NO: 24685 - DNA, 80 bp, Homo sapiens
agactcgcggttgctacgcgcaccatggctggagacgttggacctctcgaacaaccagctgagcgagatccctgcagagc

SEQ ID NO: 24686 - DNA, 75 bp, Homo sapiens
ggacagccgaactggaatctggatgagcagctcaagcagcctcttccatgagtggggagcccgctgcttgtctcc

SEQ ID NO: 24687 - DNA, 74 bp, Homo sapiens
aagcccagattccaaaacttatgtcaagaatctggtggacagtaacaaactttggtgaaatttcaggaaccata

SEQ ID NO: 24688 - DNA, 100 bp, Homo sapiens
cttgacatggagaaccaagcccataatacgatggggaataactcaagtcacctgtactggaaatcagtttgctgaaattaatcaacgattcttgaagttg

SEQ ID NO: 24689 - DNA, 89 bp, Homo sapiens
accagttggtggtgacaagaacggcggtacccgggtggttaaacttcgcaaaatgattgcagcgagaacattgggagatcttgtgcgga

SEQ ID NO: 24690 - DNA, 82 bp, Homo sapiens
gctggaccagttgatgggcacctcccgggacggcgtggtgaccaagatgaagatgcagaggaccattgtcatccgccgagac

SEQ ID NO: 24691 - DNA, 96 bp, Homo sapiens
gaacaaaatacaaatcatggagccgctggggtcccttttgcctcagatactattttgaagggcgccctgcgtccggcagaggaggcgagcatcccg

SEQ ID NO: 24692 - DNA, 99 bp, Homo sapiens
ctcttgccatgtgtgaagcactttatacacctgtaagggtctgaggcttcaggaccccaacttctgccagtgagagcactaaatgaagtcttcattggg

SEQ ID NO: 24693 - DNA, 100 bp, Homo sapiens
gacgcgacgcacaaccaggcgatggtgcactggacgggcgagaacagcagccaaatggttatgagccttagagtttctgaactccaagtactgttgggct

SEQ ID NO: 24694 - DNA, 51 bp, Homo sapiens
acatttagcgcatcatgtgatccggatgtgtatatctcatgattgatatgg

SEQ ID NO: 24695 - DNA, 97 bp, Homo sapiens
agcagctcaccagtggagagaagattttgcaagagaaaaggaacagttccgtaagctctttattggtggcttaagctttgaaaccacagaagaaagt

SEQ ID NO: 24696 - DNA, 100 bp, Homo sapiens
ctatagaaatggctgaaggaaaacctccttatgctgatatacatccaatgagggcaagagtttgtcgatgcttatgtggattacatattcaataaatcag

SEQ ID NO: 24697 - DNA, 49 bp, Homo sapiens
ccgagcgaccgtgctgccatggacacagttgattatggaagattcccac

SEQ ID NO: 24698 - DNA, 116 bp, Homo sapiens
agcgtgagcagccggaggatcgcggagtcccaatgaaacgggcagccatggccctccacagcccgcaggagtggaaacaaaatgtcagtcagtgtgcatgagaaccgcaagtccag

SEQ ID NO: 24699 - DNA, 74 bp, Homo sapiens
gtacacaaaatggatctggtacaggaggatcaacgggacctggttgaaactgataaagccactgttggatttga

SEQ ID NO: 24700 - DNA, 149 bp, Homo sapiens
aagttgtggaatatgttaaaggtctacagaaagaagatggttcttttgctggagatatttgggtacctggctttcctccgcaagcggatgaacaccaacccttcccgaggcccctaccacttccgggcccccagccgcatcttctggcg

SEQ ID NO: 24701 - DNA, 75 bp, Homo sapiens
ctttgcatccttcaatgacacttttgtccatgtcactgatctttctggcaaccgggcccctcagatgagagctgc

SEQ ID NO: 24702 - DNA, 82 bp, Homo sapiens
gcgcaaggtcgccctcaaggccatgatcaaaacgaggcagtggagaaggtgacacagcacatccacggcctgtctgggaaga

SEQ ID NO: 24703 - DNA, 53 bp, Homo sapiens
accgcagtcgtgcaggatctgaaggaggaggtcgagttgtgtcgtgttagcag

SEQ ID NO: 24704 - DNA, 74 bp, Homo sapiens
ctgaaatctgaaaaatttcaattccaatcaccaagatcactccatggatgaaatgacagctgtggtgaaaattg

SEQ ID NO: 24705 - DNA, 100 bp, Homo sapiens
aggacgaggcggcggccgcggggaggaggatgggggctaaccagttagtggtgctcaacgtgtacgacatgaaaaaagcttggccagaccacaagcggga

SEQ ID NO: 24706 - DNA, 89 bp, Homo sapiens
agagaaccgaggaacgaagaaacagacattcaacatgattgcatttgaagggtcttgctcctcagaacaaaccagaattgcagaaggtg

SEQ ID NO: 24707 - DNA, 100 bp, Homo sapiens
gcaggcggacaaggacgcgctggatggcctcctccagcaggatcccctaacaacagtgagagagcaatgcgagcagttggagaaatgtgtaaaggcccgg

SEQ ID NO: 24708 - DNA, 51 bp, Homo sapiens
tgcccatttccccagggcatggagtggctttcaacttcattgtcaatgata

SEQ ID NO: 24709 - DNA, 154 bp, Homo sapiens
aagaaaaagaagaaaacccgaggtgatcattttaaacttcgcttccgaaaaaactttcaggccctgttggaggagcagggcaccgcgtccgtgctgcagcgccggtcccccaatgaggagtacgtggaggtggggcgcctgggaccctctgact

SEQ ID NO: 24710 - DNA, 89 bp, Homo sapiens
acagctgctagccaggaacatggactgaagtatccagcgctcattgggaatttagttaaggcgcctgaagctggcccagtttgactacg

SEQ ID NO: 24711 - DNA, 50 bp, Homo sapiens
ctctccttcttctattacctgtacaggttttggagccctctcttaagtca

SEQ ID NO: 24712 - DNA, 100 bp, Homo sapiens
gggagaaagtcgtagggaatcgagactggacagacagaggcaacaaaaaccattgagaaccttgtacgtgttggagagatgaatggagagtatagaggca

SEQ ID NO: 24713 - DNA, 75 bp, Homo sapiens
gtgagcaagctgacattgcgaggatgctatataaagacacatgtcatgagtctcggaagggtgctgacctggacc

SEQ ID NO: 24714 - DNA, 118 bp, Homo sapiens
gccctgtggatgactgagtacctgaaccggcacctgcacacctggatccaggataacggaggctggagtgcctggtgaagaatgtgatgggatcactagcatgtctgcggagagcggc

SEQ ID NO: 24715 - DNA, 83 bp, Homo sapiens
gttttcgcgtggttcttttgcaagtttgctaatccagactttacacaacctatctcagaagttgtagatgaagtaattcagaa

SEQ ID NO: 24716 - DNA, 105 bp, Homo sapiens
cgcgagcacagagcctcgcctttgccgatccgccgcccgtccacacccgccgccagatgatatcatcaagttgaatcgaaaggaagggaagaagcagaattttcc

SEQ ID NO: 24717 - DNA, 97 bp, Homo sapiens
aaagaaccagatgtcaaaactgatttcagaaatgcatagttttatccaggaacccaagccagaccgtctccttgtattgaaagtactatggaatgat

SEQ ID NO: 24718 - DNA, 75 bp, Homo sapiens
gtcagtgttgtgtggaagccagaacatcgttctcaatggcaaggcgtttcagttgggccccacggaagcctctta

SEQ ID NO: 24719 - DNA, 101 bp, Homo sapiens
cttggacttcagaggaaggcagctattctcaggatatgacaggggtaacacccttccagatgatttttgagtctccaaaaaaagttggtgatgacattgcc

SEQ ID NO: 24720 - DNA, 82 bp, Homo sapiens
ttccttggtgaacgagtctgaaatcatcccggccagcaacggacacgaggagtccaaaactacttacctggaagaccttcca

SEQ ID NO: 24721 - DNA, 74 bp, Homo sapiens
tgggggtgtgcaaacccgagagaactggacctgtggatatctgggctttgggctgtatgatcattgagatggcc

SEQ ID NO: 24722 - DNA, 96 bp, Homo sapiens
caacccctacccccgcccaccagtatggcccggcacgtgttcctaacggggcccccagctcctgaattcagaccacagatccacagccacagtcca

SEQ ID NO: 24723 - DNA, 85 bp, Homo sapiens
ggcacattcaatcctgctgtgctctcacaggagaaggggtcccgggattcttgagctgtgcccagctgacgagcttttgaagatg

SEQ ID NO: 24724 - DNA, 75 bp, Homo sapiens
ttcaccaagtgggtcaacaagcacctcatcaaggtgcgtgctctggaggaggccaacgccgacctggaagtgaag

SEQ ID NO: 24725 - DNA, 49 bp, Homo sapiens
gggtggagtgtaggtcatatcgccgcgatgttcgagcctgtgagctgca

SEQ ID NO: 24726 - DNA, 75 bp, Homo sapiens
gaagaagaagaagagcatgatcggcatgtccaccaagtctctgctttctatccgtcaagatgataaagtcgtgtg

SEQ ID NO: 24727 - DNA, 90 bp, Homo sapiens
tcgcgtcgcgcccgggaggaaggaacgaggcaaggagctaaagcagcgtgcgttcagccctggggaagtgggaaaactcttgcctttgcc

SEQ ID NO: 24728 - DNA, 98 bp, Homo sapiens
ccgcttgtggagcaaacatttttccccaaccataagccaatgttagggcctagtcaaaattttgaagctgagtcaattcaagataatgcgcatatggc

SEQ ID NO: 24729 - DNA, 87 bp, Homo sapiens
gattcgcagtggtcgcttcttctccttggttggtttgacttccacaaatgcagaagtaagaggatttatagatcagaatctcagtcc

SEQ ID NO: 24730 - DNA, 75 bp, Homo sapiens
accactagaatctggaattgagaagaataactgtgtgatgcctgaagatgtgaagaacttttacctgatgaccaa

SEQ ID NO: 24731 - DNA, 75 bp, Homo sapiens
acactgccggtctcaccatgcccacagcaacactgggtattggcaagcttgccagtgtacctgctggtggggctg

SEQ ID NO: 24732 - DNA, 83 bp, Homo sapiens
tgaaatctggagtgaagaacgccgccatccagccaccattccaaggtggttgtgtcaaaccgattggtgacatctccatgctg

SEQ ID NO: 24733 - DNA, 98 bp, Homo sapiens
ccgtgcatggggctgctccccaggacctgagcaggaacctggagttttcaggtacggttcctggagcagcagaacaagatgctggagaccaagtggag

SEQ ID NO: 24734 - DNA, 100 bp, Homo sapiens
gggtgattctgcctggaatgactgcttgtatcgaatgcacgctggaactttatccaccacaggtgacagttcgtgatgctataaatcagggtatggatga

SEQ ID NO: 24735 - DNA, 82 bp, Homo sapiens
ccgccgccttcctgcagcagaggaactcctataaccaccaccaggatggagggtacagagtctgcctacatcagctcctttg

SEQ ID NO: 24736 - DNA, 83 bp, Homo sapiens
tgctactgcctgggggctgaggatgacaaaaaagccttcataggtcacacagcggcagtgataaagagcacagggatgtggag

SEQ ID NO: 24737 - DNA, 82 bp, Homo sapiens
cagggagaaacaggggggcgagaagagaaacagacatgggaaagcggaaccaccaaaaggagtgatgatcaacgatctcatg

SEQ ID NO: 24738 - DNA, 100 bp, Homo sapiens
tctgtgtcggttttcaataacaagaacagaagctgtgctgaatggtttggtggccactgaggtgttgatgtggttttatgtcggagagattataggcaag

SEQ ID NO: 24739 - DNA, 96 bp, Homo sapiens
gcaagtacccgtccatcatagtcaactgcgtggaagagaagaaacattgctgaggctcttgtcagcaaaggtctagccacagtgatcagataccgg

SEQ ID NO: 24740 - DNA, 98 bp, Homo sapiens
tcaattcagatggctatcctgacaggacccagagttcaacaatacagatcagattgacctgtatgatgatgtgctgacagccacctcacagccctcag

SEQ ID NO: 24741 - DNA, 82 bp, Homo sapiens
aaccttcatcaagttttatgctccatggcttgttagcagtggcacaagatcttacagaggatgaagaaacagtagaagattc

SEQ ID NO: 24742 - DNA, 74 bp, Homo sapiens
tttctaatccctgctctgtcactaacaagctgcgtgatcttcggctgatcccaaagttgtcagatggagagtaa

SEQ ID NO: 24743 - DNA, 80 bp, Homo sapiens
tgagaaggttcagttggcaaaccagatatatgacttggtggtgctgtgggtcggcctgggcgtcctggtggtgagcactg

SEQ ID NO: 24744 - DNA, 100 bp, Homo sapiens
ctaagagccttgaggcagaggcagctggaccgagctgcggctgctgtgggccacgtggtgcttgcgcagtgccgagtgctgatggccagtgtgggggccg

SEQ ID NO: 24745 - DNA, 73 bp, Homo sapiens
gcaaattttacccagaactgaagcttgcctatgccgttcgaggcaataaatgctggatgacaccaaaatcctc

SEQ ID NO: 24746 - DNA, 74 bp, Homo sapiens
agacacacctaccaagaagccagtcaagcggccaggcagtggctggcctacagccgcctctaccagagcctgga

SEQ ID NO: 24747 - DNA, 100 bp, Homo sapiens
cttattaaagtggcagcatcttgtggggccatccagtacatcccaactgagctggatcaagtggaagcagggaaaggcctggagatgaggaagctggttc

SEQ ID NO: 24748 - DNA, 100 bp, Homo sapiens
gccctggaaggatgtcttcactcctggctcctgggaagcattcatggtcaaaaacatagtgcccaagctggggactgctgagatgtcctctattcttgaa

SEQ ID NO: 24749 - DNA, 100 bp, Homo sapiens
cttcctcacccgcgcctgcgacctcgccctgccaggagcccggaagtgggtccgcacgagacagaatagactacactcaaactccaggggaaccgttcat

SEQ ID NO: 24750 - DNA, 82 bp, Homo sapiens
ccgagaccgcggccgggaccgaggattgtctaaagccccaggaaaaatggtggaaaattcaccgtcgccattgccagaaaga

SEQ ID NO: 24751 - DNA, 116 bp, Homo sapiens
accggcagcagcgctgccgccgcgtcctcagccaccgctccctcttcccacggtgctggagaatctggtaaaagcaccattgtgaagcagatgaggatcctgcatgttaatgggtt

SEQ ID NO: 24752 - DNA, 98 bp, Homo sapiens
taaacagggatttggaaatgttgcaaccaacacagatgggaagaattactgtggcctaccagattgtcaagacattgccaataagggagctaaacaga

SEQ ID NO: 24753 - DNA, 95 bp, Homo sapiens
cctcaagtccctgctggagcactctctgccttggccagagaagagaacagggggccgaaggccagagaccaggatttggctacggaggcagagcg

SEQ ID NO: 24754 - DNA, 75 bp, Homo sapiens
atctacaaccttcgatctcctgacgatggataagtggttccatcaccagaaaaactaatgagatttctctggaat

SEQ ID NO: 24755 - DNA, 131 bp, Homo sapiens
gggcggcgactacgacggcgttgatatcggtggtaacgacggcctcagcaggcggggaagatgaaaggggccgttgctccagggagaactgcaaatatcttcatccacccccacatttaaaaacgcagttg

SEQ ID NO: 24756 - DNA, 102 bp, Homo sapiens
cactggaggagactcagtgcagacctgcacaaacccactggacaccttcgtcccctttgatccctgtgtgctgaagaggctggggtgcagtggcgcgatctc

SEQ ID NO: 24757 - DNA, 74 bp, Homo sapiens
ggagaccccgcgccgacggctgctcaaacatcaggatgcctggagttactgtaaaagacgtgaaccagcaggag

SEQ ID NO: 24758 - DNA, 97 bp, Homo sapiens
ccacactgcgcttgttttcctgggattgaatgctggtgggaagataaactcatcctgaaagtcgctgttgttctcctgctgagcaagaatggaggcc

SEQ ID NO: 24759 - DNA, 97 bp, Homo sapiens
agagtttgtggacagatttatattgtgtccgagctgcaggaggagggaatgaacgccatcaacctgcccctcagcccaattccctttgagctggacc

SEQ ID NO: 24760 - DNA, 74 bp, Homo sapiens
ctgcagaggtgctggagctggcagaccccctggacaggccgttggttggccaggatgagtttttcctggagcag

SEQ ID NO: 24761 - DNA, 118 bp, Homo sapiens
aacacctgagccaggtgaagggccccgtaaattggaaggatgcacaagttccaaggttacgtttcaccgtgctatcaagactaatcaggaccttctcccagaaactccatggacgcac

SEQ ID NO: 24762 - DNA, 83 bp, Homo sapiens
gtcccccttctgggaaagaccgagtgaagaaaggtggatcctacatgtgccataggatccaagtattttagaacatgctcaag

SEQ ID NO: 24763 - DNA, 83 bp, Homo sapiens
caaggacttcgagcagcctctcgccatttcccgggttcccagtagctgcagcagtgaaagacagtgattggctccagtgctcc

SEQ ID NO: 24764 - DNA, 100 bp, Homo sapiens
ttaataaacacttcgagagttcttccaaagtcgcccaggcaccttctccatgcattgcaaggtcctaggcctacttacaagcctccagtctcaaattatc

SEQ ID NO: 24765 - DNA, 75 bp, Homo sapiens
cgttcctcaaactccgtgaccaggtcaggatggctaactggttggctccccacatggtgccctacgtctatatca

SEQ ID NO: 24766 - DNA, 82 bp, Homo sapiens
cggaagtggaggtggctgacgagctgctggataacgaaggaggcccaacttcattcaataaggagcctgacggatttatccc

SEQ ID NO: 24767 - DNA, 83 bp, Homo sapiens
tggctgggtagttcgaggggtttttgcggatggctgcagctcctccaagttactgttttgttgccttccctccacgtgctaag

SEQ ID NO: 24768 - DNA, 88 bp, Homo sapiens
actgcgccgcccggacggcctgcagagcgctgccatcatgagatgaaggatttgggggcagagcacttggcaggtcatgaaggggtcc

SEQ ID NO: 24769 - DNA, 98 bp, Homo sapiens
aaacacatctaattgcacttaaacttgaagaacttattttagaagacacttctctctcaccgttctgaaacacagacaacatcaagggggaaagaaag

SEQ ID NO: 24770 - DNA, 138 bp, Homo sapiens
aaattgctatctgtctagattgtttacgaaataatgggcaatcaggggacaatgtagtaaagaattcctcagagagagaagactgtaataatggcgaaccccctaggaagataataccagagaagaattcacttagac

SEQ ID NO: 24771 - DNA, 101 bp, Homo sapiens
aaagacatcttaattgggcacgaaagagcccgaccctgcccgccctggactggcagctgccgtcccactcaggcccgtatgagcttcggattgaggtgcag

SEQ ID NO: 24772 - DNA, 95 bp, Homo sapiens
tacataaacctttagaacttacattagagtgttcaagtcttctgagactccagagtcacctaaggaaattgacaatggcccttcagctatgctag

SEQ ID NO: 24773 - DNA, 82 bp, Homo sapiens
cggcagagcagggcggcggcgactcgtccatttgggaacaggagcgagtgcccctttggatcaagccatacaagattcttgt

SEQ ID NO: 24774 - DNA, 87 bp, Homo sapiens
tcagcagaggggccactgctgggccctgaggctgcaccaagtggcgaaggagccggctccaaggtgtaccttccggtttcccagcac

SEQ ID NO: 24775 - DNA, 75 bp, Homo sapiens
gggagcaggagaagaaacctaagaaggaagcaaatcaggccccgatgccaggccgggcacctggtgtgtaaccaa

SEQ ID NO: 24776 - DNA, 50 bp, Homo sapiens
gaagctgtgcttctccatgagatgctttccccagacatggccaacaaggg

SEQ ID NO: 24777 - DNA, 74 bp, Homo sapiens
cttcttttttgagaaaggaaggaatatatcctgactgattgtgacatttagtgatgtggctatagacttctctc

SEQ ID NO: 24778 - DNA, 119 bp, Homo sapiens
cggctacagcttcggcggcgaaggtcagcgccgacggcagccggcacctgacggcgtgaccgacccgagccgataacggcaaaagcttctatcatttttgttactcttcagtacaatgt

SEQ ID NO: 24779 - DNA, 90 bp, Homo sapiens
ggcgcctacggtggccgaagtgggacgcgccgagccggaggctgcaggatgcttgatcagttactggcagtcgcagactttggaccccgg

SEQ ID NO: 24780 - DNA, 74 bp, Homo sapiens
agcccatccgtctcaagactgtgaaaccagaattgtgagaagctggagaataattttgatgacatcaagcacac

SEQ ID NO: 24781 - DNA, 76 bp, Homo sapiens
tctgtctcaagatacaggacagctgtttgctcatcaacctcaactgtttcatacagtcaccaggaagcccatgtct

SEQ ID NO: 24782 - DNA, 97 bp, Homo sapiens
cgctatgagcgggaccaccctgggcacagcaggcatcggagctgccaaggggccaagggatgagctggggccctccttcccaatggcatctccccct

SEQ ID NO: 24783 - DNA, 83 bp, Homo sapiens
tggaccctgccaagaagtcgcccatcgcagcagctcgtaatgtgcatgactggagactggttttcggagcaaaggaaattaca

SEQ ID NO: 24784 - DNA, 80 bp, Homo sapiens
aaccgcccgaaccagagccggaggcgggaggacgggctgccgcagacaatgcagatcttcgtgaagactctgactggtaa

SEQ ID NO: 24785 - DNA, 90 bp, Homo sapiens
atggatattgaaatggacagtggagatgaagcctaagaatatgatcaggaaggtgtcttgctgcaggtaactaatgaagaagtggtcaac

SEQ ID NO: 24786 - DNA, 100 bp, Homo sapiens
gtcgattaaagagccatctgtggtgccaattgaagggagccccagactctggtaaatgctctgcttcctcctgcctggatacttctaatgaccctgacga

SEQ ID NO: 24787 - DNA, 75 bp, Homo sapiens
cttaagtctactggctggacttcatctccatggcaacaagcatggaagggctcaaaatttgggcggggaactgga

SEQ ID NO: 24788 - DNA, 101 bp, Homo sapiens
tctcccatgtgaactgctggcaggctgccttccctgacccccagttacgcctggaatatgaaggcttccccgtcccgatctccgcaaatgacttcattgcc

SEQ ID NO: 24789 - DNA, 87 bp, Homo sapiens
tgggatcaccaaagcctgccgggagctagaactcaaggtgcccctggtggtccggcttgaagattttaccaaatgttgcaagaactc

SEQ ID NO: 24790 - DNA, 99 bp, Homo sapiens
cagaaactgagctggaccactggagcctcggtgagggggggggccctcagcctcttggccttgaacgggctgttcatcttgattcacaaacacaacctg

SEQ ID NO: 24791 - DNA, 82 bp, Homo sapiens
cgggaagaagcagctggacccgctcaccatctacggcatccggtgtaaaaaagagtgtcaagtggacatgcaaagcttgtgg

SEQ ID NO: 24792 - DNA, 80 bp, Homo sapiens
gataatgtatgggaagtccttatcttaatggaatattgtcgagggtgaaaattccttcctacaggcgaccgtggcaaaat

SEQ ID NO: 24793 - DNA, 80 bp, Homo sapiens
caaaatatggcaaagaaacctattctgagccttcgagaaaactccatcagtcccgagggagcccaggccatcgctcatgc

SEQ ID NO: 24794 - DNA, 82 bp, Homo sapiens
ttccctctcgcgtctctggctgcaggttggtgttcgaggaagagacattgttgttcttggtgtggagaagaagtcagtggcc

SEQ ID NO: 24795 - DNA, 50 bp, Homo sapiens
taggaaaactcaaatctttggcaaccaagacctcccagtgccaagtgtat

SEQ ID NO: 24796 - DNA, 82 bp, Homo sapiens
cccaaaggaggaaacagctggctaagctcatcattgttactggtattagaaaactactcggatgctccaatgacaccaaaac

SEQ ID NO: 24797 - DNA, 75 bp, Homo sapiens
ctgattcatgtaggagaattaaacaggcctttcaaggagctgtgcaaaagagcttttcatcctactataaaggag

SEQ ID NO: 24798 - DNA, 100 bp, Homo sapiens
aaacaacacaaaaccctatctcaagaacttgttaacctccggggagagctaggcaccacactgtaactcgaggcatcaccaaaggcgtgaaggaggactt

SEQ ID NO: 24799 - DNA, 48 bp, Homo sapiens
agctgggggtcgtcaccatgcagcaaaagctggcaggctgacagaggc

SEQ ID NO: 24800 - DNA, 98 bp, Homo sapiens
ctaccttcccctatatctccagacattaaggattataaactttatgatgtagaaaccaaatatggtttgcttcaggaagaaatgttggctatttggcg

SEQ ID NO: 24801 - DNA, 83 bp, Homo sapiens
tacaagtccagacccaggagagcaaggcccagaaagaggtgacttaagagattaaaattaatttggttgctgttggttctgaa

SEQ ID NO: 24802 - DNA, 100 bp, Homo sapiens
gccggagacgagaccagaggccgaactcgggttctgacaagatggccgggctgccccgcaggatcatcaagatgaagaggaagatgatgatgtagtggct

SEQ ID NO: 24803 - DNA, 102 bp, Homo sapiens
gtaaagggagtagaattgggtggagctaccctgcgtatctggacacctttaaggattctcgcctcaggttgggagccacgtgtaccagtgtgtgttgatctt

SEQ ID NO: 24804 - DNA, 74 bp, Homo sapiens
aggagctcggggactcccccaaagacaagcactcccaccaaaggcatagagaacaaagcttttgatcgcaatac

SEQ ID NO: 24805 - DNA, 75 bp, Homo sapiens
ccggtacatctgaaagccgggaaatggttctggcctataggaacaagacattttcagtaatggaagaaggagctt

SEQ ID NO: 24806 - DNA, 100 bp, Homo sapiens
atgcgcgagcctgtgcaggtttccacctgcggccaccgtttctgcgatacctgcctgcaggagttcctcagattttatcatgtgggcaacctgctgcaac

SEQ ID NO: 24807 - DNA, 75 bp, Homo sapiens
gtatctccgctacttcactcgcactatccttgatgctagggactggtgattgcagctggaagtgcccatgaccga

SEQ ID NO: 24808 - DNA, 96 bp, Homo sapiens
acctgggattcaaatgaaagtgaaaatgttagaagaactcgtgagccggattgatgctggtccgggacaacgcagacctgcgctgtgaactgccca

SEQ ID NO: 24809 - DNA, 100 bp, Homo sapiens
gggtgaggctgcaacacgaggctgccgttcagcacccgtcgagcggtgagccagctgagaaccaggacaaccctgaggaccctgggaacagtccctgctc

SEQ ID NO: 24810 - DNA, 125 bp, Homo sapiens
gctgagacacatgttacagcttcagtgtaacgctcaggcgatgaccaccatacaacacacaggactcgggcagccgcaagtagctcctccagcgccagcagccagcccagcagcaagcagcaggc

SEQ ID NO: 24811 - DNA, 51 bp, Homo sapiens
gagccccctaccgggccggatcccgaggacttgcaattgtgaccaaatata

SEQ ID NO: 24812 - DNA, 75 bp, Homo sapiens
caggatgttttataccatgctaaatcacagaaactcggaatccagcatcttccaggtaccagaacttcagcaaag

SEQ ID NO: 24813 - DNA, 100 bp, Homo sapiens
gcgccagcaagaggatcgtcctgccggagcccagggtccaaattccaagcctgtagtgtccttcattgctggtttaactgctcctcctgggagaagaatg

SEQ ID NO: 24814 - DNA, 74 bp, Homo sapiens
agaggcaccaaggacctccaagacaggctgttttggagtcagcggaagatcaccaaggccagggagtggttcca

SEQ ID NO: 24815 - DNA, 100 bp, Homo sapiens
attttgacatcagttatattccatctactgtctttttcttcaatgggcagcatatgaaagtggattatgggttggtcaaagaaaaagtgatgtatgaaaa

SEQ ID NO: 24816 - DNA, 100 bp, Homo sapiens
cggattccagactcgtgggggaaaggctgggcttcgtgggacacatatgcaacatgcctatgatttttacaagcctgatatgctatctgaatatcctata

SEQ ID NO: 24817 - DNA, 75 bp, Homo sapiens
agaagatgggaatcagagtggatcagcttcagggagaagatagcattcttcacaaggccaaggatcaacatacct

SEQ ID NO: 24818 - DNA, 50 bp, Homo sapiens
cctggctctcatcaccgatggccccacgctctgggcatcaccagcggccc

SEQ ID NO: 24819 - DNA, 88 bp, Homo sapiens
gttttcgcgtggttcttttgcaaggtttctgggtgtctctggggagcccctgggccagattttcctctagactccagcccatctcttc

SEQ ID NO: 24820 - DNA, 98 bp, Homo sapiens
agaggtacaatttgccaatgtttccacaatggaaccaattgttttacagtctgttccgcatgatcgttataataagatttatcgaggtgtgagagtcg

SEQ ID NO: 24821 - DNA, 100 bp, Homo sapiens
tgattgtcatgctcagggaccctgtggagaggtctctgagcggcccctgatgttcctgttggacactcctggcgtgctggctcctcggattgaaagtgtg

SEQ ID NO: 24822 - DNA, 100 bp, Homo sapiens
attgaagctgtttatagtagactgaatccacatagagaaagtgatgggagaagaagttcgtgccccaattcctcaaaagcaggaaatactggtggaacca

SEQ ID NO: 24823 - DNA, 100 bp, Homo sapiens
gaatatccaggcagcgagagagatgtttgagaagctgactgaggaaggctctcccaagggacagactgaagcgttgttgacgaccatggacatcatccac

SEQ ID NO: 24824 - DNA, 100 bp, Homo sapiens
ccctgccatctatgactccaggtcttcagcacccacccaccgtggtacagggagtaccctgacttctaccggaagctctacggcctcttggacccctctg

SEQ ID NO: 24825 - DNA, 51 bp, Homo sapiens
gaaaacactgcctcagtatctgaacacaagagactgggtttcaccgtgtta

SEQ ID NO: 24826 - DNA, 100 bp, Homo sapiens
ggcaatgaacagtgagggatacttgtacacctcggtcatcaagcttgcctttgaagagtttgagctggagcgaggctatgacaccctgacggttggtgat

SEQ ID NO: 24827 - DNA, 100 bp, Homo sapiens
ggggaacccgtgcggctggagagaggtagttttggatgttgggtgtggaactggaattctctctatgtttgctgctaaagctggggcgaagaaggttctt

SEQ ID NO: 24828 - DNA, 100 bp, Homo sapiens
gtccagtctccagcttcgtgggtgcctggaggcaggtgcggagggtgacttttaaatatgacggctccaccatcgtccccggcgagcagggagcggagta

SEQ ID NO: 24829 - DNA, 90 bp, Homo sapiens
tggcggagcagacctactcgtggtttggtgcacctcgatttggaggaagtagggcagggcccttatctggaaagaagtttggaaaccctg

SEQ ID NO: 24830 - DNA, 82 bp, Homo sapiens
gcctcagttggaagcagccgatccagcctgcggagcctgtggggcaggattgtgcagactggtgcttaaaatggaagtcgat

SEQ ID NO: 24831 - DNA, 99 bp, Homo sapiens
cctagccctgcccggccccggaggacttgcaacactccgaggccaggaacgctccgtctggaacggcgcagcaggatcctaaggcctttgtagtccttc

SEQ ID NO: 24832 - DNA, 50 bp, Homo sapiens
ctttgtctatcttcttccttaggaaaccatagagacggggtttcaccgtg

SEQ ID NO: 24833 - DNA, 83 bp, Homo sapiens
gccgggatggcttctatgaggctgagctctgcccggaccgctgcatccacaggagttttgtcaagcgcttcagcagcctgatg

SEQ ID NO: 24834 - DNA, 83 bp, Homo sapiens
ctgaatgaccaggtgtaaagtgcaagagtaatatgctatgactgagaggacaagaattttgggcagatttgaatgccatgaac

SEQ ID NO: 24835 - DNA, 100 bp, Homo sapiens
ctgctacagagcaggagttgccgcagccccaggctgagacagggccatgccacttcattttttggcccagccttggagcgctactcatcctttcaagtca

SEQ ID NO: 24836 - DNA, 100 bp, Homo sapiens
tcacagtaaggccaaaaatgtgcatactcacagagttagagagagggatggtggtcatcactccccaaaatggacgttaccaaatagattccgatgttct

SEQ ID NO: 24837 - DNA, 100 bp, Homo sapiens
aaaccccgttgacaaggcactgctttttcatgacgagatggggtcttgccaggtcttggccaggctggtcttgaactcccggactcaagcaactctcctg

SEQ ID NO: 24838 - DNA, 98 bp, Homo sapiens
cgggaaagattgactagtttcacaggtggatacattgcaaatagcctagcaatcatgacagatgcacttcatatgttaactgacctaagcgccatcat

SEQ ID NO: 24839 - DNA, 100 bp, Homo sapiens
cggcgctggactggagcagaaccccaggactgcgcccccgggagcgggcgcccagagaacggaaagatgctgaaggatgggagaccgttcagagaggaag

SEQ ID NO: 24840 - DNA, 89 bp, Homo sapiens
tatcatgtatacaactgtagatgcaaatgggtatctgaaaaatggatcaggtactccaaagattcaggtttactcacgtcatccagcag

SEQ ID NO: 24841 - DNA, 76 bp, Homo sapiens
ggctttgagtgcatctgccccgagcagtgggtgggggccacctgccagctgggtgcgtgccctggaggaggccaac

SEQ ID NO: 24842 - DNA, 82 bp, Homo sapiens
cttttcagtattgtaagaccaagaagacttctctacatggcaatagatggagtggtggacccccaaaagtacaagggcatat

SEQ ID NO: 24843 - DNA, 100 bp, Homo sapiens
gagattcaatgaagtggccgcacagtatagtgaagataaagccaggcaagggatgccatggacaatattaccaggcagaaccaattctacgatacccaag

SEQ ID NO: 24844 - DNA, 50 bp, Homo sapiens
ggttaggctgccttcgcttctcaagggggacattcagcagtttttgatca

SEQ ID NO: 24845 - DNA, 98 bp, Homo sapiens
gctgacccataatggacattaagagcaccactaggctggacagcgacagagtgtcgtctgcctctagcacagccgagcggggaatggtgaagccgatg

SEQ ID NO: 24846 - DNA, 76 bp, Homo sapiens
aacagcggaggacgaagagcgggacccgagccctggtctacttccccagcaggacagcatcattctcctatatctt

SEQ ID NO: 24847 - DNA, 90 bp, Homo sapiens
acaaccctgccatgttgcaagttcttctacagccccagttatgtggacgagctgttaaaccaggtgatgctgtggagtcttcaaaaagcc

SEQ ID NO: 24848 - DNA, 75 bp, Homo sapiens
gctggttgacggaaatccgtgctgtgtatcctgctttcgacaaggttgaccccctgtttacagtgccagcgccac

SEQ ID NO: 24849 - DNA, 75 bp, Homo sapiens
tcctggctcttgccctcatcctggttctggaatcctcagttcaagggatatcccagagaaggaaggaaataccct

SEQ ID NO: 24850 - DNA, 115 bp, Homo sapiens
gcagcttggagatgtcgtcggatggggaacccctgagccgcatggactcggaggacagacacatgaatgaccactacacaaacctctacccacagctgatcacgaaaccttccat

SEQ ID NO: 24851 - DNA, 98 bp, Homo sapiens
ccagaatcagttgttggagaaaattaaaggcagtatttggcagtcgtattcagagataaacccctggagctatgggatgttaggacttgtacccttct

SEQ ID NO: 24852 - DNA, 75 bp, Homo sapiens
ccatcgccgccctgctctacacacctgtgctcatcaggggcttctttcctgtcgttgttggctttattagaagag

SEQ ID NO: 24853 - DNA, 100 bp, Homo sapiens
ccagcactggactcatggaggctgagcatttattcaggcttatcaggagggcagacttcaaaagctactaaaaatgaacggccctgaagatcttcccaag

SEQ ID NO: 24854 - DNA, 75 bp, Homo sapiens
gaaaagatccctggaatatgaagggacacagtacggtagtcaaacccccagatatgattgacaatctgctgtccc

SEQ ID NO: 24855 - DNA, 100 bp, Homo sapiens
agagaaaccagtgccggatatgactcaggcttttaaggataccggaaaaacacccgtggagccggaggtggcaattcaccgaattcgaatcaccctaaca

SEQ ID NO: 24856 - DNA, 75 bp, Homo sapiens
aggagaaggagggcaaccgagtaggagggcctataacagcccaggctgatcagctgaccgaagaacagattgctg

SEQ ID NO: 24857 - DNA, 75 bp, Homo sapiens
cagaccgccggctgcgccggagctgggggccttaggagctcttgtccctggcaaagcgaaagcgcagtgactctg

SEQ ID NO: 24858 - DNA, 99 bp, Homo sapiens
tgcttctccgtgggcagcattggcgaccagcgcttcacgcctcgtcacgtgttcaatatgctaaagaagtatgtccgcgcagaacagaaggacagacag

SEQ ID NO: 24859 - DNA, 100 bp, Homo sapiens
actggacgctcatcagagggaagatctttttcctcaattggtgatgtgccttcaggacttttttggtgatgatgacatttttattgcatgtggaccggag

SEQ ID NO: 24860 - DNA, 83 bp, Homo sapiens
cccgggaggaaggaacgaggcaaggagctaaagcagcgtgcgttcagccctggggagaaggagaggaacgcgcggaggaagaa

SEQ ID NO: 24861 - DNA, 119 bp, Homo sapiens
cgctaagctcctctaatcctttctttgttcgctgtatcaagccaaacatgcagaagatattggcgtgccacttttgaagaaggaaaatacttagctacattaaaagatttgcattgaag

SEQ ID NO: 24862 - DNA, 50 bp, Homo sapiens
caggactccaaaatggcgtcagttggctcctggcgacctccctgctgcag

SEQ ID NO: 24863 - DNA, 100 bp, Homo sapiens
cacagctggctgcctacgtccactacgcctttcgccttcctggcactgagcccagcctcccggatggttgttcctcaaagtcattcaagctgtactcgcc

SEQ ID NO: 24864 - DNA, 90 bp, Homo sapiens
ggaggaggaacagaaacacgcccccaccagggcagagcggcttgggtaaatccaccttaatcaacaccctcttcaaatccaaaatcagcc

SEQ ID NO: 24865 - DNA, 100 bp, Homo sapiens
gtccagaactctgtcaaatgaagaacactttcaagaaccagggacaagcagatcttttgaaatatgctaagaatgagacattggagaacctgaaacaaat

SEQ ID NO: 24866 - DNA, 100 bp, Homo sapiens
caaagacttcatgatccaaggaggtgacccaacagggacagaagccactggtgaaggaccgggaagctgagcttctgtactttgctgatgtctgcgcagg

SEQ ID NO: 24867 - DNA, 74 bp, Homo sapiens
agggccccgctgggctggccctgcagggaccatggaatccagagctgagagccagagataaggaagagaccaac

SEQ ID NO: 24868 - DNA, 130 bp, Homo sapiens
cagtgtttttcgaattagttcaccaggattacaactatggactcattatgatgattgttcagataaatttgaggatttacatgacatgacctcatttacacaccttaaaaaagtaaaatcaagatcaagg

SEQ ID NO: 24869 - DNA, 100 bp, Homo sapiens
cgcggtccggcccggggccccgggatctcggctgtccttcctcccgggacctgatgcccagaaccctggacgggcagatcaccatggagaagacgcccag

SEQ ID NO: 24870 - DNA, 90 bp, Homo sapiens
ccagacgttaaagcatttatgggaaaaagacctcgatgaagttctgcagacccactcagtgtttgtaaatgtttctaaaggtcaggttgc

SEQ ID NO: 24871 - DNA, 50 bp, Homo sapiens
tatttccaaagtatgttgcacccagagttgcatgctgagaatttgaaaaa

SEQ ID NO: 24872 - DNA, 100 bp, Homo sapiens
ttcctttccttgaagtcttcgtttttaccttagtctcggatgcggaaaacgccatgcggtacataaatgggacgcgtctggatgaccgaatcattcgcac

SEQ ID NO: 24873 - DNA, 99 bp, Homo sapiens
cagatactgaatgtaaaccctgcagaaagtttcctacactactgaggtttaggggcactgtgaagcaaaagccacgcctcagaatcccaggcggagact

SEQ ID NO: 24874 - DNA, 83 bp, Homo sapiens
ctcgcctcggtgcagggctccgccccgtcgcctggaaagatgatatcatcaagttgaatcgaaaggaagggaagaagcagaat

SEQ ID NO: 24875 - DNA, 75 bp, Homo sapiens
tcaagtctggacctgggacccactgcaggcaggccagaaagcagacccagggaggatagcacatgtcttcggcta

SEQ ID NO: 24876 - DNA, 51 bp, Homo sapiens
cacagtggactcccaaggggcagcgtgaagcctctgcgggccttcttttcg

SEQ ID NO: 24877 - DNA, 100 bp, Homo sapiens
cggggccctctcagcaagaacgggaacaaaactctggttgaatttggaggctttaatcagaactgtggaaatgcttcagatttagccccccagaagcaga

SEQ ID NO: 24878 - DNA, 75 bp, Homo sapiens
gcagatttacaaactggccaagaagggccttactccttcacagatcggaacctatccgcttacggtacaagctga

SEQ ID NO: 24879 - DNA, 75 bp, Homo sapiens
ggttgatgaaacttacctctttgaatctgaaggtttaggaggccagatgctccagtgcctgatggcgaaagtgag

SEQ ID NO: 24880 - DNA, 109 bp, Homo sapiens
tcccgcgcaagggggacaggctggactgaaagaggacacgggaagaacaaagacttagactcgcctcctctattggcccaggaagcccacccagccccgccacgcagag

SEQ ID NO: 24881 - DNA, 75 bp, Homo sapiens
ggccaaacacagaatcagcaaagaggaggccatgcgctggttccagcagaaggtggatgagaatggcaaaattag

SEQ ID NO: 24882 - DNA, 75 bp, Homo sapiens
catgaaatggatggacttatttttcagcctactggagaacatcatcttcagcgggctatttcagcacagcaggtg

SEQ ID NO: 24883 - DNA, 82 bp, Homo sapiens
gcgtggacacacaagcaccccaataacctcaagaacccagtgacttgattgtaaaaatttacagagcggaatcatatgctgg

SEQ ID NO: 24884 - DNA, 100 bp, Homo sapiens
gaaagccaggagccggcagatttgacaggtgtcactgtacagtccccaggggaggcacagtgtctgctggaaaaggctgaggaggtgtatcgtctgtatc

SEQ ID NO: 24885 - DNA, 98 bp, Homo sapiens
ctcaccatggtcagctactgggacaccggggtcctgctgtgcgcgctgctcagctgtctgcttctcacaggtctggggtcctgaggctgctggcagac

SEQ ID NO: 24886 - DNA, 135 bp, Homo sapiens
gttatagaaaagcctgcttggaagacatgaattcagcagagggtgctattagtgccaagttggtacccaggacctcagcaatggagaatatccccatcatcacaactgtcatcactctgccgcacgtgattgtgg

SEQ ID NO: 24887 - DNA, 75 bp, Homo sapiens
tcaacatgatagagcagagtggaccaccccatgaacctcggttttgggttggtgaaactggatgtgaaaacaaag

SEQ ID NO: 24888 - DNA, 101 bp, Homo sapiens
acgaggaatcagctttgaagtgggagcccagttggaagcccgggaccgtttaaaaaactgtggttcaactcataatgacaagagacagtgatggttatgaa

SEQ ID NO: 24889 - DNA, 80 bp, Homo sapiens
caacgacgttccatctgtggaaggacctaccaaccagaatcttcagctacttggagcaacagccattgaggataaattac

SEQ ID NO: 24890 - DNA, 99 bp, Homo sapiens
aggtcagacccattgcacttcagtatctcaggcggcaccctgtccccgaggaggggaccatgacacaaggctgctggccaagctgcaaagctgggagag

SEQ ID NO: 24891 - DNA, 97 bp, Homo sapiens
gatttcagatactctgactccacctttacttttacctacgttggcggccccagaagtttccttacgccgccccacctccccaagaacccgtgaagac

SEQ ID NO: 24892 - DNA, 83 bp, Homo sapiens
ccgggagcgagctgggagggagccgcgcgcctttgtgcgcgcgccgagtttgcctgagaatacagatcaacccacagaacaaa

SEQ ID NO: 24893 - DNA, 100 bp, Homo sapiens
aattcccctgcctcatacatcttccatcctgagaatgcagaacggcagagtcgaaacaaacaatgagggcgaaccagtttcttacatgttctaacgtttg

SEQ ID NO: 24894 - DNA, 75 bp, Homo sapiens
cttgcgtgtcctgggctctaatgtcagagaatttctacaggagtcttccagagcctctcatgacctatgagttac

SEQ ID NO: 24895 - DNA, 100 bp, Homo sapiens
gtctgagtgcgttggtcggcggcagtcgggccagacccaggactctgcgactttacgttgatgccggcccaggatggatcagacctgtgaactacccaga

SEQ ID NO: 24896 - DNA, 83 bp, Homo sapiens
cgctgctggcgctctggctgtgctgcgcgacccccgcgcatgagcggttctggtgaggttggaaggatgcagccacccggttg

SEQ ID NO: 24897 - DNA, 120 bp, Homo sapiens
ttttgtgaagcggcagctgaggagactccggcgctcgccatggccgacgaaaagcccaaggttggatccatgccgtctacacccctgtagactctttggtgttcggcggaaacatcctgc

SEQ ID NO: 24898 - DNA, 100 bp, Homo sapiens
gctattcaaggtatttcagagaaggaaaaggctggcatctccttggaaacaatgccatctttgaatgtgagagataaacctagtttcagcatgtctgcag

SEQ ID NO: 24899 - DNA, 73 bp, Homo sapiens
gcatttctcgtggctgaagaggctggaaaccttgaagcaagaggcagccactcttgctgcaaacaacacacag

SEQ ID NO: 24900 - DNA, 75 bp, Homo sapiens
ccctgctcctggtggcacccagtggcctgtactactgaagtcacctgcaccggtgcccgtgacgtacgagctgcc

SEQ ID NO: 24901 - DNA, 50 bp, Homo sapiens
gtcctggatcgacaccctctacagcagctgtctgtccccagaccccagag

SEQ ID NO: 24902 - DNA, 100 bp, Homo sapiens
gtttgaatccttccttgatgatgaagaggaatgttacgttcataacttactaaggattagtgtatattttccaaccttgaggcatgaaattctggagctt

SEQ ID NO: 24903 - DNA, 100 bp, Homo sapiens
cgagaatagctccgtccagcagaatggagatgtatgcatttcgattcttcatccgcctgtagatgacccacagagtggagaactgccttctgaaaggtgg

SEQ ID NO: 24904 - DNA, 100 bp, Homo sapiens
agaccgtggagatgcgggatggagagtactataaccaagagtggacattgtgggatcgctttgaggtacaagggctgcagcctaatggtgaggagatgac

SEQ ID NO: 24905 - DNA, 149 bp, Homo sapiens
tttcgttgacccggacgaggaggagtctgctctgcggagatcatggggacagcctcccaagctgaaggaaggccagcgtcccatgctcggtggccccagaaaagtcagtgtgtaggcctcagccacttcaggtccggcgtacattctcc

SEQ ID NO: 24906 - DNA, 101 bp, Homo sapiens
tctatcttcagaacggacaagcagaagaagaaggtgtactcctttctattttaaagagccaagcctcagagacatccgcacttccactaatagccaagtag

SEQ ID NO: 24907 - DNA, 90 bp, Homo sapiens
catcgtggtgggctgcggtggcttcgtcaagtcggacgtggagatcaactactcgctcatcgagatctggcaggggatcgacattgagac

SEQ ID NO: 24908 - DNA, 75 bp, Homo sapiens
aaagtctgttggtgcacaaaaagacacttatactatgaaagagatcaccgaagtggccttggagtacaacaactg

SEQ ID NO: 24909 - DNA, 50 bp, Homo sapiens
gaaaaacctcagcgacctgatcgacctgctatctcacgtgagagggcagt

SEQ ID NO: 24910 - DNA, 75 bp, Homo sapiens
tagtaataaagtgaaatcagacccacaacgaatgaatgaacagccacgtcagattcaaatgtaccagctgtccag

SEQ ID NO: 24911 - DNA, 75 bp, Homo sapiens
agtcttgggggtagagtgactgcttgcgaaccagttcagcagtgcctcagagttatcattaccatgttggtgacc

SEQ ID NO: 24912 - DNA, 83 bp, Homo sapiens
tcgggcgccggcgagatgcctttgttcaccgccaaccccttcgagcaagacgtgggcactatgtcgtccgaggcccagagatg

SEQ ID NO: 24913 - DNA, 75 bp, Homo sapiens
cggcttggagaggccgagggtttgatgaaggtggaggcagcgcggctctcaggagtacgaccccagcaaagcgac

SEQ ID NO: 24914 - DNA, 90 bp, Homo sapiens
agattgtgaagcaatagcctaaggggatcctgctaaagcggagcggcaagtccctgaacaaggagtggaagaagaagtatgtgacgctct

SEQ ID NO: 24915 - DNA, 50 bp, Homo sapiens
ctcattcggactcgtcgggcaggtattgttgcagcatctggcagtgagac

SEQ ID NO: 24916 - DNA, 127 bp, Homo sapiens
ccaggacgagacatcactggctacacatttccagcaggctgcagatacgagtggacaaggttagctgagttggcacatcgagaatatcaggcaggagattttgaggcagctgagagacactgcatgc

SEQ ID NO: 24917 - DNA, 100 bp, Homo sapiens
gcagtggtcgcttcttctccttgttattaccccattcaagttgacaactgaggcaacgcagactccagtctccaataagaaaccagtgtttgatcttaaa

SEQ ID NO: 24918 - DNA, 96 bp, Homo sapiens
ttatatgtgatgccattccagcactggactcatggaggctgagcatttattcagcttttgaacttctcagatagaggaaccccagtgaagactgat

SEQ ID NO: 24919 - DNA, 88 bp, Homo sapiens
gcctgttcaactttgtcctctctcagagccaaagccttggctggacagtcagtacgaatctgtaaaggccccagggctgtgttttccc

SEQ ID NO: 24920 - DNA, 129 bp, Homo sapiens
cttgtgtccgcttctcgcccaacagcagcaaccctatcatcgtctcctgtggctgggacaagctggtcaagaatgagtccctggaacgccagatgcgtgaaatggaagagaactttgccgttgaagctg

SEQ ID NO: 24921 - DNA, 74 bp, Homo sapiens
aaaaagaaccgcgcgggaagccccagcccgcagccctcggggatcgtgctgcctgccctctttgtgggcctggc

SEQ ID NO: 24922 - DNA, 100 bp, Homo sapiens
ctggtctccggggcgtggagccgaacccaggcattacaaacaggtcttcttgatccagggatgcttgtgaacatccagcagcctttgatacgtgaggatg

SEQ ID NO: 24923 - DNA, 75 bp, Homo sapiens
ctcattatttgccagatctgcagagatcaaaacaagccctccaggaactcacgaaaagaatacttgagatccatt

SEQ ID NO: 24924 - DNA, 90 bp, Homo sapiens
gtggccgaactcatccggacccctatggaaatgcgttacatccctttgaaagtggccctgttacataaccagtgcggtgcaatccaagcg

SEQ ID NO: 24925 - DNA, 49 bp, Homo sapiens
atggcagccagtcagtggtggaggtgatgaccagtggctgggagacggt

SEQ ID NO: 24926 - DNA, 100 bp, Homo sapiens
ttgagagcttctcagactatccacctttgggtcgcttataccaagttgaatatgccatggaagctattggacatgcaggcacctgtttgggaattttagc

SEQ ID NO: 24927 - DNA, 82 bp, Homo sapiens
aaaatttattaaaggaagcacacctaagtctcaacagatcaccccccaacttgcccttcaagttctacttcagtttgataag

SEQ ID NO: 24928 - DNA, 100 bp, Homo sapiens
tcagcgccaaggaggacgccagcaaagaagacgtcatcttcttctaaaagggccgtgactcaaggagtacgagagggcctccaaagtggaccagtttgtg

SEQ ID NO: 24929 - DNA, 82 bp, Homo sapiens
ccagcacactcctcgcgagcaagattctgaaaaagagttccacgtcctcccttatcgagtctttgttccccttcctggatcc

SEQ ID NO: 24930 - DNA, 97 bp, Homo sapiens
tgtccttctgctattgatcctgaagatgaataatacggcagctagtccaatgtctactgcaacttcaagtagtggaaggagtacagggaagtctata

SEQ ID NO: 24931 - DNA, 99 bp, Homo sapiens
ctgaaattaccaggaataaagactcaatataatgtagctgagattgtgattcatattcgcaataagatcttaacaggagctgatggtaaaaacctcacc

SEQ ID NO: 24932 - DNA, 82 bp, Homo sapiens
tactggatcgaaatgtccatgagaaaaagcttggagataaagttgctttttactgggcatcatggtgggaggcttgaagagg

SEQ ID NO: 24933 - DNA, 75 bp, Homo sapiens
cagagccattggagggcgcggggactgcaaccctaatcagtatggaagctccaaaaggaaagataccagattgat

SEQ ID NO: 24934 - DNA, 82 bp, Homo sapiens
gcctcagaagctcccggacgcccaggtgtcgtgaaaactacccctaaaagccaaaatgggaaaggaaaagactcatatcaac

SEQ ID NO: 24935 - DNA, 74 bp, Homo sapiens
cacgaaaccagatttgcctgaaaatggctcggccaagttcaaccagaataaaagctacttggccgtaaggctaa

SEQ ID NO: 24936 - DNA, 100 bp, Homo sapiens
attatcttcactgaggactacaggaccagaaatgtcaagctgtcagctgaggtggagccatttattccccagaagaagagtcctgatacatttatgatcc

SEQ ID NO: 24937 - DNA, 82 bp, Homo sapiens
ctctgcgttttgttttcccctcggcactaggcagcggaggagcccgaccgacccggtctctaattaacagaagatggcaaag

SEQ ID NO: 24938 - DNA, 75 bp, Homo sapiens
agctggacagtgagacagccatgttttctgtctacgatggacatggaggccctagactggagctggttacagacg

SEQ ID NO: 24939 - DNA, 50 bp, Homo sapiens
cccttctgaggagctcccaaacccaaactcaggctctgaattggttttgt

SEQ ID NO: 24940 - DNA, 100 bp, Homo sapiens
actgcagccatgatctccttaacggacacgcagagtgaaatgacaatggatgctctgttggctcgattgaaacttctgaatccagatgaccttagagaag

SEQ ID NO: 24941 - DNA, 75 bp, Homo sapiens
actgctttgcaacgcgcacctaactccaggtggtgttcccactgatgaagagcaggcgactgggttggagaggga

SEQ ID NO: 24942 - DNA, 75 bp, Homo sapiens
agttcctgagtcaatttgaaatgcagtccaggaaaaggtgtccgcaatgttgccagtgtctgtctgcagattggc

SEQ ID NO: 24943 - DNA, 100 bp, Homo sapiens
ataccaagaatacaatccttatgaagtattaaatttggatcctgtcaatgtgacggtggactacattagaccagccagcccagccacagagacagtgcct

SEQ ID NO: 24944 - DNA, 80 bp, Homo sapiens
ccaacactagtggaatatgatcacatcccaggaaggatgataaagactatgctttaaaacaaatagaaggaactgggatc

SEQ ID NO: 24945 - DNA, 75 bp, Homo sapiens
tcttctgtgaggaatctggattgtcacctttgctgcaaaaaattacgggccctgagcctgtgcaattatttcgag

SEQ ID NO: 24946 - DNA, 100 bp, Homo sapiens
ctttactctggggtcccggctgccctgtggcctcgctcctcggaggtccgagaaatgtggtttgtggtaggaaggaatggtggcctactccatgagcaga

SEQ ID NO: 24947 - DNA, 73 bp, Homo sapiens
ggcggtcagcactgtggtcctccaggccttcgctgtttctggcaaagcctgccgtgtcttacatttgtctctc

SEQ ID NO: 24948 - DNA, 51 bp, Homo sapiens
accacggcctcctgtcccgccaggacagtcattttgtttactcattcagcc

SEQ ID NO: 24949 - DNA, 90 bp, Homo sapiens
tcctacaccaagcccgacgtggccttcctcgtggccgcctccttcttcctcatcgtggcagctctggggcaccctcatccagcatctgaa

SEQ ID NO: 24950 - DNA, 100 bp, Homo sapiens
aaattttttaaaaatagagatctgtagcagtgttggggcctccggtgtggctgtctctgatggtgtcatcaaggtgttcaacgacatgaaggtgcgtaag

SEQ ID NO: 24951 - DNA, 75 bp, Homo sapiens
gaacgccctctttttaaaaaaggaaggtgggagtcaatcattttgacaagtctcctgaaaggaacagctagcagg

SEQ ID NO: 24952 - DNA, 100 bp, Homo sapiens
tgtggctcttcttcgggatcactggattgctgacggcagccctctcagggaaggatggagacgctgaaggataagaccctgcaggagctggaggagttgc

SEQ ID NO: 24953 - DNA, 75 bp, Homo sapiens
agttcgagcactaatatttaagaaagaagatgttaactttcaggtcctcagtttgcagaagacccctcccagttg

SEQ ID NO: 24954 - DNA, 100 bp, Homo sapiens
cgacgaccccgagtcgcagatggcctgccacgttttccgcgccacagaccccagccagtctgaaaacttagagaatacagtaatcataccagatatcaaa

SEQ ID NO: 24955 - DNA, 75 bp, Homo sapiens
ggaggacacgctgcagttggccttcatcgacttgagacaattactgtaaaatggggaaaggagaaatttgaaggt

SEQ ID NO: 24956 - DNA, 75 bp, Homo sapiens
ctgcttacattccaacaaatgtcatttccatcactgacggacaggaatctggaaaaccaggggctcatgtaactg

SEQ ID NO: 24957 - DNA, 98 bp, Homo sapiens
ccggactggcggtgagcgcgagggaggctactgagaagcccggcgacggaggaacgcaggtctgctgccagcccttcagggtttctcgctctctgctc

SEQ ID NO: 24958 - DNA, 98 bp, Homo sapiens
cgaattctcaacccctacaacttattcctgtccggagacagcctaagggtgtgtagctgggacggtgctggtctgagctggaccttgtctgatggctt

SEQ ID NO: 24959 - DNA, 74 bp, Homo sapiens
ctcctctgctttagcccaagcctcagctctccatctcaatgctcagcaggcgcagcccagcctcgaaatgcaga

SEQ ID NO: 24960 - DNA, 75 bp, Homo sapiens
taaaacccaagtgattttgcagttacagcctgtgcaacaaggttaattggccttggtcctcacagctccaaaaag

SEQ ID NO: 24961 - DNA, 99 bp, Homo sapiens
ctgcactatgtatttgcttgtttgtttctccaaataccatctgttgcagactggggtgcatgacattttagttaagtgggcagaccaacatccacctca

SEQ ID NO: 24962 - DNA, 95 bp, Homo sapiens
tgtgatccctcaagactggtccacggagtgtatgaccacaaacagccatcaagggaaacactactatgaagtatcctgtcatgaccaagggttat

SEQ ID NO: 24963 - DNA, 97 bp, Homo sapiens
tagttactgtggaatcaataagccatggcatctaagaaatttgctgttaaagtacaggatttctccatgttgcccaggctggatatgaactcgtgac

SEQ ID NO: 24964 - DNA, 100 bp, Homo sapiens
cggagaaggatgacaccggagtttgacgaagaggtggtttttgaggaagtggcagtttttgtctttgataaaaaactgattgacaagtatcaaaaatttg

SEQ ID NO: 24965 - DNA, 50 bp, Homo sapiens
gctaatttgcagcttcctccaggttgtcttcaaccaccttactcctccac

SEQ ID NO: 24966 - DNA, 100 bp, Homo sapiens
gtgagtgtcccctccatgctgtctgagcggccccgactgttttttgcatgtctgacacccatgactccacctggaccttatggctccacccagaagcaat

SEQ ID NO: 24967 - DNA, 83 bp, Homo sapiens
ctgccctctcgctttccctctcgcgtctctggctgcagccccagtggacaggaaagctaaggcctcagcgatgccggactccc

SEQ ID NO: 24968 - DNA, 100 bp, Homo sapiens
ccaagttctgcagccagtgcggagagaggctgcctcctgcagcccccatagcagctgccccagagcacatcagctatgtgccccagctctcaaacgacac

SEQ ID NO: 24969 - DNA, 90 bp, Homo sapiens
ttacttggtggtgtggctctaggcctggccatcccccaggcctccggaatgccccccgctgctgggcagtgatccagcccctgctgtgtg

SEQ ID NO: 24970 - DNA, 75 bp, Homo sapiens
acttcacaatcaagaaatgcagaaacgtaaagaaatgcaattgaggtcgatgaaacaggtgtagaagttaaggac

SEQ ID NO: 24971 - DNA, 107 bp, Homo sapiens
gcgccgccagccagagggccgagagccgcggggagaaggccatcacccaggtcagcaagggcacctgcgagcaagggtcactgaaatgggacgacatgaactcaagg

SEQ ID NO: 24972 - DNA, 100 bp, Homo sapiens
actgaaagaggccctggctaggaagatgactcagaatgacagccaactgcagcccattcagtaccaataccagggtttggaaatcccttgtctccaggtt

SEQ ID NO: 24973 - DNA, 100 bp, Homo sapiens
acaattgccctcatctacacaacccatacaattggatctcaggccttcgtcaagatggttggacaccacgtcgccttcctggaagcagacgtgcttcagg

SEQ ID NO: 24974 - DNA, 83 bp, Homo sapiens
tcaagaaccgccggcagcgcgacaggaacccctccgagacccagtccaaaagccctgggcgctgcctatggcacagccaagag

SEQ ID NO: 24975 - DNA, 100 bp, Homo sapiens
agacggacgttgagagaacgaggaggaaggagagaaaatggcgtccacggaatgtgtgaatgacaactactggtttgggagggacaaaagctgtgaatat

SEQ ID NO: 24976 - DNA, 98 bp, Homo sapiens
gaacagaatatcaaacagattggcacctttgcctctgattttcagtcaatgcatcatcggagcgactcaacatgggtgaaatcgagacgttggatgac

SEQ ID NO: 24977 - DNA, 88 bp, Homo sapiens
ggaggtggacggtcagaaagttgaagttccacagccactgagttggtgctttgtaacagagccagactggtttcctatctcccaggat

SEQ ID NO: 24978 - DNA, 101 bp, Homo sapiens
ttacaaccgcagcagtggtggctatgaacccagaggtcgtggaggtggccgtggaggcagaggtggcatggggagggaaaacccctgatcctaaaatgaat

SEQ ID NO: 24979 - DNA, 100 bp, Homo sapiens
gggagctgcgagaagagagagcccgggaagagatgcagcgctatgcggaggatgttggggccgtcaagtggaggttctgtacgaggacgagccactgaag

SEQ ID NO: 24980 - DNA, 96 bp, Homo sapiens
cttcgccttctgccgtgattgtcagtttcctgaggcctccccagccacgctttctgtacagcctgcagaactggggaaatttgcagtggtgagaaa

SEQ ID NO: 24981 - DNA, 97 bp, Homo sapiens
tcggaacaaagctggggaatggagtgagcctgtctgtgagcaaacaacccatgacgcgtccgtctccaagagagtatgaagagagtgcgtctgtagg

SEQ ID NO: 24982 - DNA, 90 bp, Homo sapiens
ggccgcggagcgccagctcaatgaaagtggtgaaggaggagatctcggatgacaatgccaagctaccatgcttcaatggccgggtggtgt

SEQ ID NO: 24983 - DNA, 98 bp, Homo sapiens
tttggaaataagcaaagaaaccaaagacaaacgattagaagatggctatttcagaataggctggactctgtgaagctgagcaggagcagatgcggaag

SEQ ID NO: 24984 - DNA, 99 bp, Homo sapiens
ctcctctggccaccgcccctgggaagcccttttggaaagaactccatccggcacaacctgtcactgcatagtcgattcatgcgggtccagaatgaggga

SEQ ID NO: 24985 - DNA, 100 bp, Homo sapiens
ctactacctcatggcatgttttgaggatgaaatgagctaataaacacagtcttcagccctacattaggtccttctggcactcctctggtggaccgccccc

SEQ ID NO: 24986 - DNA, 107 bp, Homo sapiens
gcccggaaggaaattgctgctgagcttggcatttattttgagccagactgtagcagtgaagacatggatcatggtgtgctggtggttggctacggatttgaaagcac

SEQ ID NO: 24987 - DNA, 100 bp, Homo sapiens
gtccaaccccgaacggggggagattctgctcacggaactgcagggatcgcttacacctgagacgaactacagaacagcacgtaccagaggtggaagtcca

SEQ ID NO: 24988 - DNA, 100 bp, Homo sapiens
agagggtctggaggagccttctcaagaacagagaattcaattcgtcataatctgtccctacacagcaagttcattcgtgtgcagaatgaaggaactggaa

SEQ ID NO: 24989 - DNA, 75 bp, Homo sapiens
cttggtgtcttttctacaaactctgtgcctcaacaaccatttctaagtgattattcagagctgggagagcttccc

SEQ ID NO: 24990 - DNA, 90 bp, Homo sapiens
ggatattctggtggggagatgaacccaacctagtgggtgtaatacatcatgaactgcagggcacttctgtctcctgctgccatgtgaaga

SEQ ID NO: 24991 - DNA, 97 bp, Homo sapiens
cagatcctgagacccggacagtggcagtgaaacaggacccacgcagccacccagcctcagcactcatctgcgcagccatggaggccctgggacctgg

SEQ ID NO: 24992 - DNA, 50 bp, Homo sapiens
tggctctttcactgccgcattgtctgtgatggtggaggcctaccggcgcg

SEQ ID NO: 24993 - DNA, 80 bp, Homo sapiens
cttgaaaaagctgccctgagacggtgtcccgccgaaaggaatttagataatgggctgtgtgcaatgtaaggataaagaag

SEQ ID NO: 24994 - DNA, 100 bp, Homo sapiens
cacccagttccaggtagacatggaggccgtcggggagacgctgtggtgtgactggggcaggaccatcagtaacaaatgtggcaattattttggatctatc

SEQ ID NO: 24995 - DNA, 83 bp, Homo sapiens
ttccaccttcagagcgtcacggcgtacgccctcatggggaaaatctccccggtgactttcagcattttgaaagcgaagcagaa

SEQ ID NO: 24996 - DNA, 98 bp, Homo sapiens
agtcaatggcaaggctaaagaaattaatgacaataatggatagtatgaatgatcaagatggcccactgcgtgaccttggttcagctgtccatttcctg

SEQ ID NO: 24997 - DNA, 100 bp, Homo sapiens
cgtgagtgtggtctacgagctgtttctcatctttatactcttccagggccagccaagtctcgggatggtgaacgtactgtctattgcaacgtacacaagc

SEQ ID NO: 24998 - DNA, 74 bp, Homo sapiens
gaggtaacgatgcaccatgctctcttacaggctttcttctagtcaagatgagtgataaaccagacttgtcggaa

SEQ ID NO: 24999 - DNA, 75 bp, Homo sapiens
gtccattgactatgcagcctaatggagaggagaggcagcagcatggcgagtgtcctgtcccgacgccttggaaag

SEQ ID NO: 25000 - DNA, 96 bp, Homo sapiens
ccggagcccccagcgcagcggccgcggttcctagaaggtgagcgcggacggtatgcaaagttgtgaatccagtggtgacagtgcggatgaccctct

SEQ ID NO: 25001 - DNA, 75 bp, Homo sapiens
ctcacctcccatccagcctggtgctggctgtggaaggactggtgttatttgtgctattgattatacatggatgtt

SEQ ID NO: 25002 - DNA, 75 bp, Homo sapiens
ggagtggacttgattgatatatatgctgacgaggagttcaaccagtagctgctgctggtggtgacaatgtcaaat

SEQ ID NO: 25003 - DNA, 98 bp, Homo sapiens
ctacagtattttttggtttgactgtgtatactctacaatctaagaaggatttcagcaaatttggagcaggctcaaagcattcagcaaaccagggttcc

SEQ ID NO: 25004 - DNA, 100 bp, Homo sapiens
tgaccattgtgtccccaggaaccacagctgctcagaaggccagagtgctgtcacttgtctgcaatggccggcagaatacatcattgtctttggactggct

SEQ ID NO: 25005 - DNA, 99 bp, Homo sapiens
cccgacaagaaggtcaaagccaaggacgtcgatgagtacaaactgaaagaccactatctggagtttgaggtggccgacatgaaaaagaagatggaggac

SEQ ID NO: 25006 - DNA, 104 bp, Homo sapiens
cgcaccgcggcttaaatgatgtattttgtgatcgcagcgatgaaagggggatatgagactttctactcggaatatcctgagtgttgcgtggatgtaaaacccat

SEQ ID NO: 25007 - DNA, 100 bp, Homo sapiens
ggctgcatccaacccttaaacaggttggccgttgtccaatgtgttgctgttatctggaactcctacctgtcctggaaggcacatcggctctaagcctgcc

SEQ ID NO: 25008 - DNA, 117 bp, Homo sapiens
aagaagcaggaggctaagaaagtggtgaatcccctgtttgagaaaaggcctaagaattttggcattggcgtgcaatggaattgagttttgccctggtaaatgggaataatatccgag

SEQ ID NO: 25009 - DNA, 83 bp, Homo sapiens
tgactctactggaacctgagatgttaatgatggcagtacagtcagagcagcccgacggccatggaggctgaagagacgatgga

SEQ ID NO: 25010 - DNA, 75 bp, Homo sapiens
gccgcgcgcctttgtgcgcgcgccgagatgttcccttcggagaggcagctccttcacattcttaacacctggccc

SEQ ID NO: 25011 - DNA, 50 bp, Homo sapiens
aaacttgttatgcagcatataacaggtccttatcttgcttccctgccatt

SEQ ID NO: 25012 - DNA, 74 bp, Homo sapiens
tgagcctcagcaagagaaattaaccctatacctctgacccaggttggactcttcacagaaattgggcccatgtc

SEQ ID NO: 25013 - DNA, 48 bp, Homo sapiens
attcagctcccagcagctgtacaacagaaattagctgggcgtggtggc

SEQ ID NO: 25014 - DNA, 83 bp, Homo sapiens
ctcgggcgaggagaggaggtgaccccgcgaaagcaattctgtggtgttcttggtcacacatttatggagtttctgaagggcag

SEQ ID NO: 25015 - DNA, 78 bp, Homo sapiens
agccttgggccagagttccaggggctctgggagtggctgccagaagcagaagctatatgagccagtggtgatccctgt

SEQ ID NO: 25016 - DNA, 75 bp, Homo sapiens
ctggacacagcaatatctctgggctttcacaggttccagcaacagatagaaatgctttaagttcactctggggaa

SEQ ID NO: 25017 - DNA, 90 bp, Homo sapiens
aggctgagtgctaaactgtgtggggcgcggatgggatccagctgttagtcggcagcagccgctcttctaaaacattcaaaccaaagaaga

SEQ ID NO: 25018 - DNA, 50 bp, Homo sapiens
tgctccccaagctccagcagctggcaacatggctgacaaggccaagcctg

SEQ ID NO: 25019 - DNA, 82 bp, Homo sapiens
ggagcttccgggagggcggctcgcagtgtactaatggtcacttgatgtgcgctggctgttttatccacctactagcagatgc

SEQ ID NO: 25020 - DNA, 96 bp, Homo sapiens
cttcactccagtgcctccgacgcctcctgatgcctccctgcccttcgctatcctgacgctggtgaacgccccgtacaagcgaggattttactgcgg

SEQ ID NO: 25021 - DNA, 100 bp, Homo sapiens
cgaacgtcatgagcatagtgatcccattgggggttgatacagcagagacgtcatacttggaaatggctgcaggttcagaattggatcacctcccaccctg

SEQ ID NO: 25022 - DNA, 100 bp, Homo sapiens
gcgacccgggctgggtgggggaccagtgccagcactgccagggcaggttcaaatggccgaacagacccaattttggatgatgttggtgaagctttccagc

SEQ ID NO: 25023 - DNA, 100 bp, Homo sapiens
ctgcttgcaacttcttgttaaatggggttgtagcatagaagatgtggactacaatggaaaccttccagaggagaaggcagagcccccccaggctatgaat

SEQ ID NO: 25024 - DNA, 90 bp, Homo sapiens
ccaaaggcagggcaaggaaactggccacaagttgaaatcacaaagattagacacctttttagataggtgttcttcagcaccactgacaac

SEQ ID NO: 25025 - DNA, 100 bp, Homo sapiens
gcccgataagcgctttcgcttggcgctgggcagcttcgtggaggagtacaacaacaaggtgaagctcgtgtgtggagtgccacggtacaatcagacgaca

SEQ ID NO: 25026 - DNA, 75 bp, Homo sapiens
gctgatatcgaactcctgggctcagactctgaacaggaagtgcctcctggaaccacagagtcggttcagtctgtg

SEQ ID NO: 25027 - DNA, 74 bp, Homo sapiens
ctgagccaggccagcgccgacctggagcacacagcaagaaggaggccatcagcaaactgggaagaggaccctca

SEQ ID NO: 25028 - DNA, 82 bp, Homo sapiens
ttatggacagccgtatgcagctggccaaactctgctatgacccagattttgtacatcaggaacgtctctatcaagaatacaa

SEQ ID NO: 25029 - DNA, 96 bp, Homo sapiens
ggctcctgcttctgctgctggtggggctcacggcgcctgccttggcgctggccggctacatcgagattgtagaaggcatgaaacaaaaaatgtgga

SEQ ID NO: 25030 - DNA, 100 bp, Homo sapiens
ttgccattgaaaaccctgctgatgtcagtgttatatcctccaggaatactggccagagaggagcaagcaagggagctgtacaggagactaagggaaaaac

SEQ ID NO: 25031 - DNA, 147 bp, Homo sapiens
aaggaaagcaccatgacgtccatccatttcgtggttcacccgctgccgggcaccgaggaccagctcaatgacaggtgtcatggagaaactccagctgggcccagagattctgcagcgggaaaatccaaggcttatttatgccaggct

SEQ ID NO: 25032 - DNA, 50 bp, Homo sapiens
ctggcctggaggctatccagcggagagtcccgtattctcagagtaaaagt

SEQ ID NO: 25033 - DNA, 75 bp, Homo sapiens
cttcaccgagctggtgtgcagcctcagatcctttgcacatggcctgctatcaacaatcctctacaatgattctca

SEQ ID NO: 25034 - DNA, 83 bp, Homo sapiens
cccggcggatcggatcccgcagatcggagacggggcctggaggcactgccgccctgcactgtagcagatgcctaaataaagtg

SEQ ID NO: 25035 - DNA, 49 bp, Homo sapiens
aagaaggaggcggagaagaggaccagggaggagaaggagttcggcttcc

SEQ ID NO: 25036 - DNA, 75 bp, Homo sapiens
cgacaacagtgtaattaggcaactagtcaaccaccctctgaccaaaacaggtgtgtggagaaatgcgctatcagc

SEQ ID NO: 25037 - DNA, 75 bp, Homo sapiens
attggctctttagctgaaatacttctgaaggtctgtcatgctaatccatcagaaagagctcgttttattcgctgc

SEQ ID NO: 25038 - DNA, 82 bp, Homo sapiens
aaacaggggagcaaggtgcaagagtccacaaagggacctgatgaagcgaagatcaaggaaagttgcagacgttggcagtgct

SEQ ID NO: 25039 - DNA, 74 bp, Homo sapiens
gggacaaggttccccacatctacttggaaatctttgggatgctcaatggattcactggcaaaatttgctggcag

SEQ ID NO: 25040 - DNA, 75 bp, Homo sapiens
aggacttcatgtctatatatttccccattcactgagcggttctggtgaggttggaaggatgcagccacccggttg

SEQ ID NO: 25041 - DNA, 48 bp, Homo sapiens
cctcctccagctgttgttgctgctgtgccacaatagagtgatatttaa

SEQ ID NO: 25042 - DNA, 100 bp, Homo sapiens
gaggagcctggggagagcttttgtgacaaggaaacaaggtatcgccagagatacttggacttgatcctgaatgactttgtgaggcagaaatttatcatcc

SEQ ID NO: 25043 - DNA, 113 bp, Homo sapiens
ctgaagttcatcgccaggactgtgatggtacaggaagggaacgtggaaagcgcatacaggaccctaaacagcctgggttactaggtgtctttcagaagctgattgcatccaaa

SEQ ID NO: 25044 - DNA, 90 bp, Homo sapiens
aaagtaccttcataagttcttcaatatcccatttttgcagcttcaggggcccatgaagaggttgactacactgaaaagctcaagttcagc

SEQ ID NO: 25045 - DNA, 100 bp, Homo sapiens
cttcgccaactccgctgcctttgccgccaccatgcccaaaacgaacattctagtatgccagtagaaaaaaatatcactttagaaaggccttctaatgtaa

SEQ ID NO: 25046 - DNA, 100 bp, Homo sapiens
aaggaggagcctgttccagaactgctggaagctgaggatttccagactgtattaccatcatttgagctcttctcaaagtatggaaaattatattcaaaag

SEQ ID NO: 25047 - DNA, 100 bp, Homo sapiens
gtctcccggagggccagagtcgggttaccatcatgaaagataaagataccaggaagagtaaaggggttgcatttattttatttttggataaagactctgc

SEQ ID NO: 25048 - DNA, 90 bp, Homo sapiens
ctgtcctaatcctcactgccgaaaggtatggacctgtctgccaatcaggacgaggagaccgaccaggagaccttccagctggagatcgac

SEQ ID NO: 25049 - DNA, 86 bp, Homo sapiens
aactagagtgaagctaacaaagcgaagtggccatactcaggttttgtagtgcatccctgagcatgagcacagaatgaagcggcgtt

SEQ ID NO: 25050 - DNA, 145 bp, Homo sapiens
tgaagctgaagtctcaggagggagaagtggttatattgccattgatgacatccaagtactgagttatccttgtgggcccactgatgatggtgaagaagagatggaagaagacacagtcacaaacgggtcctgagcagtgaggcag

SEQ ID NO: 25051 - DNA, 99 bp, Homo sapiens
caattagccgggatagagaggagaaacaggatgtggacgttgatctctcagccaaagagtcacccacttgcaatctgttccctgcatccaaaagcccag

SEQ ID NO: 25052 - DNA, 100 bp, Homo sapiens
gcagtggtcaggatagagactagtagatctggagaggaatcagagatcattgatttcttcctgggggcctctctcaaggatgaggttttgaagattatgc

SEQ ID NO: 25053 - DNA, 90 bp, Homo sapiens
cgtcttgtatctctaattggaagcatcttagtaaacacttgccatcgtcagatagtatgtctctaaaagtagatgttgaggctcttgaaa

SEQ ID NO: 25054 - DNA, 86 bp, Homo sapiens
cgtgtgctacatacgggctgaatgtggagagggtcttccaggacgtgttatagttttgccgctggactcttccctcccttccccca

SEQ ID NO: 25055 - DNA, 90 bp, Homo sapiens
caagggggacaggctggactgaaagaggacacgggaagaacaaagacttagactcggaatactcccccagttgcaagaggcgcaggaccg

SEQ ID NO: 25056 - DNA, 100 bp, Homo sapiens
gaggaagtgggggttatggtgggaggagccgatactgagcttcttcctatttgccatggatccccgtcgaggtcaagatcaagatccaggtctatttcac

SEQ ID NO: 25057 - DNA, 106 bp, Homo sapiens
tacggcgtcttgccaccgggcctgtcagttgacctaccccttgcacacctaccctaagagtgcagcagctgccccgagccccgtgcttggcaacattccccccaac

SEQ ID NO: 25058 - DNA, 76 bp, Homo sapiens
cttgtattaccgagtaatggaatccatgcttaaatcagttctgcggcatgaggaatttgaagaaggctgcaaagct

SEQ ID NO: 25059 - DNA, 87 bp, Homo sapiens
gcagtacattttgggttaccgggagaaaactggttgtcctggatgtttgaaaagttggtcgttgtcatggtgtgttacttcatccta

SEQ ID NO: 25060 - DNA, 99 bp, Homo sapiens
ttcattggccacctacagaaacaaaatgtcaacaaattgatgggaaactggtggtgacaaaagagaaagagaagaaagtggggctgtatacgatctatg

SEQ ID NO: 25061 - DNA, 50 bp, Homo sapiens
tccagagtagctgggattacaggttatttccagggaaatgcaaaccaaag

SEQ ID NO: 25062 - DNA, 50 bp, Homo sapiens
ggtcacagaccctcattcagaatgatctcagtggttcaatagcatcccca

SEQ ID NO: 25063 - DNA, 100 bp, Homo sapiens
gcgccgcgtagcttccatccgccagctgccatgagcgagcgcctccgtcccagcatctactgccgaggatgttccaagccgctgtgctgctcgtgcgcgc

SEQ ID NO: 25064 - DNA, 78 bp, Homo sapiens
ataaggagatcatagcagagtacgatactcaggtcaaagctgcagaaccttggcctgaaaatgctacattatatcagc

SEQ ID NO: 25065 - DNA, 90 bp, Homo sapiens
aaatatgaactcttctgaagaaagcactgccccccaggtgttgagtaccagctctccagcccaacaggcagaaaatgaagccaaagccag

SEQ ID NO: 25066 - DNA, 95 bp, Homo sapiens
gggaccaatgtgctggggaggaaggtcctctatctgccgagcttcttcacctacgttttgatggcgacgactttgatgatgtggaggaggatgaa

SEQ ID NO: 25067 - DNA, 100 bp, Homo sapiens
gtcagagcgagtctcggagaagatgtggtggcttccgtttgttggtggaggaggtggcaggcctcggcgaacacacatctggctttttgttagaggtctt

SEQ ID NO: 25068 - DNA, 100 bp, Homo sapiens
gtcattcaaagacccgcagcaaccctgagaacaacgtgggccttatcacactggctaaaatttacatagtacatgacgaagttaaggataaagcttttga

SEQ ID NO: 25069 - DNA, 100 bp, Homo sapiens
gcaatgttcttccactggcgacgtgcagcggaggagggcaaggactacccctttgccaggttcaataaggctaaagaattacctccaaagccattgtcaa

SEQ ID NO: 25070 - DNA, 90 bp, Homo sapiens
aagacccagagctggctccagggaagggctgcgtttggcctgggagagctcctgggtagaactgcacttcagcaataatgggaacggggg

SEQ ID NO: 25071 - DNA, 119 bp, Homo sapiens
ttcagcgactgcaccagcaagatcggcaggcgagattgcctgacccaggcctgctcggccctcacagggtgagaagccctaccactgcaactgggacggctgcggctggaagtttgcgc

SEQ ID NO: 25072 - DNA, 75 bp, Homo sapiens
gaggactgccagctggcgctgcagaatgctgaccccctgaaggtgtacccgccactgaaggggagcttcccggag

SEQ ID NO: 25073 - DNA, 125 bp, Homo sapiens
gagatgctgtatgcactgaatctggatggcgtccgttgccttcatgtgaagaatgtcacaggtagactaatggttggcctacgttggtggaatcacattgatgaagatggaaagagccattgggt

SEQ ID NO: 25074 - DNA, 75 bp, Homo sapiens
gggaactggatgtcagcaagaatgccgatacggaagatgtgtgcattgtagagagattgttctccagcagcctag

SEQ ID NO: 25075 - DNA, 100 bp, Homo sapiens
gttctgccctggctgcctcagccctaccagcactggtcatgtctaaagaccattgccctcttgaacatttaccgtaaccctcaaaactcttcccagtctg

SEQ ID NO: 25076 - DNA, 75 bp, Homo sapiens
cagctgcctcagttcttagcgcagggaggaggtacaggagaactgtgtgcggtggcgaaagaggttcaccttcgt

SEQ ID NO: 25077 - DNA, 110 bp, Homo sapiens
caactcatgcaccatgaaaagctgctgttttgcaggagatcgtgaccagctgggctcaaaatgcagagaactcaaagatattcatttcggccagtgttacaagatctcag

SEQ ID NO: 25078 - DNA, 82 bp, Homo sapiens
cggagcctggaggagctgctgctggacgccaaccagctccgcgagctgcccgaggaatcttgtcgattggcctggctgctgc

SEQ ID NO: 25079 - DNA, 75 bp, Homo sapiens
gagccctcgcgacgcgcccggcccggagcccccagcgcagcggccgcgtttggtgccctggttgtcagatgttgg

SEQ ID NO: 25080 - DNA, 88 bp, Homo sapiens
attagccttaaatgaaagaatcatgttgtctcttgtcagcacaggaagcagccagacacagtctccaacgccaccaaagcctccgtcg

SEQ ID NO: 25081 - DNA, 75 bp, Homo sapiens
ggcactgaggctctggaacttctgcccagctctccttgattgaagaatgaaaaggccttgcgtctcaaccttgtt

SEQ ID NO: 25082 - DNA, 80 bp, Homo sapiens
tttgacaagaaggaccggcgtgctctgcactgggcagcatacatgggttcccagtctaagtgggtgactttccaagatag

SEQ ID NO: 25083 - DNA, 96 bp, Homo sapiens
gtccagttggagctccagggagaccagtaatccatcagctgaggctctcagagaatgaaagtgtggccctgcaggaactcttggactggaggagaa

SEQ ID NO: 25084 - DNA, 100 bp, Homo sapiens
aactactttggattcacccacagcggggcggcggcggcggcggctgcggcccaatatagatttgagttttgtcaccggctcccacgtcggagagctgatc

SEQ ID NO: 25085 - DNA, 101 bp, Homo sapiens
tgcatccaagcctgtgttgttcaagggaatcatattgacaggtcatgaaaatgagaccaaaagatctctggaagcgattaatgataaaatttcatggagaa

SEQ ID NO: 25086 - DNA, 97 bp, Homo sapiens
cagacctcgaattagcaaaggaaacttttggtgatgccatacaacccacagcagatgggacagcagatcttccgctcttcctacacccctctgctga

SEQ ID NO: 25087 - DNA, 101 bp, Homo sapiens
tggaatctattggatatggttagagagagtcagtactgaaacaggaaataaatgaccttgtaaaacggaaaattgcagtagatgaagaaaatgctttctta

SEQ ID NO: 25088 - DNA, 75 bp, Homo sapiens
gtcatcaaagacaccaaactgctggggctgcttgctctcggtgactacatgaatgtccagtgccatgcctgcatt

SEQ ID NO: 25089 - DNA, 124 bp, Homo sapiens
gcccacgtagccccgcagctgcagccgcctgaccacggcgactggacttacgaggagcagtttaagcagcctgacatttaccccggtaactgctgggcatttaaaggctcccaggggtacctgg

SEQ ID NO: 25090 - DNA, 82 bp, Homo sapiens
ggcgtggagatatggcgcaactgcggcgcaagtcaatgaaaggattctattttgcaaagctgtattatgaagctaaagaata

SEQ ID NO: 25091 - DNA, 100 bp, Homo sapiens
cagaagtttcagttcagtatgaagaaaaatttcagaaccatcacaaactggtactctgtggatatccccttggacaaaactgtcgtcaataaggatgtct

SEQ ID NO: 25092 - DNA, 99 bp, Homo sapiens
tacagggatgtgatgctggagaactatagccacctggtttctcttgagtttccctacgtataccctggtggttcaagctgctgaccttcaaggtgaggg

SEQ ID NO: 25093 - DNA, 75 bp, Homo sapiens
gacccgttgccagagtgcagaggcctggaaaatccccagagaggagtcacgtctcttcggagccctacgagccca

SEQ ID NO: 25094 - DNA, 74 bp, Homo sapiens
ccagtttaagcgccagcggatcaacccgcttccagggggacgcaacttctcagtttctcccactactaagggca

SEQ ID NO: 25095 - DNA, 100 bp, Homo sapiens
cgacaggtgtcgcttgaaaagactgggcttgtccttgctggtgcatgcgtcgtcggcctctgggcagcagtattggtaaaggttttcaaggtgtcatgaa

SEQ ID NO: 25096 - DNA, 83 bp, Homo sapiens
gtcccgggcgctgtgcatccacactggacgcgagctgcgctgcaaggttgtatcagagtaagatggacggtagctttgattgt

SEQ ID NO: 25097 - DNA, 74 bp, Homo sapiens
ggaggaagactcgatccgcctgcctgcgcacctgcgtgtacaaagataatcaatgctgattcggaggacccaaa

SEQ ID NO: 25098 - DNA, 90 bp, Homo sapiens
cgggctaccagatcggccgtccagctggaatcaaccgatggaggctccgctgcaaactggaatgcggccttgcaggccactcgagcccta

SEQ ID NO: 25099 - DNA, 82 bp, Homo sapiens
atctcatgagcaggatgaattgcatcatagagacaccgagaaatgcatcttctgcagacaccgggttaagagggtctctgga

SEQ ID NO: 25100 - DNA, 74 bp, Homo sapiens
cgcctccgaagatgggggatttctacgacccggagcacccgacccctgatccctgcatcccatgactcggagct

SEQ ID NO: 25101 - DNA, 50 bp, Homo sapiens
gctacatggccccctggtttagggagggacacttcacggccatggtatgg

SEQ ID NO: 25102 - DNA, 75 bp, Homo sapiens
cttacacatcccctgataaactaaagcttttatcaaaatacaactcaaacctagctactccaatagcaattaaag

SEQ ID NO: 25103 - DNA, 96 bp, Homo sapiens
ctgcaccgcaccgagggcgagctccagccagctgaggtgggtgtcctggttggcaaagaccggtcaagtttttacgtgaatgggctgacacttggg

SEQ ID NO: 25104 - DNA, 99 bp, Homo sapiens
gcgttctaaaggaaggcgtccgttggccttcgtacccgtcttgattgagcctgaagagttgagagaaatcattgagaagacaagagagatggagcagaa

SEQ ID NO: 25105 - DNA, 99 bp, Homo sapiens
cccgaggctgaagccattgctccacaggttggcaatggtgtgcatcaccttcgaccaggccaacctgaccgtcaagctgccagatggatacgaattcaa

SEQ ID NO: 25106 - DNA, 118 bp, Homo sapiens
tccatgctgctgccgttaatggagataagggtgctctacagaggctcatcgtaggtgtcgtttcagtcagatgttgcatccaatttttgaggaagcttccgatgtcattaaggaagaa

SEQ ID NO: 25107 - DNA, 75 bp, Homo sapiens
atggcctgtacaacctcaaacaggtcagcaatctgaagatggtcttacggagcctagtagagtactcccaggatg

SEQ ID NO: 25108 - DNA, 100 bp, Homo sapiens
gaaagacatcctgagaggacttggcagtctgcgctcctcagaccaccggcaggtgaacagcctgatgcagaccgaggagtgcccacctatgctagacgcc

SEQ ID NO: 25109 - DNA, 98 bp, Homo sapiens
gtggagatcctattcagaggggccggtctctctaaatatgccccagtcgcaatgtatctgctgagcaaaaagatgaaaacaaagaagcaaagcctcga

SEQ ID NO: 25110 - DNA, 90 bp, Homo sapiens
gccagctgctccggagatacggaattgcttacttaggaggtgtgtgcagtgctaagaggaagtgtgtgcttgccgaagacaatggtctca

SEQ ID NO: 25111 - DNA, 82 bp, Homo sapiens
ggggccagggaaccctggtcaccgtctcctcaggcttttctggctttgcccgcccagctgctccatgccaggaggaggagga

SEQ ID NO: 25112 - DNA, 90 bp, Homo sapiens
aaaccacttctcagacaagttccatcccacctttgagtcagagccctaatttgtttagaactgtaatatgcacagttaaaacaacttgtc

SEQ ID NO: 25113 - DNA, 75 bp, Homo sapiens
agctgatcaccatgtcctgcacggacaagatcgccaggttgggcccatgagatgtgtgctctgtatattccggag

SEQ ID NO: 25114 - DNA, 75 bp, Homo sapiens
cacttccccatctgtaacgaggtgttgagacgagatgaaccaaggatcgggatagcagtataaaattagaatcaa

SEQ ID NO: 25115 - DNA, 75 bp, Homo sapiens
gcatctgctcaacgacgaggacctgacgcagcagaaatgatggaagaattgcatagcctggacccacgacggcag

SEQ ID NO: 25116 - DNA, 144 bp, Homo sapiens
tcggggggcacgcagctgaagctcatcatgaccttccagaattacgggcaagcgctgttcaaacccatgaagacccttgaacatctgtgaagaaatgactattctgcatggaggcttcttgctggccgagcagctgttccaccc

SEQ ID NO: 25117 - DNA, 96 bp, Homo sapiens
cgggggcacatcccatacccactgccccccaactacagctatgggcactcaggggcccagtgcattacctgttcctacaaggcaagctcaggactg

SEQ ID NO: 25118 - DNA, 100 bp, Homo sapiens
tttgatctgaatgggagtgccgtgctgaagatcgcggaggtgctgcacccctcatcctgtctcggattgtgggaggctgggagtgcgagaagcattccca

SEQ ID NO: 25119 - DNA, 100 bp, Homo sapiens
tgaagagccttcaggcgctgggcgagaactggaagaagttcgggaactcagagtttgacccccccggacccaatgtggccaccaccactgtcagtgacga

SEQ ID NO: 25120 - DNA, 75 bp, Homo sapiens
caatcctcagacgcctcacttaggacaaataacaacgaacttgatgcaagtgataggtttgccaaggtcagacct

SEQ ID NO: 25121 - DNA, 50 bp, Homo sapiens
tactgggggacatcctgttgtgaaggttctaaatggcttctaagaagttg

SEQ ID NO: 25122 - DNA, 50 bp, Homo sapiens
aggagcaccaggagacgcaactcatcggaacaatgcccagcgccttgggg

SEQ ID NO: 25123 - DNA, 74 bp, Homo sapiens
gaacccgagagcgtggagcgggctgggccagtataccaacagatgttttaaagattgtgtattctgtgggtgct

SEQ ID NO: 25124 - DNA, 83 bp, Homo sapiens
cactgctttccactcggctcctgtcgtccgttctctcaggctcccgttcaggagtccaaaactacttacctggaagaccttcc

SEQ ID NO: 25125 - DNA, 74 bp, Homo sapiens
gcggcggccacgccaaggacggagccagcccctgggcaacaaagtggaaatggagattgtgagcatgttggaaa

SEQ ID NO: 25126 - DNA, 83 bp, Homo sapiens
cccggaacacaagctgtgaaacactaggaggctactcacagtcgaactacaactccccggggtccggccagaactacagtggc

SEQ ID NO: 25127 - DNA, 83 bp, Homo sapiens
cgcggattcgccgaggcaccgaggcactcagaggaggagcaggccgggctctcgccatgggtcactgtcgcctctgccacggg

SEQ ID NO: 25128 - DNA, 90 bp, Homo sapiens
ctcaaggagcctgggggaggttcgtttcgattgtgttcagtgtggacccctccgagggcagccctggttccccagcagggctgggggcct

SEQ ID NO: 25129 - DNA, 80 bp, Homo sapiens
tcgacgaccacgtgcggaggaaggactcctcgctctatatagggccgcgatgggcctcttggaacattggtgtgttcatc

SEQ ID NO: 25130 - DNA, 75 bp, Homo sapiens
cagggttttcgtgagattaagaaggttaccggtattgtaagaacaagccgtacccaaagtctcgcttctgccgag

SEQ ID NO: 25131 - DNA, 96 bp, Homo sapiens
gacctgtctgggtctcagccgccaaagaccccgtccggtagagctagagccggtgcaggccacgcagaacaagacagggaagtatgtgccgccgag

SEQ ID NO: 25132 - DNA, 100 bp, Homo sapiens
atatttgctgctagagagtttaaagcccgagtggattcatttttctacatattaggatataaccctgagacaagaatggatgatgaacttgttgttggac

SEQ ID NO: 25133 - DNA, 101 bp, Homo sapiens
aacacttacagaaaatatgagagtgtgattcatgatgttgctatcaaaagttgagaaattgtcagaagaaatcatggagataatgcaaaatttaagtagta

SEQ ID NO: 25134 - DNA, 96 bp, Homo sapiens
ttctgcatcccagggctctggaacgaggcagatggcttctataagaggaccccagactacgttcagattcgagaatggaagaggacaggctgcttc

SEQ ID NO: 25135 - DNA, 75 bp, Homo sapiens
gctgttcctcaccatccctttcgccttcttcctgcccgagctggaggcccacttggccacggaatatgttcagca

SEQ ID NO: 25136 - DNA, 90 bp, Homo sapiens
cctggtgggcccagtcctcggtgcggcgcggccaggcgaggattaaatccaccacacagggtgaaatctatctccatgacaacattcaca

SEQ ID NO: 25137 - DNA, 101 bp, Homo sapiens
tccaaaatgagtcgcatcttcaacccccatctctggccaactcagccaatccgcacatttagctctccaactaccatacaacgtgcttggtttaggtcgga

SEQ ID NO: 25138 - DNA, 98 bp, Homo sapiens
tcattagagctgcatttcagtagccaaagaggacaggaacaagtctgtcttcatgaggcattccccgtcggagccctttctagagaaaccagtgccgg

SEQ ID NO: 25139 - DNA, 119 bp, Homo sapiens
ttcagatgtggtggaatatgccaaggaaaaactggagagcttcatcaaaaatagtgatagctttgataaataacaacgaacttgatgcaagtgataggtttgccaaggtcagacctctc

SEQ ID NO: 25140 - DNA, 58 bp, Homo sapiens
cgagcccaaaccccgccaccatcatagatgtgtcttgctgaatcagggctctcttatc

SEQ ID NO: 25141 - DNA, 98 bp, Homo sapiens
tgctattcctggtctacatcctgcgggtgcctttgaaaatcaacgacaacttgagcacagtgttctaagaacggaagcatctgggctggatggaattt

SEQ ID NO: 25142 - DNA, 75 bp, Homo sapiens
ggacaagatgaccacactccaggaatgccagtgcatcttttgcacagctgtcaaaatgcagatcttcgtgaaaac

SEQ ID NO: 25143 - DNA, 96 bp, Homo sapiens
aaagaaatgagcagctttggataatgacgacagcaacccgaagacagggaaatttaggcttcttctcatatcggtaattccactcaggccactgtg

SEQ ID NO: 25144 - DNA, 100 bp, Homo sapiens
gccgggtctcctgttccaactccacctaggtgccgacgccaccgccgagcccatgatcctggaacagtacgtggtggtgtccaactataagaagcaggag

SEQ ID NO: 25145 - DNA, 96 bp, Homo sapiens
gctgggcctgtccgctggcgtcatggtaactgcaaaaacaatggctcagcatgaagaactgatgaagaaaactgaaacaatgaatgtagttatgga

SEQ ID NO: 25146 - DNA, 50 bp, Homo sapiens
ggcactcaaaagtggggggcaggaaagtgctgggcctaaaggagataaca

SEQ ID NO: 25147 - DNA, 83 bp, Homo sapiens
agaaggggaacggatctgtgtgcccacagctcctggagccccacaggttggcaggggaccctcttctcccgtctgccctgcgg

SEQ ID NO: 25148 - DNA, 80 bp, Homo sapiens
cagcctggctgcacttgaggttcccgcccaggaagcttttcttgcctggagaagagggaggggagaggacaagggccctg

SEQ ID NO: 25149 - DNA, 76 bp, Homo sapiens
ccaggatagaagagtcaataactgaagacttaaggttgtccttctattcaggccactcttcgttttccatgtactg

SEQ ID NO: 25150 - DNA, 90 bp, Homo sapiens
cgggaactgggagacctggaaggaagcgactgcactgatccaggagcagatcaatatcaccctggaccaccgctgccgtatcttccagaa

SEQ ID NO: 25151 - DNA, 100 bp, Homo sapiens
ccggcatctgtcttgagctcccagcaagcactgttgcaagaattcaattccgtcttcctgatggttcttcctttacaaatcagttcccttctgatgctcc

SEQ ID NO: 25152 - DNA, 90 bp, Homo sapiens
gttgccgacgccatcaggctcaacgaggaactcaaagtggatgaggaaaatatgatgcttcctggtgtgtttagtggttggtgccattcc

SEQ ID NO: 25153 - DNA, 51 bp, Homo sapiens
tccggagccagccaacgagcggtgctggagaatctggtaaaagcaccattg

SEQ ID NO: 25154 - DNA, 88 bp, Homo sapiens
tgggtcgcagttcttgtttgtggatcgctgtgatcgtcacttgttcttggccaggctgactgagagatttgtgctgggagtggatatg

SEQ ID NO: 25155 - DNA, 100 bp, Homo sapiens
gactccaggggagccgtggcctcctctccgccctagcgctgagaaatgggcagtgtctgtcagagaaaccaactgattcctgatattatcacaaagccag

SEQ ID NO: 25156 - DNA, 83 bp, Homo sapiens
acagccaggtggcgaggatttccacataggtctcccacagcagtgatgccataacaaaagaggagattcagagcatctctgag

SEQ ID NO: 25157 - DNA, 75 bp, Homo sapiens
cacaactgctcgcgtgacgaccgcattcgtggcaggaattgaatgatctggcacgggaccctccagcacagtgtt

SEQ ID NO: 25158 - DNA, 100 bp, Homo sapiens
ggatcgtgaccgagaccgtgaccgagagcgtgaccgagagcgcgaatatcgtcatcgttagaaggagaaactggctcttcgacagcagttgaatgaagcg

SEQ ID NO: 25159 - DNA, 98 bp, Homo sapiens
gccaggttgcagggtgtccgcttcctcagattgtgggattagtgatatgcttttctaaagagtagaaaagtcgaagatgtctagacagaacttagtgg

SEQ ID NO: 25160 - DNA, 75 bp, Homo sapiens
gaaaaatatggcaaagacttcaatgacatacggcaagattttagtaagccatatcaaagacttcattgaaaaata

SEQ ID NO: 25161 - DNA, 95 bp, Homo sapiens
ttagctcaagagcaagtggcccaaggcctcagaagactagaaggaagttcctggccattcaggaagatgttaccgagtacttcagtgaattcctt

SEQ ID NO: 25162 - DNA, 140 bp, Homo sapiens
cgcacctgccgctcatcgccatcacccgcaacccggtgttcccgcgctttatcaagattatcgaggaggtcacaagccccaaagtggacgtgttcaatgctaacagcaacctcagttctgggcctctgcccatcttcccc

SEQ ID NO: 25163 - DNA, 75 bp, Homo sapiens
ggcgcggcgcagaagaaacccgcggcgaccacagccaaagcgggcagagaagaagaaggaggttcctgctgtgcc

SEQ ID NO: 25164 - DNA, 51 bp, Homo sapiens
gattgtagagccatatattgcatggggctcagcaaagacccaaatatcgtc

SEQ ID NO: 25165 - DNA, 97 bp, Homo sapiens
caggcgagggagcccgcgtcggctgagagcccacaggcccccacagttacagaatgtctgaaggggacagtgtgggagaatccgtccatgggaaacc

SEQ ID NO: 25166 - DNA, 50 bp, Homo sapiens
ggggaggccaacgtgaagaatggtacaggagctgcagcaggccatctcca

SEQ ID NO: 25167 - DNA, 75 bp, Homo sapiens
ggagaactacagaaacctggtctccctagactggcatcagtactatgacatagtttatatgaagcctcatgggag

SEQ ID NO: 25168 - DNA, 50 bp, Homo sapiens
gctttctgctgccgcccgcaagcagaggaggaacgcagtggatgcctttc

SEQ ID NO: 25169 - DNA, 75 bp, Homo sapiens
aaatgggatcgcagcctctctaggagcagattacagaaacctctgcgccatgagagccaaggtgagcggttcctg

SEQ ID NO: 25170 - DNA, 75 bp, Homo sapiens
ggccttcgaggaggtcatgaaggacctgagcctgacgcgggccgcgcgggaatactcccccagttgcaagaggcg

SEQ ID NO: 25171 - DNA, 82 bp, Homo sapiens
tgagcagtttgaagacttgctagttaggattttattactggcagcatgtatatctttttggaatgcagtagccctctgggcc

SEQ ID NO: 25172 - DNA, 50 bp, Homo sapiens
catgccgctcaccgtagacgagggggggccctcagcctcttggccttgaa

SEQ ID NO: 25173 - DNA, 75 bp, Homo sapiens
ctgggggctacaccagatcgtgggtgagttctgcagtcagggtgtccgtgagggcctcatcgtgggcttcgtcca

SEQ ID NO: 25174 - DNA, 87 bp, Homo sapiens
gcctcagtggccggagcagcctcaaagcagaagccgagaacaccacctgtgcaggagacatggcggacgcagcatctccgtgctctg

SEQ ID NO: 25175 - DNA, 96 bp, Homo sapiens
caacagctatgaaaccaaaaccccaaatcttcgaatgtcagagaagaaatgtttgtttgcagaagccaaacctgaccacagacactaaggacaagg

SEQ ID NO: 25176 - DNA, 96 bp, Homo sapiens
tgcatggagcaagtctgtcagcaccatctttctaacagtatcaaggttacattggtgcagccctagttttagggggagtagatgttactggacctc

SEQ ID NO: 25177 - DNA, 83 bp, Homo sapiens
atcccgctgttcacctacgggcctgatcaaacttgccttcctgttctccaagaccaggatgaccgagtgggagacagcagcac

SEQ ID NO: 25178 - DNA, 74 bp, Homo sapiens
agaggcttcaagctgttagtgagtccacggttccgccaaggtcgatttggtcagacaacgccaccacttgttga

SEQ ID NO: 25179 - DNA, 82 bp, Homo sapiens
ttatgaaagtgccaccaccaggtctataaccgaatatcctccgaatcctaaatctagagctccaaggatgctggtcattaag

SEQ ID NO: 25180 - DNA, 50 bp, Homo sapiens
tgtaattcccagccttgttcctttatagcgccacagcaacatcctcagag

SEQ ID NO: 25181 - DNA, 73 bp, Homo sapiens
tggtagaggcggaggctcaggcagcttgagaaagctgatgtcctgaccactggagctggtaacccagtaggag

SEQ ID NO: 25182 - DNA, 97 bp, Homo sapiens
caggtcctcgcggtgcgcaccgtttgcgacttgtgtaatgttcaagctcagaaatgccttatgtggatcgtcagaatcgcatttgtggttttctaga

SEQ ID NO: 25183 - DNA, 90 bp, Homo sapiens
cagaaaggagcagactgtggagcaaagaaaatggactgactccaaagaaaaaaattcaggtgaattcaaaaccttcaattcagcccaagc

SEQ ID NO: 25184 - DNA, 50 bp, Homo sapiens
tttgtaagcaaaaaccagcagatcctttgagatggggtctccctgtgttg

SEQ ID NO: 25185 - DNA, 90 bp, Homo sapiens
ccagccctgctcgcagaattaccgcctcttctttagagcagttggacatcatggagacaacttagtagagaagatcatttcagcacttcc

SEQ ID NO: 25186 - DNA, 83 bp, Homo sapiens
atctcgctcggctgcgggaaatcgggctgaagcgactgagtccgcgatggaggggccaaaccagtgctcctgccacctctctg

SEQ ID NO: 25187 - DNA, 74 bp, Homo sapiens
ctttcttcccaatgatgcttcctacttcctttccgtgcataagaagccgaatgacgggctcatcttcgcttgtg

SEQ ID NO: 25188 - DNA, 75 bp, Homo sapiens
agaggacccaggagaaattcgccctcaaacatgggcctcctacatgaccaactccccgactctgatcgttatgat

SEQ ID NO: 25189 - DNA, 76 bp, Homo sapiens
tgtttgcggttcagccctttgatgaccgcagcaggaaatttgcgagaatccccgatttatcattgatggagccaac

SEQ ID NO: 25190 - DNA, 112 bp, Homo sapiens
gcgcccgggaggaaggaacgaggcaaggagctaaagcagcgtgcgttcagccctgggcaacccagactactacggactcatctaacaaaacagcaccgactccagcatccag

SEQ ID NO: 25191 - DNA, 100 bp, Homo sapiens
gtggagacaaatcatcaggaatccattatggtgtcattacatgtgaaggctgcaagaacatacatatgatagttgagaaagacacatattctgatcatga

SEQ ID NO: 25192 - DNA, 100 bp, Homo sapiens
caagtctgattctaaccagtatattggggaactgaaagatcagatagcagagctgaatcatgagttctccaaggagaggcacatcatggacaggaccccc

SEQ ID NO: 25193 - DNA, 100 bp, Homo sapiens
gccgagatgtccggctgcagcagcaagtcccatcggaggacctccctgccctgtataccgagggaacagaatcatgtcaaccctgccatggacttcacgc

SEQ ID NO: 25194 - DNA, 60 bp, Homo sapiens
aaaccacgctcctcggaccaagcctcgggagctaaggaagctaaactccaaggtggaaag

SEQ ID NO: 25195 - DNA, 100 bp, Homo sapiens
actcggggccggacggacattgttctcagatactttacgaattcttacatgtgagccatctcagaataaacaaaaaggagttggatattttaacagtatc

SEQ ID NO: 25196 - DNA, 103 bp, Homo sapiens
ttggtttggctcctcctccagactcaaagagtccagcctctgatgaagcaggagagaaagaagccaagtctgattaataaccatataccatgtcttatcagtg

SEQ ID NO: 25197 - DNA, 122 bp, Homo sapiens
ctcacggccaccgataatagtttctgagtttcggaatgagatatatgatgtaagacacagtattgcctaagtgtaatcttgaacatgggcggtgctgtgagtgctggtgaagacaatgatga

SEQ ID NO: 25198 - DNA, 147 bp, Homo sapiens
aatcctgaatcgagctgagagggcttccccggttctcctgggaaccccatcggccccctgccagcacacacctgagcagctgctccctgcatgaggaggacacccagagacatgagacctaccaccagcaggggcagtgccaggtgc

SEQ ID NO: 25199 - DNA, 100 bp, Homo sapiens
ctgcaagtgatggatttaaggcaaatcttgtttttaaggagattgagaagaaacttgaagagaattcatctgtgccttattccagttcactcttgtaagg

SEQ ID NO: 25200 - DNA, 75 bp, Homo sapiens
agatcatcgagcatttcaaacgccatcccaggcctcaggacctgagttctccgacgcccacatgacatggctgaa

SEQ ID NO: 25201 - DNA, 100 bp, Homo sapiens
gccagcgcagaagggacgtgagcccagccgaggtaccgctgaagaggaatcaattttggttttgattcccaccatggccatcacccagtttcggttattt

SEQ ID NO: 25202 - DNA, 83 bp, Homo sapiens
gacgctgctgctgcccggcctcggggaattgaatgatctggcacgggaccctccagcacagtgttcagcaggtcctgttggag

SEQ ID NO: 25203 - DNA, 75 bp, Homo sapiens
cacaatggaaccaattgttttacagtctgttccacatgatcattgtaataagttcacatggatgcagtggagcca

SEQ ID NO: 25204 - DNA, 90 bp, Homo sapiens
cgccatcgttgctgccttcttcgtcaagatgaggagcgggaaggcctcctgcaccctggagaccgtgtgggaagacaagcacaagtatga

SEQ ID NO: 25205 - DNA, 50 bp, Homo sapiens
acatcaccgacttgttaaaagaaggtgctggagaatctggtaaaagcacc

SEQ ID NO: 25206 - DNA, 90 bp, Homo sapiens
gcttcatcctcggcggcggtggccgctagctccaaggaagggtctccgtctctccaccgggggcttcatccttccagggaggagaagagg

SEQ ID NO: 25207 - DNA, 75 bp, Homo sapiens
gtcggagtgaggaagaggaagaagaggatgaagatgtggatctggcccaggcggctgagccagaggccaactgca

SEQ ID NO: 25208 - DNA, 75 bp, Homo sapiens
ctcctttgagaaaggctaatcttcagcaagctattgtcacacctttgaaaccagctggaagagcctgtattgtcc

SEQ ID NO: 25209 - DNA, 98 bp, Homo sapiens
ctgggaggtggaacgggccgaactgcaggatttccatttaaacagggttaatttggaagaatcttcaggagtggaaaactctccagctggtgctagac

SEQ ID NO: 25210 - DNA, 50 bp, Homo sapiens
tgtggaagtattttgttatgccaggtacaggacacaatatccaatcctag

SEQ ID NO: 25211 - DNA, 100 bp, Homo sapiens
ctgacagcagccatcgaggcgagccagagcctgcagtcccacacggtgatttgatgaaggctgctgcaggagagttcgcagatgatccctgctcttctgt

SEQ ID NO: 25212 - DNA, 100 bp, Homo sapiens
gctgctgcctgtggcccgggcggctgggagaagcggagtgttggaaatctactttcttcaatgtgttaaccaatagtcaggcttcagcagaaaacttccc

SEQ ID NO: 25213 - DNA, 83 bp, Homo sapiens
gacgctgctgctgcccggcctcgggcgagccatccagcaggctgtgggaagctccctgcagggggacctgcccaatgataaag

SEQ ID NO: 25214 - DNA, 82 bp, Homo sapiens
gtctctcttattcaggacatgaggctaaaaggtcagattcctgaaattaaacagactttggaaattctaaaatacatgcaga

SEQ ID NO: 25215 - DNA, 117 bp, Homo sapiens
cgtccctgacagcgcggaatctgggtgcagttcctgcagtaccccactctacgatcagggtctcatgttccggtgcagcgccagctgttgtgaggacagccaggcctccatgaagca

SEQ ID NO: 25216 - DNA, 100 bp, Homo sapiens
tcgcgctcgcgctggtggcggtcgcctgggtccgcgccgaggcttctcgtcagtgcctcgcaggatggtaaacttatcatctgggacagctacaccacca

SEQ ID NO: 25217 - DNA, 75 bp, Homo sapiens
gcctaaagccgggcggactgcggtagccaaggtgctttggtggtactatttctccaaatcagtagagttcctgga

SEQ ID NO: 25218 - DNA, 100 bp, Homo sapiens
agaagaaacgaattagtaaacagtgcaagttgatgcgtcttccatttgcaaggaaagtgggggctcagcaagaactgattaccgagccattcaactagcc

SEQ ID NO: 25219 - DNA, 97 bp, Homo sapiens
gccttcctgttcacggtgaccttcgcttggtgtcctcctggcctcagcaacctgacaattctgtcgtgtcccggatgtgaaatggtctgacttcggg

SEQ ID NO: 25220 - DNA, 98 bp, Homo sapiens
cttcgctgtctgggatgttggcagccacttcaaaatcagacctctgtggcagcattttttccagaacacaaaaggaatatcacaggagtgatgctgtg

SEQ ID NO: 25221 - DNA, 100 bp, Homo sapiens
cgcatctggctggagccctgcattcgcggcgtgtgcaggctggacgtaaagaaagaagtgatgcactcaattctgcaatagataaaatgaccaagaagac

SEQ ID NO: 25222 - DNA, 90 bp, Homo sapiens
ctggactcatggaggctgagcatttattcaggatgaaaactttcggaagagaaagttgcctgtggtaagttcagttgttaaagtaaaaaa

SEQ ID NO: 25223 - DNA, 106 bp, Homo sapiens
ttctaccctgtccgaaggagctccaggaagagcaaagccgagctgcagacaatgcagatcttcgtgaagactctgactggtaagaccatcaccctcgaggttgagc

SEQ ID NO: 25224 - DNA, 83 bp, Homo sapiens
cgagaagtttgccaaccctttccctgcagcagtgcgagtgctgaagctgctgaaagatggcagaagaagtggtggtagtagcc

SEQ ID NO: 25225 - DNA, 100 bp, Homo sapiens
gacagattctgacaatatatacatgtatggctctggaaatttgaaggtggcggggcaggatggttctgtggtgcagtttaagattaagaggcatacacca

SEQ ID NO: 25226 - DNA, 97 bp, Homo sapiens
gctttttctatcccgtgctcttcgtgctcttcatgttctttggaagtgtccctggccagtgtccttccacctgtccacaagcatggggaacatcttc

SEQ ID NO: 25227 - DNA, 100 bp, Homo sapiens
cgctgggcgtgaggggggccttagagggcctccccaggccgcctccgcccgtgaaggttcgttaccgtgaacgcatcaccattcttcgagggaatcatga

SEQ ID NO: 25228 - DNA, 141 bp, Homo sapiens
gcacctcgctagcgttcccctgtcttccccaacgccccggagccgccggccgctagcgtcagcgccagccaggtaaacactacacgtgaagagtggtgaaagggaacattgattactgaagtgccctggagagggaaagca

SEQ ID NO: 25229 - DNA, 98 bp, Homo sapiens
atagacgtcgaggaggcagccgttctcgctctcgttcccgttccaaatctgcagaaaggaagctactggaagatgtgttccaccaaaataagggagta

SEQ ID NO: 25230 - DNA, 100 bp, Homo sapiens
tgttagtgagtccacggttccgccaaggactcgctgattcttgagaagagtcaaaactggagctctcaaaaaatggaccatattctgatttgctgtgttt

SEQ ID NO: 25231 - DNA, 101 bp, Homo sapiens
acgagaagccgccgagagccgactaccctccgggcccagtctgtctgtccgtggtggatctaaggaatttaaactttgggataatgagctgcagtatgtgg

SEQ ID NO: 25232 - DNA, 100 bp, Homo sapiens
cgattctcctgcctcagccccctgagtagctgggattacaggcacgcgccaccactcccaggtaccattgttggatactggtgacatcatcattgacgga

SEQ ID NO: 25233 - DNA, 90 bp, Homo sapiens
gctaactatggagaaaagtgcctctacaactattggaattacatgaatgacagtcttcgaaccaatgtgtttgttcgatttcaaccagag

SEQ ID NO: 25234 - DNA, 95 bp, Homo sapiens
ctggtcttcacttttttgaggcaggaaggcaatccctattcaacagaggaaaatgggtcaacttgcttctggaattagatcatcacttcttccta

SEQ ID NO: 25235 - DNA, 83 bp, Homo sapiens
ccgcgcccggccggacccgggcccgaggcatccttctttaaaagagaaatccacgttagctctccttgaggtctcgagttccc

SEQ ID NO: 25236 - DNA, 83 bp, Homo sapiens
ccacgtgaagctcaccgacagtgccctgagggccttcgagagctaccgcgccagacagaccacctcctccaccctgaagggtg

SEQ ID NO: 25237 - DNA, 78 bp, Homo sapiens
caacagccgcaccactacgtggaacgacccgcgcgtgccctctgagggccccaagattttgtatcagattgtaccatc

SEQ ID NO: 25238 - DNA, 75 bp, Homo sapiens
atgcaagcacagatttgcttttacaccaagttgcaacaaggacagtgtcagagcaggctgtaaaaaatgtggcta

SEQ ID NO: 25239 - DNA, 83 bp, Homo sapiens
ggaattcttccagtttctttatcctaaaactggtgtaacagctttcatccatcccaggggaatcacttacctatgccagcaca

SEQ ID NO: 25240 - DNA, 97 bp, Homo sapiens
agtgaaagagatggcctggtggaaagcctggcatttgatgaatacagaaatatcagccaaaaggacattgtggacagcataaaaggagaattatctg

SEQ ID NO: 25241 - DNA, 80 bp, Homo sapiens
cctgtctctgctcctcgctgtggctttggacaatgcagatcttcgtgaagactctgactggtaagaccatcaccctcgag

SEQ ID NO: 25242 - DNA, 90 bp, Homo sapiens
caggaggaggaggaggaggagggactcggcgggaggatgatccagtttgctgaccagaagcaagaattcaacaaacgtcccaccaaaatt

SEQ ID NO: 25243 - DNA, 83 bp, Homo sapiens
cccagacgctgcccgcgggcccggccacggcggagccaagagttgtctgctggttctcagcttgaagaagattctgcagtcct

SEQ ID NO: 25244 - DNA, 100 bp, Homo sapiens
gacacttagaagaagcatggaccctgcaagagggtcatattgaacattccagatacctatcattactcgatgctgttgataacagcaagatggctttgaa

SEQ ID NO: 25245 - DNA, 100 bp, Homo sapiens
acttcctgctcacagcccgacgaaaggatgccaaatttcccagtgacctgacagcagaggagcgtcaagaactggagaacatccgacggagaaaacagga

SEQ ID NO: 25246 - DNA, 113 bp, Homo sapiens
gagaccataacccccgacagcgccatggcccagattctgccaattcgttttcaggagcatctccaggttatcaatactctggctgaccatcatcatcgtgggactgactttgg

SEQ ID NO: 25247 - DNA, 101 bp, Homo sapiens
gaagaatcagaaatctttactgattccaattgaacagagtatctgccaagcccgggcttccgtgatggtctacgatgacaccagtaagaaatgggtaccaa

SEQ ID NO: 25248 - DNA, 100 bp, Homo sapiens
atctgatgtggtgcttttgaaccactggaaagtgaggaattttgaagtacaccgtggtgacattgtatcattggtacggtactgcagggacaccagcaat

SEQ ID NO: 25249 - DNA, 75 bp, Homo sapiens
tggcctccatcttcggcaccgagaaagacaaaatgtgacagtgatgataacatgggtgccaaaaatacttcaata

SEQ ID NO: 25250 - DNA, 75 bp, Homo sapiens
tggaagaagatggaaaaaacttgtttaatggtatagactatggtcgaagaaaaagaaatgcttttaggattcagg

SEQ ID NO: 25251 - DNA, 117 bp, Homo sapiens
gagcgagctgagtggttgtgtggtcgcgtctcggaaaccggtagcgcttgcagcatggtgacaagtcagcagcaggagatggctgtcttggacaggcagttagggcataaaaaggag

SEQ ID NO: 25252 - DNA, 75 bp, Homo sapiens
attttgaggcggtcctcctagcggcctgggaaagaatatggcaaagctgatgcaagatgggtttattttgatcca

SEQ ID NO: 25253 - DNA, 83 bp, Homo sapiens
cggaagtgtaacgttgaggcccttcttgtgtatctggagaaaatagaggtatctctcctaaatgtgtgatcaaggaattacca

SEQ ID NO: 25254 - DNA, 100 bp, Homo sapiens
tcccctctaggggatggaggctgagagaccccaggaagaagaggatggtgagcaggcctgtcctcctcggtacacatgctgtccctgtccatcacgccgg

SEQ ID NO: 25255 - DNA, 50 bp, Homo sapiens
ggttggtccgagaagccaacaatttgatcaccctgacagtgggcttcggc

SEQ ID NO: 25256 - DNA, 100 bp, Homo sapiens
taccagcatcaagatgatttatggtaataaggtcatcctgtacagttctacagcatgaataggcctgcctctcgccatactcccccaacaatagggggct

SEQ ID NO: 25257 - DNA, 98 bp, Homo sapiens
attatgttataatgtggaacctggatgaatgtagagagaaagtacttcaagagtgcctggtgaagaatgtgatgggatcactagcatgtctgcggaga

SEQ ID NO: 25258 - DNA, 100 bp, Homo sapiens
ttctactcttctctacaaatatagactccgttccctaccacagccttgatgttccctttctacagctgctggaggactggactgctactactactcctgg

SEQ ID NO: 25259 - DNA, 80 bp, Homo sapiens
ccattgtgtgctgtgaggtaaaggtcggattattgtccttatgaaatagttaaacagcctcgccatgtgccagaagaata

SEQ ID NO: 25260 - DNA, 87 bp, Homo sapiens
caactgaactacaagattcaggcaattccgacttatgaaaccgtgatgacattttttaagagggtcgagctgtgcagttttagcggg

SEQ ID NO: 25261 - DNA, 50 bp, Homo sapiens
cgcttcacggaggcaatagctagccggaattgaatgatctggcacgggac

SEQ ID NO: 25262 - DNA, 75 bp, Homo sapiens
acaatggcatttacagaaagagtcaacagcagtggcaacaggcaatgcatgaaccattgcaaacttggcaagatg

SEQ ID NO: 25263 - DNA, 98 bp, Homo sapiens
ttccttatttgcgaggattagacggaaatggaacaggaaacttggatttaactggccagaagcaggtattcaaagcagagaacaatccctgggtgacc

SEQ ID NO: 25264 - DNA, 100 bp, Homo sapiens
cgggaacccttgccgctgctgtcctgcgaccccaagcagatgaagaagatgactttatgtgtaagaaggcggcctctaaatcaaaagagaatggaagatc

SEQ ID NO: 25265 - DNA, 100 bp, Homo sapiens
ccaccgcctcggcgccctttcttggcccttgttcccccaaatgtctgactctgactctcggactgagaaacgcaaggattgtcagtggcttcgccccgag

SEQ ID NO: 25266 - DNA, 100 bp, Homo sapiens
gcagcttcaaaatgaagaaattgtggagatgttaaacatgtctaagaaaacagtttcttgttttgtgaacttcaccagactacagcagatcacaaatatt

SEQ ID NO: 25267 - DNA, 100 bp, Homo sapiens
cgcaggagcggctggaccagggcggcgggcagcgaggtcacaggccccacctttgctgatggcgagctcatccccagggaacccggcttttttcccgagg

SEQ ID NO: 25268 - DNA, 89 bp, Homo sapiens
ccgcagagcgcatccatcaaagctttgcgcaacgccaacctcaggcgagatgatgcacgaaggagagagagtgagaagtctctagaaaa

SEQ ID NO: 25269 - DNA, 75 bp, Homo sapiens
tggacatgcacagttgatacagagtgatgatgatattgggatggacgacgaagacacgttgttacctaggaagtt

SEQ ID NO: 25270 - DNA, 100 bp, Homo sapiens
ccctcgagtgtacacactgcgagctactttctgactgcccgcctggcactgaagccgagctcaaaggggcatatgggggcctctcagaccgcccctcggc

SEQ ID NO: 25271 - DNA, 90 bp, Homo sapiens
taagcttgaatcagcacaatagagcccttaacattgaaagagctcatgatgaaagttatttccagaaagaagagaatggcaaagtatgag

SEQ ID NO: 25272 - DNA, 90 bp, Homo sapiens
ctcgatttgaaaaaatggacaacctgctgcgggatcccaaatcggaagtgaattcggattgtttgctgggactgtggagtttattatgga

SEQ ID NO: 25273 - DNA, 83 bp, Homo sapiens
gcaaggtgggaagtgaagtcagtgcctcagttgctggtgtacaagggagaagaagccacattccaaatctcaggcctccagac

SEQ ID NO: 25274 - DNA, 100 bp, Homo sapiens
gcctggatgccttcccaaacctgaaggacttcatctcccgatttgaggcttgccttttgtcactgctccgaataaatttgaagctctggctgctcatgac

SEQ ID NO: 25275 - DNA, 100 bp, Homo sapiens
cgcctatcaacttccaccagaacgatcccgtagaaatcaaggttcggacaagtggacctccctagaaagaaaactgtttaacaaagcactagccacttac

SEQ ID NO: 25276 - DNA, 83 bp, Homo sapiens
tggtgaaactgaatcacaggagatatttccagcttaaagcttttcaagccaggccaagaagctgtgaagtaccagggtcctcg

SEQ ID NO: 25277 - DNA, 82 bp, Homo sapiens
cctgaagtcggtgtctgctgcgttcacggcaggattcggttaggtactccaaagattcaggtttactcacgtcatccagcag

SEQ ID NO: 25278 - DNA, 101 bp, Homo sapiens
tagaggaggcagaagatttctggccagtggagagaggaattcctcaagacaccattccagatcactttgggaagcagtgacatccaacctgtatcaagtct

SEQ ID NO: 25279 - DNA, 87 bp, Homo sapiens
aacagctgagggaacagcagaaagtccttcatgaaaccattaaagttttagaagatcgagaaactcttgctactcagttggatctag

SEQ ID NO: 25280 - DNA, 51 bp, Homo sapiens
tgtacatcgtgcatggcgtccaggttgcttataaaaagggagtcaaacatc

SEQ ID NO: 25281 - DNA, 100 bp, Homo sapiens
cagcatccctgcagccttctggtataccatcgtcaccatgacaacactaggtactatactggcaattgctggagaagattttgcaattgttgcttctgat

SEQ ID NO: 25282 - DNA, 100 bp, Homo sapiens
ccgaaagctacttcacaatctggctgaacctggaactgctgctgcctgtcatcattgactgctggattgacaatatcagactctgcacttgatggatcag

SEQ ID NO: 25283 - DNA, 75 bp, Homo sapiens
aaggaacttggttccccctccctcagcttccgccccaaaaggcatcaagcagatcctgccacaccagatgaccac

SEQ ID NO: 25284 - DNA, 100 bp, Homo sapiens
gaaaaactgaattggaaatttttattcggctgtcggaaaaggtaacagaagatggaactcgaaatcccaatgaaaaacctacccagcaaagaagcatagc

SEQ ID NO: 25285 - DNA, 100 bp, Homo sapiens
cgttatttcgggcactccacagattctgttgcgaaggcagccatctttagttcgtctttcctagagagtcaatgcaaaatcatgctgccgtgttccgtgt

SEQ ID NO: 25286 - DNA, 100 bp, Homo sapiens
gcggatctcaccgccgctcaggccaagaagtatgatgcgtttttggcctcagagtctctgatcaagcagattccacgaatcctcggcccaggtttaaata

SEQ ID NO: 25287 - DNA, 74 bp, Homo sapiens
gacggcccggctgcagcgagcgctggacggagaggaaagcgctgctgatgaagaagcatttgaagataattctg

SEQ ID NO: 25288 - DNA, 101 bp, Homo sapiens
ctgcgatcccgggtcatctccagatgctagggttatggacccaacatgagtgaagtttcctgcaagaaacgggacgactatttggaatggccagagtattt

SEQ ID NO: 25289 - DNA, 105 bp, Homo sapiens
acatttccagcaggctgcagatacgagtggacaatcattgcacgtgcagaagagcgacgtggacctgatgagaacgaagctccggcgcctggaggaggaaaacag

SEQ ID NO: 25290 - DNA, 111 bp, Homo sapiens
gaaaccggcatgcccagggagaaaaaactgcaggcattaatgtccgaaagcaaggatggaacattactgtggacctggtcattggccctaaagggatccgccagctgacta

SEQ ID NO: 25291 - DNA, 50 bp, Homo sapiens
agcctcctgaatagctggaattacaggctcctaggtggaagagacttgcc

SEQ ID NO: 25292 - DNA, 100 bp, Homo sapiens
ctcctggtccagctctcaggacaagaacaaagtgtgctgctattgacctgaaaagtggttctggaaaagtgtaccaaggccctgcaaaaggtgctgctga

SEQ ID NO: 25293 - DNA, 119 bp, Homo sapiens
ttcaaggcaagaccgaattcagaaggatatcgacgtcgtgatccagaagtccagagctgaggactgcctgtttgcagaataccctctaccatctgctttggtcagggtgccgctcgagg

SEQ ID NO: 25294 - DNA, 50 bp, Homo sapiens
gtcttgaaacacaaatggtttttggctacccacctttctgttctgagacc

SEQ ID NO: 25295 - DNA, 103 bp, Homo sapiens
ctgtggttggtcccatgggcctccttgtggtcctgctcgttggaggctgtgcagcagaaggttcacgcttacatcatcagctacctgaagaaggagatgccct

SEQ ID NO: 25296 - DNA, 98 bp, Homo sapiens
ttggggaggtggagaatatgccaccgccacagccacgatcatgcaatgactcagatgcatataaagatcaaatatcagtactgccaaatgaacaagac

SEQ ID NO: 25297 - DNA, 76 bp, Homo sapiens
aaagagctattgaaaaaatgaatggaatgctcctaaatgatcgcaaagtttgtggacatcggatacccaaggagac

SEQ ID NO: 25298 - DNA, 100 bp, Homo sapiens
tgggaaggcacagggagaagggataaccctacacccagaccccaggcgccaagcccatctttgtgtgcttgcatccaactgtgatgagcctatgtatgtc

SEQ ID NO: 25299 - DNA, 100 bp, Homo sapiens
gcgccttggaccccgcctccctcccgcgcgtgctgcgggtctgctcgggggtctacttcgaggagacaagaggagcagcagcggcaccgcccctcaccct

SEQ ID NO: 25300 - DNA, 101 bp, Homo sapiens
gagagaaaatggcgtccacgggaagagagaagggcacagttacctaagtatcaacgtaatcttcctcggccaggacaggcccccatcggtaatccaccagt

SEQ ID NO: 25301 - DNA, 90 bp, Homo sapiens
gcggcaggtgctgtcccagcagagtctgtacctgcacaggtacgtccagtgtgcccgagccgcgggcgtcccctgccgctgcttcctctt

SEQ ID NO: 25302 - DNA, 80 bp, Homo sapiens
atttctatatgatgctcctcccaatattctgaaacatgtggttggacagttcagtaaggaatggttagactctccgaact

SEQ ID NO: 25303 - DNA, 75 bp, Homo sapiens
cggaggaggaggggagaggcctggaggacaccaacatgtaattttgcacgatggcagtcaaatgagagcaaaagc

SEQ ID NO: 25304 - DNA, 100 bp, Homo sapiens
ctggggaagccgtggcgtcccccatggacgacgggtttgtgagcctggactcgccctcctatgtcctgtacagagttgtggaaagtaaaaatgtagccct

SEQ ID NO: 25305 - DNA, 90 bp, Homo sapiens
cccccatgttcgtcatgggtgtgaaccatgagaagtatgacaacagcctcaagatcatcagcaacttctactacaccagctaccaacacc

SEQ ID NO: 25306 - DNA, 83 bp, Homo sapiens
gatgatgtgcagatcaatgacatttccctgcaggccataaagaatgctgatgggagaaccattttcctaattttcaaattgtt

SEQ ID NO: 25307 - DNA, 98 bp, Homo sapiens
ctgaaccctgcacagagggctttatacagggccgtgatgttggagaactacaggaacctggagtctgtggtttttcccaggtcatgagtctcgggcta

SEQ ID NO: 25308 - DNA, 100 bp, Homo sapiens
tccattcctactgtggatttgggaattcctaatacagatagagaagcccctgaatgtgacagtgatccgcaggggggaaaaacaccagcttagacttgtt

SEQ ID NO: 25309 - DNA, 98 bp, Homo sapiens
ggacacacggagctcagggaggcagcagtggcagtccatcgaggggaccaaactctccatcacccagggtgacgatgcctggggagcctgtggacgtg

SEQ ID NO: 25310 - DNA, 82 bp, Homo sapiens
aatcccatctaccgcaactctcagttcgagagtaaaggccagctgcgggccgtccagcggctgtgccacttctacagcgccg

SEQ ID NO: 25311 - DNA, 97 bp, Homo sapiens
tgtccgccgagatgtccggctgcagcagcaagtcccatcggaggacctccctgccctgtataccgagggaacaggatctaacttggcaagatgagca

SEQ ID NO: 25312 - DNA, 82 bp, Homo sapiens
gcgccttcttgctcgccgcctgctgctgctgtcctcgcgtcgcggatgtgaagttcatttccaatccgccctccatggtggc

SEQ ID NO: 25313 - DNA, 100 bp, Homo sapiens
taactgccgcctcacctgtggagctctgggtacagctttaatgttgacctactagcaggaaaatcaaaggatattgctctacacttgaacccacgcctga

SEQ ID NO: 25314 - DNA, 75 bp, Homo sapiens
ggtgcccgcaccgctcaacagctgtctcctcaaaggcgtctctggccgagcctctttttgtggaaaacgacagca

SEQ ID NO: 25315 - DNA, 129 bp, Homo sapiens
caggtgttactcggggtgcgccagtggaagcgggaggcagttgcagctttcaggacctgcacgctgccttgctgttggagatctgtgcagtaggcagttgtggaattaaaagcaacaccccatgtcgct

SEQ ID NO: 25316 - DNA, 74 bp, Homo sapiens
tcagaacacctcacaactttgtggtctataatgacggatctatactacctcagtcagacagatggagcaggtga

SEQ ID NO: 25317 - DNA, 82 bp, Homo sapiens
tggacctggatgtgagggtgaaggctgtgctgctgggagccacattcctcattggggatatgagactttctactcggaatat

SEQ ID NO: 25318 - DNA, 76 bp, Homo sapiens
ctttggttataaattatgatctacctaccaatcgtgaaaactatattcacagtgacctgaaaaaaatgtctggatt

SEQ ID NO: 25319 - DNA, 75 bp, Homo sapiens
gccatctgggttataccctttgtaaacaaataggccaagatcaagcaaaagctgcgggaaattgaagagaatcag

SEQ ID NO: 25320 - DNA, 100 bp, Homo sapiens
cggcgggaacgattgggctgagcagaggacgacatgttgcttttcgtggaggcctcccagaagttcctgccgaatcgtcttcgtcacccccggggtccga

SEQ ID NO: 25321 - DNA, 75 bp, Homo sapiens
gaaaatgccaacgccgtgtctgaagacaggggcaagtgtccgagtggtgaatcagctacttacagagatggatgg

SEQ ID NO: 25322 - DNA, 75 bp, Homo sapiens
catattgtactggcctgctgctggcccgcagggaacagcatatgccatatatgagctggctgtggcttcatttcc

SEQ ID NO: 25323 - DNA, 100 bp, Homo sapiens
ctatcgccttcgccgaccggctacgcgccgtggacacagacggggtggagcccatggaatcggtcctggaggacaggcccactgctcagtggagcgtgga

SEQ ID NO: 25324 - DNA, 98 bp, Homo sapiens
cagtgaggccgcggcgcagggcagagagacgccacacagccaccagccgcagcaccaggatcacgaagcggtactgcaaggaccccagccccagcagc

SEQ ID NO: 25325 - DNA, 102 bp, Homo sapiens
aagtgactcaaactgtgagaacttcagtgccggtggtggtgtgcacattgagccccggtatagacagttcccccagctgaccagatcccaggtgttccagag

SEQ ID NO: 25326 - DNA, 75 bp, Homo sapiens
atttggcctgagcagctcagagtcaggaagtcagagcgcagacggttacctggcacgctggccacattctgcctc

SEQ ID NO: 25327 - DNA, 100 bp, Homo sapiens
ctctcgtctggcaaaggtggtgaagacgttgaaggagattcaccttgccttcctcccctacgaggcccaggaagccctctccgggttcgctgaggccgcg

SEQ ID NO: 25328 - DNA, 80 bp, Homo sapiens
agcgtggccggcagcgtcccggacgaggaggtggcgacatgtctaagaatgtgagccagtcacagatggcaaaattgaac

SEQ ID NO: 25329 - DNA, 100 bp, Homo sapiens
ggtgcagaagtcattttaaactatggacgactccgaggaacattgagttgtcatttacgtgctgaagcatattgacttgaggaaaacgccttccttggag

SEQ ID NO: 25330 - DNA, 86 bp, Homo sapiens
ctgtagaagtgatttctgcaaaggatgtcccaacaggaggaatcttccagctccggcagttccatgccattgcagtgtcaactagg

SEQ ID NO: 25331 - DNA, 75 bp, Homo sapiens
ctttgcttttaattgaaggacaacttcctcctctgtggaagatagatgataagcctgtaaaaattgacaagtggg

SEQ ID NO: 25332 - DNA, 83 bp, Homo sapiens
tctgctgattcacaattatggagactgtagatgcagaggatgctatttatggaagaaatggttatgattatggccagtgtcgg

SEQ ID NO: 25333 - DNA, 97 bp, Homo sapiens
attttgccgatttcatgactaaccagtgggatctgaaacttgtggaaaagccgtctcctttgactcttgctcctcatgacttcgcaaatattaaagc

SEQ ID NO: 25334 - DNA, 89 bp, Homo sapiens
ttaaatactggtttcacactccaccaagcatcccattacagatagaagagaagcctggaatggtcccccctccgccgggagaagaaagc

SEQ ID NO: 25335 - DNA, 100 bp, Homo sapiens
gggactactggtgcctgcgctgaaaaagattcaaccctatgaaaagataaaggccaggggcttgcctgataatatatcttccgtgttgaacaaactagtg

SEQ ID NO: 25336 - DNA, 100 bp, Homo sapiens
ctgcacagcgacgagcaccagctcctgaccaaccccaaggtgacaaacagcatgtttggtgcttcaagaaagaagtttgtagagggggtcgacagtgact

SEQ ID NO: 25337 - DNA, 100 bp, Homo sapiens
ctcaaactgaatcctctaaaggccccatacaatgaagtagacattggtggaaacatttagaatgaatctgaagtctgctgcagtaaaacacagaaggctt

SEQ ID NO: 25338 - DNA, 75 bp, Homo sapiens
gatggccccaggtgtaagcgcagaaagcaggcgaacccgcggcgcaataacgggcgtgatggtgggcatgggtca

SEQ ID NO: 25339 - DNA, 90 bp, Homo sapiens
atatttttggacctgaaacagaaattctggaacacctatatgacgctgaccggaaaggagattgagattgacattgaacctacagacaag

SEQ ID NO: 25340 - DNA, 95 bp, Homo sapiens
attcgttgaaggacaccagctgcggaatttgcggctttggcaggcttcagggatgacttcttagggggcaggggaggtagtcgcccaggcgaccg

SEQ ID NO: 25341 - DNA, 100 bp, Homo sapiens
ggaggtggtggagagagcgaccaggttcctcaggtccgtcgtgacggggactcagtgacctttgaagatgtggctgtgaacttcacccaggaggaatgga

SEQ ID NO: 25342 - DNA, 73 bp, Homo sapiens
tcagcttcccagcctaccactggaccctctgctgcctctccaggcctctcttctgtggaaactctgaagccga

SEQ ID NO: 25343 - DNA, 75 bp, Homo sapiens
gatcacccgcttggaaaagggcaagatctatcggcaggtacatgtccagggccgccgggtccccttccccattgc

SEQ ID NO: 25344 - DNA, 98 bp, Homo sapiens
cagaagagaagaagaagcaggatgaactgaaacggattgccagagaattggcagaagagcaaggtccgtggtcctgtcagtggaagcccggatagcat

SEQ ID NO: 25345 - DNA, 82 bp, Homo sapiens
tagaatgtttgcgattgctgctttagttgaagctttatatcaaactacatacccagaatatctccagtacatttatttggtg

SEQ ID NO: 25346 - DNA, 100 bp, Homo sapiens
acagctgaccctacatgatgagaggtttgagaaggcaagaaacctattggaattcgagacttaattaatgaagctttgcatcgagaaacgatgggtctga

SEQ ID NO: 25347 - DNA, 95 bp, Homo sapiens
gttgctacctcagaaggctccctttggggactgtgctgcttttgacacaaaaacggggttacgtgtggcagtgaagaagctctccagaccatttc

SEQ ID NO: 25348 - DNA, 74 bp, Homo sapiens
tcagcttgacttccaactgcccctgagatttgacctccagtataaggggtgatctgctgcctgcagatggaatc

SEQ ID NO: 25349 - DNA, 109 bp, Homo sapiens
ccgggaggaaggaacgaggcaaggagctaaagcagcgtgcgttcagccctgggaccatggtgaatccgggcagcagctcgcagccgcccccggtgacggccggctccct

SEQ ID NO: 25350 - DNA, 75 bp, Homo sapiens
attcaaccagctggaagtgaagttgcaaccagtgtggcagagagtctaagcttttgtcaaaattttatgagctgg

SEQ ID NO: 25351 - DNA, 100 bp, Homo sapiens
ctctcttgagccgctgccttgttaccagctggagcttgacgcagggaacgggtatggcaatccccgaaactcaccaggtctgctggtctcacctggtaac

SEQ ID NO: 25352 - DNA, 75 bp, Homo sapiens
cccgagtggatcggggacggagagaacacgagcccatcagtaacctttggaaacatcagaagctactctccattg

SEQ ID NO: 25353 - DNA, 82 bp, Homo sapiens
gtttttattaaggctgttcatgtgaaagaataaacagccattggactcttcaaacaaaaacgctgtctccatcaagtactgc

SEQ ID NO: 25354 - DNA, 50 bp, Homo sapiens
cccggggccaggtgctcctgctcagacggcgaggggaccgacctgtttgc

SEQ ID NO: 25355 - DNA, 98 bp, Homo sapiens
gggcagtccgcgagccccgcactctctcgatgagtcggagaagtcccgtgttcagattttgcaaatctaaatgtcataaaaactttaaaaagaagcgc

SEQ ID NO: 25356 - DNA, 117 bp, Homo sapiens
gtagccaaatggcttgaggctcagatcatccaggcccgatctggcagacctgttgatctgtccaaggagtgagagcgcagagagccctgagacagcccctactggagcacctcctgg

SEQ ID NO: 25357 - DNA, 83 bp, Homo sapiens
gcaaagttttgcagatcttcaacaagaggacccaggagaaattcgccctcaaagatggagtctcactctgttacccaggccgg

SEQ ID NO: 25358 - DNA, 145 bp, Homo sapiens
gtcgctggagcacaaaagagtctccgcggtggaggtctgcgttgctcttgcttttcctcgctggggtgtacggagatacaactcgtcaacgaatcaaattcagtgatgacagagtatgcaagagtcaccttctcaactgttgtcc

SEQ ID NO: 25359 - DNA, 125 bp, Homo sapiens
cagcttcgagggccgggagctcctggtcatcgagctgtccgacaaccctggcgtccatgagcctgggtgttttgaatgctgtatcaaatgcctggggggcattccctatgcctctctgattgcca

SEQ ID NO: 25360 - DNA, 90 bp, Homo sapiens
ctcagatgtggagcactacctttgtgagcagtgtgacccaaggcctgtggacagggctttgatgacagtagggaaagaaccatttcctac

SEQ ID NO: 25361 - DNA, 75 bp, Homo sapiens
ccgagctcaccaaactgctcaacgacgaggacccgtgcccgaaggaggaaacagtgacagacctggagactgcag

SEQ ID NO: 25362 - DNA, 50 bp, Homo sapiens
gcttgtgatgatgccaaacaagattgaggaaacttgaatatttttgtatc

SEQ ID NO: 25363 - DNA, 75 bp, Homo sapiens
tactggtgggaaatcaagtcgtaaaaacaggtcaagtggtttgggttggtaccattgggtcaggccccaagggtc

SEQ ID NO: 25364 - DNA, 50 bp, Homo sapiens
agccgaggcgcaggtggcgctgggtttggtgcacctcgatttggaggaag

SEQ ID NO: 25365 - DNA, 98 bp, Homo sapiens
gactggtctgtctgagggagatggtgacaagctcaaggcctgcgaggtaggaggtgtgcaatctttggggggaacaggtgcacttcgaattggagctg

SEQ ID NO: 25366 - DNA, 96 bp, Homo sapiens
atccctggggctggagccacaaaatgaaatgacatttcaacgagtttgtcatcatgtgagagagaatagtattgcctaagtgtaatcttgaacatg

SEQ ID NO: 25367 - DNA, 100 bp, Homo sapiens
atgctagtctggcataaacataaaaaataccccttctggccagcagtgtgggctcgggatgagtttgaaggcctcttcaagcagccagcagaaaatgtca

SEQ ID NO: 25368 - DNA, 100 bp, Homo sapiens
cagcagtaaaggaactattcggctatgtgacatgagggcatctgccctctgtgatagacattctaaatacattgcctaagatactgagccatatcgcccc

SEQ ID NO: 25369 - DNA, 83 bp, Homo sapiens
catctccatattctcaggcacagagaaagttactgtaaaatggggaaaggagaaatttgaaggtgtagaattgaatacagatg

SEQ ID NO: 25370 - DNA, 83 bp, Homo sapiens
tggaccacaggccctcgttgcccagatgaccaagaatcgccttcagccctgtctggtgcatccttggcagaaagtgaggagga

SEQ ID NO: 25371 - DNA, 100 bp, Homo sapiens
gtctccaagaggagtttgaagctacccttggggcatctgatcctaattcccttgctgatgatattggtcagccgtcagatccaggagcatgagcaggact

SEQ ID NO: 25372 - DNA, 98 bp, Homo sapiens
gttcgcgtcatcacggacgagaactggagagaactgctggaaggagactggatgatagaattaatgccgggtctaagttgtagattttatcaacacaa

SEQ ID NO: 25373 - DNA, 83 bp, Homo sapiens
caagcctctacaggggcctcccgcgccccccgggacccccacgccgccgccaggttaaacccatccagagtaatggctgcggc

SEQ ID NO: 25374 - DNA, 102 bp, Homo sapiens
acttcataatggagaccaagctcaaacccctccggaagtcattgaaattatgagactatcattcaaatggaagcattatagttcttcggaaccattatgatc

SEQ ID NO: 25375 - DNA, 107 bp, Homo sapiens
cactctccagcaccagcttccagttagtggatatagcacaccatccccagccaggggatatgagactttctactcggaatatcctgagtgttgcgtggatgtaaaac

SEQ ID NO: 25376 - DNA, 83 bp, Homo sapiens
gggccccgctgggctggccctgcagggaccatggaatccagagctgagcagccagataagctggtggtggtatggacccgtcg

SEQ ID NO: 25377 - DNA, 75 bp, Homo sapiens
tcaaggaggccttccagctgtttgaccgaacaggaaagtctacagtttggtaccccaggactcgctggtcaggaa

SEQ ID NO: 25378 - DNA, 90 bp, Homo sapiens
gtcacttttcacagaaggactgaagagtctgacagcagagagtgaggaagaagatgaaatggaagttgaagaccaggatagtaaagaagc

SEQ ID NO: 25379 - DNA, 75 bp, Homo sapiens
aacagtgcatggccagcaagcactatctcagtgccactgacatgttgaattgatagatgtcacatgtaccctgct

SEQ ID NO: 25380 - DNA, 101 bp, Homo sapiens
caggccagcagaaacccaatcacatccaaagagtggtactggaaccagatatgaaaaacagtagctccgtatcgaatacattgacaaatggatgtgtcatc

SEQ ID NO: 25381 - DNA, 100 bp, Homo sapiens
ggagaggtgctcggattctcgtagctgtgccggaataagaaagccttgagttttgtgaaaaaccggagaagagaaactaaaaggacagtagaaaaggctt

SEQ ID NO: 25382 - DNA, 74 bp, Homo sapiens
tggagttgctgcccttccggagtccgccccgtgaggagaatgacctcactctacggacagtgccacacatagaa

SEQ ID NO: 25383 - DNA, 100 bp, Homo sapiens
gaagcttcaccacaaaagcgaaatgggcacaccacaggtgcgcgcggagccatggttatcatgtcggagttcagcgcggaccccgcgggccagggtcagg

SEQ ID NO: 25384 - DNA, 100 bp, Homo sapiens
gacagtctgcatgtgcagttttcagccccttcatgaataagttttttccagccagctttccaaatcgacagtaccagctgctcttcacacagggttctgg

SEQ ID NO: 25385 - DNA, 100 bp, Homo sapiens
gggacagcagtagcatctcctccttcagctaccgggagatcttgcgggaaaaggagagctcggctgttccagccaggatattatgcctggtgatcctgat

SEQ ID NO: 25386 - DNA, 100 bp, Homo sapiens
gaaacacaacaaaaaagatgattgttggatatgcataagaggctgtgttctagatcctcagaaaggaaccaccgtggggaggtccttttctctcagctgg

SEQ ID NO: 25387 - DNA, 82 bp, Homo sapiens
tcgccgggaccctcgcgcgcgaccgccgaatcgctcctgcagcagagggaaagcaggcaggatgggagagtcgccgatagaa

SEQ ID NO: 25388 - DNA, 100 bp, Homo sapiens
ccggggcgccacgggggccatgtaagcagaatggcttattcagaagagcataaaggtatgccctgtggtttcatccgccagaattccggcaactccattt

SEQ ID NO: 25389 - DNA, 75 bp, Homo sapiens
acaccattttctgccgctggacgcaaggaaatccttgcacgaggaattcttcttccattaataaatcaactcagt

SEQ ID NO: 25390 - DNA, 82 bp, Homo sapiens
acggggactctcttctggatggattttttatcaagcagaaatgcatcgaacaacgagaatcaagatcactgagctaaatccc

SEQ ID NO: 25391 - DNA, 100 bp, Homo sapiens
tccgaccctactgagccgtgagagccgcagtggatggctggaggtgcagggccaggaggaacatgaggaagacctggaagcgctcatagcccatttccag

SEQ ID NO: 25392 - DNA, 100 bp, Homo sapiens
ctggatattcctactgctgctaaatatgaggcgcagatcaggcctctataaccgccaggaatcacattcagctggtgaaactgcaggtggaagaggtgca

SEQ ID NO: 25393 - DNA, 83 bp, Homo sapiens
caggaacagggacagcacctcatcccctggatgggggaccacaagatcctcatcgacaggagtcctggcaaaataagcatgca

SEQ ID NO: 25394 - DNA, 98 bp, Homo sapiens
ttctgcctcttccctcagctccatgagctcagtggcctcctctgtgagcagcaggcccagtcggacaggactagagcaggaagccgcctaccaccatg

SEQ ID NO: 25395 - DNA, 80 bp, Homo sapiens
catgctttctccagctgccctatcacctgccagctcatcacaaagaggagatgttaaagtaacccatcttgcaggacgac

SEQ ID NO: 25396 - DNA, 100 bp, Homo sapiens
tgaatcagggttccttgaaaagggaggaacggcgacatcctgacctagagcccatcctaagcattgcagtgtcgagatggctatgaaccctgtgtaaatg

SEQ ID NO: 25397 - DNA, 95 bp, Homo sapiens
ttggctcatggctctcaccttgctcacggcatttggttgccaagctccagctttgaagaaccaaattaagctaccatgaaaagaagaggaaaagt

SEQ ID NO: 25398 - DNA, 83 bp, Homo sapiens
ggcgtttgttgcagctacctgcacttctagataactcccccactggaaaggattctgaaagaaatgaagtcagccctcagaaa

SEQ ID NO: 25399 - DNA, 98 bp, Homo sapiens
ccaagcaaggttccttggaagaagatgtctgcagaggctgtgggtgagcgtggaggatgctcagatgcacaccgtcaccatctggctcacagtgcgcc

SEQ ID NO: 25400 - DNA, 75 bp, Homo sapiens
cagtccccagtgagggtgtacaaatacccctttgaattaattatggctgtgagccagccatgagagggtatcttg

SEQ ID NO: 25401 - DNA, 98 bp, Homo sapiens
ctggcgaggatgcaccttcccctgccttggaaaggtccaggggcaagttcatcctactctcgagtctaatgatgatgctcttcagtatgttgaagaat

SEQ ID NO: 25402 - DNA, 75 bp, Homo sapiens
acagatcgtggatctgaaagtgacaagcattttagaaagtgtttacaggcattggagtttttacatgctaatcaa

SEQ ID NO: 25403 - DNA, 100 bp, Homo sapiens
tggaagattatccatgacactgttctgccctgctctgctctaacaacatttttgttggaattggaagcggaacaaaaatgttgaccagtatgttgtcagg

SEQ ID NO: 25404 - DNA, 75 bp, Homo sapiens
cagggaactcaaacagcagatgcaggtgctggagaatctggtaaaagcaccattgtgaagcagatgaggatcctg

SEQ ID NO: 25405 - DNA, 75 bp, Homo sapiens
actacgacaagaagctgaaggagtcccaggattctgtttcactgaggccatctatccgatttcaaggaagccaag

SEQ ID NO: 25406 - DNA, 83 bp, Homo sapiens
cgaactccaggacagcatccaggcctcattggacagcattcgaggcccatctgggggagggcagcccagagacacgtgtgcac

SEQ ID NO: 25407 - DNA, 75 bp, Homo sapiens
ctgctgagcccgtccgtccgccgccaccacccactccggacacagtttgttgcatattctaaggacccagacata

SEQ ID NO: 25408 - DNA, 74 bp, Homo sapiens
ctttctatgtactgcgcctggatgtggccaggacgcgtgaccaaaaccaaagacggccatgaagtgagatcgtg

SEQ ID NO: 25409 - DNA, 51 bp, Homo sapiens
taaatttctcaacaccacagtcagctaagacgacagtgaaggagtcagcca

SEQ ID NO: 25410 - DNA, 75 bp, Homo sapiens
ccctgcacagagcagattctgaaacttcttgacaatttgcttgcgcttataaggctccccaaaaaggccacaaag

SEQ ID NO: 25411 - DNA, 100 bp, Homo sapiens
gaacgcaccgcaagctccctcctcgattcatgatgttgctatcaaaagttgagaaattgtcagaagaaatcatggagataatgcaaaatttaagtagtat

SEQ ID NO: 25412 - DNA, 100 bp, Homo sapiens
aaggggagtggctggtgcccatcgggaaatgcatgtgcaaggcaggatatgaagagaaaaatggcacctgtcaagtttcttcagatggaggtactgagcc

SEQ ID NO: 25413 - DNA, 75 bp, Homo sapiens
gcccctattgtaagtgcagatggaacacaacaggcaataccaagattttcttgaagatcttgaagaagatgaggc

SEQ ID NO: 25414 - DNA, 101 bp, Homo sapiens
ccgctgtcctcgtccccagcggtcccgcccaacgcccgactctgtactaggttttgacaagcttgcatcatgcgtgagtataagctagtcgttcttggctc

SEQ ID NO: 25415 - DNA, 73 bp, Homo sapiens
accagttataggggtaaacactgatccagaacgtgccggtggtggtgtgcacattgagccccggtatagacag

SEQ ID NO: 25416 - DNA, 100 bp, Homo sapiens
cttaggagggcaggaagagctgcagtctttgtgggacaagaatcatgcggaagcagccgaccgtcgtcctgggtgtggcgcacactgtggtgaagaggat

SEQ ID NO: 25417 - DNA, 75 bp, Homo sapiens
gaggagcccgaataccaccccgacgcctcagcccaagacacatcaccttcactttgggatatggaatttgataag

SEQ ID NO: 25418 - DNA, 76 bp, Homo sapiens
agagagaaacatcctgaaaaattcaacagcagattttatttggagagaagcaagcatctttgcctctttggagtag

SEQ ID NO: 25419 - DNA, 96 bp, Homo sapiens
ggcaccaagacgcaggggggatatccacagttcgatcaagaacaaatttcaaggaatggtctttgacttcgtaaccagacaagtttttgacataag

SEQ ID NO: 25420 - DNA, 98 bp, Homo sapiens
tttacgttcacctcggtgtctgcagcaccctccgcttcctctcctaggcgacgagacccagtggctaggaagctgccacttttgctagagagcaaggc

SEQ ID NO: 25421 - DNA, 100 bp, Homo sapiens
ggaaagttgactgaaaatggggcggaagaaaatacaaatcacacgcataatggatgaaaggaaccgacagtatggatggagcagatctgtgttttgaaat

SEQ ID NO: 25422 - DNA, 100 bp, Homo sapiens
atcaaggagcgccaagagctagagcagactcagaatgagctcaccagggagctgaaactcaagtgtctgtgacctttgatgatgtggctgtgactttcac

SEQ ID NO: 25423 - DNA, 50 bp, Homo sapiens
caattactgagagacaacttgacagagccagcaccgctctttgaccttgc

SEQ ID NO: 25424 - DNA, 50 bp, Homo sapiens
cttcccagtagctggaactacagcatggaggagcaggacttggagcgaag

SEQ ID NO: 25425 - DNA, 100 bp, Homo sapiens
tagaaaactggtcaaggaagctgttacaggaaatacaggaggcagaggaacaaataaaagacaccacgagaaacagacacatccagaacgtggaatattg

SEQ ID NO: 25426 - DNA, 76 bp, Homo sapiens
gtaaatactcaggagtgggattgctggatcatatgattgcttccaagtatgatcatcaggcagaagaagatcttcg

SEQ ID NO: 25427 - DNA, 75 bp, Homo sapiens
ctggaggcccggcggtcccacctctcagagagctgcagcataggatcttttgccagaaatgagggcatactggcc

SEQ ID NO: 25428 - DNA, 100 bp, Homo sapiens
ttcgggccgagatgtctcgctccgtggccttagctgtgctcgcgctactctctctttctggcctggaggctatccagcatggttggcaatggctgataaa

SEQ ID NO: 25429 - DNA, 75 bp, Homo sapiens
ccttataggcgtcagcgggggaacagctagcggcaagatcaagaatgctgcagccaatgtccttcgggaaacatg

SEQ ID NO: 25430 - DNA, 83 bp, Homo sapiens
ggcggtcctcgggtccgcggaggctgcgctctgcgaaagcacacctgagctgctcttaatatcatctcttgaagatacaaatg

SEQ ID NO: 25431 - DNA, 100 bp, Homo sapiens
ttcaggctgttcaaggtgaaggattcatgagtctatataaaggctttttaccatcttggctgagaatgccgtgctggtatagaggactctaagaagtggg

SEQ ID NO: 25432 - DNA, 100 bp, Homo sapiens
ccgagctcccgggctcggttggtagaagatcgctttgggaatcctcctactctacgaggaccaagaaacttggatttaactggccagaagcaggtattca

SEQ ID NO: 25433 - DNA, 98 bp, Homo sapiens
cgggcgccatcgagccttggcggcggacgtgcaggtcgcaatggaagaagagatcgccgcgctggtcattgacaatggctccggcatgtgcaaagctg

SEQ ID NO: 25434 - DNA, 75 bp, Homo sapiens
gtgatgatggagctcagccctccacctccacagatgctcccataatactctcagatagtgaagaagaagaaatga

SEQ ID NO: 25435 - DNA, 51 bp, Homo sapiens
cagacttgatttcaatcttataaggtggaataacactcccatggatgaagc

SEQ ID NO: 25436 - DNA, 76 bp, Homo sapiens
atatcatgctggtggctctacccagaattcaattaaagtggctcagaccagagtgaactccgagcaggaacacttc

SEQ ID NO: 25437 - DNA, 82 bp, Homo sapiens
cttcggcagtccacccaccgccgccgcctcccagaacactctggacctggaggaaactggcgaggctgtccagggcaatatc

SEQ ID NO: 25438 - DNA, 83 bp, Homo sapiens
cccgcccggaaggagatccgcagaggacagtcatcagatttacaagggtcccgactcttccttccggtattccagccttcagc

SEQ ID NO: 25439 - DNA, 80 bp, Homo sapiens
aaacaaaatgtcaacaaattgatggaggcggggtttcaccatgttgcccagactggtcttgaactcctgagcttaagcaa

SEQ ID NO: 25440 - DNA, 75 bp, Homo sapiens
gtaccatgatgtgatgctggagaccttgacacttatatcctccctggattcatgttacatgtaaagctgtcctca

SEQ ID NO: 25441 - DNA, 86 bp, Homo sapiens
cgattttctgaagacagcagatttatcactgttaatccagaaccaccaaagccagctcccagacaagtttccctgccagttaccaa

SEQ ID NO: 25442 - DNA, 74 bp, Homo sapiens
ttagttgcagcatggaacaattacaggagcgggctgcagatgacagcaaagaggttgagagcttccagcagctg

SEQ ID NO: 25443 - DNA, 90 bp, Homo sapiens
actacaggggctctggccatcttcgtgctgaaaatgtgtgtctgacatgcaagctcagtggggcagagacccgtggattgctgtgccctg

SEQ ID NO: 25444 - DNA, 90 bp, Homo sapiens
ctcacccaaagacagggaagtggcagaaggaggccttccccgggcggagagcccctctccaggattcttacagaagcagagattgatgct

SEQ ID NO: 25445 - DNA, 100 bp, Homo sapiens
actctgttgtccacactccccagctgcactgaccagtgtttccggcaaaaccacattcatgggacacttctccaggcatcctctggtatcacgattccaa

SEQ ID NO: 25446 - DNA, 90 bp, Homo sapiens
ggaatttatggtcgcctttttgaatgagaaatgagccgtcagactgctacagcattacctaccggtacctcgaagtgtccaccatcccag

SEQ ID NO: 25447 - DNA, 101 bp, Homo sapiens
ggctcactccccggtgcagtcgggcctgcccggcatgcaggtcgcccggctcatggagatgggattttccagaggtgatgctttggaagccctgagagctt

SEQ ID NO: 25448 - DNA, 90 bp, Homo sapiens
gttgttcccggagatgcggcgcgcagtgggcctttggagtgacgctgtgggaactcatgactctgggccagactccctacgtggacattg

SEQ ID NO: 25449 - DNA, 98 bp, Homo sapiens
agcacaaaatgattttcctgttgcaatgcaggactttgcctcccgggccaaactggcagttcaaaaactagtacagaaagttggattttttggaattt

SEQ ID NO: 25450 - DNA, 90 bp, Homo sapiens
acacctggaagccgagaaatgattactttctatgaagacaaaaattttcaaggccgtcgctatgactgtgattgcgactgtgcagatttc

SEQ ID NO: 25451 - DNA, 98 bp, Homo sapiens
gccaggtcgtgggctcccgctccgggcccggggccaccggctgtaatatgacagatacctagcatctagcaaaataatggcagctgcttaccttgacc

SEQ ID NO: 25452 - DNA, 100 bp, Homo sapiens
tggatctacattataccaataacgaggcccccacagaacacctgaactcaaatgagatgccggaggacagcagcactcccgaagagatgccacctccaga

SEQ ID NO: 25453 - DNA, 101 bp, Homo sapiens
cgaataccaggaccctgcttttgtgtgggtacccaaatgttgggaagtccagcttcatcaacaaggaccacagccgctttgtcaactgtgtgcgattctct

SEQ ID NO: 25454 - DNA, 90 bp, Homo sapiens
gctgaccagaagaggtttagtgccctcctgagtgactgcgtcaggcatctcaatcatgatgcctgtgaggagccaccaacatttgaagct

SEQ ID NO: 25455 - DNA, 51 bp, Homo sapiens
gctggagagggggcgctgagctgttgggattgatagagctacattctcctg

SEQ ID NO: 25456 - DNA, 100 bp, Homo sapiens
tcatgtcagctgttctgcaggatcccatgagaaggccgaggagtcttgtaaatgtaatggctggaaaaaccctaacccctcacccactccccccagagcc

SEQ ID NO: 25457 - DNA, 97 bp, Homo sapiens
tggagaactatagcaatctggttttcttgggttctgaaaatattgtgcacagggcaggctgaggacacagccacgtgatacccactgtagagagagg

SEQ ID NO: 25458 - DNA, 82 bp, Homo sapiens
tctggtgtaccaggcgaagctggccgagcaggctgagcgatacgacggactctccttcagcaactccagaagcttcagactt

SEQ ID NO: 25459 - DNA, 82 bp, Homo sapiens
cattctaataacatctccattctccaggaactgtacgaaagtacagctattggaatcagatgcaaagatggtgttgtctttg

SEQ ID NO: 25460 - DNA, 100 bp, Homo sapiens
gatgattgacttcctgcagaaccacacggaaggaagccggccccctgcctgcccgcgcctagaccccattcacgcccgggggctggagaaggccaggcag

SEQ ID NO: 25461 - DNA, 75 bp, Homo sapiens
aacctggtaaaatttcacggcaggatcctgttacatacatttcagaaacagcacgagaagccctgccaacgtggg

SEQ ID NO: 25462 - DNA, 75 bp, Homo sapiens
ctcggacgccgactcggaggtgggtccggggagcccgactcggaccgcggagcaattctggggtcagaagccatg

SEQ ID NO: 25463 - DNA, 90 bp, Homo sapiens
ggcctttacagccgaagcggaagcctcagtggccggagcagcctcaaagcagaagccgagaacaccaacctggagtggaagatcatttat

SEQ ID NO: 25464 - DNA, 100 bp, Homo sapiens
gcgtggggggccgccaccggccgccgccgccgccgcccaggcgcagtgtgtgctgtatttatggagtttaaagattaatcatcccaaaacattgtttctg

SEQ ID NO: 25465 - DNA, 75 bp, Homo sapiens
acgcgctgctaggcattgaggagaaggcagcggacaaagagtacagaacctgctaaggccatcaaacctattgat

SEQ ID NO: 25466 - DNA, 50 bp, Homo sapiens
gcctactacaggggtgcaatggcgttggagaccagggccagccctggcca

SEQ ID NO: 25467 - DNA, 100 bp, Homo sapiens
caaagatggggttgtcctctttaagaagtctctagtgatccctgaaaagttccagcatattttgcgagtactcaacaccaacatcgatgggcggcggaaa

SEQ ID NO: 25468 - DNA, 100 bp, Homo sapiens
gtcggggagacgctgtggtgtgactggggcaggaccatcaggttggatggcaagcatgtggtgtttggcaaagtgaaagaaggcatgaatattgtggagg

SEQ ID NO: 25469 - DNA, 100 bp, Homo sapiens
tggagactggaggaagaattcccaagccagagctttccagccctggaacagctgctgacagagttggatgacttcctcaagattcttgaccaggagaacc

SEQ ID NO: 25470 - DNA, 100 bp, Homo sapiens
tggcgttcctcaaactccgtgaccagtcaacgaaacggaatattccaatgctctttgtccggggagatggcgttgtcctggttgcccctccactgagagt

SEQ ID NO: 25471 - DNA, 75 bp, Homo sapiens
cgtggagatatggcgcaactgcggcgccacaaacatttcactgaagatattcaaacaaggcaatatcgttccttg

SEQ ID NO: 25472 - DNA, 100 bp, Homo sapiens
accagacccgcagtggccagtggcgcatctacggcagcgaggaggacctatgtgctctgccctaccacggtgaccaagaatatggcccaggtgaccaaag

SEQ ID NO: 25473 - DNA, 100 bp, Homo sapiens
ctgaagagttaccagatttctccgaagaccctacctcctcagggctgcatgtatctaccaggatgtacaatcaaggagatcgccacaaacccagaagaag

SEQ ID NO: 25474 - DNA, 98 bp, Homo sapiens
gtgggtgccctgtactctgaggagcggaactacagccagatgcggatccgggccaagcagtgggccgaggtcgcaatggaagaagagatcgccgcgct

SEQ ID NO: 25475 - DNA, 80 bp, Homo sapiens
gcagatttgagctttcttcttggacacctaatacccacagtcctccaggtgacttaagagattaaaattaatttggttgc

SEQ ID NO: 25476 - DNA, 75 bp, Homo sapiens
gccaaagaaacaagccgtggaataggtgtatcaagtaatggtgcaaagcctgaatctcaggatgcaggaatcaag

SEQ ID NO: 25477 - DNA, 100 bp, Homo sapiens
ggcgggtggaggttcgagcgctgttctcgctccggagccgctgcacatttcgctgtgagtaccagagtgcccactggttccaacagttcttctcagacca

SEQ ID NO: 25478 - DNA, 82 bp, Homo sapiens
ggggatgcattccaagaccccctgtggatgcttcaaaccatggttcgggaagaataccggaagtgggcctgcctagttgctg

SEQ ID NO: 25479 - DNA, 87 bp, Homo sapiens
actctcttctgagggctcccagacatatataatgagttgtctgatgtcctgtgggccatgctgatgcgcgtgggcctccgcgttgac

SEQ ID NO: 25480 - DNA, 75 bp, Homo sapiens
acgattggaccagcaccttgatcttggattttctagcctccagaactaggaagaagcccctccagatggtgctgt

SEQ ID NO: 25481 - DNA, 100 bp, Homo sapiens
gaagactcagactcctgcagcccagccagtaccaagaccagaacatgccagcagaagcattcaccaactgacatgtgccctgaaagaaggcgatgtcact

SEQ ID NO: 25482 - DNA, 100 bp, Homo sapiens
cgtggaataggtgtatcaagtaatggtgcaaagcctgaaataacagcatacaggttttccccccccaccccgtcatgtacagctgaatcatgcagaattt

SEQ ID NO: 25483 - DNA, 99 bp, Homo sapiens
gtatttgcaagtcatcagactgcataaaatcaggttggttaaatctagacttaagaggctctgctcctcagaagttggacttctgaaaaatgctgaacg

SEQ ID NO: 25484 - DNA, 100 bp, Homo sapiens
atgaaggactcattgatgaaatttatggcattcagaacagtgcagcctttgtgaaggagaaccaccggcaactccaagccaggatgggggacctgaaagg

SEQ ID NO: 25485 - DNA, 75 bp, Homo sapiens
taaagtatttgccgttggtgattcaagggctcattggtgggcagtattacttatgggaattgctctgatcatgct

SEQ ID NO: 25486 - DNA, 100 bp, Homo sapiens
gtaggagaatgactccgattcgtgaccctcagcgccggtgcatgtcgatgaatccctggaagtccctgctgtgtggatagcacccttctcgatttccagc

SEQ ID NO: 25487 - DNA, 82 bp, Homo sapiens
agccggccgtacgcggtgctgcgagggcagaacctgggtactccaaagattcaggtttactcacgtcatccagcagagaatg

SEQ ID NO: 25488 - DNA, 115 bp, Homo sapiens
cagctggcccaagacggggtccccgagtggttccatggtgcaatctcaagagagaagacggaagaaagtgccgggaagaaagaaaaccccgtccggaccatccgcaaaaagtaag

SEQ ID NO: 25489 - DNA, 74 bp, Homo sapiens
aaaaaatgagggagctggaacggaagtattactgacagccctgtcctaggagcacaacgtccgagaaatgctca

SEQ ID NO: 25490 - DNA, 75 bp, Homo sapiens
tttctccagctgccctatcacctgccagctcatcacaaagtattgaagcccctgggtgataatttgatggaggaa

SEQ ID NO: 25491 - DNA, 74 bp, Homo sapiens
gcagccatgatctccttaacggacacgcagaagccctatgagtttgtctctctggaatggctgcaaaagtggtt

SEQ ID NO: 25492 - DNA, 82 bp, Homo sapiens
cctgtggtaacttcctaggagggaagtggatcccaaaggaattacatgaatgacagtcttcgaaccaatgtgtttgttcgat

SEQ ID NO: 25493 - DNA, 74 bp, Homo sapiens
tgggaacccaggccccgccgaggcggccaggtgtttgagaagtcccccctgcgggtgaagaacttcgggatctg

SEQ ID NO: 25494 - DNA, 100 bp, Homo sapiens
gcaagaccgaattcagaaggatatcgacgtcgtgatccagaagtccagagctgaggactgcctgtttgcaggtatattcagcatgcagctttactttttc

SEQ ID NO: 25495 - DNA, 87 bp, Homo sapiens
tccagacagttcttgaaggtgacaacttagagacttggtgtaatacggtgcccagtatgccgccaagaatgcagacagatagacctt

SEQ ID NO: 25496 - DNA, 74 bp, Homo sapiens
agtgcaatgctgaaagaagttcaacctaggagtcaacaaacactcgggtcctatacttcagcatcttttcaatg

SEQ ID NO: 25497 - DNA, 75 bp, Homo sapiens
cggatctcttcgtctttgcagcgtagcccgagtcggtcagcgccggaggctgatcagctgaccgaagaacagatt

SEQ ID NO: 25498 - DNA, 97 bp, Homo sapiens
tcttccagtcccctgaggtgatggcaggttggatggcaagcatgtggtgtttggcaaagtgaaagaaggcatgaatattgtggaggccatggagcgc

SEQ ID NO: 25499 - DNA, 101 bp, Homo sapiens
accgaagccacctcaggggagggagcctcccaaagcagtgtggagagagtatgctctgtgtcgtcccagacatttctgcattccgagaaggttggagatgg

SEQ ID NO: 25500 - DNA, 75 bp, Homo sapiens
cagtgaggcaccatttgcaaaatcagataatcagccatcaactgaaaagtgaagcagccgacacgagtcgttgtt

SEQ ID NO: 25501 - DNA, 98 bp, Homo sapiens
gatgattccagcagtggtcttgctcttactccttttggttgaacaagcagatacagaagatcattgagacactgacacagcagcttcaggcaaaggga

SEQ ID NO: 25502 - DNA, 75 bp, Homo sapiens
aaaacaggatgaaaaagactgattggctcttcctcaatgcttgtgtgggtcaacacaagataaagttcattccag

SEQ ID NO: 25503 - DNA, 83 bp, Homo sapiens
tttcacagcactctgggcgaaaattggatgtgaaaatgaagccagaccgagcccgacggccatggaggctgaagagacgatgg

SEQ ID NO: 25504 - DNA, 83 bp, Homo sapiens
ccgagggactgggagtcgttagtgaggtaaactcctccctgctgacctcagactgcagcgagcgctgttcctgttcctcaagc

SEQ ID NO: 25505 - DNA, 75 bp, Homo sapiens
ggcggagtctctctttccggattctgcctccctccgctaacctccggagctagagttaatgccaaagacagcaaa

SEQ ID NO: 25506 - DNA, 100 bp, Homo sapiens
cagacaccgccctgaacactatcaccgactggccataatataattgtgataatgtaataaaatcaggaaacattacctgaagcagatgcttttgaagtca

SEQ ID NO: 25507 - DNA, 50 bp, Homo sapiens
tgcagtctaatagtaacacagaggcacccaggcatgtggaatatgctcat

SEQ ID NO: 25508 - DNA, 51 bp, Homo sapiens
agcacggcttattgctcatgcagggtctccgtctctccaccgggggcttca

SEQ ID NO: 25509 - DNA, 101 bp, Homo sapiens
ggctgatgtcggcacgcctggcgatcctgggcggcgtggaggggcagcctggctgtagaagccgcccagctggccgaggacctgaaggtgcagctggagca

SEQ ID NO: 25510 - DNA, 100 bp, Homo sapiens
gaggagctgaaggggccgtgggggatcagacaagttggatggcttgaggactggtactaaaaggaaacgtgactgggaggccattgccagcagaatggag

SEQ ID NO: 25511 - DNA, 90 bp, Homo sapiens
cccgacatcctgcggacctactcgggcgccttcgtctgcctggagattgagaagacagactgctgctttggacctgttggtaatgatggc

SEQ ID NO: 25512 - DNA, 74 bp, Homo sapiens
gcaggagtcgggcaccatcccaaagaagcgtgctcatcttcaaactctatcagcgggcaaagcatgtgtacagc

SEQ ID NO: 25513 - DNA, 98 bp, Homo sapiens
acagtgttctgctttcatggagttcacagaagagtcgaggagattgtggacaagaacaaccgctataagtccatagatggctcagacgagaccaaagc

SEQ ID NO: 25514 - DNA, 83 bp, Homo sapiens
cgccaacgcctccatgtcccacaccatcctcctgaaggctccccttccctgcgggcatatccgctcctctcggtgatcacccg

SEQ ID NO: 25515 - DNA, 75 bp, Homo sapiens
gtggggcgctccgcttctacgacagatccgacatcgacgcagtctaccgctcaacgaacccaccatcgattatgg

SEQ ID NO: 25516 - DNA, 100 bp, Homo sapiens
attttgcacagccattttccttaaaggttgacctgacagttcaagaaaaggagaaatatcttaatgtgtctcgctggttttgtcacattcagcattatcc

SEQ ID NO: 25517 - DNA, 74 bp, Homo sapiens
ctccacccccggttcggccacctacgtgagatacaagccatccccagaaagatgtgaagttcatttccaatccg

SEQ ID NO: 25518 - DNA, 87 bp, Homo sapiens
ggatccgcaggttccctacacggtctcctgggtcaaggagactggagaagctggctggtggaggggcgaacttaatggtaaagaagg

SEQ ID NO: 25519 - DNA, 74 bp, Homo sapiens
gaccggacccagagaagaggaaaactctaccggtgcaggatggtgccatgacaatggtgtgaactacaagattg

SEQ ID NO: 25520 - DNA, 74 bp, Homo sapiens
tacaaactctgtgcctcaacaaccatttctaagtggaatcaagaacccagtctcggttgccaacagactcttat

SEQ ID NO: 25521 - DNA, 95 bp, Homo sapiens
ccgcccttcgccttcgttgagttcgaggacccgcggcttggctataagaagtatgaacatgtcctgtgtactctgaaggtggatagcaatggtgt

SEQ ID NO: 25522 - DNA, 95 bp, Homo sapiens
ctcccaagtagcttggattacaggtttctgagtcccttcaacatgatcctgggaggaatcgtggtggtgctggtgttcacagggtttgtgtgggc

SEQ ID NO: 25523 - DNA, 90 bp, Homo sapiens
caagacaagggtcctaaaacaggatcagtaaagaaggaaaaagcagtaaagccagaggaagactgtcagcatcaataaggccattaatac

SEQ ID NO: 25524 - DNA, 100 bp, Homo sapiens
catgaagccgctggtcgtgttcgtcctcggcggccccggcgccggcaaggggacccagtgcgcccgcatcgtcgaggatattggtgctggaaaaggcaaa

SEQ ID NO: 25525 - DNA, 74 bp, Homo sapiens
gagggcggagcggagacgggagtattatgaaaagatcaaaatggacccaagtggggtcaaagtgctggaaacag

SEQ ID NO: 25526 - DNA, 83 bp, Homo sapiens
gccgcacccttgaaaggaggcccctgccgtgtggacccgtaaaataaaatggggtgaaaatgggatggaggattgtgtcatgg

SEQ ID NO: 25527 - DNA, 100 bp, Homo sapiens
ccgcgtccgccccgcgagcacagagcctcgcctttgccgatccgccgcccgtccacacccgccgccaggaaattgctttggagatgaggaaacaaactct

SEQ ID NO: 25528 - DNA, 83 bp, Homo sapiens
gagaagaggattccggcgggaactcgactcttggcgccaccgcctcatgcactgtgtaggtctcctccgggctggggctgagc

SEQ ID NO: 25529 - DNA, 90 bp, Homo sapiens
gaacgtagggatgcctattgccatgcttttacacactgatggagagcatgaacggccaggagatggagtgaaggtacctgagcgcaggaa

SEQ ID NO: 25530 - DNA, 100 bp, Homo sapiens
aggacctctatctcgcttttcccctggccttctgtatcttcatggtgcggctcatcttcgagagcttccaattgaagacttgtgcagtttaacatcccag

SEQ ID NO: 25531 - DNA, 96 bp, Homo sapiens
aaccactctctggcctttgtgggcaccaaaagtggcaagctgaagaaggcaaaagaatggaccccagcaggaaaagcaaagcaagagaattctgct

SEQ ID NO: 25532 - DNA, 101 bp, Homo sapiens
tgagtgccagtcacccaatggtgggcaagtggctggagaaacaagaacaggtaactataactacccaatattgcagccatggagtccatgcttaataaatt

SEQ ID NO: 25533 - DNA, 82 bp, Homo sapiens
tgttgtcgtggccggagcggcccgcgcctgggctgccggcacttcgcggcagctcttttgaaacagatggtcaccatgttta

SEQ ID NO: 25534 - DNA, 83 bp, Homo sapiens
tcctgcgcgcgcgcctgaagtcggcgtgggcgtttgaggaagctgggttctgggccggagaaggggcgacgttcgggcacccc

SEQ ID NO: 25535 - DNA, 80 bp, Homo sapiens
atgtgcgggttcaggaggtacccaaactgaagaatgaggaaaatggggagcaggaggctgacaatgaggtagacgaagaa

SEQ ID NO: 25536 - DNA, 97 bp, Homo sapiens
ttttgacagtcgctcagaagcagaggctgcaaagaatgctttgaatgaagggaaaaggccgaggcatcagcgtgtgaagaccgcaaagacgatcccg

SEQ ID NO: 25537 - DNA, 74 bp, Homo sapiens
tgagggctgtgaaagggtcaaagtctttgaggaatgctcttgcatttgctggtctggcctttgcgtccttctac

SEQ ID NO: 25538 - DNA, 100 bp, Homo sapiens
ttttattctcatcagccaagaacctcagccatggatccagatcatgtttctatttcagcagatcccttcccactggaggcatgtgatgagaggaaatcac

SEQ ID NO: 25539 - DNA, 124 bp, Homo sapiens
tgccaagtcagcaattctgtgagcagcaagaatggcacggtctgcctcagtccaccctgtaccctgggtgggcgcatgatgaactgcccaaagattctccggcagttgggaagcaaagtgctgc

SEQ ID NO: 25540 - DNA, 100 bp, Homo sapiens
gaggaagtggaggaggcggctataataatagcaaacatcgatggcctactggggataacattcatgcagaacatcagatccccctagctcagtcggaggc

SEQ ID NO: 25541 - DNA, 100 bp, Homo sapiens
ctcggcgccgcggctcttttctaaaagtgtgaaaggtgtagcagtcactcggcctacacccacagcatcgaccttgtgaacccagcgacctgactgcctt

SEQ ID NO: 25542 - DNA, 75 bp, Homo sapiens
gcttcatctgcccctgcccagatccggaagaacggtgaatttcccccgcagaaccactcacgaattcttgtttgg

SEQ ID NO: 25543 - DNA, 96 bp, Homo sapiens
tcatcacaaaagagttgattgaaattatctctggtgctgcagctcttgagaaagatcagtctaaagaaaaggagaagaaagtgaaaaaaacaattc

SEQ ID NO: 25544 - DNA, 100 bp, Homo sapiens
aactaaagccccacatttgcagctcattgaaggaaagttgcaggacgaggagcggaggcggcagcagcagttagaagagatgcgcaagcgggaagcggaa

SEQ ID NO: 25545 - DNA, 100 bp, Homo sapiens
agatgggcagcctgtctcttctcccagagacacctatggctgccgatgaaggctcagcagagaaacaggcaggagaggcccacatggctgcggacggtga

SEQ ID NO: 25546 - DNA, 82 bp, Homo sapiens
ctgctctccaagcagcactaccggctggatctcgaggacctggaagaagcagaggagccagacatggaggaagacgatgatc

SEQ ID NO: 25547 - DNA, 90 bp, Homo sapiens
gtaggagcgcgggggcggctcctgctcttcctggactcctgagcagaggtccacctgggcttgcgaaggcacagattccccgtccacagc

SEQ ID NO: 25548 - DNA, 100 bp, Homo sapiens
acttacgtgtactttaccaacgagctgaagcagagcttactcacatagcatattggtatatcaaaatgaaatgcaaggaaccaaaaataacataattgaa

SEQ ID NO: 25549 - DNA, 90 bp, Homo sapiens
gcagtgcccggcgacactgcacccatcccggctgcttttgctgcgccctctcagcttcccaagaaagagataatcattcaggtcttcgtg

SEQ ID NO: 25550 - DNA, 50 bp, Homo sapiens
cggcacgatgccctttgacttcaggagggttctccaaaaaatgtggaatc

SEQ ID NO: 25551 - DNA, 75 bp, Homo sapiens
ttaaaacctgacacttttaacaggagtggaagctggacacactatgtgacttgtatgaaaccctgaccatcaccc

SEQ ID NO: 25552 - DNA, 100 bp, Homo sapiens
gctgcacccgcctccgcgctcgtcagtgcctatgaagtcatcaagctaaaaggatataccaactgggctattggattaagtgtggctgatcttattgaat

SEQ ID NO: 25553 - DNA, 80 bp, Homo sapiens
tgcactccgcacctcggggacattattgcgcgtggaacggctgcttttggaagatgctcactctacacatggaaggtcca

SEQ ID NO: 25554 - DNA, 90 bp, Homo sapiens
tgctgctcaccttcacagattttctggcttttaaagaaatgtttttggactacagagcagtccaggagtccgtagccagctgcttgccac

SEQ ID NO: 25555 - DNA, 100 bp, Homo sapiens
gattcactagtgtgcctctgcgaatttaaagctcatgaaaacagggtttagcgctggtggatagacactcgagaccagaaatcatatttttgctgaaagt

SEQ ID NO: 25556 - DNA, 101 bp, Homo sapiens
agctcatgagcagcctgcccaacttctgcgggatcttcaaccacctcgagcggctgctggacgaagcctgattacatcaaccccagagccgtgcagctggg

SEQ ID NO: 25557 - DNA, 100 bp, Homo sapiens
gcactactgccattagaactacaagatgacggctctgacaaaaccagcctggacaccaagtctgtgtcagaaggccacctcaagaggaacatcgtggtga

SEQ ID NO: 25558 - DNA, 100 bp, Homo sapiens
gcggctgcaggctaggggcggctcggagtccgctggccacccagctgagaggagaggcgcccccggggacgttttcggctttgtgagaaaccttaccatc

SEQ ID NO: 25559 - DNA, 58 bp, Homo sapiens
cgtcagctgacacttttggagtctgatctttacagtggcagaatgagaaatttagaaa

SEQ ID NO: 25560 - DNA, 100 bp, Homo sapiens
tgtggagaagacaacatctgtgtgcctgacctgcagctggaagtgtttggctccgtggatggccgcgtgagacgctatgacctaaggatggggcagctct

SEQ ID NO: 25561 - DNA, 80 bp, Homo sapiens
ccggctgctggatggaggggattttgtcagcttgtcgtcaaggggcagtgatcggtgatggacagtctgctgtggccagt

SEQ ID NO: 25562 - DNA, 125 bp, Homo sapiens
aggaagaaaattttccttgacctttaggtgcttttatattcatctcaaaaacaaaattctgaactcaggacttggcaagtgatggcttggacaacagtgtagcttcccccagcacaggtgacgat

SEQ ID NO: 25563 - DNA, 98 bp, Homo sapiens
gaagggggagaccatcttcgtagaacggcccctggtggctgcacagtttctctggaatgcactttatcgctaccgagcagccaactccaaacagccga

SEQ ID NO: 25564 - DNA, 60 bp, Homo sapiens
ccgggaacctgacaaccccaagccgctcctgccagaatccccggaagggggcaatgccag

SEQ ID NO: 25565 - DNA, 100 bp, Homo sapiens
ctttagttccatcaaacacagaggaatgaccaccatggcagatggcaacagaggatgtcaacaattttttggagatatgccacacttctgcctgctgttg

SEQ ID NO: 25566 - DNA, 101 bp, Homo sapiens
cttggacttctcagcctccagaactttgctgaagtaaaggaaccctgcagccttcccatgctatctgttgacatggaaaacaaggaaaatggctctgtcgg

SEQ ID NO: 25567 - DNA, 50 bp, Homo sapiens
gctgctcaaggtgctgggcacgggaggatgatcggctgaatgtaacagag

SEQ ID NO: 25568 - DNA, 83 bp, Homo sapiens
cggcagtttcgtgagcgacctcagcagcacttgcacctcctgcgccgccgccccccatccaaggatatgccttcaagcctcca

SEQ ID NO: 25569 - DNA, 50 bp, Homo sapiens
gtaaaacagggtgatttcaagagacacgaggatgctgtggaaatacgtcc

SEQ ID NO: 25570 - DNA, 82 bp, Homo sapiens
catgtgaaaattgtggggccatgacacacaaaaagaaagactgctttgaggaggagtgggctttgctggatatttcccagag

SEQ ID NO: 25571 - DNA, 90 bp, Homo sapiens
aaagaattcatagatttcagtgatacaggtatgttaagctactgcgacagatacagcgaaggcataaaacatgtcctacagacttttgga

SEQ ID NO: 25572 - DNA, 83 bp, Homo sapiens
gagaggtagccatgatgccccacttggtgaatggagatgcagctcagcagaaaatggtgtgaatggaacattaacttcaaatg

SEQ ID NO: 25573 - DNA, 75 bp, Homo sapiens
ctggtccggacccgcatgcaggcacaagaaatgggcaagttcatgaaacctgggaaggtggtgcttgtcctggct

SEQ ID NO: 25574 - DNA, 49 bp, Homo sapiens
ttgacaaactgctttcccatagaggccaagctataacatcagaaatggt

SEQ ID NO: 25575 - DNA, 51 bp, Homo sapiens
tgctggcaaagtggaaaaatgtgcggacctttcttggccaggactcgcagt

SEQ ID NO: 25576 - DNA, 80 bp, Homo sapiens
aaccattgacgccatgtcgggttattcgagtgaccgagaccgcggccgggaccgaggaattctctggtggttgagatccc

SEQ ID NO: 25577 - DNA, 60 bp, Homo sapiens
ccttttggacaggaaagtgtaacatcagttacagagaccatagctgtctgcagtgcagga

SEQ ID NO: 25578 - DNA, 51 bp, Homo sapiens
ggagggagcctctgacggcgtctgatgctgttgatggagtaatgaatggtg

SEQ ID NO: 25579 - DNA, 75 bp, Homo sapiens
aaatgaagaaaaagaaatacgtgaattctggcacagccccagtctccccaagaacgacgtcatcgtggccgtcaa

SEQ ID NO: 25580 - DNA, 90 bp, Homo sapiens
gccggcctgcctgccacagccggactccgccactccggaggtggtccaggccacgctggtggtcctggccttggccatggtgcccatcct

SEQ ID NO: 25581 - DNA, 100 bp, Homo sapiens
ctgccccctgcccaggaccagcccctggtggaagccaaccacctgctgcacgagagcgacacggacaaggtgaactccagaaagccattgacttattcac

SEQ ID NO: 25582 - DNA, 97 bp, Homo sapiens
tttctttctcgctgatcgcctaacttctactgacgaagcttggaagttgcagaaggtaagaatgattgatgttggctgatattggagtgctcattca

SEQ ID NO: 25583 - DNA, 112 bp, Homo sapiens
gggggccgttggctccagacaaataaacatggagtccatcttccacgagaaagatgaagcctgctgggagcgtgaatgacatggccctggatgccttcgacttggaccggat

SEQ ID NO: 25584 - DNA, 100 bp, Homo sapiens
gtatgggagtgaactcagatgtggagcactacctttgtgagcagtgtgacccaaggcctgtggacagggttatcactgtgaatataagatgcggacagga

SEQ ID NO: 25585 - DNA, 100 bp, Homo sapiens
gagaaatccaaggacttcaagaaccacgtgatcaagtaccttgagacactcctttactcacagcagcaggttgtttacattcagagctctatcaataaga

SEQ ID NO: 25586 - DNA, 101 bp, Homo sapiens
cggcgaaggaggcagaggcacttatgcttgtcaggtgagaattatgaagatgatgacctagtaaattctgatgaggttatgaagaaaccatgtccagtaca

SEQ ID NO: 25587 - DNA, 75 bp, Homo sapiens
gcttcacctgtgattgttctatgacctcttattctggaaaccagtgcaatgatcccatgtacatcttcatgtgat

SEQ ID NO: 25588 - DNA, 75 bp, Homo sapiens
ccaggcaagccgtccagtaaatcacagaacaaatgtaaaccctctcaagacagagtctcactctgttgcccaggc

SEQ ID NO: 25589 - DNA, 100 bp, Homo sapiens
caacaacaactgcgaggaaaatgagcagtctctgcccccgccggccggcctcaacagttggctcaaaaacagaagttgctgagtgcaaggagaaattcgc

SEQ ID NO: 25590 - DNA, 106 bp, Homo sapiens
cccagacctgtgcttctgactatcttctcttcaccagctcttcagatcaatatgctactgatgcaaatgtgaagaatgaaagtctttcatctgtgcagcagcttgg

SEQ ID NO: 25591 - DNA, 100 bp, Homo sapiens
cggtcacctacccccagcaccacctccagcccctgcgcctcggctcagtagatgaaggcgtttctgagggcttgcctacacttcaaagcacgtctagcac

SEQ ID NO: 25592 - DNA, 100 bp, Homo sapiens
tcgtcggcagtgaagctcaagttgctactcgggacgctgcacctcccgcgccgcacggtggacgaggcgtcacaatgtagcagggaccccaggcgtcgtg

SEQ ID NO: 25593 - DNA, 90 bp, Homo sapiens
ggactggcccccttgagcctgtcccaagccctggtgccaggtgtccatccccgtgctgaggttgcctgcctgattcgagttccatctgaa

SEQ ID NO: 25594 - DNA, 75 bp, Homo sapiens
atgaactggagacagagaatagaaaagcacttggttctgcttcgagatggaaggacacttataggctttttaaga

SEQ ID NO: 25595 - DNA, 74 bp, Homo sapiens
ggagctcatgcagtcttcagtggataataccaaaatggagtaaaagtccctcgcaatttccgactgttggaaga

SEQ ID NO: 25596 - DNA, 80 bp, Homo sapiens
ctgactctgtgtgtttttaccaaccatacagttacaacattaaagcctgaacttggaaagataatgtacagtgatttcaa

SEQ ID NO: 25597 - DNA, 100 bp, Homo sapiens
ccctgggcaagtcgctccgtcatgcggacctcagttttctcatctgtccgacgaagcgagtaaccagctcataaatcacatcgaacagtttttggatact

SEQ ID NO: 25598 - DNA, 96 bp, Homo sapiens
aaactggagagcttcatcaaaaatagtgatagctttgataagaaccacgtgaatgttgagggggcgacacacaagcaggtggtggacctgattcga

SEQ ID NO: 25599 - DNA, 100 bp, Homo sapiens
gtaagaagtgccttttgcctcccaccgtgattctgaggcctccccaaccatgtgcaattgttcgatacaagaggctgttttcctagcgtggcttgctgcc

SEQ ID NO: 25600 - DNA, 90 bp, Homo sapiens
ctcatatcttcacttggcaaactcaacaagatgtttccattcctgaaaaacccaagcttagatttattgaaagggcaccacttgtgccaa

SEQ ID NO: 25601 - DNA, 100 bp, Homo sapiens
tgtgattgacaaccccaattataaaggcaaatggaagcctcctatgattgacaatcccagttaccaggaatgatgagaagacagcagctgattacaagat

SEQ ID NO: 25602 - DNA, 85 bp, Homo sapiens
ggcagcagtaccagcgagacacagagcagctccgcaggagcatgcaagatgcaacccagctatccgtggtcctgaaccagttatg

SEQ ID NO: 25603 - DNA, 100 bp, Homo sapiens
aagcatgcggtggcaatcatctttcacgatgaaacatcgaagacatttgcctgtgagtcaggaattactgaaccttcaacatgcctactataaactaaac

SEQ ID NO: 25604 - DNA, 100 bp, Homo sapiens
gaacgactgaggcaggacatgaaagtccagaaattaaaggagcaggcacctggctgaggtgtggagaatgctgtcggtggagcttcccagcacgacctgg

SEQ ID NO: 25605 - DNA, 100 bp, Homo sapiens
cgcccggattggggatgagtatgcggaggacagctctgatgaggaggatgccttccgcgccttccaccctgacctggaattcgtgggcaagttcttgaaa

SEQ ID NO: 25606 - DNA, 75 bp, Homo sapiens
gtggtctctgcacctcctttctgtatgatctcgtgaaaccttgagagaaactgaatgacgaatgaaactattgtt

SEQ ID NO: 25607 - DNA, 83 bp, Homo sapiens
agttcaacatcctcctggccaccgactcctacaagatgatatcatcaagttgaatcgaaaggaagggaagaagcagaattttc

SEQ ID NO: 25608 - DNA, 82 bp, Homo sapiens
caccaaagacatgaggaaatcacaggttccagtgtctcgccccatcctcaccctcagggttcccagggcccaggctgtggtg

SEQ ID NO: 25609 - DNA, 83 bp, Homo sapiens
caaggacacggtctacaccgacttcgacggtgcagaggccaagaccgttttgcccaagaaggagaaaatgaagctgaggcgtg

SEQ ID NO: 25610 - DNA, 98 bp, Homo sapiens
caaatacccctttgaattaattatggcttttataggcaagcaataaacagcaagatgtttgaggtggatatgaaaattgctgcaatgcatgtaaaaag

SEQ ID NO: 25611 - DNA, 51 bp, Homo sapiens
ctgtctactggaacagcagcaaccccagctcgtttgacagcaagtttgttt

SEQ ID NO: 25612 - DNA, 51 bp, Homo sapiens
cgagccgtctcctgcagcggcccccgccggtgttatccaagataaattctg

SEQ ID NO: 25613 - DNA, 82 bp, Homo sapiens
tctggatggagtatgaccagcccctctatgtgggaagcggtacctccggcggcgggcagctttgggacagctgaacaccatc

SEQ ID NO: 25614 - DNA, 82 bp, Homo sapiens
gaacgaggcaaggagctaaagcagcgtgcgttcagccctggggtttctgaaacagatcgtgagcttcatcaagagaattcaa

SEQ ID NO: 25615 - DNA, 83 bp, Homo sapiens
gccggagcgcggagcccggctcccgcaccatggaggaggacgacagctacgaaaaatggctacaaacttcctagcacatgaga

SEQ ID NO: 25616 - DNA, 75 bp, Homo sapiens
aggcggccgcggggcccgagcgcaggaatgggtaccacagaccatgtcatcgtcctggcgtccacgaaccgagct

SEQ ID NO: 25617 - DNA, 73 bp, Homo sapiens
ggttacctatgtacctgttaccactttcaaaatctttctctaatacacagaattctaggaaggaggctgttct

SEQ ID NO: 25618 - DNA, 143 bp, Homo sapiens
atcttacagtactgatgatgaggaagacacacagcagagtactggcaaggagggtggccagctgtacagctggagaatgctggaggagaccttaaggatggccaccaccactatgaaggagctgttgtcattctggatgctgg

SEQ ID NO: 25619 - DNA, 74 bp, Homo sapiens
gacattcagtcagaagaaggctgctattgaaagagagtatgcacagatctcagaaaactgatcttcacaatgaa

SEQ ID NO: 25620 - DNA, 100 bp, Homo sapiens
tctcggaaagtagcctcttctgcaagtggggcattcacacagagtatgaagagtgtaaagacctcataaaatttatgctgaggaatgagcgacagttcaa

SEQ ID NO: 25621 - DNA, 50 bp, Homo sapiens
atgacatgggacttggaaaaacagtacagcagcaacaactccaggcccag

SEQ ID NO: 25622 - DNA, 120 bp, Homo sapiens
acgcgcaggaaacatggcggcggcgggtgttgtgagcgggaaggtactaggttttgacaagcttgcatcatgcgtgagtataagctagtcgttcttggctcaggaggcgttggaaagtct

SEQ ID NO: 25623 - DNA, 100 bp, Homo sapiens
gcatcgatctggtttatgtttggacctcgaggctccaccagcgctggcgcaggcaggaaggagcggggatctgatgagcttctttcttctggcatcatta

SEQ ID NO: 25624 - DNA, 98 bp, Homo sapiens
gcaaagcgcccagcctgccgcctcgctgtccctgcggcttctggggtttcaccagtgatcattaaagaatgggcagcttacaaaggaaagtctcctca

SEQ ID NO: 25625 - DNA, 75 bp, Homo sapiens
gacgtcgtgatccagaagtccagagctgaggactgcctgtttgcagaaatcttcccaaggctgcagacaccgacg

SEQ ID NO: 25626 - DNA, 80 bp, Homo sapiens
tgagagctgggttctattttccctcctcaaactgactttgcagccacggagagcttaatcctgattatcgagatgcccaa

SEQ ID NO: 25627 - DNA, 50 bp, Homo sapiens
cagaacggagatgtgtttggcgctatttccttcgtgctaccatcagccgc

SEQ ID NO: 25628 - DNA, 100 bp, Homo sapiens
caacagcacagagctagatatgacggactttgttttccaagctgcagtaccaaagaaaaaccatgccacatggatcgtttggatcgaatcctattgtctg

SEQ ID NO: 25629 - DNA, 75 bp, Homo sapiens
taaatgttgagcctttttggcctggcttgtttgcaaagaaatgcactcggtgatggaaagagagccactattctg

SEQ ID NO: 25630 - DNA, 126 bp, Homo sapiens
ttaaaggctatgcagctatcgtggacgtcactggccctggtggggattgacagccacgggaaggttctgggccggagaaggggcgacgttcgggcaccccccgaatggacaatctttccttctgtc

SEQ ID NO: 25631 - DNA, 102 bp, Homo sapiens
caaaagcagagctcatatagccagcaaccatataataaccagggacagcagcaaaacatggaatcatcaggaagtgagaaagatcagtctaaagaaaaggag

SEQ ID NO: 25632 - DNA, 98 bp, Homo sapiens
attgatgaactagtagatagagccaaacaatcttttcaagattccagaggggtgactaccatattgatgtctgtatcaatgactacctggatgttttc

SEQ ID NO: 25633 - DNA, 107 bp, Homo sapiens
accaggaacccaccagaaggaaccaattccggacacataacaagcagcagtgaggacaccaaaggtattagaaaactactcggatgctccaatgacaccaaaacaga

SEQ ID NO: 25634 - DNA, 83 bp, Homo sapiens
ccgcagccttgggcctcgcgccggctatggccgtgccctggggctgagccctcagaaaaggagaacaacttcccgccactgcc

SEQ ID NO: 25635 - DNA, 98 bp, Homo sapiens
gggtgatccgcatgtgggcagatgagggcagtcgaaacagccgatttcagatgctcttcacatcctttcaagaactgcacctggtggacatatggaat

SEQ ID NO: 25636 - DNA, 100 bp, Homo sapiens
ctggagagcttcatcaaaaatagtgatagctttgataaccccatggctgggggttatggagtgatgggtgacgatggttctattgattatactgttcacg

SEQ ID NO: 25637 - DNA, 75 bp, Homo sapiens
ggaaaaactacatcattctgaacatgacagagaacatagactgtgtagtgtgccagtatttgaaaaatcccaatg

SEQ ID NO: 25638 - DNA, 51 bp, Homo sapiens
attccaagtaactcttatttggtcaacagcgacctcatttacattacagct

SEQ ID NO: 25639 - DNA, 100 bp, Homo sapiens
ctacaatctaagaaggatttcagcaaatttggagcaggttctgctaagccaatattctctagaatgagcacaaaacaaatcgaataacagctaaacaaat

SEQ ID NO: 25640 - DNA, 83 bp, Homo sapiens
cgtccgacagtctgtctgttcgcgatcctgccggagccccgccgccgccggcttgccattgtttgatgtcctgtgactgagaa

SEQ ID NO: 25641 - DNA, 90 bp, Homo sapiens
ccgcggcccgctactctccgggaggggcgcttcccgacgccaaggatctcactggcatcgaatctatggatcagtgtcgccataccttgg

SEQ ID NO: 25642 - DNA, 90 bp, Homo sapiens
cggcgctggtggagggccaggtcaagctgcgggacggcaagaagaatgagtctgcaggtcttaaacgacaaaaatgtcagcaatgaaaaa

SEQ ID NO: 25643 - DNA, 75 bp, Homo sapiens
accaatcctcacgattgagtgtcaaagaaggttcttctgtgtggcagttcagaatgatggatcaagctagatcag

SEQ ID NO: 25644 - DNA, 95 bp, Homo sapiens
atgccttgagctcctcaatgtgggtgtagagtctaaactcatccttaaaggggtcatactgctggatttttgaagtgaagcatcagcataggaag

SEQ ID NO: 25645 - DNA, 97 bp, Homo sapiens
gtggctaaatggctccctgattcatggaaatctgaaatagagtactatgctatgttggctaaaactggtgtccatcactacagtggcaataatattg

SEQ ID NO: 25646 - DNA, 100 bp, Homo sapiens
gtactgtcttcgtgatgaataaaaacatttcaactccctacagttgtgccatgcctgatgatgggagaaccagttactaccttctctaacacaggctcca

SEQ ID NO: 25647 - DNA, 101 bp, Homo sapiens
agggaaggaaattatgaccaagtacctcaccccaaaggatttaagtgccctgtatgctcaaaatttgtatcctcagatgaaatggatttgcatcttgtaat

SEQ ID NO: 25648 - DNA, 90 bp, Homo sapiens
ttaaagaatattttggagcctttggagagattgggggcactgaggaatataagatttgccggggcatcaaggagggccgcctcactaagc

SEQ ID NO: 25649 - DNA, 100 bp, Homo sapiens
tggttatctacacacccttctcatggcaatcgagttgagtacttggatagacttatacctcaggttatgaagacagtatggagtttccagaccatagtag

SEQ ID NO: 25650 - DNA, 75 bp, Homo sapiens
tggtgctctgcccattcaaagactccggctgcaagcacaggcctcctgacaaggtgatccgggcgggccccgcag

SEQ ID NO: 25651 - DNA, 100 bp, Homo sapiens
ctacaatgaggagcgctacgggaacatcaccttgcccatgtctcacgcgggcttctccagggaaagtgaccgaggcagtgaaagaggccattgacgcagg

SEQ ID NO: 25652 - DNA, 88 bp, Homo sapiens
gacagtttgtgccagctctccagagagaaaagctgtcttgtcgacggtctcactgatgcctcttctgcattcaaagttcctcgacccg

SEQ ID NO: 25653 - DNA, 90 bp, Homo sapiens
aggaggagcagcaggcctccgggcccggcgccgccgcccgcagttcctccaactcctctgccaaccaatgatgttgatgtgtatttcgag

SEQ ID NO: 25654 - DNA, 90 bp, Homo sapiens
agcctcctgagtacctgggacaacagagctccactggttcaacagcctctcctccagtttcgaccccagtcacaggacacaagagaatgg

SEQ ID NO: 25655 - DNA, 100 bp, Homo sapiens
ggcatcgccgcctcagccgccgccgccgccgttttcgcctgcagctgctcaccgtaagactttgaccccgacgcaggcttcagtgattgccgcggatcag

SEQ ID NO: 25656 - DNA, 75 bp, Homo sapiens
agctctttctgacagctggaggcgccggcggccttcacctctggaagtaggcttctcaaatttaataactatgga

SEQ ID NO: 25657 - DNA, 100 bp, Homo sapiens
tgggagtctccgcgtcccgctcgctgggagagaggtacctctccttttccctctccctttccctaaggtgaaaataagtcccctcctcgcccatgtggct

SEQ ID NO: 25658 - DNA, 100 bp, Homo sapiens
tggcgccgtgaagtgctcgtcaccgccccctcctgccccttcatgcatgcgcggaggccgcctgctagcaagaggatggcattccctgtggatatgctgg

SEQ ID NO: 25659 - DNA, 75 bp, Homo sapiens
agcccagtaaggatgtacatgttgtaaaagagcaaaatccaccacctgcaagggtctgctcttgataaaataaca

SEQ ID NO: 25660 - DNA, 75 bp, Homo sapiens
cagagaaagataggcggccatggtccaaccttgaagactgaaactgttgaggagcccatggaggaagaagaagca

SEQ ID NO: 25661 - DNA, 75 bp, Homo sapiens
aatgtcatactacagatttggagaaatgcagccaaactcaggctctgaattggttttgtctgaagatgaaaaaag

SEQ ID NO: 25662 - DNA, 98 bp, Homo sapiens
gaagccttcctttatcgctttcaggtgaagtattacagacacttagcacctgatcacttgctgcaaatatgtcatcgactaggacctcttcttgaaca

SEQ ID NO: 25663 - DNA, 100 bp, Homo sapiens
gcctacctcaatagacattgggttcgccgtgaatgtgacgaaggacgaaaaggaatatatgaaatctattcggtggatgaagccgcttccagggaagaca

SEQ ID NO: 25664 - DNA, 100 bp, Homo sapiens
ctgagtctgggaaggattctgagcaagagaatgggctgggcagcctgagtcccagtgataactcctctttcctaaaatggagtcgagtaaaaagatggac

SEQ ID NO: 25665 - DNA, 75 bp, Homo sapiens
gagcttctcagaagacagagggttttcttttgaggttctgactaataagaagacgaccttctttggtggcaattc

SEQ ID NO: 25666 - DNA, 51 bp, Homo sapiens
gcgcccagcaccatgaagatcaaggtggtttgtgatgaaaatggttccaag

SEQ ID NO: 25667 - DNA, 100 bp, Homo sapiens
ggcacgctctttactccatgtgtgggacattcattgcggaataacatcggaggagaagaacccttaggagaaatcttgagagtggacagcaattgtgaag

SEQ ID NO: 25668 - DNA, 75 bp, Homo sapiens
acgccatgtcgggttattcgagtgaccgagaccgcggccgggaccgagggtatgacctggacgcgtgtgacattc

SEQ ID NO: 25669 - DNA, 50 bp, Homo sapiens
aaaacgtcaacaacagttttacgtgccttctcccagtgccttgctcgtag

SEQ ID NO: 25670 - DNA, 82 bp, Homo sapiens
caggaagggcgaggaaagcggagtggacaattctgtggtgttcttggtcacacatttatggagtttctgaagggcagtggag

SEQ ID NO: 25671 - DNA, 75 bp, Homo sapiens
ctgccggcacgcgactccccccgggcccaaactacgagttccagggagctctgtcctggtgaccgtgcccgggtt

SEQ ID NO: 25672 - DNA, 100 bp, Homo sapiens
gctgggcttggccaagtccatccaccacgctcgcgtgctgatccgccagcgccatatcaggtgtccctggccagtgtccttccacctgtccacaagcatg

SEQ ID NO: 25673 - DNA, 87 bp, Homo sapiens
ctcacagttttgtggctgaagcaaagccacctacagttactatgcctcgaatcaagaaactggaggaagcagcatctcgtgcagcag

SEQ ID NO: 25674 - DNA, 90 bp, Homo sapiens
ctttgagcggactcccttttaagctgctactgtttgaacggtcttggatgaacagatggaagtctgctgttctgcatgaaggggaaggga

SEQ ID NO: 25675 - DNA, 83 bp, Homo sapiens
cagagcctcgcctttgccgatccgccgcccgtccacacccgccgccaggaccagatggcctttgaggatgtggctgtgtactt

SEQ ID NO: 25676 - DNA, 100 bp, Homo sapiens
cactggtgtcatcactcaagggaggaactccctctggcttgccgtggaggtcccagcccccgctgcggttctcggaggtccggagcccctgatgcagtgc

SEQ ID NO: 25677 - DNA, 101 bp, Homo sapiens
ctgttccaatcgctcctgtttgtcttctgctttggcccagatcctctgccttgtcaatgttagtcacaatggtgtgagtgaatcagaactgatggaactct

SEQ ID NO: 25678 - DNA, 100 bp, Homo sapiens
ccgaaggaagcatcccagacaccgggaaggttggtcaaagaaaaagtgatgtatgaaaaagaggcaaaacaacaagaagaaaagattgaaaaaatgagag

SEQ ID NO: 25679 - DNA, 100 bp, Homo sapiens
ctgtcattgccctcctgctctggggacagctttttgcagtggactcaggcaatgatgtcacggatatcgcagcctatgtgcttcccaagctgtatgtgaa

SEQ ID NO: 25680 - DNA, 96 bp, Homo sapiens
gaggaacctcagaacatgggtccgtggtcgtttgtttctccaaggtttgaaaagcagctggcctgcaagcttggattccttagcaccaccacagct

SEQ ID NO: 25681 - DNA, 75 bp, Homo sapiens
gtggagccctcaggcatcacatgtggagacccccctgagaggttctgctcccatctccagaacctgggtatcaac

SEQ ID NO: 25682 - DNA, 110 bp, Homo sapiens
agacaacagctgcttagacatatagaagctagacggttagacaggagataattgacgaccttgccaacctagtggagaacacagatgaaaaacttcgcaatgaaaccagg

SEQ ID NO: 25683 - DNA, 83 bp, Homo sapiens
gtgtgggccacctcaaggcccacctgagccgcgtctaccccgagcgtccggtgcaggtgatggtcctaccagtgtgtctgttg

SEQ ID NO: 25684 - DNA, 98 bp, Homo sapiens
agaggttagacttgtttcttatatgtgatgccattccagcactggactcatggaggctgagcatttattcaggtgcagcttcaagcttaggaccaccc

SEQ ID NO: 25685 - DNA, 100 bp, Homo sapiens
tgggctttcgtcgcgagatggaacgctggcaaacccgctggttcagaaccaacacctaagtcacgcattgcagaccttcctcctgccaaccctgatcaca

SEQ ID NO: 25686 - DNA, 100 bp, Homo sapiens
agaaccgctgccagagcctgcaggaggagctggacttccggaagagtgtgttcgaggaggttgtcggggccaaagtggtaacgaacgcccgcagcccggg

SEQ ID NO: 25687 - DNA, 80 bp, Homo sapiens
cacgatgcaggccatcaagtgtgtggtggtgggagatggcaaaatgatgcttcaacacccaggccaggtctctgcctcgg

SEQ ID NO: 25688 - DNA, 100 bp, Homo sapiens
tccgcgtctccctcgcgaactcggtgaaaggaattggcgccgttcgacaccaggaagtggatccccctcagccacctcaattcttcaaaagaaagagact

SEQ ID NO: 25689 - DNA, 75 bp, Homo sapiens
aaatgcatgagaggaattctctactgctatatgcgtcaggccgataaggttggcgggacgaagactggcgtggtg

SEQ ID NO: 25690 - DNA, 98 bp, Homo sapiens
atgaacttaattttccataaagacattctgtttggcattccagctaataaggcaggatggggaagcagaatagcaaactggcccctgaagtgatggag

SEQ ID NO: 25691 - DNA, 132 bp, Homo sapiens
gcgtttcgggtggggccgcgcaggcaaggacaaggccacagagtcggggtcttcacgggccaattcctgtccccccagcagcatggcatcgtgtgctgaaccctctgagccctctgccccactgcccgccgg

SEQ ID NO: 25692 - DNA, 100 bp, Homo sapiens
ctggtcggggaggagaccatggctgactacctgctgtacaccctcaacaaacaccagcgctttggaagctaaaccagccccagaaatatttgaaaatgaa

SEQ ID NO: 25693 - DNA, 100 bp, Homo sapiens
cacggagctgggcgacgagctgaccctgggagacatcgacgccaccaaaaccctcaacaggggcatctctgagttcatcgtgatggctgcagacgccgag

SEQ ID NO: 25694 - DNA, 100 bp, Homo sapiens
tgggaagtgtacaacttccccgcaggcggcgtgggcatgggcatgtacaacaccgacgagatgcgtctgttactagagtggagagtctaccttcgtctca

SEQ ID NO: 25695 - DNA, 83 bp, Homo sapiens
taagaaagaatcttgtcactttagccactgctactacagggtgttgatgatgccttctatacattagttcgagaaattcgaaa

SEQ ID NO: 25696 - DNA, 75 bp, Homo sapiens
ggatgcctacggcgtgggccgctaccaggaggtcaaccccgtccccatgtgagagcagcagaggcggtcttcaac

SEQ ID NO: 25697 - DNA, 75 bp, Homo sapiens
gctgatgacctcacatggtgtggtgaattcaacacttccagtgtcagctgtgatgcatgtttaaaaggaaatttt

SEQ ID NO: 25698 - DNA, 82 bp, Homo sapiens
tgagcctgcagccggccctgccgtcccgcagcgtggacaagcagcatgccgtcatcaactacgaccaggacagggacgagca

SEQ ID NO: 25699 - DNA, 100 bp, Homo sapiens
aagaaactgtggcagaggtgactgaggtggagatgctagaacgaaagtatggggggcgcctggtaacccgccatgcggcccgcaccatccagacggcgtt

SEQ ID NO: 25700 - DNA, 76 bp, Homo sapiens
gattgcgttacaagctttgtctccttcgacttggagtctttgtccaggacggcaccagtttgtagaaaataattta

SEQ ID NO: 25701 - DNA, 75 bp, Homo sapiens
cagatgttgtcaaggtggcctaccaggaggccaggggtgtcgccatgattcaggcttcttcaggagaaagcaagt

SEQ ID NO: 25702 - DNA, 75 bp, Homo sapiens
tatttgctgagggacagcgagagcgtgccaggcgtgtactgcctatgtgtgctggtcggtgtacccgagagaact

SEQ ID NO: 25703 - DNA, 97 bp, Homo sapiens
catctccttcctcatgctgtgccatgtggcccagacctatggttcagaggtggtgctgtccgagaggctgcaggccctggtgaacagtctgtgtgcg

SEQ ID NO: 25704 - DNA, 100 bp, Homo sapiens
tataatgggcagtgtctaccagatattgcccccaaatacatcaagatgtttgtactggatgaagctgacgaaatgttaagccgtggattcaaggaccaga

SEQ ID NO: 25705 - DNA, 100 bp, Homo sapiens
gtccgtatcatcaagaacagaacaggccctatggggcatacctatggctttattgacctcgactcccatgcgatgaacccgaatggcccagcctggtgct

SEQ ID NO: 25706 - DNA, 50 bp, Homo sapiens
ctttggagaatgatatcaaaccaaccggaacatgaacattttgcagtact

SEQ ID NO: 25707 - DNA, 90 bp, Homo sapiens
ggaaggagccattatttatgtcatcaagaagaatgacgatgttgcatttgctggtctggcctttgcgtccttctacctggcagggaagtt

SEQ ID NO: 25708 - DNA, 51 bp, Homo sapiens
ttagcagattggccgatgattcaggtctaggcgttttacactgagattctc

SEQ ID NO: 25709 - DNA, 75 bp, Homo sapiens
gccgtctgcaaagtgtccccggcaagaagaccatatactccttgacgacagggactaccaccttcaccttcatgc

SEQ ID NO: 25710 - DNA, 97 bp, Homo sapiens
tgctggagcagtttgagaaatcagaagccaccagtgaagactataagctcctggaaaatatgaataaactcaccagcttgaagtatcttgaaatgaa

SEQ ID NO: 25711 - DNA, 101 bp, Homo sapiens
cccaccaggagtcacagtcccatggcccacccaaggagagaaccccatcatcacccagttcttccccaccctgctgctgtggtgcttctcggccctccttc

SEQ ID NO: 25712 - DNA, 75 bp, Homo sapiens
ccgcggcggcagcagcagtgagaggtttatgatgataaagactacaggagaattcggtttgtaggtcgtcagaaa

SEQ ID NO: 25713 - DNA, 75 bp, Homo sapiens
gttcatcaacatcaactacgtccctctgaaggactccctggaggaaaagcggaagcggcagcggtctgaacgcct

SEQ ID NO: 25714 - DNA, 100 bp, Homo sapiens
ctgtacaccccatcccagacgaagacagtccctggatcaccgacagcacagacagaatccctgctaccatgaacaacgtgggaatgtcgtatgagtatcc

SEQ ID NO: 25715 - DNA, 75 bp, Homo sapiens
ctcgaactaaacaaattcatcccagaaatctaagagatgtagccatagctgtaacgtataaccatgatgggtctt

SEQ ID NO: 25716 - DNA, 100 bp, Homo sapiens
cgcggtgatgcgtgcttttcgcaagaacaagactctcggctatggagtccccatgttggactcacaccacccggcaagaactgctcactacggctccctg

SEQ ID NO: 25717 - DNA, 82 bp, Homo sapiens
agattgacttctcggaatggaaggatgacgagggcagtcagggcgacagcaagaatgccaagaagaagaacaacaagaaaac

SEQ ID NO: 25718 - DNA, 101 bp, Homo sapiens
gttagaagaagaagctgccgtttttcctgaagttgcgtgaatcagtggctaacctggttagaaactgctgaagaagaagaatcagaggaagaagctgacta

SEQ ID NO: 25719 - DNA, 100 bp, Homo sapiens
agaccggggctcgcaactcggcagcctccacccaccggcccaccctacatttagcgcatcatgtgatccgggtagcacaggcggagtgcagcggaggccc

SEQ ID NO: 25720 - DNA, 99 bp, Homo sapiens
tgtataatggaagctggggaggccggggagaggcatctccagaatatcagaaactgcaggattccagttcttgttatgagtgtcttgctctccatctcg

SEQ ID NO: 25721 - DNA, 75 bp, Homo sapiens
ggcccacagtgggggtgtgcaaacccgagagaactgggttcaggtgtgggacacagcaggtcaggaacgtttccg

SEQ ID NO: 25722 - DNA, 100 bp, Homo sapiens
ctgcctgacttggaccctggaaaacctggccctcttcaatttctgacaaaagagtgtgaacatggctacgcctcttcattcccgtccatgccgagccccc

SEQ ID NO: 25723 - DNA, 80 bp, Homo sapiens
gtggacagctgctgtcagcacctagaaaaacatggttcgacccaagcctgtggcccagaataacattcctattgccccag

SEQ ID NO: 25724 - DNA, 82 bp, Homo sapiens
aagatggttgtactgtctctccccaggatccagagtcagaggtaccagcttcgagagctgtgcccaggagtgaacaaccagc

SEQ ID NO: 25725 - DNA, 100 bp, Homo sapiens
tgttcttttgctgcaaatgaagttgatggaattacactgtgatacgactgacttcatgcggaggaatccctttggtgtggacatctgctgccggaagggg

SEQ ID NO: 25726 - DNA, 100 bp, Homo sapiens
cgcctagtaaacggggctgctggtgggccgcgtcgaagacatggaccagggctacggaggctactgcagcactggggtgtcagttgttggtccgacccag

SEQ ID NO: 25727 - DNA, 74 bp, Homo sapiens
tgggcgttcatctaccacgctttcgtccacaatggtgcgcatgaatgtcctggcagatgctctcaagagtatca

SEQ ID NO: 25728 - DNA, 97 bp, Homo sapiens
ggccctctcggcgtccgccagcgatggcacagaataagaaagccttgagttttgtgaaaaaccggagaagagaaactaaaaggacagtagaaaaggc

SEQ ID NO: 25729 - DNA, 52 bp, Homo sapiens
atacagaactagctgccttcacaaagaaccagtctgggatcttgtactggcg

SEQ ID NO: 25730 - DNA, 96 bp, Homo sapiens
ggagaactatagcaatctggttttcttggacatatctgaagagatggattaagaatgctttggattaaggattgtggagcacatttcaatcatttt

SEQ ID NO: 25731 - DNA, 80 bp, Homo sapiens
gacttaaggattgtctttgtacataacaaggacatggatttgattgacatactttggaggcaagatatagatcttggagt

SEQ ID NO: 25732 - DNA, 100 bp, Homo sapiens
acgtgttagaaataaatctgatattgcaccttcacagcaacaaggaacagcccgaaggaacaacccttgtcaaggaggaaggggacaaagatgaaagcaa

SEQ ID NO: 25733 - DNA, 100 bp, Homo sapiens
cggctcacagatctgggacaccgcattcgccatccaggctctgcttgaggtggggaagctgaggcaggaagccctttagtcacttgccgaaggccacgct

SEQ ID NO: 25734 - DNA, 82 bp, Homo sapiens
aactgatcctggacctggagaagaatgatcgtgagatggagaataaagaaactctcaaagggttgcacaagatggatgatcg

SEQ ID NO: 25735 - DNA, 153 bp, Homo sapiens
aggaagtggcagaggcagaaggagccccagagctcaatgggggaccacagcatgcacttccttccagcagctacacaggagttcatgatcaagtgttgcccacaccaaatgcttcatccagagtcatagtacatgtggatctggattgctttt

SEQ ID NO: 25736 - DNA, 100 bp, Homo sapiens
tatgtctgcctgttctcccctcgtcggtggctaagttacagttacatgatcgacaacgtgatcctgctcatcacaggcacgctgcaccagcgctccatcg

SEQ ID NO: 25737 - DNA, 51 bp, Homo sapiens
agacaagttcaccccgaagtctgccgtacctggagtagaacagaaaaatta

SEQ ID NO: 25738 - DNA, 120 bp, Homo sapiens
gtctcaatatctgtcttcggtggactccttcggcagtccacccaccgccgccgcctcccagttggaatcgaagcctcttaaaatggcagatgacttggacttcgagacaggagatgcagg

SEQ ID NO: 25739 - DNA, 90 bp, Homo sapiens
gtggtccttctccatattcgagagctgattggtcagatggttgtatcctgaccttccccagatctttctgtctttggaccttatacacat

SEQ ID NO: 25740 - DNA, 88 bp, Homo sapiens
ttggcgaagccttgggtttctttcttaaaggactgatttttagaactccacatttgagctgggatctagcaattgggaggcagcagac

SEQ ID NO: 25741 - DNA, 90 bp, Homo sapiens
tttttaaggaaagccggagtgttcataatcatcttacttctgctccctaacaacctgagagaagattacaaatttcaccacactttcagc

SEQ ID NO: 25742 - DNA, 89 bp, Homo sapiens
caagtaccgcctgggacggaagatcgggagcgggtccttcggagatatctacctggactcttccagctggagttggaggctgacgccct

SEQ ID NO: 25743 - DNA, 90 bp, Homo sapiens
gggggaatgtggcgctggatccggcagcagctggccggaccagaatatggccaagggatgaaccctattagccgcctggcgcaaattcaa

SEQ ID NO: 25744 - DNA, 82 bp, Homo sapiens
aaccaggcaatgctggatagataccgaattcttatcacaaagattcaaacatctacttctttgggaacatcacagatttcac

SEQ ID NO: 25745 - DNA, 100 bp, Homo sapiens
gaggcggaggctcaggcagcttgagtggttacccaggctgtccttacccacctggtggtccatatcctgccacaacaagttctcagtacccttctcagcc

SEQ ID NO: 25746 - DNA, 100 bp, Homo sapiens
agagccgcagtggatggctggaggtgcagggccaggaggaacatgagcctgtgcaggagacatggcggacgcagcatctccgtgctctgtggtaaacgac

SEQ ID NO: 25747 - DNA, 100 bp, Homo sapiens
gttagccaaaatgaagacctgtgttgatacctataccaaccgtttaagccataaggatgagtttaccattattcctgtactggttggagctctgagtgag

SEQ ID NO: 25748 - DNA, 100 bp, Homo sapiens
ctgagattgactccttgaccagcatcttggctgaccttgagtgcagctccccctataagcctcggcctccacagacggccgaagccctgcagcccacgct

SEQ ID NO: 25749 - DNA, 75 bp, Homo sapiens
gcaaggcgcgcggcgactccggcatgcccaagagaatcgtaaatgcaaaaattgcttgccttgacttcagcctgc

SEQ ID NO: 25750 - DNA, 82 bp, Homo sapiens
acgaccaagagggtgttcgactgctagagccgagcgaagccggagctggagtttgttcagatcatcatcatcgtggtggtga

SEQ ID NO: 25751 - DNA, 50 bp, Homo sapiens
ccagagttgattgtgatcagcactgaaactctgctcttaaagacaaagaa

SEQ ID NO: 25752 - DNA, 100 bp, Homo sapiens
agcggagagcaacagcgcgccgagccaaataactatcggaccatgcatggccgggcagtaaatggcagccagttgggaaaggattacatccagctgaaga

SEQ ID NO: 25753 - DNA, 108 bp, Homo sapiens
aacgacctgtttgagagtgggaacatgacgcaggtgcaggtgtctcttctcgccctggcggggaagggtcttgctctgtcagactagagtacagtgccatgatctccg

SEQ ID NO: 25754 - DNA, 100 bp, Homo sapiens
ctaccaagtccgtgctgtttgtgtgtctggcacccttacccttctgaagaacagaaaaagcagttggcacaagacacgggactcaccatccttcaagtga

SEQ ID NO: 25755 - DNA, 102 bp, Homo sapiens
tcaactcccaggtctacagccggctcacagcacgagccagaagatacctgaaattcctgcagatgttgtgggtgcccttctgttcctggaggattatgttcg

SEQ ID NO: 25756 - DNA, 153 bp, Homo sapiens
catttgttggggagaagaggattggaggtgtcagtgttaaaggaacctctacaacgaaggtgaagccacggaagataagatcgcccaggaccacaccgcagcgtaactgcaggcctctcagcgaaaaagggggaaagcaaagacccgggtgtg

SEQ ID NO: 25757 - DNA, 98 bp, Homo sapiens
tttccccagagcgtcttgatccttttgcagatgcaatggaccaagaatctggtaaggctgtctggcccaaaccagcaggagggtatcagacaattaca

SEQ ID NO: 25758 - DNA, 101 bp, Homo sapiens
gagacgcgagcataatccttttgcagacatctcaacgctggctctccaggaatgaatctgaagtctgctgcagtaaaacacagaaggctttaaaatgtttt

SEQ ID NO: 25759 - DNA, 96 bp, Homo sapiens
gcctcccaaagtgctggagttacagatgtgagcctctgtgctcagtccatccttggctgttcaagtgtagagcggggatctgatgagcttctttct

SEQ ID NO: 25760 - DNA, 112 bp, Homo sapiens
gcccaattagctggatcagtggctgaaatgtcttcttatcatcatggtgagcagccagtccctcctgcactccagcaactccagccatcagtcatcttccagatccttggaa

SEQ ID NO: 25761 - DNA, 82 bp, Homo sapiens
cgagcgcgagcggcgcgagaaagtgacaccggaaactggtactcaagtgatgaggatgagggtggaagcagtgtcacctcca

SEQ ID NO: 25762 - DNA, 100 bp, Homo sapiens
agaatgtcgggcaaagaccgaattgaaatctttccctcgcgaatagagaagaagaaggaggttcctgctgtgccagaaacccttaagaaaaagcgaagga

SEQ ID NO: 25763 - DNA, 73 bp, Homo sapiens
ctaccaaggaagatgctgaggccccaggcatcagagatcatgagaggacacattcagctaacgtattttagca

SEQ ID NO: 25764 - DNA, 75 bp, Homo sapiens
gtacctgcagaaggtctctggagacatcttcagcagaatattgaaggatgtttgttccaagatctctaaaaatca

SEQ ID NO: 25765 - DNA, 82 bp, Homo sapiens
ttttgtacccatcagcgcaggagaaggtgctccagagatcttctgttcttcaggtctgaaaactccaaatggctgtgagctg

SEQ ID NO: 25766 - DNA, 100 bp, Homo sapiens
tctaccagatcaacgtcctccgggaccggagtcagaaccctccgcagagtaaagggtgattgtgttgttacagtgctgcttgctgaagaggacaaagctg

SEQ ID NO: 25767 - DNA, 50 bp, Homo sapiens
cagcagcacaagggcagtttgcagagacgccaggaagaacggcatgatag

SEQ ID NO: 25768 - DNA, 80 bp, Homo sapiens
caatgaggaatctgttcgccaggcaaccaagcgatggagaagtgtacccaggacctgggcaacagcaccaaagccgtgag

SEQ ID NO: 25769 - DNA, 74 bp, Homo sapiens
ctgggccatacagactgtgtgaaatgaaggagtctcgctctgtcgccaggctggagtgcagcgacacgatttcg

SEQ ID NO: 25770 - DNA, 75 bp, Homo sapiens
gtcatgtagccaagactggagaaacaatactcaccccacacagaccgcgtttctctccagtgtcgacctacacac

SEQ ID NO: 25771 - DNA, 100 bp, Homo sapiens
ggaggacctacgccggcctggcggatgtgatgctggtacaacccagagtagaatttattctgtctttcattgaccacattgctggagatgaggatcacac

SEQ ID NO: 25772 - DNA, 100 bp, Homo sapiens
aagactccaagccctactgggaggcacggagggtggcgaggcagtgaaacaaagagtcctcttcgtggaaaagaaaaaaatacgctccctttaaacggtg

SEQ ID NO: 25773 - DNA, 100 bp, Homo sapiens
cttcggggccctggccgccggcctcccagccgcgttctcctccgccgctcctccgggcttgccctggagccctcaggaggctgaggatggcattattgct

SEQ ID NO: 25774 - DNA, 75 bp, Homo sapiens
tgaggaggtggcttatgaaagtgtgatgttcgcgtatttcttgacagtacataccgagcatcaaatattaaggca

SEQ ID NO: 25775 - DNA, 131 bp, Homo sapiens
gtggaatatgccaaggaaaaactggagagcttcatcaaaaatagtgatagctttgataaggaggtggggaagacagggctccagctaccacaggacgggctctgggtatagccgttccagtcagggacagc

SEQ ID NO: 25776 - DNA, 136 bp, Homo sapiens
cgagccagacagctggaggaggaacttcgaaccatggaccaggccctcaagtccctgatggcctcagaggaggaggctgagctggctgaccgacccaatccccctacccgccctctgcccgctgacccggtggtga

SEQ ID NO: 25777 - DNA, 90 bp, Homo sapiens
gacaaaaatggaaacaggactaagattcctgcattttgactctaaatggcatttattgaaatggcaaccacagaggatgctcaggccgca

SEQ ID NO: 25778 - DNA, 82 bp, Homo sapiens
aaactgaaagtgcgaactgcctatccgtcattgagacttattcatgctgtcagagggtttgggccccatggtatccctgtga

SEQ ID NO: 25779 - DNA, 82 bp, Homo sapiens
aggacacagcctcgctggaggcagtttctgatgccatggacaatattaccaggcagaaccaattctacgatacccaagtcat

SEQ ID NO: 25780 - DNA, 50 bp, Homo sapiens
tggtacatcttccgcgtgctgctgcaggaacgagtctttgggaacgtggt

SEQ ID NO: 25781 - DNA, 75 bp, Homo sapiens
attggggacagatcagagtttgcatgtgcgtcagaaatagacccaggcctccgttccccagtcagtcgcaacatc

SEQ ID NO: 25782 - DNA, 100 bp, Homo sapiens
agaaattactgtctcaagtgatacgttgttgacctcctgtactggagagacattaagaagactggagtggtgtttggtgccagcctattcctgctgcttt

SEQ ID NO: 25783 - DNA, 73 bp, Homo sapiens
cccgagtgagggatttcgccgcccgctttcaggcccgtgaatgggtaccacagaccatgtcatcgtcctggcg

SEQ ID NO: 25784 - DNA, 85 bp, Homo sapiens
atcatcgctggtatcctcgcctacgcctactaccagcaggttacgaagtgacagtgctggtgcgggactcctccaggctgccatc

SEQ ID NO: 25785 - DNA, 100 bp, Homo sapiens
ccgcgagttcctgcgcggctgcggggcttccctgcggctggagtgtgcaggagaagagaattgggtggacagcaggaccatctacgtgggacacagggag

SEQ ID NO: 25786 - DNA, 150 bp, Homo sapiens
agaccaactgccccgccaccgtcatcaacgggcagtttgtcgaacgatgttggactcatagtcactgccagaaaggaccagttgctcttctgtgatgactgcgatcgtggctaccacatgtactgtctcaccccgtccatgtctgagccc

SEQ ID NO: 25787 - DNA, 98 bp, Homo sapiens
ctgaacccggaccccctacccaggtccagggccagccgccatgacgaacgacacaactcatgtacaaatgggccaagccgaaaatctgtagcgaggac

SEQ ID NO: 25788 - DNA, 74 bp, Homo sapiens
aaagcaaatttatgaagaattcattcaaacggaggctcctaaagagtttgaaaaagtaccagaaggtcctatcc

SEQ ID NO: 25789 - DNA, 75 bp, Homo sapiens
aggacatcgacatccaggcgaactcggcctatcgctaccctccgaagtccgttggagtgcctcaagcttattgcc

SEQ ID NO: 25790 - DNA, 82 bp, Homo sapiens
gtccgccgctcaccccgcggccgcaccttcccgccttctcaggagtccaaaactacttacctggaagaccttccaccacccc

SEQ ID NO: 25791 - DNA, 75 bp, Homo sapiens
cgggctgtgtgccccttctccacccagaggaactaccactgctggaatgaagcatggatgacaaggcctgacctt

SEQ ID NO: 25792 - DNA, 100 bp, Homo sapiens
ggtgatcacatccccaccccacaggatctgccccagagaaagtcctcgctcgtcaccagcaagcttgcggggttacctaaccaaactcctgcaaaaccac

SEQ ID NO: 25793 - DNA, 98 bp, Homo sapiens
ccgcagggaggtggagaggaagcagaagggctctgaagttgatccacctgaagaattaggagctagtatttctgtcacaacagatgagctagagaaat

SEQ ID NO: 25794 - DNA, 100 bp, Homo sapiens
tggtgcagaacattgcgcggcagcatgcagccagtaaagatcccagagaagttcgagaagctagagatcataaggaaccaaaagaggagatcaacaaaaa

SEQ ID NO: 25795 - DNA, 75 bp, Homo sapiens
ctgcacctggtcctgcgtctgagaggtatggtgctgggtgcagatgcagtgtggctctggatagcaccttatgga

SEQ ID NO: 25796 - DNA, 75 bp, Homo sapiens
ccgggaaaacgttcgtcaacatcacgggactttgaacatgtcggggatcgccctcagcagactcgcccaggagag

SEQ ID NO: 25797 - DNA, 110 bp, Homo sapiens
cgtgcggctcgcagaacggcgagtagcggagcgggacccgctgaacaagttccagttccagtctaccacccaacacctagccagactcggctagcaactcagctgactga

SEQ ID NO: 25798 - DNA, 75 bp, Homo sapiens
aaagtatctcatatgaccagtgggacgcactctctgagatattttcgcctgggcgtttcggatcccatccatggg

SEQ ID NO: 25799 - DNA, 82 bp, Homo sapiens
catgaggagtggctcatcaaaggcagccttttccccatggcagcccctgttctgagatctggttggagttggagggtgagag

SEQ ID NO: 25800 - DNA, 100 bp, Homo sapiens
actgatatctcaaaaggtgatctggacaaaggaacaggtatctcaggtgtcatggagaaactccagctgggcccagagattctgcagcgggaaaatccaa

SEQ ID NO: 25801 - DNA, 74 bp, Homo sapiens
acaaacaagcaactgtgggcgacataaatacaggtgctggtatcaaggctcagatttgctcattagtggagttg

SEQ ID NO: 25802 - DNA, 75 bp, Homo sapiens
cccggccggcaccaccgctgcaagagccgggttttaaaatcaaagatgggaaaatcggagaaaattgcccttccc

SEQ ID NO: 25803 - DNA, 75 bp, Homo sapiens
tgcaccgacctcgacgtcttgcctgtgtcccacttgttcgcggcctataggggataaaaacattcagatggcaga

SEQ ID NO: 25804 - DNA, 75 bp, Homo sapiens
agcgccatggcccagattctgccaattcgttttcaggagcatctccaggtgcataagctggagcctgaggcgtgg

SEQ ID NO: 25805 - DNA, 100 bp, Homo sapiens
ggcgagctcctccaggacttccagaagcagggcgtcgccctggcctttgtgggcctgcagggaaggaccccacgccctccatgctgggcctctgcggctc

SEQ ID NO: 25806 - DNA, 100 bp, Homo sapiens
gaggatcaaaagaagtttattgaccaagtggtcaaacatgtctgacaaagagctaaagaagctacgtaataaacaaagaagagctcaaaagaaagcccag

SEQ ID NO: 25807 - DNA, 103 bp, Homo sapiens
cttctggcctttggcacgtcctgctccgtggtgctctatgaccccctggcgtctgtagaggcttctggtgaaatcgcattatgcaagactggatttcctgaag

SEQ ID NO: 25808 - DNA, 76 bp, Homo sapiens
gtctgattcagatgacaactgtacagatgtcactgtacgaattggagcaatgttggcttatacacctctggatgag

SEQ ID NO: 25809 - DNA, 100 bp, Homo sapiens
ctcctgcagagctcattgaaagattggagcaggtgggaatggaagtggccccacatctcaaagaaaccctaaataagaacttttttgacttcctccttac

SEQ ID NO: 25810 - DNA, 100 bp, Homo sapiens
ggtggcggcggcggcggcggcggctgctgctgctgctgcccgcgtccgaggctcgcgggcggcgggcccgggtcatcttccacgatgttgctgtgctgac

SEQ ID NO: 25811 - DNA, 74 bp, Homo sapiens
gaccacttaccgcagcatccaagtcggccctggtaacagctgtggactggcactttgaggaggctgtggatggt

SEQ ID NO: 25812 - DNA, 101 bp, Homo sapiens
gctgatgctggcaaggaggggaataaccctgcagaaaatggagatgccaaaacagaccaggcaagaccagctgaaagaggttccgcaactgtgtcatttgg

SEQ ID NO: 25813 - DNA, 75 bp, Homo sapiens
gaggtagttccttcgcggtggagagatccagacatttaatgtggatgcaccatgccagaccgtggaagatttaac

SEQ ID NO: 25814 - DNA, 75 bp, Homo sapiens
gactgcgggcccgtagctgggctctgcgaggagccaaaaacctgtatatcatctccgtgaaggggatcaagggac

SEQ ID NO: 25815 - DNA, 98 bp, Homo sapiens
ggagccagcctgagttgggagaagagctccagagagttggcaaaagcagcttttgatgatgcaattgcagaactggatacgctgagtgaagaaagcta

SEQ ID NO: 25816 - DNA, 82 bp, Homo sapiens
gaacgtgagggtgtaacttacaaaaagcaaacggggattcagcgtccgatcctttggaacagggactcacgtgaagcttcca

SEQ ID NO: 25817 - DNA, 75 bp, Homo sapiens
acctgccccttacggatgccgaactggggctcctcgcacctaccccagcaactcaaattcaccacctcggactcc

SEQ ID NO: 25818 - DNA, 100 bp, Homo sapiens
gtgaggcacacagaattctctacatttgtgaaagtcagtttctgaggaatttcatcaggcaggtgacaaacattaccaccccagctgtgcacgatgcagc

SEQ ID NO: 25819 - DNA, 82 bp, Homo sapiens
tacggtttgagctcagatatcgggctgaacggtcaaagacattcacaacatggatggtctataagaaggagaaagctcgagt

SEQ ID NO: 25820 - DNA, 143 bp, Homo sapiens
aagattcaaacaaccaaccctgatttcctgcttctccttttcatgagtgttcctgtggtctctgcacctcctttctgagcagatgtctcaagtattagatgccatgtttgaaaaattggtcaaagatggggagcatgtaattg

SEQ ID NO: 25821 - DNA, 74 bp, Homo sapiens
ctgcaggtccagcttcttccccatgccagcaagagctccttaataagcatttatagtcagtttttggcagcaat

SEQ ID NO: 25822 - DNA, 98 bp, Homo sapiens
tcgtctttccgtcctctgaggcgacggccgcggctgcacaggagccaaaaacctgtatatcatctccgtgaaggggatcaagggacggctgaacagac

SEQ ID NO: 25823 - DNA, 74 bp, Homo sapiens
aagagactcttcatttagattggattctgaatatcagccgcagggccgtaggcagccatggcgcccagccggaa

SEQ ID NO: 25824 - DNA, 88 bp, Homo sapiens
cggggcctttccgtccgagaaattctcgcagagcttacaggcctcagtgaccccacacccccttcaggcccaagcctggatggtaccg

SEQ ID NO: 25825 - DNA, 100 bp, Homo sapiens
gcatccggggatttctgctcacctggagaagggatggaaatacttcaacaagatggccgccctgctcccccaatgaaaggccagcttcgaagaaaagctg

SEQ ID NO: 25826 - DNA, 100 bp, Homo sapiens
agaagccaaagagaaaggtacctgggttcaactaaagcgccaggtgattatcctgaaccatccaggccaaataagcgccggctatgcccctgtattggat

SEQ ID NO: 25827 - DNA, 100 bp, Homo sapiens
gcctgcagatcccggctagggcacggaccgcctaggccgaggtacagctggataacttgccaggaatgagtctcgtggctgggaaagcacttagctctgc

SEQ ID NO: 25828 - DNA, 75 bp, Homo sapiens
cctggagtattccctgaagctaacgcaagcatgtttttggcccagaggagcctctgctctcttagcggtagagca

SEQ ID NO: 25829 - DNA, 75 bp, Homo sapiens
gatagatcgtgtggtagaagttgtggaggagacaattaaagaacaaaatccagtctcatagcagaggagaatata

SEQ ID NO: 25830 - DNA, 118 bp, Homo sapiens
ggaattccggtcagggtcaagtcgtgttctgatcactactgacttgttggacactcatgaggaccatgatacttccactgagaatacagacgagtccaaccatgaccctcagtttgag

SEQ ID NO: 25831 - DNA, 101 bp, Homo sapiens
actgttgtgcctcttcatattggcgatcctgttgttgtgttaacagggcacaaccattatgtgatgtgtgctcagttccaccccacagaagacttggtagt

SEQ ID NO: 25832 - DNA, 49 bp, Homo sapiens
agtagaaaactggtcaaggaagctgacccagattcaagaacatggcatc

SEQ ID NO: 25833 - DNA, 129 bp, Homo sapiens
ggaccctgcccagcagaatttgtatagagatgtgatgttggagaactacagaaacctggtctccctaggtgatatccgacatccaaagcacgtccaacagacggatgtggctgcgacactggcgatagc

SEQ ID NO: 25834 - DNA, 90 bp, Homo sapiens
gccttcctctactggcccctgcttgagagtgcccgcccagtcaagttcctctggaagctggagcagttgctgatggagacggtgggctcc

SEQ ID NO: 25835 - DNA, 100 bp, Homo sapiens
ctgtcctgctgatgaagtctacgttcattcagggcctgctgtggaagaccagccccaaagatgatgatgtgcctgcagatatggttgcagaagaatcagg

SEQ ID NO: 25836 - DNA, 98 bp, Homo sapiens
cacattgagagcaaaatctacaagatgatgcagggaggaggacgtagacaagtttggcaacgagatcacccagctggcccggcccctgcctgtggagt

SEQ ID NO: 25837 - DNA, 97 bp, Homo sapiens
actgtggtgccatcctatactcagagtgctacttacagtaccacagcagttacatattctgattccactgtgtaaagtaattagattcaacatagac

SEQ ID NO: 25838 - DNA, 100 bp, Homo sapiens
aagaagaagatggagaagaaatagttacctatgatcgtggcacgcactacccttcttcctggcctcctgaagaccatagcagcaaatcgtaagatgcccc

SEQ ID NO: 25839 - DNA, 75 bp, Homo sapiens
gtgattaagcagagaatggagaagaaggttgattccagtggtagacggaggagaagtccatccccaccacccacc

SEQ ID NO: 25840 - DNA, 97 bp, Homo sapiens
tcaacaccaggactacagtaaggctgaaatcattgaagtgcttggagtgcagaactgaaagagagttgctggagaatgtaaccctaatccataaacc

SEQ ID NO: 25841 - DNA, 97 bp, Homo sapiens
gtattctgcatctgcttcctggtggcctgtgtcctgtacctgcacatcacccgggtccagctaaagttggtggttaagaaaggaaatcaaaccgaaa

SEQ ID NO: 25842 - DNA, 100 bp, Homo sapiens
cttcgcccggccgacgcctgcagctgctccccggtgcacccgcaacaggcgttttgcaatgcagatgtagctggacccacaaaccgtggagaccaagaac

SEQ ID NO: 25843 - DNA, 83 bp, Homo sapiens
gcgcgggaggtgttcgagaacgaccccgagacgttgcagagtgggcaggatcttaagacccgataggtgcagaacccatctgg

SEQ ID NO: 25844 - DNA, 98 bp, Homo sapiens
ggaaagtatgcaccagctgtcatcgtttgtcagaagaaagcagctggctcagaaaacagaatgaaatgaatgatgtgcctttctttgatatccaactg

SEQ ID NO: 25845 - DNA, 75 bp, Homo sapiens
cctgcgaccgccctgcgcttcgtgcaccggggcggtccgttgccaaagccagtgacaaatggcctacagctgtga

SEQ ID NO: 25846 - DNA, 100 bp, Homo sapiens
ggaacctggccctaagggagaccctggtgagaagagccactggctaaagctccatggaatagagattcctgaaaggacagattatgaaatggacaggcaa

SEQ ID NO: 25847 - DNA, 95 bp, Homo sapiens
acccggtggacgaaaatggtgccaagaaaattcaattctacagggagtggattatgactcacagtagcagtagtgatgatgatgatgatgatgat

SEQ ID NO: 25848 - DNA, 88 bp, Homo sapiens
agatggcggacagtgcggaactaaagatacactctgtgcagttttagagagagacacactcagtattcgagaaagtcgactttttgga

SEQ ID NO: 25849 - DNA, 90 bp, Homo sapiens
atgcgcgtgcgcagaaagcgtcccggggtgtttgatgatggtgatgagcgaacattgagacgtacctcactttgtctgaaaggagagaga

SEQ ID NO: 25850 - DNA, 82 bp, Homo sapiens
ccagtttttccctgaggccatttctttcatagatcgagggcacccagaaactgctcaacaaagacctggcagagctcatcaa

SEQ ID NO: 25851 - DNA, 50 bp, Homo sapiens
ggaggaccgattctttgagcacgagcgagggcggcactgctcacaggacg

SEQ ID NO: 25852 - DNA, 98 bp, Homo sapiens
cctctcgcaatattgcaatataggggaaaagcagacagcccacctgaggatattgaccataaggactcatatctcattacaagaagcatcatggccga

SEQ ID NO: 25853 - DNA, 75 bp, Homo sapiens
catgaccacagtggaccagctcgagtctcaagtggacaatgacccaacatgagtgaagtttcctgcaagaaacgg

SEQ ID NO: 25854 - DNA, 82 bp, Homo sapiens
ccccggctcagcccccggagtgcggagccgaccagacgaagttatacggaagcgtctcctcattgatggagatggtgctgga

SEQ ID NO: 25855 - DNA, 88 bp, Homo sapiens
ctgcctgttactcctggtgttggctacagcatgctggccatagggattggaaccctgatctacgggcactggagcataatgaagtgga

SEQ ID NO: 25856 - DNA, 50 bp, Homo sapiens
tgtagcattcaagacttcaaactgatagttttgaggcagctgtgccatca

SEQ ID NO: 25857 - DNA, 100 bp, Homo sapiens
tgcaacagctcactgtctgagtacggcgtgctgggtaactaggatttctacctcaaccgcgagacctatgcaaggacggtgtggaccaactcgcgcccgc

SEQ ID NO: 25858 - DNA, 88 bp, Homo sapiens
cacctccaggagcccagctcacagccaccggtaccttcttccagcccttgccagcatccagccatgggggatatgaaaaccccagatt

SEQ ID NO: 25859 - DNA, 88 bp, Homo sapiens
accccgtactggcaggcatggagccaacaaggagaacctggagctcaacggcagcatcctgagtgaggaagaatacaagcgattgagt

SEQ ID NO: 25860 - DNA, 76 bp, Homo sapiens
gaaactcctggttgagctcaaagttattttacatttagcaggacccagtgctccataaaggataatagtttccagt

SEQ ID NO: 25861 - DNA, 83 bp, Homo sapiens
cgggcacgacgggggcaccttctcggctgctagttatggaaacaaaggacatgctttacatcgtcactgaatttgctaaaaat

SEQ ID NO: 25862 - DNA, 100 bp, Homo sapiens
cgaaaggagcaagagcaagatcaccgtgacatccgaggtgcctttctccaaaagctgtcaaagctcgaaaaacagcagcagaggaaagaaaagaccagag

SEQ ID NO: 25863 - DNA, 100 bp, Homo sapiens
tcagctttaccatccctggaggagacctggcagcaggtcaagaagaagagagattggccctagaaactgccctgatgtacggagctaaaaagcccctcaa

SEQ ID NO: 25864 - DNA, 88 bp, Homo sapiens
ttacttggcaaagtacaacagctaccaaaatatacatctcaaattgtgggtagattcattaagacatcgctattgcggttccgaggca

SEQ ID NO: 25865 - DNA, 100 bp, Homo sapiens
gggacacgggagcggcccgcacacctgagccgcccggagaggagcctcggccccgtacccaggaggaggaagccaagaatctggtgagcgaagccatcgc

SEQ ID NO: 25866 - DNA, 90 bp, Homo sapiens
ctagtcgtggccggaggagtctcagagctgtcagaaagctgggatctagcaattgggaggcagcagacttgggtaatgaagagagaaaac

SEQ ID NO: 25867 - DNA, 75 bp, Homo sapiens
gtggtggctggttactaccatgccaatgcagctgtgaacgatcagagttatgtgtctcggtaccacgtgaaagac

SEQ ID NO: 25868 - DNA, 100 bp, Homo sapiens
tggaaatctgctctgagcctgtggcagcctcccctgcaccggcagtaagactttgaccccgacgcaggcttcagtgattgccgcggatcagaagcctgag

SEQ ID NO: 25869 - DNA, 82 bp, Homo sapiens
cccaggacaggtggcactctttcaggcttgggcactgtttaaaggaaagttccgagaaggcatcgacaagccggaccctccc

SEQ ID NO: 25870 - DNA, 50 bp, Homo sapiens
gcagtgcttcgtggtgactgaaaaagccttttggccataaccagtctcag

SEQ ID NO: 25871 - DNA, 51 bp, Homo sapiens
ctcagcgggaaaaacagtatgcgccgatgttatccaagataaattctgtgg

SEQ ID NO: 25872 - DNA, 83 bp, Homo sapiens
ttaatggttctatgaaacagtgtatcaaagtgtggactgagatatttacagaaagccttctgtgctctagtcgccttgaaaac

SEQ ID NO: 25873 - DNA, 101 bp, Homo sapiens
gaaaaagagcaaagataagaagagaaaaagagaagatgaagaaacccagcttgatatgttggtctatgctccatcagcaagcactgccgactacaataggg

SEQ ID NO: 25874 - DNA, 75 bp, Homo sapiens
ttttgatccacaaagaagctgacacagtttacttctttatgggaagatgctgttcccaaaactgctaatacacta

SEQ ID NO: 25875 - DNA, 75 bp, Homo sapiens
gttgccgttattacatcagatgggagaatgattgtgagtgttgcggagataggaacatgggagagaaacaatctg

SEQ ID NO: 25876 - DNA, 74 bp, Homo sapiens
attaatgcagtaaaacgcttccatatttatccagaggttagcatggcctcattgaaagaactagatcaaagact

SEQ ID NO: 25877 - DNA, 134 bp, Homo sapiens
gtctgcgtttctgataaattgaaaccagttttaattcttctgcccgggagacctaaccgccgaatgcgttcggagcctctgaagagccaatccattcaggatgggaaaccacgcaggcaaacgagaattaaatg

SEQ ID NO: 25878 - DNA, 83 bp, Homo sapiens
gccgggcgcgcagcgacggagctggggccggcctgggaccatgggcggttgcacactgggccacagaggatccagcaaggatg

SEQ ID NO: 25879 - DNA, 60 bp, Homo sapiens
agatgctgtcctggactttgtcaaacttgaattcggagtgatttaccactgcacagagga

SEQ ID NO: 25880 - DNA, 75 bp, Homo sapiens
gtcagagtgagggagatgactgctgagctccgagaggtgaacagagcccctgctgtctgtgatcctggaaacata

SEQ ID NO: 25881 - DNA, 98 bp, Homo sapiens
catgctcaacttctgtgaaaaggagaccaagaaacttatgcagagggagatgtccatggatgctggacgtaaagaaagaagtgatgcactcaattctg

SEQ ID NO: 25882 - DNA, 100 bp, Homo sapiens
ggctcggtgccttacaatgaatttggggaaagagttgtcaaacgaaacccatgtttctaatgaccagcaggagccattgacactggagaatgatacctac

SEQ ID NO: 25883 - DNA, 100 bp, Homo sapiens
ctgcctcagcctcactagtagctgggattacaggctaccctgtcatgatcaaggcctcagcaggtggtggtgggaaaggcatgcgcattgcttgggatga

SEQ ID NO: 25884 - DNA, 90 bp, Homo sapiens
gttaccgggagaggctgtgtcaaaggtctacttccccagcaggacagcatcattctcctatatcttctagacatcactcatcttcctcac

SEQ ID NO: 25885 - DNA, 83 bp, Homo sapiens
tgtatttggaacaaaaaaaggagatgcctggcagccccgctctctgcaccgcttacaaacacgcagatggcaagaagattgat

SEQ ID NO: 25886 - DNA, 80 bp, Homo sapiens
ggaggacctcacttccccggggtgtaataatgttaactgaggatgcctcattgatggacatgaactccttcagccctatg

SEQ ID NO: 25887 - DNA, 100 bp, Homo sapiens
gggctcgctccccgcggccctggtgccctcgccggcatgtgctgcctaccagaccaggttttggaaaatgacgatggtatgatctcgtgaaatcttgaga

SEQ ID NO: 25888 - DNA, 51 bp, Homo sapiens
cagctgcctcagttcttagcgcagagcatgcaagcggcaagatgtcctaca

SEQ ID NO: 25889 - DNA, 76 bp, Homo sapiens
aatgcagaaaaaagatcacaagcaactctggatgggattgcaaaatgggcaagaatatcacggcatgggcatgagt

SEQ ID NO: 25890 - DNA, 97 bp, Homo sapiens
aaaatccgcagcaggaagcttgggcttatgttcctgaggaagaattgaaggcagcagaaatagatgaagagcacgtggaggatgacgggctgtcttt

SEQ ID NO: 25891 - DNA, 98 bp, Homo sapiens
ttgaacagtcttcaaggtgggatcgtaataatggcaaaagacctcaccaagaatttggcatttcaaggacactttcttcatgagcaacaaaccccaaa

SEQ ID NO: 25892 - DNA, 75 bp, Homo sapiens
cgcggcggcagcagcagtgagagcccaagaggagagggtttgaccgcttcggaccagatggcacgggcaggaaac

SEQ ID NO: 25893 - DNA, 101 bp, Homo sapiens
tggatgtggaggggaatagactccatctatccatatgagaaggaacccagccagccggcggaatgcaagcagcagtaggaagcggaggcgggtgcctggca

SEQ ID NO: 25894 - DNA, 75 bp, Homo sapiens
tggtgattccctgcggtgtgcaagtccgactggaacaggcagttgtgaaaaacttcaggacaaaaatgtttcatt

SEQ ID NO: 25895 - DNA, 75 bp, Homo sapiens
gagaaagaactggcaaaagtcactatcaagaaggaagatctggagctaatagatttttcgggattgtcaccctac

SEQ ID NO: 25896 - DNA, 139 bp, Homo sapiens
tgttctccgacatctacaagatccgggagatcgcggacgggttgtgcctggaggtggaggggaaggtgtttgaaatgatcattaatcctggagataatgtcctcctagatgaacctgcttattcaggaactcttcaaag

SEQ ID NO: 25897 - DNA, 100 bp, Homo sapiens
gctttgcagctgacctacatctcgaaggtttcccggtcctctggcgaggatcctccaaggcgtctcacatgaaccggctcagaaacgccaaaatctacgt

SEQ ID NO: 25898 - DNA, 100 bp, Homo sapiens
ccaagcagaaggaggtctgcatcaatccctaccactataagagagtagaaagccctggcgtggtgaccaagatgaagatgcagaggaccattgtcatccg

SEQ ID NO: 25899 - DNA, 100 bp, Homo sapiens
gttctataaacatgtggtacagagtgttgagaagtttattcagaaagaggagcctgatctggttagtgcaatttatggccgagggatagcctatggaaag

SEQ ID NO: 25900 - DNA, 75 bp, Homo sapiens
tgcggagagaggctgcctcctgcagcccccatagcaggaggctactcacagtcgaactacaactccccggggtcc

SEQ ID NO: 25901 - DNA, 102 bp, Homo sapiens
cggaaactcatggaatatcctgcagaagaaaatggatttcgttatatcccctttagaatatatcagaatacttcagagagtcagagttgtgccagaagtctc

SEQ ID NO: 25902 - DNA, 100 bp, Homo sapiens
agaatggagtcttccatcaatcatatctcacagctcgcaaaggatctccttcatccctctccagaagaggagaagaggaaacacaagaagaaacgcctgg

SEQ ID NO: 25903 - DNA, 100 bp, Homo sapiens
cacgagcccagagggacagcccaaggtccaccgagcccgcaaaaccatgtccaaaccaggaaatggacagttaagtgggcagaccaacatccacctcagc

SEQ ID NO: 25904 - DNA, 82 bp, Homo sapiens
cgacaagccgctggcagccgcggatctcaccgccgctcaggctcaggcgctcaggactgccaggacccagaggattcacacg

SEQ ID NO: 25905 - DNA, 100 bp, Homo sapiens
acaagtgacttaagaagcaaaaaattcaagaaactgactaaagctatatgtggactggatgtctccccgttcaatgttgtggcctggcacgggaattata

SEQ ID NO: 25906 - DNA, 87 bp, Homo sapiens
ccacaggcctgcagaggtgccgacatggggcttaagatgtcctgcctgaaagtactgtaagattgatgttaaaggcatggtgttcac

SEQ ID NO: 25907 - DNA, 99 bp, Homo sapiens
cgcgtgcttcgtggcccggcaccgttccgcggacgtgctcgatgcttttactgactctgctatcagtgctaaagtgaatggcgaacacaaagagaagga

SEQ ID NO: 25908 - DNA, 75 bp, Homo sapiens
aaacaggcaacagttgtcctcaattgcgtaggaccagcatcctctggtatcacgattccaaaacccccaaagcca

SEQ ID NO: 25909 - DNA, 83 bp, Homo sapiens
agccacagcggcagctccagcccggcccggcagcgacatggaaggtgcaggtcttctgaacaaatgcctcctgaggatttctg

SEQ ID NO: 25910 - DNA, 100 bp, Homo sapiens
ggggaccctgtacgtgtacatcatttacggcatgtacttctgcatgaacatctccagccaggaaacagtatctcacctccctaaactggttaatagtggc

SEQ ID NO: 25911 - DNA, 100 bp, Homo sapiens
aactttgaaaatgcatctcagacatttgatgacctccctgcaagatttggttatagacttccagctgaaggtttaaagatactggtagacacagtctggg

SEQ ID NO: 25912 - DNA, 99 bp, Homo sapiens
ggccaaagcctgcccagacggctcacctgtgcgggatggaacaaaaggtgccagctattcaacagaaaagaacggtggcttttctaaaccaatttgtgg

SEQ ID NO: 25913 - DNA, 75 bp, Homo sapiens
agatctgggtgccatcattttctggttctgttgatgaccctcttccaggcataaaccttccactcttgaacaaag

SEQ ID NO: 25914 - DNA, 100 bp, Homo sapiens
ggagacgagaagcctgaaaagtcgcagcgagctggagccgccggagctgatgttctaatcatgtcagataaagatgatattgagactccactgctaactg

SEQ ID NO: 25915 - DNA, 75 bp, Homo sapiens
cgtgggggaccggctgttggcgggctttatcctgtggataaacgcagagtgaacgagtttggggagtcctacgag

SEQ ID NO: 25916 - DNA, 75 bp, Homo sapiens
cttcacagtcctctccaccaagagcctcttccttggccagaagtggcagctgaaatatcctaaactaattctccg

SEQ ID NO: 25917 - DNA, 50 bp, Homo sapiens
tcagcgggtaattggctgctcctaggttttgcgtgtgaagctgtgtggaa

SEQ ID NO: 25918 - DNA, 100 bp, Homo sapiens
cagaagccactggagaaaaacggccaagaggcagacctaggaaatgggactgggaattcccacatttcatgggagatgttgatgtaaatctccctggttt

SEQ ID NO: 25919 - DNA, 83 bp, Homo sapiens
tttggatgatgatggatccatttctcctattgaggagtcaacaaaccagggtggttatgaccgctactcaggaggaaattaca

SEQ ID NO: 25920 - DNA, 75 bp, Homo sapiens
ggagaaaaaagacagaggagtgacgagggaaagatatggagagagatttgaaggctgactcaaacatgccactca

SEQ ID NO: 25921 - DNA, 100 bp, Homo sapiens
accagccacccgagggtcatccggatttcccaccagagtgtggaacccgtggtcatgatgcacatgaacattcaaggaatttgctgacacaatatcttcc

SEQ ID NO: 25922 - DNA, 97 bp, Homo sapiens
aaacatgctagaattacctggaacttcatcatcatctacttcacaggaattgccatttaaaagacagctttgatttctggctgcaaaaaagatatga

SEQ ID NO: 25923 - DNA, 100 bp, Homo sapiens
gtggagagagcgagctgagtggttgtgtggtcgcgtctcggaaaccggtagcgcttgcagcatggtgaaattgatcttcaaattctctccaaagttcagg

SEQ ID NO: 25924 - DNA, 82 bp, Homo sapiens
gggagaacggaaaactcccaacttcctgggttggattcattcactggaaatgttcagaactcacttcttgatgaggaaaaag

SEQ ID NO: 25925 - DNA, 82 bp, Homo sapiens
cgcgaaggatatcggtttcattaagatttttggaagtaccagcacagtgacgcttcctgaaaccttgttgtttgtgtcaacg

SEQ ID NO: 25926 - DNA, 74 bp, Homo sapiens
taccaatcgtgaaaactatattcacagggtttttaatgaccacaacaagcaagcatgcagcttactgcttgaaa

SEQ ID NO: 25927 - DNA, 83 bp, Homo sapiens
catattgtgtcttccccggccggtccctcgcctcccggccgagctgacggcccgggtcctttttgtgctgattgtgctgagcc

SEQ ID NO: 25928 - DNA, 100 bp, Homo sapiens
ccaaagcaaatccggccatgaagactgtctacaagttctgtctttggtgcaacactaacaaggcttgtctggactacccagttacaagcgtcttgccacc

SEQ ID NO: 25929 - DNA, 100 bp, Homo sapiens
cttatagctgctacaatttctagtcagatttcaggttcagtgacatcagaaaatgtgtccagagattacaagggccggtgcataaacttctcccgagttc

SEQ ID NO: 25930 - DNA, 100 bp, Homo sapiens
cgcagtggtcgcttcttctccttgctctcaaatcgactggaagtggtgaaggaatttctgagaaacaatgaggatcttagaaatggccttacagaagata

SEQ ID NO: 25931 - DNA, 80 bp, Homo sapiens
ggagaaaatgaatgccaaatgggacacgatatgcctcttcatgttcgacgcagtagtgacccagctctaattggcctctc

SEQ ID NO: 25932 - DNA, 90 bp, Homo sapiens
gatggaacctgagctgggtctctgactcacttctgactttaggaagttaaatgaagttcgaaagagattgaatgagctaagagaattagt

SEQ ID NO: 25933 - DNA, 78 bp, Homo sapiens
aaacatgcaatgaacccaaaaggtagaatttcagaatggcttctggaacatgtttcctgttaaaaggcctagaatatc

SEQ ID NO: 25934 - DNA, 100 bp, Homo sapiens
cggacttcgacacctacgacgatcgggcctacagcagcttcggcggcggcagaggcacagtgaacactagtctgaatgtataccgaaataaagatgcctt

SEQ ID NO: 25935 - DNA, 101 bp, Homo sapiens
gccatccagagctgtgcctcccagcaccacagtccttctgcagtccctcgtccagccacccccagctggtgaaactgcgtgctgtaagctgggaccagctt

SEQ ID NO: 25936 - DNA, 95 bp, Homo sapiens
gtacatctgaaagccgggaaatgaccatgctcgacagctgaccaaggccatgatgcgaaaggccacggccagccgcctggtcacgcagcgcgatg

SEQ ID NO: 25937 - DNA, 75 bp, Homo sapiens
gcagcatttaagacctcctatggcaagattgagaggatccagaatccagatctctggaatagctaccaggcaaag

SEQ ID NO: 25938 - DNA, 100 bp, Homo sapiens
ctgtgcgagagcctcctcacttgggtgtcatggagaaactccagctgggcccagagattctgcagcgggaaaatccaaggcttatttatgccaggctgag

SEQ ID NO: 25939 - DNA, 89 bp, Homo sapiens
tgctgcgctacctggtggtcgccctgggctgctttgaattgtattccatggtgccatctatttgtcctctagaaactcttcataatgcc

SEQ ID NO: 25940 - DNA, 75 bp, Homo sapiens
ggaaaaactggagagcttcatcaaaaatagtgatagctttgataagcaaactaggcgtggcaactgctggctgcg

SEQ ID NO: 25941 - DNA, 82 bp, Homo sapiens
gaacaaactcgaagaacagctgtggaaagaagttgcaaaacactggtacctggagtagaacagaaaaattattatgtctgtg

SEQ ID NO: 25942 - DNA, 82 bp, Homo sapiens
gaagccgaaaacaccctgcaatctttcagacagtctgaacaacccagtcctgccagctccagctccagctccagctccagct

SEQ ID NO: 25943 - DNA, 90 bp, Homo sapiens
tgggcagcgggaagcgaggccccagcaccatgtatgtgttcggtggtttcaatagtctcctcctcagcgacatcctggtattcacctcgg

SEQ ID NO: 25944 - DNA, 83 bp, Homo sapiens
caatgacaccaagttggacgctatgctggaagaatttaagaaagggacaggccttcagtatttggcatcacctttacatggag

SEQ ID NO: 25945 - DNA, 98 bp, Homo sapiens
gcggctgcgctggcgcggcttttggcggcctttctgctcctcgcggcccagggggggccctcagcctcttggccttgaacgggctgttcatcttgatt

SEQ ID NO: 25946 - DNA, 88 bp, Homo sapiens
caagatattgtttacaaattggtaccaggcctccaagaagagaactcaatttcctgtatctactgagtctcaaaaaccccggcagaaa

SEQ ID NO: 25947 - DNA, 102 bp, Homo sapiens
gcggaggctgccatggacgacgaggaggagacgtaccggctctggaaaatccgcaagaccatcatgcaggacaccatgtaaaattgaacctagtataaacca

SEQ ID NO: 25948 - DNA, 95 bp, Homo sapiens
gaatgcagtaccctcagcagcaggagtatgcatcaacaattgtgtcaggaacttcaaagggacaatgtggacctatttgtacagtcttcattatc

SEQ ID NO: 25949 - DNA, 75 bp, Homo sapiens
cggaagcagaaggcccgggaagctgctgctgggtgctggagaatctggtaaaagcaccattgtgaagcagatgag

SEQ ID NO: 25950 - DNA, 75 bp, Homo sapiens
taggaatgggatcctggtgcttccacatgactctgaaatatgaaatgcaggtgccttatgcccgctcagaggccc

SEQ ID NO: 25951 - DNA, 75 bp, Homo sapiens
acggagccgccttggcctcggggtctccctacaccaacggccggaaggtggtggtcgtacgctgtgaaggcatca

SEQ ID NO: 25952 - DNA, 51 bp, Homo sapiens
agtattcacagggaaagctgtgaggatgtgtggagttggctgttacgacat

SEQ ID NO: 25953 - DNA, 51 bp, Homo sapiens
gtgaaatgttcactgttaaagagggtacggtatatcttgaatgtcactcga

SEQ ID NO: 25954 - DNA, 90 bp, Homo sapiens
gccggcagcggcgcgggaggccgtgcggctgtcaataccagcaaatatgcagaaagctatcggatccaaacctatgctgaatatatgggg

SEQ ID NO: 25955 - DNA, 101 bp, Homo sapiens
gcaggaagaacccatcgggcagctacacatcttgaaagagaagctcttcctgtgagaataatgcatatactgccatgtcagattcctacttacccagttac

SEQ ID NO: 25956 - DNA, 100 bp, Homo sapiens
ggcaatttgtgatggaaacttcacaattcctgataattctcgatattctcaagacatgcactgcctaattaacattccacttcttccatctattacatct

SEQ ID NO: 25957 - DNA, 100 bp, Homo sapiens
cttctggtgatgtgagctgtgtggatgaaatcctaaaaatgttctcaaatagtgatgaagctgtaatcaataaaaaacttcccaaagaactcctgttacg

SEQ ID NO: 25958 - DNA, 100 bp, Homo sapiens
agggcaaggtgtctggctgcgcgtttggctgcaatgagctcggcctcggggctccgcagggggcacccggcagcagtatcctggtgtgaaccagctatcc

SEQ ID NO: 25959 - DNA, 100 bp, Homo sapiens
gcggcggcggcggcggccgagggggatggagcgagcgccgagccgggtcagagctgtaggtaaaacttgcctactgatcagttacacaaccaatgcattt

SEQ ID NO: 25960 - DNA, 100 bp, Homo sapiens
gagaggcctgcgagcactccggcgaggccaaggccttccaggactatgtcacagaagatgtgaattcaagtatcaagacatttttttgtcccaatgatac

SEQ ID NO: 25961 - DNA, 78 bp, Homo sapiens
ggacagaaatcattatcttagccaccaggccttcccttcttcttggtggtgttcttgagtaagataatctggactggc

SEQ ID NO: 25962 - DNA, 75 bp, Homo sapiens
gtccccccaagtctcctgaagaggaaggagcggtgtcctcttaagaaaatgcttcttctgcacggtacctgagat

SEQ ID NO: 25963 - DNA, 100 bp, Homo sapiens
ggtccgatacatgaagatcattgagaaaagtggttaccaggccctgccctgggttcgctacatcacccagagtggcgacagttgcatctataaaaaggtt

SEQ ID NO: 25964 - DNA, 75 bp, Homo sapiens
gtggagagagggcaccaccaaaagtgaggtcttctacccaggtttctgcataaagaccaactcctcggaagggaa

SEQ ID NO: 25965 - DNA, 74 bp, Homo sapiens
cagagggacccacagtttcatttcaatggaaccaaagatcttcataaacaatgaatggcatgattcagtgagtg

SEQ ID NO: 25966 - DNA, 83 bp, Homo sapiens
ctgcccactctagaggagctgaaagtagatgaggacaggaagatgtcacccaagcgcatagctaaaagaaggtcccccccagc

SEQ ID NO: 25967 - DNA, 139 bp, Homo sapiens
caggactgcactcctctgctctgcctggctgctcactgcctccttctctgcccagcagcacaagggcagtttgcagctcaagaggtttggatatggaccttcttcaattcctggccttcctctttgtcctgcttttgtc

SEQ ID NO: 25968 - DNA, 100 bp, Homo sapiens
tactgcgtctaccagagcatggtgctcttcttcttcgagaattacaccggggtccaggttattcagcttctcaaggctggaaaagcgaaggaagtttcct

SEQ ID NO: 25969 - DNA, 100 bp, Homo sapiens
ggcgaagggaatcgcaaggctcttccctgaccattttctactgtccctgcgcgaggtatagacacgtgtggccgtttacgctgtaggatcctcattccca

SEQ ID NO: 25970 - DNA, 98 bp, Homo sapiens
tgattgcaaaagggaaaaatgcatctgaactgtttcctgctgttgtgaagaatgtggccagtaaaaatattgagagatttatggagaatagcagcata

SEQ ID NO: 25971 - DNA, 83 bp, Homo sapiens
acagtcctcgtcagcactgactttcagctatggaatcggttacgactatggctatgtctgcgtggagttttcactcttggaag

SEQ ID NO: 25972 - DNA, 75 bp, Homo sapiens
gttcctcatcaacaccaaggatctgcaggaagacgcttccctcctggggccaggccctgctgtcacaggacttcg

SEQ ID NO: 25973 - DNA, 95 bp, Homo sapiens
gcagtcgcgaagcagcaaccatgccctcttcgcccgacctggaccgcatcgcggcgagcatgcgcgcgctggtgctgcgagaggccgaggacacc

SEQ ID NO: 25974 - DNA, 82 bp, Homo sapiens
cacaaggggtcttcctgtggccctcaaacaaaaaatcactgcattacatcagcaggtctggtgagctgtaccttctttctgg

SEQ ID NO: 25975 - DNA, 83 bp, Homo sapiens
gtttggggttggtagaaggtgttattgggaaaattcaacttcattcagcaagggcaagtattttgtaaccttcccatatccat

SEQ ID NO: 25976 - DNA, 90 bp, Homo sapiens
atacaaggacctgtggaatatgagtgatgacaaaccctttctatgtactgcgcctggatgtggccaggatctaccaatgtattggcacat

SEQ ID NO: 25977 - DNA, 101 bp, Homo sapiens
tttgctgtgaagttcaatgcactggaattagatgacagcgacttggcaatatttattgctgtcattattctcagtggagagtctcgctctgtcacccaggc

SEQ ID NO: 25978 - DNA, 75 bp, Homo sapiens
aaggaactgctgaaatgtaaacaagaagccagaaacttacaggggataaaggaatcggatataacatcatccggg

SEQ ID NO: 25979 - DNA, 101 bp, Homo sapiens
gtactctggtttccagcagtcggctgacaggtgttttctttgtggacatctgatcatggacatgaaagcatgctctgaattgccatcggatgaagcctgct

SEQ ID NO: 25980 - DNA, 86 bp, Homo sapiens
atttgttaaggattccaagtaactcttatttggttacttttcacatagaaccatatagcaatcgagatgatcaaaacatgtacaaa

SEQ ID NO: 25981 - DNA, 74 bp, Homo sapiens
ctcgtatgcaacctcaggcttcagccagttggtttcagtgctgatgaaacttgggactctgcaatagatacatg

SEQ ID NO: 25982 - DNA, 90 bp, Homo sapiens
ggactctgcaaattccctaaagtaggaggaaaaatgaccatgtccaagtccgaggatcagaaggactgtacatggtgaatggaccaccac

SEQ ID NO: 25983 - DNA, 75 bp, Homo sapiens
catcaaacttgctaagcggcggatacccccagcttctaaggaccctgatgcttggtgtgacctgagtaaatttga

SEQ ID NO: 25984 - DNA, 82 bp, Homo sapiens
cgcgagcacagagcctcgcctttgccgatccgccgcccgtccacacccgccgccaggggcactatggcagacaaagttagga

SEQ ID NO: 25985 - DNA, 90 bp, Homo sapiens
cttcaagtgaagttaatctgaggtgaagcaaacagaaaattgtggaggttttgttgaaacaagtgttgaaaatgttaaaggctgtgctga

SEQ ID NO: 25986 - DNA, 75 bp, Homo sapiens
tttgtgattgtccgcaggcctaagctaaatcgagagaactttccagggtctgaggcttcaggaccccaacttctg

SEQ ID NO: 25987 - DNA, 104 bp, Homo sapiens
tgctgcttatggcggcgctggagagggggcgctgagctgttggggctgaaggtgatgtggccgccctcaaccgacgcatccagctcgttgaggaggagttggac

SEQ ID NO: 25988 - DNA, 82 bp, Homo sapiens
ccgaggccttcaagtgcatgatgtgcgatgtgcggaagggcacctccacccgccccatggctgggggttatggagtgatggg

SEQ ID NO: 25989 - DNA, 89 bp, Homo sapiens
agctgggagagactggaccagaccatgggcctgagcatcaggtaaaaagaacgtattctcatggtacttacagagctggcccaatgaga

SEQ ID NO: 25990 - DNA, 82 bp, Homo sapiens
gaaggaattcctcatttgcaagagagacagttactggaacatagagattttatagggttgttgatcattatgaaaatcctag

SEQ ID NO: 25991 - DNA, 83 bp, Homo sapiens
tttgaagacgttccttgaggaggtttgaaaaactctcgtggcattatccttcagtggggctattggactgacttttcttatgc

SEQ ID NO: 25992 - DNA, 100 bp, Homo sapiens
aaggccagcagtccttcagggaagatgggaggcgaggagaagccggtgcttaatttacccatttctgatgcgaggaggaaagcctatgccactgttggcg

SEQ ID NO: 25993 - DNA, 49 bp, Homo sapiens
aactggaggagtcccgctcgaagctaggagtccaatgtgctgattgctg

SEQ ID NO: 25994 - DNA, 90 bp, Homo sapiens
tggctctgcagaggcaggggaagctctttggggcagcagaagttcagcgctttaacaggggatgatggaactaacaaagaagccacaagc

SEQ ID NO: 25995 - DNA, 100 bp, Homo sapiens
gtaatggagaagttgatgactctcgtgaacatagctttaatagggtggtgatcgtggcagaggtggccctggtggcatgcggggaggaagaggtggcctc

SEQ ID NO: 25996 - DNA, 90 bp, Homo sapiens
cgagactaggtttgaggcggccgtgaaggtgatccagagtttgccgaagaatggaaagtgatgaagcattgggcccaacaatgatgagtt

SEQ ID NO: 25997 - DNA, 100 bp, Homo sapiens
tatttgaagtatttgacgaaaatagactgtgcatgcaagatatgggaaatactaaagcaagactactctatgaagccaatcttccagagaactttcgaag

SEQ ID NO: 25998 - DNA, 100 bp, Homo sapiens
agaataattctgaaagaaagaaaacaaagaaaaacatactccagaattcctaatagaacagtccagtccaggtgcagcagcaaggagaacattctcagag

SEQ ID NO: 25999 - DNA, 100 bp, Homo sapiens
gggggactctgtgtgagggaaagaaaacaatttctcctgctctgcagcttctgttcagggtctttttggagttcctgagctgagtgccccagaaggattt

SEQ ID NO: 26000 - DNA, 75 bp, Homo sapiens
ctgggtcgggaagacatccatggaagtgaagatgcaaatgttccagtttaattggttggggtcagataagaagag

SEQ ID NO: 26001 - DNA, 100 bp, Homo sapiens
aaactaggaagaggaaattaactatctgtacttataagtacgtagagaaatcgacactcttaatgaacgtttagctgctgaaggacaagcgattgatgga

SEQ ID NO: 26002 - DNA, 90 bp, Homo sapiens
caaagattcagagaggcgtgagcagcccctctggccttcagactgtgtacagtgccctgggcctgagggatgcctgccgctccctgccgc

SEQ ID NO: 26003 - DNA, 90 bp, Homo sapiens
ctgatgacgatttggatgaatatacccttagaaaaaatgtggcagtgaaagaccacagcaagattctttcattcgtctcctcctagcctg

SEQ ID NO: 26004 - DNA, 100 bp, Homo sapiens
gcgccgtcgcgccactcctccgatgccggtggtggtgtgcacattgagccccggtatagacagttcccccagctgaccagatcccaggtgttccagagcg

SEQ ID NO: 26005 - DNA, 75 bp, Homo sapiens
aaaagctgaaaatttacttctggatgccaatctgaatatcaaaatagcagataatgcaccccggaccatatttat

SEQ ID NO: 26006 - DNA, 74 bp, Homo sapiens
ggcttcatgattcctttgttgaaaatgaagactatgcaggttatatctaatagctcttcaagtctgcaataaaa

SEQ ID NO: 26007 - DNA, 75 bp, Homo sapiens
gaaaagtctccattgctcgggggagaaacaaagggacttaaccaccaccatgtcgagcaaaagaacaaagaccaa

SEQ ID NO: 26008 - DNA, 100 bp, Homo sapiens
gtcggaggccaaacacaccgtatttcatctgtagcattcaagacttcaaactgaacaagcgggagcctgtgtcaggaaagcatgtcagagcagagctgcc

SEQ ID NO: 26009 - DNA, 90 bp, Homo sapiens
ggtcccagtgttgcttgtgtgaagaaagcctcctaccttgattgcatcagggccattgcggaatcagagatcattgatttcttcctgggg

SEQ ID NO: 26010 - DNA, 130 bp, Homo sapiens
cctttgaccttctgccatgattgtgaggcctccccagccacgtgaaactggaggtggggaagacagggctccagctaccacaggacgggctctgggtatagccgttccagtcagggacagccgtggagag

SEQ ID NO: 26011 - DNA, 51 bp, Homo sapiens
ctgccggacgccctatcgcaagcagggctacaccaagtccattgatatttg

SEQ ID NO: 26012 - DNA, 75 bp, Homo sapiens
gcagttgtgggcaccttgtatgcgggactggtttggctgaaagacaaagaagcaacacattgtaaactttgtgaa

SEQ ID NO: 26013 - DNA, 75 bp, Homo sapiens
ggaactcctttataagtgtcagctgtgaggaatgggtaccacagaccatgtcatcgtcctggcgtccacgaaccg

SEQ ID NO: 26014 - DNA, 83 bp, Homo sapiens
cttcaaacttactcctgtggcctatggctggatgagaatgaggatatgcacagtctcctactgactgacagcagcactctact

SEQ ID NO: 26015 - DNA, 73 bp, Homo sapiens
agtatttttactgatggagcaggaactcactgctgatgaagatatttcacgggaaatgatcttcattggttag

SEQ ID NO: 26016 - DNA, 74 bp, Homo sapiens
gaagtgcagaggtttttttctgaggcatttcatccttcatgaagccattcaggattttgaattgcatatgagtg

SEQ ID NO: 26017 - DNA, 100 bp, Homo sapiens
agtggcacctgcgcgaagctggccaaagcctgcccagacggctcacctgtgcgggatggaacaaaagaaatactacccgccggactttgacccatcaaag

SEQ ID NO: 26018 - DNA, 101 bp, Homo sapiens
ctgagtgtggacgagtagccagtgaagataatgaatgtcgaatgtgactgactagcagcttcattttgaagcgtgcaatggaattgagttttgccctggta

SEQ ID NO: 26019 - DNA, 75 bp, Homo sapiens
gtggagaggcaagcacggattccaggctcttgcagccaatgccggaacaggatttgctgttgctgagcctcaaat

SEQ ID NO: 26020 - DNA, 100 bp, Homo sapiens
ctacctatcctcagctctatgtttctggagagctcataggaggacttgatataattaaggttttcctttggaatatggataaatacaccatgatacggaa

SEQ ID NO: 26021 - DNA, 97 bp, Homo sapiens
aacactggggtcatcaatgctcctgagaagatcaatgaggaaatctccgtgaagcaccttccgtctacagagcctgacccccacgtggtccgtatcg

SEQ ID NO: 26022 - DNA, 100 bp, Homo sapiens
gcgcaggatttcaaaaccgacctgaggtttcagagcgcagccatcggtgcgctgcagacaatgcagatcttcgtgaagactctgactggtaagaccatca

SEQ ID NO: 26023 - DNA, 100 bp, Homo sapiens
gatgttttcacctcctgtgagcagtgggaaaaatggaccaacttctttggcaagtggacattttactggctcaacattcctctgaatattgatttgctga

SEQ ID NO: 26024 - DNA, 100 bp, Homo sapiens
tatacagggacgtgatgctggagaattataggaacctggtctccctggccctactgccaataaagggaaaataagagatgctcatcgacgaattatgctt

SEQ ID NO: 26025 - DNA, 95 bp, Homo sapiens
cggacagtcatcaccatgggccgggatcacattctgattacaccaaatcctactgcaagcgagtttattcctaaaggaggatcaacctccaggct

SEQ ID NO: 26026 - DNA, 100 bp, Homo sapiens
agcccctctccagctcgaaatcacctccaatggaagtccgggcacatggcggagagcctcaccaacatgccacggcactccctctacatcatcattggag

SEQ ID NO: 26027 - DNA, 100 bp, Homo sapiens
atgaaatccgaaaggtctgtgataatacattagatattatagcggagtacaagcgcaagctagccagagtttccctggtgcgcaaagaactcaggtcccg

SEQ ID NO: 26028 - DNA, 74 bp, Homo sapiens
cctgagagaacagggtggccgcttggtccagacaaagaggcagctgaacgtctttcaaaaacagtagatgaagc

SEQ ID NO: 26029 - DNA, 82 bp, Homo sapiens
ctaggttctgcggcacgggatggcggaggcgcctcctgtctcagatatgaggccccaggattcctggcgaggtcctcctccc

SEQ ID NO: 26030 - DNA, 75 bp, Homo sapiens
tggaaccgcaggactgcagggtctctccagttttagaaagagcgttttcgctacgtaaagcacattcgataaagg

SEQ ID NO: 26031 - DNA, 100 bp, Homo sapiens
ccgtcttcgacctcagttacttcatcgtctccatcctctacctcaagtatgagccaggcgaggaacaagattccctggacacctccagtgagatcaggtg

SEQ ID NO: 26032 - DNA, 75 bp, Homo sapiens
cgtgaacgcgcccctcggggctccagtggagagttcttacggatgaaacaggcgcctatttaatcgacagagacc

SEQ ID NO: 26033 - DNA, 50 bp, Homo sapiens
ctgggacttcccgtccgcggcgtggagggcttgcagccaatttactggag

SEQ ID NO: 26034 - DNA, 96 bp, Homo sapiens
cacgaactgctggacgacctcggcgaggtgcccaccatcgagtccctgataggatcgaacctgcaagcacttatagacagtactcgggaaccaaat

SEQ ID NO: 26035 - DNA, 100 bp, Homo sapiens
aaagtgaggcagctgcaaggagggcggcgggactgcactcgagtgtccagacctgctcgatggaagtgtttggattgtgagctatttcagaactgttctc

SEQ ID NO: 26036 - DNA, 87 bp, Homo sapiens
ggaaaatgaagtggatgccttttggtgctttgcctcttacatggaccaaatgattgctacgctttacatatggtccttcatttcctg

SEQ ID NO: 26037 - DNA, 100 bp, Homo sapiens
caggaccaaaagaggaagatagtcttgggacccttgcatggtgtttcaaagggtggtgaagaactaagtgtatgtggtagaagaccaaagaagagatgag

SEQ ID NO: 26038 - DNA, 90 bp, Homo sapiens
ggaagattcacactgtaacattattcacactgagttatttgctggtataaaggatggagaaagcctgcagctctttgaacaaagttctcg

SEQ ID NO: 26039 - DNA, 99 bp, Homo sapiens
tcaagaatcgccgcgggggaccgcccttcgccttcgttgagttcgaggacccgcggttttaaaatcaaagatgggaaaatcggagaaaattgcccttcc

SEQ ID NO: 26040 - DNA, 99 bp, Homo sapiens
gcccagacgcggcacagagagggcctgggagcttgctgcagcttcagccctgggcgctgcctatggcacagccaagagcggtaccggcattgcggccat

SEQ ID NO: 26041 - DNA, 100 bp, Homo sapiens
gcgccgccccgtcgtcgtctgccttcgcttcacggcgccgagccgcggtccgagtcctggcattgatgtgcctgctccagacatgagcacaggtgagcgg

SEQ ID NO: 26042 - DNA, 95 bp, Homo sapiens
acaacaatgagatcgtggacaagatcatgggcaaaggacagatccagatgatatcatcaagttgaatcgaaaggaagggaagaagcagaattttc

SEQ ID NO: 26043 - DNA, 90 bp, Homo sapiens
agaatgctctgcacccgttgatgctaatgtaatgcttgaatatgatattgatgaagctcaggcattgttggaaaagaatttatcgactgc

SEQ ID NO: 26044 - DNA, 100 bp, Homo sapiens
cacctcggtgtctgcagcaccctccgcttcctctcctaggcgacgagacccagtggctagatgaggtttatataactttccaagacaaggaagttgtgca

SEQ ID NO: 26045 - DNA, 89 bp, Homo sapiens
gtcagcagcccagcccctacccaagacacccacatggaaacggacctgctcagcagcctgaaagaccacagcaagattctttcattcgt

SEQ ID NO: 26046 - DNA, 75 bp, Homo sapiens
tacagccatcaagaggatcttaaagtgtggtctttagtggaaaaaaaggtaaatatgctgaagatatatttggag

SEQ ID NO: 26047 - DNA, 82 bp, Homo sapiens
cccaatgcctttgatggaccaattaccataaattagatcctgtgctgaaagagaaaccaagaaaaaagatgacattccagaa

SEQ ID NO: 26048 - DNA, 100 bp, Homo sapiens
ttctgcaccccgcactgcccagcaccttccgctcagtcctcggcgcccgcctgccgcctccggagcgcctgtgtggggtgaatcctggttctttcgttgg

SEQ ID NO: 26049 - DNA, 75 bp, Homo sapiens
ttggcctgtccctcacatccgatgcaccctttttgtcagattatcaggatgaggatgaagtcttgctctgtcacc

SEQ ID NO: 26050 - DNA, 100 bp, Homo sapiens
ctcggatcagtatcttgccacagaaaccatacaagctaaggcagctggataagcacagccaggccacagcccagcagctggtgcagctcctcagcaagca

SEQ ID NO: 26051 - DNA, 100 bp, Homo sapiens
tggcaggagcatgggcttcggaggcctatagcccgcagtgtctttggtgcaacactaacaaggcttgtctggactacccagttacaagcgtcttgccacc

SEQ ID NO: 26052 - DNA, 87 bp, Homo sapiens
tggtgagacggagctatcggcgccgcggcaagagccagaacatcgggtcagaagttgagatttccactatcgagaaacaacggaagg

SEQ ID NO: 26053 - DNA, 83 bp, Homo sapiens
agagcagagcggagggagccccagacacggagagaacattgaaagtattctctaagctatttgaagagagtgactaaatgcac

SEQ ID NO: 26054 - DNA, 75 bp, Homo sapiens
tggacatcgccatgctggtggagaatcagatcattcccagtgaccccttctgggtgccaactactgaggaggaat

SEQ ID NO: 26055 - DNA, 100 bp, Homo sapiens
ctctccaccatcgactacgtggaggacggaccagttgctcttctgtgatgactgcgatcgtggctaccacatgtactgtctcaccccgtccatgtctgag

SEQ ID NO: 26056 - DNA, 100 bp, Homo sapiens
ggagttcgtctcttacgtctgcggaagtgcagctgcctcagttcttagcgcaggtacaggtttgcagattccgccagcagcacagcaagctctacagatg

SEQ ID NO: 26057 - DNA, 75 bp, Homo sapiens
cgcttcaccacttacgaaatcagggtcaagctgcagcaaaaaattattcctgatcaggaccaactgatggcaata

SEQ ID NO: 26058 - DNA, 90 bp, Homo sapiens
atactgcccctgcattgttggtattgaaaacccaaacctttattgttcaaaggagatcacagatatccctcgtctaatcctgaaagccct

SEQ ID NO: 26059 - DNA, 90 bp, Homo sapiens
agtactttagaaccaattataagtagttcaggtcttgccaagaaatattgctgttccttactgccaactctccaagaaactggaactgcc

SEQ ID NO: 26060 - DNA, 100 bp, Homo sapiens
gctcaaccctgccaacgtgcccactcacctcatggtgctctgctgcgtcttacggggcaagctctgtgtgattgattggaagacatcagagaaaccaaag

SEQ ID NO: 26061 - DNA, 88 bp, Homo sapiens
aagaacgacatgatgcaatcttcaggaaagtaagaggttcccaaaccagatctagattcttacgtgtttctgagagtgagagaacgac

SEQ ID NO: 26062 - DNA, 74 bp, Homo sapiens
agcgggatcaagctgtgtgcattagtacaaatggtgacaatggaatggactctgatatggaagaggaagcagat

SEQ ID NO: 26063 - DNA, 76 bp, Homo sapiens
ctgaccagggggaatccatgaaacctgttgctgctaaaaccttgcctttttataaggactacttcaatgttcctta

SEQ ID NO: 26064 - DNA, 74 bp, Homo sapiens
ttgagcctgtgaaggacactgacattcagcatctcataatctatcctggggaattcagctgcctcccagggtga

SEQ ID NO: 26065 - DNA, 80 bp, Homo sapiens
ccgctgcggctcatcgaccgggagagcactacaaacaccactggtttcccgaaaagccgtccaagggctccggctaccgc

SEQ ID NO: 26066 - DNA, 75 bp, Homo sapiens
cctagccgaagcctcctctgtggcgctcagcaactgcgatgggctgcttcgagagctgtgcccaggagtgaacaa

SEQ ID NO: 26067 - DNA, 115 bp, Homo sapiens
caagcggcctaaactctcatctccggccctctcggcgtccgccagcgatggcacagggtatcgggtgctgcttcggtatgaaggctttgaaaatgacgccagccatgacttctgg

SEQ ID NO: 26068 - DNA, 100 bp, Homo sapiens
ccccggagccatgggcaagtgcagcgggcgctgcacgctggtcgccttctgctgcctgcagctggttaaaacgtttggacctctggccgcaggaaatggg

SEQ ID NO: 26069 - DNA, 98 bp, Homo sapiens
gaagtcctacagagttatcaggttccagaccctgccttctcttctgaaaggctctgtgtgctccgggatggagcaggtgtgcagagggtgagaaccca

SEQ ID NO: 26070 - DNA, 110 bp, Homo sapiens
gagcacagagcctcgcctttgccgatccgccgcccgtccacacccgccgccagggtttccaggcctgaggtgcccgccctggccccaggagaatgaaccagccgcagagg

SEQ ID NO: 26071 - DNA, 83 bp, Homo sapiens
atacccaataaccaggtgcttggcaaaatcgagcgggccattggtgtacgtgaacggagagtgggtgaccaacatcagcgagg

SEQ ID NO: 26072 - DNA, 100 bp, Homo sapiens
tgatatccttctcaaccttgtgggatgtgaaaactctgttactgaagtggatgacgtagtagatgaaagtgatgacaacgatgatattgatgtagaagct

SEQ ID NO: 26073 - DNA, 100 bp, Homo sapiens
ttgtgtcctaccatggtatttgctaacgtttagagagtgcttccccttgccgagcactgggtatttgaaatatctcaccaaaaaatatttgaagaagaat

SEQ ID NO: 26074 - DNA, 80 bp, Homo sapiens
caacgacgcggacatggtcatgagctttgtgaacctggatcaacagtacaaattctgaagtttgtaaacttgctgatggt

SEQ ID NO: 26075 - DNA, 75 bp, Homo sapiens
aaggcaagacgcacaggaattaggcacagcatttatcctggagaagagatctttgtagaatttgatggctgtaac

SEQ ID NO: 26076 - DNA, 83 bp, Homo sapiens
gtctcaggcctttagtgatgatgacctgcctagagctggaacgttacctccagagcgagccctgctatgtttcagcctcagaa

SEQ ID NO: 26077 - DNA, 90 bp, Homo sapiens
ggtacctgttactgctgctacttcctcgtttgacaccttcctggtttgggtacaacaaaaaagggcattggcccagtttattcgtccaaa

SEQ ID NO: 26078 - DNA, 83 bp, Homo sapiens
ctcaattacacttcgactctcaaagcaataccaggatagctgttgtttcagagaaaggactcagaattcatgattgaagaaat

SEQ ID NO: 26079 - DNA, 75 bp, Homo sapiens
gtgggcagcagagggatggctgctcagctgctgactgatgaggcactgggcgccatgttttggaagtttgacctg

SEQ ID NO: 26080 - DNA, 74 bp, Homo sapiens
catattttgaagtgtttacgggatttggatgtagctttgcccattattgagaattataaggatcggttgttggc

SEQ ID NO: 26081 - DNA, 100 bp, Homo sapiens
aaatgatgtcatagaggaagaccttgcaaaggctgcctctcccagggagccacttgaaccactgaacttcccagatcctgaatataaagaggaggaggaa

SEQ ID NO: 26082 - DNA, 80 bp, Homo sapiens
atctggtgaaatggagaggctggtcgcccaaatgtcgtgatctcaacagcttgtcacccaacagaaaacatcatcgcctc

SEQ ID NO: 26083 - DNA, 90 bp, Homo sapiens
tggaggacgcgcggcacaagctgcagcaccacctgcacaaggcttcctcagcaccttcaagcccccagcctacgaggatgtggttcaccg

SEQ ID NO: 26084 - DNA, 75 bp, Homo sapiens
gtgcagcggcgccagctccctgccactgctcctggcccttgccctgggtggattctccacagttttcctcgtgcg

SEQ ID NO: 26085 - DNA, 82 bp, Homo sapiens
ggcgatcaaggccaagtatccgccagtcaataggaagtacgagtaatgttgtaccatctttgggtaggcagacttccctgac

SEQ ID NO: 26086 - DNA, 83 bp, Homo sapiens
agagaggaagccgaaaacaccctgcaatctttcagacagtgcctccggagccagcgtggtggccatagacaacaagatcgaac

SEQ ID NO: 26087 - DNA, 107 bp, Homo sapiens
gatgagtccagcattctaagacgaagagggctccaggaatgtatacaaagactatcgcttccttgagctggcatgtgattcccaggaggatgtcgacagctggaagg

SEQ ID NO: 26088 - DNA, 75 bp, Homo sapiens
tggacagacgcacagacacctgcaggagtccaaaactacttacctggaagaccttccaccaccccctgagtatga

SEQ ID NO: 26089 - DNA, 75 bp, Homo sapiens
agaggatgtggatgccctcaagtcctggctggccaagttactggagccgatgtttgggccccatggtatccctgt

SEQ ID NO: 26090 - DNA, 73 bp, Homo sapiens
acggcgccgctaggatgaagctcgtgagaaagtgactgagaccgaagatgatagtgatagtgacagcgatgat

SEQ ID NO: 26091 - DNA, 97 bp, Homo sapiens
cacaaggttgatgggcgtgtagtggaaccaaagagagctgtttctagagaggcttttctgatgtggatcacacctatgctcaaagaactcagctctt

SEQ ID NO: 26092 - DNA, 90 bp, Homo sapiens
tgcagatcttcactgtattagtgaatccgataagcttttcatgcaacacccaacacttataagcggaagaacacagaaacagctctagac

SEQ ID NO: 26093 - DNA, 50 bp, Homo sapiens
ctacaagaaagcggttcccactcccctcccacccggtcactccgtccagc

SEQ ID NO: 26094 - DNA, 100 bp, Homo sapiens
gtcacagcctggttggaaaacccaagatatttatcattcaggttcgtgctgtaagacctaaagttcttatgagattgtccaaaacaaagaaacatgtcag

SEQ ID NO: 26095 - DNA, 107 bp, Homo sapiens
tgctgcttggattccagttcgtctgcccacagccctccactcaacacaggaaggttatgatgtgattgctcaagcccaatctgggactgggaaaacggccacatttg

SEQ ID NO: 26096 - DNA, 74 bp, Homo sapiens
tctcttcaaaaatgtcagagaacttgacactccattcagggtaatggacaagatggagtttgcagaggcgagga

SEQ ID NO: 26097 - DNA, 100 bp, Homo sapiens
aagctgacagacccttctctgctctacctggaggtctccactctggtcagcaagtatccagacatcaggtgcagaccctgatagtcgtgatcatcgggat

SEQ ID NO: 26098 - DNA, 101 bp, Homo sapiens
ttcaacaaatacgtggcctacatagagtcgcagggagcccaccgggcgggcctggccaagagctgagctcaatgtgcagcaatggatgacgacagcctgga

SEQ ID NO: 26099 - DNA, 80 bp, Homo sapiens
cagcactggactcatggaggctgagcatttattcaggacatgatgagctacattgggcccaagaggacagcagtggtgcg

SEQ ID NO: 26100 - DNA, 100 bp, Homo sapiens
aaaattgtcaaatggaaagaagtttgattccagtcatgatagaaatgaaccatttgtctttagtcttggcaaagggctgtgcttaagagtaaaacttcag

SEQ ID NO: 26101 - DNA, 74 bp, Homo sapiens
ttaccgatgctgagtgtgttgaatgtgaacgaggcgtgtgggaccatggtgagcccattggcaggggtaccaaa

SEQ ID NO: 26102 - DNA, 98 bp, Homo sapiens
aaggagctgaaccttcaagaatacaagtgcgatgacatggatcctgcggacaaaccgccccagggcgtacctagcaccgaagcatcaggcgccactag

SEQ ID NO: 26103 - DNA, 79 bp, Homo sapiens
caccatcgagtgcacggggcagaggcctccatccaggcaggcatctacgccactcgctctggtgggaacctcgtgcttg

SEQ ID NO: 26104 - DNA, 101 bp, Homo sapiens
ggaagtactgagcctgttggaggaactggcccggaaacaggaggacgacgagcctgtggagtgggagacacctgacctttctcaagctgagattgagcaga

SEQ ID NO: 26105 - DNA, 74 bp, Homo sapiens
cctgctgctgaagatctggaagacgcgctcctgcgccggagcagtgaggagaatgaataccttccaagaccaga

SEQ ID NO: 26106 - DNA, 89 bp, Homo sapiens
cggagcccggcgctttccccgcaagatggacggtttcgccggcagtctcgatgagcgtgaagccgtgcagaagaagaccttcaccaagt

SEQ ID NO: 26107 - DNA, 96 bp, Homo sapiens
cctggccatgggcatgaagcgggaagggcgtctctggccgagcctctttttgtggaaaacgacagcagcagcagtggcctggaagacgccaccgct

SEQ ID NO: 26108 - DNA, 97 bp, Homo sapiens
tggtaatcctgacgaaattgaaattacctccgagggaaacaagaaaacatcaaagaggtctagcaaagggcaagtgtccagagaatggctgggatga

SEQ ID NO: 26109 - DNA, 100 bp, Homo sapiens
cgaaaccataaaggagcatttatgtaaggtttttgtcatccattggagggacactgtatgaggttggaaagcctgaaatgcaacaaaaaataaattcatt

SEQ ID NO: 26110 - DNA, 98 bp, Homo sapiens
gtctgggctacattgcaggctccaaagtgaaggatatggctggagactggcactgggctctgagggtacttcaggtcatgccttctgacagcttcttt

SEQ ID NO: 26111 - DNA, 95 bp, Homo sapiens
gcagcaccagggccggccgccaccgcctctagaacgcggaggagctgcaaataccatcagatgaaaaacttgaggaattttggattgattttaat

SEQ ID NO: 26112 - DNA, 100 bp, Homo sapiens
aagctcgacttcaaggatgtcctgctccgacctaagcggagcagcctcaagagccgagccgagcaattctgtggtgttcttggtcacacatttatggagt

SEQ ID NO: 26113 - DNA, 49 bp, Homo sapiens
gtcatgtacccggtggactcggtgaaggatgccgaggaatgtgacaggg

SEQ ID NO: 26114 - DNA, 101 bp, Homo sapiens
ctcatgagtaactgggactacagtttcagatgcttcatcaagatgaatcaaataaaagagaaaagatcaagacaaagggaatggactctgaagacgacctg

SEQ ID NO: 26115 - DNA, 82 bp, Homo sapiens
cgtccgccttctctgtcagctctttccccgtcagcatcccagccgtgctcacgacctccgcgctctggcagctcctcttccg

SEQ ID NO: 26116 - DNA, 82 bp, Homo sapiens
tttcaccagcctatcacagcttctagtcttcttgggaatctttttaaagatgacatcaggtatctgttgacaatggacaaac

SEQ ID NO: 26117 - DNA, 83 bp, Homo sapiens
gttggacgctgccagtttgcacagcagcagactccgtgggaaggaggcttgtttaaactacggatgcttttcaaagatgatta

SEQ ID NO: 26118 - DNA, 88 bp, Homo sapiens
gataagcttgaagctgaaaagcggatgagacctgcacgcagtggctcacagcagcacgatttgtgacagcccgaggcggagaacaccg

SEQ ID NO: 26119 - DNA, 98 bp, Homo sapiens
tgcactttatccagcacgagtgggcgcgcttcgaagccgagaaagcccgctgggaggccgagcgcgccgagttacagtgggtgggaggacgctactcg

SEQ ID NO: 26120 - DNA, 82 bp, Homo sapiens
ctgacaacatttttccttttccgagaaaatgctgctgtgaagacccaattaaagctttcacataaatgaagctacagctatc

SEQ ID NO: 26121 - DNA, 74 bp, Homo sapiens
tggttaaggaacaggaggaaaccattcagagatgggcttccccaaggatttattgacattgctacttgagtgtg

SEQ ID NO: 26122 - DNA, 78 bp, Homo sapiens
aacagtgtaccagcagggcgttggctatgtgcccatcacagcctcagcctgaagccctcggaggcccctgaactggat

SEQ ID NO: 26123 - DNA, 100 bp, Homo sapiens
aatgctccacctgtaagaacagaaaatcgtcttatagttgagaatttatcctcaagagtcagctggcagcgcatttgtagccatgaagtgccatcttgcc

SEQ ID NO: 26124 - DNA, 100 bp, Homo sapiens
ggtccggtttccagggggttcctggtgctcgaggctggcggcgaggaagagcgggacaaggagaaccggcatcggaagcgcagccacagccgctctcgga

SEQ ID NO: 26125 - DNA, 100 bp, Homo sapiens
agagtattctggagcaccttattcccaaaggcttaattggcttagtgtcgacttcaataattggaaagactgggaagatgattcagatgaagacatgtct

SEQ ID NO: 26126 - DNA, 100 bp, Homo sapiens
taaaccaaagacagcatctgagcacagaaagggttgtctcctcacagactatgagctccttgaaagagggaatcgtgtcttactcatctttgtatcccca

SEQ ID NO: 26127 - DNA, 87 bp, Homo sapiens
tgggactgcaccgcaccgagggcgagctccagcagccagactgccttccgggtcactgccatggaggagccgcagtcagatcctagc

SEQ ID NO: 26128 - DNA, 100 bp, Homo sapiens
cgcaatgccaacctcagcaccatcaagcagaggatccacctggttcatgaaccctccctcactgctctctgcacatcacggccacacagcacctgcaggg

SEQ ID NO: 26129 - DNA, 105 bp, Homo sapiens
cccgagctgacgtggcttgaattgggaggggggcagctggagcctcaggcggcagcgcttctaggtgctggagaatctggtaaaagcaccattgtgaagcagatg

SEQ ID NO: 26130 - DNA, 50 bp, Homo sapiens
aaggattccaagtaactcttatttggtggtggtcaccaatacaattccac

SEQ ID NO: 26131 - DNA, 75 bp, Homo sapiens
cacgcgggtctgtcatcatgtcgcgttacgggcggtacggaggagatttctgcgccaggagatgaggggcggtag

SEQ ID NO: 26132 - DNA, 100 bp, Homo sapiens
ctctcgctctgggtccctcagaatatgactctctgcctgaaaatagcgagacagcttaaagcttttcaagccaggccaagaagctgtgaagtaccagggt

SEQ ID NO: 26133 - DNA, 50 bp, Homo sapiens
ctgcaagtgagaacatatttaacaggagtgactccaaatttgcatatact

SEQ ID NO: 26134 - DNA, 98 bp, Homo sapiens
gagaaacaggacatacctttcgtagagcttcctgcagatttcacaaaactgcatcttactgacagtctccacccacaggtgacccacgtttcttctag

SEQ ID NO: 26135 - DNA, 100 bp, Homo sapiens
ttccttcagccaaagaaacaagccgtggaataggtgtatcaagtaatggtgcaaagcctgaaactcgggaagaggctctgtcgggattggccggaagcag

SEQ ID NO: 26136 - DNA, 82 bp, Homo sapiens
gctggctatctagaagttggcagacagaactgcccaaaggcagagaaaagtaaactgtttcacgttagacctgtaacccaag

SEQ ID NO: 26137 - DNA, 88 bp, Homo sapiens
gccctggcttgggccgtgggcttcgtgagctccatgggctcggggaaccccgcgcccgggggtgaatctctacattaagaacttggat

SEQ ID NO: 26138 - DNA, 82 bp, Homo sapiens
ggaccaccgggcgctggtctgctcccagccggatgccgaggaatgtgacagggctgggagtgtggccacctgccaggccgtc

SEQ ID NO: 26139 - DNA, 102 bp, Homo sapiens
attatgtcagccaaagctactcctactcatctattttgaataaatcagaaactgtcctggctggtgccttgttagaagaagcggagcaattgctagaccgag

SEQ ID NO: 26140 - DNA, 100 bp, Homo sapiens
ggagcaggaaaaccggaagggcctgatagccgccatctgtgcaggtccacctaatcatcctgtgaaagtggtttctctatggaaagctttgtttgcttcc

SEQ ID NO: 26141 - DNA, 50 bp, Homo sapiens
ctacaggaacctggtctccctgggtattgacctgatggacatggcttcgg

SEQ ID NO: 26142 - DNA, 75 bp, Homo sapiens
acggctccttctgcgtctgtgaggccaatgcaaatgccatcgaagacggcaatttggaggaaatggaagaggaag

SEQ ID NO: 26143 - DNA, 88 bp, Homo sapiens
ctgccaataaaggagcaagatggctaggggaacaacttgatacagagacaagtacaactcaatcagaaactattcagacagcggcttc

SEQ ID NO: 26144 - DNA, 101 bp, Homo sapiens
ctgcccaaacatctcaacttacatttaaaggtcgaggacttcacaggtgtttatgaagaagttgatgaagaacagtattcgaagctggttcaggcacgcca

SEQ ID NO: 26145 - DNA, 100 bp, Homo sapiens
tgccttcacgctgctgtctgccgtgagcctgccccgccgggagcccaccgtctccagcttctatgtgaagcgggcgggcatccgtgggctctgagaagct

SEQ ID NO: 26146 - DNA, 82 bp, Homo sapiens
gttgcgggccccgggacctgggctgggaacccgcggtggagcgggacacgaacgtggatgaaacgaggaggaagagatagtg

SEQ ID NO: 26147 - DNA, 75 bp, Homo sapiens
cgcaacactcgcttggttggggagatcggcgcttggccgggtgggagactacactggaaaataaagagttagctc

SEQ ID NO: 26148 - DNA, 97 bp, Homo sapiens
aaagctcagctggtggtgattgcacacgacgtggatcccatcgagatgactccaatgatatgtgggaggaccaggaggaggaagaggaggaggagga

SEQ ID NO: 26149 - DNA, 90 bp, Homo sapiens
cattttccttacaagaatagataccaggagattgtggactggttcaatgcactccgagctgctcgcttccactacctgcaggtggcattc

SEQ ID NO: 26150 - DNA, 105 bp, Homo sapiens
acaagatgtcacctgaaagtggtcacagccgcatctttgaagtactatactggcaattgctggagaagattttgcaattgttgcttctgatactcgattgagtga

SEQ ID NO: 26151 - DNA, 75 bp, Homo sapiens
gagctcacagagacttcaaatgagcgatcgtcttctgatcaaaggaggtaaaattgttaatgatgaccagtcgtt

SEQ ID NO: 26152 - DNA, 96 bp, Homo sapiens
aaggtagcagtgacacctcctggcttggcaagagaagactggaaaattataagagcactctctgagattcttggtgccaccattgagaactccagg

SEQ ID NO: 26153 - DNA, 74 bp, Homo sapiens
accagtactaccaaggacagcttttttcctgcaagatcccagatgcagtgactggttactacctgaaccgtgct

SEQ ID NO: 26154 - DNA, 100 bp, Homo sapiens
agcgcaggccgagaatcacctcaatggcaagaattcctctttgactctgactggagagctgccactgcagagccccgccatggaagacacgccgttggtg

SEQ ID NO: 26155 - DNA, 98 bp, Homo sapiens
agaactacaggaacctgctttctctcgatgaggataacatccctccagaagatggaacctggcttctgtatttaccatgtacctggagcattggtttg

SEQ ID NO: 26156 - DNA, 97 bp, Homo sapiens
cgcggccgcggcggcggagaagcagctcgccagccagcagcccgccagccgccgggaggtgtcatggagaaactccagctgggcccagagattctgc

SEQ ID NO: 26157 - DNA, 87 bp, Homo sapiens
tgtatcttctgatgggaagggaactggaatatctagaggaggtacctccaggaaatgtgctaggagattacctggggcaattgatgt

SEQ ID NO: 26158 - DNA, 87 bp, Homo sapiens
ctggaggagcgaggcagctgtactaggactgggaacgggatcttagaaatgaagttgaaaaattacgcaatgaagtgaatgaaagag

SEQ ID NO: 26159 - DNA, 74 bp, Homo sapiens
ctctctttcgcttttgtggaactactctacggcatctggagcaactggtaaggaagtggaggattaaatgattt

SEQ ID NO: 26160 - DNA, 95 bp, Homo sapiens
gttgaggttcaggaaggattcctgagattccaggaggaagtactggcgaagtgctccatggttggatggcaagcatgtggtgtttggcaaagtga

SEQ ID NO: 26161 - DNA, 100 bp, Homo sapiens
tcgaagtgcgcaaacttgacactcaccctgaccggccactgcagaacaaattagacttgcacagatgatttcggaccataatgatgctgactttgaggag

SEQ ID NO: 26162 - DNA, 83 bp, Homo sapiens
caacgagaagcacagcaagaacatcacccagcgcggcaacgtcgccaagacctcgggttatgataattcagagagcagtgttc

SEQ ID NO: 26163 - DNA, 100 bp, Homo sapiens
aatgggtcaaaacaaaacaaaacggaaaaaacaagacttctggccacaggtggaaatcagccccctggagaatgccattgagaccatgcagctgacgaac

SEQ ID NO: 26164 - DNA, 100 bp, Homo sapiens
tgacagaacatttacttaacacatcatgaaggctagtttggatgtggaggggaatagactccatctatccatatgaggcttgggaagatacacatgcaaa

SEQ ID NO: 26165 - DNA, 82 bp, Homo sapiens
cgcagttcttgtttgtggatcgctgtgatcgtcacttggacgagattgaggagctgcgggccgagatgctggagatgcggga

SEQ ID NO: 26166 - DNA, 100 bp, Homo sapiens
agagccctagaactggatcataaaaatgctcaggcacaacaagagaattcagatcaggaaggaggtggaaagaaaaagaagaaaaagaaggacaagaaac

SEQ ID NO: 26167 - DNA, 100 bp, Homo sapiens
gcacctgtgtggaccaggtggacggctttgagtgcatctgccccgagcagtgggtgggggccacctgccagctggggattttatggatccaacaatggac

SEQ ID NO: 26168 - DNA, 101 bp, Homo sapiens
gataaagaaggaagtagagcctcctcctaaggatgtggttgcaaaagcttctcatttcagagagatgccaggatcctaagtgcctgccaaacttaccaatt

SEQ ID NO: 26169 - DNA, 82 bp, Homo sapiens
atgatcctggccagcctgctcatcgcctactgcattccagggtctccctccactgctgtagtaacccgggtccggggcctcg

SEQ ID NO: 26170 - DNA, 100 bp, Homo sapiens
ggaacaaaatcacatgatccgcacccccagcatgaggcaggaggagcgctacctggctgatgcacctaatccaggactcattccagatgcagatgcagta

SEQ ID NO: 26171 - DNA, 78 bp, Homo sapiens
ttccagctcccctcacccaacgtcgtgtatggacgacaaaggcgacccgagcaatgaggaggcacctaaggccatcaa

SEQ ID NO: 26172 - DNA, 100 bp, Homo sapiens
ctggcgggcataccagcgggccctggccgctcacccgtggaaagtacaggtcctgacagctggacttggggtggagtcgaaagcagggagccctgtgagt

SEQ ID NO: 26173 - DNA, 100 bp, Homo sapiens
gcatggatgaccattacgccagtcaggccctggaggagggtcagtgtggttcctgttgggcttttagctctgtgggtgccctggagggccaactcaagaa

SEQ ID NO: 26174 - DNA, 75 bp, Homo sapiens
ttagagcaagaggagcttcaagcattgcagatagagcaaggagggcatatcgatgcatttacttcaaaacttttt

SEQ ID NO: 26175 - DNA, 75 bp, Homo sapiens
gcccatccgcaaggacgacgaggtccagagggtacaccacccggactacaacaatgagttgacccagtttctgcc

SEQ ID NO: 26176 - DNA, 100 bp, Homo sapiens
aagaaactctcagtttgtgtttctgagaaaggtgttctttgacctaatgagagaaatcagaacaaagaagatgtcagaaaacaaagacaagaatggcaag

SEQ ID NO: 26177 - DNA, 100 bp, Homo sapiens
gccgaggcgcttctgcatctgtgggccgaggactggtaatgaggaacaaacacggattaatctgaattgtactcagaaggctttgatgcaggtggtagat

SEQ ID NO: 26178 - DNA, 74 bp, Homo sapiens
tacagcatcaactacctgcactttggggagcctaagtcctgcagatggactgctcccccacggccagcagcagt

SEQ ID NO: 26179 - DNA, 76 bp, Homo sapiens
ccccgccgccgccggagctctgcagcacggctaaaaggtcagattcctgaaattaaacagactttggaaattctaa

SEQ ID NO: 26180 - DNA, 98 bp, Homo sapiens
gcaactaatagcccttgaacagctatgcatgctgcttttgatgtctgacaacgtggatcgttgttttgaaacaattggcttggaaacgaaattgaggt

SEQ ID NO: 26181 - DNA, 75 bp, Homo sapiens
ctggcatccatataacaggattgacagccggatcattgagggtggagagattcaaccagttagcgtgaaagttgg

SEQ ID NO: 26182 - DNA, 99 bp, Homo sapiens
cggactggagggagacaaagcagcgcccgtctgcttcgggcctctggaatttagcgctcgcccagctagccgcagttgccaccttccagagaagaggta

SEQ ID NO: 26183 - DNA, 75 bp, Homo sapiens
tcgagtgaccgagaccgcggccgggaccgagggttatgggagaagatatcccagaaaaaataaaagatgaagttc

SEQ ID NO: 26184 - DNA, 90 bp, Homo sapiens
tttaccaccaatgggaacatgcacaggtctgccatcatggatgttctcgcagaagcaaatggcacctttgccttaaaccttttgaaaacg

SEQ ID NO: 26185 - DNA, 96 bp, Homo sapiens
ataaaatccaaagccataatttcatcaagtgatgactcttcggatgaggataaacttaaaattgctgatgaaggggtgaatcctggttctttcgtt

SEQ ID NO: 26186 - DNA, 100 bp, Homo sapiens
agaagctggtcgccgccggcaggaacggaagtttgtaggtggatctggtcaagtgagcgaacggataatggacctcctcggagaccaagtgaagctgaac

SEQ ID NO: 26187 - DNA, 49 bp, Homo sapiens
gagcccctcaccctgagatgggagccggcttcccagcccaccatcccca

SEQ ID NO: 26188 - DNA, 100 bp, Homo sapiens
aacaaatacagtgacagcacaggtcacagtaaggccaaaaatgtgcatactcacagagttagagagagggatggtggaatcacaaccaagatctggtttg

SEQ ID NO: 26189 - DNA, 83 bp, Homo sapiens
ggggacttggtgttcgctaagatgaagggctaccctcactggcctgccaggaattcagaaggagctggcggacatcactttag

SEQ ID NO: 26190 - DNA, 89 bp, Homo sapiens
cttaccaagcaacaagtgaaattgaggtcacaccttcagtccttcgagcaatccaagccttatgcatttgatcgggtgttccagtcaag

SEQ ID NO: 26191 - DNA, 100 bp, Homo sapiens
agcgggagcccggccggagctgggtctggagacgccgtggcagcctgaacggagtgtgcgacggattgggaggaatggtcctcgtccgaagtgagaatgg

SEQ ID NO: 26192 - DNA, 51 bp, Homo sapiens
gccaaccggcagacccgactgaatggaaatcatcgagttccccatcctaaa

SEQ ID NO: 26193 - DNA, 80 bp, Homo sapiens
cagctggtggtcctggtctacgtcatcgggttatgaagacagtatggagtttccagaccatagtagacatttgctacagt

SEQ ID NO: 26194 - DNA, 78 bp, Homo sapiens
tggaatgtcattatcagacacaatgttccagtctcatcagattttccatgtcctggtggtggcagcagcctttgtcca

SEQ ID NO: 26195 - DNA, 83 bp, Homo sapiens
ggatgatatcaacaacgtcggactcagacttcaagggctaccactggacccttcccctgtcttgaaccctgagccggcaccat

SEQ ID NO: 26196 - DNA, 74 bp, Homo sapiens
gggcacgtcaaccccttcctcccgtatatcaggacataagcagctctatgaccaatagcacagctgccagtaga

SEQ ID NO: 26197 - DNA, 75 bp, Homo sapiens
gccaagcagccttagccctagtgtagaggttcaggaagatttgactgaagagaaaaaaagggaactggagcataa

SEQ ID NO: 26198 - DNA, 100 bp, Homo sapiens
ggctgagacatgagatcttcagcctccaggctctccagtttttcgtcgagagattcactatggaatcggttgacatgatgaaagaagcattagaaaaact

SEQ ID NO: 26199 - DNA, 100 bp, Homo sapiens
tcatgtgctgggtgggggacgtgtaccctgtctaccagcctgtgagtgttctgccagttctggataatccactgtccaagaaggttcgaggcctcattga

SEQ ID NO: 26200 - DNA, 90 bp, Homo sapiens
tgcctcaccagatctttggccagaacaatccaccaaaaccctcaacaggggcatctctgagttcatcgtgatggctgcagacgccgagcc

SEQ ID NO: 26201 - DNA, 100 bp, Homo sapiens
aatcaccagaacaaaatgtgcagggtaaaccagacttgaatacaacattgccaattagacaaacagcatcaattttcaaacaaccggtaaccaaagtcac

SEQ ID NO: 26202 - DNA, 83 bp, Homo sapiens
cttcgccttcgccctttccacctcgcggcagttcgatctctggaaacatggctacagaacatgttaatggaaatggtactgaa

SEQ ID NO: 26203 - DNA, 83 bp, Homo sapiens
aggaattctcggctggagagcagaagaccgaaagggtgtttctgtggcctgggactggttagcaccaacaagtcctgctcgat

SEQ ID NO: 26204 - DNA, 83 bp, Homo sapiens
catctttcatgcagtgacatgttgataaaaaatgatgatccgaattcgagatccaaaccaaggaggaaaggatatcacagagg

SEQ ID NO: 26205 - DNA, 98 bp, Homo sapiens
ctgggcgtctcctacatcgacgaccacgtgcggaggaaggactcctcgctctatataggcttctagtgaggacgttgccagctccccggagcgccact

SEQ ID NO: 26206 - DNA, 74 bp, Homo sapiens
ggtgcccacttaactgtgaaaaagatatttgttggtggcctgcatgcagttcatcaacattgtggtacattcgg

SEQ ID NO: 26207 - DNA, 100 bp, Homo sapiens
tcgccagtcctgctcgggacatttgccctcagtggtggggttactgctgtttcggaggtatgcagaatctgtgggagcaaaacattatcatacttcagcc

SEQ ID NO: 26208 - DNA, 90 bp, Homo sapiens
gagtcgtcaagaggctctgcaccctggatggaaagcagacacagtgccgtaactggctgaagactggcaactgcctctatggaaacacat

SEQ ID NO: 26209 - DNA, 100 bp, Homo sapiens
ggaggacgacgacgatggggatatcgcctgattacatcaaccccagagccgtgcagctgggctcccttctcgtccgcggcctcaccactctggttttagt

SEQ ID NO: 26210 - DNA, 74 bp, Homo sapiens
tttccacgactttctgggagactccacccaccaaggctccggatgtgttccccatcatatcagggtgcagacac

SEQ ID NO: 26211 - DNA, 88 bp, Homo sapiens
tcacctggatgcctacgtgggaagggacctcgaatgtgggaccccagcccctctccagctcgaaatcatggtgtcctcagaccgaagc

SEQ ID NO: 26212 - DNA, 90 bp, Homo sapiens
gcctggtatggagaacgagaggaaagaagtcccttatcacgttgccaccttccagagaagaggtacgagatgacaagacaaccataaagt

SEQ ID NO: 26213 - DNA, 100 bp, Homo sapiens
cagactgacgcgagcagccaaggtgttggagcagctcacagggcagacccctgtgttttccaaagatatggctcgtggacagcagaaaattcagtctcag

SEQ ID NO: 26214 - DNA, 106 bp, Homo sapiens
cttcagacagcatatttgagtcatttccttcgtacccacagtgcttcatgagagctgtgcagacgttcttgcagaggaaggagaagtccacgtggcattatgtaga

SEQ ID NO: 26215 - DNA, 75 bp, Homo sapiens
tacttgaagccctacgccgtggacttccagcgcagtgctctacggaaacgtattcgagaggacagaaaggccacc

SEQ ID NO: 26216 - DNA, 90 bp, Homo sapiens
gaaaagatggcggctgccgcacaatcccgggttgtccgggtcctgtcaatgtcacctgtcacaagatgaaggtagaggcacattatacaa

SEQ ID NO: 26217 - DNA, 98 bp, Homo sapiens
tgagactgacatcggaaccagagggggactggttttgtcctgaatgtgagacagtaaggattgtatcctggagccgctttccctgccagaaagtccag

SEQ ID NO: 26218 - DNA, 145 bp, Homo sapiens
cccttctttcgatcagagatcggcggagaccctcgaagtgcgcaaacttgacactcaccctgaccgccttggaatggatggctttggccaaccagttggcattcttggacgccctgccacagcatatggattccgccctgatgaa

SEQ ID NO: 26219 - DNA, 83 bp, Homo sapiens
tttcactactccaaaatctgtcccagctgccttgaaaggtcaactgcaacttggcctcttgatccaccaaaggatgagaaaca

SEQ ID NO: 26220 - DNA, 100 bp, Homo sapiens
gacttacagacccgagtggaatctttagaatctcaaacaagacaacttgagctgaaagcgaaaaactatgctgaccagacaacaagctcatcagtagaga

SEQ ID NO: 26221 - DNA, 100 bp, Homo sapiens
tagaaactcgctctaaagacggaaccgccacagcactcaattgtgaatgggagagttcacatccgcgactggcgagaggagacactgtggaagacaaagc

SEQ ID NO: 26222 - DNA, 80 bp, Homo sapiens
ttggcattgacatttaattttagggtcctttatatagaagggagagtaggcaacagcattattgagaaaagcccttacag

SEQ ID NO: 26223 - DNA, 100 bp, Homo sapiens
gaggttcgaagctgagtatgtgacagacctgatggccaaaagaaaggaagaaaatttttcctctcctaaaaatgccaaaaggccaagacaagaagaattg

SEQ ID NO: 26224 - DNA, 98 bp, Homo sapiens
cggcgctgggctggaggcggcggagcgcgagagcttcgagcggactcaggccgagcaggagctccgcgtggcccagacagagtttgaccggcaagcag

SEQ ID NO: 26225 - DNA, 75 bp, Homo sapiens
ctggagaaaagtggtgacttattggttgggggccgtcccgctcctaaggcaggaagatggtggccgcaaagaaga

SEQ ID NO: 26226 - DNA, 100 bp, Homo sapiens
caaatgaatccaaccagccacagatactattaggaggcttcctgcctgacacagctcacttcaagaagtgcacaatgtcagaacgtggaattaagtgggc

SEQ ID NO: 26227 - DNA, 100 bp, Homo sapiens
cttcgaaaccttcgacttccttcagggtttaggagaagcactgttgttttccacacagaaagaatcttcaagagggagacatagggaaaaggaagacata

SEQ ID NO: 26228 - DNA, 83 bp, Homo sapiens
actgcacaggcccgaagggcagaggctgaccccgcactacatctacccaccagccatcgtgcagcccagcgtggtgatcccag

SEQ ID NO: 26229 - DNA, 100 bp, Homo sapiens
tgtctctccactttctttccctctccgttttggtgggctggcatgagtacagtaccagaagttatcgttgcacggcactgtggacttcgagtctttggct

SEQ ID NO: 26230 - DNA, 75 bp, Homo sapiens
cgggattgagaggctgaaaaagttttaaaatcaaagatgggaaaatcggagaaaattgcccttccccatggccag

SEQ ID NO: 26231 - DNA, 116 bp, Homo sapiens
cacaacgtcaaggagctggaagtgctgctgatgtgcaacaagaaaagccatggagacttcagcatcctcctcccagcctcaggacaacagtcaagtccacagagaaacagaagatg

SEQ ID NO: 26232 - DNA, 123 bp, Homo sapiens
tcaccagtcaacagagcttcttaaatgtcagaaactggatgaatttctcatgggcataagaaagaaaaagatctgttgcataaaaattgcatgttgcaggaagaaattgcaaggctaagactg

SEQ ID NO: 26233 - DNA, 99 bp, Homo sapiens
cgctggatgaacaacctgcttatgcgggagcttcctcttcgctgcaccatccgcctgtgggacacatatcaggtgactgtaggacgaggatttggtgtc

SEQ ID NO: 26234 - DNA, 95 bp, Homo sapiens
tgtacattccagaggaaaaccaccaagctgttgtagcaaacagtgacgaatctcagcttctgacaccaggaaagatgagtcagcgccaaggaaaa

SEQ ID NO: 26235 - DNA, 100 bp, Homo sapiens
accctttcaggtgaacggccaggcccggtgacgtcacttcctgccagatcaggatcctcatgaccagccaaagagaagaagaattaggaagcataaatca

SEQ ID NO: 26236 - DNA, 83 bp, Homo sapiens
gaagctgtctctgatccgcaagcatgctcagaccttcattgctctgtgtgccaccggtcaagaaatccctgaggagggacggg

SEQ ID NO: 26237 - DNA, 76 bp, Homo sapiens
cggatctgcatgccgctcaccgtagacgaggtttgtccgatatgtgcctcgatgccctggggagaccccaactacc

SEQ ID NO: 26238 - DNA, 75 bp, Homo sapiens
ggctccggatctcttcgtctttgcagcgtagcccgagtcggtcagcgccggagacaatggcgatgaccactcaga

SEQ ID NO: 26239 - DNA, 88 bp, Homo sapiens
agggagtcgccgctggagaggggctcggcgcccggcggggactgcaggttcttgggtgtctctggggagtccctgggccagaccttcc

SEQ ID NO: 26240 - DNA, 100 bp, Homo sapiens
gtccagagactcatccccgccctgtgggagaagcacagtccacaggttttgcggctagttggctattcaagaaacctcgcccctctgaatgtcatactgt

SEQ ID NO: 26241 - DNA, 116 bp, Homo sapiens
ttccctttcctcttgacactgcagctgcagtcaacctcttccccaatttcaatgcgggagattcttcaagcaatcactatgtcaacagacacaggtgtttcccttccttcatatga

SEQ ID NO: 26242 - DNA, 78 bp, Homo sapiens
aacagaatcatgtctttcagagcagcatgatcagcatgtttataaagctggtctcactgtgttgcccaggctggtctt

SEQ ID NO: 26243 - DNA, 51 bp, Homo sapiens
atgtaactgctatcctctggaggttggagtcagttagctgctatgcactgt

SEQ ID NO: 26244 - DNA, 100 bp, Homo sapiens
ctcaagtcctggctggccaagttactggagccgatgtgagaagccctaccactgcaactgggacggctgcggctggaagtttgcgcgctcagacgagctc

SEQ ID NO: 26245 - DNA, 75 bp, Homo sapiens
cgagaaaacattgaatctcttgcacatgctctggttgatccctcaacaccttacactaagtcaaagcgtggccac

SEQ ID NO: 26246 - DNA, 97 bp, Homo sapiens
ctcgtgctcaccggtttctcccacatcgacctggttcttcacacacccccattcggcgtagtacccagagagctcaagatgtgtggcagttttcgga

SEQ ID NO: 26247 - DNA, 75 bp, Homo sapiens
ccgctctcgcttcgtcctacacttgcgcaaatgtctccggtccaaaagcttctttgcatgtgtccagtggatttc

SEQ ID NO: 26248 - DNA, 95 bp, Homo sapiens
ccggatgcagtcctttgggatgaagactatcaagaaatccaagtggtaatgggcgaagtttattcagcatccggcaatggacttatcgtagttgg

SEQ ID NO: 26249 - DNA, 98 bp, Homo sapiens
cgcccatgggcccctgtgatggtcatggcctcaagaatcacagtccaggtgagaagccttataagtgctcatgggagggatgtgagtggcgttttgca

SEQ ID NO: 26250 - DNA, 85 bp, Homo sapiens
actgcagtgcccctggacccctggcctgtggggtgccctacacctgctgcatcaggaacacgggacatggatggagctggaagcc

SEQ ID NO: 26251 - DNA, 75 bp, Homo sapiens
ttcattctcgaggtcgaccggctgcccaacaaccactccacaggtttgggtacccagaccccacctacctgaccc

SEQ ID NO: 26252 - DNA, 98 bp, Homo sapiens
caggagcccggccccggagccaccggtttggtgcacctcgatttggaggaagtagggcagggcccttatctggaaagaagtttggaaaccctggggag

SEQ ID NO: 26253 - DNA, 51 bp, Homo sapiens
tgagagcgacgaagccaactgtccaggtgctggagaatctggtaaaagcac

SEQ ID NO: 26254 - DNA, 74 bp, Homo sapiens
cgctgccgggcaccgaggaccagctcaatgacagatctcccttgagtttagaaatctggctgagaaataccaaa

SEQ ID NO: 26255 - DNA, 74 bp, Homo sapiens
caccggctgttcgaggccttgactgtagtaagactttgaccccgacgcaggcttcagtgattgccgcggatcag

SEQ ID NO: 26256 - DNA, 76 bp, Homo sapiens
caacattctctttaccttagatggagatatcaaattgggtgtgaagcttacactctctgctctggtagatgggaag

SEQ ID NO: 26257 - DNA, 107 bp, Homo sapiens
atcaccgttccagccccaacgtagcaaggcaagaagtacaagcccctggacctgcggcctaagaagacacgtgccatgcgccgccggctcaacaagcacgaggagaa

SEQ ID NO: 26258 - DNA, 100 bp, Homo sapiens
atagagaccagatgtactacaatctgctaaaactgtatagcaagaagcgaaaccctggccttaaaattccaaaagaagcatttgaacaacctcagaccag

SEQ ID NO: 26259 - DNA, 98 bp, Homo sapiens
tggatatcaaattcgtctccagagacctgtcgcgaaatcgcctttcagaaattcctatagaagcatgtcactttgtttctctggaaaatctcaacttg

SEQ ID NO: 26260 - DNA, 50 bp, Homo sapiens
ggtgcctgtgagcccatcggcctgcaggtaaagaggctggagaggagctg

SEQ ID NO: 26261 - DNA, 72 bp, Homo sapiens
gcggctctacccggtgctcaccaaggcggccaccaggcagcagctaccaagaaaccagcccctgaaaagaag

SEQ ID NO: 26262 - DNA, 90 bp, Homo sapiens
acctccaaggaagccacgtgcagacatctacaaccttcgatctcctgacgaggagaagagaagtttacctttattgagaaatgtaacaac

SEQ ID NO: 26263 - DNA, 90 bp, Homo sapiens
tgttgcagaacctcggccccaaggacaaggccaagatgttcataaatataaagagcatcttatggatgtgttcaaccttaatagtaaccc

SEQ ID NO: 26264 - DNA, 98 bp, Homo sapiens
cctggaccctgctcagaggactctatacagggacgtgatgctggagaattataggaacctggtctccctggacttctgcctggtgtcgaaggtggtgg

SEQ ID NO: 26265 - DNA, 101 bp, Homo sapiens
gtggaactagaaaatggcttaaatgccgatgagcatatggcaaacacaggtcaaagatgttgattcattcatagtgtgaggcccagaaatcggcattttta

SEQ ID NO: 26266 - DNA, 82 bp, Homo sapiens
tgaaactgctttctaaaacaccagaactcaacctgagatcgcggattcaggtgtggctctatgagcaagtgaatatgcggat

SEQ ID NO: 26267 - DNA, 100 bp, Homo sapiens
ccgggtgctgctggttagtgtgctctgagggagggtccgagccagccgctgttttgccggaggagcccctcaggccatctgaaactcagcaccgaggctc

SEQ ID NO: 26268 - DNA, 75 bp, Homo sapiens
ctgcgagctcctcaagaatctcgtgctcaccggtttctcccacatcgacctgaaactaattctgaagcaagccct

SEQ ID NO: 26269 - DNA, 100 bp, Homo sapiens
gaattcctgcttgtgagaaatccaattcagctttttgtgctgccagcaagaaatgatcagtagcaccagtgtttatgcaggttcccttgcgtcagaagcc

SEQ ID NO: 26270 - DNA, 82 bp, Homo sapiens
cgagcgcaaggacagcgcgaggtccgcgcagcccagcgcagccataacccagcgggtgccgcttctccacccgaggcttcca

SEQ ID NO: 26271 - DNA, 83 bp, Homo sapiens
gagaaataaggacaaaagccaagaggaggacagttcgctacacagcaatgcatcgagaaagtgttgtgaagagcgaagacttt

SEQ ID NO: 26272 - DNA, 80 bp, Homo sapiens
gccctcagtaccagagacagaagcagatggattcgtccttttaggaatacatggtttacaggaagcatacctacatgagg

SEQ ID NO: 26273 - DNA, 83 bp, Homo sapiens
accacttccagatccttcgggccattgggaagggcagctttggcaagttgcagagtgggcaggatcttaagacccgataggtg

SEQ ID NO: 26274 - DNA, 83 bp, Homo sapiens
ccagcacactcctcgcgagcaagtggagaccatcctgggcctcacaggagcgaccatgggaagcctcatctgcttcatctgcc

SEQ ID NO: 26275 - DNA, 74 bp, Homo sapiens
tcctgagtagctaggattacaggcaagaggaggaacgacgtagaagagaggaagagatgatgattcgtcaacgt

SEQ ID NO: 26276 - DNA, 82 bp, Homo sapiens
ccgaaaaagagaagacgctttacccgactctttgggccgttatctcacgcttgggcactgtttaaaggaaagttccgagaag

SEQ ID NO: 26277 - DNA, 73 bp, Homo sapiens
tgccagaggttccctccgagccccttcctgagaagatcccagaaaatgaaactgaagccgtggtcacgtgaca

SEQ ID NO: 26278 - DNA, 75 bp, Homo sapiens
gagcctcagttggaagcagccgatccagcctgcggagcctgtggggcagataatatcgtctactgcattattttt

SEQ ID NO: 26279 - DNA, 100 bp, Homo sapiens
gatgatgatatccttctcaaccttgtgggatgtgaaaactctgttactgaagcggggatctgatgagcttctttcttctggcatcattaacggacctttt

SEQ ID NO: 26280 - DNA, 141 bp, Homo sapiens
gaagacatggccactccagtcggtgttgagcacggcgagcagtctcaggcctttagtgatgatgtctccaaaaaaagttggtgatgacattgccaaggcaacgggtgactggaagggcctgaggattacagtgaaactgac

SEQ ID NO: 26281 - DNA, 74 bp, Homo sapiens
gtaactgccaaacccaagttggttggagatgtggattttgaaggtcagaagagatcaattctacagaaatttcc

SEQ ID NO: 26282 - DNA, 82 bp, Homo sapiens
ccgcatcttcgccgtctggaaagaaatatacgtctgtcacagttaacggcaaagcctagggcaagagttctacgcccaagat

SEQ ID NO: 26283 - DNA, 75 bp, Homo sapiens
ggcagtgctcaaactcaccgaccaggagacgcaggtcagaatggaaatgggctgcagaccgggcagctattgtca

SEQ ID NO: 26284 - DNA, 100 bp, Homo sapiens
cctgaccctgccctccctgcgagaactccagtccgggctccacaaagggcgcggtctcgctctcgaagcagacattcccgtaagagcagaagccgaagtg

SEQ ID NO: 26285 - DNA, 100 bp, Homo sapiens
ctcatcttcagcgtgctgtccaccatcgagcagtatgccgccctggccacggggactctcttctggatggtgtacatcggtgagctcccgcaggacttcc

SEQ ID NO: 26286 - DNA, 100 bp, Homo sapiens
gcctgctgttcgaggccggcacggtggccacgctggttcagtaccatttgaagaaaggattttagctgttcttcagtggctacagcttcctaaagatgaa

SEQ ID NO: 26287 - DNA, 100 bp, Homo sapiens
gcagtatcactgtgaaaactgtggaatttgtagaatctgaattatccagaacagaaagttgtgactgttggacagttcaaaattggtctgatccatggac

SEQ ID NO: 26288 - DNA, 74 bp, Homo sapiens
tcagagccagcgcacctgtgcagccttctgcaggtcactcaggatgtgtcaactgtctggagtggaatgagaaa

SEQ ID NO: 26289 - DNA, 98 bp, Homo sapiens
ggcggcggcggcgctgctcccgggggcgacggatcatcattttctgggtggaagtattcagctaaagactggttgatgagtgatgtagactatttcag

SEQ ID NO: 26290 - DNA, 75 bp, Homo sapiens
cagcccagtatccagagcagcgttcagcagggactgcagactcaggactgggccttatgacctatagaagccagg

SEQ ID NO: 26291 - DNA, 100 bp, Homo sapiens
gaacaacccgttcttgcctcaggccagtcgcctccaggccaagagggatccttcacccgtgtctgtgccctctggtggtcagaagatgctgtgctgtctc

SEQ ID NO: 26292 - DNA, 100 bp, Homo sapiens
tgtcttcttcggcttcgaggagaataagtgcagtatgagctacatgtttgagtacccggagtatcaggacaacagctttgagcagttcattattaattat

SEQ ID NO: 26293 - DNA, 50 bp, Homo sapiens
ttcctgtacagcctgcagaactcgggctgacgcacgaggcacacaggaag

SEQ ID NO: 26294 - DNA, 50 bp, Homo sapiens
gaatccttctagagacgtccacgccaaaacagagtggagtacgagaaaag

SEQ ID NO: 26295 - DNA, 121 bp, Homo sapiens
catttctataacaagtctctggcagagcaccgaaccccagatgtgctcaagaaatgccagcagggagtgtttgccattgtggagatgggggacgtgggtgctcgagaggctgtcttgtcac

SEQ ID NO: 26296 - DNA, 75 bp, Homo sapiens
ctccagaatctggattggggcgtgctgatccaccttatactcatactatacagccttctcttggagtcaagaagc

SEQ ID NO: 26297 - DNA, 100 bp, Homo sapiens
ttcattattacatgaagtatcatgtttctgcgggtgccacgtctatgtgggcttcgtgctgtgggctgctgaatgaagtcatgggaactggagctgtcag

SEQ ID NO: 26298 - DNA, 98 bp, Homo sapiens
tgttgccaagctcatcgctgccctctccaccccctcccagcaggacctgaaggagaagaaggagaaggtggaggagaaggcaagccggaaagagcgaa

SEQ ID NO: 26299 - DNA, 100 bp, Homo sapiens
ccgagccgggccgcgccgccgctgccgccgccgcgcgcgggtgctggagaatctggtaaaagcaccattgtgaagcagatgaggatcctgcatgttaatg

SEQ ID NO: 26300 - DNA, 98 bp, Homo sapiens
agaaagtgaacttggcattttagatctaattcaaatgccttcaattaagttgcagagttctgatggagagatatttgaagttgatgtggaaattgcca

SEQ ID NO: 26301 - DNA, 100 bp, Homo sapiens
cggaaggtgatgcccaagatggaccagacccaacatgagtgaagtttcctgcaagaaacgggacgactatttggaatggccagagtattttatggctgtg

SEQ ID NO: 26302 - DNA, 82 bp, Homo sapiens
catggtttacagagcactagaagctccttccattcagatccagtctgttcggcacttgaagtactccttgtttaagaaatca

SEQ ID NO: 26303 - DNA, 82 bp, Homo sapiens
aaaagcttgcagaatatatttgttccaacaatgcagatcttcgtgaagactctgactggtaagaccatcaccctcgaggttg

SEQ ID NO: 26304 - DNA, 95 bp, Homo sapiens
tgcccagctctgatgcttttgctgctgtggctcagctgtttcagacaactcaaggccaacagattccactgtgtaaagtaattagattcaacata

SEQ ID NO: 26305 - DNA, 100 bp, Homo sapiens
aacacggagaacgacctcaaccaggggacttcctcgttctgcccatcttcctaacaaggctatggctgataacagcagtgatgagtgtgaagaggaaaat

SEQ ID NO: 26306 - DNA, 75 bp, Homo sapiens
atcaagcagaatgtgatttgcttgaagatatgagattccattggccgtgacatccccaaaatgcttgaattattt

SEQ ID NO: 26307 - DNA, 96 bp, Homo sapiens
ttcgtccgcatcgaggacttcatccagtttgctacggtctacggggcagagcagctcaaagcttggattctgccgtgccactcacgaatggcgaca

SEQ ID NO: 26308 - DNA, 98 bp, Homo sapiens
caagctctacctgaccaactctaaacaggctgcctgggtctcagccatttgggtccccattggcccctgtgggcaaccagccacctgtgcttcagccc

SEQ ID NO: 26309 - DNA, 76 bp, Homo sapiens
gccagaggtcaacaaggttctggacaagatgaagtctttctgccagacaccaactctacaacattacctgtcatat

SEQ ID NO: 26310 - DNA, 49 bp, Homo sapiens
tcatcactgaatacatggagaatggtcgagtcccagacaccagaagtct

SEQ ID NO: 26311 - DNA, 96 bp, Homo sapiens
ggagcagggaagaaggaatcatcgaggcatgggggtccacactgcaatgtttttgtggaacatggatttcaggtgttggcgtctgcttcccattac

SEQ ID NO: 26312 - DNA, 100 bp, Homo sapiens
ccccactggaggagatgaggaaggctgccgaggatctggaaattctggcacagtgatgtttgagtatggaatgcggcttggcagagaagttcgaactctc

SEQ ID NO: 26313 - DNA, 100 bp, Homo sapiens
tgctgcttttccaggaatgaaagacattcaggatcaacttgaacgaatatttctgaatgtgaaagatgttgcagaagtgttccagaagtggctgaagata

SEQ ID NO: 26314 - DNA, 74 bp, Homo sapiens
ttcactggtaatgtgtccattcgagggcggatcctctctgatttggggatattccctgcccaaaaaattcctgg

SEQ ID NO: 26315 - DNA, 95 bp, Homo sapiens
aatcctcttttggcccctctccatgatattattatcagacaaaatccagtcttctaaaagagtggactattccataatagcatcacaagccggag

SEQ ID NO: 26316 - DNA, 74 bp, Homo sapiens
aacttccctggtcgaacagttttttctaatggctattcaagtgtgaagcagtattctggaaagtttttctaaga

SEQ ID NO: 26317 - DNA, 88 bp, Homo sapiens
aagggcaggacgaggtgtcggcgcgggagcagcacttccacagccaagtgcgggagtccacggtgtcaagctagggatgcggtccatt

SEQ ID NO: 26318 - DNA, 100 bp, Homo sapiens
caaccaccgccctggccatctaccatgtgcccagctcaacattggcaatgtgctccctgtgggcaccatgcctgagggtacaatcgtgtgctgcctggag

SEQ ID NO: 26319 - DNA, 101 bp, Homo sapiens
tttgttggggagaagaggattggaggtgtcagtgttaaaggaacctctacaacgaaggtgaagccacggaagataaggctgaccaactgactgaagagcag

SEQ ID NO: 26320 - DNA, 100 bp, Homo sapiens
gcccgcaagggcggagggggcccgaaggacttcggcgcgggactcaagtacaactcccggcacgagagtgaagtcaccctgctgagaaatgaagtggcac

SEQ ID NO: 26321 - DNA, 75 bp, Homo sapiens
cactgcagcctcgacctcccaggctcagatgactttgaagaagccaaggaaattttgacaaagatgagatacttt

SEQ ID NO: 26322 - DNA, 100 bp, Homo sapiens
gaccagccacatctgaaaagggttctcccatgggcaggtggtctctctggatgagctgcgccccttccaggacccagacctgagctccctgcaggccggc

SEQ ID NO: 26323 - DNA, 100 bp, Homo sapiens
gcggcagagataccgcgatatttgggagcggccccgagacgcgcctggcgcgggtcagaagttgagtagcaggggcctaggagggctcgaagccttcaca

SEQ ID NO: 26324 - DNA, 75 bp, Homo sapiens
ctcggaaaccggtagcgcttgcagcatggtcgagtcccagacaccagaagtctgaatttggagaaggctggggta

SEQ ID NO: 26325 - DNA, 89 bp, Homo sapiens
cggcaaatacttcgacaaggccaggccccgccgtggcgggcatcctctccatccagaacatgacgacattgctggccaatgcctccttg

SEQ ID NO: 26326 - DNA, 100 bp, Homo sapiens
aatgctggctttcagagagaacagcgtttcagttttggtcatcggaagtggtgccttcagcacagaatgacatcttcgagtggtccagggaccaccgagc

SEQ ID NO: 26327 - DNA, 97 bp, Homo sapiens
gagatgcacgttcatcacctagaaagccttttggagcagaaggaaaaagagaacagtatgttgagagaggcagtttgaagagaacacatgaagaaga

SEQ ID NO: 26328 - DNA, 100 bp, Homo sapiens
gctccttacccaagtgggtggtgaataaatcttctcagttcctggctcccaagtttctaagctgactaaacaactaatgctcctggaggcaaaaacccac

SEQ ID NO: 26329 - DNA, 94 bp, Homo sapiens
gattaggccacaatcttcaatgagtaaacatattcctaccatggtgaatccgggcagcagctcgcagccgcccccggtgacggccggctccctc

SEQ ID NO: 26330 - DNA, 100 bp, Homo sapiens
atgaaacagtgtatcaaagtgtggactgagatctccagtctatgtgctgaagaagcagcagcccaagagcagacaggtcaggtggaggagtgcctcaagg

SEQ ID NO: 26331 - DNA, 108 bp, Homo sapiens
ttctctcctgtttgttgtgacatggaggctcaagctgggtctactcaaggattgaaccagctgccctttgaccctgctaacaacaacgagcccctgcagtttggtagt

SEQ ID NO: 26332 - DNA, 75 bp, Homo sapiens
gccgaccgtgtgcgctccttatattcccccgcagaggataagttctgaacgtcgaaaagaaaagtctcgagatgc

SEQ ID NO: 26333 - DNA, 101 bp, Homo sapiens
aacaggaaaatcatattatagatggagtaaagatcaccggcgtaatcaacccagcgttggacaaatactttccgtcagactctggagtgagaatcatagct

SEQ ID NO: 26334 - DNA, 82 bp, Homo sapiens
cttgttgacatagatgcagctgttgtcggcctcctgctggtcagaagttgagtagcaggggcctaggagggctcgaagcctt

SEQ ID NO: 26335 - DNA, 90 bp, Homo sapiens
cgacgatcgggcctacagcagcttcggcggcggcagagggtgacaatctccaatagacttgtgtcttcaccttgctgcattgtgaccagc

SEQ ID NO: 26336 - DNA, 82 bp, Homo sapiens
gtgagaaggtggtgaggcttcccgtcatattccaggtgctggagaatctggtaaaagcaccattgtgaagcagatgaggatc

SEQ ID NO: 26337 - DNA, 99 bp, Homo sapiens
agacatgagatggtagccaacccctcaggcaaatacgccatgcgagacctagtccacaggcttccaggagggaacaacagcaacaacactgcaagcaag

SEQ ID NO: 26338 - DNA, 100 bp, Homo sapiens
ccatgattctatccagtatgtccagaagaatgcaggaaagctgaccaccacttttggagactgccagggaccatgttttgcccattgactattactttcc

SEQ ID NO: 26339 - DNA, 90 bp, Homo sapiens
cgagaaagagatgcgaaacaagttgcagagctacgtggacgcaggaactccatagacccaaatgatttgtacattgtagaacccctcaag

SEQ ID NO: 26340 - DNA, 75 bp, Homo sapiens
ctgggagatgcggggcaatgcactagaaaagaagtctaactatgaagtattagaagagtgataatgaactctcaa

SEQ ID NO: 26341 - DNA, 100 bp, Homo sapiens
aagagccatgaagtttgcctttgaggaattccacctgtggtaccagtttgctctgtccctgatggctgctggaaaagcttccaactgaatatgagaggaa

SEQ ID NO: 26342 - DNA, 100 bp, Homo sapiens
accaggacacgtgcgggatagacggggacaatgaggaggagacggagcacgccaaaggggtgtccggtggagagctgtttgaccggatagtggagaaggg

SEQ ID NO: 26343 - DNA, 100 bp, Homo sapiens
aaaaagttctaggaaaagcactttccttaatccggttcccactgatgacaattgaggaatttgcagcaggtgatctgtgaaaatggttcgctattcactt

SEQ ID NO: 26344 - DNA, 100 bp, Homo sapiens
ttgacatttaattttagggtcctttatatagaagggagagtagacagccacaaccaaagtcccggagatccgtgatgtaacaaggattgagcgaatcggt

SEQ ID NO: 26345 - DNA, 83 bp, Homo sapiens
acaaattatgctgcagcatattgtactggcctgctgctggcccgcaggggcttcgtgggacacatatgcaacatgcctatgat

SEQ ID NO: 26346 - DNA, 132 bp, Homo sapiens
ctggaggctccgggcgcggggaagtcatgctcgcttcacggaggcaatagctagccgtcaggtcaattcagtgaagatatgatacccacagtgggcttcaacatgaggaaggtaactaaaggtaacgtcaca

SEQ ID NO: 26347 - DNA, 75 bp, Homo sapiens
ataaaaataaactgcttgaacatcctttgactggttagccagtggtacacctgatactgttctatgagaaccggc

SEQ ID NO: 26348 - DNA, 101 bp, Homo sapiens
ttccttcttcagtcctgctcgtcggaggacccggttgccatggtgaaggaaaaaggacccagatgatgtggtaccagttggccaaagaagagcctggtgtt

SEQ ID NO: 26349 - DNA, 91 bp, Homo sapiens
gcgccgcgcacttcgtcatgttcttcgcgccctgtccctgaagaggaaggagaaggaatatgagcatgaaatggagcggctggcacgtgag

SEQ ID NO: 26350 - DNA, 75 bp, Homo sapiens
cgcaggtgctcccccacccccattctcttcaggggggcttcctctagagctgacatggacccaaatcctcgggcc

SEQ ID NO: 26351 - DNA, 99 bp, Homo sapiens
cggactctctccggaccccgcagcgttccgacatccagaatgcagatctcactggcatcgaatctatggatcagtgtcgccataccttggaacagcata

SEQ ID NO: 26352 - DNA, 50 bp, Homo sapiens
ccccactcctgggccgtccctgaagactcggtgaaatacctggagtgctc

SEQ ID NO: 26353 - DNA, 50 bp, Homo sapiens
ctttctggcctggaggctatccagcacaaaacttacctggggtccctact

SEQ ID NO: 26354 - DNA, 83 bp, Homo sapiens
atgtcgcgttacgggcggtacggaggaggtctgagagtcactggagctaccagaagcatcatggggccctggggagagccaga

SEQ ID NO: 26355 - DNA, 50 bp, Homo sapiens
gcatccacattgcacataaagttggtaacctggatgaggacatcattgca

SEQ ID NO: 26356 - DNA, 100 bp, Homo sapiens
cttaagttggcaagacactccaagtttggcatgaaagaggttggcgatttgaaggagctgcagacactagacatttctaccaatcgtttgctaactttac

SEQ ID NO: 26357 - DNA, 75 bp, Homo sapiens
gatagatccaccattgcaagacatttgctcagttgcatttgctggtctggcctttgcgtccttctacctggcagg

SEQ ID NO: 26358 - DNA, 105 bp, Homo sapiens
gtctttgtgtcctgagatcaaatggcacttcattggccacctacagaaacaaaatgtcaacaaattgatggtcaccaggagactaaagtccatcaaaaacatcca

SEQ ID NO: 26359 - DNA, 90 bp, Homo sapiens
gggatcccggcaagtaacatgactaaaaagaagcgggagaatctgggcgtcgctctagagaagccactggtgaaggaccgggaagctgag

SEQ ID NO: 26360 - DNA, 116 bp, Homo sapiens
gaagataaagctcaaagattactcaaagcaaagaaacttaccagtgatgaggaccttgttgctcgcctggatgaactcgggggcgtgtatctccagtttgaagaaggactggaaac

SEQ ID NO: 26361 - DNA, 100 bp, Homo sapiens
acccgcattggcagcgggagccgtccggaggacctgggacaccgcggaagtcgggaaatgacttgccttcaaggtgtgcaagtaaggacttatctccaga

SEQ ID NO: 26362 - DNA, 89 bp, Homo sapiens
gatgaggagggctctgatccccccctgccggggagggcccagcgcatccgacagggcgtgatggtgggcatgggtcagaaggattccta

SEQ ID NO: 26363 - DNA, 100 bp, Homo sapiens
ccagagcgggaccccggctgccgagtccaggtgtcccgcgggcctcgatttggggagcagcccgacctgctgaatttcaagaaaggctggctgactaagc

SEQ ID NO: 26364 - DNA, 100 bp, Homo sapiens
ccagtggacaaaagaggggaaactatgggagttcccaattaacaatgaagcaggctatcaagtactagctccaactgcctattatgatcagactggtgcc

SEQ ID NO: 26365 - DNA, 101 bp, Homo sapiens
ctttcgggaaagctctctggggcaggcctggccccaaccctgagacctgtatgaaggtggatagtccacactcagaaaagagaagcaggatggtagtcatg

SEQ ID NO: 26366 - DNA, 75 bp, Homo sapiens
ccgcggccacttttgccttcccggagagtcccacgaactggctgggtatacagaaatgtccagaggccggagagc

SEQ ID NO: 26367 - DNA, 101 bp, Homo sapiens
cgcccaggagacccctctgctgcaccacttcatggagaacaagctcaagttctcggccttcctggagaaggagtacaaggtgaagatcaacccctcctcca

SEQ ID NO: 26368 - DNA, 108 bp, Homo sapiens
gtggggagtggttggaggtgaggatgagtcaacaggttggggcccaaaggcacagcgatcctgttctcagattgagtttatgtggccgaggcagacaagtggaattag

SEQ ID NO: 26369 - DNA, 51 bp, Homo sapiens
ctcgccccccggggaagcggtggatgtctccctctgatgccgagcggaagc

SEQ ID NO: 26370 - DNA, 100 bp, Homo sapiens
tggtgcggcctcaccatacaggaacagggcagacgttagcgtgagtgatcactctcaatcccggcaatggctgccatccggaagaaactggtgattgttg

SEQ ID NO: 26371 - DNA, 75 bp, Homo sapiens
ctgcgaccgccctgcgcttcgtgcaccggggcggtccgttgccaaagccaggccagaggcacccaatgagttcta

SEQ ID NO: 26372 - DNA, 148 bp, Homo sapiens
gggaggcggcggccgcggcggctgctgctgctgcagtgggacaggtggcggcgaccggcggcgtccgaggaggaatggaggatctttggttccataccaatgcaggcatgtcagcagaaggatgtgtttgccaattaccttacttcta

SEQ ID NO: 26373 - DNA, 75 bp, Homo sapiens
cgaggctgcccttctcactcaggctctctatgagaacatgctggtggagctgccctttgcaggcttctttctttc

SEQ ID NO: 26374 - DNA, 88 bp, Homo sapiens
tgaaagccagaatggcatccagagagaggctctttgaactttggatgctttattgtacaaagaaaactttagaaactgttcctttgga

SEQ ID NO: 26375 - DNA, 80 bp, Homo sapiens
gcgggcggccccggccgcctccgcgagggcaccatggaggtgaatgcagaggtggggctggtgtccgagcacttctcgca

SEQ ID NO: 26376 - DNA, 121 bp, Homo sapiens
gggagcctcgccgcccgtccccggcacacgcgcagccccggcctctcggcctctgccggagaaacaggatttgttgagaaagagataagaaaagctaacattccgattatggacaccggtg

SEQ ID NO: 26377 - DNA, 100 bp, Homo sapiens
cgagaagcaagcggaacttcctgaggaatactcccccagttgcaagaggcgcaggaccgtggaagacttcaacaaattctgcacctttgtcttggcctat

SEQ ID NO: 26378 - DNA, 140 bp, Homo sapiens
cgcagcttggatggccacttacctgaatgaccacctagagccttggatccaggagaacggcggctggaaaatggacccaagtggggtcaaagtgctggaaacagcagaggacatccaggagaggcggcagcaggtcctag

SEQ ID NO: 26379 - DNA, 80 bp, Homo sapiens
tttagacggtgggaagaccgcaaggaaatgcaaaatgatgcttcaacacccaggccaggtctctgcctcggaagtgagtg

SEQ ID NO: 26380 - DNA, 139 bp, Homo sapiens
gcgggactcacggcagaagtgagctggaaggtcttggagcgaagagctcggaccaagcgctcagggccacgcctggctgaaagatgacgaagcgacacactgtaggcagtgtgagaaggagttctccatttcccggaga

SEQ ID NO: 26381 - DNA, 100 bp, Homo sapiens
caggctgccattgtcaaagagaagggaaccgtatacttcaaggctatagaaagcgcaattggtggtaacgcttatcaacacagcaaagtgaaccagtgga

SEQ ID NO: 26382 - DNA, 75 bp, Homo sapiens
aagaaacaaaagttcacctctgcgaagaattaaacaaccaccatgtcgagcaaaaaggcaaagaccaagaccacc

SEQ ID NO: 26383 - DNA, 82 bp, Homo sapiens
gcctacgccctggggctggacaccgtgatgatgaacagtctacacagatggctgcaagttgggaagatgataaagttacaga

SEQ ID NO: 26384 - DNA, 100 bp, Homo sapiens
cctaaatagctgacattgcatcttcaagactgtaattgcctgaggttctgtccattgaggaggaagtggaagaaacagagtcttgggcgaaacctctcat

SEQ ID NO: 26385 - DNA, 100 bp, Homo sapiens
gccaaggttccgcgccgggcgtggacggtgtggggcggtcccggccccgcagggaaccttctgaccagcctcatgggctcctcagagcaggaggatgggg

SEQ ID NO: 26386 - DNA, 75 bp, Homo sapiens
cctccgtgcggagaccactgttcaaggccacaggctaccggctctctgaccagttccacgacatcctcattcgaa

SEQ ID NO: 26387 - DNA, 98 bp, Homo sapiens
caaggtcgtgcggtgtgtgtagaaggacattcagtgagataaataaagcggaagagcaatacagcctatgtcaagaactttgcagtgagcttgctcag

SEQ ID NO: 26388 - DNA, 95 bp, Homo sapiens
aatcttggagaagggtctaaaggagctgaagaagaagctgttcaaacgccggcgggtgttgaatcgggagcggcgtctgaggcaccgggtggtcg

SEQ ID NO: 26389 - DNA, 100 bp, Homo sapiens
atttgaaattaatcccagacacccgctgatcagagacatgcttcgacgaattaaggatgatgaaattaaccagcagagccagctggctgaaaagctgaag

SEQ ID NO: 26390 - DNA, 82 bp, Homo sapiens
ggagggaagccacaagcagactgacaacgtttctagggcacctcaacacctttgcttcgaatagcctgggctcgaatcatat

SEQ ID NO: 26391 - DNA, 103 bp, Homo sapiens
gggacctgcatgtgtgtgcgcgcgaaggagcggaagaatggcagtgctcaaactcaccgaccaggtggtgatgatgtccagcaactctgtgaagcaggagaag

SEQ ID NO: 26392 - DNA, 96 bp, Homo sapiens
tgcctcttctccggccggggcggcgggagggggctgtggactggccgcccgcagtcagatattctctaagccgctttcatcatgggagaaatagag

SEQ ID NO: 26393 - DNA, 100 bp, Homo sapiens
gccccctgggatccgcaggttccctacacggtctcctgggtcaagatacagtaccaatgaaggggagacctggaaaacattcatcttctctgagaagcca

SEQ ID NO: 26394 - DNA, 100 bp, Homo sapiens
tagaacctattatgctctatcaggtggcttcccacacttctgactcggacgttccttccggtgtcactgaggtggtcgtgaagctctttgactctgatcc

SEQ ID NO: 26395 - DNA, 96 bp, Homo sapiens
gtggaggagctgtgcagccgcgaggaggcgcgggaggtgttcgagaacgaccccgagacgctggtactcctggttaatcaacagcttcgtcaacgg

SEQ ID NO: 26396 - DNA, 75 bp, Homo sapiens
tgtgaagatgctgtaaaaagattgaaagctgtttcctatcctgggagcaggagagtgtgcctatttgaatgacaa

SEQ ID NO: 26397 - DNA, 102 bp, Homo sapiens
aacctgtccagcgatgatgccaatgtcctggtgtggcacgctctcctcctacccgatgtctcagtggtacgaacttcagcagcttgactcaaaattcctgga

SEQ ID NO: 26398 - DNA, 98 bp, Homo sapiens
ctttcggctagcagccgtgtggctagaactacctctgatcatctttggctcggacatcatcatgcagctggacgacgtggttagcagtactgtgactg

SEQ ID NO: 26399 - DNA, 75 bp, Homo sapiens
ggggcattgctgtggaagtgcaggacacggaaggtgtcttgctgcaggtaactaatgaagaagtggtcaaccaca

SEQ ID NO: 26400 - DNA, 99 bp, Homo sapiens
agcttttgtaactgatggaaattttgactctgccagctcattgaactcagataatcttgatgcagttggtctcttcccatggcgatgtccatctgccac

SEQ ID NO: 26401 - DNA, 96 bp, Homo sapiens
agcaaaacaagaaatttcaaaacttgatcaagagctcaggccccggggcctccagcggcaccagcggagaccacggtgagctcgtcgtccggattg

SEQ ID NO: 26402 - DNA, 87 bp, Homo sapiens
gcgcagtacaccaacgcggtgcgcgaccgggagctggacctccgggaatggagatgaggcgcctggtgtttggatgatcccaacttc

SEQ ID NO: 26403 - DNA, 85 bp, Homo sapiens
cccagccgggaactccccatcgcgttttgccagcgataatacgcctcagaagtttgggaagttgatgaacagatcaagaagcaac

SEQ ID NO: 26404 - DNA, 100 bp, Homo sapiens
cctccttccatgaatcacaaatgttcttaatggcatctagaatggaaagtcatttagcatcttcattatccaagtctagtgaaggaagagagaaaacgtg

SEQ ID NO: 26405 - DNA, 98 bp, Homo sapiens
agatgccccggtaccgaggggcggcgctggcgcgggaggaggcctttgaactggccacaggtgactatttgtttgaacctcattcaggggaagagtac

SEQ ID NO: 26406 - DNA, 96 bp, Homo sapiens
tcctaccactttggcatcgtcggcctcaacatgaatggctactttcacgtagatgatgagctggagatcaaggcctactatgcaggccacgtgctg

SEQ ID NO: 26407 - DNA, 75 bp, Homo sapiens
agcagatcgagaccatggggaaactggacgagcatcaaggactcccaaattcgtcagagcacagcttatagctta

SEQ ID NO: 26408 - DNA, 109 bp, Homo sapiens
ctgaaccattgcttctgctttcggggatgcagctggccaagctgatccgacagagaaaggctggtcgtctgatgataaggaaattagttgcagagaaattgaatatccc

SEQ ID NO: 26409 - DNA, 101 bp, Homo sapiens
ctggtactgggatttttgtattattctgcgtggaagctacacttactccagtgggaggaggactccaattcctgtctgactaaagggacctcaaaaaggag

SEQ ID NO: 26410 - DNA, 48 bp, Homo sapiens
cacggcgtggcctctcagcctcggtgacaaacagcatgtttggtgctt

SEQ ID NO: 26411 - DNA, 95 bp, Homo sapiens
ccacctcgtgaacgaagattcgaaaagccacttgaagaaaagggtgaaggaggcgaattttcagttgataggaggaaacaccaattggaagcctc

SEQ ID NO: 26412 - DNA, 50 bp, Homo sapiens
tggtgcttaaatccagctgtgctgtcggaaaaggtaacagaagatggaac

SEQ ID NO: 26413 - DNA, 100 bp, Homo sapiens
ctgaggagcgggcacagggcaaggcggcggacggctgcgtcgcccgaggcgaggaggagcgctggcgattattaagttcctgcaacttaactgggaactg

SEQ ID NO: 26414 - DNA, 100 bp, Homo sapiens
ggttgaagttggagaagtatccaatagggatattgtagaaactgtctttaacctgggccaagaccagcttcaagtctccatggtaccagaaaacaacaac

SEQ ID NO: 26415 - DNA, 50 bp, Homo sapiens
cttctctttgttttgggcggctcggagtctctggacaagtgggaacgtct

SEQ ID NO: 26416 - DNA, 100 bp, Homo sapiens
ctcttggttcagatgtatctgggaatagtgctgagacaggactgaaagactatttctgcatttgaagtccagccaatttccactgaggtccacgaaggtg

SEQ ID NO: 26417 - DNA, 118 bp, Homo sapiens
tccgtttaagagaagctcaaggccgaagccgagcagaggatctaaatacaagagtggcctattgcaatggcaccagcatgatatcattgatcattcctcccaaagaccagatttcacg

SEQ ID NO: 26418 - DNA, 98 bp, Homo sapiens
atcttcaggaattttactgggataattatccaaataaattgcaagcattctatccaaatgggagatgcagttaaagacttgatgcttcgctttctggg

SEQ ID NO: 26419 - DNA, 80 bp, Homo sapiens
tcgagcactaatatttaagaaagaagatgttaactttcagatgcggcattccaaaagaactcactgtcctgattgggata

SEQ ID NO: 26420 - DNA, 100 bp, Homo sapiens
caggctggttaaagcagcaaaggtagcctttccagtaaatatatgactcagggaaaagcctcagcgaagaggacccagcaggaatcatgagggaaggaaa

SEQ ID NO: 26421 - DNA, 83 bp, Homo sapiens
cgcgccgaaaaggagcgcagctgcagcccgcagggcgccatcctcgtgctgggttctgggccggagaaggggcgacgttcggg

SEQ ID NO: 26422 - DNA, 75 bp, Homo sapiens
ttcctctttctcgactccatcttcgcggtagctgggaccgccgttcagcccattcacctgcttacgtgatggcca

SEQ ID NO: 26423 - DNA, 100 bp, Homo sapiens
tgattagagacatactaatgtacatgctgcggcttgatgagacccaggaggcagagttccaggcccttcggcagcagcttcaacaggagctggagctgct

SEQ ID NO: 26424 - DNA, 100 bp, Homo sapiens
taaagattctgatgtcgaaggtggagaggtcctttacttggtgcattactgcggatggaatgtgaggtaccctcacctgagtcccaagtacaaggagtct

SEQ ID NO: 26425 - DNA, 50 bp, Homo sapiens
cttccctgacaagaagtccgaaggggagaatgaagtttctagattagaag

SEQ ID NO: 26426 - DNA, 89 bp, Homo sapiens
ctctgacaccagcacagcaaacccgccgggatcaaagtgtaccagtcggcagcatgggagatcatgcacgccctgaagatgacctggca

SEQ ID NO: 26427 - DNA, 96 bp, Homo sapiens
gcgaagcgggtcctggtgaccggcggtgctggtttcatgttgaaatcacaaagattagacacctttttagataggtgttcttcagcaccactgaca

SEQ ID NO: 26428 - DNA, 75 bp, Homo sapiens
acttctgcagtacgagaacgtggatgaagactcttcgggcatccgtgtcattctggaccttactcccaactaccg

SEQ ID NO: 26429 - DNA, 100 bp, Homo sapiens
aaggactctgggaaaatggcctttcctatgaatgtaggacgctgctcttcaaagcgatccacaatctgttagaaagttggtgtaatacggtgcccagtat

SEQ ID NO: 26430 - DNA, 100 bp, Homo sapiens
tcacgttacaactgctagtttggacggagaaactaacctgaaggcaactttggctttggggattcacgtggtggcggtggaaatttcggaccaggaccag

SEQ ID NO: 26431 - DNA, 73 bp, Homo sapiens
gggggttgtcggagggattccaccaagcaggtacaggtttgcagattccgccagcagcacagcaagctctaca

SEQ ID NO: 26432 - DNA, 83 bp, Homo sapiens
taacagctggagagaacagttcattgaagctatcactgtcagtgctgccatcactggtgcaagctatatttaacggagatcct

SEQ ID NO: 26433 - DNA, 96 bp, Homo sapiens
gtggaaagagctactggggatgagagaaagaggaggaggcagttttgattacgaagatgcaggctaccagactgcagaacttgtaaaaatggatat

SEQ ID NO: 26434 - DNA, 98 bp, Homo sapiens
gggaagatgccgctggcgcagctggcggacccgtggcagaagatggctgtggagagcccgtccgacagcgctgagggagagataatgcatgtgagaaa

SEQ ID NO: 26435 - DNA, 83 bp, Homo sapiens
ccggccggtgccagcacctttcggcttctgagacggcggcagcagcggcattcagattacctaggaacagtacgatttggggt

SEQ ID NO: 26436 - DNA, 72 bp, Homo sapiens
gagagaaaatggcgtccacggcttatcaaccagcccagccgtatcccttcggaacaggggggtcagcaatgt

SEQ ID NO: 26437 - DNA, 97 bp, Homo sapiens
tggggaccatgggctccaggatcaaaccagagtgaactccgagcaggaacacttcctcattgtcccttttgggcttctttacagtgaagtgactgca

SEQ ID NO: 26438 - DNA, 97 bp, Homo sapiens
cgagccaggggagcgcagccggaccatgcctcgcaccgtgcccggctctaccatgaagatgggctccctggagagagaatggcttactacacctcca

SEQ ID NO: 26439 - DNA, 75 bp, Homo sapiens
gtatatctcagcccttcatttgacagtgtactgccccgttacttatttttacaaagggcttattccaaagggcca

SEQ ID NO: 26440 - DNA, 100 bp, Homo sapiens
ggaaaaccgaagttggaagtgtctcttagcagcgcgcggagaagaacggggagccaggctggcgcccatgcggctctacacgctctccaagcgccacttt

SEQ ID NO: 26441 - DNA, 74 bp, Homo sapiens
agagatgtgatgttggagaactatagcaatctggttttcttggaaatggtggtgaatctacagaaacaatttag

SEQ ID NO: 26442 - DNA, 98 bp, Homo sapiens
atgactccaagaaagttaaagtacaaaaagtacagtctgtcaggcaatttctaaaccgggatgacattggcatcatcctcatcaaccagtacatcgca

SEQ ID NO: 26443 - DNA, 100 bp, Homo sapiens
ataaccaggtgcttggcaaaatcgagcgggccattggaaagaccacagcaagattctttcattcgtctcctcctagcctgggggaccaggctcgaactga

SEQ ID NO: 26444 - DNA, 75 bp, Homo sapiens
gtcggccgcatccgtttccacgactttctgggagactcaggaattccagggaagaaatgtggtacaatcatactt

SEQ ID NO: 26445 - DNA, 83 bp, Homo sapiens
atattacatgctgcaaagcagatagcaaaacacttactattttggagtttaaagtatgtcatcatggcaaagtttcggagaag

SEQ ID NO: 26446 - DNA, 90 bp, Homo sapiens
ggggcctcattttggatatctgtgataaagttggtcagtctcgcactgggcagtatttggcagtcgtattcagagataaacccctggagc

SEQ ID NO: 26447 - DNA, 74 bp, Homo sapiens
aacattgagacatttctttcggatccatcagttacacaagtgacaagaaatgttccaccaggacttgatgaata

SEQ ID NO: 26448 - DNA, 128 bp, Homo sapiens
tcattgtcacctcctgtagtggagcagatcatcacctccatgaagtgcatcatggggcaggatggcaccagccttgtgtttgatgatggtgatgagcgaacattgagacgtacctcactttgtctgaa

SEQ ID NO: 26449 - DNA, 100 bp, Homo sapiens
tagcgacgaggagccggctttgagcaggactataagacctacttggactttgtccttgcattagaaaacagaaaggaacctgcagctctacaatatattt

SEQ ID NO: 26450 - DNA, 75 bp, Homo sapiens
ggccggcgagcagatgagaccgctactcacccggtgatgtcttggcattgcccattttcaagcaggaagattcca

SEQ ID NO: 26451 - DNA, 82 bp, Homo sapiens
cttaaagtttcctagatcccagctttttttcagaagaagtgaagtcaagatgaagaaccatttgcttttctggggagtcctg

SEQ ID NO: 26452 - DNA, 82 bp, Homo sapiens
agaatggttctatgaggaacgagccaagaaatttccaactggagatcaatgtccgagttaccaccatggatgcagagctgga

SEQ ID NO: 26453 - DNA, 48 bp, Homo sapiens
atctctgttccaaatgctttgctgaaacctctgcgccatgagagccaa

SEQ ID NO: 26454 - DNA, 75 bp, Homo sapiens
tacccagggagaggaattacgggaacagaaagaaaagtccgaaagagctgatgggcttaggtcacgagcaaggat

SEQ ID NO: 26455 - DNA, 90 bp, Homo sapiens
taaagaaatcagtccttcctttccgacttagtcctcgggaagaagtttcagactacaagacagattatgagggacaagccaagaaactcc

SEQ ID NO: 26456 - DNA, 75 bp, Homo sapiens
tgatcacgcagctggctggcttcagtggaccaaaagctgatgtcctgaccactggagctggtaacccagtaggag

SEQ ID NO: 26457 - DNA, 90 bp, Homo sapiens
tcggcttccacacggtgacgtgctgcggcttcatcccgcagagcttcatagcaagtgaagtactcaagttgttcagtcttaaaaaggagc

SEQ ID NO: 26458 - DNA, 129 bp, Homo sapiens
gatcggaacaagattttgagcatcttatcccagcacatcaatagcaacatgccacaatcacttaaggtgaccttggagaaggtgctgggaattacagtgtctggaggcagaggacttgcctgtgacccc

SEQ ID NO: 26459 - DNA, 95 bp, Homo sapiens
tctgatgaaaccctctcggctttatgatgcttatgaactgaaacatgccttgaagggggcaggaacaaaggaccggaccctgattcgcatcatgg

SEQ ID NO: 26460 - DNA, 82 bp, Homo sapiens
gatccgagccagagtggagcgtaacgcagtggctggacggcagtctggaaacgaccaatgagatcttggactctgcctctca

SEQ ID NO: 26461 - DNA, 95 bp, Homo sapiens
ggaggccagatagtaccatgatagctgtatcattcattatgctgacatatcttttcatgttggcctggctgggagtcacggctttcacctcactg

SEQ ID NO: 26462 - DNA, 83 bp, Homo sapiens
gctgcatcttccaatcttccagggaagtgggaaaactcttgcctttgccatcccaatgattcatgcggtgttgcagtggcaga

SEQ ID NO: 26463 - DNA, 100 bp, Homo sapiens
catgcagattatatcgcatcctatggctcaaagaaagatgattatgaaccacgtgaatgttgagggggcgacacacaagcaggtggtggacctgattcga

SEQ ID NO: 26464 - DNA, 100 bp, Homo sapiens
ggccctggccccgatggctctgtgcaacggagactccaaggatggagggtacagagtctgcctacatcagctcctttgtctgtttctcttccgacaaaca

SEQ ID NO: 26465 - DNA, 83 bp, Homo sapiens
tgacgggatcgctttctcccatcgaaccttctagttgcttattgcaggctatgacttctgccaggtcctgcagtggtttgccg

SEQ ID NO: 26466 - DNA, 82 bp, Homo sapiens
agagccacacacaccatcatggtcctggctccaactattatgtgcgcatcctgagcaccatcgatcgggagctgctcaagcc

SEQ ID NO: 26467 - DNA, 100 bp, Homo sapiens
agaggggccgcggaaacctggagtggaaggaggatgcggctgtgaaggggcggctggtggaatgtctggagactgtgctcaacaaggcccaggagccccc

SEQ ID NO: 26468 - DNA, 74 bp, Homo sapiens
gtctgtgaagccacacagtgtccagatacgaggtctatacgagatactccagccaaaaatgcacaaaagtcaaa

SEQ ID NO: 26469 - DNA, 50 bp, Homo sapiens
ctttgggaaagccactcgaaaagtatctctcagaagatagaagtgtgcaa

SEQ ID NO: 26470 - DNA, 98 bp, Homo sapiens
ccgcctccgccaggtgcgcatctctatgaagaacttggagacagctcaatgtttactcctggcttgggggcattaggaagcactggaggctcttcggg

SEQ ID NO: 26471 - DNA, 90 bp, Homo sapiens
aagacccagaatatgccaagtatctaaaacaaggcgcctctgtcgaagagccttctgctggtccccagtgccctctccctcctgctcgcc

SEQ ID NO: 26472 - DNA, 82 bp, Homo sapiens
gcaccgcaagctccctcctcgcagtatcctggtgtgaaccagctatcctccagtataggaggattgagtcttcagagttctc

SEQ ID NO: 26473 - DNA, 75 bp, Homo sapiens
acattgaagatgagcaccaaaatcctaggagaaacctaaggaatcctgcaatatggcgaacataagagaatatta

SEQ ID NO: 26474 - DNA, 100 bp, Homo sapiens
tggcatctagactttggtttacatacaggaaaaactttccagccattgcacaagcagcgctgccctgtgctggaggaccagttggtggatctggttgttt

SEQ ID NO: 26475 - DNA, 82 bp, Homo sapiens
cagcacatggtgggggccacaccatttgccgtggccaggctagagtgcgtaaattcacagagaaacacgaatgggtaacaac

SEQ ID NO: 26476 - DNA, 98 bp, Homo sapiens
ttttaagcctatactttctaccagaagcttgaagggtttggttaagcctcgtcacgtgttcaatatgctaaagaagtatgtccgcgcagaacagaagg

SEQ ID NO: 26477 - DNA, 100 bp, Homo sapiens
agacagaataggaaccggcggctcggtggtggactgcagaggactgttagaaaatgaagggtcctgcaggatatggtcccccctaagaagcacctgctcc

SEQ ID NO: 26478 - DNA, 75 bp, Homo sapiens
gttggatcttgctcagtctctgtcagaggaagatcccttgcaacagccaactcagtttataaatccagaaacacc

SEQ ID NO: 26479 - DNA, 75 bp, Homo sapiens
gtctctgtccgggggcctggctaaggaaaccctattacctccagacatctcgtggggaatttgactccagtgaat

SEQ ID NO: 26480 - DNA, 75 bp, Homo sapiens
aggttcgagcgctgttctcgctccggagccgctgcacatttcggttttcaaatggaacattttgatgcatcactt

SEQ ID NO: 26481 - DNA, 83 bp, Homo sapiens
atttgcgacgcctcggaagcatgtgtttctgccttgctgggaaacgaggcttcaacggaccacaccaaaatgccatctcaaat

SEQ ID NO: 26482 - DNA, 82 bp, Homo sapiens
ccaaacagcggcgtttcacggtggcacatacatgacttaattcagtgcacaaatgagatgaatgtgaacatcccacagttgg

SEQ ID NO: 26483 - DNA, 78 bp, Homo sapiens
aagaggattgcacggaggagctctttgacttcttgcatgcgagggaccattgcatggagtctcactctgtcgcccagg

SEQ ID NO: 26484 - DNA, 75 bp, Homo sapiens
acaagctgtgatggacttcatcaaggatttacccattagaaagtcacagagtgaaaaggtgagattacattggcc

SEQ ID NO: 26485 - DNA, 98 bp, Homo sapiens
gatctgttgcagagtatccagaggatggaggagaaaatcaagaacctcacgcgggaaaacgtggaaatgggagcttctgataattggaggtgttgcag

SEQ ID NO: 26486 - DNA, 100 bp, Homo sapiens
gcggtattctggtgcttatggtgcctcagaataatcatgggccagactgggaagaaatctgagaagggaccagtttgttggcggaagcgtgtaaaatcag

SEQ ID NO: 26487 - DNA, 83 bp, Homo sapiens
ccatacctgatccggagaatcgaggagctcaacaagatcgcaccccctccctccctggcggagcccctgaaggagctgttcag

SEQ ID NO: 26488 - DNA, 75 bp, Homo sapiens
cagagtgctgttttagagctggcagcagcatctcagcccaagagaagagcagcccgacggccatggaggctgaag

SEQ ID NO: 26489 - DNA, 100 bp, Homo sapiens
ccaccggggtcttcgtgctgtccctctcggccatcccggtcacctatgtcttcaaccacctggcggcccagcatgaactcagcgtaaaccagatcactga

SEQ ID NO: 26490 - DNA, 74 bp, Homo sapiens
ctgccttatgggacagatcaaatgtgactgccatcatcttcgtggtggccagcagcagctacaacatggtcatc

SEQ ID NO: 26491 - DNA, 82 bp, Homo sapiens
cggttccttggtgtcatccagccttagcaaaccagaggacagtaataccccacttttattcgctataatttgcaagaaagag

SEQ ID NO: 26492 - DNA, 101 bp, Homo sapiens
aggatgttggatccaaaagtcagttagtgacagctaatcccagcataattcggcaaaggctaatagctcgtcagcttgctaaaatccatgctattcatgca

SEQ ID NO: 26493 - DNA, 101 bp, Homo sapiens
gccgtgccgaggatgccatcattgccctttccaattacagacttcacatcaagttcaaggagtctcttgttaatgttcccagaccagaggactgttgttag

SEQ ID NO: 26494 - DNA, 100 bp, Homo sapiens
ttacagaaagaaaagtcaaccaaatcagagggaaaacatgaaggtgtctatagagaactgggccatcgatgcacccctcggagctaatagcggagatgag

SEQ ID NO: 26495 - DNA, 100 bp, Homo sapiens
cttctctgaggcggcgagagatggtcaggtctggagctcgaccgggccagatgttctcaaatagtgatgaagctgtaatcaataaaaaacttcccaaaga

SEQ ID NO: 26496 - DNA, 90 bp, Homo sapiens
tcaagaatgaagctgcggaccctcgtgtatatttaaagttggagttcgttgctaaagatggcagacccagatgtcctcactgaagttcca

SEQ ID NO: 26497 - DNA, 101 bp, Homo sapiens
gcacctatggacaagtctataaggattctgaaaccttccttgtatccctcctgagacatctttgctgcaagatcgaggctgtcctctggtgagaaggtggt

SEQ ID NO: 26498 - DNA, 75 bp, Homo sapiens
ctgttcggcctgccatgtggaaaatgatgcttaatatcgatgaccccatatcatgtgaacctcctcctggctggc

SEQ ID NO: 26499 - DNA, 101 bp, Homo sapiens
gtcacctccttccagaaagccaacatgctggaccagcatcacaccgacctgatcttaaagtctctgctggatgaaccgaatcctaacagtccagccaatag

SEQ ID NO: 26500 - DNA, 74 bp, Homo sapiens
aaggaccagtacctgcccaggaaactgataccgtggccagccagtgacagaaaaaagagtgaatgtgcctttaa

SEQ ID NO: 26501 - DNA, 89 bp, Homo sapiens
gcagaagttggcaggagcatgggcttcggaggcctatagcccgcagagcacaaagttatcattgttgggctggataatgcagggaaaac

SEQ ID NO: 26502 - DNA, 111 bp, Homo sapiens
cccctgtgtttctccattctgttggttttatgcatctttatccaatcaagtgcccttggacaaagcctgaaaccagggtactgccagggggatggttaccgcatcggcttt

SEQ ID NO: 26503 - DNA, 75 bp, Homo sapiens
ggctgtgcagggccccgagccggcccgggtcgagactgaaatcgccaagagattgaatacgatttgtgcacaagt

SEQ ID NO: 26504 - DNA, 100 bp, Homo sapiens
acctggcatatctgggcgccaagccgcggagcctccagacggcatcccagccatcactcttccacctgctccttagagaagggaagatgagtgagtcgag

SEQ ID NO: 26505 - DNA, 100 bp, Homo sapiens
agctgtggccgtgaaggtggcagaaggacagcataaggaagccaagttggaccgttctgatgtgactgagagagaagttcacacaaaagatgttggacaa

SEQ ID NO: 26506 - DNA, 74 bp, Homo sapiens
aagtattactaattggtgatactagatcaatgaagcaatctgcacatcgtgctgccacacgaggcttcattcgt

SEQ ID NO: 26507 - DNA, 100 bp, Homo sapiens
tccgggccatggataagaagaaagtgttggtcaagggcaccctggaaggtgatgtttgtggtgtggagcctcctggcccaggagacacagtagtccaggg

SEQ ID NO: 26508 - DNA, 83 bp, Homo sapiens
aagggaccaaggtggaaatcaaaccggatcgtgtgaagaagggatttgacttccagtggccccaacccgataaaccgatgttc

SEQ ID NO: 26509 - DNA, 49 bp, Homo sapiens
tcctgtacagcctgcagaactaaataccctgatgtattaggagaatgaa

SEQ ID NO: 26510 - DNA, 150 bp, Homo sapiens
gaaacggctccagcggaatcgacttaccaaagagcaactgaaacagattcctacacatgactatcagaagggagaagcagaagctgttggatgagatagagtcgctgacgctgcggctcagtgaagagcaggagaacaagaggagaatgg

SEQ ID NO: 26511 - DNA, 90 bp, Homo sapiens
ccgcagcctcctgaggatctgggattacaggggccacctacagatgctcctgcagtggacacagcagaacaagtctatatctcttccctg

SEQ ID NO: 26512 - DNA, 82 bp, Homo sapiens
cgggagtgttcgttgtgccagcgactaaaaagaggaagccagcagacctgcagaacttggctcccgggacccacccaccatt

SEQ ID NO: 26513 - DNA, 90 bp, Homo sapiens
gttattcaccatgtacacagcctgtacccttctgctcctttcctggcagcaggggtttcaatgggaggatttgctgtcatgaaccgaaaa

SEQ ID NO: 26514 - DNA, 74 bp, Homo sapiens
acaaccttcgatctcctgacgagctgtgggtgagcgtggaggatgctcagatgcacaccgtcaccatctggctc

SEQ ID NO: 26515 - DNA, 98 bp, Homo sapiens
agcctgcaggagctgggccgcagcctgcacgagtgcgccgagcttttccagaagcctgttaaaagcaaggtctccccacaagcaacttctctgccaca

SEQ ID NO: 26516 - DNA, 100 bp, Homo sapiens
gggagcccgcgtcggctgagagcccacaggcccccacagagaatggcaaatcggttcattggaaacttggagctgataaggaagtctgggtatgggtgat

SEQ ID NO: 26517 - DNA, 71 bp, Homo sapiens
gaaaaacaccttggcccgccggaagggcaggcacatgggcataggagctgttttggcccacaaaggatatt

SEQ ID NO: 26518 - DNA, 100 bp, Homo sapiens
gccattcgccaggctcttcaggatctgctttcagagtacatgaacaacgattttatgggcagctgcagaagttctgtcccccacactaccccgattccca

SEQ ID NO: 26519 - DNA, 82 bp, Homo sapiens
ggcagattagcgacatccgagtgcagaacctgcaagcgagtgatagacagccaagcagagaaactgaaggagcttgacaagg

SEQ ID NO: 26520 - DNA, 97 bp, Homo sapiens
gcggcgcccgccaccggctccctcgggagctcatcttcgtggggcgtgaggagtgtgagctcatgctacaggctgaggctgaggtggcctccttgaa

SEQ ID NO: 26521 - DNA, 90 bp, Homo sapiens
gcacaaaggcccaacttgataggactaacatcaggggatatggatttgccacccagaggttctaaggcccagcagctactacaaggattg

SEQ ID NO: 26522 - DNA, 83 bp, Homo sapiens
ggtccgtcaaaatctttgatgtgcgcaatggagggcagatccttatcgccgacctcaggggactcacactatcttctcactgc

SEQ ID NO: 26523 - DNA, 51 bp, Homo sapiens
cctactgcaatctactgcactcgagcattgatctggtagccttgctccaga

SEQ ID NO: 26524 - DNA, 98 bp, Homo sapiens
gtagcgtatggtgctgctgtccaggctggtgtgctctctggtgatcaagatacagggatcgcctccggaccaccaccaacgtactgggagactccctg

SEQ ID NO: 26525 - DNA, 97 bp, Homo sapiens
aataataagtcacaaagggaggagctggactccatcctcttcctttttgaaatgcctttgagtaatggacagatgggccagcctctcaggcctcagg

SEQ ID NO: 26526 - DNA, 49 bp, Homo sapiens
caggaaccattctgagagtcaagtccttttgcctgagaatacagatcaa

SEQ ID NO: 26527 - DNA, 100 bp, Homo sapiens
cagagcagaggaaggctcatgaaaaggtgatgcagaagatggggaagaatatgatgacccttttgctgggcctccagacactatttcattagcctcagaa

SEQ ID NO: 26528 - DNA, 89 bp, Homo sapiens
atcaggtattatgatgagctgtgtacagcaatggctgaggaattgaatgctgtcattgtttccattgaacactattttgcactgcctac

SEQ ID NO: 26529 - DNA, 82 bp, Homo sapiens
cgatccgccgcccgtccacacccgccgccagcgtttagtgggctacagatggcatggcatctaaaaccttacaatgcttgat

SEQ ID NO: 26530 - DNA, 97 bp, Homo sapiens
ctggaaagaaaggctggcttgtatggaagagttccagaagagcagcccgacggccatggaggctgaagagacgatggaatgccttcaggagttccct

SEQ ID NO: 26531 - DNA, 98 bp, Homo sapiens
cgcgtcgcgcccgggaggaaggaacgaggcaaggagctaaagcagcgtgcgttcagccctgggtagaacttcatggaggaacacggagtgacccaaac

SEQ ID NO: 26532 - DNA, 100 bp, Homo sapiens
cacgccagccgcaccatgccgctcctaagcctgcacagccgcggcggcagcagcagtgagagatgccatggacaatattaccaggcagaaccaattctac

SEQ ID NO: 26533 - DNA, 50 bp, Homo sapiens
ctgtgacctgccccttctctttacatgtcatttgtcagagtgaaccgctg

SEQ ID NO: 26534 - DNA, 80 bp, Homo sapiens
ggcctgcaccatgagcgtcccggccttcatcgacatcagtgaagaagatcaggacagtcattttgtttactcattcagcc

SEQ ID NO: 26535 - DNA, 50 bp, Homo sapiens
ggcctcttctggaccaggaaactctccaccactgcctcctaaaccaccaa

SEQ ID NO: 26536 - DNA, 90 bp, Homo sapiens
gtgataagaagcacctggatgagacatttgctacagcatcccacattaagtcaacggaatgtatcctgtcaggtataatgtcagtgaatg

SEQ ID NO: 26537 - DNA, 83 bp, Homo sapiens
ggcggagaccctcgaagtgcgcaaacttgacactcaccctgaccgaaactgccaagttttggaccttatctggaacagcgcaa

SEQ ID NO: 26538 - DNA, 75 bp, Homo sapiens
ggaaaacatatccattaaatgggaggactacactgaaacattcaaatgtgtggcgaaaacataattttcattcct

SEQ ID NO: 26539 - DNA, 82 bp, Homo sapiens
gcttatggcggcgctggagagggggcgctgagctgttggggtcgcaatggaagaagagatcgccgcgctggtcattgacaat

SEQ ID NO: 26540 - DNA, 97 bp, Homo sapiens
aacacaaagcagcccaaccaaaggcacaaagacattagcaggctgctggtttcatggacctgtaccacaatgacacagagaacaccagagcatcagg

SEQ ID NO: 26541 - DNA, 50 bp, Homo sapiens
attcagcggtactggtgtataatagcatttcagcaggaacttgatgcaag

SEQ ID NO: 26542 - DNA, 83 bp, Homo sapiens
ctcgcgcggcgctggagagagacaagatgtccgccagagctgcggccgccaagctgtttgcagacaaggtcccaaagacagca

SEQ ID NO: 26543 - DNA, 85 bp, Homo sapiens
gtgaacaagatgaagaaggaagggaagctgatcatgggcattggtcaccgagtgaagtcgtgcacagccagagaacaacacatca

SEQ ID NO: 26544 - DNA, 74 bp, Homo sapiens
agcacatcgagaagatggtggaggacctgcccagacgcctcagaggcccccaaaaggatgagctgaagtccttc

SEQ ID NO: 26545 - DNA, 100 bp, Homo sapiens
gcttactcggcgcccgcgcctcgggccgtcgggagcggagcctcctcgggaccaggaggaagagtttgccagcccgggatggaggcttcaccctggaaga

SEQ ID NO: 26546 - DNA, 82 bp, Homo sapiens
ggcgtccgcctcgacccaaccggcggccttgagcgctgagcaagcaaaggtttcagagtgctggccacaccaaagcatcagc

SEQ ID NO: 26547 - DNA, 100 bp, Homo sapiens
gcacagaggcaggaaactcaggtgtcatagcttggctcagatccagctccaggtcccacaggggctcttcttccccacgaaaaagatcttattcaagttc

SEQ ID NO: 26548 - DNA, 96 bp, Homo sapiens
gtcagcgcaaccaaaaggagatccaagaatcgagtaccagttttttgaagacagacacagttttccaagagataacttcaccaagatgtccagtga

SEQ ID NO: 26549 - DNA, 100 bp, Homo sapiens
cttttagaatatgaaaataagagccctgaggatccacaggtcttggataagctgaaacacttttccaggaaatctgccccaatgaagatttctgtccccc

SEQ ID NO: 26550 - DNA, 50 bp, Homo sapiens
aacctactatgagggtcgagcagagagtgatggtgatgattttaattaca

SEQ ID NO: 26551 - DNA, 100 bp, Homo sapiens
gactggaccaagatcgagcccagcgtcaacttcctcaagtcgcccaaaggtgaatgaaaactttgccattgatttgatagcagagcagcccgtgagcgag

SEQ ID NO: 26552 - DNA, 99 bp, Homo sapiens
ctagaagaatgctaagtttgtgtccttgctctgaaaattgtgtactaatggtcacttgatgtgcgctggctgttttatccacctactagcagatgcccg

SEQ ID NO: 26553 - DNA, 82 bp, Homo sapiens
aggcgccggttgccggccacaacccttggcggagcctgcctgcagtgagacggtttaagcggaagcatcttactgccattga

SEQ ID NO: 26554 - DNA, 50 bp, Homo sapiens
gccttctccatggatgaacacaatgcagctgaagagctcactcattatgc

SEQ ID NO: 26555 - DNA, 101 bp, Homo sapiens
gggagaaattgttgaagagttcaactttcccagaagttgttctaacgctgcctttgctttaaaacagtattacttgcgggtggttctcttcccaaagtgga

SEQ ID NO: 26556 - DNA, 98 bp, Homo sapiens
caagcaactgggattgagtcgttggaaggtgactacgaagtctcagtcaagttcaacgaggaacacattcccgacagccccttcgtggtgcctgtggc

SEQ ID NO: 26557 - DNA, 74 bp, Homo sapiens
ctacaaggacagcagcgactttggggcccgtcaccctcaggttcctccccgggcagaagaaatcaccattccag

SEQ ID NO: 26558 - DNA, 90 bp, Homo sapiens
gagagaaatggacttcaccagtggtctttggcttcatcaattcacagttacatgggaattggtctttctgctcaaggtgtgaacatgaat

SEQ ID NO: 26559 - DNA, 82 bp, Homo sapiens
ctggcctgcggcgcctgggcgctctgagctctacgaactcgacggggaccccaagaggaaggaattcctggatgacttgttc

SEQ ID NO: 26560 - DNA, 49 bp, Homo sapiens
cttggcttctcccagcatagccccaggacagagcgggatgccaccagct

SEQ ID NO: 26561 - DNA, 75 bp, Homo sapiens
gctctccgcaccgcggcttaaatgatgtattttgtgatcgcagcgatgaaagacaagttggatggcttgaggact

SEQ ID NO: 26562 - DNA, 101 bp, Homo sapiens
tttactgtggactgtaagcatgagtgaattctggttgtgtttcaactgctgtattgcagaacagcctcagcctgtgagacatggaatccattaaaattgca

SEQ ID NO: 26563 - DNA, 100 bp, Homo sapiens
agaggctgcagcggaggcggaagcaggactcggggcacttgggttatcaatactctggctgaccatcatcatcgtgggactgactttggtggaagtcctt

SEQ ID NO: 26564 - DNA, 96 bp, Homo sapiens
cttatttagccggagtgagaagcaagaaggccctggacacagcaatatctctgggctttcacagattactttgtggaccacatgggtgactatgag

SEQ ID NO: 26565 - DNA, 98 bp, Homo sapiens
gggcaccgaggaccagctcaatgacaggtcccagtagggatggcacaatcagcgaggacaccatccgagcctctctcatctctgcggtcagtgacaaa

SEQ ID NO: 26566 - DNA, 100 bp, Homo sapiens
tacccttcaaaaatttaaacaagaatccactgttgctactgaaaggccggttcttcttgatagcagtagcattcttgcagatcgtattcttctcatggac

SEQ ID NO: 26567 - DNA, 96 bp, Homo sapiens
cctgtattctccatgtagacttccatcttcatgagtactccaagaagatggttcagttgactattgcaaagacagagtctttctctgtcacccagg

SEQ ID NO: 26568 - DNA, 100 bp, Homo sapiens
gacggcaaggtcttctacattgaccacaacaccaggaggaccagctggatcgacccccgggacagaccccctggttgtggaatacgaggcattgctggta

SEQ ID NO: 26569 - DNA, 90 bp, Homo sapiens
aagtatggcaacatgacagaggaccatgtgatgcacctgctccagatcgagcctgcgtgctgccgaagcagggcgccgagtccatgcgaa

SEQ ID NO: 26570 - DNA, 111 bp, Homo sapiens
cccacccaggcctgagcgaagcccacaaccccgccgggcacatgtgaaaggtaactaggatttctacctcaaccgcgagacctatgcaaggacggtgtggaccaactcgcg

SEQ ID NO: 26571 - DNA, 100 bp, Homo sapiens
gctccctggggttttactctaaagggtggcctggagcacggagaaccattaatcatctctaagagtttgttattaaccccaacgggaaatccgaggtctg

SEQ ID NO: 26572 - DNA, 76 bp, Homo sapiens
tgaattggatttgatcttccatatggataaggttctgcggcatgaggaatttgaagaaggctgcaaagctgcctgt

SEQ ID NO: 26573 - DNA, 82 bp, Homo sapiens
cgacggcccggacttcctctcagaagaggaccgcggaaaaccaaggtgtatgttggtaacctgggaactggcgctggcaaag

SEQ ID NO: 26574 - DNA, 83 bp, Homo sapiens
tatctcaggcggcaccctgtccccgaggaggggaccatgacacagtgatgtgtccaatctagatcccaacttctcatttgaag

SEQ ID NO: 26575 - DNA, 98 bp, Homo sapiens
agcagatgtgatctgcgctaggtggcatctcctctcacggatgcctcgataatgcctctacaaagaattcagaaaatgtggatgaattacagctccct

SEQ ID NO: 26576 - DNA, 75 bp, Homo sapiens
cagcgctgtcccggccaggaaccagtctctttaatgtggggaacaagctgctggtaagcctggacttgctttttg

SEQ ID NO: 26577 - DNA, 74 bp, Homo sapiens
cacaactgtccacgtaggcattcaccccagcaaggcatgaaaacagccctggaagtctgccctggcgcctgcac

SEQ ID NO: 26578 - DNA, 50 bp, Homo sapiens
ggcctcgggaagaatgcacaagggatggtgctccgtactgtgaaaaggac

SEQ ID NO: 26579 - DNA, 82 bp, Homo sapiens
cgagcaccagagtcggcgtaactatcgcctgacagggtatctgaagtaaaagggggtttggtgcacctcgatttggaggaag

SEQ ID NO: 26580 - DNA, 100 bp, Homo sapiens
gagccagagcctgcagggtgggtgtcgggacatgctgatcttccctcaagacagattgtcaaaagagtggggaatggtgaggaaacgccgatgattggag

SEQ ID NO: 26581 - DNA, 75 bp, Homo sapiens
ccgaaacctggacaacgcggtcctcatcgtttctcttcagcaacgggtagcagaattggaaaaaattaatgcaga

SEQ ID NO: 26582 - DNA, 80 bp, Homo sapiens
ggagacgacagaccgtttgtgtgcaatgccccgggctgtggacaggaactgtggctgcaccatctgtcttcatcttcccg

SEQ ID NO: 26583 - DNA, 83 bp, Homo sapiens
tgtatcaagtaatggtgcaaagcctgaattggaaatggaggatgaagatacaattgatgtgttccaacagcagacgggaggtg

SEQ ID NO: 26584 - DNA, 89 bp, Homo sapiens
ggaagagaagatcatcgagcatttcaaacgatctcacattcttgaaggtggcattgaagagcactaagatcggaagatgagtgagcttg

SEQ ID NO: 26585 - DNA, 100 bp, Homo sapiens
atgatgaacagagttatgattcctatgataacagctatagcaccccagcccaaagttgagggagaagacttgcaacaagaagatggacccacaggagaac

SEQ ID NO: 26586 - DNA, 51 bp, Homo sapiens
cacaatggatctgaatcatctcttgaaaggatttgtacacacagatatgac

SEQ ID NO: 26587 - DNA, 98 bp, Homo sapiens
ttgcattgactggaaacaatggcatttacagaaagagtcaacagcagtggcaacagatcatggaagggaagtggttgctgtgtatgttactggtgctt

SEQ ID NO: 26588 - DNA, 100 bp, Homo sapiens
acgaatgtacaaagaggacccggtgcaaggaaaatccaatggagaactctctttgagcagattatctgactccagaaaaagaacgcgtacaggaagatct

SEQ ID NO: 26589 - DNA, 82 bp, Homo sapiens
gccgaggcaccgaggcactcagaggagcggagctggagtttgttcagatcatcatcatcgtggtggtgatgatggtgatggt

SEQ ID NO: 26590 - DNA, 75 bp, Homo sapiens
gtccggttcccgtggcggccggacagcaaggacatttccaaggaagtctgttagaactgctgtgctgatcaacgg

SEQ ID NO: 26591 - DNA, 51 bp, Homo sapiens
agcactgactttcagctatggaatcgattctgaaggaagatttccattagg

SEQ ID NO: 26592 - DNA, 75 bp, Homo sapiens
tcaaaagcaggaaatactggtggaaccagaaccattatttggtggtggaaaacgaagctcattcccaacgtgcaa

SEQ ID NO: 26593 - DNA, 90 bp, Homo sapiens
atcccaaagccaaggagaagttctcccagctggcagaagcctatgaggtgttacagcacatgaaggccgtgcaggcagatcaggagcggg

SEQ ID NO: 26594 - DNA, 98 bp, Homo sapiens
ctgctttcgacttagaaaaaagaaccagatgtcaaaactgatttcagaaatgcatagttttatccagctttctgaaaaggatatgagcatgctcgagg

SEQ ID NO: 26595 - DNA, 100 bp, Homo sapiens
ggatggagtccgtgagatgggttttagctgccgccggagtcgagatctttccctagatcattctgacctagttgcagagttgttgaaggagctgtctaac

SEQ ID NO: 26596 - DNA, 101 bp, Homo sapiens
gttggctgtggggaaacagcaagcggcgtggacgaccgttgctgagctggtgtggaacgtctgtgatcagagtctttggaacaaattcttccaagataaag

SEQ ID NO: 26597 - DNA, 100 bp, Homo sapiens
ctggcgaacgagagactacgcgctctggaagacattgaacgggaaatcggcgccatccttcagaatgcagccacaatggtgcgcatgaatgtcctggcag

SEQ ID NO: 26598 - DNA, 83 bp, Homo sapiens
cacgtacagggtttcagggcagaaagcagcttttcctccgcaaccatgtctgacaaacccgatatggctgagatcgagaaatt

SEQ ID NO: 26599 - DNA, 90 bp, Homo sapiens
gggaaaatctccccggtgactttcaggctttgtgccttgggcaaagggcagcttactcctggaagaggactgactcaaggaccccagaac

SEQ ID NO: 26600 - DNA, 100 bp, Homo sapiens
gccagctctgcttcctggcctcggtggcgctgctgctctggtcgctgtcgagcctgcgagagcagaaggatggcaagtttggggcctacatgcaggtgca

SEQ ID NO: 26601 - DNA, 100 bp, Homo sapiens
agcatatggagcctcaagtaaaacaagtttttcaaagcctaccaaaatctcctgccctcaagtatgtgttgtatacattggttggctttgtgggttttgt

SEQ ID NO: 26602 - DNA, 95 bp, Homo sapiens
cgttctaaaaagaggcgaaaggaagcaagcagttcagaagagccaaggaataaacatgcaatgaacccaaaaggaagtcgaactgaaccagcgat

SEQ ID NO: 26603 - DNA, 100 bp, Homo sapiens
tgtggctatgctgattgggcccaaggcccctctggccctggagcgagctgtggactgtggcattcctgaatccattgagaatggtaaagttgaagaccca

SEQ ID NO: 26604 - DNA, 82 bp, Homo sapiens
agttggcaagaaaaccccgaggagccctgttccaaagcctcctggaccgtccaagaagagcagctgatgagccagatccggg

SEQ ID NO: 26605 - DNA, 101 bp, Homo sapiens
cttttagctgaactaaggagaaagtcctacaacagtttggcgtgcaacatggggcttgagaaagggaacttgctactaccagcaccatgccctaccaatat

SEQ ID NO: 26606 - DNA, 75 bp, Homo sapiens
gggcggcggcggcggcggctgcggcccaatatagaaagtgaagtcactgcttttgctgtcttggatcaagaccag

SEQ ID NO: 26607 - DNA, 100 bp, Homo sapiens
caggaaggctcgcctatccaggcctggcaactcttcgtcaatgagggaaagaaacgtccactctgctccagtcaaccccactgctggtgtcctctgcact

SEQ ID NO: 26608 - DNA, 90 bp, Homo sapiens
caaagaactggctaggcaaataagctttaagaattctggaattgaaaaggcatttctatttgatgtggtcagtaaaatttatattgcaac

SEQ ID NO: 26609 - DNA, 98 bp, Homo sapiens
tgtctttaaaattgactggatttgcagtctgtggtccgaagacaaccctatgaggcatcagtagggttttacaggtggggaagtggaggcctaaccaa

SEQ ID NO: 26610 - DNA, 50 bp, Homo sapiens
attctggccaacagtgttaagtataatgtctgggttctgcccgcacacat

SEQ ID NO: 26611 - DNA, 100 bp, Homo sapiens
tccacacgaacaagcgcgtgtgcgaggagatcgccattatccccagcaaaaagctccgcaacaagatagcagggcagaggataaaggaggaagagaaaag

SEQ ID NO: 26612 - DNA, 100 bp, Homo sapiens
tatacccttagaaaaaatgtggcagtgggttgcagatggtgtaggaggctggagagactatggagttgatccatctcaattctcagggactttaatgcgg

SEQ ID NO: 26613 - DNA, 90 bp, Homo sapiens
cccacaaaaattccacctctgagtcctcaactgctgaccccggggtcaggagctcatgggacacatgtagctagtatagctgctggacac

SEQ ID NO: 26614 - DNA, 97 bp, Homo sapiens
gtgatggaggggaagaagaggcatctccatcgttttaccaactggtgttctcagaatgccaggcataacacaggccacttaaggatgcagcaagaag

SEQ ID NO: 26615 - DNA, 100 bp, Homo sapiens
ctggctacctcgtggacaagtttgcagatcgggagcgcaaggtcgccctcaaggccatgatcaaaacaggctgggaggcggcagaatgcagccagaggag

SEQ ID NO: 26616 - DNA, 82 bp, Homo sapiens
cctgtgtcccacttgttcgcggcctatagtatctcctatagggctcttcaaactgtggtcaacttagtaaatgatgttgaca

SEQ ID NO: 26617 - DNA, 101 bp, Homo sapiens
ctatagtctggtatcaaaagaaggcctggttgcagtatgcctgaaatttgggatgtagaagatcctgccaatgctgggaaaactcccttatgtaacctctt

SEQ ID NO: 26618 - DNA, 101 bp, Homo sapiens
gccatgaccatctggattctcaaagtcatgaacttcacaattgtgcctgtcctgagacccatggacctgatggtggaggccaccccacgaagagtatttgc

SEQ ID NO: 26619 - DNA, 75 bp, Homo sapiens
atggcctggagattcatgacaaaatcatggagtacgaattggagcaatgttggcttatacacctctggatgagaa

SEQ ID NO: 26620 - DNA, 51 bp, Homo sapiens
gatatggattatacccttgctgacaggaacacagaggacgatcgccccccg

SEQ ID NO: 26621 - DNA, 90 bp, Homo sapiens
ctgtgctgtgcctctctcgcccacattttccccaagcactctcaggaacctggcaacagaaaacaatggactgctcttcctggagacctc

SEQ ID NO: 26622 - DNA, 100 bp, Homo sapiens
tgtggggcctccgcgccgcggccgttagtcatgtcgggtgaccaagaatatggcccaggtgaccaaagccctggacaaggccctgagcaccatggacctg

SEQ ID NO: 26623 - DNA, 100 bp, Homo sapiens
ccagtttatggcttccagtggaggcattttggggcagaatacagagatatggaatcaggtacaactccaaaaggagacattggagaagaaccaagctggg

SEQ ID NO: 26624 - DNA, 82 bp, Homo sapiens
aaggattccaagtaactcttatttgtactgctggcgttggacaggttttaacttcggcttcgacctacttgtaacttacacc

SEQ ID NO: 26625 - DNA, 75 bp, Homo sapiens
gcaatttgggcaactttaattatgtacttcctcgcgtattgctaaaggaggagttgaccacaccaaaatgagtct

SEQ ID NO: 26626 - DNA, 98 bp, Homo sapiens
aaaagagcttgttaatgatgatgagtctttctctaatacacagaattctaggaaggaggctgttcttttagccaaaatgaaacaccctaatattgttg

SEQ ID NO: 26627 - DNA, 75 bp, Homo sapiens
taaaggatattattagaattctgccatgcaataatccagtccctcatagcactggtgaatgacccccagcctgag

SEQ ID NO: 26628 - DNA, 74 bp, Homo sapiens
agaacccgaccaacatccagaacttccagctgcccccagatctcctgggaggcccccgtggagaagaagactga

SEQ ID NO: 26629 - DNA, 51 bp, Homo sapiens
gatttcggagaggccgcaggagtcatttcataaagagttctatctgtcttc

SEQ ID NO: 26630 - DNA, 98 bp, Homo sapiens
agtctctgtcagaggaagatcccttggtgcccctgggcgctgggattgctctagcctgtaagtataatggaaaagatgaggtctgcctgactttatat

SEQ ID NO: 26631 - DNA, 98 bp, Homo sapiens
ggaacatgcgcgggaactcccactgtgtggactgcgagacccagaaacttcaaaaatctgattacatggagtatgctgggagacagtactatttggga

SEQ ID NO: 26632 - DNA, 90 bp, Homo sapiens
gtctcattctcagggatcctgtctttcattgagcttcttgcccaatgatctgggcttcactgatagctactctcagaaggctttctgtgg

SEQ ID NO: 26633 - DNA, 88 bp, Homo sapiens
cttctgtgctgtcacctcgaatgagcaggtcaagtgattacagtggcgagatcttgaacaactgctgcgtcatggagtaccaccaagc

SEQ ID NO: 26634 - DNA, 83 bp, Homo sapiens
atttgggtcagatagatttggaagaggatcgtggctattttgaagagctgatcaccatgttggaagcagcactgggacttgag

SEQ ID NO: 26635 - DNA, 96 bp, Homo sapiens
gcttctcgtagtcctgggagcacagcagaagtgtgaccattgtgaggtagatattttgttctaattttccagatgaggaagctgagaccctaaaag

SEQ ID NO: 26636 - DNA, 75 bp, Homo sapiens
catccacgcacctgcagctctgctgagagagtgcaagccgtgggcttgcactttccagtgacaagattgctgcat

SEQ ID NO: 26637 - DNA, 75 bp, Homo sapiens
caggacctgctttcggagtacatgggcaataggaggaagcttgacgctgtctattactatatgcgcagtttagct

SEQ ID NO: 26638 - DNA, 50 bp, Homo sapiens
attccaacagctcattttatgttgaggatgatgtggacctggaagccctg

SEQ ID NO: 26639 - DNA, 85 bp, Homo sapiens
actcattattttaacatttgggagaaacacagccagaagatggcttacaaaatttaatcctgcttaatctgaacaacaatcatct

SEQ ID NO: 26640 - DNA, 101 bp, Homo sapiens
cgctgccaatatggagcacgaaaatcaaattcaggagttcaagaaacgagatgcacagagaccgagaggttgatgtcactcccaatatcggaggaagtata

SEQ ID NO: 26641 - DNA, 98 bp, Homo sapiens
gtgtagagtgcttcgaacgctcggttaagattaatcccatgcagtgtggcaaagcgctccctggcctttcaaagcaagaggactgctgtggaactgtg

SEQ ID NO: 26642 - DNA, 95 bp, Homo sapiens
gtgccaaagtggttgcgctcgaaagtgacaaaacttttattccacatttggaggtaagaccattgcaattggaaaagttctgaaactggttccag

SEQ ID NO: 26643 - DNA, 99 bp, Homo sapiens
attttttcaccagtgaccctccagcactcagctatgcctggaacaaggccgtatctgaggaacagcagcctgcactcaagggcaaaaagggaaaggaag

SEQ ID NO: 26644 - DNA, 100 bp, Homo sapiens
gtgagcacttctggaagatcattaatgccttccgctactacggaacccctgaacagtgcccaagtgttgtctctttgttgtcagagagttacaaccctca

SEQ ID NO: 26645 - DNA, 82 bp, Homo sapiens
tatggtgaatacatggataaaaataatgtgaggcgacaagcaacaacaatcatagctgatgtagtggaaccaaaggagaggg

SEQ ID NO: 26646 - DNA, 100 bp, Homo sapiens
ggctctcaaccacagtcttgtagatattttaacccaaagaatgatgtaggaggacaacgcagcctgataaacaagtggacgacttttcttaaggccagac

SEQ ID NO: 26647 - DNA, 83 bp, Homo sapiens
gggaaggagggaaagagctcccgcggttgccccattgcaaagtgggtggtggtgaagtttattaagaaggagaaggtcttgga

SEQ ID NO: 26648 - DNA, 75 bp, Homo sapiens
cttctatctctgtggcaggaaaccaggtgaaatgacaatggatgctctgttggctcgattgaaacttctgaatcc

SEQ ID NO: 26649 - DNA, 74 bp, Homo sapiens
cctgtgtggtggactgtggcacggggaccatggccaacctggagcgcaccttcatcgccatcaagccggacggc

SEQ ID NO: 26650 - DNA, 98 bp, Homo sapiens
aggattgggccgagcctatgccctggcttttgcagaaagaggagcgttagttgttggtgcttttgaagatgatgatatcacgcacgttgaaggaagtg

SEQ ID NO: 26651 - DNA, 73 bp, Homo sapiens
ggaggcgaagacaagagagctcattgggcaaactctttgattctacaatagctgatgagggaacatggacttt

SEQ ID NO: 26652 - DNA, 96 bp, Homo sapiens
gatgatgagaaataaggacaaaagccaagaggaggacagttcgctacacagcaatgcatcgaggtgcatgcctacatcatcagctacctgaagaag

SEQ ID NO: 26653 - DNA, 96 bp, Homo sapiens
aaaatcagatccaccaacatgggaaacttgtgaatgataagttcactaccttatggttctgtctgccaactgggcctatgtgaaagacgcctgccg

SEQ ID NO: 26654 - DNA, 100 bp, Homo sapiens
gttgagtatatcaataccctgttcccaaccgagcaacccatgaaacccctgaaggccaccgccaccacctcccagcccgtgctcaccatccagcagatcg

SEQ ID NO: 26655 - DNA, 88 bp, Homo sapiens
ccagcccttccgccacggccgtctctggagagcagcagccccaaatccgccaccattccgtgctgcggggacaccatggctccagaag

SEQ ID NO: 26656 - DNA, 83 bp, Homo sapiens
aagaaatccacagatttagttcttatatcaactccgggaacctggaacagttgctagacagtaacctgcatttgccttggact

SEQ ID NO: 26657 - DNA, 100 bp, Homo sapiens
ttcttgaagaaagacagatcctgtgtcacccggcaactcagaaacatcaggtccaaggctgttaaattccaaaagtttcaagcctttgactggggaagca

SEQ ID NO: 26658 - DNA, 100 bp, Homo sapiens
cagtaccagacctgggaggagttcagccgcgctgccgagaagctttacctcgctgaccctatgaagagcaaatttttcagaacataaaacaagaatatag

SEQ ID NO: 26659 - DNA, 75 bp, Homo sapiens
gttcgttgtgccagcgactaaaaagaggttacaggaaatacaggaggcagaggaacaaataaaagacaccacgag

SEQ ID NO: 26660 - DNA, 100 bp, Homo sapiens
caacctctgcctccagggtcaagcagttctcctgcctcagccttccgagtacctgggattacaggacattatctttctggggacccagtttgccttcatg

SEQ ID NO: 26661 - DNA, 83 bp, Homo sapiens
tcaaatgatgcaaccctgcagcatgttttaatgagtgactgatacattttgcagaggcatcagaaaactaaagaatgattggg

SEQ ID NO: 26662 - DNA, 88 bp, Homo sapiens
gttggcaaaccagatatatgacttgagccccccaagatgaacccagtggtggagccactgtcctggatgctgggcacctggctgtcgg

SEQ ID NO: 26663 - DNA, 90 bp, Homo sapiens
ttggggttgaagccgttgttattttcttaggagttaagttgctttccaaaaaacagattctttcaaaatgggacaagagtttgtgaaaca

SEQ ID NO: 26664 - DNA, 81 bp, Homo sapiens
ccgttagaactcgcgtttccacttcagagatctggtcagcccaaggccaaccccactgtcactctgttcccgccctcctct

SEQ ID NO: 26665 - DNA, 74 bp, Homo sapiens
aaatccgtgtcggagtccttacagagtgatcagcagctggactgtgccttggacctaatgaggcgcctgcctcc

SEQ ID NO: 26666 - DNA, 100 bp, Homo sapiens
ccgccgctagggtcgccgttgcatcggtgcagggcaaggttcgtgctggccgtgggcagcgccgtctttgatgccatgttcaacgggggaatggccacaa

SEQ ID NO: 26667 - DNA, 75 bp, Homo sapiens
ttttttttgagacagagtctcactctgttgcccagatgagtgtgggtcagagagccaaactgactatatctccag

SEQ ID NO: 26668 - DNA, 100 bp, Homo sapiens
gggattcacacacggcacggaggcagagtggcagcagggcttccgttacaagatgaggtctgtgtatgctcacttccccatcaacgttgttatccaggag

SEQ ID NO: 26669 - DNA, 82 bp, Homo sapiens
cggttgtcctcaggcgctgtcaggtaatcattaccaaatgaggaggaaaggacgatgtcatcgaggctctgcagcgaggcat

SEQ ID NO: 26670 - DNA, 101 bp, Homo sapiens
tgcctcagcctcccgagtggctgggactacagtggccactgcctccaccatggctgaggctttctctaagacaacctctgaggaagaccagagcatccagg

SEQ ID NO: 26671 - DNA, 100 bp, Homo sapiens
tgtgttaactgctaacttttctgtaaccaacctggaagttaaatgaagttcgaaagagattgaatgagctaagagaattagttcattattatgaacaaac

SEQ ID NO: 26672 - DNA, 75 bp, Homo sapiens
ctctccttggcctctcctgggatcggcccaaggccagttctccgcagcaagatcagcattggacacagctgcacg

SEQ ID NO: 26673 - DNA, 75 bp, Homo sapiens
aaaagatggagccctgcatatgattggctctttagctgaaatacttctgaaggaacaggagtacagctgtgtagt

SEQ ID NO: 26674 - DNA, 73 bp, Homo sapiens
ctacagagaagaaactaagtttacttgcattgatcctattgtgcttcagtttgctgagaatgatggtttccag

SEQ ID NO: 26675 - DNA, 100 bp, Homo sapiens
tcactgaccccagagtggcagaaaggctgatgcagcagaggcggggtttcaccatgttgcccagactggtcttgaactcctgagcttaagcaatccacct

SEQ ID NO: 26676 - DNA, 74 bp, Homo sapiens
atagcaatcccagacctaagtttgaagattggctttgtaacaagatgttcatgagagcgcagtttgactatgat

SEQ ID NO: 26677 - DNA, 100 bp, Homo sapiens
gctgagcagcctccctttccagaaggatataaagtcaaacaggagcctgtgattacgattgaagccttcagctgactgtggcccttttcgaggtctgcct

SEQ ID NO: 26678 - DNA, 75 bp, Homo sapiens
tacgctattcgttgtggtccaaaacagtttacctcttatctaacagaagttgattcaagtcagttgagacgccag

SEQ ID NO: 26679 - DNA, 50 bp, Homo sapiens
gtcctttatatagaagggagagtaggattatctccgagaagaagctgaag

SEQ ID NO: 26680 - DNA, 84 bp, Homo sapiens
atcacgagtgccgccagcatgtctgacaaactgccctacaaagtcggcattcccatcaagagcaccatggacaaccccaccacc

SEQ ID NO: 26681 - DNA, 101 bp, Homo sapiens
gcagggctgagatgggcaccgcggatctggggccgtcctcagcaccatatgaaggcggagtatggaaagttagagtggacctacctgataaataccctttc

SEQ ID NO: 26682 - DNA, 100 bp, Homo sapiens
ttacctgtttggagagaacagcgatctgaactttctggggaacagaccagttgtggctactggatcaaggtcagttcctatgccactgtcaaatatatca

SEQ ID NO: 26683 - DNA, 50 bp, Homo sapiens
tggaggccaccctgtggttcagatgccttcaattaagttgcagagttctg

SEQ ID NO: 26684 - DNA, 100 bp, Homo sapiens
cactcctggacaggatggattgccagggcttcctggcccgaaaggagagcctgtgcgagacaagaagcttctcaatgacctgaatggagccgtggaggat

SEQ ID NO: 26685 - DNA, 100 bp, Homo sapiens
gtccgccccgcgagcacagagcctcgcctttgccgatccgccgcccgtccacacccgccgccaggatcagttcgaggtgctcgagcgccacacgcagtgg

SEQ ID NO: 26686 - DNA, 97 bp, Homo sapiens
tactgaaagctgccgctgaagctgccgccgttgcctccgccgccaagagtgagcgagcggacccgcgatggctcctgtcttcgttcctggctagaac

SEQ ID NO: 26687 - DNA, 75 bp, Homo sapiens
cagcgaccccacagtgcagcgctccgtgtttgcatcggtggacaaggtgccagctgatcactggagattccatcg

SEQ ID NO: 26688 - DNA, 90 bp, Homo sapiens
aacctcaaccccaagcagttcatgaccatgtttcctctggtagctgaagaacatctcacagtggacgccagggtctattcctacgctcta

SEQ ID NO: 26689 - DNA, 100 bp, Homo sapiens
aaaggatgggttttaactacagacccagtctctgccaaattaaaaggagcccaagccccatctcatcctagcacaccctcctccactgtcctggcagtag

SEQ ID NO: 26690 - DNA, 87 bp, Homo sapiens
agctatgttctgctggagcattctgtgaagaaggcagtacattttgggttaccggacagagcgggatgccaccagcttgtccaaagg

SEQ ID NO: 26691 - DNA, 100 bp, Homo sapiens
ggcctggcgacccattcaggcacttatggccatttcagccatgtcaactgttagccacgcagatgccgattgctttgtgtgtgtcttcctgagccatggc

SEQ ID NO: 26692 - DNA, 127 bp, Homo sapiens
acctgaacgccgccttggacctcctgggaggcgaggacggtctctgccagtataaatgcagtgacgctgaagctgaagaagatggggacctgcagtgcctgtgtgtgaagaccacctcccaggtccg

SEQ ID NO: 26693 - DNA, 82 bp, Homo sapiens
cagagacctggcaaatgacatcatgacactgccccagtggacaggaaagctaaggcctcagcgatgccggactccccagcgg

SEQ ID NO: 26694 - DNA, 95 bp, Homo sapiens
cgacggccacaggggcggcgacggcgcagtgcgaagcgaaacagcttcagtatcagacacagcacagcagccatctgaagagcaaagcaagtctc

SEQ ID NO: 26695 - DNA, 75 bp, Homo sapiens
ttctcaaccttgtgggatgtgaaaactctgttactgaagcttcagtatcagacacagcacagcagccatctgaag

SEQ ID NO: 26696 - DNA, 50 bp, Homo sapiens
gacgctgagggcagccccgtccaggggttttttgattaactcaaaaccag

SEQ ID NO: 26697 - DNA, 100 bp, Homo sapiens
ggaggatgtggcgcgcggaggggaaatggctgccgaaaacaagccggaagaaacgcttcgttaagggactcaggcagtacgggaagaacttcttcagaat

SEQ ID NO: 26698 - DNA, 51 bp, Homo sapiens
ccccgaggacttcctctccctgcaggatcttcttcactctggaggtgccac

SEQ ID NO: 26699 - DNA, 51 bp, Homo sapiens
gcagctgcccttagccctctggatgtgcttttccagactgatccaactgca

SEQ ID NO: 26700 - DNA, 100 bp, Homo sapiens
gagacgggtgaagtacaggctcagtctgcggccaagactccatcctgcaagataccatgtttgtgtggaagtgccccgtgtttgctatgccgatgctgtc

SEQ ID NO: 26701 - DNA, 100 bp, Homo sapiens
aagaagtattcaaaccagaaaacattagcctgaggaacaacattcctgggagatggtcgggaagaagaagggagtctcaggccagaaggatggtggccag

SEQ ID NO: 26702 - DNA, 98 bp, Homo sapiens
atcacttgaaaagaggctcgaggtgtcatggagaaactccagctgggcccagagattctgcagcgggaaaatccaaggcttatttatgccaggctgag

SEQ ID NO: 26703 - DNA, 75 bp, Homo sapiens
gtgcgaggctagccacgcaggcggggccctgggttggtgttcgaggaagagacattgttgttcttggtgtggaga

SEQ ID NO: 26704 - DNA, 90 bp, Homo sapiens
agagagaaccagtgcgtcattatcagggttggattgagattgttggatgtgctgatcgttcctgttatgacctctcctgtcatgcacgag

SEQ ID NO: 26705 - DNA, 100 bp, Homo sapiens
tgcctctgacaatctctagtgacccagatgatgtggtaccagttggccaaagaagagcctggtgttggtgcatgtgctttggactagcatttatgcttgc

SEQ ID NO: 26706 - DNA, 71 bp, Homo sapiens
ttcctcctccttggtcgccgcgtccttggctggcgtagtgcgctagatgttggaccgagtatggaatccgc

SEQ ID NO: 26707 - DNA, 99 bp, Homo sapiens
gtcttccaaccagagcttgtgtagcgtcagatccttgagtgataaaggagtagaggtatcacctgattttgatacagcagcaggaagcttgttcccagc

SEQ ID NO: 26708 - DNA, 90 bp, Homo sapiens
atttgggaaaaagctccaggattctgacagggatgttgcgaagtgccggtggtggtgtgcacattgagccccggtatagacagttccccc

SEQ ID NO: 26709 - DNA, 97 bp, Homo sapiens
cttcgacattgccgtcgacggcgagcccttgggccgcgtctcctttgagataattcgtgtccagtccccggatggagtgaagcggatcacagcaaca

SEQ ID NO: 26710 - DNA, 100 bp, Homo sapiens
acagctgtggaaagaagttgcaaaacactgggagttcaacctaagcctgctagctccatgcttaagcctagggatgagtgaaatttctggtggccagaag

SEQ ID NO: 26711 - DNA, 88 bp, Homo sapiens
caaaaccgcctcctcttccacttggctcacaagcactctacacccccaagtgcatatgggtctgtcaaagcctatactaactttgatg

SEQ ID NO: 26712 - DNA, 96 bp, Homo sapiens
agcgtgccaggcgtgtactgcctatgtgtgctctcctactgaagcccaagttcagcggcgtggagaagatcaagaccatcggcagcacgtacatgg

SEQ ID NO: 26713 - DNA, 82 bp, Homo sapiens
tgtgtggttgcaacggagataaattcccggaaccgcgattcggcgtgtcagataccatgatatgcctgacgttatagatttc

SEQ ID NO: 26714 - DNA, 106 bp, Homo sapiens
cgccggggcctagcgctatgcctgcggcggagactgcatcaggctctcggtctcctctgagcctccggcctccataagacccaaaacagatgacacctcttcccag

SEQ ID NO: 26715 - DNA, 78 bp, Homo sapiens
tgtccttgttgagagaggaaaccactccaaaatcgtcgcagggaattatatccagatcgagagacagaagattctgaa

SEQ ID NO: 26716 - DNA, 80 bp, Homo sapiens
agaagcctgagctgccggcattgccgggcaccctgctgcggagcagacgtgaagatttatgtgatcagtttggctgaacc

SEQ ID NO: 26717 - DNA, 74 bp, Homo sapiens
ttatattcatctcaaaaacaaaattctgaactcaggacttggcaagttcattgtctgagatcagttgataactt

SEQ ID NO: 26718 - DNA, 75 bp, Homo sapiens
ctcccgagtagctgggactgcagatggttttactcagcatttggtgtggtggatcttacataaacctttagaact

SEQ ID NO: 26719 - DNA, 75 bp, Homo sapiens
aggacctccaggggaacaatgaggcctacgcagagctcatcgtccttggagccccagtggcaccagtgacgggca

SEQ ID NO: 26720 - DNA, 100 bp, Homo sapiens
acgcattgccgccggtcctgaccaccgtgaacggacagtcccccccaggagtgaagtgcaaccagtggtctgaggaggcttctatggtgtttcgaaatca

SEQ ID NO: 26721 - DNA, 100 bp, Homo sapiens
cagctcctgcagatggccaatgagaaagccctgaagcagaagggcatcaccgtgaagcagaagagggaggatctgtgggtgcgcggaggccgcatcttgg

SEQ ID NO: 26722 - DNA, 100 bp, Homo sapiens
gaggagtcccgctcgaagctaggttaatgactccagagagtaagatcagattcgtccacaaagagatgggcataataccaagctggggtggcaccacccg

SEQ ID NO: 26723 - DNA, 100 bp, Homo sapiens
gcagaggaccagcagatgaatggacaccttgaagcagaggagcagcaggaccaggacccgtccctgctcctgaccatcaccgtcactggggtcactgtgc

SEQ ID NO: 26724 - DNA, 75 bp, Homo sapiens
cacaaaagagttgattgaaattatctctggtgctgcagctctgttgcagatgaatacatgttttccctagaagag

SEQ ID NO: 26725 - DNA, 101 bp, Homo sapiens
gttccagtgcctcgagcgctcaggatggaggaagactcgatccgcctgcctgcgcacctgctgtaatgttcaagctcagaaatgccttatgtggatcgtca

SEQ ID NO: 26726 - DNA, 101 bp, Homo sapiens
gatgtgcgcggagagcaatcgccgggacagctgcaagtacaacaagcacctgttcgtgcacattggccagtccagcccaagctacagcgacccctacctcg

SEQ ID NO: 26727 - DNA, 75 bp, Homo sapiens
cgtggttcacttttgaggcagggagtactatactggcaattgctggagaagattttgcaattgttgcttctgata

SEQ ID NO: 26728 - DNA, 75 bp, Homo sapiens
ccgcgccgcccggcagcctcggcagttatttctcaaactctgaggctgcggagttcacacattgaaatctgtcat

SEQ ID NO: 26729 - DNA, 75 bp, Homo sapiens
aatcgcttgggagagctcctgggccacccctcctttcaggtcaagttcttggccaggctgactgagagatttgtg

SEQ ID NO: 26730 - DNA, 99 bp, Homo sapiens
ctggcctccaccgagtggctcaccatccagggcggcctgcttggttcgggtctcttcgtgttctcgctcactatgtatgtccctgggaagctgcatgat

SEQ ID NO: 26731 - DNA, 100 bp, Homo sapiens
gaggccccgagccccgtggatccgctggagcggagccggccgtacgcggtgctgcgagggcagaacctggagccagccccagtgcctgctgagccgtttg

SEQ ID NO: 26732 - DNA, 75 bp, Homo sapiens
atgggtcgaccattccaaaaaaatcggggatgttcgtctaaccccagaagactttgctagagctcagaagtactg

SEQ ID NO: 26733 - DNA, 98 bp, Homo sapiens
ggacctaggtcgcggcgacatgcggctccagcaggagaaccatgagctccggcgaggcctggcagcccgaggagccgagtgggaggcccgggccgtgg

SEQ ID NO: 26734 - DNA, 87 bp, Homo sapiens
tgatgtcttgataaagcccagtcgagttgttgccattttggcagcagcttgtttgctgcagttggagtctgatgatgaagaaaattt

SEQ ID NO: 26735 - DNA, 51 bp, Homo sapiens
ccggcgaggatcaaaatcttcgaaggaggaacctgcacttgttgccaagtc

SEQ ID NO: 26736 - DNA, 110 bp, Homo sapiens
cgcggaatcggggagcgtccggagctagctggatcctctaggcaggtcaaaatgcagatcttcgtgaaaacccttaccggcaagaccatcacccttgaggtggagcccag

SEQ ID NO: 26737 - DNA, 51 bp, Homo sapiens
gtcccgtccgacagccaggcccgggagaaactttgaataatgagatgagta

SEQ ID NO: 26738 - DNA, 90 bp, Homo sapiens
caaggctcgggtgcagccactgagacggtcttggtcttgatgccaagtttgggaaaggagctaagaagacatcccactaggaagagagag

SEQ ID NO: 26739 - DNA, 95 bp, Homo sapiens
tgcctcccagcaccacagtccttctgcagtccctcgtccagccacccccagttatggctgcagcttcgattgccaatattgtaaaaagttctctt

SEQ ID NO: 26740 - DNA, 75 bp, Homo sapiens
agttcaagaccagcctggccaaggtggtggaagctacaatgattttgggaattacaacaatcagtcttcaaattt

SEQ ID NO: 26741 - DNA, 74 bp, Homo sapiens
ccggatcaatccagatggcagccagtcagtggtggaggtttgtgggggagagaaaccttatttgtctccagaca

SEQ ID NO: 26742 - DNA, 100 bp, Homo sapiens
gtggtggcttgtggtgcggcctcaccatacaggaacagggcagacgttagcgtgagtgatcactctcaatcccgggtgtcatggagaaactccagctggg

SEQ ID NO: 26743 - DNA, 75 bp, Homo sapiens
gtcagctgctggtacaagtacctccttttcagctacaacatcatcttctgggctggagtgcaatggcgcgatctc

SEQ ID NO: 26744 - DNA, 82 bp, Homo sapiens
tcttttttagacaaagagaagggcctttttatccaaccctaagattacttcacaaatgaaccctaaggactctgcaatatga

SEQ ID NO: 26745 - DNA, 95 bp, Homo sapiens
ggggagattacttttctggaagaactattgcacagccaaaacattgtatatatctgactcagacaagcgaaagcacttcatgttgtctgtaaaga

SEQ ID NO: 26746 - DNA, 100 bp, Homo sapiens
taacgtcatggaggatgaacgacagcctctacggcagacacatgcaggccaacccagaaccaccgaagaagaataatgacaaatcgaaaaagatcagccg

SEQ ID NO: 26747 - DNA, 100 bp, Homo sapiens
tttaaacaagagatttccacagaaggatgatgaggatgataatgcaggcacggagatgaagatactgcggggccactgcggaccagtgtacagcacgagg

SEQ ID NO: 26748 - DNA, 100 bp, Homo sapiens
agtggaaagaaatcctgaagttccctcacattagccagtgtgaagacctccgaaggaccataggtaagaactcagggccctatcctcacagcaagtggca

SEQ ID NO: 26749 - DNA, 100 bp, Homo sapiens
tggtttccggagggctccgagtgcttttctattatcctcccagtccacaacgctgaaccgtggctggacgaatgtttgaggtctgttttgcaacaggact

SEQ ID NO: 26750 - DNA, 100 bp, Homo sapiens
cttggcgcctcattgctgtaattttgggaatcctatgcttggtaatactggtgatagctgtggtcctgggtaccatggccatgcaggatatacgtactgt

SEQ ID NO: 26751 - DNA, 96 bp, Homo sapiens
gggatgaggacaacaaccttctgactgagaagcagaagctgcgggcagtagagtcccagaggatgtgtgagctgatgaagcagcaagagacccacc

SEQ ID NO: 26752 - DNA, 101 bp, Homo sapiens
tctagtaacccgcgaaatgatgggatagcgttgcaaatccttaaaagagtcttaacggcatttgttgctatcggggactacaatggccacgtcggtctggg

SEQ ID NO: 26753 - DNA, 100 bp, Homo sapiens
actatcattgaagttaatggcaaaagggtcataggaaggcagtatccttggagtgttgctgaagatgcctgtcttagatgtcaagctgaaaacaaacaag

SEQ ID NO: 26754 - DNA, 75 bp, Homo sapiens
cccaatatccaagaagcagtagagggtgccatgcacattcagcttcttaatgaagaggataactcagaatcatcg

SEQ ID NO: 26755 - DNA, 100 bp, Homo sapiens
aaattcctaggcgatgctcacactgttggtgtaaggcatgatccgctgggcccccagcgcatctcctggaagagcccactcaccctggacgagctcttcg

SEQ ID NO: 26756 - DNA, 51 bp, Homo sapiens
gcttcctcccgccggcgtgcctggctgaaactgccgccaaccggatctgta

SEQ ID NO: 26757 - DNA, 75 bp, Homo sapiens
ccaggaccaggaagtaactttagaggaggatctggtcaaaatgcagatcttcgtgaaaacccttaccggcaagac

SEQ ID NO: 26758 - DNA, 75 bp, Homo sapiens
cgggggagtattttgcttctggaggctctgatgaacaacccgaaaatggcacagaaatggtatcaagaaaccccg

SEQ ID NO: 26759 - DNA, 100 bp, Homo sapiens
cggcgtcgggagagcgcgcctagccggctcgcgaagctccacgcaggagatcggtgaggagctgatcaacggagtcatctactccatctccctgcgcaag

SEQ ID NO: 26760 - DNA, 100 bp, Homo sapiens
ccagtacaaccttcaaaacaactggaatatttagcaaggattcaaggctttcaggcctggttgcagtatgcctgaaatttgggatgtagaagatcctgcc

SEQ ID NO: 26761 - DNA, 90 bp, Homo sapiens
ctggaccgtgagagcatcaagctcgtgtccatcggagacctgagcctgccatactgagtctatggacagttccacagcaatgaatcaatg

SEQ ID NO: 26762 - DNA, 50 bp, Homo sapiens
cttacatctaaagagctagggagtccacagcctctgacatgcgatttgaa

SEQ ID NO: 26763 - DNA, 131 bp, Homo sapiens
tccaggcgaggtggtcatcaaaatagctacaaaccatactaaattattccatttgcaacttatccccaacaggtggtcctgccgtcctacgaggaagccctgtctttgccatcgaagaccccagagggggg

SEQ ID NO: 26764 - DNA, 100 bp, Homo sapiens
tgaggccaaaaagagaggaggaagaagatttcataagacggtatccaactgttgaaaaacgagccagagtcttcaatggagcaagttatgtgcctgttcc

SEQ ID NO: 26765 - DNA, 82 bp, Homo sapiens
tttccaaggaagaatttcctctgaagcaccggtgaccctggcaaagatgagagtgcacatttcgtcctgcctgaaggtccag

SEQ ID NO: 26766 - DNA, 50 bp, Homo sapiens
gccttcccagtagctggaactacagtgtgcagcaaacaacttcctccttg

SEQ ID NO: 26767 - DNA, 98 bp, Homo sapiens
tatcgtcgagaagcctatcatcgataacgtcctcctctcccagccacccggccaactccttctactacccgcggctgaaggccctgcctcccatcgcc

SEQ ID NO: 26768 - DNA, 75 bp, Homo sapiens
ggttagacatccctgaggttgatttggttatacaaagctctccaccaaaggtgatgatgaacagtctacacagat

SEQ ID NO: 26769 - DNA, 100 bp, Homo sapiens
caggggtgcgcccaagcggggctctggcaagattcgaatgcaggctcaaggaagcttgttccaagggagcatgattggaagctttatcgatatataccaa

SEQ ID NO: 26770 - DNA, 110 bp, Homo sapiens
ctgtttacaactggaccaaggccaccacagtctacctggacctgttcgtccatgctatattggatgtggcagcctgccctacgagtacaagatcgtgatcgcaggcaacc

SEQ ID NO: 26771 - DNA, 100 bp, Homo sapiens
gtcattccgtttgctgtcaggaaaggagaaatcactgcgttgacagaaggctacgttggggccctgcacgagaatagacacggcagcgcagtgcagatcc

SEQ ID NO: 26772 - DNA, 100 bp, Homo sapiens
ggagaagggtggtaacatgaagagagtgtttgaaagattctgccgaggcctcaaagaggccatccgggatggtgtcattgaggccagcatcaaccacgag

SEQ ID NO: 26773 - DNA, 76 bp, Homo sapiens
ctctcaacgatgaggttccaaaataccgtgaccagattcctagcccagatatgaccacattctgaagtgggaactc

SEQ ID NO: 26774 - DNA, 100 bp, Homo sapiens
ctgggagttcagcttttagagcaggtgtatgatcttttggaggaggaggatgaatttgatagagaggtgacttaagagattaaaattaatttggttgctg

SEQ ID NO: 26775 - DNA, 83 bp, Homo sapiens
cccggacatgctcagggctgcggccgcccgaagaggagagagcgcgggcctctaggaaggtcgccatgggctactcacactcc

SEQ ID NO: 26776 - DNA, 101 bp, Homo sapiens
gttttttctacctgttgacgtgtcaagcactaactgattcgataccagcatcttgccaatttgcaaggactcacttggctggatgtttaacagacttgata

SEQ ID NO: 26777 - DNA, 100 bp, Homo sapiens
ttgatatacacttttcaaaatgctttggtgggaagaagtagaggactgttggctggttgatatgtgaagagccaacctgtcgcaatcgaactcgtcacct

SEQ ID NO: 26778 - DNA, 98 bp, Homo sapiens
tgacctcatgctggcggctctgcgtacgctggttggcatttgctctgagcatcagtcacgggctggtgggaaacgggcagctggagattgcgacagga

SEQ ID NO: 26779 - DNA, 90 bp, Homo sapiens
tggtggaaatgttggtggaaacatcagatctctccatattttggttaggaaagattacgacaccctttctaaatgctcaccaaagatgcc

SEQ ID NO: 26780 - DNA, 98 bp, Homo sapiens
gaggcggctgcagagggagctcaagtgtgctcagaatgaggtgcttcggtttcagacctcccacagtgtcacccagcctatccctcggccagatcctg

SEQ ID NO: 26781 - DNA, 83 bp, Homo sapiens
gcagcccgacgcaaaccaaggatctggggatcttcgcactatcccaaggagcatcagatccatgctgctgctgactcggagcc

SEQ ID NO: 26782 - DNA, 74 bp, Homo sapiens
tgcgcaaaggcctgcagtgcgcgcgtatttgactggaatggttgacaaaaggacgcttgaaaagtatgaaagag

SEQ ID NO: 26783 - DNA, 82 bp, Homo sapiens
gtgagattcccttgcaaatttacatacgagaatggcttgtgaaatcatgcctctgcaaagctgtgagtaccagagtgcccac

SEQ ID NO: 26784 - DNA, 75 bp, Homo sapiens
gagcgcgaatatcgtcatcgttagaaggaaactctgatgaggaagaaagtgcttcagaatctgaactttggaagg

SEQ ID NO: 26785 - DNA, 98 bp, Homo sapiens
aggggccatggccagcgacggggccaggaagcaattctggaagcgcagcaacagcaagctcccgggcagtacagagcaactgattttgttgttcctgg

SEQ ID NO: 26786 - DNA, 74 bp, Homo sapiens
ctggagtgcccccagcccagagcccgttctccaaggagaagtacatcctggactcatcgccagagaaactccac

SEQ ID NO: 26787 - DNA, 90 bp, Homo sapiens
gagacggcccggctgcagcgagcgctggacggagaggaaagcggttgaaatcacaaagattagacacctttttagataggtgttcttcag

SEQ ID NO: 26788 - DNA, 90 bp, Homo sapiens
cagctggaggaggaacttcgaaccatggaccaggccctcaagtccctgatggcctcagaggaggaggagcaaatggaatgatgactttga

SEQ ID NO: 26789 - DNA, 100 bp, Homo sapiens
ggaaacgccgaggaacccggctgaggcggcagctcaacatcctggtggatacaggcagcagtaactttgcagtgggtgctgccccccaccccttcctgca

SEQ ID NO: 26790 - DNA, 101 bp, Homo sapiens
gcccacgctgctgccgccttcgctgccgctgctgctgctgctaatgctagtgtgatccaggccaagccaccaagtacctatatgagctgctctacaacgac

SEQ ID NO: 26791 - DNA, 75 bp, Homo sapiens
gagaagctggaggagcggctgaagcgcgtgcgcatggctatgactttgcagccgtcctggagtggttcgcggagc

SEQ ID NO: 26792 - DNA, 89 bp, Homo sapiens
caggggagcaggcggaggcaaggtgatgtcttggcattgcccattttcaagcaggaagattccagccttccattggatggtgaaacaga

SEQ ID NO: 26793 - DNA, 98 bp, Homo sapiens
ggaaagcggcgccgccgtggggcctcctggacgcgtcggcggaggtggcttcgtcccgcggagtccaggcttcagatgtgtgcaacagcaccgatctt

SEQ ID NO: 26794 - DNA, 100 bp, Homo sapiens
aatggaaaaagaaactggaatctcccaacagagaaattattattttacacaatccaaagaattaaacatgtggacatgaaccaaaagagcatattatgga

SEQ ID NO: 26795 - DNA, 100 bp, Homo sapiens
gcttttaggcatacaagtaccctggctggtgactattatatggttaaaaagattttggaggaaaacagttcaggtgacttgaacataaattgcgtagatg

SEQ ID NO: 26796 - DNA, 75 bp, Homo sapiens
gttgcggcgaaaggaacggctgaaggccctacgggagaaaaccgggcgcaaggatagtaatgatgacactgaaga

SEQ ID NO: 26797 - DNA, 100 bp, Homo sapiens
accaaatggacctggtggccaccctcagccagctggagaagctccatgaagaaattgacagggtgattgggccaagccgaatccctgccatcaaggatag

SEQ ID NO: 26798 - DNA, 98 bp, Homo sapiens
tgagcactcccagcgagagctggacacagtcaccttggaggccgccgccgctccactgtcactctccaaggccagcgccacctctcactcaccgagct

SEQ ID NO: 26799 - DNA, 50 bp, Homo sapiens
tttcattactacgttcagatctgtgcagatctctagctcctataccacca

SEQ ID NO: 26800 - DNA, 83 bp, Homo sapiens
tgacagcgatgctgaggatcgaggaacgttgtctggagtggagtcaacatatcaatggagcaagtcacagtcgtcgatgccag

SEQ ID NO: 26801 - DNA, 49 bp, Homo sapiens
aaacatctcaccaatttcaaatccggtcgacaaagatgctgaattagtg

SEQ ID NO: 26802 - DNA, 98 bp, Homo sapiens
gccttgcctagtgggccttccttcccagaaacgttcagtgcctgtagccactgtagaactggaagaaaagaggttcagaactctgcctttagtgccaa

SEQ ID NO: 26803 - DNA, 100 bp, Homo sapiens
cctggaccaaactagagtgaagctaacaaagcgaagtggccatactcaggctgaagccgacgtagcttctctgaacagacgcatccagctggttgaggaa

SEQ ID NO: 26804 - DNA, 100 bp, Homo sapiens
tcctgatattaagccatcaaatgtggaacctatggaaaagtgccccatcctgtccctccaggacgtggtgaagggcctgttcgtgtgctgcctgttcctg

SEQ ID NO: 26805 - DNA, 87 bp, Homo sapiens
gtgacgaggagggagaagacgaggatgatgcggaaattaaccccaaggagagaacattgaaagtattctctaagctatttgaagaga

SEQ ID NO: 26806 - DNA, 99 bp, Homo sapiens
acttcttgtcctcaagtgatcctcccaccttagcctcctaagtagctgggaccacaggatgaccggaaagaagggatgaccgcgtttgtggaaaagaga

SEQ ID NO: 26807 - DNA, 75 bp, Homo sapiens
ccaacatgggcattttgtttatgagcaaggtgcgctacttgaaggtgtttgaaccgaagctgaactacagcgacc

SEQ ID NO: 26808 - DNA, 82 bp, Homo sapiens
ctggctggaagtggcgtggctgaaatgcttcggttacccacagtctttcgccagatgagaccggtgtccagggtactggctc

SEQ ID NO: 26809 - DNA, 98 bp, Homo sapiens
tccctatccccgacgaccggatcctgaggaggcagctgcggtggcagctgctgagttctcggtgaaggcaacatgagtgagaatgaggaagaggaaat

SEQ ID NO: 26810 - DNA, 50 bp, Homo sapiens
cccagtactaccggcccctgcatgaaacatttactagggacaacttttga

SEQ ID NO: 26811 - DNA, 74 bp, Homo sapiens
tgattatatttcttggagttgtgttggtaatgaagaaaaggagacaaggacggcagcaaggtgacaacagtggt

SEQ ID NO: 26812 - DNA, 78 bp, Homo sapiens
tgggccacccctcctttcaggtcaaggccaagactaaggggctgcagagcggggtggacattggcgtcaagtactcgg

SEQ ID NO: 26813 - DNA, 100 bp, Homo sapiens
gttttcttatgcttataagagtggaacagacttttggaacagcgatcgtaatcaatcctgagaaagacaaagacatggtccaagacctgttggacttcaa

SEQ ID NO: 26814 - DNA, 82 bp, Homo sapiens
gtctttgacgggtcctccctgcctgccgatgtgcatcggtacatgaagataccacaccaccccagagccaagtgcaccgagg

SEQ ID NO: 26815 - DNA, 80 bp, Homo sapiens
caacaactgtactgggagagctaggatggaaaacatatccattaaatgggctaatagctcgatttgaagaagaaacaagt

SEQ ID NO: 26816 - DNA, 97 bp, Homo sapiens
ctgatactaacctcttattcagaatgtcccaacagggatgaattgtaaaagcaacatcagcttgaccagtataaaattacagtggattgctcatctc

SEQ ID NO: 26817 - DNA, 98 bp, Homo sapiens
gtccactgcgggccggcgaaagctggtgtgtgtgtgcaggccacagcagcatgcccttggtgtagtcagtgccgaaaggggtctgttccttcttgagc

SEQ ID NO: 26818 - DNA, 80 bp, Homo sapiens
agaaatgggcttggattactcttacaagtgcaccacgcctgtcccagaacagcacaagaatctcactctgtcgcccaggc

SEQ ID NO: 26819 - DNA, 100 bp, Homo sapiens
cgtggtcagagcgagtctcggagaagatgtggtggcttccgtttgttggtggaggaggtggcaggcctcggcgaccaagatcactccatggatgaaatga

SEQ ID NO: 26820 - DNA, 88 bp, Homo sapiens
gctcggctgcgggaaatcgggctgaagcgactgagtccgcgatggaggcgatgttttctctggcctgtattcttccctttaaataccc

SEQ ID NO: 26821 - DNA, 82 bp, Homo sapiens
gcgtctggccaagaatcagaggaagtggggagactcatgcatctgtatgccgtgtgcgtggactgcctggaaggggttcaca

SEQ ID NO: 26822 - DNA, 100 bp, Homo sapiens
gacgaatcagtggaagaagagggcattgaggaagatcgccatggatcggatgaagaagatcaaacggcagctgtcaatgacactccgaggtggccgaggc

SEQ ID NO: 26823 - DNA, 75 bp, Homo sapiens
caatcatgtctacggaaagtattacaggcaagtatatcgcgtcaacacagcgacctgacgggacctggcgcaagc

SEQ ID NO: 26824 - DNA, 100 bp, Homo sapiens
aatttcaagaacattctacagtgggagtcacctgcttttgccaaagggaacctgactttcacagctcagtacctaagaaatgcactcggtgatggaaaga

SEQ ID NO: 26825 - DNA, 100 bp, Homo sapiens
cagagttgttatttttcagcgtgaacaagaggatgaccatgaaagctgtggttctaattctaccaaccgtagtactgctgagagcacaaaatcatcaatc

SEQ ID NO: 26826 - DNA, 100 bp, Homo sapiens
gtcgcctctgtgctcgtgagtgcatggggtataagatgctgagctttttataccaccaaagatcaacagaagaacccagtggaagctgagcctgctagac

SEQ ID NO: 26827 - DNA, 82 bp, Homo sapiens
cccgggcctgcaccatgagcgtcccggccttcatcgacatcagtgaagaagatcagccgcaggtggctgcgatgggacggaa

SEQ ID NO: 26828 - DNA, 95 bp, Homo sapiens
acatggctgcgcccttgtcagtggaggtggagttcgggagcttactccacgggaacagcctctagataatctgagttgttgaaaatacgaagcct

SEQ ID NO: 26829 - DNA, 80 bp, Homo sapiens
ccaggatgccgtgggccgcagccactcaggactgtcaaaggaccaagaatcgccttcagccctgtctggtgcatccttgg

SEQ ID NO: 26830 - DNA, 100 bp, Homo sapiens
gcgaagctggccaaagcctgcccagacggctcacctgtgcgggatggaacaaaaggcaatggatcacttggagtcctttattgctgaatgtgatcggaga

SEQ ID NO: 26831 - DNA, 75 bp, Homo sapiens
acttcgtgtgcacattcgtgtacaaggcactggccctgcggtcccaccacttccagaaggtgggcaagaagccgg

SEQ ID NO: 26832 - DNA, 83 bp, Homo sapiens
aaggattccaagtaactcttatttgactgctctggcccatttagagtctcttgcagtggatgttgaggtggccaatccaccag

SEQ ID NO: 26833 - DNA, 78 bp, Homo sapiens
caggcatgcctcctcagcctcaggggcctgcagtgtattggcactctagtgctcacataatgggtgaagccatggaaa

SEQ ID NO: 26834 - DNA, 100 bp, Homo sapiens
tggtaaaggatcatttgctggtgtctacagagctgagtccattcacactggtttggaagttgcaatcaaaatgtctcgaagatatgactccaggaccact

SEQ ID NO: 26835 - DNA, 75 bp, Homo sapiens
aaagtttacatcctcggtgggcttgtggatgaaagcattcagaagatgcctgaggaaacccagacccaagaccaa

SEQ ID NO: 26836 - DNA, 76 bp, Homo sapiens
catcctgctgtccagtcagacctcggataacaatgccctgacacctgagatcagtgtgcgtgtgaccaccatggat

SEQ ID NO: 26837 - DNA, 100 bp, Homo sapiens
caggttaccatgaggaggatttctggccttcgaagggtcattttcaacattgttaacttcagtaaaaccaagagtctctatagagatgggatggccccta

SEQ ID NO: 26838 - DNA, 75 bp, Homo sapiens
ggaatctgttcttcttttgcatcctacgtaaccagaccaagctgtgggcaatcatttggggaagaatctacagtt

SEQ ID NO: 26839 - DNA, 100 bp, Homo sapiens
cgcgggagcgagctcaaggcggcgcggcggccactgggcgcagcacccaggccatgcggaccctcagttggaagcacaccctgggcctggtgaccatgga

SEQ ID NO: 26840 - DNA, 51 bp, Homo sapiens
aagctacaagagatattcagccgagagaccatcacctccctctacaagacc

SEQ ID NO: 26841 - DNA, 75 bp, Homo sapiens
tcagctgtgtgtccagaacgtgccatggagacgcttaacggtgaaaggtgtagcagtcactcggcctacacccac

SEQ ID NO: 26842 - DNA, 80 bp, Homo sapiens
agtgaatatgtgaaagatatttatgcttatctgagacaacttgagattcctggagttctgtaaagaaaacggagggtata

SEQ ID NO: 26843 - DNA, 87 bp, Homo sapiens
gccggccgacccttcctgtcgctgacggcgactgcgggaggccaggcagcctggcatcctcgctacaacctcattgttgtgggccga

SEQ ID NO: 26844 - DNA, 98 bp, Homo sapiens
cgcgctcccgctgctcctgccggaggcgacaggaagaagggtattacagccgcctggaagccgagaggcgcagacagcacgacgaggcggcgcgcagg

SEQ ID NO: 26845 - DNA, 74 bp, Homo sapiens
gcagagccgcctggtggccacatctcctggcagctccctcccagcagccaactcttcctgccaaataaatagag

SEQ ID NO: 26846 - DNA, 100 bp, Homo sapiens
gccaggcgtggaggaagaggcattgaggactttccttacctgtttttccagctcacccactgccagcagagggtacagaagtgcaggtggatgacatcaa

SEQ ID NO: 26847 - DNA, 98 bp, Homo sapiens
ctgaaaaaaatagtcaatagtgctcagactggtagcttcaaacagctcacagttaagatgcttgctctgtcaaggcacagcctattgtctcctttgct

SEQ ID NO: 26848 - DNA, 90 bp, Homo sapiens
aaaaatggaggaaaggcaacagaatcatgtctttcagagcagcatgatcagcatgtttataaagctagacaaggtctcactatgttgccc

SEQ ID NO: 26849 - DNA, 100 bp, Homo sapiens
cataaacttggcttcctcgcttctgctcctcagaacacagtactgtctgctttgcttgcagtatgtaattctgctggtgaagctttggatacaggaaaac

SEQ ID NO: 26850 - DNA, 74 bp, Homo sapiens
ggagaacaccttgcccactcccatggtcctgcagagcactttttatgaagactggtcttttgtgatggatgaag

SEQ ID NO: 26851 - DNA, 82 bp, Homo sapiens
cgcaaggtcgccctcaaggccatgatcaaaacgtcccatccatgggggggcggaagcgggagcgcaaggctgccgtcgagga

SEQ ID NO: 26852 - DNA, 51 bp, Homo sapiens
cttggacccatccatcctcccccaaggccggagcctcaacagaaagctcct

SEQ ID NO: 26853 - DNA, 100 bp, Homo sapiens
tgctaactaccagacgatgaaagaacatttcctctagtttctggataatgagcaggcacacagatatggaatgtgcagatgtcccactattaactccaag

SEQ ID NO: 26854 - DNA, 97 bp, Homo sapiens
ccagtgacgggtctggagtgcgtgggggaccggctgttggcgggttttaaaatcaaagatgggaaaatcggagaaaattgcccttccccatggccag

SEQ ID NO: 26855 - DNA, 100 bp, Homo sapiens
gatgatggggccttgcagtaagcaggtgcagagtgtcgatatcgcagctttcaacaagatctgaagcctgagtgtgtgtacgtgcgcgcgtgcgtgaggc

SEQ ID NO: 26856 - DNA, 96 bp, Homo sapiens
aaaatgccaacgccgtgtctgaagaagatgcagatgcctccagctattacgagtcccatggcaacaaggatcagaggcagagctgctttccatgcc

SEQ ID NO: 26857 - DNA, 83 bp, Homo sapiens
tggagctctccctggaagagtaagcaggccgagggctgtgcattcaagtgcctacaccaactaatgttacaattgaatcctat

SEQ ID NO: 26858 - DNA, 123 bp, Homo sapiens
tgggtgaacatagaccaaatggaaaaagataaagtgaagattcatggaatattgtccaatactcatcggcaagctgcagacactggagtcactaacagggatctaattagtcgaagaataaaa

SEQ ID NO: 26859 - DNA, 96 bp, Homo sapiens
gccgaggacagaggagaggggcgctcaccagggcgcttgtgcagggtaaaatccagtacaaggaatatatcattgaaggatttgaaaacatgccag

SEQ ID NO: 26860 - DNA, 50 bp, Homo sapiens
cgtcgctgctggcacttcaggctctgaacccctgaacagtgcccaagtgt

SEQ ID NO: 26861 - DNA, 106 bp, Homo sapiens
ttacgtgcggcagggctgtgaggcccgccgctcgcatgagcacctcatacggctgcttctggagaaggaccacagccgctttgtcaactgtgtgcgattctctcct

SEQ ID NO: 26862 - DNA, 80 bp, Homo sapiens
cttcagttcgtgtgtggagacaggggcttttatttcaatccagtccttctgtggaacttctgaacatcttttattagtgg

SEQ ID NO: 26863 - DNA, 75 bp, Homo sapiens
ttatgtttgtaaatgtgagtggaagccatgaggccaaaggcagttgtattgacgaaggggaggaccaggctggcg

SEQ ID NO: 26864 - DNA, 95 bp, Homo sapiens
gatcatgggatatgactgggcagaaagcttgtgagaagaatgagttgatgacatgctccataccagtggctagatggagtattaaggtggagcag

SEQ ID NO: 26865 - DNA, 50 bp, Homo sapiens
cagtgcgcggggagcgttcctacaggtggcgggacaggcttcattgggac

SEQ ID NO: 26866 - DNA, 90 bp, Homo sapiens
gctgccgggattttggaggccggggccgcgctgagggcgcccagctggcaatggatcacttggagtcctttattgctgaatgtgatcgga

SEQ ID NO: 26867 - DNA, 100 bp, Homo sapiens
acgaggtgtcggcgcgggagcagcacttccacagccaagtgcgggagtccacgaaatgcactcggtgatggaaagagagccactattctgaagaacactt

SEQ ID NO: 26868 - DNA, 83 bp, Homo sapiens
cggagagactcgccggccgagggtggccctaggggcagcgagcaagacagcaagcaggcaggacagaagacttcagctgccct

SEQ ID NO: 26869 - DNA, 100 bp, Homo sapiens
tcctccatgggtcagtgcagagcctggcaacctgcataaggaatctgtcttgaactatcgtttcgatcctctcggcattgttgatggttttactgccgag

SEQ ID NO: 26870 - DNA, 51 bp, Homo sapiens
gtgtgtcctgccgagaccccagagaattttgattcagctaaagttccatca

SEQ ID NO: 26871 - DNA, 100 bp, Homo sapiens
atttacaaactggccaagaagggccttactccttcacagatcggaactcgctttgaacgcttgcttatgagaataggacatcaatcaaagaatgccccag

SEQ ID NO: 26872 - DNA, 48 bp, Homo sapiens
agcaatcgccgggacagctgcaaggagagccggacagggcagcggccg

SEQ ID NO: 26873 - DNA, 100 bp, Homo sapiens
caatgataggaccaaaacaccaataatcgccacattagcctcgggtgccgttgctggatctagttcaggttcaaaattaaaagatcctgaactgagttta

SEQ ID NO: 26874 - DNA, 98 bp, Homo sapiens
ctggggccgcgccacttccgcaaacaggtgcagcattatgccagtacatacaggcttctaaagccagggatggtgccagccctttcatttcaagtacg

SEQ ID NO: 26875 - DNA, 98 bp, Homo sapiens
tggagacggtcgtagctgcggtcgcgccgagaaagaatcaaaggcatgggaggttgatacctgccggggccattacaacaatgtatcttgtgccgtct

SEQ ID NO: 26876 - DNA, 100 bp, Homo sapiens
cggctgacagcctcaaccaggtgtccaccatctgggacgataaccctgccccctccacccacgataagctgtgccacgaccgtggctatctggtgaccca

SEQ ID NO: 26877 - DNA, 74 bp, Homo sapiens
cctggctcttgccctcatcctggttctggaatcctcagttcaaggatgtgtttcacatggtagttgaagtacca

SEQ ID NO: 26878 - DNA, 51 bp, Homo sapiens
gagccctggcatgctgactaagctccagatgtgtcttgctgaatcagggct

SEQ ID NO: 26879 - DNA, 100 bp, Homo sapiens
attgcttctcgcatgattgaatgcctaaggaggatacagaccacaattactatatatctcgaatatatggtccatctgattctgccagccgggatttatg

SEQ ID NO: 26880 - DNA, 90 bp, Homo sapiens
atccgggagagaaatcacttggaaggactttgtcaataactatctttcaaaaggagtagttcaagaacatgaagactcgggtgactcaga

SEQ ID NO: 26881 - DNA, 83 bp, Homo sapiens
ggcagcctgaacggagtgtgcgacggattgggaggtttggtgcacctcgatttggaggaagtagggcagggcccttatctgga

SEQ ID NO: 26882 - DNA, 101 bp, Homo sapiens
ttttgcagagtcactcaggacaagcttgaaggtggtaaattcactccagcagcaacctcaggctgcatccccttcagtaccagagccccactctttgactc

SEQ ID NO: 26883 - DNA, 90 bp, Homo sapiens
ctaaaaagcaccaccaagatgtctctaaatgagcgcccgcctgcacccaggtgaaataaacagccttgttgctcacacaaagcctgtttg

SEQ ID NO: 26884 - DNA, 80 bp, Homo sapiens
cgttacaagctttgtctccttcgacttggagtctttgtccaggacggacccatggatgaaggaccagatcttgatctagg

SEQ ID NO: 26885 - DNA, 95 bp, Homo sapiens
tccttttccctctccctttccctaagcaatgaggtcttactgtgtagcccaggctgctctggaactcctggactcaagtgatcttcctaccttgg

SEQ ID NO: 26886 - DNA, 90 bp, Homo sapiens
cgcttgatgtggaaatcccagtatgttccatatgatggaatcccatttgttaatgcagatgatggagcagtggtatcacctgaccttggg

SEQ ID NO: 26887 - DNA, 78 bp, Homo sapiens
tggaacacatttatgcattgatgtggaagatgcaataacaacgaacttgatgcaagtgataggtttgccaaggtcaga

SEQ ID NO: 26888 - DNA, 90 bp, Homo sapiens
cggccacatgaaagttttcagcctcatccagcaggcggtgacccgctaccggaaggccatcgccaagacagcccacctgaggatattgac

SEQ ID NO: 26889 - DNA, 100 bp, Homo sapiens
atgcatgaaagcacatgtttcagtgccactcacataagaagtgcccggcaggacagaagacttcagctgccctgtccacagtgggctctgccatcagcag

SEQ ID NO: 26890 - DNA, 115 bp, Homo sapiens
ggggggagctagtggaagttactgccgcgccaccgagtccggaccggagactttggggcctaactaggatgttcacggaagaccagggtgtagatgacaggctgctctatgacat

SEQ ID NO: 26891 - DNA, 90 bp, Homo sapiens
cggatagcgagggcggccgcgccggctccaggatgctccaggatgaaacgccataggcctgtcagcagcagtgacagttcagacgaaagt

SEQ ID NO: 26892 - DNA, 83 bp, Homo sapiens
cggatggcaacctgctccagcgatcagagcgttaagggggatatgagactttctactcggaatatcctgagtgttgcgtggat

SEQ ID NO: 26893 - DNA, 75 bp, Homo sapiens
tgctcttcctgctcgtgctcactgtcaccgagccgctgcggccagggaagaaggagaaagggccaacccctgaag

SEQ ID NO: 26894 - DNA, 100 bp, Homo sapiens
tcacccggacatcaagtattcaccagttaatagcaccaggttggaatgttgcatcagcaggtagaagaacatgaaaaaatcaagcaagagatgaccatgg

SEQ ID NO: 26895 - DNA, 100 bp, Homo sapiens
agtcagaaggggaacggatctgtgtgcccacagctcctggagccccacagaaggtgcttcctggaggggcctgccccactgttcctgtgctgagttccag

SEQ ID NO: 26896 - DNA, 123 bp, Homo sapiens
ggcgaccgagggaatgatccttactaaccacgaccatcaaatccgtgtcggagtccttacaggcaaataagggcgagactgaaaaatcaagtcactcagttgaaggagcaagtacctggtttc

SEQ ID NO: 26897 - DNA, 100 bp, Homo sapiens
gccacacagaacacctccggccccggtgactgaagagatgctacagcggagtgggaagctttggggtggccggtttgtgggtgcagtggaccccatcatg

SEQ ID NO: 26898 - DNA, 100 bp, Homo sapiens
gtgatccggggccccggaacccgagctggagctgaagcgcaggctgcggggcgcggagtcgggagaagcatcaagtgtacctgatttgtgaacctatctt

SEQ ID NO: 26899 - DNA, 74 bp, Homo sapiens
cccggttccccggcccacagtgggggtgtgcaaacccgagagaactgggtgattacgtttttgaagaagaagga

SEQ ID NO: 26900 - DNA, 98 bp, Homo sapiens
gtgagtgcaacagggagcaaaggaaacagaaccgacagctgttgctgggacatggcttgcagtgtggcaggcataacttctgatgctaatgttctgac

SEQ ID NO: 26901 - DNA, 75 bp, Homo sapiens
atgtacatcaaggcctccggcagctatgcagatggccaccatgtctgggagatggaagcgaaaactgaccgggac

SEQ ID NO: 26902 - DNA, 98 bp, Homo sapiens
accgagtgtcacagacgccagagagcctggatttcctcaaggtcccggaccagggagctgcaggggctcacctgcttgaggaaacaggaactgcctcg

SEQ ID NO: 26903 - DNA, 51 bp, Homo sapiens
tgcagtcagggcgcaaaggaaaaatcctaagtaatgcactgaagagaggag

SEQ ID NO: 26904 - DNA, 88 bp, Homo sapiens
tgtactgaccaagatgagcaacatctacatccaggagcctcccacgaatgggaaggttggtcaaagaaaaagtgatgtatgaaaaaga

SEQ ID NO: 26905 - DNA, 74 bp, Homo sapiens
ccgaagccccgccagcccagctaaagcagacggctcgcactgcgacccgaaggagtacgagagggcctccaaag

SEQ ID NO: 26906 - DNA, 100 bp, Homo sapiens
tttgccctggcaaacactggaatcctactttttctgacttggatgttgtgggtgatggtatgcagtgtcctccttcacctttgctttttgatccttcact

SEQ ID NO: 26907 - DNA, 50 bp, Homo sapiens
tgtgatgagatattctgctgagtggaaggaatcattgtagtcaatcattt

SEQ ID NO: 26908 - DNA, 87 bp, Homo sapiens
ccggcgggccatggccactctgccgagcgcagagcgccgcgcgttcgcgctcaagatcaacagaggaagtccacaaatgaaggggac

SEQ ID NO: 26909 - DNA, 98 bp, Homo sapiens
tgctgatgaagatccacacctcactgcagtcgaaggtcatcagccagaaggagggagacttcttctttgattccttgagggaggtgtctgactgggtg

SEQ ID NO: 26910 - DNA, 98 bp, Homo sapiens
agggatgtgatgctggagaactgcaggaacctggcctcactagattggagctggagtgagccttccaggaattttggctgccaaatgtggtgcagaag

SEQ ID NO: 26911 - DNA, 100 bp, Homo sapiens
acagcatcctacaagaatgagcaaacctattctgatggcaggagattgaggactaccatcttcctcatgggaccagtgaaacagctgaagcgaatgtttg

SEQ ID NO: 26912 - DNA, 108 bp, Homo sapiens
tctcccatgggcagttgtgaactaacaagaccttccttacccaaagacgcaagataccagtttcattccaggacctgactgtgaacttcacccaagaggaatggcagc

SEQ ID NO: 26913 - DNA, 101 bp, Homo sapiens
gaaaatcgtggccgggcgccatttgccagtgatggaccgtgctagtgacctgactgatgccttcgtggagatatgagaagaagtttgtgctacagaaacta

SEQ ID NO: 26914 - DNA, 75 bp, Homo sapiens
ccaggaagccgtcttcgaactcaggagaagcaatcatcctcttccagtggtagcgtgtttgggtctggaaacact

SEQ ID NO: 26915 - DNA, 73 bp, Homo sapiens
atcctaccatgtcagccttcccagtagctggaactacaggtgccaagtcctgccctgccaacttcttggcagc

SEQ ID NO: 26916 - DNA, 100 bp, Homo sapiens
ccattgtactcagtagaggagtatcagttcagtatcgctacttcaaagggtactttttagaaccaaagttgtggacatcggatacccaaggagacgaagc

SEQ ID NO: 26917 - DNA, 50 bp, Homo sapiens
cactagtgaacaggagcgcatgaaaagaaagctgacttcatgagaccgag

SEQ ID NO: 26918 - DNA, 75 bp, Homo sapiens
gctatttttttttctattccacatgtaccaaagtggtaagttttcttcatacagttcttttgtgtgacaaactgg

SEQ ID NO: 26919 - DNA, 82 bp, Homo sapiens
gcggtggcatgagggtcggaccccagtaccaggcggtggtgcccgacttcgaccccggggataaaaacattcagatggcaga

SEQ ID NO: 26920 - DNA, 100 bp, Homo sapiens
cttctgatagcaactttaatgtgtggttggaataaaaacagggttgaatgagttccagaaagcagggttctcaacctcgtggacagcaatctgcagaaga

SEQ ID NO: 26921 - DNA, 90 bp, Homo sapiens
cgaatgggatcctactgggcgctacgtcgtcacctctgtgtcctggtggagccataaggtcgtagttcccccgctccctgggaaagcgtt

SEQ ID NO: 26922 - DNA, 88 bp, Homo sapiens
cagaggccctcacaccttcctcagaatggacccccaggtcctgaaaatccttggttggttcaagcttatgtttcagcagctaaacacc

SEQ ID NO: 26923 - DNA, 89 bp, Homo sapiens
cagagctgagccggaggggaatccggaagggacacgctgaacaggaacgaatgcaggaatttgggaactgagctgtgcaagtgctgaag

SEQ ID NO: 26924 - DNA, 89 bp, Homo sapiens
ggagagggaagaagtgcccagaaggtcggggctgtcggccggccacagggatgtcttttactataggcattttttactgtctacagaaa

SEQ ID NO: 26925 - DNA, 116 bp, Homo sapiens
aaccattgacgccatgtcgggttattcgagtgaccgagaccgcggccgggaccgagggtgcgcgcggagccatggttatcatgtcggagttcagcgcggaccccgcgggccagggt

SEQ ID NO: 26926 - DNA, 100 bp, Homo sapiens
aggaccggcacacactggcttatgataagggctggcgtgtcagaactgactttaagcagtatcagtctagggacaggaagatggttggcgacgtgaccgg

SEQ ID NO: 26927 - DNA, 51 bp, Homo sapiens
gccctgggtcgcttggaagaagccaagattttggaaataatcagggttatt

SEQ ID NO: 26928 - DNA, 75 bp, Homo sapiens
cgacaagcacatcaccactctgcaggttttgtaatcaacccccctcagcatggtcctctcatcccccgactggta

SEQ ID NO: 26929 - DNA, 96 bp, Homo sapiens
tcggcggcgtgcagcgcgtcctcagcacgcttgaccctaagcaggaggcagtgcctaccaagtcaggattgttacccccaccacctgcgctccctc

SEQ ID NO: 26930 - DNA, 76 bp, Homo sapiens
cgggcagggctctaggaaacatatgttacgatagccgtgaccaagaatatggcccaggtgaccaaagccctggaca

SEQ ID NO: 26931 - DNA, 80 bp, Homo sapiens
aaacatggagattaaagaccagggagcccaaatggagccgctgctgcctacgtttgcagatggcgtgtacctggttctgc

SEQ ID NO: 26932 - DNA, 74 bp, Homo sapiens
cttcagtacaatgtcaccctcccagcaacaggagaattctcaccaaatgttcccaaatccttatcctcagctgt

SEQ ID NO: 26933 - DNA, 50 bp, Homo sapiens
gcgccgcgtagacctccgctcccccagttgaagattcctgtctctggatc

SEQ ID NO: 26934 - DNA, 126 bp, Homo sapiens
cactatgctggcccttgcttcgtcccagggggatggcctctacaaggagcttgcagtgtccaggccgcgcagctcccctgacgacctgaaggccctgactcgcaatgtgaaccggctgaatgagag

SEQ ID NO: 26935 - DNA, 75 bp, Homo sapiens
ccggtgcagaagaacatcctggcggcggccagcccgtacatcagattttctccaaaggaacatccggtgcttgcc

SEQ ID NO: 26936 - DNA, 85 bp, Homo sapiens
cactatcagaaagaaatgaacccaccttctccttctaatccccggtttttcgttggaatatacgttgcacatttatggcgattct

SEQ ID NO: 26937 - DNA, 88 bp, Homo sapiens
ccaagaccccaggctgcctcccaggtcctctgggacagcccctgccttctaccagtggaggaaggccctgtcttcgccatgtgcatgg

SEQ ID NO: 26938 - DNA, 90 bp, Homo sapiens
tcaggaacctgggcatccctctgggccaggacgccgaggaggtgacagattgactgggatcccctcgcacatcctcaacagctccccatc

SEQ ID NO: 26939 - DNA, 83 bp, Homo sapiens
atttggtttgccaagggagcttgtggtaactgtatcaggcattgaatgccccagaggagcccgaaacctcccaggcttggtgc

SEQ ID NO: 26940 - DNA, 100 bp, Homo sapiens
gatcgtgaccgagaccgtgaccgagagcgtgaccgagagcgcgaatatcgtcatcgttagaagggggtccactggacggggcctgagctacaacttcacc

SEQ ID NO: 26941 - DNA, 82 bp, Homo sapiens
ctccctaatgatgatgctcagtttgatgcgtcacactacgacagtgagaaaggaggaacgtcaaggtcgtgggaaataaaag

SEQ ID NO: 26942 - DNA, 83 bp, Homo sapiens
aagaaatttggagtgtgcgtgcgcgccgagcgggtggcccagttgaaatccttcccttcctctaccttggaagtgcctaccat

SEQ ID NO: 26943 - DNA, 100 bp, Homo sapiens
ccagcccgcagagccagcccccgaccccgggccacctgggcccccgggttccgccggcactctcgccaccaccgcgtggacttcccaagtaagaagcgga

SEQ ID NO: 26944 - DNA, 100 bp, Homo sapiens
atgaatactgcagcaatgagtgtgtggtgaagcactgcaggaaactttgagggaaattttgagtcactggaccttgcggaatttgctaagaagcagccat

SEQ ID NO: 26945 - DNA, 101 bp, Homo sapiens
gagaccgagtcagaacccgagtgctgcttggcggcgagaacccagcccttgctgacatctacacagagcacgcccatcaggtggtggtggccaagtatgcg

SEQ ID NO: 26946 - DNA, 75 bp, Homo sapiens
agtttggcgtgcaacatggggcttgagaaaggggactttgaacatgtcggggatcgccctcagcagactcgccca

SEQ ID NO: 26947 - DNA, 101 bp, Homo sapiens
ggggactgcgggcggcgctgtgtccgtcgccatgacagtgtctttggtgcaacactaacaaggcttgtctggactacccagttacaagcgtcttgccaccg

SEQ ID NO: 26948 - DNA, 60 bp, Homo sapiens
ctgcagagaccccgctatggctatgccttcaattaagttgcagagttctgatggagagat

SEQ ID NO: 26949 - DNA, 80 bp, Homo sapiens
ctctacaggacccgctttctaccattaaggtcatcatcagatttgaaatatttaaagtggatacaaaactatttcagcaa

SEQ ID NO: 26950 - DNA, 95 bp, Homo sapiens
tgtggaggacctggggtctctgatgcctattattgtaaggagtgcaccatccaggagaaggacctctggtcagcgatgctatccacaatgacttg

SEQ ID NO: 26951 - DNA, 111 bp, Homo sapiens
cggctccctcgggagctcatcttcgtggggcgtgaggagtgtgagctcatgctacaggacctgaaggagaagaaggagaaggtggaggagaaggcaagccggaaagagcga

SEQ ID NO: 26952 - DNA, 82 bp, Homo sapiens
gaaccagatccgggagcacgtcatctccatcgagggtgaggcggaaccaaccctcctggccatgggaggggccgtggtggac

SEQ ID NO: 26953 - DNA, 50 bp, Homo sapiens
agccgccctggagaaacagatcgatggcgattttgctgacagctgccaag

SEQ ID NO: 26954 - DNA, 75 bp, Homo sapiens
gaatttcgatctccgccctggggtcattgtcagatcaaatgatgccgtttggaaaaatttcccagcagttgtgtg

SEQ ID NO: 26955 - DNA, 100 bp, Homo sapiens
caacgtctaagaaacttggagaactccagaaactgccaagttttggaccttatctggaacagcgcaagaaaatcatagcagaaaacaagattagactgaa

SEQ ID NO: 26956 - DNA, 92 bp, Homo sapiens
cactggtagaggacagcgcagaagaggaatctactctcaccaacttcacagagaatgcagttgtcttgacttcaggtctgtctgttctgttg

SEQ ID NO: 26957 - DNA, 75 bp, Homo sapiens
gttgtgacccagagcttcctaaaacttcatcctttgccgcatcagagtgtccccccattgggatggagtcacacc

SEQ ID NO: 26958 - DNA, 82 bp, Homo sapiens
ggcgcctgaaggagttgttgtctcggcagcgcccgcggagacgtgaagagtgagggccccaaggctgttgcagctcctcgac

SEQ ID NO: 26959 - DNA, 85 bp, Homo sapiens
cggccttggtgcggcgagccgagcgaggcagctctgagccgcgcgactgtgccctgtccacggtgcctcctgcatgtcctgctgc

SEQ ID NO: 26960 - DNA, 82 bp, Homo sapiens
tggatgaaagataaagcccttaaggacaagtgagaaagatcagtctaaagaaaaggagaagaaagtgaaaaaaacaattcct

SEQ ID NO: 26961 - DNA, 100 bp, Homo sapiens
ctgctgtctgcctccccggctgattggattcgttactgctttgcaacgcgcacctaactccagggcagctgcaatgactctccgcacggtattattgtca

SEQ ID NO: 26962 - DNA, 100 bp, Homo sapiens
ctcatcaacaccaaggatctgcaaccttgaagcatgacactgctgcagtcgatcgttccgtcaagcgtcttttcaaagttcggagtgatcttgattttgc

SEQ ID NO: 26963 - DNA, 100 bp, Homo sapiens
ggcagcctccgcggaggagcagaagatactctggatgaatattttgaatatgatgcagaggagttcttggtctctttggccttgctgataacagaaggac

SEQ ID NO: 26964 - DNA, 83 bp, Homo sapiens
cattatttgaggtggtgaaactggggaaaagtgcaatgcaggttcattttccagacactgaaagagcagaatggctaaataag

SEQ ID NO: 26965 - DNA, 98 bp, Homo sapiens
agacagcgatcgagagagaccggagaggtggagaggtgaagtggtaaggaataccagtggacatttgtgtccctggtttcgaagcaggctgccagcac

SEQ ID NO: 26966 - DNA, 74 bp, Homo sapiens
taccccagacccctcagcgtctggcatctacctgaaagatgtctgaaaattccagtgacagtgattcatcttgt

SEQ ID NO: 26967 - DNA, 124 bp, Homo sapiens
gcagcgacaagattgtcctgttggtgtgtaaccgagcctgcactgggcaacaagggaaaaggcataaagagccacccaaggagctggacacggcctcctcggatgaggagaatgaggacggaga

SEQ ID NO: 26968 - DNA, 100 bp, Homo sapiens
ctcagtttgtgcaggacaccgacatggaacagggactcactggggatattctctaagccgctttcatcatgggagaaatagagcagaggccgaccccagg

SEQ ID NO: 26969 - DNA, 82 bp, Homo sapiens
caaaagtttgatgagattttttcagcaacaagcatatctggggatcgtactggaaagaaggccgatggggatacaaatgctg

SEQ ID NO: 26970 - DNA, 100 bp, Homo sapiens
ggaggcgttcagctgcttcaagatgaagggacatgagagatggctttagaagaaaaagtttctactcttcccattatgcgagagagcggtctccttataa

SEQ ID NO: 26971 - DNA, 80 bp, Homo sapiens
agagcgatacctctcaagtcaaagcagcaggaagataccacaatcagaccctccgtgattacagtggcgagatcttgaac

SEQ ID NO: 26972 - DNA, 90 bp, Homo sapiens
aaacatggcggatccagaattctgcttgactgtagtagactctgatggagctaccaactctactactgcaaacctgacagtgaacaaagc

SEQ ID NO: 26973 - DNA, 83 bp, Homo sapiens
ttaacagtgcgtatttgcctgaagaaggtcagtgtgcttgcttggagatcaggacgcaaagctttctgaaacaaagactcatt

SEQ ID NO: 26974 - DNA, 76 bp, Homo sapiens
tctcaaagtgggagggatccttgtcatgccactggaagagaagagtcattcttatagaagagcatcagaggaagat

SEQ ID NO: 26975 - DNA, 75 bp, Homo sapiens
tcacaaaagagtgtcaaaatattggctcgatgcattctatttctcatcatttggctcataactggaggaaggcac

SEQ ID NO: 26976 - DNA, 83 bp, Homo sapiens
gctgttaacacttcctagataacgggcctggctacagcaatatggctacctgcctcccggggacctacgtacccacacacagc

SEQ ID NO: 26977 - DNA, 100 bp, Homo sapiens
aacagatctgaatttcctgatgtgaaaatactgattgcatttataagctacaaagactttagagatatgaaccagaaatttattgtccagcaccaccaca

SEQ ID NO: 26978 - DNA, 90 bp, Homo sapiens
ctctgcaacaaaggcagtccacataagtaatcctaaaacagctgaatttcagggctccgtaggcaccaactgcaaggacccctccccctg

SEQ ID NO: 26979 - DNA, 100 bp, Homo sapiens
aggaggcctgcaaattcatgacaggattattgagggtctccaactgaattccttgaagagaaaatggcctaccaggaatacccaaatagccagaactggc

SEQ ID NO: 26980 - DNA, 75 bp, Homo sapiens
cggcgctggagagggggcgctgagctgttgggccaatggtaatgatagtaaaaaatttaaaggagaagataaaat

SEQ ID NO: 26981 - DNA, 75 bp, Homo sapiens
tcacgctggactacttataggggccctgagaccaacccccggccaggcagttctattatcctcccagtccacaac

SEQ ID NO: 26982 - DNA, 90 bp, Homo sapiens
cttgttttttcatattacatctacaagaggggacaagtacctttatgaaccagtgtatcccaaggaacgatcagcgttggagtagatgcc

SEQ ID NO: 26983 - DNA, 90 bp, Homo sapiens
cgccgccatgaacaactcgggcgccgacgagatcggggactggtgattgcagctggaagtgcccatgaccgagctggcgtcctccggggg

SEQ ID NO: 26984 - DNA, 100 bp, Homo sapiens
ctgagattctgcggggagacaagttcatccccattttccaaggggacgacagcgtcgttattgggactctagatctcgttagagcattacaagatctgga

SEQ ID NO: 26985 - DNA, 98 bp, Homo sapiens
aagaagcaggatgctgatctaaacgtggaaaaaatcaagtgttccctccaaagtgcaacatagggaagaattttctctcactcaattaccttgctgag

SEQ ID NO: 26986 - DNA, 100 bp, Homo sapiens
atgctaccctctactttgtattttgtgtggattcctcagagagtgaacttggaatcttggacctcatccaggaagaactcttggatataaaagaactccc

SEQ ID NO: 26987 - DNA, 75 bp, Homo sapiens
gaaatatactacactgcaagatctaatctggactgagcagggggaggaacatttaagctgatggaagtggaagtg

SEQ ID NO: 26988 - DNA, 100 bp, Homo sapiens
gggagccgttggctgggaccgtgcgcgtgcgcctgggggcaccgctgccgttccgagagcgggaacagcttccacgtgttcgaccagggccagtttgcca

SEQ ID NO: 26989 - DNA, 75 bp, Homo sapiens
ctcactggacgccacaggggcaaggtggtggagacactgccacttgctgtgccaaatggaacacggaggataaag

SEQ ID NO: 26990 - DNA, 100 bp, Homo sapiens
ctaagaatattaatggccagatctagtataagaatgcgggagtgattgagttggaagcgtgcatcaaggctgtacgtgtccttgcaattcagaaacggag

SEQ ID NO: 26991 - DNA, 50 bp, Homo sapiens
tcttctcttccctcgggtgacttgagtgttataactcagtggaaaatggc

SEQ ID NO: 26992 - DNA, 75 bp, Homo sapiens
ggaaggcgcgagtgaggaaaggaggtactgtagctgttaaacgtttaatgaaagaagcggcagaattgaaagatc

SEQ ID NO: 26993 - DNA, 100 bp, Homo sapiens
gtagatgttactggacctcacctctacagcatctatcctcatggatcaactgataagttgccttatgtcaccatggtggaagagaaagccaatacccacc

SEQ ID NO: 26994 - DNA, 98 bp, Homo sapiens
gcggtgtaagtcggtggcggcgccggtacgcctggtccccgcgtggagtctttactcaaaacagatttccatgaggacaacttacaaggacctgtatg

SEQ ID NO: 26995 - DNA, 100 bp, Homo sapiens
cgagaatgtgtccgtggcgctcgagttcctggaccgtgagagcatcaagctcgtgtccatcgtttctggagcagcagagctgaaggaacccaaacttgga

SEQ ID NO: 26996 - DNA, 83 bp, Homo sapiens
caatgaccggcagcttgcccttcgagccaacagaaaaatatggctcaggagactaaccagaccccggggcccatgctgtgtag

SEQ ID NO: 26997 - DNA, 74 bp, Homo sapiens
gtcgccagtcagtgttgtgtggaagccagaacatcgttctcaatggcaaggcttatttgcaacaagttcaagat

SEQ ID NO: 26998 - DNA, 100 bp, Homo sapiens
tggatccttgtgggcatgatccataatcggtttcaagagccagcactgagcaacctcggcctccccttcagcagctttgaccactctaaagcccactact

SEQ ID NO: 26999 - DNA, 74 bp, Homo sapiens
gaagagtaagcagcaccagtcatctgtgagttggcgagctttagcccctctcctccttctccgtaccctaccac

SEQ ID NO: 27000 - DNA, 100 bp, Homo sapiens
cagcagctcttcaactgcggagacggcctcacctacaagagggtcaggtgggagctggaagttgctcacaattgaccaggacctcatggtggcacagttt

SEQ ID NO: 27001 - DNA, 74 bp, Homo sapiens
cgtgaacctcgttttgagattaagattcatgcccaagcacaaaacaacccatttaaagaagatgctcggcctta

SEQ ID NO: 27002 - DNA, 100 bp, Homo sapiens
ccaaattgtcgccattaagaaaaactcgaaaattaatgctgaaaataaggcgaagatcaacatggcaggcgcaaagcgcgttcctacggcccctgctgca

SEQ ID NO: 27003 - DNA, 75 bp, Homo sapiens
ctcaccgttctgcccccagaactagagtgagcctcgcagctggtccctgctagagcagctgggcctggccggggc

SEQ ID NO: 27004 - DNA, 100 bp, Homo sapiens
tttacttatgttaatcatagactttcgacattggagtgcttcattaccacgagataggcaatacgaaaggtttgtcaagggctatttaatgagttactag

SEQ ID NO: 27005 - DNA, 98 bp, Homo sapiens
ttcaacgctgagccaccttgggaacctagctgatgataggggggttccatctcccaacttgtccatttttctgagtttaaccagtaatgccattcagt

SEQ ID NO: 27006 - DNA, 90 bp, Homo sapiens
agctgcgggaggcccccagccccgacctgcctgatgtgcaagagctcatcactcaagtgcggtcagagaagtgctccctgcaggccgcag

SEQ ID NO: 27007 - DNA, 82 bp, Homo sapiens
acgtcactggccctggtggggattgacagccacgggaaggccactcttcacctccaccatgagcctggacatccagagcctg

SEQ ID NO: 27008 - DNA, 76 bp, Homo sapiens
ccctgctggaccagctcatgggcacggctcgggacggctgaagccgacgtagcttctctgaacagacgcatccagc

SEQ ID NO: 27009 - DNA, 74 bp, Homo sapiens
agctcctgagtgactacattcgcctcctggccatagtccgcgtagaggaaggatggtgggaaggtgttctcaac

SEQ ID NO: 27010 - DNA, 101 bp, Homo sapiens
tctctttctggcctggaggctatccagcgtggtgatgatgtccagcaactctgtgaagcaggagaagaggagtttttggaaatcatggcactcgtgggcat

SEQ ID NO: 27011 - DNA, 90 bp, Homo sapiens
acccaaggaagtgactcaaactgtgagaacttcagctgtttgagggcatgaaggcgttcaaaggcaaagaccagcaggtgcgcctcttcc

SEQ ID NO: 27012 - DNA, 100 bp, Homo sapiens
gacaagtgcctggaagagttctatgcactctgtgaccagctggagctgtgcctgatctggaatcgatgtgtgaaaccaagttattatctctaaagaagga

SEQ ID NO: 27013 - DNA, 97 bp, Homo sapiens
ctcctcccctagcttcactcaatgttagtaaggaccatggccaacctggagcgcaccttcatcgccatcaagccggacggcgtgcagcgcggcctgg

SEQ ID NO: 27014 - DNA, 75 bp, Homo sapiens
tgaaagttgtaagctgcgaggtcttcatcacagcttgtagacaaaagacgtcactctcattccttaatcgaccag

SEQ ID NO: 27015 - DNA, 51 bp, Homo sapiens
tggccgaggagattcaggatgaagttgtgaccctaaacatcaaccgtaagc

SEQ ID NO: 27016 - DNA, 80 bp, Homo sapiens
gtccggatgagatcgcacttcctgcagtgggcattagccacgtccagcaaggatggaacattactgtggacctggtcatt

SEQ ID NO: 27017 - DNA, 90 bp, Homo sapiens
cggcgacccgggcttctgtgaaacatggcggtaggctgggaccataacacaaggctaaacatatttttgactggtatgaacccattctac

SEQ ID NO: 27018 - DNA, 75 bp, Homo sapiens
accagtcttccctggcaagattcttctgaattgtgctgccttggccaaaagagactctgatgccagtatggactg

SEQ ID NO: 27019 - DNA, 98 bp, Homo sapiens
ttccctggtgaaaggatcctacaagaccctcaggctggtagtgcgcaggctgtattcatcaccaaagaaaaaacttacaccaatgcagaaatcggtta

SEQ ID NO: 27020 - DNA, 120 bp, Homo sapiens
cttcttcctcttcttcctcctccgctaccaccaccacaccagaaactagcaccagccccaaatttcgtgtcagaaactatttaaaagaagcactggtgaatataattgccgtgcatgcag

SEQ ID NO: 27021 - DNA, 90 bp, Homo sapiens
gcctaaagtctgagagagggaagtcgcctctgtgctcgtgagtgcatggggtataagatgtgaactatgaagactttactttcaccatac

SEQ ID NO: 27022 - DNA, 78 bp, Homo sapiens
ttgcagcaaagaggaaatagttcagttctttcaagataaagtggagaattttcatgaagaacatgaaaagaatagtca

SEQ ID NO: 27023 - DNA, 83 bp, Homo sapiens
agatgcatgctgatggcgataagtcattaccacagaacccagtgacttgattgtaaaaatttacagagcggaatcatatgctg

SEQ ID NO: 27024 - DNA, 100 bp, Homo sapiens
tgctggccaagaagatcatcattaaggacggaggcacgaaacatgattcccgtgacagaattccggcagttctctgagcagcagcctgccttccgagtgc

SEQ ID NO: 27025 - DNA, 90 bp, Homo sapiens
aaacaccattccagaaaatgggattgcccaccacgataatgcagttcttattactaggctggtctgatccggatggaggaggaggagttc

SEQ ID NO: 27026 - DNA, 97 bp, Homo sapiens
cttgtccaggcgggcctcccgtttctggctccgggctgagcttcctggagaagaggaagcataagcttaaatcgtctcagaaggacaaggtccgcca

SEQ ID NO: 27027 - DNA, 100 bp, Homo sapiens
aaagcagcgtgcctggttacagctgtttccacgtgcggtgctcgtcgggagtgatcacctaccctacaggtagatgatactatcaagattgcagaggctc

SEQ ID NO: 27028 - DNA, 83 bp, Homo sapiens
ccctcacggagctgggcgacgagctgaccctgggagacatcgacggaccaagaatcgccttcagccctgtctggtgcatcctt

SEQ ID NO: 27029 - DNA, 75 bp, Homo sapiens
gtgatgagcatctagagcagttccatccaaggttttgccatcaaggggggacgatttaccaaagcccaagactgc

SEQ ID NO: 27030 - DNA, 125 bp, Homo sapiens
ttgctgtgctatttgacctcttggtttcagagagctccctggaccatctaatggctatgggagatggagcctgtgtgaaatgcagcaaaggggtgtttggggctggccaggcctgtcaggccatg

SEQ ID NO: 27031 - DNA, 75 bp, Homo sapiens
gagactctggcctgcagtcgccgccgccgccgccaggttactacaggctgcctcagctaataaggaagagtcttc

SEQ ID NO: 27032 - DNA, 85 bp, Homo sapiens
gacgccttcaacaccaccttcatctccaccatcgggtgtaccagtgatggcaataagaaacaaaatgatatcagaaggactagac

SEQ ID NO: 27033 - DNA, 100 bp, Homo sapiens
gccgcggggaggcttggaggcaagcgctgcccgcgagctgagccgccggaggaggagccgcgggcaacgagggccgagatctggacgataaaattcagga

SEQ ID NO: 27034 - DNA, 75 bp, Homo sapiens
cagcctgcaggaccctacggagctcgccccccagcaggtgccagatgccagcttggagagtcacgtgagagcaag

SEQ ID NO: 27035 - DNA, 100 bp, Homo sapiens
aaagaccagcatcatccaaaacatcatcaccaccatcatcaccatcaccatcgtcacagcagtagccatcacaaggtcgagctgtgcagttttagcgggt

SEQ ID NO: 27036 - DNA, 97 bp, Homo sapiens
gccgccgaagaagcatcgttaaagtctctcttcaccctgccgtcatgtctaagtcagaggatcccatgacagattctgttgtcacgtctccttacag

SEQ ID NO: 27037 - DNA, 95 bp, Homo sapiens
gtgccgtgcgccgcagcccgggcccaggccccggcagcgcctgggacaagtcaggtcaattcagtgaagatatgatacccacagtgggcttcaac

SEQ ID NO: 27038 - DNA, 75 bp, Homo sapiens
caggcatgtctcccgaggagtgcaggcgcttcaccacagacgttcaatcaaatgcctggtaggaattgctagcgt

SEQ ID NO: 27039 - DNA, 75 bp, Homo sapiens
cgccagcttgtatgatgagatggtggctgcccagatcccttatctggtgggccagccggccgtacacttgaagcg

SEQ ID NO: 27040 - DNA, 100 bp, Homo sapiens
ctggaatctctgcacgggccttgattgctgctctctgaacactatagtcgtcgaatctcacaagcgtacggtctgatgaatgaactgttatctgagtcag

SEQ ID NO: 27041 - DNA, 100 bp, Homo sapiens
tttgatttagtttatcacaatgaaaatggagccgaggtagtggagtacgctgtgacacaggagagcaaggcatccttctttaaaagagaaatccacgtta

SEQ ID NO: 27042 - DNA, 75 bp, Homo sapiens
tgcaggacggcgcggcagagtccccgtacgcctacagtaacggtattctgagagaagcctcacaaagtgtattgg

SEQ ID NO: 27043 - DNA, 88 bp, Homo sapiens
gaggaggctgaggaggagaggacagaggtgcctggggcaacctccaccttgacggttccagctgctctgttaaaagcgaaaatgaaac

SEQ ID NO: 27044 - DNA, 90 bp, Homo sapiens
caactaaaaacaaaattgccagaaaatctttcctctaaagtcaaactgtttgcaatggattttggataaacaagatctgttgaaggagcg

SEQ ID NO: 27045 - DNA, 98 bp, Homo sapiens
tgaaagccacacagggatcctgagacgtctggatacctcgttaggatcagctcgcacagaggttgtctgcaagcagatcgtagctggggtgaactact

SEQ ID NO: 27046 - DNA, 87 bp, Homo sapiens
actttaaaacagatctgcgcttccagagcgcagctatcggtgctttgcagatgaaagaaatgacctgccgtgatatcgttaaagaag

SEQ ID NO: 27047 - DNA, 95 bp, Homo sapiens
gggaaaagccatctcctattcagaaagtgaatggcttggaggaaggcgtggagttcctgccagtcaacaacgtcaagaaggtggaaaagcatggc

SEQ ID NO: 27048 - DNA, 98 bp, Homo sapiens
aacgctacacgaagaactaagaatattattagcacaagagcaccatactttgaggattcccagaaaatctaagctggcagttcataggaatatcagag

SEQ ID NO: 27049 - DNA, 75 bp, Homo sapiens
agcgtcggtgctggaagacgaggccacagacacttctgatagtgaagaggaagctcaccagtgtgggaaggggct

SEQ ID NO: 27050 - DNA, 100 bp, Homo sapiens
tacggaggtggttatgacaactatggaggaggagcagttggttctggtggaattatcaggaattattgattcagacttcctctcaaaatgtgaaaataaa

SEQ ID NO: 27051 - DNA, 100 bp, Homo sapiens
ggcagatccagtcttgctcagctctcacaggagagggcgttcagacaccattcgcttttcacccaagatgatttgatgtcttataaaactctgatgaacc

SEQ ID NO: 27052 - DNA, 82 bp, Homo sapiens
gccacgcccggggccaccctccccaagtccccatctcagccctgggcgctgcctatggcacagccaagagcggtaccggcat

SEQ ID NO: 27053 - DNA, 51 bp, Homo sapiens
ctgtggcagcctcccctgcaccggcagctgggagtgtccactcgccttcca

SEQ ID NO: 27054 - DNA, 100 bp, Homo sapiens
tggtaaatgcaggcttttatgcgagagacatcaactagtcaggcagtcttccgtctccagtctggcatctgccatctcttccgagaaactttaattaaca

SEQ ID NO: 27055 - DNA, 100 bp, Homo sapiens
gcgagcgaggggctaacttcagcggtggcaccgggatcggttgccttgagcctggctcttgtcaggatggtgaagctgttcatcggaaacctgccccggg

SEQ ID NO: 27056 - DNA, 126 bp, Homo sapiens
cccgtggttccagcgccggttttgaccgccacattaccattttttcacccgagggtcggctctaccaagtagagttcttcgtaagtacatcttaaagctgtcaagatggttctagcagaccttgga

SEQ ID NO: 27057 - DNA, 100 bp, Homo sapiens
caaggacatggacggggtggagatggatgagactgaccgagaggtggagtactttaagaggtcttgggcgtctttggtactggcttttttaggggtctgc

SEQ ID NO: 27058 - DNA, 100 bp, Homo sapiens
cccgccgcccttctgctccacgaggagcacagccgggccgctgcgaaggattcagtgtcatttgaagatgtggctgtggcctttactcaggaggagtggg

SEQ ID NO: 27059 - DNA, 90 bp, Homo sapiens
tcggctgtacaaagttttaaaggtcttcggataaactcaaccaactgtcaactagaaaatgtttaaatttacctatagcctggaaaccac

SEQ ID NO: 27060 - DNA, 85 bp, Homo sapiens
ggatgggtattaagtcttcttagcccttttgccttcactgctggaatggcccaggattctttctactaatccagatacttgttga

SEQ ID NO: 27061 - DNA, 83 bp, Homo sapiens
gggcactgctttccactcggctcctgtcgtccgttctctcaggctcccgttcagtgcctacaccaactaatgttacaattgaa

SEQ ID NO: 27062 - DNA, 73 bp, Homo sapiens
ctctggagttctcccaccctcacaggtttctggccagaagaaccaactccacattcaaccaggttgtgttgaa

SEQ ID NO: 27063 - DNA, 96 bp, Homo sapiens
ctgttgcagggttttgtttatataactcaagttgtttggctaaattcttcaggacaaccttaaacttccaccacaagaggaatataaagaggtccc

SEQ ID NO: 27064 - DNA, 90 bp, Homo sapiens
tggatgtcaaatactttgcacaggaagctataagtgccgattatgtttcgaggggaagtacgtttaaatgtggaagagaaaaaaacaaga

SEQ ID NO: 27065 - DNA, 75 bp, Homo sapiens
aagatgttgtggggagagccaggggggagttaaatacctgtgcatcccagcagcggattcaccatctcaaaacct

SEQ ID NO: 27066 - DNA, 100 bp, Homo sapiens
cgccttggagtccggagtaacttggccaggctggccccgagcggaactggagaaagctgagggctgtgggtgagcgtggaggatgctcagatgcacaccg

SEQ ID NO: 27067 - DNA, 100 bp, Homo sapiens
tgcctgtcttcagatcttcacagcacagttcctgggaaggtggagccaccagcctctccttggataacgtggaaagggcagatgctttacagctgtctgt

SEQ ID NO: 27068 - DNA, 74 bp, Homo sapiens
gcggctcccagtccctgaaagcattaccgggttcgctaggctcacagccaatggagatcttcgtggatgatgag

SEQ ID NO: 27069 - DNA, 100 bp, Homo sapiens
gaagaaagctggtaatagatgtctgacaaactaaagaaagacttgtgttacaattaaggaagttcactggagtaaaatggaggcctcagtaatattaccc

SEQ ID NO: 27070 - DNA, 99 bp, Homo sapiens
cttccagtgtgtagatgcttctgttctgaattatgactgtgatgttcagaaaaagtgtcatggacatgggattttacaatcaggcgttgaatgtaggcc

SEQ ID NO: 27071 - DNA, 74 bp, Homo sapiens
aagcattccaccgaggtgactgtaggtccagcctctactcttcatggatcttttggatgaaagaacactcgtgg

SEQ ID NO: 27072 - DNA, 100 bp, Homo sapiens
aacgctgcagcagcagaccttcaagatccgcatggagcctgacgagacgccagctgaggtgggtgtcctggttggcaaagaccggtcaagtttttacgtg

SEQ ID NO: 27073 - DNA, 75 bp, Homo sapiens
gtatatggtgcagtccgagcggtacctccaacagccatccccgcctatccaggtcactgtatatatgccttattt

SEQ ID NO: 27074 - DNA, 100 bp, Homo sapiens
agggaagatctttttcctcaattgactgcttctcggaggagtgccgctctgtgatccaggaacaagccgcagctctgggcttggccatgttttctctact

SEQ ID NO: 27075 - DNA, 100 bp, Homo sapiens
agcagcagcagtagctatggcagtggcagaagattttaattaggtcgttccaggggtagaggaggcatgaaggatgaccgtcgggacagatactctgcgg

SEQ ID NO: 27076 - DNA, 75 bp, Homo sapiens
cgattggacagaatttgtgaagcatgatgccttcttctgtagagtgggcgctttgcagaatacgtgttgaatgaa

SEQ ID NO: 27077 - DNA, 82 bp, Homo sapiens
ccaaagatgagatttacctgtgagatgtttcatcccaacattccagtatctcgtcccatcctcaccttcagggctcccaggg

SEQ ID NO: 27078 - DNA, 74 bp, Homo sapiens
cactgcgtctccttatctggacacgtgcaggctggtatacccctccttgaacagagcagggaaggatgcgtcag

SEQ ID NO: 27079 - DNA, 101 bp, Homo sapiens
aggatactcgtgatgatccctacagaccagggttgagaatgcttgcaccaagcttgtccaggcagctcagatgcttcagtcagacccttactcagtgcctg

SEQ ID NO: 27080 - DNA, 74 bp, Homo sapiens
ggaccgcggggttagccactgctggctgcttccagtgttcgccgagagacagggtcagatgtgttactgggctg

SEQ ID NO: 27081 - DNA, 113 bp, Homo sapiens
ggggtaaaaccccagacgccatgaaagctgccatggccctggagaaaaagctgaaccaggccccagcctccaggcccccaactccgcccagcctctccccgctctggatcctg

SEQ ID NO: 27082 - DNA, 100 bp, Homo sapiens
atggtggcagaaataccagaaggaagtggacctctacagaatgaacagccaggacaagctgggcctcactgtgtgctaccggacggacgatgaagacgac

SEQ ID NO: 27083 - DNA, 100 bp, Homo sapiens
ctctgacaggcattgatctaagtgtgtgcacacaatggttcacagcagatgaggctcgggacctgattcaacgttacctgacagagcaccctgaccccaa

SEQ ID NO: 27084 - DNA, 98 bp, Homo sapiens
taccatcaatactatggaatgcattttgaaacttaaggatgggatacagatggagcctcgctctgtcgccaagactggagttcagcggcacgatctcg

SEQ ID NO: 27085 - DNA, 90 bp, Homo sapiens
gtgccggcctagcgtcctggaattacttcaatcaagtttgccctggagcctctcctgccaaagaaaatgcactccaggtcccaggacaag

SEQ ID NO: 27086 - DNA, 82 bp, Homo sapiens
ccgcatggacggggtcctcaggaagttggccaaagtatcccacatgacgagtggtgagaagccctaccactgcaactgggac

SEQ ID NO: 27087 - DNA, 100 bp, Homo sapiens
tgggggcaaggagaagatcctgttgatcatggccttgccaggttggtgacagtatattgtgagcatggtcataaagctgccaaaatcaaccccctcttca

SEQ ID NO: 27088 - DNA, 100 bp, Homo sapiens
cgggtgatctttggtctcttcggaaagactgttccaaaaacagtggataattttgtggccttagctacaggagagggtcagttaaatgaaagcatggacc

SEQ ID NO: 27089 - DNA, 104 bp, Homo sapiens
ttcacgcacgggatccagagcgccgcgcacttcgtcatgttcttcgcgccctggtttggtgcacctcgatttggaggaagtagggcagggcccttatctggaaa

SEQ ID NO: 27090 - DNA, 100 bp, Homo sapiens
gtaaagcagcctgtcgcttgccgggcagctgggcccatttggaggccagcgctgagaagtggaacaggttgctgatgtccttagaagaactgatcaaatg

SEQ ID NO: 27091 - DNA, 75 bp, Homo sapiens
tacttcaaggataagggtgacagcaacagctcggcgggctggaaggacctgaaggagaagaaggagaaggtggag

SEQ ID NO: 27092 - DNA, 100 bp, Homo sapiens
gctgtgcttgccaggcctggctccagttcccagtctaagtgggtgactttccaagatagaggcagatcatttctccgtcaagtatagagagacacatctg

SEQ ID NO: 27093 - DNA, 100 bp, Homo sapiens
gcccaaataaaggaggaggtgcgccagcgagccctggctctggatgaagccgtgtcccagtccacacaggtttaatagactacaacttccactgtttccg

SEQ ID NO: 27094 - DNA, 100 bp, Homo sapiens
ggagatcatccgtcggctggaggtgtgatccctcacatccacaaatctctgattggaaagaagggacagcagaaaactgcttagagggatgctttaacca

SEQ ID NO: 27095 - DNA, 74 bp, Homo sapiens
ctgccgcgctgcccaggccatggactgtgaggttggtgttcgaggaagagacattgttgttcttggtgtggaga

SEQ ID NO: 27096 - DNA, 100 bp, Homo sapiens
gtgtgctctgcgctgaggtggatttgtaccggagtcccatttgggagcaagagccatctactcgtccgttaccggtggtggtcgtggtgacaggactggc

SEQ ID NO: 27097 - DNA, 90 bp, Homo sapiens
ctgggtgcagcaaccggaggcggcggcgcgtctggaggaggctgcagcagcggaagaccccagtccagcccatgaggctcccagtcccca

SEQ ID NO: 27098 - DNA, 100 bp, Homo sapiens
ttggatgtggaggggaatagactccatctatccatatgaggatcccaaaatggctgggcgaaaacttgctctaaaaaccattgactgggtagcttttgca

SEQ ID NO: 27099 - DNA, 101 bp, Homo sapiens
gtttttcggatgatgccttcaatactacctttatttccaccataggaatgaatctgaagtctgctgcagtaaaacacagaaggctttaaaatgttttcttg

SEQ ID NO: 27100 - DNA, 50 bp, Homo sapiens
gccaggttggagccccgggatggacttggcagtggatcaacccagtggac

SEQ ID NO: 27101 - DNA, 82 bp, Homo sapiens
cgaagagctgcagctcctcctgtgcgggtcaaaatgcagatcttcgtgaaaacccttaccggcaagaccatcacccttgagg

SEQ ID NO: 27102 - DNA, 100 bp, Homo sapiens
ccccccacaagcctggcaccagcccagggaagactgaggagcctcactccatggggactggtgtggagccggagccttttgaagttggagaccacctgac

SEQ ID NO: 27103 - DNA, 83 bp, Homo sapiens
ccctgagtctttgaggacacagcctcgctggaggcagtttctggctactgcagcactggggtgtcagttgttggtccgaccca

SEQ ID NO: 27104 - DNA, 74 bp, Homo sapiens
atccgtttgttcaggaaccaccagtgacagatatcagatgtagaaggtggtgatggactgcagctcagaaagga

SEQ ID NO: 27105 - DNA, 98 bp, Homo sapiens
ctggaggagccactgtggaagcagagcaatcgccatggagtttgtgatgaagcaggctctaggagagcccccctccatgcgcctgaaggcccgaccca

SEQ ID NO: 27106 - DNA, 100 bp, Homo sapiens
cgggaccctgtgccccaactctacttccctctgctccttcccagtcaggatggctaaaggtgaccccaagaaaccaaagggcaagatgtccgcttatgcc

SEQ ID NO: 27107 - DNA, 100 bp, Homo sapiens
agccgcgagggcggctacacctgcgagtgcttcgaggacttcactgctcctgcccctcctaaagctgaagccaaagcgaaggctttaaaggccaagaagg

SEQ ID NO: 27108 - DNA, 90 bp, Homo sapiens
cataaactattggattcataacctgctccatgcttgaaaacatggggattggaattcgtcctggaggctggaagtgcaaaaggaaggtgt

SEQ ID NO: 27109 - DNA, 101 bp, Homo sapiens
cgccgccgcacccaggacggaggctgcatgcccgaggaccaggccggcgcagccatggttgctccttgagggcaggacagttcttatggctttatccgttg

SEQ ID NO: 27110 - DNA, 100 bp, Homo sapiens
ccagctttaccgcaaccaccgccaccagtccacggagggcatgagtgacatattcgatgccatgttccctgtcactcacatcgctggggagactgttata

SEQ ID NO: 27111 - DNA, 100 bp, Homo sapiens
ggcgggctgtggggcctccgcgccgcggccgttagtcatgtcggatgagacaaaaggacccagtgaaaggaatgacagcagatgactaaagccgcctttc

SEQ ID NO: 27112 - DNA, 100 bp, Homo sapiens
attagctctgattttgaggtgggagactccatggcctcagaggaagtaaagcaagaggccatgtggaagtgttacatcaccttttgcttggaaagattta

SEQ ID NO: 27113 - DNA, 75 bp, Homo sapiens
tggatcacggatgtaggaagtggatatgataccaccaagccaaacgtcatcattaagttggagcagggagaggag

SEQ ID NO: 27114 - DNA, 83 bp, Homo sapiens
cctttatctccacaccatggagaggccacatttacaccagcacgtggaagatggaccattaaaaatctcaagtgacgactttg

SEQ ID NO: 27115 - DNA, 90 bp, Homo sapiens
tcaactggtgtgtgcagatcgcaaaggagatctattgggaaactgattataaccactcgggcaccatcgatgcccacgagatgaggacag

SEQ ID NO: 27116 - DNA, 116 bp, Homo sapiens
aggggatgtggtccaaggaagaaattgatattttgatgaacaatattgaacgctatcttaagggctacagaactggctacccttatcgataccctgctctgagagagaagtctaaa

SEQ ID NO: 27117 - DNA, 75 bp, Homo sapiens
gactacaatggaaaccttccaggtgcccttcgctttatgaggcggataattggacttaaagatgaattttataat

SEQ ID NO: 27118 - DNA, 130 bp, Homo sapiens
gttgtccaacagaacgacctagtatttgaatttgctagtaacgtcatggaggatgaacgacaggtgctggagaatctggtaaaagcaccattgtgaagcagatgaggatcctgcatgttaatgggtttaa

SEQ ID NO: 27119 - DNA, 98 bp, Homo sapiens
gagttttatcctatattcataattacattgtggatggctgggtggtatttcaaccaagtgtgccaaaggcagtaatgcattttttggttaatcatgtg

SEQ ID NO: 27120 - DNA, 82 bp, Homo sapiens
ctgcaacccagtgtgtgtggggcttccgctgagacctgccgtgctgggtgcccagctcaacattggcaatgtgctccctgtg

SEQ ID NO: 27121 - DNA, 100 bp, Homo sapiens
accatgccagaccgtggaagatttaacgaatggggttgtgatggcccaggttcttcaaaagattactatactggcaattgctggagaagattttgcaatt

SEQ ID NO: 27122 - DNA, 75 bp, Homo sapiens
aatgtgatggaggcaaaccagcggatccgagtgaagcctgacaggaccggtgtggtcacggatggtgtgaagcac

SEQ ID NO: 27123 - DNA, 97 bp, Homo sapiens
atttgattggggaagaaacaaagattgatgtacagctatatattttgtcctttctttcacctcatgatctgtgtcagttgggaagtacaaatcatta

SEQ ID NO: 27124 - DNA, 80 bp, Homo sapiens
gctgacaccactcagggcaagggtgtccgacggctggagcgatgtggaagttcacgcagagccgctgggtggttaggaaa

SEQ ID NO: 27125 - DNA, 100 bp, Homo sapiens
gcgttctaaggagatgcccagagatgcacaagtctggcgttctgaggaaggccattgattacatcaaatacttgcagcaggtcaatcataaactgcgcca

SEQ ID NO: 27126 - DNA, 90 bp, Homo sapiens
ccggttccccggcccacagtgggggtgtgcaaacccgagagaactggcattcctctgaatattgatttgctgaatagcccagacttattg

SEQ ID NO: 27127 - DNA, 80 bp, Homo sapiens
ggaactcaaagtggatgaggaaagaatactcccccagttgcaagaggcgcaggaccgtggaagacttcaacaaattctgc

SEQ ID NO: 27128 - DNA, 100 bp, Homo sapiens
cggacggtcgcgcggcggcaggcacagagctcccagctcctccagcagccgacaggaggcccgtcaagatgcaggcaggcattgccaccccagggatgaa

SEQ ID NO: 27129 - DNA, 96 bp, Homo sapiens
tcccaagaggagagaatggctgctgggtacctgccccgctggtcccagtgaacacctacctcttcatgatgcaagcccaaggcattctgatccggg

SEQ ID NO: 27130 - DNA, 90 bp, Homo sapiens
ctgccaggccagctcgaagaaggcgagcagggtgcgggagagccccttgcagaagacgccgtacgagattgggctaatggatactacaga

SEQ ID NO: 27131 - DNA, 75 bp, Homo sapiens
ccggcccgcctccctggccggggcgcagttcggaggttcagggacccagacatggagctgcgggaagaagcctgg

SEQ ID NO: 27132 - DNA, 100 bp, Homo sapiens
gaggacgccgcggtgaagttctccgccatgaacctgaggggcctcttccaggacttcaacccgaggggtctaaattatggataataatggaatacctggg

SEQ ID NO: 27133 - DNA, 110 bp, Homo sapiens
aagctaaattgttggcgggtttcatgggcgtcatgaataacatgcggaaacagaacttcgagaaaccaagacctctgaatacttcagcctttcccaccatcctttagact

SEQ ID NO: 27134 - DNA, 107 bp, Homo sapiens
aaggcgtgggcgacccggtgtgtggcgcgcccagagccccgcgtttcagccctagggaagaacaccttccaccatgaccacctcagcaagttcccacttaaataaag

SEQ ID NO: 27135 - DNA, 100 bp, Homo sapiens
tgggcccagtggataagcggaagaccatgctcgacagctgaccaaggccatgatgcgaaaggccacggccagccgcctggtcacgcagcgcgatgcggac

SEQ ID NO: 27136 - DNA, 82 bp, Homo sapiens
cgtacgccctcatggggaaaatctccccggtgactttcaggctccctggggaagggaatgcagggttgctggggctgggccc

SEQ ID NO: 27137 - DNA, 75 bp, Homo sapiens
atctgcaagcccggaagtttcagaaggtgtgagtgatgtagactatagtctgtatccagatagagaactacagag

SEQ ID NO: 27138 - DNA, 90 bp, Homo sapiens
gccttgagtcagtgcgccgctctccagcccgcttgaacggcacaggaggaagctcgtcggaacaggctcatgagagacatggctcagcta

SEQ ID NO: 27139 - DNA, 83 bp, Homo sapiens
acacgccccgcgctgctgggtcccgccagacacgccgccgccgcaggcttgggcactgtttaaaggaaagttccgagaaggca

SEQ ID NO: 27140 - DNA, 51 bp, Homo sapiens
cgggaggagcctgttcccctgagagtcctccctgctgctgtgtggacgaca

SEQ ID NO: 27141 - DNA, 74 bp, Homo sapiens
ccgaggaggatttggtggcagaggccggggaggctttggagtggatgcccgtcaccaagttgggccgcttggtc

SEQ ID NO: 27142 - DNA, 75 bp, Homo sapiens
tgacctgaaggctgtcaagtatgtggagtgttctgcacttacacagcttcgggctcagaatcaggttctgaaaaa

SEQ ID NO: 27143 - DNA, 50 bp, Homo sapiens
gggaggacaggccctcgtccgcagggcgccctgcgtccggcagaggaggc

SEQ ID NO: 27144 - DNA, 75 bp, Homo sapiens
tttggctcacccattccccctgcaagcctccagcgtcgcggttcattgtccccatatcttgtgtgatctgtaatg

SEQ ID NO: 27145 - DNA, 75 bp, Homo sapiens
agacggctcacctgtgcgggatggaacaaaagactttctggggccttggacacctagaacattttttgtgaatct

SEQ ID NO: 27146 - DNA, 82 bp, Homo sapiens
tcccagtggcccaccaatgagtttcgctgatataatgtggaggaatcattttgcagtgttctagaacagatcagacattttg

SEQ ID NO: 27147 - DNA, 100 bp, Homo sapiens
cagcaatagcatctttgctccagtgcttttgccacattcaaaacagcatgatcctctctgctgccatcttcatcaccctcttaggtctgcttggttatct

SEQ ID NO: 27148 - DNA, 98 bp, Homo sapiens
ccctgccctgctgctgggcaacaagctggacatggctcagtacaggaaagtggagaatgaggacatgaataaagaccagatcttgctggaaaaagaag

SEQ ID NO: 27149 - DNA, 98 bp, Homo sapiens
acggtctgcatactcgctgcccgccggctccctcccccgcgtccctgcgaccgccgcggcgaagatggtggagcagttctggaggttttatagccaca

SEQ ID NO: 27150 - DNA, 75 bp, Homo sapiens
ctgtcagctgctcagccacatcctggaggtgctgtacaggaaggacgtgactttcttgtctgcacagaaagtccc

SEQ ID NO: 27151 - DNA, 101 bp, Homo sapiens
ctactctgtattcagatcttcatgtgtctcttctaagctgaataaagctgttttggaactgtcaggtacctcaaagctattactagaacatttgcatcggg

SEQ ID NO: 27152 - DNA, 88 bp, Homo sapiens
gaagaggaaagcaaaggagtcagggatggctcttcctcagtgatgtccttgcattgcccatttttaagcaagaagagtcgagtttgcc

SEQ ID NO: 27153 - DNA, 82 bp, Homo sapiens
gcgacccggtgtgtggcgcgcccagagccccgcgtttcagccctagggaaggctgaaggtgatgtggccgccctcaaccgac

SEQ ID NO: 27154 - DNA, 101 bp, Homo sapiens
tgaatctgtggtggaagcagacctcgtggaagcgctggaaaaatttgggacaatatgaaatacactttcgggaaatggcctctaaatcctggctgaatttt

SEQ ID NO: 27155 - DNA, 100 bp, Homo sapiens
ccttcgaactgctgggaacctgaaaacactgactatgctgaagctgaagaagatggggacctgcagtgcctgtgtgtgaagaccacctcccaggtccgtc

SEQ ID NO: 27156 - DNA, 83 bp, Homo sapiens
cttcgcctcctaatccctagccactatgtcattgaaattatgagactatcattcaaatggaagcattatagttcttcggaacc

SEQ ID NO: 27157 - DNA, 100 bp, Homo sapiens
ttcaaggttgggcattgggtggaggagcagaatttactacagcatgtgatttcaggtggtttatgaaataccagcatgtagacccagaagaagctgtaag

SEQ ID NO: 27158 - DNA, 73 bp, Homo sapiens
ggagaaggacaggcagtgtcgtggcctggagctcattgcctcagaggtatgtgcactgcgcgtgaccagccgg

SEQ ID NO: 27159 - DNA, 80 bp, Homo sapiens
aaggctgaccctgatggtgacgcagcctcccgcgacgatgcccctcaacgttagcttcaccaacaggaactatgacctcg

SEQ ID NO: 27160 - DNA, 104 bp, Homo sapiens
ctcttcgccgtcatccgcttcgaaagcatcatccacgagttcgacccgtgacaatgcagatcttcgtgaagactctgactggtaagaccatcaccctcgaggtt

SEQ ID NO: 27161 - DNA, 140 bp, Homo sapiens
cgttcatgccacccaggatgaaaatggatagggacccacttggaggacttgctgatatgtttggacaaatgccaggcatcgagcccacaggcaacatggtgaagaagcgggcagagttcactgtggagaccagaagtgct

SEQ ID NO: 27162 - DNA, 100 bp, Homo sapiens
gtctcccctgaagaggcagtgaaatggggtgaatcatttgacaaactgctttcccatagaggtttttcgttggaatatacgttgcacatttatggcgatt

SEQ ID NO: 27163 - DNA, 100 bp, Homo sapiens
ctcccatgaattcacctttgattccagtgtgaactgtcaatcataagcgttgctaatgttatacagcaggctgggtgtcctgtaccagaatacataaaag

SEQ ID NO: 27164 - DNA, 75 bp, Homo sapiens
gcagtggtcgcttcttctccttgggccctgttggaggaagccagaaagcgaagactgctggaggactccgactca

SEQ ID NO: 27165 - DNA, 73 bp, Homo sapiens
ttttagggtcctttatatagaagggagagtagaatgtaaggtatggagaaaccctctaaatcttttcagagga

SEQ ID NO: 27166 - DNA, 100 bp, Homo sapiens
taagttctccttactggttggattaatctttggctacctaataactggatgcattgctgactgatttgagaatggcagtgagtttccctcagagctggag

SEQ ID NO: 27167 - DNA, 60 bp, Homo sapiens
atggtgacaagctcaaggcctgcgaggccaacatagccgaggtagaggtctccatccctg

SEQ ID NO: 27168 - DNA, 75 bp, Homo sapiens
ctaagatgctgccgactctgggcggcgaggaaggcgtctcccgggtggtgatctttgtgaagtctgtgcagcggt

SEQ ID NO: 27169 - DNA, 83 bp, Homo sapiens
cagcttttcagaactgcagggaaacagccatcatgagggcctgctatggtgtgctgcggttcatcatggagagtggggccaaa

SEQ ID NO: 27170 - DNA, 83 bp, Homo sapiens
gtcagccttctaccccatgagaaagaccagacaatgcagatcttcgtgaagactctgactggtaagaccatcaccctcgaggt

SEQ ID NO: 27171 - DNA, 75 bp, Homo sapiens
agcaggtctaccgggccacgcaccgcctgctgctgctggggtgaggtggctttgaccccgggttgcccggccagc

SEQ ID NO: 27172 - DNA, 82 bp, Homo sapiens
atatatcctctaaatctgatgacttctgcacggacctggccgtctccagtgccaacttcattcccacggtcactgccatctc

SEQ ID NO: 27173 - DNA, 50 bp, Homo sapiens
gacagtctccgaagtctcgagcagtttcaccagtgatcattaaagaatgg

SEQ ID NO: 27174 - DNA, 75 bp, Homo sapiens
actcacagttgaagcctgattgcagatgttgaacgtcgacgcatttacgatatcgtgaacgtcctagagagttta

SEQ ID NO: 27175 - DNA, 82 bp, Homo sapiens
ggaggcacgtcgtcttctacccaaccctgaaggttttaaaatcaaagatgggaaaatcggagaaaattgcccttccccatgg

SEQ ID NO: 27176 - DNA, 75 bp, Homo sapiens
acagaggaccatgtgatgcacctgctccaggtgacctctgagaaggatgtgcaaacagctctggctctagcaaaa

SEQ ID NO: 27177 - DNA, 75 bp, Homo sapiens
ggtttatcaaaatcacgttataatcagattttgaccaagcattttgtaagttctaattgtggagtggtaaatata

SEQ ID NO: 27178 - DNA, 75 bp, Homo sapiens
ctcagcaagctccacatccccgtggctctgaagagcggccattcctcagattcgaagctgaacacatctccaact

SEQ ID NO: 27179 - DNA, 97 bp, Homo sapiens
aataatattagctgttttgcaccttcatagtatgaaaaggattgaactggatgacaggcttcagattctcaaggatcactttacttattcactgtat

SEQ ID NO: 27180 - DNA, 75 bp, Homo sapiens
ggaagttacaccaggtgcagagatccaagatggcagattcaatctttttaagaaaatatttacaccagcagctcc

SEQ ID NO: 27181 - DNA, 75 bp, Homo sapiens
ggcgcgagcttttgactctggccagaacctcagcccggacaggagattgctgcgatgattgacactgagtttgcc

SEQ ID NO: 27182 - DNA, 98 bp, Homo sapiens
aagctgctctcctacaccaagcccgacgtggccttcctcgtggccgcctccttcttcctcatcgtggcagctctgggaaaaatccagtgactgccgac

SEQ ID NO: 27183 - DNA, 100 bp, Homo sapiens
agataagcttgacattacagccaagatggtgctgtcccagagacaacgagatgaacttggggaccacaagcagaagttttactgggggcacaaagagatc

SEQ ID NO: 27184 - DNA, 96 bp, Homo sapiens
tgagaagatatccagaaggaggacagattcttaagggcaaacttgaagataaatcttttgactccagctctttagaggatctaaagtgaccttgat

SEQ ID NO: 27185 - DNA, 95 bp, Homo sapiens
gaacgattgggctgagcagaggacgacatgttgcttttcgtggaggagctgacatggacccaaatcctcgggccgccctggagcgccagcagctc

SEQ ID NO: 27186 - DNA, 98 bp, Homo sapiens
agaggagaatctgaaaaaaagagaaacctgggtgaactttcacggacaacctcagaggacaacgaagtgttcggttatgagtgccagtgagccgcctt

SEQ ID NO: 27187 - DNA, 74 bp, Homo sapiens
cgcagtggtcgcttcttctccttggagcttctacctggccctctacaagcagatgagcttcctggagaagcgag

SEQ ID NO: 27188 - DNA, 51 bp, Homo sapiens
aatctcaacgacagctctcagcagctacagccaaacctcaccgcaagacac

SEQ ID NO: 27189 - DNA, 75 bp, Homo sapiens
gaggactgactggggttctgagactccctgtcccggaccgcaggaaactggaggcgaccagtgcccagaatatcg

SEQ ID NO: 27190 - DNA, 51 bp, Homo sapiens
ccttcaatcatcattttgagctcaaagtcattttttgagaccagtactgtt

SEQ ID NO: 27191 - DNA, 74 bp, Homo sapiens
cacccacggagcctccggggctggcgaagttcttctgtgttgtgcaggcggagctgaaccattgcaacagcatg

SEQ ID NO: 27192 - DNA, 96 bp, Homo sapiens
gacggcacaccctacgttaccgtgctcaaggctcatcggaacctgtcccagctccctaattttgccttctctgttccactggcgtatttcctgctg

SEQ ID NO: 27193 - DNA, 50 bp, Homo sapiens
atcatccgctatgcaattggggggaaggtgtggctcattgactttaatcc

SEQ ID NO: 27194 - DNA, 100 bp, Homo sapiens
acttcaaactcgtctttggcgaggacggggcgccggcgccgccgcccccgggctcgcggcctgcaggaaaggacttagaagccttacaaatacatctgtg

SEQ ID NO: 27195 - DNA, 75 bp, Homo sapiens
agaaatagaagctgaatatgctgcattagacaaacgagagaatgtttgatgtgggaggtcagagatctgagcgga

SEQ ID NO: 27196 - DNA, 100 bp, Homo sapiens
gtggataagctgaacattatggcagccaaaagacaacagcactattcctgatcagagaactccagttgcttcaacacacagtatcagtagtgcagccacc

SEQ ID NO: 27197 - DNA, 74 bp, Homo sapiens
aaagaggtagcaagaaagaaaattagagtgaatgtagttgcaccagggagtaatgtggtcattgcatcccgtaa

SEQ ID NO: 27198 - DNA, 98 bp, Homo sapiens
cgagaaagagatgcgaaacaagttgcagagctacgtggacgcaggaactccacatgttgacatagcggctttattgataaaatacaacacgtgtgtaa

SEQ ID NO: 27199 - DNA, 89 bp, Homo sapiens
gaaaggcctggagagtcgtgcggacagcattgggagcggccgagccatcccaattaaacagctcaaactttggaacaaataccgaattt

SEQ ID NO: 27200 - DNA, 75 bp, Homo sapiens
tggcggtgtcggagagccagctcaagaaaatggtgtccaagtactaaggctcgtacgtctgcatcgattatctta

SEQ ID NO: 27201 - DNA, 76 bp, Homo sapiens
caagtgccaagttatttactttcccatcaggtttcctgatgtgagcagatgtgttcagagcaacattgttttgttg

SEQ ID NO: 27202 - DNA, 89 bp, Homo sapiens
cgctgcgggcagccgtggtggaccggaaaggttccatcaatggtgagcaccagcctgaatgcagaagcgctccagtatctccaagggta

SEQ ID NO: 27203 - DNA, 97 bp, Homo sapiens
gtggaatgagagaaccgaggaacgaagaaacagacattcaacatgattgcatttgaaggatttcagtcataatcggttgtctaactggaacatcagc

SEQ ID NO: 27204 - DNA, 88 bp, Homo sapiens
ggtggcccgagtgtgccccgtgggcttctcgatgacggagacagctgttggcatcaggtgtacagcggatgtgatgctggtacaaccc

SEQ ID NO: 27205 - DNA, 82 bp, Homo sapiens
cccgaagctacacagcggacctgtcagagccagcccacaactagggctttctggtacacattgttctaccatctccagaggg

SEQ ID NO: 27206 - DNA, 101 bp, Homo sapiens
tgcgggaggctgcggagcgcaggcgggcggcctgggaggccaaggacaggtcaaggctgagctggcccggaagaagcgcgaggagcggcggcgggagatgg

SEQ ID NO: 27207 - DNA, 98 bp, Homo sapiens
ccacatactgctgacggcccagaactggcagagagaagggtgtccgcaatgttgccagtgtctgtctgcagattggctacccaactgttgcatcagta

SEQ ID NO: 27208 - DNA, 97 bp, Homo sapiens
tcgcgagctgctgatacagaagagatggatattgaaatggacagtggagatgaagcctaagaatatgatcagaagggcgctatattcctcctcattt

SEQ ID NO: 27209 - DNA, 82 bp, Homo sapiens
ctcgcctttgccgatccgccgcccgtccacacccgccgccaggctggacggcagtctggaaacgaccaatgagatcttggac

SEQ ID NO: 27210 - DNA, 100 bp, Homo sapiens
ttctgacttcaaaccagaaaactttgacccccgagaaggggcagagtcagggtttgatttgggactttggttacctgctaaaaatgaagctgatcgtcag

SEQ ID NO: 27211 - DNA, 80 bp, Homo sapiens
aggttgatgcatctctctcagaggcagtcttgattgatatggaagaaggggtagtgaatgaaattctgcagggaccactg

SEQ ID NO: 27212 - DNA, 52 bp, Homo sapiens
gtctcagccccccctccaacagaatcagacttcatcacctgattcttccaat

SEQ ID NO: 27213 - DNA, 90 bp, Homo sapiens
gctggctctttggcggctcggaggagcggctgctgctgctgctgctgctgctggtggcccctttgcagggcgcaccctacgacgcgcaca

SEQ ID NO: 27214 - DNA, 78 bp, Homo sapiens
tacctcctaggactctatgacacggccggacagggcggcgtgatggatgacaagagtgaagattccatgtccgtctcc

SEQ ID NO: 27215 - DNA, 101 bp, Homo sapiens
gaccggtttggttgaagttggagaagtatccaatagggatattgtagaaactgtctttaacctgtggaatgcagtagccctctgggcctgggatattgtgg

SEQ ID NO: 27216 - DNA, 51 bp, Homo sapiens
cgcagtggtcgcttcttctccttggattggttgccgtggtctttactgctt

SEQ ID NO: 27217 - DNA, 100 bp, Homo sapiens
gagggcgagaagaagtaagtgacgccggctgcggcgggccgaggaaaaatcgcagccctcagagagtcgctggctgaagtatctagaaaaggactcccaa

SEQ ID NO: 27218 - DNA, 75 bp, Homo sapiens
cgggctcggggcgcctgcgggacgcccctggtggcggcggcgtgtaacaccttcccgaggaaactccgctgccga

SEQ ID NO: 27219 - DNA, 100 bp, Homo sapiens
gactgggcggaagattccttcttacatcacagacctgccctctgaagttctctccacaacaccttccaccatgaccacctcagcaagttcccacttaaat

SEQ ID NO: 27220 - DNA, 100 bp, Homo sapiens
cgcgtacgtggtggagctctgcgtgtgcgtggtgtccctcgtggccgttcacccctccaccgtcaacccgctcgggaagcagctcttgccaaaaaccttt

SEQ ID NO: 27221 - DNA, 49 bp, Homo sapiens
ggagactcctgaccctcagaatggaccagtcctgcctctgttgtagaag

SEQ ID NO: 27222 - DNA, 82 bp, Homo sapiens
ctggcatctgccggctgctccgcaccccggggtcccaggaagggcggcccaggtcaaaatgcagatcttcgtgaaaaccctt

SEQ ID NO: 27223 - DNA, 100 bp, Homo sapiens
tggatccaaactcacgcagtgaccccaagcttcaagaactgatgaagagcaggcaccgcgccgaggccccgccgctggagcgcgaggacagtgggacctt

SEQ ID NO: 27224 - DNA, 98 bp, Homo sapiens
tagtgagtcggcggctgatttagaaggaggttcaggctacggtgagccgaaggttcgcctaacccctactggtcataacatgaaaattctgcagccgc

SEQ ID NO: 27225 - DNA, 75 bp, Homo sapiens
ccaccagcaaccatgagtggttccatgatgggaagtgacatgctctactgagatgaagaaagaaaaagaatacct

SEQ ID NO: 27226 - DNA, 82 bp, Homo sapiens
agacgctttacccgactctttgggccgttatctcacgacggggaggtttactgcatcgacgcgcggttctacgggaacgtca

SEQ ID NO: 27227 - DNA, 101 bp, Homo sapiens
gaggcggcggggagccgcgcgcggcaggtactccaaagattcaggtttactcacgtcatccagcagagaatggaaagtcaaatttcctgaattgctatgtg

SEQ ID NO: 27228 - DNA, 75 bp, Homo sapiens
cccctggatctgtatcacctattcatggacaggtggaagttaaacgagctgagcctcgggacagcaagagccaag

SEQ ID NO: 27229 - DNA, 75 bp, Homo sapiens
ctcggggcgggcgccgcgggacctctccgggccatgggatgaacttgcgtcctttctcttctccgccatggaatt

SEQ ID NO: 27230 - DNA, 83 bp, Homo sapiens
ggagccgtgtggaccaggaggagcgctcctggagcattggtaagcgtcacactgccaaagtgagagctgctggagaactcata

SEQ ID NO: 27231 - DNA, 100 bp, Homo sapiens
cggcaacatggtgcggtcggggaataagcatctactgccgaggatgttccaagccgctgtgctgctcgtgcgcgctccttgacagcagccacagtgagct

SEQ ID NO: 27232 - DNA, 100 bp, Homo sapiens
gggaagtcaggttcttccgccacctcccagccagggatcgcttacacctgagacgaactacagaacagcacgtaccagaggtggaagtccaagtcaaacg

SEQ ID NO: 27233 - DNA, 90 bp, Homo sapiens
ctctttccgccctaatggaggtctccagtttcggcctcctgatcacttgccacgtggcacgcatccctctgccagccggatacagagaag

SEQ ID NO: 27234 - DNA, 87 bp, Homo sapiens
cgcgcaagggctgcggagccgcgggccggcgagcgcgtcgccaccatggggggctttctctgtggtccgacgctgtgtcaagctctg

SEQ ID NO: 27235 - DNA, 101 bp, Homo sapiens
tacagtgacagcacaggtcacagtaaggccaaaaatgtgcatactcacagagttagagagagggatggtgatatcaatgatgtcaaacggctgaaacctgg

SEQ ID NO: 27236 - DNA, 75 bp, Homo sapiens
ccagtctcagcatctcttccaacagaaccagatgttcccacaagcctgcatttccagagcatgctgaaatctcag

SEQ ID NO: 27237 - DNA, 100 bp, Homo sapiens
tcttcagaatctcccaccaaggctgtacctctggaggagttctaggtttggatttggtcatctcaagaaggcaagccaaattagagctgagagttgctgt

SEQ ID NO: 27238 - DNA, 101 bp, Homo sapiens
gaggatctggtgtaccaggcgaagctggccgagcaggctgagcgatacgacgagtgtgaacatggctacgcctcttcattcccgtccatgccgagcccccg

SEQ ID NO: 27239 - DNA, 98 bp, Homo sapiens
gaattttctctaacaattacaaaggtggaactccagggaagatatgaagagcattttaagaggtgcagcctctggaagtggatcaaactagaactcat

SEQ ID NO: 27240 - DNA, 83 bp, Homo sapiens
aaaaggaccaagaagaggaagaagaccaaggcccaccatgccccagattaacgtcttcaaggacccagttgctgatcccaaca

SEQ ID NO: 27241 - DNA, 90 bp, Homo sapiens
tgactcccagagaggatggcatctagaagaaatctcagtgcttgtggaggttttgaagtttgtgatgacatggtgactaaggatatcatg

SEQ ID NO: 27242 - DNA, 83 bp, Homo sapiens
ccgagaccccatcaacgtggagggcctgctgttgatcatggccttgccaggttggtgacagtatattgtgagcatggtcataa

SEQ ID NO: 27243 - DNA, 89 bp, Homo sapiens
caagaatctcgtgctcaccggtttctcccacatcgacctgttcgatcctttggtacagaagacagaccgacagatcgtccaataccacc

SEQ ID NO: 27244 - DNA, 82 bp, Homo sapiens
acaaggaagaagctaaaccagatggagaaaaagatccagattttaatcaagtaatggcacaattgacttccctgaatttctg

SEQ ID NO: 27245 - DNA, 98 bp, Homo sapiens
ccagcctgccgcctcgctgtccctgcggcttctgggggcaaagcgaaggctggagctaggagaaagcggtcatcagtacctctcagatggtttaaaaa

SEQ ID NO: 27246 - DNA, 75 bp, Homo sapiens
gaactttcagaatctcaggcgggtgagcttgataactatggacagcaagaacttgcggatctttttgtgaactat

SEQ ID NO: 27247 - DNA, 75 bp, Homo sapiens
ttgcaattggactggaggctataagtggtctacggctctggctctaagggttctgaatgagtttattatgaaaaa

SEQ ID NO: 27248 - DNA, 100 bp, Homo sapiens
catcatcaatttcgagcagaagggaaggtgctgagctactggtgcttcagtcccggccacagcatgcacgagctggtccgccagggcgtccgctccctca

SEQ ID NO: 27249 - DNA, 75 bp, Homo sapiens
agactattgtggaagaagcatccattaaggagcttgtggtgctttgccacctccaccaccccagtttgatatctt

SEQ ID NO: 27250 - DNA, 75 bp, Homo sapiens
gcgttctgctcctactgcttcgcgtccagacaggctgcctgctgtttcccggggagatcatgaaacgaggtcgcc

SEQ ID NO: 27251 - DNA, 88 bp, Homo sapiens
gtcacaatttctacagcagagaccttgagggatatctttcttcactcctcttcacttcttcagcaagaagctaccggatgtttcacga

SEQ ID NO: 27252 - DNA, 75 bp, Homo sapiens
tgcggtgggaccacgagagctacaaaattggacagctgtacatgatcagcaaacacagccatgaacagagtgacc

SEQ ID NO: 27253 - DNA, 98 bp, Homo sapiens
tccacagctccagggaaggcactcaaaagtggggggcaggaaaggtgcaagttctctcctgttgccctgagtgcccactcccaggccctctgtatgag

SEQ ID NO: 27254 - DNA, 83 bp, Homo sapiens
tctgcttcccagcttcaagtgattctcctgcctcagcctcccgagtagctagtattacaggcccacccttcctccattctgag

SEQ ID NO: 27255 - DNA, 98 bp, Homo sapiens
aacagatgactacccagggagaggaattacgggaacagaaagaaaagtccgaaagagctgagcatgaagactttttaacagttgcagagtcactgaag

SEQ ID NO: 27256 - DNA, 90 bp, Homo sapiens
gtggtcctgggaaagctggaatcaggatctatttgtaaaggccagcagcttgtgatgatgccaaacaagacggagtttcgctcttgttgc

SEQ ID NO: 27257 - DNA, 100 bp, Homo sapiens
acggctacatcttttcgtcgcttgccggctgtctgatgaagagcagcgagaatggcgcggtactataagatctccgtggtgctcatgtgctttgtggtcc

SEQ ID NO: 27258 - DNA, 100 bp, Homo sapiens
ggtgctgtctacctctgtccttggggtgccagccccacacagtgcacccccattgaatttgacagcaaagcttgtctttaaccgaactgtcacactgaag

SEQ ID NO: 27259 - DNA, 101 bp, Homo sapiens
accctgtgcgttagtcaccagctgctcctccgtcttctcaggagaccagctggtccaaccgctgctgctgaagctgatggtattgatccattaataaacct

SEQ ID NO: 27260 - DNA, 101 bp, Homo sapiens
ccgggcggggggcccgggttcgccgagccgcaggagagacacgctgggccgaccccagagcggcgctggacagaaaaagatggaggagctcttattactgg

SEQ ID NO: 27261 - DNA, 100 bp, Homo sapiens
aggaaaacatgacgtctccagccaaattcaaaaaggataaggagatcatagcagagtacgatactcaggtcaaagtgggggcccctgaagccactgatgg

SEQ ID NO: 27262 - DNA, 98 bp, Homo sapiens
atctgcacaggcaacggccgaggagagtggaagtgtgagaggcacacctctgtgcagaccacatcgagcgggtgaaaatcctatttataagagtgccg

SEQ ID NO: 27263 - DNA, 100 bp, Homo sapiens
atcatccagatccgcataaagcgctgccagcagggaccatggctaaacctcctggatcattagccagaagcagcagcctgtgccgttcacgccgcagcat

SEQ ID NO: 27264 - DNA, 82 bp, Homo sapiens
caatatctgtcttcggtggactccttcggcagtccacccaccgccgccgcctcccaggaaaagcaggtgatattctcagtgg

SEQ ID NO: 27265 - DNA, 100 bp, Homo sapiens
catccatacccttgcaacagcagctgtcatcgtattgaggaagttcctgaacttcctttggtagttgaagataaagttgaaggctacaagaagaccaagg

SEQ ID NO: 27266 - DNA, 100 bp, Homo sapiens
caccaatattccacagatacaagtgacactgctgaaaaataaagctccaggattagggaaagtcaatggtaatgcacaggtgacacaaacaaagtttctc

SEQ ID NO: 27267 - DNA, 100 bp, Homo sapiens
gcctttccaggacatgcatagaactcagcttggacgaaccttgacaggatgggtgcagcgaactttccagagcacccaggcagctacggcttcctcccgg

SEQ ID NO: 27268 - DNA, 101 bp, Homo sapiens
aggattctgcaatggaagacaagttctatagcctggatgaattgcatattctggacatgatagagcaggtgtgactgcacagaaaagttacaaaacaaatt

SEQ ID NO: 27269 - DNA, 100 bp, Homo sapiens
ggagctttgaagccaccccggtcaaaggatgctgagtccggagcgcctagccctaccggactacgagtatctgggcccggtggttctgggaagcgtactt

SEQ ID NO: 27270 - DNA, 88 bp, Homo sapiens
aagactccttcagccaacatgatggtactgaaagtagaggaactggtatgtgcaagaggtgaaataattggcgtgaaagttctaggca

SEQ ID NO: 27271 - DNA, 90 bp, Homo sapiens
gcgccgtgggcgccgagccccatttcttcgatcgcagctacgacaagggcctcgcttggtaccggataacaaagccattgacctttgccg

SEQ ID NO: 27272 - DNA, 108 bp, Homo sapiens
cgccagcggccgagcgggcggcttcctggcctgggcgctccggtggcggcggaggaaggtgctcgggtcttcggggcactgggtcccatcggtccctcctcacctggg

SEQ ID NO: 27273 - DNA, 100 bp, Homo sapiens
gggattctaaaaaagatgatggcgattcagtggtgtcccagcgaatcagtaccgtggatctctcgtgttacagcctcgaggaggttcctgagcatctctt

SEQ ID NO: 27274 - DNA, 100 bp, Homo sapiens
gttcggtgcttctccactctgcagtggctcttccgcttggacatcagtgagaaagatcagtctaaagaaaaggagaagaaagtgaaaaaaacaattcctt

SEQ ID NO: 27275 - DNA, 75 bp, Homo sapiens
ttctcctcgctgggcaaaccttggagaggagtccagccagtctctgagcagagttcacccagggcatgatcttac

SEQ ID NO: 27276 - DNA, 101 bp, Homo sapiens
gctacgcaccgtcaagaaggaggtccagctgtagttcctctggacgttctcgaagatgctcttcctcttcttcgtcatcatcttcctcttcgtcttcctca

SEQ ID NO: 27277 - DNA, 50 bp, Homo sapiens
tgaccctgggagacatcgacggcgcggggcgaaggagctgctagaacaat

SEQ ID NO: 27278 - DNA, 113 bp, Homo sapiens
aggagcgggactgagagcgcctggaggctcgagcggaggagccagtcttggtgctctgtgttcacctggttcatctgaggagctgcatctaccctgcccatgccatagatcct

SEQ ID NO: 27279 - DNA, 90 bp, Homo sapiens
gttcctgctgacttacgcttgtttgaggtggtgaagaaggtgaagtccatgcagatgttccacatgcccatcacttcagccatgcaagga

SEQ ID NO: 27280 - DNA, 85 bp, Homo sapiens
ggcggtgccagccgtgaccgaggggcccattcccgaggtgctcaagaactacatggacgttgaaccctcggatacgatagaaaat

SEQ ID NO: 27281 - DNA, 80 bp, Homo sapiens
ggcggcgcggcgcaggcaccggcccggggagaggcaccatgagcggcctttccacgaagagtcctcagccttctccctcc

SEQ ID NO: 27282 - DNA, 100 bp, Homo sapiens
agattccaggaggaagtactggcgaagtgctccatgccgaatttgccatgtactgataacgtagcattcgatatggaaaggctcaccagaacccaagctg

SEQ ID NO: 27283 - DNA, 51 bp, Homo sapiens
gacatgttgataaaaaatgatggtgctggagaatctggtaaaagcaccatt

SEQ ID NO: 27284 - DNA, 75 bp, Homo sapiens
ccgcagctagcatccaaatcagcccttgagatttgaggccttggagactcagggacaaactacaaggcattcgat

SEQ ID NO: 27285 - DNA, 83 bp, Homo sapiens
ggagctcggagtttgaggacttctggaggcccccgtcaccctccgcgtctccaggccgagacgcatccagagctttcgtgacc

SEQ ID NO: 27286 - DNA, 75 bp, Homo sapiens
gtttgggctacggttgttgttggcgactgtgcttcaagcggttatttggaaatagcggtgcttgcagcgcttgcg

SEQ ID NO: 27287 - DNA, 100 bp, Homo sapiens
tgctgggggtggctcaccgggcagcgtgggtgagcggcgcagcggcggcagcggagagcgagagaggggagcaggttcgaagtcaacaataccattcttc

SEQ ID NO: 27288 - DNA, 87 bp, Homo sapiens
gagaagatgaaagtcctggaggagctggaagtacaccttgttggaggcttcagtgacgacaggcagttgtcacaaaaactcactcat

SEQ ID NO: 27289 - DNA, 100 bp, Homo sapiens
tggaggtctacgcagatgccgacgaaatcctccaggaggagatcaaggagtacaaggatttgaagacaagcttgaaggataaaaagccttggtgcttccc

SEQ ID NO: 27290 - DNA, 110 bp, Homo sapiens
attcagggcttcaaatataatgccatcttcaagaaatcatgaccaccccaggaaaagagaactttcgcctgaaaagttacaagaacaaatctctgaatcccgatgagatg

SEQ ID NO: 27291 - DNA, 100 bp, Homo sapiens
agtgacagaaaaagtgagagttacagcgaaagttcaagagtcattttttacaggtcagaactgtagaaataatgaggaagtgacacttatacgcaaagct

SEQ ID NO: 27292 - DNA, 74 bp, Homo sapiens
ggccagccagttccggctccccgacccacacagccacagctgctctttggcgtaaattgcaatcgattagggat

SEQ ID NO: 27293 - DNA, 82 bp, Homo sapiens
gccaagcagctatggaggaaaatcagggttttggccaaattgggcgagggcacaaaataaccacttaccccttctcaccgag

SEQ ID NO: 27294 - DNA, 83 bp, Homo sapiens
gcgctgcgccgcaacgccgagcgcaccgacatctgcctgctcaaagatgagcagcaccagcagtaagagggctccgaccacgg

SEQ ID NO: 27295 - DNA, 83 bp, Homo sapiens
aagaaatccattctcatgaagcagctgcagcagcagcagcacagcgacaagacggtcagaagttgagtagcaggggcctagga

SEQ ID NO: 27296 - DNA, 50 bp, Homo sapiens
cgggtggagtgtaggtcatatcgccgcgatgggggctccggaggtggcgc

SEQ ID NO: 27297 - DNA, 75 bp, Homo sapiens
ctcagacaagttccatcccacctttgagtcagcaagcctgtggttatgagtttaccagcaagctacatcggatgt

SEQ ID NO: 27298 - DNA, 50 bp, Homo sapiens
gctctgctgaccttgtgccttgcccctgaagtgctgtgcctggagatacc

SEQ ID NO: 27299 - DNA, 100 bp, Homo sapiens
gggggattctcgacctgctaacagaactggaccttttcggttccttttttgccaggagattcagaccttgatcagctaacaagaatatttgaaactttgg

SEQ ID NO: 27300 - DNA, 97 bp, Homo sapiens
tgtttttccagctcacccactgccagcagaggtgtaccgcaaaaccgtgattgcccagtggagggcgctggacctggatgtggtgctgacccccatg

SEQ ID NO: 27301 - DNA, 82 bp, Homo sapiens
gcaggctagaagagctcgatgagagagctgagcagctagccagtgtacagtatacacttccaaaaacagcaggcggagaccg

SEQ ID NO: 27302 - DNA, 98 bp, Homo sapiens
gggaaggagggcgtccgagtcaacaaccgcttcgagctgcatggcatcgtgtgctgaaccctctgagccctctgccccactgcccgccggggtcccac

SEQ ID NO: 27303 - DNA, 87 bp, Homo sapiens
caaggagttcctgcggcagtaccgagtgggcaccgaccgcacgggcttcaccttcaaatacagattgggaagctgcgcagtgagctg

SEQ ID NO: 27304 - DNA, 98 bp, Homo sapiens
ggggaacgctcacggactgtgtgtttaagtgctgtggggctgctaactacacagattgggagaaaatcccttccatgtcgaagaaccgagtccccgac

SEQ ID NO: 27305 - DNA, 101 bp, Homo sapiens
ggggaatttccttgtgcctccattcccgggaggggggagcggcgttggaggccaccgtttccaggacgtcctccccaacgtcgccctcaattccaccgcct

SEQ ID NO: 27306 - DNA, 82 bp, Homo sapiens
atgccatcctgaacgtctctccctgtcctagctctgtaactgtttacaatattgatgatgttaagaagttcaaaccgggtta

SEQ ID NO: 27307 - DNA, 98 bp, Homo sapiens
cagctgctatacagtgaggccaaggtccttcaagggttagattacttacacagtaagtgcaagatcattcatactgacataaagccggaaaatatctt

SEQ ID NO: 27308 - DNA, 82 bp, Homo sapiens
cgcccgccagctgctccggagatacggtatcagaatggcaaagcaacttaaccttccagaaaatacagatgattggacaaaa

SEQ ID NO: 27309 - DNA, 101 bp, Homo sapiens
cggggtgaaggcgctcatggacggaagacccctggctctataagctgaattatggcagcccagtcaagatatttggagttcttacaacatggcagacattg

SEQ ID NO: 27310 - DNA, 50 bp, Homo sapiens
gcaacccatagtcaacgattacatggacgattactgagagccaatcagat

SEQ ID NO: 27311 - DNA, 75 bp, Homo sapiens
ccaaaggccagtgactaccaacgtttggaccagaagtctgcgggccaggcatcgacatccgcaacgactatcagc

SEQ ID NO: 27312 - DNA, 100 bp, Homo sapiens
gagaggtacctctccttttccctctccctttccctaaggccgaatacatcaagcaatggtaacatctttaaatgaagataatgaaagtgtaactgttgaa

SEQ ID NO: 27313 - DNA, 83 bp, Homo sapiens
gacgctgcccgcgggcccggccacggcggagccaagagcgccatgctgcactgcccctactggaacaccttctcgctgccgcc

SEQ ID NO: 27314 - DNA, 100 bp, Homo sapiens
tgaagaatattcccaagtccttcacccggcatcaagatggtgctcatgtggaccagtggtgacgccttcaagacggcctacttcctgctgaagggtgccc

SEQ ID NO: 27315 - DNA, 51 bp, Homo sapiens
gagcggagacaacagcagtgagcaaggtgacttaagagattaaaattaatt

SEQ ID NO: 27316 - DNA, 100 bp, Homo sapiens
gaggaagacggagctggctgcccagcccaaaggcccatgaggggatgcagttatgggctctgtcgccgtggaaacattgcttctcagactgtagccagat

SEQ ID NO: 27317 - DNA, 75 bp, Homo sapiens
gagccgctgggcgccggagccgaggcgagcgccgcgcgcaccactgccagagactgctgctactttgaaacgtac

SEQ ID NO: 27318 - DNA, 97 bp, Homo sapiens
tggatttaaaagacagtcctcgtcagcactgactttcagctatggaatcgaatttcgctaaggagtttgtgatcagtgatcggaaggagctggagga

SEQ ID NO: 27319 - DNA, 73 bp, Homo sapiens
gcgggcggcgcgccgcagctgcccaggccggaccgggccgggcgcccgcagaaatggtggagtcaatgaagaa

SEQ ID NO: 27320 - DNA, 74 bp, Homo sapiens
gttcaatacacctcccacctgtcctcaggcatatcaaaggtacaaactgttttgaagccagttcatcataagga

SEQ ID NO: 27321 - DNA, 89 bp, Homo sapiens
gatcctgaacaagcatctactcctgcagggctgaattccacagctaaaaatatttttctgacctaagaaacagtattgtgaacagccag

SEQ ID NO: 27322 - DNA, 133 bp, Homo sapiens
tcgatgcagccagtagcttggatccttgtgggcatgatccataatcggtttcaagaggagatttgcaccctagttatcgctgagactttccctgaagatgcagggatctttacatgttcagcaagaaatgatt

SEQ ID NO: 27323 - DNA, 74 bp, Homo sapiens
cttggatttacaatgagagtttggttccagaggagaaggcagagcccccccaggctatgaatgccctgatgcgg

SEQ ID NO: 27324 - DNA, 74 bp, Homo sapiens
cgggaggcgcttccacctctccaccaccgaccgcgtcatcaaagattacctaggaacagtacgatttggggtta

SEQ ID NO: 27325 - DNA, 75 bp, Homo sapiens
ccgtaagcgaggcctccttctcctacaagagctggacagaggcctcacggagccccagatacaggtggtttgccg

SEQ ID NO: 27326 - DNA, 83 bp, Homo sapiens
agcctgacataccaggactgcctgagacaagccacaagctgcatttttgaaacgttggggttgttggagtggttggattttcc

SEQ ID NO: 27327 - DNA, 100 bp, Homo sapiens
gtcagagagagagcttggttaacttgggagaaagtttcatctgtggatggagtattgaattatatccagatcgagagacagaagattctgaaagggttca

SEQ ID NO: 27328 - DNA, 100 bp, Homo sapiens
cagcaactacggcggcggcggcagaaaaggcgacggcggattgacagaagtatgattggagagcccacaaactttgtgcatacagctcatgttggatcag

SEQ ID NO: 27329 - DNA, 75 bp, Homo sapiens
caccactcagggcaagggtgtccgacggctggagcggtgttggagagcacaatggctgaacaagtccttcctcag

SEQ ID NO: 27330 - DNA, 82 bp, Homo sapiens
ggccgccgctgctacctgcagcgccgtgtggcacgacacaaaaatcaggtggtctttgggaagaagcttcctgcctttgcca

SEQ ID NO: 27331 - DNA, 100 bp, Homo sapiens
tggtggtggagtgtagagatatagttggcaacctcactgagttagaatcagagacgctgaccggaaaggagattgagattgacattgaacctacagacaa

SEQ ID NO: 27332 - DNA, 50 bp, Homo sapiens
gatcatccatggcaatgacctgtcccagaagcttttgttgacaattccag

SEQ ID NO: 27333 - DNA, 83 bp, Homo sapiens
ctgagcgagctgtcagagcccggggacggcgaggccctcatgtaccacacgattgtagaaggcatgaaacaaaaaatgtggag

SEQ ID NO: 27334 - DNA, 94 bp, Homo sapiens
agagctttcacgaaggcaccgacgtcatcatgctgaccaccaatcagatccgtaagctctacgaactcgacggggaccccaagaggaaggaatt

SEQ ID NO: 27335 - DNA, 101 bp, Homo sapiens
tggatcaagcaggttttaaatcaagatttaacattccaacacataaaaattatttatccaacagctcctcccagggcgccaatgcttcggcattagagaaa

SEQ ID NO: 27336 - DNA, 100 bp, Homo sapiens
ggcccagctcgtccagagtctgcggacagcgcacgtccagatgcacgggaacaagcagcacctgcagaaggacttcttcctgtacaacgcctccaaggcc

SEQ ID NO: 27337 - DNA, 83 bp, Homo sapiens
ggagccctggaagcagcagctcaccgaggacggggactcctcaccatggatgatgatatcgccgcgctcgtcgtcgacaacgg

SEQ ID NO: 27338 - DNA, 100 bp, Homo sapiens
ggatggccgagtggtctaaggcgccagactcaaggtatggacctgtctgccaatcaggacgaggagaccgaccaggagaccttccagctggagatcgacc

SEQ ID NO: 27339 - DNA, 83 bp, Homo sapiens
acaggtaccggctgggccggaagatcggcagcggctccttcggagacatctatctcggtgagcgagtgctgtgctttcatggg

SEQ ID NO: 27340 - DNA, 75 bp, Homo sapiens
gagagctgaggctaatgaaaaacaggttccctggcttcaaggaagtacgtctggtaccagggaggcatgacattg

SEQ ID NO: 27341 - DNA, 75 bp, Homo sapiens
ctacactagagcagagtacgagtctgaggcggagggagtaatggtatgcatttatagagtttgcttcattcgaag

SEQ ID NO: 27342 - DNA, 76 bp, Homo sapiens
gaatttaattccttttcgaccttcaatccagttccaaggactccacgggctgatgttctaatcatgtcagataaag

SEQ ID NO: 27343 - DNA, 100 bp, Homo sapiens
aaggaattgttttggcctaggatcatccagataatccgcaagatgggattatggtgaaactagttgtcaatttgttgcagttatccaagatggcaataaa

SEQ ID NO: 27344 - DNA, 100 bp, Homo sapiens
aaaattgtgaactaaggccccctgcccccttttcctggtgcatgtgaagttatcaaaaacaggcatgtggagaccccaaggcaaaaccatcctatcttat

SEQ ID NO: 27345 - DNA, 75 bp, Homo sapiens
gcagaggatggaacacttcagtgcattcaaggaatgctgtctctgcaatttgagaggaggtgctcttaagcaaac

SEQ ID NO: 27346 - DNA, 100 bp, Homo sapiens
caaggacatctttccaccgaatgccacctggtttataacaaaaggtgtttaaaattatccaactgccatagagctaaattcttttttggaaaattgaacc

SEQ ID NO: 27347 - DNA, 83 bp, Homo sapiens
gagacctgcgtacattcggggtgccagaaggaaagcatagggggattcccgaagtcttccgttttctgagaatgtgagtgctg

SEQ ID NO: 27348 - DNA, 100 bp, Homo sapiens
cccagcaggagcagttccacaaccaaattcaaataacagtactgaattttgggacacagatataaaatggttttctctgttggaaagtagcagctggctt

SEQ ID NO: 27349 - DNA, 82 bp, Homo sapiens
ggaacaattgttgtagcaggtctaaaagttcaggtccaggaggagctggctctgtgtggctccaggctgctggtcttgggct

SEQ ID NO: 27350 - DNA, 83 bp, Homo sapiens
ccctattgtaagtgcagatggaacacaacaggttttgatgatgatggttcagaatttcatgaacatatatttctggagaaaca

SEQ ID NO: 27351 - DNA, 74 bp, Homo sapiens
cagggaagtggcagaaggaggccttccccgggcggagagcccctctccaggcgaagatgaagagatggctgacc

SEQ ID NO: 27352 - DNA, 96 bp, Homo sapiens
gacgccggaacaccctggaagccgagaaatgagggctctgaactcctacttcgagcctccggtggaggagagcgccttggaacgccgacctgaaac

SEQ ID NO: 27353 - DNA, 75 bp, Homo sapiens
aaggtctcagcacactgatgatagtgccttgtgcatggggccacctacagatgctcctgcagtggacacagcaga

SEQ ID NO: 27354 - DNA, 74 bp, Homo sapiens
tacttccacagtgcatcagtgagatcaatatacacgaaactagaaaaactgcttttggaattatctctacagtg

SEQ ID NO: 27355 - DNA, 100 bp, Homo sapiens
ggccgatgaagtgcagaggtttttttctggcctgaattattggaacaactttggaaagccagagctgaaaaaaagaaactacgcaaaacgttgcgggaat

SEQ ID NO: 27356 - DNA, 100 bp, Homo sapiens
ctacctggtgcagggcctgattgaggactgccagctggcgctgcagcttattacagccaaacttacacagataagttccaatatgccttcaagccctgat

SEQ ID NO: 27357 - DNA, 90 bp, Homo sapiens
tctttctcactccatagctacctccaccctgggtccacatatagcctcagttacattagctgcttatgaatgcaattcagttaattttcc

SEQ ID NO: 27358 - DNA, 100 bp, Homo sapiens
gctggcccgtggacgcctgggaggtggccaaggacatcaacaagcgcctatcactaccagctgacatccggctgcctgagggctacctggagaagctgac

SEQ ID NO: 27359 - DNA, 96 bp, Homo sapiens
cctctacaatgccagcgccaagttctactgtgtctccttcttctaccacatgtacgggaaacacatcgtgcctcagagtgacccaagtccagggac

SEQ ID NO: 27360 - DNA, 82 bp, Homo sapiens
ttcaagtttcctggccgccagaagaggaaatatcattctgcaaaagaagcttatgaacaacttttgcagacagagaatcttt

SEQ ID NO: 27361 - DNA, 80 bp, Homo sapiens
ggcagtggcgcttgagttggtcgggggcagcggcaggaatcctatccatcttcttcaccgatatggtttgtggattctga

SEQ ID NO: 27362 - DNA, 51 bp, Homo sapiens
gcatgacacaagaatcctttgatctcagtgaatatcttccggactctgccg

SEQ ID NO: 27363 - DNA, 75 bp, Homo sapiens
cggatgggtgctattgtgaggcggttgtagaaggaactcattatacaatgacaaatggaggcagcattaacagtt

SEQ ID NO: 27364 - DNA, 100 bp, Homo sapiens
tgataggctgcgctaccggaatgtcatccagcgagtgattaggaatcagagatcattgatttcttcctgggggcctctctcaaggatgaggttttgaaga

SEQ ID NO: 27365 - DNA, 90 bp, Homo sapiens
gacgtttttgcctcttcttagaaaatccaaagggaggctggtgaatgtcagcagcatgggaggagatatgtcagtattgaattctcccag

SEQ ID NO: 27366 - DNA, 100 bp, Homo sapiens
aaaaagatgagaagcagaacttactatccgttggcgaccctggtacctgacagtgtaaagaaggagctcctacaaagaataagaacattccttgctcagc

SEQ ID NO: 27367 - DNA, 100 bp, Homo sapiens
tgcagaggcgcttcaaggagttcctgcggcagtaccgagtgggcaccgaccgcacgggcttcaccttcaaatacaggttggaagtgtatcctcccttctt

SEQ ID NO: 27368 - DNA, 100 bp, Homo sapiens
aaagaagaaaatgttaaaaagaacagatacaaggacatactgccatttattttaccaagaaaatggtttgcacgactttgaacatatactatccatgctg

SEQ ID NO: 27369 - DNA, 100 bp, Homo sapiens
aaaaatcttaaccttcaaccatctggggaaaaggcaaaaatcccatctaccgcaactctcagttcgagagtaaaggatttgcagatttacagaatggctg

SEQ ID NO: 27370 - DNA, 100 bp, Homo sapiens
gaaatttggagtgtgcgtgcgcgccgagcggagtcagagtcagaagcaaaggtagatggagagactgcatcggacagtgagagccgggcagaatccgcac

SEQ ID NO: 27371 - DNA, 75 bp, Homo sapiens
gcaagaatgacttctccctctccctcaaggacctgtccatgatcctgtgtgaccccttcgccatcaacacgctgg

SEQ ID NO: 27372 - DNA, 106 bp, Homo sapiens
tcgaccccaccggcctggagcgcgccgccaaggcggcgcgcgagctggagcactcgccaaacggggattcagcgtccgatcctttggaacagggactcacgtgaag

SEQ ID NO: 27373 - DNA, 90 bp, Homo sapiens
cgagatgctaccagccggcgagatcggcgcctctcctgcagccccggtcacagttacctggagaggctcctgaatgttgaggtgccccag

SEQ ID NO: 27374 - DNA, 82 bp, Homo sapiens
gaggccgcctggggtagcggcggcgggagtcctggcgctctgcaggctccccatcaacccgggcagccgggatttaaattca

SEQ ID NO: 27375 - DNA, 90 bp, Homo sapiens
gcggtgtggtttactccatgcagttgtcaggagagcttgtggacaaatgtataggatcaagaattcacatcgtgatgaagagtgataagg

SEQ ID NO: 27376 - DNA, 101 bp, Homo sapiens
gacaaagggggcctttggtgacatgctaaaggcatgacttcctggcaccacagggaaaatcgggtgcaagcccagaaactatttccccaccaccacttgtt

SEQ ID NO: 27377 - DNA, 100 bp, Homo sapiens
ggactcacagctgatgacctgctgctcgtgctgatctcagcttactacctgcccaaggatgatgagtattaccagttctgctatgtggatgaggatggtg

SEQ ID NO: 27378 - DNA, 100 bp, Homo sapiens
cgcgactgggaggagcgccggaacgccgaggcccaggacctgaaggagaagaaggagaaggtggaggagaaggcaagccggaaagagcgaaagaaagaag

SEQ ID NO: 27379 - DNA, 88 bp, Homo sapiens
tttgacagcctcctgacctgtaggacgagggattccttgttcttctgcctgaagaggagatgttaaagtaacccatcttgcaggacga

SEQ ID NO: 27380 - DNA, 83 bp, Homo sapiens
cgctctggctctggctgtgcgcgctggcgctgagcctgcagccggccctgccgcatcctgaggttagcattacacttctccca

SEQ ID NO: 27381 - DNA, 100 bp, Homo sapiens
gcggagatccgctacgagggcatcctctacaccatcgacaccgaaaactccaccgtagcccttgccaaaggaagagctgaagagagacctgaaaattaag

SEQ ID NO: 27382 - DNA, 111 bp, Homo sapiens
cctgaagaagcgcggatacgatgtcaccaggaaccctcatctcaacaagatacagtttatgtaacttgatggaagaaaatggaattactccaaaaagacaagtgctcaagc

SEQ ID NO: 27383 - DNA, 75 bp, Homo sapiens
cattataaggggccaagaatagtgcttgctgctgctggagctctggatgagggggatattgccttgttgaaaact

SEQ ID NO: 27384 - DNA, 89 bp, Homo sapiens
cggcccgggccggcgctccaaggcccgcccgggagggccggggccgcgctcaggttcacagaatgattgcagagttcaagctgatccct

SEQ ID NO: 27385 - DNA, 75 bp, Homo sapiens
agggaggctccaagacctcatcaacaattaagcttgctagagaagttttggatgttgctgccggcatgattaaac

SEQ ID NO: 27386 - DNA, 46 bp, Homo sapiens
aaaggatgatgaacgaaggcagagccactgccaaaaaatatggtgt

SEQ ID NO: 27387 - DNA, 51 bp, Homo sapiens
ccagggaaccctggtcaccgtctcctcagcgggacctggacttcaccatcg

SEQ ID NO: 27388 - DNA, 100 bp, Homo sapiens
gcaggacacggaggaccggagcggcctgtccgagtcttccgtgtgtgctaagatcgtgcagctcctggggcagaatgaggtggactatcgccagaagcag

SEQ ID NO: 27389 - DNA, 75 bp, Homo sapiens
atgttgatcactgaaaatgatttatgcaagtttaaggaaattcgtacaagtttcaagctggcaatagaatgaatg

SEQ ID NO: 27390 - DNA, 96 bp, Homo sapiens
gcccggttcctctccacttcgtttagttgcgctccatggacagatcaacgaacctggacattgaggagctcaaggattggattcagcatcaaaata

SEQ ID NO: 27391 - DNA, 74 bp, Homo sapiens
gcggacaccctgaaggtcccggtgctcacttggacatgctccctagatctttagcttctactcccactgctcct

SEQ ID NO: 27392 - DNA, 83 bp, Homo sapiens
tcctggtctgacatccaaagagtcactctttgttcgaatcttcatcactggtccagctgtaataccagggtacttctccgttg

SEQ ID NO: 27393 - DNA, 95 bp, Homo sapiens
ggcgcgcaaagggggaggagcgggcgtgaccaggcgcgcgcgcgcgtctggagtgactctagagagcaggcagagaaaggcaatgccagggtcaa

SEQ ID NO: 27394 - DNA, 50 bp, Homo sapiens
ggatccgcttcgtagtagattccggtcccccccgcctccagccagcctgt

SEQ ID NO: 27395 - DNA, 75 bp, Homo sapiens
cttcgccaccacgcactgggtcgtcacggaggacgggaaaatccagcagcagaaatcgaaacgagttggctgaga

SEQ ID NO: 27396 - DNA, 75 bp, Homo sapiens
gcgatcgacgccaccgactcttgtatcatgagcattggatttgatcacatgggttccatcaatggtgagcaccag

SEQ ID NO: 27397 - DNA, 80 bp, Homo sapiens
ttggaagtgtgaaagcattgatggaatgtgctttagaagttaaaaagctgatcttgcatctttaatggataaaacatttg

SEQ ID NO: 27398 - DNA, 101 bp, Homo sapiens
gaatggcctacagaatgaaagtttaagttccacacatcatacaggtaatgggaataattgtggaaagcagtttcttcatttatttcttgtggaaggaaggc

SEQ ID NO: 27399 - DNA, 75 bp, Homo sapiens
gcggccttcgaggaggtgatgatggacatcggctccacccgggtgctgaaggtcgccatcctggctgagaagtac

SEQ ID NO: 27400 - DNA, 97 bp, Homo sapiens
ggtggactccttcggcagtccacccaccgccgccgcctcccaggtcacaccgacaaatctgaagcgggtttgccaggggagtgtacccgtctcccca

SEQ ID NO: 27401 - DNA, 87 bp, Homo sapiens
ccgacccttcctgtcgctgacggcgactgcgggaggccagaaaaagatgctatggacgtatggtgcaatggtaaaaaattggagaca

SEQ ID NO: 27402 - DNA, 80 bp, Homo sapiens
ccactctttccgccctaatggaggtctccagtttagacttaattcagtgcacaaatgagatgaatgtgaacatcccacag

SEQ ID NO: 27403 - DNA, 82 bp, Homo sapiens
acccaacggggcaacagaagaagatggggttccttccaaagtgcagcgctgtgcagtggtaccaaccaagaagctgaagaaa

SEQ ID NO: 27404 - DNA, 100 bp, Homo sapiens
ggcgtggccaatgccctggacaacgtggatgcccgctggacggtttaccacccaacgtctgagagagtgacctataagtctagtagcaaacctcgtgctc

SEQ ID NO: 27405 - DNA, 98 bp, Homo sapiens
gcgacctcaagaagcagctccacgaaaggcagccgcggatcgccgcgctcagcgacaaacaagcagtcgatgatgtgaagaaaggttacatcaaagca

SEQ ID NO: 27406 - DNA, 75 bp, Homo sapiens
cggctggttatgaaagacagtgcaaccccaccaacaactgaacgctttggtcaggctgctacaatggaaggaatt

SEQ ID NO: 27407 - DNA, 90 bp, Homo sapiens
ataaaggaccagacaaatcaaattagtggttttgatgccgacaaaaggatcaaggtggcgaagcccgtggtggagatggatggtgatgag

SEQ ID NO: 27408 - DNA, 88 bp, Homo sapiens
ttagtggcttcacgcagaagttggcaggagcatgggcttcggaggcctatagcccgcaggtgcaaggaaccatcttcccagctcccaa

SEQ ID NO: 27409 - DNA, 82 bp, Homo sapiens
acattgagcagcagatccagacctaccagcgcaggatctggtgaagaatcatctgatgtatgctgtgagagaggaggtggag

SEQ ID NO: 27410 - DNA, 75 bp, Homo sapiens
ctggagttaaggaacagatccccggaggagactagacgcttgaagcaaagctgccatcccagaagacgacatgct

SEQ ID NO: 27411 - DNA, 51 bp, Homo sapiens
gagggccccgggccctcagcctctcttaaacattgaatgaggaggataaag

SEQ ID NO: 27412 - DNA, 82 bp, Homo sapiens
ggccatcgtcatcctgctgctgaagatctggaagacgcgctcctgcgccgtgcacttacatttcaatcgaccaagttccaag

SEQ ID NO: 27413 - DNA, 100 bp, Homo sapiens
ggaacttggttccccctccctcagcttccgccccaaaaggcaacaggacctgtaccgaatcctgaaggcctacaccatctaccggcctgacgagggttac

SEQ ID NO: 27414 - DNA, 100 bp, Homo sapiens
gaagaagtagaagcatcgaaagcgttggagaggtgttaccggaacggcggcgacaagggtgttcccgaactagagtggggttctgatgactgtcttgtga

SEQ ID NO: 27415 - DNA, 100 bp, Homo sapiens
atgtatgatcgtgtgattgactttgatgagaacactgctctggatgatgcagaagaggagtcctttaggaagatcaacaaactccatttatgtaaacccc

SEQ ID NO: 27416 - DNA, 82 bp, Homo sapiens
gctcgccgtcctgccccccttggagagaaactgaaagacaatgcagatcttcgtgaagactctgactggtaagaccatcacc

SEQ ID NO: 27417 - DNA, 73 bp, Homo sapiens
gcagatacgaccccgaacggcccccaaggggcgggcgctgtgatcagcacttgactgtttattttcaaatctc

SEQ ID NO: 27418 - DNA, 100 bp, Homo sapiens
tcggagttggcattcatcattttctaatcatcagcatttacatgacagaaatcacctatgtttacagcgacaggtgttaagtgtgatgcttccataatac

SEQ ID NO: 27419 - DNA, 100 bp, Homo sapiens
gtcatctctctggtaggctttgtccttctcaccgtgggagctctcctcatgctgacagctttcaagatgttagaaagttcaagccagaagtttcttcagg

SEQ ID NO: 27420 - DNA, 89 bp, Homo sapiens
ctaacatgttgttactaatcaatgtcattctgaccttgtgggtttcctgtgctaatggacaaggaacctagaaagattgtacaatgaat

SEQ ID NO: 27421 - DNA, 82 bp, Homo sapiens
acttctctcagccaagaacaaagactacatgagcatcattcgcatgtggctagatgctgttgatggagtaatgaatggtgaa

SEQ ID NO: 27422 - DNA, 100 bp, Homo sapiens
ctccgagccagcgagccagcgagccgccgacccgccgagcaaaatggtgagacgatgcggatcgcctcctccgagtttgcagatgacccttgctcgtcgg

SEQ ID NO: 27423 - DNA, 100 bp, Homo sapiens
gaagagatttagagtcacgactcatagaagcatacgttattcaatgtcaggctgaagctcaagaaggggatgtggagacgctggtagcggggccaggaag

SEQ ID NO: 27424 - DNA, 101 bp, Homo sapiens
tgtgcagccgcgaggaggcgcgggaggtgttcgagaacgaccccgagacgctgagatctgtatctgtggacctgaatgttgatccctcgcttcagattgac

SEQ ID NO: 27425 - DNA, 100 bp, Homo sapiens
ggtatactcaatgtctctgctgtggacaagagtacgggaaaagagaacaagattactatcactaatgacaaggatcgctgtctcgggagagaaatcacaa

SEQ ID NO: 27426 - DNA, 90 bp, Homo sapiens
cctccttggagcaaaaatcagtgagagaatacagggccacacaggtacaaacccgtagtgctgatgaaccaatgacaacatttgttgtct

SEQ ID NO: 27427 - DNA, 101 bp, Homo sapiens
cagtccacatttaacgatttacaagacctgagagaacagattcttcgagttaaagacactgatgatgtggagccgccaccaaaatgcagattttcgtgaaa

SEQ ID NO: 27428 - DNA, 95 bp, Homo sapiens
ccgccagaatcttcccaacctcatgaatctcatcgccaccatctttgtctttgcagtggtcatctatttccaggctgaagtgcaatgttgtgatc

SEQ ID NO: 27429 - DNA, 90 bp, Homo sapiens
tattaagttccacttgtaccttgtccccagcgacgccttgctaacaaaggcctccccagcccggctgccccgccttcatcatcgtcaagc

SEQ ID NO: 27430 - DNA, 96 bp, Homo sapiens
ccagtacacagacgagcatggggaagacaccatccggaagatgaagaacgatttccggaagatggaggatgagatggaccggctggccaccaacat

SEQ ID NO: 27431 - DNA, 101 bp, Homo sapiens
ccggcctgtgtggtggactgtggcacgggggcgtctctggccgagcctctttttgtggaaaacgacagcagcagcagtggcctggaagacgccaccgctaa

SEQ ID NO: 27432 - DNA, 82 bp, Homo sapiens
tcaagcaagggctgtatgagctctcagcaagcaactttgagctgcacgttgcacaaggacccaaaagggggaaacatgcctg

SEQ ID NO: 27433 - DNA, 75 bp, Homo sapiens
gagcgctgttctcgctccggagccgctgcacatttcgaaggaagaggcccagcagaagggactcgctgagccacc

SEQ ID NO: 27434 - DNA, 101 bp, Homo sapiens
cagttctggcagattctggaaactgtacattgaagcagaggtggtgaagctgctgctgcggtacggagggaacccgcagcagagcaacaggaaaggcgaga

SEQ ID NO: 27435 - DNA, 74 bp, Homo sapiens
ttcgcagtggtcgcttcttctccttggagaataaaggcagccccgttgatgactgaaaatgacaaagcatccac

SEQ ID NO: 27436 - DNA, 98 bp, Homo sapiens
acgacgacgaggaagaggaggtttctgagatgccttcaattaagttgcagagttctgatggagagatatttgaagttgatgtggaaattgccaaacaa

SEQ ID NO: 27437 - DNA, 75 bp, Homo sapiens
catctcttagtccagcaagtcctcatagccaggccaagggaagagatggtgttgagtggaaaatacaaatctggg

SEQ ID NO: 27438 - DNA, 77 bp, Homo sapiens
ccttgctcccatccctgcagcatgaacaagtgcctacaccaactaatgttacaattgaatcctataacatgaaccct

SEQ ID NO: 27439 - DNA, 100 bp, Homo sapiens
ccgcaaggtgtccacgtcgggtcagatccgacagaagggaactctaatgatccaggacaaagaagttaccctggagtatgtatcaagcctggatttttgg

SEQ ID NO: 27440 - DNA, 76 bp, Homo sapiens
cgaggactctgtggacttccggctccgcgtctctgaagctccaccatgaggcgaggtggatggaggaagcgagctg

SEQ ID NO: 27441 - DNA, 100 bp, Homo sapiens
ccgctggcgcagctggcggacccgtggcagaagatggctgtggagagcccgtccgacagcgctgagaacttcagatggtggcaaagtggttggcaccata

SEQ ID NO: 27442 - DNA, 76 bp, Homo sapiens
cagctaggagcgctctgtggtgcctggggctgaacgcggctttctgtgctgtgctgtggctttcattgagaagcta

SEQ ID NO: 27443 - DNA, 98 bp, Homo sapiens
cgcgcctggacgccgctgacggccccgagcacggccgcccggccacggtaatccacgacttcttattctccttgaaggaaagcccagaaaagtttcag

SEQ ID NO: 27444 - DNA, 90 bp, Homo sapiens
agtactttctggggtcttagatacagaactacgatataagccagagcccccctccatgcgcctgaaggcccgacccagcagccctggctt

SEQ ID NO: 27445 - DNA, 75 bp, Homo sapiens
ccggagacagcccaaatatcctcggaagagcgctcccaggagaaacaactggactgtgctgctgccatctcggct

SEQ ID NO: 27446 - DNA, 83 bp, Homo sapiens
tttggatatagaggtcgatggtggagtaggtcctgacactgtccataaatgtgcagagatgtatcggcaagcagtgtaaacgg

SEQ ID NO: 27447 - DNA, 83 bp, Homo sapiens
ctcgtagtcctgggagcacagcagaagtgttatggaaacaaaggacatgctttacatcgtcactgaatttgctaaaaatggag

SEQ ID NO: 27448 - DNA, 75 bp, Homo sapiens
atctgggacacagcggggcaggagcgcttccgcaccatcacctccacgtacatgtcccagagcaagcacacggag

SEQ ID NO: 27449 - DNA, 100 bp, Homo sapiens
cccgaccctctctctgtcctcattgcgcccagacgggccggcccagagctcccgggtcgtctttcgtgtggccgcgagggctcatcgttggggtgatcct

SEQ ID NO: 27450 - DNA, 75 bp, Homo sapiens
gatggaagccatggatggccgggaacctacaagttggatggcttgaggactggtactaaaaggaaacgtgactgg

SEQ ID NO: 27451 - DNA, 50 bp, Homo sapiens
aagaatgaagccgcggaccctcgcgagacccagggccctgtggagccgag

SEQ ID NO: 27452 - DNA, 104 bp, Homo sapiens
caggccaaggctgtgctcaagcatttcaacgtgcgtgtcacccacgcagacatcttcagccgctgccaggccaggtcagagcagcccaccatgggatggggagg

SEQ ID NO: 27453 - DNA, 50 bp, Homo sapiens
gggcgttcatctaccacgcctacgtctgaaccttagccggccgatcgagg

SEQ ID NO: 27454 - DNA, 75 bp, Homo sapiens
agtgcccttgtggcgaatggggctcacgtcgactccgggaagcagtttgttcgctatataaacatgttgataaac

SEQ ID NO: 27455 - DNA, 100 bp, Homo sapiens
ccaaaaacgcagccaccttacatcgaagaggaggtattggaagaagggttgaagtggatgtgagatgagatggtttctccacgttggtcaggctggcctc

SEQ ID NO: 27456 - DNA, 100 bp, Homo sapiens
gagctccaggagttcgtctcttacgtctgcggaagtgcagctgcctcagttcttagcgcagataggtgatcttcagctttgcaaactggatgaactagat

SEQ ID NO: 27457 - DNA, 98 bp, Homo sapiens
gccttgtcctcagggaagctggggctggtgcaactttcagaagtggtcccaggagctgatcgacctcaagatgattcagtgcaagagagttgttaatg

SEQ ID NO: 27458 - DNA, 98 bp, Homo sapiens
tgagccggttcctgttcaaaaggcccagaccacactgaccacaaatgacattgtcattagcaagctgacccagatcctttcatacctgaggcagggaa

SEQ ID NO: 27459 - DNA, 100 bp, Homo sapiens
ttcactgaaactattacagttagatctcatctctatgggtggaaggcatttgatctaacagagcaaagatacgtagctgtgaaaattcaccagttaaata

SEQ ID NO: 27460 - DNA, 101 bp, Homo sapiens
ctcaggggctctcagcaagtcagctcctgggtccttctggcacattcaggcagatcatgcataccagaacaccttccaccatgaccacctcagcaagttcc

SEQ ID NO: 27461 - DNA, 99 bp, Homo sapiens
cagagcctcagtttgtgcaggacaccgacatggaacagggactcactggggggatcgtgggactttaccagatcggtttgtaataacacctcgaagacg

SEQ ID NO: 27462 - DNA, 75 bp, Homo sapiens
tgaccgagagcgcgaatatcgtcatcgttagaagatgcatagctctcttaggtcccttcgtaatagtgcagctaa

SEQ ID NO: 27463 - DNA, 75 bp, Homo sapiens
gcaaccagggtgggggctacggaggtggttatgacaactatggaggaggccgtttgagcaaggaagacattgaac

SEQ ID NO: 27464 - DNA, 90 bp, Homo sapiens
cctgcgctctccgcaccgcggcttaaatgatgtattttgtgatcgcagcgatgaaaggtggatctcgagccagaggggaaagtatttgtg

SEQ ID NO: 27465 - DNA, 98 bp, Homo sapiens
gaagctaccacctgtaactgtaagaagccagatgatgacaccaggaagggctgtgttgatgactgcctcaatagaactttgaccagaataagctggaa

SEQ ID NO: 27466 - DNA, 78 bp, Homo sapiens
gaacaacctcaaaaccaaaaccagacacagcacaagcagcggccacaggcagcacgctggctcttctcctgaacttcc

SEQ ID NO: 27467 - DNA, 96 bp, Homo sapiens
ccggaacgggagccaacatggcagcggggttcgggcgatgctgcaggacgcaagatggctgtcctctctaaggaatatggttttgtgcttctaact

SEQ ID NO: 27468 - DNA, 100 bp, Homo sapiens
gcaggaatgcagcatccctgtctgtggacatacagccctgccgagcaaataatgaacgtaactcacaaacttcctgcttatcatcaaacgcacgcatcca

SEQ ID NO: 27469 - DNA, 88 bp, Homo sapiens
gagacaccctctgggggtcctctctgagtcaaatccagtgaacaccaccgatagccacaccgaagagttctcccatttgctggttccc

SEQ ID NO: 27470 - DNA, 101 bp, Homo sapiens
ccgggccggtcgcggaggccgcgccgggccctgtcgcgaacctccggcgcgctgccccgccggaccgtggattcgaggcacaaacccagcagcctcaacct

SEQ ID NO: 27471 - DNA, 99 bp, Homo sapiens
caaaaacttaaattgtggaatgaatgtttctccatcccagagagatgaagtaattcaatggctggccaaactcaagtaccaattcaacctttacccaga

SEQ ID NO: 27472 - DNA, 75 bp, Homo sapiens
gtccaggcacagatggaggaggaatacctccgctcccctctctcagggggactttgaggaggaagatgacaaccc

SEQ ID NO: 27473 - DNA, 100 bp, Homo sapiens
gtgctgcaaaccgagacaagttcaccccgaagtctgccgatggactcaccctgtcacccaggttggactgcactggcctcaacctcctgagttcaagtga

SEQ ID NO: 27474 - DNA, 100 bp, Homo sapiens
cgggggcgacgcgcgggaacaacgcgagtcggcgcgcgggacgaaggtatggagagtgcaatcacgctgtggcagttcctgttgcagttgctgctggatc

SEQ ID NO: 27475 - DNA, 87 bp, Homo sapiens
tgggcggctttgaccgagaggctgctggagctcgtgtttggacgcgaactcgaatcatttatgacagaaagtttctgttggatcgtc

SEQ ID NO: 27476 - DNA, 83 bp, Homo sapiens
ccagagactgctgagcccgtccgtccgccgccaccacccactccggacacaggttatgccaaggacgccctgaatctggcaca

SEQ ID NO: 27477 - DNA, 101 bp, Homo sapiens
ttgggaatatacttatgtattagatattcgacattcttctataatggaggcagtgacattcaaggacgtggctgtggtcttctctgaggaggagctgcaac

SEQ ID NO: 27478 - DNA, 83 bp, Homo sapiens
gggaacatgacgcaggtgcaggtgtctcttctcgccctggcggggaagaagtttccaagggtcacttgtgtctcgtccgtggg

SEQ ID NO: 27479 - DNA, 98 bp, Homo sapiens
ttctccatacccgtgacctggggatcgctacggaccttaaaatacccgcaacagccccttcgtcccaagctcccagccaacctctgataaaccctccc

SEQ ID NO: 27480 - DNA, 101 bp, Homo sapiens
gcacagagctgtaccagtacacggcccacgttgccagaatgaagaaggagccccacaggaaggaattctggaagatatgcctgtggatcctgacaatgagg

SEQ ID NO: 27481 - DNA, 96 bp, Homo sapiens
ctgggctggaggtctggacccccccatgggggatcctgagtacctggctgctttcagtcatagcacacatcggacatttggaaaacagcagtggca

SEQ ID NO: 27482 - DNA, 100 bp, Homo sapiens
ctcaggctttaggaactgaagaggactgaaaactggatatttggtccccatggactttctggtcaccctgtgaagtggacttaactttttcttgaatcat

SEQ ID NO: 27483 - DNA, 101 bp, Homo sapiens
tcaggacagggctgaggaaccatgtctccatccccgaccgccctcttctgtcttgactatttggagttttcctggtcttactggatgtcactctcgtcctt

SEQ ID NO: 27484 - DNA, 96 bp, Homo sapiens
ccgcccaggccagccccagcagcaacagcagcacaggtggttccttaaaaacagttattgctcaagatgaaaacctcccagaagatgttgtgagag

SEQ ID NO: 27485 - DNA, 75 bp, Homo sapiens
ctctctgcccaagagcctctatcggagcccaggccactactacgtgcccctcctgagagcggaagagacttcttc

SEQ ID NO: 27486 - DNA, 129 bp, Homo sapiens
ggaccgagcgcgctcgctccggcgccggcctcgcctcctcgcagcagcgccatggtactccaaagattcaggtttactcacgtcatccagcagagaatggaaagtcaaatttcctgaattgctatgtgt

SEQ ID NO: 27487 - DNA, 100 bp, Homo sapiens
tcagcgttcacctctctgcgcccaaacggatctgaggctctgtcggtggtgagcgacgaccagtccctctttgactcagcgtacggagcggcagcccatc

SEQ ID NO: 27488 - DNA, 50 bp, Homo sapiens
caacctgggaaggaattcaggctggaaaaccccccaaagacacacgtgac

SEQ ID NO: 27489 - DNA, 100 bp, Homo sapiens
caaaattgaaaaaatggttgacctcacccagaataatccagaatggctactctgatctatgttgataaggaaaatggagaaccaggcacccgtgtggttg

SEQ ID NO: 27490 - DNA, 82 bp, Homo sapiens
gcatgggcacgccacatctgcagaagacgctgaatcaggccagtgaagaagcaaaggaagacatgaaaattgacgctcattc

SEQ ID NO: 27491 - DNA, 75 bp, Homo sapiens
caggcccagaacggagccgccttggcctcggggtctccctacaccaacgtcttgaatccagataatagttttgaa

SEQ ID NO: 27492 - DNA, 83 bp, Homo sapiens
ggcagcggaggtggtggtggaggtggaggtcgcctgcgaggccgctggccaggcctgagcctctgccaccatggccattgtgc

SEQ ID NO: 27493 - DNA, 50 bp, Homo sapiens
gtgtttttccgtaagcatactcagattttgaagatgtaactgagtttctg

SEQ ID NO: 27494 - DNA, 75 bp, Homo sapiens
aaagcacgaacaggaatacatggaagtccgggagagaatacacagagccactcagccagacgtccaggatcccac

SEQ ID NO: 27495 - DNA, 50 bp, Homo sapiens
caattgcaggatgcacagattctggtgtgatgaatgcagactctgctacc

SEQ ID NO: 27496 - DNA, 83 bp, Homo sapiens
gaagaagattaacctggagttaaggaacagatccccggaggaggtgtccctggccagtgtccttccacctgtccacaagcatg

SEQ ID NO: 27497 - DNA, 100 bp, Homo sapiens
cggcagcgcgcggtcgacgcgggcctgagctccctccaggtaacaattgcttgtgatgcagttctcagctcaaaatctccatacagaaagcaggacccag

SEQ ID NO: 27498 - DNA, 75 bp, Homo sapiens
cctgaatcttggtgtttggacataggagtggtcatatgcattagaaaaacccaacactggcagcatatttaatat

SEQ ID NO: 27499 - DNA, 78 bp, Homo sapiens
gtcagtgcacaaaatggcgccctacagcctactggtgactcggctgcagggacatatttggagaagactgtgtaagtg

SEQ ID NO: 27500 - DNA, 82 bp, Homo sapiens
gacaagccgctggcagccgcggatctcaccgccgctcaggggtgtgacacttggcaccacactgttccctgtcccttcatgg

SEQ ID NO: 27501 - DNA, 80 bp, Homo sapiens
aacggcaacgtgtaatcagaaggcacagattagaggaaggaagaggcttgagtttgaagaaacagaagaacctgatttta

SEQ ID NO: 27502 - DNA, 78 bp, Homo sapiens
ttttcttatgctgggatgtgccttagaggattatggctccagtggctgttggataattatgaaacagcggaaggtgtg

SEQ ID NO: 27503 - DNA, 49 bp, Homo sapiens
aacctgcgcccccagatgtcccagtgggtaattccagaattgattggcc

SEQ ID NO: 27504 - DNA, 98 bp, Homo sapiens
tagctttgtaggagcatggcttggagcacttcctattccactggattgggaaagaccatggcaggacagtcattttgtttactcattcagccctgttg

SEQ ID NO: 27505 - DNA, 83 bp, Homo sapiens
gagttccgctcctgcgggcttagcaggaaagggtgcctaagacctgcctagagctggaacgttacctccagagcgagccctgc

SEQ ID NO: 27506 - DNA, 100 bp, Homo sapiens
tgttttgtccagggcagcatctctggtgcatgctgatgacgaaaaacgatgctcgtcagaagttccgctctgttctggttgaagcaacggtgaaactgga

SEQ ID NO: 27507 - DNA, 83 bp, Homo sapiens
cgacggaccagcgacccaagcgccgcggttaaccacgtctcgtccacgacctccctaggtacaatgactcttcttgcttttca

SEQ ID NO: 27508 - DNA, 101 bp, Homo sapiens
gtttgggatcatccagaagcatctgaagaccatggatcacaaccggaaccgcagggactcagtctcctttgaggatgtggccgtgaacttcaccctggagg

SEQ ID NO: 27509 - DNA, 100 bp, Homo sapiens
agaaagcagccacctcacagatcaggacaatgaaatccgagccactgacctgcctgagaggttccaggtacttcctcctccagctggttatgttcctatt

SEQ ID NO: 27510 - DNA, 100 bp, Homo sapiens
tttgacagtcgtagatacaaatttttggatgatgatggatccatttctcctattgaggagtcaacacatctttccaggaacagcgtgaggaggacagaag

SEQ ID NO: 27511 - DNA, 83 bp, Homo sapiens
cttccagaacctcagcaagcgccagcggcagagcctacgcaagatggtcatcgacatggcacatgatggctccgctacttact

SEQ ID NO: 27512 - DNA, 82 bp, Homo sapiens
tcccagtgacgggtctggagtgcgtgggggaccggctgttggcggacctccgcgctctggcagctcctcttccgtgtgctct

SEQ ID NO: 27513 - DNA, 74 bp, Homo sapiens
gacgccttagataacagccatcctattgaagttaccacattctcatctggagccaggaggaagccaggacacgg

SEQ ID NO: 27514 - DNA, 101 bp, Homo sapiens
cctggggcagctgaactgagcgtatgtgccacgccgcccaggagacccctctgctgcaccacttcatggctatgaagagaccctgacccgcctggctgcca

SEQ ID NO: 27515 - DNA, 96 bp, Homo sapiens
atgattttaacctggaggatgcagtgaaagaaacttcctcagtaaagctgaaactggaacgccaagctgaagaagaacgaatacggaagcacaaag

SEQ ID NO: 27516 - DNA, 89 bp, Homo sapiens
aaactcctggactgaaacgatcctctcatctcagcctccaaaagtgctggcattacagcacagacgcagtcttcagcaaggaagtgctg

SEQ ID NO: 27517 - DNA, 82 bp, Homo sapiens
ctcgccccgcctcccccttccctccccttggggaccaccgggcgccacgccgcgaacgacaatgcagatcttcgtgaagact

SEQ ID NO: 27518 - DNA, 100 bp, Homo sapiens
cagcaatggcacattgaaggaatggagggaatccaatatttctgcctctgacataatttgggagaacctaactgtgtcatttattaaccttgcaagaact

SEQ ID NO: 27519 - DNA, 100 bp, Homo sapiens
agactggccaaaattcaatccctgctttagctcagtttgaaaatgagatcatcaccaagctggatcatgaagtcgaaggaggcagaggagacgaacagta

SEQ ID NO: 27520 - DNA, 95 bp, Homo sapiens
gaatgagagaaccgaggaacgaagaaacagacattcaacatgattgcatttgaagtatcgatatcctgaagcttgtagcagcccaagtgggaagc

SEQ ID NO: 27521 - DNA, 100 bp, Homo sapiens
agcgggacccggcgaagacgcgaccgcggcgcgagtcaccatggaagcgagcagctgcaaagcatctaatagaacgctactaccaccagttaactgaggg

SEQ ID NO: 27522 - DNA, 98 bp, Homo sapiens
ttgctaagtgcaatgggaaatacctctcatcaaattactcagaggcaagccaaaattccttccggatagaatatgatacctttggtgaactaaaggtg

SEQ ID NO: 27523 - DNA, 50 bp, Homo sapiens
gcggaagcaggactcggggcacttggatgcaggagctggagcagaggctg

SEQ ID NO: 27524 - DNA, 100 bp, Homo sapiens
ctttgcatggctcccggggcgctgactgcgtgttaacatcagcacgtggtgaggtgtgtatggcttcccgtggactcagcctcttccccgagtcctgtcc

SEQ ID NO: 27525 - DNA, 82 bp, Homo sapiens
ccgcagtcggcaaggagagacgtcgctgaggggcttgcctgaagcgagggtctgaacaacccagtcctgccagctccagctc

SEQ ID NO: 27526 - DNA, 90 bp, Homo sapiens
tgcagactgtggcgcaactggtcttggtagcggaggcacccgaatgctgcccgggtgaggtctagcacataccgctccaagggctttgac

SEQ ID NO: 27527 - DNA, 88 bp, Homo sapiens
tacccttgcgtcctggctactgagggtttcacctcaggtcgacactactgggaggtggaggtcaaaatgcagatcttcgtgaaaaccc

SEQ ID NO: 27528 - DNA, 100 bp, Homo sapiens
cattgatgcctgggctccttacttacctcagtacatagaccacgtcatatcacggtctcctatggacagaagtgcgggcaaggagctttgttcctccccg

SEQ ID NO: 27529 - DNA, 76 bp, Homo sapiens
cttgggtgaactctagcaattacaagactacttgttgaacggatctttgctcaatacatggttcctcacaatttag

SEQ ID NO: 27530 - DNA, 100 bp, Homo sapiens
caaaatacttgctggatggtggactcagagaccaataaaaataaactgcttgaacatcctttgactggttagccagacaagttggatggcttgaggactg

SEQ ID NO: 27531 - DNA, 82 bp, Homo sapiens
tttaagaaaaggcattgaggaactcaatcaaaccagtattcttttcacacagacagagcgccaagtgtctcgctggtttgtt

SEQ ID NO: 27532 - DNA, 80 bp, Homo sapiens
gacgactgtgacgaggacgaggaggcagccacggggcccctgggtgcgcgcggagccatggttatcatgtcggagttcag

SEQ ID NO: 27533 - DNA, 75 bp, Homo sapiens
tcgcgctgctgggcacccacggagcctccggggctggtgtgaatgacagaggtggtgccatccagcgcgctcagc

SEQ ID NO: 27534 - DNA, 104 bp, Homo sapiens
ctccattggatttaaaagacagtcctcgtcagcactgactttcagctatggaatcgtaagactttgaccccgacgcaggcttcagtgattgccgcggatcagaa

SEQ ID NO: 27535 - DNA, 87 bp, Homo sapiens
ggatgagtcatgtggcagtggaaaatgcgctcgggctggaccagcaggtgtccctggccagtgtccttccacctgtccacaagcatg

SEQ ID NO: 27536 - DNA, 100 bp, Homo sapiens
ctgaattcctgcattaacccaattgctctgtatttggtgagcaaaagattcaaaaactgctttaagacttcacagagaatgcagttgtcttgacttcagg

SEQ ID NO: 27537 - DNA, 75 bp, Homo sapiens
cccaagtctgcaatcttaccagggaggccaagcgaccacccaaagaaggtttaaacttacacgaatcgctttctg

SEQ ID NO: 27538 - DNA, 50 bp, Homo sapiens
agctcaccctcccgagttgaaaaatactatactggcaattgctggagaag

SEQ ID NO: 27539 - DNA, 97 bp, Homo sapiens
ggagttagatgagccacttgggaagaatgatggcgctgttgctggaacaagaatgagagaagacagtgctagagtctatgaaaacgtgggcctgatg

SEQ ID NO: 27540 - DNA, 50 bp, Homo sapiens
aaccctcggggtcattgccatcgaccgccgtcctgtacttcctcctccaa

SEQ ID NO: 27541 - DNA, 107 bp, Homo sapiens
agccgcgcgctgagggtctcggggcgggcgccgcgggacctctccgggccatggcaaaatgatgcttcaacacccaggccaggtctctgcctcggaagtgagtgctt

SEQ ID NO: 27542 - DNA, 100 bp, Homo sapiens
tcggagaagccctcgagcatccccacagttggtaatcagtggataaattacatatcattctgtggtcttagaacacatgcagagctcgaaggaaacctag

SEQ ID NO: 27543 - DNA, 100 bp, Homo sapiens
aaagaactggatctttatctggcttactttgtccacactccggatgcctgtgaggagccaccaacatttgaagctatggagctcattggtaaaccaaaac

SEQ ID NO: 27544 - DNA, 83 bp, Homo sapiens
gaccgggaccgccgccgccgccgccaccatggtgaagatttggttccagaaccggcggatgaaatggaaacgcagcaaaaagg

SEQ ID NO: 27545 - DNA, 74 bp, Homo sapiens
atgctaaaagatgacagacttggacaacatgtcccaacattacatcccagatttttacctcctataactccacc

SEQ ID NO: 27546 - DNA, 82 bp, Homo sapiens
tatagtgaagataaagccaggcaaggggttcttggagtgtcaatgttttaataccagtacacaattaaatctgtggtgaagt

SEQ ID NO: 27547 - DNA, 154 bp, Homo sapiens
ctcacacccatgcctatgatattcttctcctggttaatcaagaattctctatttctgctccgtcatccatgccactccggatcgagctgggagatgtgacaccacacaatattaaacagttgaaaagattgaatcaggtcatctttccagtcag

SEQ ID NO: 27548 - DNA, 98 bp, Homo sapiens
ctcctgagtagctgggattgcagtctcgtcctgatggccagactggagtacagtggtgtgatctcggctcactgcatcctccgcctcctaggttcaag

SEQ ID NO: 27549 - DNA, 83 bp, Homo sapiens
cagcagctcaccgaggacggggactctctcttgcatggcaccaagaatgttaccaattcaagcagtttaagattgccaagaca

SEQ ID NO: 27550 - DNA, 75 bp, Homo sapiens
aaagaatttaatattgtatgaacgaagataagggagtacacctttaggatgctataaaaaactaatagaatatca

SEQ ID NO: 27551 - DNA, 95 bp, Homo sapiens
aagaagaagcaggatgaactgaaacggattgccagagaattggcagaaggtgtggaccactacaacgaggtgaagagcgtcaccatctgcgatta

SEQ ID NO: 27552 - DNA, 51 bp, Homo sapiens
cccagcagacagattttacaagaaagaaggactttgctgctttgggccagg

SEQ ID NO: 27553 - DNA, 83 bp, Homo sapiens
ttggaccttccggagcttctcagaagacagagggttttcttttgaggctaagaaatggcatttcaaaaggcagtgaaagggac

SEQ ID NO: 27554 - DNA, 110 bp, Homo sapiens
caaattttcaagtgccaaacggaggaatacctcgtatgcaacctcaggcttcagccaaattagacctttacgagaagcacagttttgtcttcagtttcctctccccccac

SEQ ID NO: 27555 - DNA, 100 bp, Homo sapiens
gcccttcgaaaaatgatcaactattgaccatataggtggaaccgtcccaaaatgtcccttgctcagaagaaggatcgggtagctcaaaagaaggcaagct

SEQ ID NO: 27556 - DNA, 75 bp, Homo sapiens
atttttggatgatgatggatccatttctcctattgaggagtcaacgaattacatgaacgacagccttcgcaccga

SEQ ID NO: 27557 - DNA, 75 bp, Homo sapiens
cttcagaacctcctactggacgacttctttaagtcagctgttgaaaactgccagagacaaggtctcaccatgttg

SEQ ID NO: 27558 - DNA, 74 bp, Homo sapiens
atcaagaggttccaatcttcgtgttcactttaagcaccagtatgcatgagcgggtgaaccgaacagaaagacag

SEQ ID NO: 27559 - DNA, 96 bp, Homo sapiens
ggaaccacgcgagctgcagccagccatgaatcatcttaatggacagaaaatgtatggaaaaattattcgtgttactctgtctaaacatcagactgt

SEQ ID NO: 27560 - DNA, 100 bp, Homo sapiens
tgagcaacctaatgaatctgggcaggaagaaatccacctcactggagcctgtggagaggtccctcgagacatccagggagtacatcaagacctggcggcc

SEQ ID NO: 27561 - DNA, 75 bp, Homo sapiens
tgaatggagcgtcaaactaaactggacaggtaaagagtgtgtacaacagttagctgaaaacaccaggtatttcag

SEQ ID NO: 27562 - DNA, 90 bp, Homo sapiens
ccggccgcggccgggtcctcaggtgtcatggagaaactccagctgggcccagagattctgcagcgggaaaatccaaggcttatttatgcc

SEQ ID NO: 27563 - DNA, 98 bp, Homo sapiens
ggcgcgggtgctccgggccgaggccgcgtttgtgaatagcacaatggaagaagctggactttgtgggttaagagagaaagcagatatgttgtgtaact

SEQ ID NO: 27564 - DNA, 100 bp, Homo sapiens
tggctctgctgaccttgtgccttgtttctccttggaccaagatgactgatggaaaactctccacctctacaaatggcgtagccttcatgggtattctgga

SEQ ID NO: 27565 - DNA, 100 bp, Homo sapiens
cctggctagaagcagagacaccaggacagaaaagacagtgttctgctttcatggagttcacagaagagtcgaggaggaccgccgggagagcctgcccacc

SEQ ID NO: 27566 - DNA, 90 bp, Homo sapiens
gagccgggatctcaggtcctcgggggcggcggccacgccaaggacggcggacaaggcaaaatctcagcaagttcggacctctagtacaat

SEQ ID NO: 27567 - DNA, 90 bp, Homo sapiens
catgtccatggaggaccccttctttgtggtgaaagggcgaggattaaatccaccacacagggtgaaatctatctccatgacaacattcac

SEQ ID NO: 27568 - DNA, 75 bp, Homo sapiens
cccactcaccttgtttgtcccaggactcctctatctcctccagaatttctctgcaaagaatgtccaaaaattcat

SEQ ID NO: 27569 - DNA, 87 bp, Homo sapiens
gatgggaccacatcagtaattattcttgggaaatcctcattgacgattcaatttgttgaaggccaatttgtggactcctacgatcca

SEQ ID NO: 27570 - DNA, 91 bp, Homo sapiens
tggggccagggaaccctggtcaccgtctcctcaggcctgggttctgaggaaaacgcaatggtggccatggacttgggctctccctcgctcc

SEQ ID NO: 27571 - DNA, 100 bp, Homo sapiens
ctccctcaccttggacacctcgcttggagtccccagggagacacttaagggaaattaaactgcagagtgcaagagatgcctcagtcaagtcagccaaaaa

SEQ ID NO: 27572 - DNA, 101 bp, Homo sapiens
gcattgactggaaacaatggcatttacagaaagagtcaacagcagtggcaacagcacaaccagtgtctctgaagaagatgtctcaagtagatattctcgaa

SEQ ID NO: 27573 - DNA, 97 bp, Homo sapiens
gcccgccgccccgcgggggagggcggagctggcgcggcccctagctttctccttctggtgtggggcccgaggacttctgccatgggcaagtgatgtg

SEQ ID NO: 27574 - DNA, 100 bp, Homo sapiens
cgacactatccgtgcggccaggcggaggtttgggccccatggtatccctgtgacagtatttcccaaaagggaatataaggataaaccagaagccatgccg

SEQ ID NO: 27575 - DNA, 51 bp, Homo sapiens
tgcgttttcatcctcagaagcaggatgctttcattggatttggaggaaatg

SEQ ID NO: 27576 - DNA, 90 bp, Homo sapiens
tgaggaattcttccagtttctttatcctaaaactggtgtaacaggaagtcctggctgagcaaggttggaagccctagttctcgcattgac

SEQ ID NO: 27577 - DNA, 83 bp, Homo sapiens
gttccttagaaaggagcagcaggctatagaaagcgcaattggtggtaacgcttatcaacacagcaaagtgaaccagtggacca

SEQ ID NO: 27578 - DNA, 96 bp, Homo sapiens
tcttcatcgtgctattcctggtctacatcctgcgggtgcctttgaaaatcaacgacaacttgagcacaggaagaattttaaatcgtttctccaaag

SEQ ID NO: 27579 - DNA, 82 bp, Homo sapiens
ctccacttggcccgtccatagagccaggatattagaaatggctactccccagtcaattttcatctttgcaatctgcatttta

SEQ ID NO: 27580 - DNA, 101 bp, Homo sapiens
atgtggatcaagcaggttttaaatcaagatttaacattccaacacataaaaattatttatccaacagctcctcccaggcctccccatggccacccatggac

SEQ ID NO: 27581 - DNA, 75 bp, Homo sapiens
gcagactccatgctcttggcattgcagctttctatggcggagaacaacaaacagattttgtacttcagctgctga

SEQ ID NO: 27582 - DNA, 100 bp, Homo sapiens
gcggcgctcgccgccttgggcaggacccacctcgccttcctcccggcgtggcagatgctccaggttctgaatgatgactgacgcgggtttgggtgatacc

SEQ ID NO: 27583 - DNA, 75 bp, Homo sapiens
ctctcattttctttccctgcaccaactagcagaaactggcgatggaatatgagaggagccctctggaaagaaaag

SEQ ID NO: 27584 - DNA, 100 bp, Homo sapiens
cggacggctgcatttacggggtctcccggagggccagagtcgaattaaacaaccaccatgtcgagcaaaaaggcaaagaccaagaccaccaagaagcgcc

SEQ ID NO: 27585 - DNA, 100 bp, Homo sapiens
aatcactaaatactactctgaggggcttagaaattaacagggtctgtttatgatggtgaagaacatggacgtttcatggagaagcttgaaactcgtatcc

SEQ ID NO: 27586 - DNA, 100 bp, Homo sapiens
gtgtggagtgttctaaccaacaaggaagagagatgtttcacaaagcagaagaattattttctaaaacaacaaacaatgaagtggatgacatggacacgtc

SEQ ID NO: 27587 - DNA, 100 bp, Homo sapiens
ccatgtgttttacttgtagtgtatgcctcgtttgttgggaacctactgatgaaccttggcttgagaaagagatccaagatcttgaaaaagctgaactgca

SEQ ID NO: 27588 - DNA, 88 bp, Homo sapiens
gaaacatgcagattatatcgcatcctatggctcaaagaaagatgattatgatgctttcattggatttggaggaaatgtgatcaggcaa

SEQ ID NO: 27589 - DNA, 98 bp, Homo sapiens
tttataatggaattggagtcagcagaactgaaatagtggaggccatagtggagtttgactaccaggcccagcacgatgatgagctgacgatcagcgtg

SEQ ID NO: 27590 - DNA, 89 bp, Homo sapiens
gttcgagcgctgttctcgctccggagccgctgcacatttcgctctctatcaatatcagctcacatcattgaaaagataattttgaagac

SEQ ID NO: 27591 - DNA, 90 bp, Homo sapiens
ctcagagctcagacacagagcagcagtcccctacaagatcacaaaatttgtccaggatagacatagagctagaagaaacagacttcgtaa

SEQ ID NO: 27592 - DNA, 82 bp, Homo sapiens
ggtcatgagctttgtgaacctggacctcctgccccccgaggtctgcagtctcctgaacccagcagccatctacgccaacaac

SEQ ID NO: 27593 - DNA, 73 bp, Homo sapiens
ttgtgtctaattctgctaacctgaaagtaatgcccaaggcaatgtggctgggataccctgggacgagtggtgc

SEQ ID NO: 27594 - DNA, 100 bp, Homo sapiens
aaaacaacaaggaagctttcagtgttaatcatgttatcagccctctgttggatatctactttcctgaaggatctggtgttaagataatttcagaacccgg

SEQ ID NO: 27595 - DNA, 90 bp, Homo sapiens
cggcagcatcaatgtctggaacatctgtcccctgttcaaagctccctgcggtgtggccccccaagcacgcatcacaggtggcagcagtgc

SEQ ID NO: 27596 - DNA, 82 bp, Homo sapiens
tcatcaagctagtggacatcacggacatccagaagctacgagttccagggagctctgtcctggtgaccgtgcccgggttatg

SEQ ID NO: 27597 - DNA, 74 bp, Homo sapiens
aaacatttcaactccctacagttgtgccatgcaataactgaagtgaagtgatggactccgatttggagagtagt

SEQ ID NO: 27598 - DNA, 75 bp, Homo sapiens
cggaagctgcgcatcgagaagcgccagcagggttccgagtctgaggaagacataaccttgtgcctgcctgcccac

SEQ ID NO: 27599 - DNA, 82 bp, Homo sapiens
gaacttttgacacggctttggaaacgacgtcatgtgttagcaaaatgatgcttcaacacccaggccaggtctctgcctcgga

SEQ ID NO: 27600 - DNA, 98 bp, Homo sapiens
gtagagccccgccggagaggctgggcggctgccggtgacagacaatgcagatcttcgtgaagactctgactggtaagaccatcaccctcgaggttgag

SEQ ID NO: 27601 - DNA, 75 bp, Homo sapiens
caccagtgggtgtttcccaaggacgttgtcaagcagcaggtagatgatgagctggagatcaaggcctactatgca

SEQ ID NO: 27602 - DNA, 75 bp, Homo sapiens
cttcgaccttggacttctcagcctccagaatgttgcattaaaatcctcccctactgaaagaaacggaggccagga

SEQ ID NO: 27603 - DNA, 50 bp, Homo sapiens
actcataacagttgatgaaaaattgttacattcagaccaggatagaggag

SEQ ID NO: 27604 - DNA, 100 bp, Homo sapiens
cgggcggcccaggcgcgcagctgggcgcctccttcctgcaggccaggacggctgtcctcagcgaggggccgtgcacccgctcctgagcagcgccatgggc

SEQ ID NO: 27605 - DNA, 98 bp, Homo sapiens
cggccgcgaggccacggagagctcgccttggagagcccaggagcaggggagacatgggaacgatgcctctggaggtggtggtggagctgcagatccgg

SEQ ID NO: 27606 - DNA, 50 bp, Homo sapiens
cctgtcccctacgtcctacatgaggtttttagaacttcagccataaaaat

SEQ ID NO: 27607 - DNA, 100 bp, Homo sapiens
tgccaccgggcctgtcagttgacctaccccttgcacacctaccctaaggctgaagggtatgtgattggcagctgtattaaacacattccaatcgcaggac

SEQ ID NO: 27608 - DNA, 82 bp, Homo sapiens
ggagatggaaaaggagttcgagcagatcgacaagtccgggagctgggcggccatttaccagctgctgatgcaaggaatcccc

SEQ ID NO: 27609 - DNA, 100 bp, Homo sapiens
gtccgacctcacaggccgacaagatacctctcgcatgtccacctcacagccactgaggcggctcccagctgcgttggcgacatggccgacacccccagag

SEQ ID NO: 27610 - DNA, 121 bp, Homo sapiens
atttctcttgacaaccaagggcctccgtctggatttccaaggaagaatttcctctgaagcaccggtgtggacactgccagcggctgcagccgacttggaatgacctgggagacaaatacaa

SEQ ID NO: 27611 - DNA, 74 bp, Homo sapiens
cttactttcatgagtttggtcacgtgatgcatcagatttgtgcacaggaacaggagtacagctgtgtagtaaag

SEQ ID NO: 27612 - DNA, 100 bp, Homo sapiens
ctcggggtgactcttctcaaatgccttctcatccccacatagggcaagctctgtgtgattgattggaagacatcagagaaaccaaagccttttattcaaa

SEQ ID NO: 27613 - DNA, 75 bp, Homo sapiens
ggaggacttcactgtaaaccagccaaacccttgcctaagcatccttttatcaagaatgccaaacctgtatcaata

SEQ ID NO: 27614 - DNA, 98 bp, Homo sapiens
agcatgacgcacacaggagagccaggattcatgctctacatccccatagaggtgggtgaattttctggagccaataaggaaaagcttgaagccaccat

SEQ ID NO: 27615 - DNA, 98 bp, Homo sapiens
gttctcgagttcccattgctgaaaggccaccctaacctctgtgttcaggtggtgattattccttgtggcattaccaatgcactttctgaagaagacaa

SEQ ID NO: 27616 - DNA, 100 bp, Homo sapiens
ctagcattgcagttggctgaaccttgtgtcaaccatccattccaggagccagctatctgaggtattaatctctggagaagacacatccacagttagcact

SEQ ID NO: 27617 - DNA, 82 bp, Homo sapiens
atttagaaatgaaggatatccaacagggtcaaagagccccctgaaatcaatttagttttgtaccctcaaggcctaactggtg

SEQ ID NO: 27618 - DNA, 100 bp, Homo sapiens
taagaatgctgatggtttcattgatctagaagagtatattgagtggaacagatgtgcattcagattaaagaagttggagatcgtgtcaactacataaaaa

SEQ ID NO: 27619 - DNA, 100 bp, Homo sapiens
aacggcttagagcaggccgcttggttctgacccagctgaggattgtgctcatggacgatgccatggactgcttgatgtctttttcagatttcctctttgc

SEQ ID NO: 27620 - DNA, 100 bp, Homo sapiens
cagaagttgtctgagtgcgttggtcggcggcagtcgggccagacccaggactctgcgactttactactatactggcaattgctggagaagattttgcaat

SEQ ID NO: 27621 - DNA, 101 bp, Homo sapiens
gagctgttggagctttgcagctgacctacatctcgaaggataaagtggccagtgtgtacgaagccccgggctttttcctggacctggagcccatcccggga

SEQ ID NO: 27622 - DNA, 82 bp, Homo sapiens
gtcgcgaggttcgagtgttgcagagcctgcggggcaagatctgaacaagatcactcaaggtgaaggataatctactaatacc

SEQ ID NO: 27623 - DNA, 122 bp, Homo sapiens
gaagaccgcgcgcagggcctgcagcgggagctggacggcgagcgcgagcggcgcgagaaaaaactatgttccaacttcctgtcaacaatcttggcagtttaagaaaagcccggaaaactgtg

SEQ ID NO: 27624 - DNA, 100 bp, Homo sapiens
aggcagaggtggaggcgctttgaaagaacccttaggagaaatcttgagagtggacagcaattgtgaagatcgccagagagttctgtgtttcatcaccgcc

SEQ ID NO: 27625 - DNA, 100 bp, Homo sapiens
ctcagataagagtcaacctcaactaccgaaagggaacaggtgccaggttgcaaattcgtgaagaatcagcatcatgtttggcagctgagtattggagcca

SEQ ID NO: 27626 - DNA, 91 bp, Homo sapiens
tgcctcctgttccgcttctcagaggacgccttcaacaccaccttcatctccaccatcgtgataccaagaagaagcaggggatgaagaagag

SEQ ID NO: 27627 - DNA, 83 bp, Homo sapiens
ctggaacagaggaacattttgaaaccttcgcttttttgcaaatgcattcactttgacaccatataatggaacagaagctctgg

SEQ ID NO: 27628 - DNA, 75 bp, Homo sapiens
cgaggcgccctagacatcttctccctcccttgcctcagagatcctgagtcatgtgttccagtggcttgggttcac

SEQ ID NO: 27629 - DNA, 96 bp, Homo sapiens
ctggacaggcagagtgctgatgtgaaaaataccacgacaaaaccaccctagtcagcccaaggccaaccccactgtcactctgttcccgccctcctc

SEQ ID NO: 27630 - DNA, 98 bp, Homo sapiens
aaaacaacagaaatttgtggtgcaccaggtgttggaaaaacacaattatggtttcaggtacgttcaccaactttctttcaaaaatcccgggaccagca

SEQ ID NO: 27631 - DNA, 101 bp, Homo sapiens
tctacatgtaaaaggccactgactcctacttcctctgtatagagcaactgttgaactcagctgcctgtagaattcagcttagagaactatcaacacaggac

SEQ ID NO: 27632 - DNA, 100 bp, Homo sapiens
tcgaaccatggaccaggccctcaagtccctgatggcctcagaggaggaggagaccagtatgatgtctgtgccatttgcctggatgaatatgaggatgggg

SEQ ID NO: 27633 - DNA, 83 bp, Homo sapiens
gtcagcttggcatcgcggctgtgacagcccacctgaggatattgaccataaggactcatatctcattacaagaagcatcatgg

SEQ ID NO: 27634 - DNA, 98 bp, Homo sapiens
actgcggcggcgccggcctccggggagaaacgctgatggtgagaccattctaaaaggcctccagtccattttccaggagcaggggatggcggagtcgg

SEQ ID NO: 27635 - DNA, 90 bp, Homo sapiens
ctttaaatccggagggggaaaaaatcccaaggtctgcaaaggtttgcaaatgaaattcaaaaaatcggcagtgactcttcttggaccagg

SEQ ID NO: 27636 - DNA, 100 bp, Homo sapiens
tccgccattttgctaccaagaaagccaaagctacaaggctttggcccaccaagtgtgtaccatgctgctattgtcatcttccttgaattctttgcgtggg

SEQ ID NO: 27637 - DNA, 82 bp, Homo sapiens
ggccgttgttcccgagacgttgttgagtcccctgtgtcctcttctggggttttcagagaaagatgctgatgaggtgaaagga

SEQ ID NO: 27638 - DNA, 90 bp, Homo sapiens
tgaaggccctccagacccaaagtccccttcccctgagcccatctacaatagcgaggggaagcggcttaacacccgagagttccgcacccg

SEQ ID NO: 27639 - DNA, 50 bp, Homo sapiens
agcctctcagctttttcgtatttggagtgacttttttgaacgaaccattc

SEQ ID NO: 27640 - DNA, 100 bp, Homo sapiens
caaagcctgcccagacggctcacctgtgcgggatggaacaaaagtttgtgatggacgcctctgaccccacccagctctctgcatcctgtgtgcagctctt

SEQ ID NO: 27641 - DNA, 50 bp, Homo sapiens
cttcgggacctcataaaggaaagctgataggaagatgtcttcaggaaatg

SEQ ID NO: 27642 - DNA, 82 bp, Homo sapiens
cctggatctcatcaaaaaggacaccagcaagctgttcaatgaggagggggatatgagactttctactcggaatatcctgagt

SEQ ID NO: 27643 - DNA, 100 bp, Homo sapiens
gagaacaacctgacataaactagcaagccaacaggtgaagtttcgacacacctcctttaataaaggacctgaaggagaagaaggagaaggtggaggagaa

SEQ ID NO: 27644 - DNA, 90 bp, Homo sapiens
catcagtctatcagtgttcggctccagcctgtgaagaagttaactgattagaaatgatatttgccaaatttgatgaagtgcaaagttcag

SEQ ID NO: 27645 - DNA, 95 bp, Homo sapiens
gggcagcgcccgcgccccgccgctgagccgtcgcggagccgcgcagccctcggagcacggcctgtaactgtgaccagtacctaaaggtctccagg

SEQ ID NO: 27646 - DNA, 83 bp, Homo sapiens
ctgctacaaaaacaaggtcgtcggctggcggagcggcgttgcctccggagccagcgtggtggccatagacaacaagatcgaac

SEQ ID NO: 27647 - DNA, 100 bp, Homo sapiens
tggatctctttctccacccatcccgagaacagaagaggaggctgcaaaatgggcccgggaagaagaagaagcccagcgtcgattagaggagaaccggctg

SEQ ID NO: 27648 - DNA, 87 bp, Homo sapiens
gagctgtccagatgctgaaaagagaaggtcaaacagctgaagaattctgcttggtcagaatcgtgatggcattgtgttcagcactga

SEQ ID NO: 27649 - DNA, 97 bp, Homo sapiens
gtcgcccaggagtcatcggacgccagaatctgactgtgccctgtccacggtgcctcctgcatgtcctgctgccctgagctgtcccgagctaggtgac

SEQ ID NO: 27650 - DNA, 90 bp, Homo sapiens
ccaagacctgccagtcctgcctccaatgtagttgtcttgccaagtggaagtactgtttatgtcaaaactcaactataaatttccagcaac

SEQ ID NO: 27651 - DNA, 118 bp, Homo sapiens
aagaccgcgcgcagggcctgcagcgggagctggacggcgagcgcgagcggcgcgagaaagctcttgtcaggatggtgaagctgttcatcggaaacctgccccgggaggctacagagca

SEQ ID NO: 27652 - DNA, 50 bp, Homo sapiens
ggctcttcctcctcctcccgcgacggatccaaactactggatacaggtgc

SEQ ID NO: 27653 - DNA, 74 bp, Homo sapiens
aagaacttcttcagaattagaaaggagctgcttcccaataaggaaacatgttgttacagatcttataacagtcg

SEQ ID NO: 27654 - DNA, 80 bp, Homo sapiens
cgacgcggggcccatggccaggaccaccagccagctgaacacagatatgtagaactcttcttgaattctacagcaggagc

SEQ ID NO: 27655 - DNA, 82 bp, Homo sapiens
aaacacttcttttattttcctgtaatatatctgtatcatcggagataaccacctgcctcaaagataatctgctcaaaagact

SEQ ID NO: 27656 - DNA, 97 bp, Homo sapiens
ggtgcagcgaatcaagcgggagttcaaggaggtgctgaagagcgaggaggaacctagaaagattgtacaatgaatggtgattctcgtgctgcggtgg

SEQ ID NO: 27657 - DNA, 74 bp, Homo sapiens
ctgcaaagtgaaaagcttgaacatgcaaacttcgttttttaaaaacatgatatctaaaaagcagaatgtgcaga

SEQ ID NO: 27658 - DNA, 75 bp, Homo sapiens
ccagaggttcacaaaacaagtgtagtagaatcatcggactcaggtacatctgtgagtgagaacaggtgtcacctt

SEQ ID NO: 27659 - DNA, 88 bp, Homo sapiens
ccggggacccggcccgggaccggcggcgcgcggcggccgaggccagtgtggacgaatgtggaacctcgctctgtggctgtgttccctt

SEQ ID NO: 27660 - DNA, 87 bp, Homo sapiens
cagctcgtcagcccatttctgggtaaatctgatatgtctcgcttgcgattagctgctggtagtgccataatgaagcttgctcaggaa

SEQ ID NO: 27661 - DNA, 100 bp, Homo sapiens
catcactcgtcttatggaggtgtctgtaactgaggttttccctgatgaatttcacctccagactttgaatccttttcttcgggcctgtgctgagttacac

SEQ ID NO: 27662 - DNA, 97 bp, Homo sapiens
aagaagtggtacaggagagaatttgtgatgatgagctgatcttaatcaaaaacttggatttacactgggcaacgtggttggaatgtatctggctcag

SEQ ID NO: 27663 - DNA, 50 bp, Homo sapiens
aattatgggaagagatgttcaaggaagaccaacactgtcatctgaagttg

SEQ ID NO: 27664 - DNA, 105 bp, Homo sapiens
agaacctaagtctgtttgcaaagcacctgaactggtaaaataccatgaagattttgaaaaaacaaaggggagaggctttactcccgtcgtggacgatcctgtgac

SEQ ID NO: 27665 - DNA, 83 bp, Homo sapiens
gtgcagccgcgaggaggcgcgggaggtgttcgagaacgaccccgagacgcagcccctgtcaaagggaacaggaagcagtccac

SEQ ID NO: 27666 - DNA, 71 bp, Homo sapiens
cagggaataggagctggggagcccttctgcgccacaggaggatggcagactgtcagtatcatacataacag

SEQ ID NO: 27667 - DNA, 75 bp, Homo sapiens
agtgaagcaaaagcctttcatgattataatccacattcatctcaatggaaggatcctgccttaagtcaacttatt

SEQ ID NO: 27668 - DNA, 82 bp, Homo sapiens
aataaatccagtccagcgtgcgacgacttactggcttcatgggactggtgattgcagctggaagtgcccatgaccgagctgg

SEQ ID NO: 27669 - DNA, 82 bp, Homo sapiens
cgagcacccgcctccgggcatcttcaactgagctctttgttcaatgcctagccacctattcctacagacacggcagtggaaa

SEQ ID NO: 27670 - DNA, 100 bp, Homo sapiens
tctaatgtattggctagatccaaatcttcgatacgccacaagggaagcagatgtcatgtctctggatggtcgtcagatccgtgtggatcatgcaggcaag

SEQ ID NO: 27671 - DNA, 75 bp, Homo sapiens
ttaatcaacgattcttgaagttgaagaaaaggaagtgcattttcagctgagcacctcaaacttcaactccagaag

SEQ ID NO: 27672 - DNA, 100 bp, Homo sapiens
actcttggcatttggctttgcctttctggacacagaagtatttgtgacaggtatcagtttttggaagaagcttttcaaaatcagaagggtgcaattgaga

SEQ ID NO: 27673 - DNA, 101 bp, Homo sapiens
ctggggcccttgacacatgtcactgtgcactgctcttctcgctgggtcccatatagaaatcatccgtggccatgcagccttcacgagtgatcccaagccca

SEQ ID NO: 27674 - DNA, 100 bp, Homo sapiens
gacaccttcagaatcgactcaagagttacatgcatcagtgtggcccagagttgctcagaattggagcagagcctgagacgtatctgcagatcctgtcatc

SEQ ID NO: 27675 - DNA, 90 bp, Homo sapiens
ggcgcgggcaggagcctggcgaggatgcaccttcccctgccttggaaaggtgcccacggcaggggccacagggaagactttcgcttctgc

SEQ ID NO: 27676 - DNA, 82 bp, Homo sapiens
agagacgcatccgcgtgaccaccatcgcccgaaagcttcacaggctgctcaagaagccgagatcaatgccagaaaagccaaa

SEQ ID NO: 27677 - DNA, 100 bp, Homo sapiens
ccacgctccactcagggactcaaggtcacatccagtacatgtccagcatagttcgggagcacagacagaagctgcggaagaagtacggcgtccagtttat

SEQ ID NO: 27678 - DNA, 74 bp, Homo sapiens
gctaagagccttgaggcagaggcagctggaccgagctgcggctgctgtgggccaggcacctcattgagaagtca

SEQ ID NO: 27679 - DNA, 74 bp, Homo sapiens
cgtgcgccgtggaccaggagaaccaagatccaaggaattatatccagatcgagagacagaagattctgaaaggg

SEQ ID NO: 27680 - DNA, 51 bp, Homo sapiens
tgctgaagacggggtagccacgaggggtttgttaaagttgttaagaataag

SEQ ID NO: 27681 - DNA, 74 bp, Homo sapiens
gaagcggagagcaacagcgcgccggttttagattcaggaagactgaaagaatatgatgagccgtatgttttgct

SEQ ID NO: 27682 - DNA, 100 bp, Homo sapiens
gtgtcacactgccccggcggggaggacgagaatcggtgtgggaggccccgtctggcccctccccagaatgtgacgctgctctcccagaacttcagcgtgt

SEQ ID NO: 27683 - DNA, 100 bp, Homo sapiens
ccgccgacatgacggacaacatcccgctgcagccggtgcgccagaagaagcggatggacagcaggccccgcgccggatgacttggaagactccatgatcg

SEQ ID NO: 27684 - DNA, 50 bp, Homo sapiens
gaatatggagactgttcaatcaccagggaacgattccaggtgaagaatcc

SEQ ID NO: 27685 - DNA, 100 bp, Homo sapiens
cgtcaatcagagcgtcctgtgcgtggttggcacttaccatggttccccagaccagtcccatcaagtgactggtaaccaccagcagcctcctcagcagaac

SEQ ID NO: 27686 - DNA, 98 bp, Homo sapiens
caggctgcgtgctggtacgtgcttttcctcctgcagcccaccgtctacttggtagtatcttccccagcagatgttgctgaaaaagctgacagaattat

SEQ ID NO: 27687 - DNA, 95 bp, Homo sapiens
agatgaaccatttagagatcctgctgtttggccaccccctgttcctgcagaacacaggatattgctgcatatcgagctaaaggaaagcctgatgc

SEQ ID NO: 27688 - DNA, 76 bp, Homo sapiens
tacctgttaccactttcaaaagggcacaagttgaccagtctgtcttcgaggagctcatcaagggtcatctcccaga

SEQ ID NO: 27689 - DNA, 100 bp, Homo sapiens
agctggagagtttggagccctgcagactgtccgcctggagcgttacaaggccttctacattaccggctcgtttctggcgctggagacatcaaacttacta

SEQ ID NO: 27690 - DNA, 83 bp, Homo sapiens
tactggctgcaggggacgtggacggggacgtgttcgtgattttgacattgctggtcagtttgaccctatgatccccgatgcag

SEQ ID NO: 27691 - DNA, 116 bp, Homo sapiens
acggggacggattggttgttttttcctgtatgaagcggttggcaccactgaagtgaccgaatgaggattttcttactggagtgcaatgtgagagaagtacgagttgctgtggccac

SEQ ID NO: 27692 - DNA, 75 bp, Homo sapiens
tgggccgcaagaagggagccaagctgaaacacgaccctcctctgagtagcatcccttgtctgcattataagaaaa

SEQ ID NO: 27693 - DNA, 100 bp, Homo sapiens
ccagaccagctcggctacctggtactgagtgaagaaccaggccttccagtacgagtttggagccatgtatgcatggatgctgtgtgtcttcactgtcatc

SEQ ID NO: 27694 - DNA, 75 bp, Homo sapiens
atgaaagtcggggaagtccttatgcgaatcgtcagggcattagggaagctgactccacccatgtgttcaatccca

SEQ ID NO: 27695 - DNA, 82 bp, Homo sapiens
tgctgagcccgcggaaccgcagccatgatttggagcaagaggtggtggtggccttcccccgaagaaatttggtaatcctggg

SEQ ID NO: 27696 - DNA, 100 bp, Homo sapiens
gaatgttaactacgtggaaacatctgctaaaacacgagctaatgttgacaagcttaaagctcaaaatgatcgagaaacacaaagtttggatgtcatattt

SEQ ID NO: 27697 - DNA, 75 bp, Homo sapiens
gccacatactatccgtttgttcaggaaccaccagtgacagattggctggatctattattggcaaaggtggtcagc

SEQ ID NO: 27698 - DNA, 87 bp, Homo sapiens
agcgagtacacctgcaccatccaggtgagatttcaatggaaaaagtgaaggtaaagcgttatgtgtccggaaaaaggccagactatg

SEQ ID NO: 27699 - DNA, 75 bp, Homo sapiens
ccgatttaaagctgagctgcgaggaaaatggcggcgggagggtgtacagcaagctgtgattcctgggaaaactaa

SEQ ID NO: 27700 - DNA, 98 bp, Homo sapiens
gagctgctgaggatcgccaaaaagctggagaagatggtggccaggaagaacacgatcatcatggcaaaaccagctggtgggcccaagcctccaagtgg

SEQ ID NO: 27701 - DNA, 99 bp, Homo sapiens
gccggccatggtgcagacagaggagggctccccgaggactttctgaactccctggagaagatggaggacggcaagttgaaggtcaccctcaagtacccc

SEQ ID NO: 27702 - DNA, 83 bp, Homo sapiens
cggcgagcgcgagcggcgcgagaaactggcccgagataacttcttccgctgtggtgtgctgtatgaggactccctgtcctccc

SEQ ID NO: 27703 - DNA, 75 bp, Homo sapiens
tctcacattggcatagacaagattgcattcacagggtctactgagagcagcccgacggccatggaggctgaagag

SEQ ID NO: 27704 - DNA, 75 bp, Homo sapiens
gggagacgggtgaggtacaggctcagtctgcggccaagactccgtcctgcaagtgtctgctgcacagagctttac

SEQ ID NO: 27705 - DNA, 102 bp, Homo sapiens
gacaagttctggaggagatgaaagctttgtatgaacaaaaccagtctgatgtctatcatggtgaacttacttcagattgtgcgggaccactgggttcatgtt

SEQ ID NO: 27706 - DNA, 98 bp, Homo sapiens
cggcccgagacacaccaggccggcaggctgagaaaagcgagaccgcgtgcgaggaccggaagctcttcgtgggcggtcttgactggagcacgacccaa

SEQ ID NO: 27707 - DNA, 100 bp, Homo sapiens
acaaccaatatttccaggggatagtggtgtggatcagttggtagaaataatcaagtaacgcatccccaattaatagaattgtacaaatcagtggcaattc

SEQ ID NO: 27708 - DNA, 98 bp, Homo sapiens
tcgctggccgactgcgccgagctgcacgtcctcgaacgcgaggccaacagccccggttggctcaaaaacagaagttgctgagtgcaaggagaaattcg

SEQ ID NO: 27709 - DNA, 83 bp, Homo sapiens
ggccctggaggcggcgggagggccgccggaggaaacgctgtcactgtggaaacgagatgccctgtatccaagcccaatatggg

SEQ ID NO: 27710 - DNA, 98 bp, Homo sapiens
ttcgtgctgatggacaccgtctccatgcccgagttcatggccaacctcaggctcaggaaaaggggaagatagtgatgtactcagtataaatgcagatg

SEQ ID NO: 27711 - DNA, 75 bp, Homo sapiens
ctaggggctgcatcaccatcatagcagagctgtcagaagatgacctgttgagtcagtattctctttcatttacga

SEQ ID NO: 27712 - DNA, 100 bp, Homo sapiens
gttgtaaaagttattggaagaggtgcttttggtgaagtgcagttggtttgatctgtggatgaaatgaatcatgattttcaagctcttgcattagaatctc

SEQ ID NO: 27713 - DNA, 119 bp, Homo sapiens
ttatctgtggggaaaactgcaattttggagcagctcctttatggaaatcatactattgctgataccccaatgtccttctttgactttgtggttgatcctcattctttcccccgtacagt

SEQ ID NO: 27714 - DNA, 130 bp, Homo sapiens
tttgacttggaagcaatgtttgaacaaactcgaagaacagctgtggaaagaagttgcaaaacactggagcagcccgacggccatggaggctgaagagacgatggaatgccttcaggagttccctgaacat

SEQ ID NO: 27715 - DNA, 90 bp, Homo sapiens
cacaaagcctccaaccacgtcaacagaaggaggtgcagcctcccccacgtcaccaagtcaatggcatgcagctttatggaaaatctcgcc

SEQ ID NO: 27716 - DNA, 105 bp, Homo sapiens
acctgtctggagcaaggaaaagatccctggaatatgaagagacacagtatggtagccacacccccagggcgccagcctcccagtgatggacctgactgaactccc

SEQ ID NO: 27717 - DNA, 83 bp, Homo sapiens
cacttcatagaaaactatccaagaatgtgacttcctggagtagagtcttttttcactgagggatattagaaatggctactccc

SEQ ID NO: 27718 - DNA, 75 bp, Homo sapiens
gctcacctgcgctgtgatgcctgcagagctgtggcttaccagaattatatccagatcgagagacagaagattctg

SEQ ID NO: 27719 - DNA, 50 bp, Homo sapiens
catcacttcttctgtttgcagtggcatttccggagagttcttttgaagtc

SEQ ID NO: 27720 - DNA, 132 bp, Homo sapiens
ccaacattacagaccggtggatcctgtccttcatgcagtctctcattggcttctttgagactgaaatggcagaatcaaagccagctgctaccacacgctcttctggaggaggaggtggtggcggtggaaaac

SEQ ID NO: 27721 - DNA, 97 bp, Homo sapiens
cacatgtctgggaggataattgggatgatgacaatgtagaggatgacttctctaatcagttacgcccagatgacttactcaatgccttgaatgaggg

SEQ ID NO: 27722 - DNA, 80 bp, Homo sapiens
caagatggcgaccgagacggtggagctccataagctaaaggcaacaagattgacctggctgaaaggagagaggtttccca

SEQ ID NO: 27723 - DNA, 75 bp, Homo sapiens
ataaagtcaagtgtccattttctttcaactatatttgagcatacccagagtccctgtgaagcaggaagagtgagg

SEQ ID NO: 27724 - DNA, 100 bp, Homo sapiens
ccctgaccccttcttgccatcgccccagacatggggaacgcggcgaccgccaagaaaggcagcgaggtggagagcggagatgcctacatagaagagtgac

SEQ ID NO: 27725 - DNA, 84 bp, Homo sapiens
ctactttggattcacccacagcggggcggcggcggcggcggctgcggcccaatatagtgacaaagcataaatcatggacaccag

SEQ ID NO: 27726 - DNA, 96 bp, Homo sapiens
ctctgttacctcgtctttgagaaaagccaacttagacaagaggctgcttgaggaagatgaaggctcgtgctcccccacctcctggaaaggctgcca

SEQ ID NO: 27727 - DNA, 100 bp, Homo sapiens
gctgtggatgctttgaaatctgataagaaagtacggaccataataatcaggagtgaagtcccagggatattctgtgctgagacaaggtctcactatgttg

SEQ ID NO: 27728 - DNA, 75 bp, Homo sapiens
ggaaggatgcacaagttccaaggttacgtttcagtgttttattccaaacgtctatgctgctttgttcactgcagc

SEQ ID NO: 27729 - DNA, 100 bp, Homo sapiens
aaggagttctgaatcctgagacgacagtggtggccatcttcccatctcccatgatgtatgctggaccaactgagaagattctagtgttccagaaactcca

SEQ ID NO: 27730 - DNA, 82 bp, Homo sapiens
tgtggggagtttcatcctagcggaacactggaactattttggggctgatgagaatcttggtccagtggctgtgagcattcga

SEQ ID NO: 27731 - DNA, 98 bp, Homo sapiens
ggactgataacgaagaccaggaggcagacggggaagaggacgaaggaaccagctcttctgtccagagagcacttaacaaacaacagttgcagttactg

SEQ ID NO: 27732 - DNA, 88 bp, Homo sapiens
gagcacgagcggatcttgcaggagatcgagagcaccgacaccgcctgtgtggggcccaccctccgcggattttggagtatcagctaaa

SEQ ID NO: 27733 - DNA, 50 bp, Homo sapiens
cctcccgagtggctggaactacaggtgttatcccttttcatggattttca

SEQ ID NO: 27734 - DNA, 84 bp, Homo sapiens
tccagcgctgcctggaggagaatcaagagctccgagcaaattgtggctactaatttgccccctgaagatcaagatggctctggg

SEQ ID NO: 27735 - DNA, 75 bp, Homo sapiens
tgctttttggaggtcagtttgccagcagtcaagaaacttatggaaagagtgcctggtgaagaatgtgatgggatc

SEQ ID NO: 27736 - DNA, 101 bp, Homo sapiens
ggccgcgcactcgcctcagctgagcctgggcttcagggatgacttcttagggggcaggggaggtagtcgcccaggcgaccggcgaacaggcccccccatgg

SEQ ID NO: 27737 - DNA, 101 bp, Homo sapiens
ttaattctcagaagccgatcacaaggagatacaactcgtcaacgaatcaaattcagtgatgacagagtatgcaagagtcaccttctcaactgttgtcctca

SEQ ID NO: 27738 - DNA, 50 bp, Homo sapiens
ctgggaccagattacaagtctttccaagctggagggcagtggcatgatct

SEQ ID NO: 27739 - DNA, 100 bp, Homo sapiens
aaaactttacaatcgctgctgtgccatatactccaaatcttttaccaacttcaagcacatggaatcctgaagtgggtaaaactgattgacaactttgaag

SEQ ID NO: 27740 - DNA, 83 bp, Homo sapiens
gtcaccacgctcgtgctcatctcctactgtcccacggccaccgaagaggctctgccgacttccagttctggaacaagatggtt

SEQ ID NO: 27741 - DNA, 100 bp, Homo sapiens
ccttgtatgcctcaatttgctggatttaagcactgctgcactttatgagaggaggtggccaagttggagaagcacttgatgcttctgcggcaggagtatg

SEQ ID NO: 27742 - DNA, 75 bp, Homo sapiens
gaacttaatacagcaagaaagaccatcaagtttaccagtcaaatgggctctctcattcttggagtgaaaggattc

SEQ ID NO: 27743 - DNA, 75 bp, Homo sapiens
caaacgtatccccctgcggagacaggtaccaggatcatctatgaccggaaattcctgatggagtgtcggaactca

SEQ ID NO: 27744 - DNA, 75 bp, Homo sapiens
gctcagtctgcggccaagactccgtcctgcaaggtgaaagatctggcttctgtctccttgaagaatcctgtccgg

SEQ ID NO: 27745 - DNA, 101 bp, Homo sapiens
atttacctgggtgagacagcttgagccccatcgtggattccaagacatccctgctgagagagccaaggaagcagacagtatgagcatgaccagtggagaag

SEQ ID NO: 27746 - DNA, 100 bp, Homo sapiens
caacaggtacactgcctgctgccagtgagctgcctgcgtcccaaagaacagaaattcattgtacaacacacgaaccccttcaatacctggataggtctca

SEQ ID NO: 27747 - DNA, 90 bp, Homo sapiens
cgcggcggcgcttggcagccaggagctctgcattgaaggcactgggggcacggccgagcagatgaggactgtgtggacgaccgggccaga

SEQ ID NO: 27748 - DNA, 82 bp, Homo sapiens
gagcgtcacggcgtacgccctcatggggaaaatctccccggtgactttcagacaaatttacatgtattggagaccagaccag

SEQ ID NO: 27749 - DNA, 75 bp, Homo sapiens
gcagtttccagtggcagcagtacagcattactttatagcaaacgactgactatgtcttcagcagtggtgcagtta

SEQ ID NO: 27750 - DNA, 100 bp, Homo sapiens
gcggaagtggccggcgagcccggtccccgccggcaccatgttaaatccagatgtgaatgttttccaacggaaatttgtgaatgaagttagaagatgtgaa

SEQ ID NO: 27751 - DNA, 75 bp, Homo sapiens
gctgaatgtgttactccattgctgaggagtgggtgttccctcaggtcaatgtcacgaagatgggcagttggggcc

SEQ ID NO: 27752 - DNA, 83 bp, Homo sapiens
caaaatgcaaaaaaggaggccaaagactttgcacctgggagtcccatccagagaccacggagctggtggttttgcagggcagg

SEQ ID NO: 27753 - DNA, 90 bp, Homo sapiens
gggcaaaggatccgtctgaggcggcgacgagtgtgacagcctcatcaagggtaagaaatgagcctagtcaccaagaactccacccccaga

SEQ ID NO: 27754 - DNA, 74 bp, Homo sapiens
cccggggctgggcttcgtgtcctgcgttccgggagcgccaacccctccagccaactcctgtatgagttctacac

SEQ ID NO: 27755 - DNA, 100 bp, Homo sapiens
aaaagaactgctctccatggagagagtaactctgtccttattatcggaccccgaggatcaggaaaaactatgatgcaccagcaaggaatactgaagaccg

SEQ ID NO: 27756 - DNA, 98 bp, Homo sapiens
ctggccgccgatattcaccaagcgcttcgctacaagctccttgacctgtttatggtttgggattggtctacttacctagctgattatgggcagccagc

SEQ ID NO: 27757 - DNA, 50 bp, Homo sapiens
ggaccagccggcgcaagcgggcgaagataacccaggaggctggagaattc

SEQ ID NO: 27758 - DNA, 95 bp, Homo sapiens
tttctcttcattgacagacagcacttgcagctaacccactcctagaagcctttggaaatgcgaagactgttcgcaacaataatagcagtcgattt

SEQ ID NO: 27759 - DNA, 82 bp, Homo sapiens
cggagcgggagtgttcgttgtgccagcgactaaaaagagttttccacctatttccctggatattttgatggtcagtactggc

SEQ ID NO: 27760 - DNA, 75 bp, Homo sapiens
gcaggtcgagaccccaggcacagagaccccatcctacaaggacttgaaagaggagattgatattcgactctccag

SEQ ID NO: 27761 - DNA, 82 bp, Homo sapiens
gaagacttcaccattttcataaagaaccacatccgtttccccaaattcaacttctccaatgcctccggagccagcgtggtgg

SEQ ID NO: 27762 - DNA, 89 bp, Homo sapiens
atgaggctctgcggctggtccaggccttccagtacacagacgagcatggggaagtccagggaccttgacccagcccctctcagcagacg

SEQ ID NO: 27763 - DNA, 50 bp, Homo sapiens
gggccatggccgccgccgatgccgagacatgcgtcgggatgtccaggaaa

SEQ ID NO: 27764 - DNA, 75 bp, Homo sapiens
gaacactggcctcatatttgcacgataacgaggaaatattctgaaatggatcccaaatatttcatcttaattttg

SEQ ID NO: 27765 - DNA, 80 bp, Homo sapiens
cagccttagactatttttcaaacagtacatggactatatcgcacaacaggtgctagttttgagaaggcccaacaggagtt

SEQ ID NO: 27766 - DNA, 149 bp, Homo sapiens
gcgcacagcagacattaaggagtcagccgcctacctggccctcttgacgcggggcctgcagagactctaccaggaattgcgcagtacctggccacttatggccccatcaccgtgaccatcaacatgaagccccttcaggtgagatgggg

SEQ ID NO: 27767 - DNA, 75 bp, Homo sapiens
tcctcttcctatccaatccctgccttttgagtccaggtgccgcagcaatggcgctgagttcctctgctggagttc

SEQ ID NO: 27768 - DNA, 75 bp, Homo sapiens
aaacagtcttccgcaggaaggagatgtggtcaaaatgcagatcttcgtgaaaacccttaccggcaagaccatcac

SEQ ID NO: 27769 - DNA, 96 bp, Homo sapiens
gtctttgtgtcctgagatcaaatggcacttcattggccacctacagaaacaaaatgtcaacaaattgatgggctggagtgcaatggcgcgatctcg

SEQ ID NO: 27770 - DNA, 83 bp, Homo sapiens
gcggaacctgcggggcagaggcggcggccgcagcggcgcagctgatagcaggaacaggttcatgtgtgcccagctgcccaacc

SEQ ID NO: 27771 - DNA, 82 bp, Homo sapiens
caactgcccagcgtgaccagtggccacctctgcagtgtcttccacaacctgggtcacggtctagatcacattctcgatccag

SEQ ID NO: 27772 - DNA, 100 bp, Homo sapiens
ccatgaccgagagccggacaatggcaaggaggagcaggaacgatgaaggatttgggggcagagcacttggcaggtcatgaaggggtccaacttctcgggt

SEQ ID NO: 27773 - DNA, 100 bp, Homo sapiens
gacagcattctattaaaaatgggtcaggcgtgaagcatcacattgccagtgacatagcttcagacagtgagtgatggattggaactgagaccgaaatata

SEQ ID NO: 27774 - DNA, 75 bp, Homo sapiens
acaaggcttcttgtatcttcagcagcagcagacgtttggaaaggcggaattctccacgagttttgagcagcctcg

SEQ ID NO: 27775 - DNA, 82 bp, Homo sapiens
ctttctggcctggaggctatccagctgtaagagacttaaatgaatatgactgtcacacaaaaaaggtgtgtcctacttcaac

SEQ ID NO: 27776 - DNA, 100 bp, Homo sapiens
atggcggatgccctgcagtacctgcagaaggtctctggagacatcttcagcagtactataaccaagagtggacattgtgggatcgctttgaggtacaagg

SEQ ID NO: 27777 - DNA, 76 bp, Homo sapiens
gggacatttctgaagcgagcgtcttcgatggtaagaatgattgatgttggctgatattggagtgctcattcacatg

SEQ ID NO: 27778 - DNA, 75 bp, Homo sapiens
tggaaaagttgcagtttgaagaggaggacttttactatactggcaattgctggagaagattttgcaattgttgct

SEQ ID NO: 27779 - DNA, 83 bp, Homo sapiens
agcgagctcagcaggagctggctgcggagcggcgagggacctcgcagggagccatccgatgaggaggacttcatccaacccag

SEQ ID NO: 27780 - DNA, 100 bp, Homo sapiens
cgccttcccacatctctgtggaagactccccactccaaagtagcctggtgtggaaattgctggacgaaagggtcacaaatggatacttttcatggggcag

SEQ ID NO: 27781 - DNA, 75 bp, Homo sapiens
gtgccatgcacaaggctgtggtggatgcaggaatcactaccaagcttctgaccggatatcccagagaaggaagga

SEQ ID NO: 27782 - DNA, 100 bp, Homo sapiens
tacgtggagcggaagaacagcctgaagaagggctccctcgtgaagaacctgaaggacacactagttgcagaactgctttattcactgcagtggtgtgaag

SEQ ID NO: 27783 - DNA, 80 bp, Homo sapiens
acaatgggacactgagctttgtggaagcatttggcggcataccaccctgcactgtgaggcccagttccaaggctccggca

SEQ ID NO: 27784 - DNA, 99 bp, Homo sapiens
gggtaatgttctacaaggaggtgaaggacaagctcctacaaggcaggcagtattgggtgcaggtaaaagtgcagttttaaagtgtctcctggatattca

SEQ ID NO: 27785 - DNA, 74 bp, Homo sapiens
gctcatctggaattttgccgatttcatgactaaccagtcccagacttggagctgaagaagctggaaacatggaa

SEQ ID NO: 27786 - DNA, 101 bp, Homo sapiens
cctaggaggactggcttgtcttattgtaatgtttcttccagaaaagaaaggcaggaaaagttattccagttggttacagagttgcaacctgcttgactgaa

SEQ ID NO: 27787 - DNA, 50 bp, Homo sapiens
cagaaacgtaaagaaatgcaattgagagacatctgaacagctgacccctg

SEQ ID NO: 27788 - DNA, 83 bp, Homo sapiens
cgcgcctccatctgggccatggatgggtgagaagccctaccactgcaactgggacggctgcggctggaagtttgcgcgctcag

SEQ ID NO: 27789 - DNA, 90 bp, Homo sapiens
catcagtgcccttgtggcgaatggggctcacgtcgagaaaacacagatcctggtgccgaacatgaggacagggcaggccgaaggagaaag

SEQ ID NO: 27790 - DNA, 75 bp, Homo sapiens
tttccccaggtctctggaggttgcaggctcaggctctgctcagcggggcttaccactcttctctcatggatcctg

SEQ ID NO: 27791 - DNA, 98 bp, Homo sapiens
ctgaattataacaagctgcaggagttccctgtggccatccggaccctgggcagactgcaggaactcttcatggaagctattgagtttgcccaaaaggg

SEQ ID NO: 27792 - DNA, 82 bp, Homo sapiens
tctgtcccaggctgttccctaagaaggtctgcccaggactcagttgggccatatggtgctcttcccagtctggttcctgtac

SEQ ID NO: 27793 - DNA, 100 bp, Homo sapiens
gtcactgcagctttaaaaagcagtgggctctggaacaacacggtgttcatcttttctacaggctttgcacttctgggaggacatccttgttttcttacca

SEQ ID NO: 27794 - DNA, 100 bp, Homo sapiens
ccggggcctgttgcctgggggcacacaggtgctggatggtacctcggggttctctcctgcccccaagctgggagcagtttttgcaagaaaggatcaaagt

SEQ ID NO: 27795 - DNA, 71 bp, Homo sapiens
cagcctgaacggagtgtgcgacggattgggagaggacacagagactcttattaaggcagtttatacattat

SEQ ID NO: 27796 - DNA, 95 bp, Homo sapiens
gatggcagccccctgtccccattctggcaggacacagcgttcatcacactctctcctaaagaagggctttttggtggtgctggagttggcaagac

SEQ ID NO: 27797 - DNA, 75 bp, Homo sapiens
cagtctctgatcgaaggggagtttccacagtgattgatgctgcctcaggagggccaaacatgtgggctattacct

SEQ ID NO: 27798 - DNA, 75 bp, Homo sapiens
aagaagatgatgctccaagaacaatagcttgccctcataaagtcggaggagcggccggtgaagaagcgcaaggtg

SEQ ID NO: 27799 - DNA, 100 bp, Homo sapiens
catacccactgtttactacaaatgcttgctctactagtggaaattctaatctttcacagacacagacagttgaatttctgaatgaaaagctggaaaaaag

SEQ ID NO: 27800 - DNA, 85 bp, Homo sapiens
cggaaatagaggcttcgtgtttggaggcagatatcgaattgagtttgtgacgggcaccaaaaaaggcaccacgaccaacgccacg

SEQ ID NO: 27801 - DNA, 100 bp, Homo sapiens
gcagaagaagaaaagaggagagttgaaagagaacaggaacatctagatatagcaatcaaacttttaccagaggaaccctttctatattacctcaaaggga

SEQ ID NO: 27802 - DNA, 90 bp, Homo sapiens
caaccataatagaatgtctacattcctgttctctttgttcccagacactggtggcattacgtagaatccattgatcctgtcactgtcagt

SEQ ID NO: 27803 - DNA, 100 bp, Homo sapiens
cgggaccgaaacctagccccggacgagaagcgcagcaacgtgcggtgggaccacgagagcatgttcccgctgcctgtcaccaacgggaagggccggcccg

SEQ ID NO: 27804 - DNA, 90 bp, Homo sapiens
ccgacgccatgaagatcaaagatgccaagaaaccctaatttttccctagattggtgtaaacagccagacgtgggccttcccaaacccgac

SEQ ID NO: 27805 - DNA, 83 bp, Homo sapiens
gttaaaagtggagcagcacgtggagctgtaccagtgcctccggagccagcgtggtggccatagacaacaagatcgaacaggcc

SEQ ID NO: 27806 - DNA, 98 bp, Homo sapiens
tgacagagagcaagtctgctcatgtgcagactcagactggccaaaattcaatccctgctttagctcaggtcaagaaagtagtgaagactgtgacaaca

SEQ ID NO: 27807 - DNA, 100 bp, Homo sapiens
cgacccgtacttgaagccctacgccgtggacttccagcgcaggatttttagactctgaggagcagttggagctaatccacattatggaaatggaaaccac

SEQ ID NO: 27808 - DNA, 100 bp, Homo sapiens
cttttgtgaagcggcagctgaggagactccggcgctcgccatggccgacgaaaagcccaagattggttcgagtgagtaaaaactaccgatcagtcatcag

SEQ ID NO: 27809 - DNA, 90 bp, Homo sapiens
caccctcctgcctgaggaggcccagccttcctatctgctggcctcggcatacttgcaccctcagagacctaccccctacctacaaccagc

SEQ ID NO: 27810 - DNA, 100 bp, Homo sapiens
caggaacatcttggatttttacagcctgcctagggtagttaaaagacgagtgaatgctctcaaaaacctgcaagttaaatgtgcacagatagaagccaaa

SEQ ID NO: 27811 - DNA, 90 bp, Homo sapiens
aaagaaatgagatcgtgtttcatttcaggaagatatatgcgtcaggtatatgaatgacctaaaggtacaaataaagacggagagagaaca

SEQ ID NO: 27812 - DNA, 50 bp, Homo sapiens
cagttcagcctattccttgttgtgtttgcacttgtgacagcagtatgctg

SEQ ID NO: 27813 - DNA, 88 bp, Homo sapiens
gtccaactacttccttaagatcatcggctgttttgctgcagcttctgaagtgttaaagcacttgaaggaacgatttccgcctaatagt

SEQ ID NO: 27814 - DNA, 72 bp, Homo sapiens
ctgggtccgctgagcggggcgacccgaggttctctttgtaaagaatccttttctggtcaagtttcttcttca

SEQ ID NO: 27815 - DNA, 75 bp, Homo sapiens
gatgttagcctgctgcctgccttcgatgctgtgggggtgggaaccgccaaacctctcccttctttttgacttcac

SEQ ID NO: 27816 - DNA, 90 bp, Homo sapiens
gtggtgctgaagcacatcccctcaggcatcgttgtaaaggcagagaacatttataatgatgaagaccctgaaggaagcgtggatccagaa

SEQ ID NO: 27817 - DNA, 100 bp, Homo sapiens
gccggcgggaccagcacaggcggcgttttctccttcggaacgggagcgtctagaaaccacaacaaaggtgcttgcccatggctcctcgcttccctctgcc

SEQ ID NO: 27818 - DNA, 74 bp, Homo sapiens
tgaggagactccggcgctcgccatggccgacgaaaagcccaaggagacgcaggtcagaatggaaatgggctgca

SEQ ID NO: 27819 - DNA, 126 bp, Homo sapiens
tgagacagtattacacactgctgaaccaggccccagacatgctgcatagcttcttggacacttaatgattgttggcaagaaatgtgctgctgatctgggcctgaataagggttatcgaatggtggt

SEQ ID NO: 27820 - DNA, 80 bp, Homo sapiens
agcggctgacagaggggatgcgagtattctaccttgtaaatactgttatttgtatatactgtaaatgatgacatcggtgg

SEQ ID NO: 27821 - DNA, 100 bp, Homo sapiens
ccttggtggaggtccacagcatggaggcccagagcaagagaggcatcctcaccctgaagtaccccatcgagcacggcatcgtcaccaactgggacgacat

SEQ ID NO: 27822 - DNA, 98 bp, Homo sapiens
ttcaagcagtggattaatctgaaaaagctccaaagacaacaggccctccctctgccctcccgtctgtgagctccctgcccagcaccacctcctgcact

SEQ ID NO: 27823 - DNA, 100 bp, Homo sapiens
atctgtggtctctggagctgtggttgctgctgtgatatggaggaagaagagctcaggtgattatcctgaaccatccaggccaaataagcgccggctatgc

SEQ ID NO: 27824 - DNA, 90 bp, Homo sapiens
ggccgggggcgcgggcggcggcgccggcaggaagatcgataaagaattggctagtggtgaatactttttgaaggcaaatcagaagaagcg

SEQ ID NO: 27825 - DNA, 75 bp, Homo sapiens
aagcacaggaatctcactctgttaaagctggtctgttctaactgaggcatctccttggaaacaatgccatctttg

SEQ ID NO: 27826 - DNA, 75 bp, Homo sapiens
ctgccagtgagcctcaggctttaggaactgaagaggttatgatgtgattgctcaagcccaatctgggactgggaa

SEQ ID NO: 27827 - DNA, 83 bp, Homo sapiens
tcagtagctgtcagagggaaagactgtgcagtaattgtcacacagaagaaagtacctgtcttcaggtcaagttactcttggag

SEQ ID NO: 27828 - DNA, 100 bp, Homo sapiens
ggctagtggagggccagctgcctgtgggggctggacatcgtgttaatgttgaagaaggaaaatgcggaagtcgtcatttgacaagttttataaatgagta

SEQ ID NO: 27829 - DNA, 100 bp, Homo sapiens
ctcattcttattgttttattagggcaatttgtctcaataaaagcccaggaagaagacgaggatggacaaaactttcggtttgaagaataagaaaggagca

SEQ ID NO: 27830 - DNA, 89 bp, Homo sapiens
cgcggggtctcgcggcgcctggcagcagagaccaccagaagggaaacacttcaagttgaagaagatgatcgacctgagttaccatggtg

SEQ ID NO: 27831 - DNA, 75 bp, Homo sapiens
gaggccaaggccttccaggactatcttgctgagcgagagcgagaagcggcccttcgtggaggaggcagagcgcct

SEQ ID NO: 27832 - DNA, 100 bp, Homo sapiens
accaaagaggactttcgctatcgatctcctcattcaggtcccaggtgtgtgatggcggctgcaatctgtcttgtgggtattaatgcaatcttcagtggtg

SEQ ID NO: 27833 - DNA, 83 bp, Homo sapiens
tcccccaaatgtctgactctgactctcggactgagaaacgcaagggactttgaacatgtcggggatcgccctcagcagactcg

SEQ ID NO: 27834 - DNA, 83 bp, Homo sapiens
atccattgaaaattttccttggataggaaaggtaagtccatggcctacatgcgcggcatgtactttcgcatgaaggatgaggt

SEQ ID NO: 27835 - DNA, 83 bp, Homo sapiens
caaggagctaaagcagcgtgcgttcagccctgggggaaagtacggtggccagactttaaccaggaagcttatgttggagggac

SEQ ID NO: 27836 - DNA, 90 bp, Homo sapiens
gccagctgccatgagcgagcgcctccgtcccagtatggtttgaagtggtgaacatggatttttctcggcttcacatgtacagtcctcccc

SEQ ID NO: 27837 - DNA, 83 bp, Homo sapiens
ccagcttcggaacaagagaccctggatgctggatgagtactttgaggagcagatgaaggagatcatccgaatgtgttcccacc

SEQ ID NO: 27838 - DNA, 83 bp, Homo sapiens
gtggagatggcggctcagaagataaacgaggggctggaacacctcgccaaagcagagaaataatggagtcatcagaacccact

SEQ ID NO: 27839 - DNA, 100 bp, Homo sapiens
gcctgacagctctgcggctcgggccctgagccacatgaaatgaagatcacctctgcctatctacaggacattgagaatgcctataagaaaacctttctcc

SEQ ID NO: 27840 - DNA, 87 bp, Homo sapiens
atacaggaaaaactttccagccattgagccccccaagatgaacccagtggtggagccactgtcctggatgctgggcacctggctgtc

SEQ ID NO: 27841 - DNA, 100 bp, Homo sapiens
cacgacccacgagatcatggggcccaagaaaaagcacctggactggaacaatggcaaaagcctttgatgaagcattttcctctgagacaacagcggcaat

SEQ ID NO: 27842 - DNA, 83 bp, Homo sapiens
accaaacagaatggacaagcttaataaaataaccgtccccgccagtcagaagttgagctgtgttggggtggaagaggaggagg

SEQ ID NO: 27843 - DNA, 100 bp, Homo sapiens
actttaaaaatcgccaaaaattacttggagcaaagggcagtcggcggagcttcgccaaggctggcgcagtcgccctgggcgctgcctatggcacagccaa

SEQ ID NO: 27844 - DNA, 71 bp, Homo sapiens
actgttactggactcacgcagctgatgtctccgtcatgaaccaggtgtaccaggacaacgtgtactctcca

SEQ ID NO: 27845 - DNA, 50 bp, Homo sapiens
caccacttacgaaatcagggtcaaggcccagacatgtccgtccttgtaag

SEQ ID NO: 27846 - DNA, 100 bp, Homo sapiens
aagtttgctttattgatattgcctgcgatgaaattccagagcgctactacaaagaatctgagggacacaactgactgtggaagtccaccctcgagatgcc

SEQ ID NO: 27847 - DNA, 90 bp, Homo sapiens
gtggcagagtgtaatgctgtccgccaggccctgcaggacctgctttcggagtacatgggcaatgttaatccctatatcctgaagaagaac

SEQ ID NO: 27848 - DNA, 83 bp, Homo sapiens
cctgaccccaagattccagatgttcctgtggaccccagtccagattccgaagaggctcaatctgtaaatccttctagtgttga

SEQ ID NO: 27849 - DNA, 83 bp, Homo sapiens
ccaagaaggaagtcatcatgggccggcctggaacagccgccaccggcacggccaggccagcatggtggaccacttacttccag

SEQ ID NO: 27850 - DNA, 100 bp, Homo sapiens
ttgggctcgcggcgagcggacggggtcgagtcagtgcgttcgcgcgagaccctacagcttggggcctgggctcctctgaccatcctcattgagaaaggaa

SEQ ID NO: 27851 - DNA, 100 bp, Homo sapiens
gggatgcagcgcgggggtcagagagcgaccccaacagggtagacgtttgtttcgacgccggaccgcgtaagagacgatgatgttgggcacggaaggtgga

SEQ ID NO: 27852 - DNA, 100 bp, Homo sapiens
gtgaatctcaccaacaagttgtggcagtgggtcaacctttagcagtccagcctcaagggacagtaatgacgacaaaaggagcttcatctttcaagataac

SEQ ID NO: 27853 - DNA, 75 bp, Homo sapiens
catgaagactaccacatgatggttttcaagctagaaatgcccttcttcagtcaaatctttctcaaactcagctgg

SEQ ID NO: 27854 - DNA, 50 bp, Homo sapiens
cacagcatcctccagcacctcagaatggcccggagttgctgcctcgcgtg

SEQ ID NO: 27855 - DNA, 50 bp, Homo sapiens
tgtggtctctgcacctcctttcttgtatgtggtagaagaccaaagaagag

SEQ ID NO: 27856 - DNA, 99 bp, Homo sapiens
tctgagagaattcacgagcaggttcgggaccggcagattatggtaggagaaggaattctctactgttgcctctccaaaagaagaaatggggtcggacta

SEQ ID NO: 27857 - DNA, 100 bp, Homo sapiens
tcttaagctgcctcattcttccatcctcagaacagtcccctttacttggtaaatcacggcgagagtggaccagtcagatgcaacaggtgcaaggcctaca

SEQ ID NO: 27858 - DNA, 100 bp, Homo sapiens
cggacacctggggcggttccagacaggcatttctcattgcaattgtggtaccagatgttgagacattatgttcctgggcccaaaagagaggatttgaagg

SEQ ID NO: 27859 - DNA, 98 bp, Homo sapiens
cgccttccctgcaccatgctcatagaggatgtggatgccctcaagtcctggctggccaagttactggagccgatccggcctcagaaagtgtgtttgtg

SEQ ID NO: 27860 - DNA, 100 bp, Homo sapiens
ccatgacgataagcaaccaacgttcagagcactctatgaagcaatacgggatggcacaagagactatagtccccggcagatggcagttcgcgagaaggtg

SEQ ID NO: 27861 - DNA, 100 bp, Homo sapiens
caaaaatcccatctaccgcaactctcagttcgagagtaaaggctgttcgctgctatgaatctctaatcttaaaagctgaaggaaaagtggagtctgattt

SEQ ID NO: 27862 - DNA, 89 bp, Homo sapiens
ttctgagcaacagatctaaagccctggtggcctatatgaacccaatagcaatggcgagatcaaggggtccaatccagtcttcagggcca

SEQ ID NO: 27863 - DNA, 51 bp, Homo sapiens
agcagcggaaaatgatccagtcacagaataagttttacatcgaaaccaagc

SEQ ID NO: 27864 - DNA, 107 bp, Homo sapiens
aggtacagaaacacccccagttcaaggatcttcacacctggatttaggcctacacctgcaactaccccagagccaagagctgggtagagctgcaaggacaccgcctg

SEQ ID NO: 27865 - DNA, 101 bp, Homo sapiens
tcaatgctgctgtgtgggaagaagatttgtaaagaaaactcttaggtgtgcaactgaggaacatggctcaagaaactaatcacagccaagtgcctatgctt

SEQ ID NO: 27866 - DNA, 90 bp, Homo sapiens
gtggagtgcgccaaacatgaactgctgcaaccatttaatgttctctatgagaaggaggtaatgggggcctagcagacatcttcacggtct

SEQ ID NO: 27867 - DNA, 83 bp, Homo sapiens
agcagttctacaaggcgagccagagatgttcgacaagcagcaggcgaacaccatcttctggagcccccaaggacagttcgtgg

SEQ ID NO: 27868 - DNA, 100 bp, Homo sapiens
cgcagatcgcaggaccgtggagaagacttggaagctcatggacaaagtgggaaatcctcattgacgattcaatttgttgaaggccaatttgtggactcct

SEQ ID NO: 27869 - DNA, 100 bp, Homo sapiens
gggacctagcgctgcagagacacaagcaccacatgggcgtccgctatattgaggtgtatccagggcagcagtatctgcaaggaggccagtatgcacccag

SEQ ID NO: 27870 - DNA, 100 bp, Homo sapiens
ttcaccacaaaagcgaaatgggcacaccacagttaagatgtcccgtgaagtccaggtgtttgagataacagagaacagcgccaaactccactgggagagg

SEQ ID NO: 27871 - DNA, 100 bp, Homo sapiens
gcagattttaattcccactctagattctgagactccagtacttcacttatttgggaaaaaattgaagagccatccatagattgtcatgaatttgaggaat

SEQ ID NO: 27872 - DNA, 50 bp, Homo sapiens
tgataattgggcctccaagaatgctcctgccagcatttgtcttcattggg

SEQ ID NO: 27873 - DNA, 100 bp, Homo sapiens
gccaggagccaggggcccagaagctgagatctgtatctgtggacctgaatgttgatccctcgcttcagattgacatacctgatgcgctcagtgagagaga

SEQ ID NO: 27874 - DNA, 100 bp, Homo sapiens
caatataaagtttcatcaacttccataccgggagatggagcatttgagacagggggtgaatctctacattaagaacttggatgacactattgatgatgag

SEQ ID NO: 27875 - DNA, 74 bp, Homo sapiens
gcagacacctcgctggagaccccatgattgatcgtgtcctgtgctgaagatgtttccggaacaacagaaagagg

SEQ ID NO: 27876 - DNA, 51 bp, Homo sapiens
tgatgagatagacatctcctcctacacttcgagagctgtgcccaggagtga

SEQ ID NO: 27877 - DNA, 50 bp, Homo sapiens
tgagaatgtatttacatctgtaaggcccaagtctgttttggtggtctgag

SEQ ID NO: 27878 - DNA, 100 bp, Homo sapiens
cctcttgtatgaacttggagacacaggacatggtctgctatacagctcagactctcgtccgaatcctctcacatggtggctttaggaagatccttggcca

SEQ ID NO: 27879 - DNA, 100 bp, Homo sapiens
agtagttcaggaggggagtctgatattgaagaggaagaactgaccagagctgatcccgagcagcgtcatgtacccctactttgctaccaggacttgctgg

SEQ ID NO: 27880 - DNA, 80 bp, Homo sapiens
cgcacctcggggacattattgcgcgtggaacggctgcttttggaagaacatccagtcatggataaaaatgagctggttca

SEQ ID NO: 27881 - DNA, 100 bp, Homo sapiens
tccaaagtgaaggatatggctggagactggcactgggctctgagggtggtcttttggtgccttaatgaagagtcggattttgaagcagccttcagcgtgg

SEQ ID NO: 27882 - DNA, 82 bp, Homo sapiens
ctgtcctgtcctcgtccgtctcatcaaagctgaggagaagaaagtggaagcaaagaaagaagaatccgaggagtctgatgat

SEQ ID NO: 27883 - DNA, 98 bp, Homo sapiens
atctaattatgacctccttcgccacttacagtatgcaacacattttcctatacctctgattgtctacaaagcctggctctgttcccagtattttgaag

SEQ ID NO: 27884 - DNA, 71 bp, Homo sapiens
gcgcctgctgccgggttgcgctccgtgcacctcttgcgggtcttagtggtgcaatggctagtataagcgtg

SEQ ID NO: 27885 - DNA, 100 bp, Homo sapiens
aatgagcaactgcccatgctgggccggcgccctggggccccggagagcccaactatggaaaccagcaatatggaccaaacagccagttccccacccagcc

SEQ ID NO: 27886 - DNA, 100 bp, Homo sapiens
tggtaggaggagttggcggaagcacttggaactcctttataagtgtcagctgtgaggaccgtataatagacgctggccccaaaggaaactactctcgatt

SEQ ID NO: 27887 - DNA, 90 bp, Homo sapiens
ggtgctttgtgaggtcatcacggcgcgacgacgagctgcagttgtgggcaccttgtatgcgaatggagatgtatgcatttcgattcttca

SEQ ID NO: 27888 - DNA, 80 bp, Homo sapiens
ttaatggtctaatttatgatagtgtgaagagtgccagtgctggcagcatggggtctgcatgggattactggaagaaaatg

SEQ ID NO: 27889 - DNA, 100 bp, Homo sapiens
gagcgggaccccgagcaccgggccctctgcgacctggggccctgggtgaagtgctccgccgcccttgcctccagaactgataaatttcaaacggaagaga

SEQ ID NO: 27890 - DNA, 75 bp, Homo sapiens
ggatcatggccgcagccgctctggggcaggttccccaaggactctagcacctggactgtggaccaccagctcctg

SEQ ID NO: 27891 - DNA, 82 bp, Homo sapiens
gtggggagatgaacccaacctagtgggtgtaatacatcatgaactgcagggaaataatgaagatgtttcattttcaagacca

SEQ ID NO: 27892 - DNA, 87 bp, Homo sapiens
gaagtaatatctggactttgaaattatctaaagcgggaagccagtatctgtcatatgctgaaacatccacacattgtagagttattg

SEQ ID NO: 27893 - DNA, 74 bp, Homo sapiens
ccgggtcctgagaaaactcccctttctggctcatgcgctgtatgtccaggcccctcggctccctcccagatccc

SEQ ID NO: 27894 - DNA, 80 bp, Homo sapiens
atcacaaagatcctggaatatataaatgtgttgtttgtggaactccattgtttaaggactactggcattcagtgatgtgg

SEQ ID NO: 27895 - DNA, 100 bp, Homo sapiens
ccggtgttcccgcgctttatcaagattatcgagagaaccatggagtctggcagtaccgccgccagtgaggaggcacgcagccttcgagaatgtgagctct

SEQ ID NO: 27896 - DNA, 75 bp, Homo sapiens
gggcgcggaggcgaccgccatggcgttcctcaaactccgtgaccaggtgctactcgtgagcagtagtcgccatcc

SEQ ID NO: 27897 - DNA, 100 bp, Homo sapiens
gccaacgccccggtggagaagctgagatcatgacaagatgtttaagatgagtgaaaagatattactcctgtgtgttggagaggctggagacactgtacag

SEQ ID NO: 27898 - DNA, 97 bp, Homo sapiens
gagcagaagactctgagcccccgaactctgcaaagcctccagaggacataccacctccaggatcaggatgcagagagctgagaaaacagaagtcctt

SEQ ID NO: 27899 - DNA, 88 bp, Homo sapiens
cgattaggaggcctggttacagtgttgtgcttctttttcaatcatggagagttattcaagcggagaaatgttgctacagcagaagaag

SEQ ID NO: 27900 - DNA, 90 bp, Homo sapiens
caatgatggggcagcaagtggccaagaacccttctctgaagcaacagctcttctcctacgccattctgggctttgccctctcggaggcca

SEQ ID NO: 27901 - DNA, 90 bp, Homo sapiens
gatctctggtgcaggaaaaatgttcactgcaggccaaacagtccttagctacgctgaccaaggacgtccccaagcggcattccctcgcca

SEQ ID NO: 27902 - DNA, 96 bp, Homo sapiens
cagcgctcccacccccggcggcggcacgatgccctttgacttcaggagggccaattcctgtccccccagcagcatggcatcgtgtgctgaaccctc

SEQ ID NO: 27903 - DNA, 100 bp, Homo sapiens
tgaaagtcagtttctgaggaatttcatcagacttatgaaaatatgcatcagtttaatactgtcttggaattcatgagatggaagcataggtcaaagctgt

SEQ ID NO: 27904 - DNA, 80 bp, Homo sapiens
tctcacgacgggccgagcctgccactgggctttgaccacgacctttgaagagcttcattttgagatcaagccccacgatg

SEQ ID NO: 27905 - DNA, 89 bp, Homo sapiens
gtattcacacagaccacaatacactgaaccggaacatgaacattttgcagtactgcccctcttccgacatgtggacgctctttgaaaca

SEQ ID NO: 27906 - DNA, 90 bp, Homo sapiens
agctctcctccttcttcctcaactatctcgctgacacgcagacggccgaagccctgcagcccacgctacagccggagatgcagctcgagc

SEQ ID NO: 27907 - DNA, 77 bp, Homo sapiens
cgcttcagccttcggttaaagacggacttattgtatatgaagactcacctttgggttctgagcaaggttcaaccagt

SEQ ID NO: 27908 - DNA, 50 bp, Homo sapiens
acgcagctggctggcttcagtggaccagtcccccgaatccactgggacct

SEQ ID NO: 27909 - DNA, 100 bp, Homo sapiens
aagtagcccttggaaccatgatgcattgtcagaccctaaaggatcaaccctctgcatacagtaaagacttggatgttgtgggtgatggtatgcagtgtcc

SEQ ID NO: 27910 - DNA, 74 bp, Homo sapiens
gttcttacaacatggcagacattgacaagcactgttatagaagaatggaagaagatacagattatagaatcagg

SEQ ID NO: 27911 - DNA, 100 bp, Homo sapiens
acaacatcaccgtgaggcagggggacacagccatcctcaggctatttgatcactccatggaaggattcaaaaactgggagttcatgaccattcattgctg

SEQ ID NO: 27912 - DNA, 98 bp, Homo sapiens
cgagcaggaggcgccatcatggtatttacatgaggaatttccagagtcctggtcagttcccaggttggctgaaggctttgatgtcagcactgatgtga

SEQ ID NO: 27913 - DNA, 82 bp, Homo sapiens
tcggccctgcgccgcgacaagtacgtggccgagttcctcgagtggggtcagcccaaggccaaccccactgtcactctgttcc

SEQ ID NO: 27914 - DNA, 90 bp, Homo sapiens
ggtgaaggccagtgctctcaaggaaaatttctaccttgaaccgtatctgaaagaggttattcgggaaagaaaagaaagagaagaatgggc

SEQ ID NO: 27915 - DNA, 80 bp, Homo sapiens
ctgaaaaggactctatgattgaaaatatgagctaaatctgcttcgtaatgttgatgctaacaacactgagaatagcacta

SEQ ID NO: 27916 - DNA, 98 bp, Homo sapiens
gaagcagtgcttcgtggtgactgaaaaaggttcgatacaagaggctgttttcctagcgtggcttgctgcctttggtaagaacatgtcgtccatcttgc

SEQ ID NO: 27917 - DNA, 75 bp, Homo sapiens
ttgataaactgaagcatgttgttcagcacaaatggacccccgaggcctatctcccagacaaagtaaaagtgacag

SEQ ID NO: 27918 - DNA, 108 bp, Homo sapiens
tgctcttgaggttcacagatgatacgtttgatccagaacttgcagcaacaatagatgaacccacaagatcattgagtggtcttatcttgaagaataatgtgaaagcac

SEQ ID NO: 27919 - DNA, 96 bp, Homo sapiens
tttatgaaactagcgacctacctgaggatgatcaagcggagttcgatgcggttgccaacttggcctgttccatctcaaataatgaagaaggtgtaa

SEQ ID NO: 27920 - DNA, 98 bp, Homo sapiens
ccctcccctcgcctcctctcctaggtgccggccgggagggcggccgcagcaggttttgcactgattgcaaaaataaagtcctccgagcatacaatatc

SEQ ID NO: 27921 - DNA, 100 bp, Homo sapiens
aatgcgaatgatcctgaagcctcaaagtttcatgaacacacgcaggacttgaaagatgttactaataatgtccactacgagaactatggaatcagaaaac

SEQ ID NO: 27922 - DNA, 100 bp, Homo sapiens
ggagtccgctaaagcgaagcattccaggggtgcttcaaggatgaccgcatcgtcttctggacttggatgttctccacctacttcatggagaaatgggctc

SEQ ID NO: 27923 - DNA, 90 bp, Homo sapiens
cctccttccacctggccaggaatcagtgtggcaaaggagcagagaactttgacaagttcttcacacgaggacagcccgtcttaacaccac

SEQ ID NO: 27924 - DNA, 100 bp, Homo sapiens
caaaagactgctaaagtgagagtgaccaggcttgttctggatccctatttattaaagtatttagtgtctctgatccgggacaagctaggatggatgtggg

SEQ ID NO: 27925 - DNA, 100 bp, Homo sapiens
cttgctgaccctgtggcctttagcctcagagacgaatcgacaccctcaactcagatggatacacccctgagccaggtatctctaagggacagcagtctgg

SEQ ID NO: 27926 - DNA, 80 bp, Homo sapiens
aggagatcatgtcgctgaccagcccgtctgccccgcccacatctagaacgcggcgtcttcgacatcttcggaacattgct

SEQ ID NO: 27927 - DNA, 101 bp, Homo sapiens
gctaccagttctgggatacgcagcccgtccccaagctggtacactcagaagaagccttgtttttactggcaacctgttattaccgctcaggaaaggcatat

SEQ ID NO: 27928 - DNA, 75 bp, Homo sapiens
atgacttctcagcgttcccctctggcgcctttgctgctcctctctctgcacggagacaaggacggcagcaaggtg

SEQ ID NO: 27929 - DNA, 100 bp, Homo sapiens
tttactctggggtcccggctgccctgtggcctcgctcctcggaggtggttggatttcatcccttactggtctcaaccaaaatattcctgttggaatcatg

SEQ ID NO: 27930 - DNA, 75 bp, Homo sapiens
cttttaatatctgatactcagcctgaaggtatccaaaccttgaaacctttgctctagatgtcaggcttgtttttg

SEQ ID NO: 27931 - DNA, 76 bp, Homo sapiens
aaagaatacattcctgattacctgccacccattgtgtcttctcaagaagcttttagtaaaacatggaggagacttg

SEQ ID NO: 27932 - DNA, 105 bp, Homo sapiens
tgtgattagcttcgcagtctggaaagctttaggagttcacagtaccacattgtgcaacacatcattggacaacccaacccagagaaacaaggatcagctgatccg

SEQ ID NO: 27933 - DNA, 101 bp, Homo sapiens
aagagttctttagtttcatctctctataaagttatccaggagccacaaagtgagaatgtgacagtgatgataacatgggtgccaaaaatacttcaatagga

SEQ ID NO: 27934 - DNA, 83 bp, Homo sapiens
ccctctgaaaactgaggaatttgaagtgaccaaaacagcaggcatagaatgtcaagctaaccaggcgtccgctacttcagaag

SEQ ID NO: 27935 - DNA, 83 bp, Homo sapiens
ctcctctcaagaaatctcaagatattaaagttactgctgttaaaaaggttggtcaaagaaaaagtgatgtatgaaaaagaggc

SEQ ID NO: 27936 - DNA, 87 bp, Homo sapiens
gtgcactccgcacctcggggacattattgcgcgtggaacggctgcttttggaaggaattgtcttagaagaaagaaggcaagccacca

SEQ ID NO: 27937 - DNA, 50 bp, Homo sapiens
tgcagaagcacaagccaaactgtttgtagaagactatgaacctaccaaag

SEQ ID NO: 27938 - DNA, 98 bp, Homo sapiens
tttcatgtgcgatgatgaggaggactacgacctggctccgagctctgtccagtggtgggagtattacatcccctcctctttctccagcattgccgaag

SEQ ID NO: 27939 - DNA, 90 bp, Homo sapiens
acacctcatcatggacacgctactttagctaaggcatgaccagcaatgaacagtagtaagggtgtcaaattgagaaccaggtagatcccc

SEQ ID NO: 27940 - DNA, 75 bp, Homo sapiens
aagctcatggtgcaaattgttatttccagaggcccaagagccaatccagatgcctgagacaacggagactgtgct

SEQ ID NO: 27941 - DNA, 76 bp, Homo sapiens
aatggcacttcattggccacctacagaaacaaaatgtcaacaaattgatgggaaacttttgagaagaactttgaaa

SEQ ID NO: 27942 - DNA, 74 bp, Homo sapiens
acaaacccatttcagaccaatgccagaggagcaacagacccaagcaccagccgccgcttcacacctccctcccc

SEQ ID NO: 27943 - DNA, 97 bp, Homo sapiens
cctgaagtcagttgttgcatcaaatacttcatatttggcttcaatgtcatattttgggtgggtttggaggatttgggacaacatctacaactgcagg

SEQ ID NO: 27944 - DNA, 100 bp, Homo sapiens
aaagaatggttggagcccaagcccctttgttttatggagtggactcccgaaaaattgaccaggaagggaaaatcccagatgaaactttggagaaattgaa

SEQ ID NO: 27945 - DNA, 50 bp, Homo sapiens
gtttgcaaagcacctgaactgggaagctgcccgggagtgtcgcaggaaga

SEQ ID NO: 27946 - DNA, 143 bp, Homo sapiens
ctcggtcacaaggaaaatggattcagtttgcatctctccctcctttaaacagcttctccgggtctcagcatggaaattcagtgaacattatcactccttgtgtaaagcagtgcatcacctagcaactgttgactgcattttct

SEQ ID NO: 27947 - DNA, 75 bp, Homo sapiens
ccagcttaaggaccacattgaccgatcccggaagaagcggggtgagaaagtcggtcctgaccgccagcctgtcgt

SEQ ID NO: 27948 - DNA, 75 bp, Homo sapiens
gctagagaagctggactcccgggatgggaagttcatccaatcaatgagctgagcaatgttcctgttcctgtcatg

SEQ ID NO: 27949 - DNA, 82 bp, Homo sapiens
ccagcatggaaacctgtgaagttagctgggccaggccaaagagagggttgcagataagctcccccggcccaacctcctgcta

SEQ ID NO: 27950 - DNA, 75 bp, Homo sapiens
ggcgccccgcgcagctggctggcggagcatgagcgccccagggtgccaagtaccggggctccatccatgacttcc

SEQ ID NO: 27951 - DNA, 98 bp, Homo sapiens
acatgcgtttcatacagaagtacctgcttcagagacatgagaagattcatactgaagcctaaagaaactgttccaactcttgctccaaaaactctttc

SEQ ID NO: 27952 - DNA, 96 bp, Homo sapiens
tccggcagcagcggcctcgccgccgcccgtctcctgtcgcgcagcttcctccgtggtcttcaagctgacagagaagctgacggaacagaaggagtg

SEQ ID NO: 27953 - DNA, 75 bp, Homo sapiens
tttacttgtggtttagacttcagtcttcagagccccactcagcaacatcggcaagtatagacagaagcgctccct

SEQ ID NO: 27954 - DNA, 82 bp, Homo sapiens
aaggaaagcagtaccttttaaatctcattgatacaccgggttcagtttggcaaagacttggtgcagatgtgacagcagttga

SEQ ID NO: 27955 - DNA, 101 bp, Homo sapiens
ctccatcagagagccctggcatgctgactaagctccaggagttcattcaaaagtgcctgcagtctgagcctgctcgcagaccaacagccagagaacttctg

SEQ ID NO: 27956 - DNA, 100 bp, Homo sapiens
agctcagcactctctaaaggagcaacagtttacagcccttccagatacagctaccaggctctgtgatcctctaccttatgatataatagtcgatccaatg

SEQ ID NO: 27957 - DNA, 83 bp, Homo sapiens
catcgagtgtgacgtggtgaaaggtcagcccaaggccaaccccactgtcactctgttcccgccctcctctgaggagctccaag

SEQ ID NO: 27958 - DNA, 98 bp, Homo sapiens
aggtggcagtggttcttatagccctggagtgacctactcgcccgtcagtggttataataagggcctgagcgcctgcgaacagatccgagctgctctct

SEQ ID NO: 27959 - DNA, 100 bp, Homo sapiens
ccctcctgccaccggacctacagctgcattcactgcagagctcacttggccaatcatgatgaactaatttccaaggtcaacgaagtgacggtggaacagc

SEQ ID NO: 27960 - DNA, 80 bp, Homo sapiens
cgtggtgcgggctctgcagcgagcgctcgatggaacctcatcccagggagtgcatccgccccaacccttttccccctcgt

SEQ ID NO: 27961 - DNA, 82 bp, Homo sapiens
ccaggatgtctacaaaattggtgatgagttttgatcatcctgagaaaaatgggccttggcctgcagacccaataaaccttcc

SEQ ID NO: 27962 - DNA, 96 bp, Homo sapiens
actctttccgccctaatggaggtctccagtttcggtgacttcatggtcatgacgattttcttcaatgtgagcaggcggtttggctatgttgccttt

SEQ ID NO: 27963 - DNA, 83 bp, Homo sapiens
gcttatggcggcgctggagagggggcgctgagctgttggggtatcatgatattagctggtttgacatcaagtcatttgtgagt

SEQ ID NO: 27964 - DNA, 75 bp, Homo sapiens
cactggaacagaatcaacccagaacggatagctccctcctggaaaagctgcaagctttcttcctggtggcagatg

SEQ ID NO: 27965 - DNA, 86 bp, Homo sapiens
cctcggagtccttggggacggagcagcgcgtcgtggggcgagcggcagcaaacggggattcagcgtccgatcctttggaacaggga

SEQ ID NO: 27966 - DNA, 60 bp, Homo sapiens
gggaagaagatcaaaacccaccatgccccagcatccacctccagatcgacaggcagtacc

SEQ ID NO: 27967 - DNA, 114 bp, Homo sapiens
cgggagcctgctgtacaatgcaggcaacatctgcaaccacttcttcacccgaggcttccttaaggcggtcaccaggcagaagctgaccctgcttaaagagatgctggcgggctg

SEQ ID NO: 27968 - DNA, 100 bp, Homo sapiens
aaatcttgcggcaacgcccccgggacatgcatcgtcccctggactctctcaagattttttatcaagcagaaatgcatcgaacaacgagaatcaagatcac

SEQ ID NO: 27969 - DNA, 51 bp, Homo sapiens
cgaggagaagtccagtttcttggaaggctaacagagaccctgatgctggaa

SEQ ID NO: 27970 - DNA, 100 bp, Homo sapiens
ttccccacaaaacaagaaagtcaactccgtaatgaagtggctattttacaggtttgggagttgagtgatattgaccatgatggaatgcttgacagagatg

SEQ ID NO: 27971 - DNA, 83 bp, Homo sapiens
gtttctctgctgcaccgacctcgacgtcttgcctgtgtcccacttgttcgcggcctatagggccgagaactactggtggcgtg

SEQ ID NO: 27972 - DNA, 100 bp, Homo sapiens
caacgtgctgatgaccctcgagggagacatcaggctggacatcaacgagtgtgcaacaccgtcgaaagtgtcatgcggaaaattctcggactgctggaac

SEQ ID NO: 27973 - DNA, 111 bp, Homo sapiens
gcgctacacaagtggagctccttttcctccacctaccttcccgagactctgtctactagtgacgatgtcgaagacagggaaaatgaaaagggtcgccttgaagaagcctac

SEQ ID NO: 27974 - DNA, 83 bp, Homo sapiens
gtctttatctgctgtcaaggatcttgtgtgctccatagtttatcaaaagtttggcagtaatcagtccaaaccagagttcacag

SEQ ID NO: 27975 - DNA, 100 bp, Homo sapiens
tcccagaaagagaagactttaaccactgtgatgcctgagaatccagtgagcaccactggatcataccagtgacaagtcacttctcgacgctaattttgag

SEQ ID NO: 27976 - DNA, 98 bp, Homo sapiens
gggggcgccgggggggcccaagcgtcagcggcccgcgcctgtcgggctgaactgagctcaggagcatctatcggctgcacgccaacatcaacacaggc

SEQ ID NO: 27977 - DNA, 75 bp, Homo sapiens
tgctggctgtatgggagtttgtgtttggcggtatgggctacgtgagttcgtggtgattgcccctgctgcacacag

SEQ ID NO: 27978 - DNA, 97 bp, Homo sapiens
tgtggcctagatcctacatctacacttggcatctattttgaagttgtcaatcaggttcagcctccgttttgtactccagatgaatttacatactggg

SEQ ID NO: 27979 - DNA, 101 bp, Homo sapiens
cggcctggtgcgcaaggccccgaacaacaggtatgacctggacgcgtgtgacattcaagaaaaatacccggatttatttcaagtgaacctggaagtggagg

SEQ ID NO: 27980 - DNA, 82 bp, Homo sapiens
ccagagactgctgagcccgtccgtccgccgccaccacccactccggacacagggccgagaactactggtggcgtggccagaa

SEQ ID NO: 27981 - DNA, 100 bp, Homo sapiens
gctgatctgagctcagacctgccaatttaccagagataattgataacaccctgtaacagctgaactgtcagcatcaataaggccattaatacgcaggaag

SEQ ID NO: 27982 - DNA, 100 bp, Homo sapiens
cgcggccgctcgcgcctctcgatgggcagctcgcacttgctcaacaagggcctgccgcttgggtcggcccgaaataggcggagttgggattcgaactcat

SEQ ID NO: 27983 - DNA, 74 bp, Homo sapiens
tgctcacgtttcccttcctccatatttactggacagagtgctgtggtggactccattatgctggtggaagaggg

SEQ ID NO: 27984 - DNA, 99 bp, Homo sapiens
cctcgctgcgctcatggcgtcgcccgggtttcagcagagcagctttaccatttgggctggtgaggcgagaattatcctgtgaaggttattctatagatc

SEQ ID NO: 27985 - DNA, 100 bp, Homo sapiens
ggacagcattgggagcggccgagccatcccaattaaacaggtgaacaacaacgggatcatctccttcctgaaggaggtttctcagttcaccccagtggcc

SEQ ID NO: 27986 - DNA, 98 bp, Homo sapiens
atcagttcttccttatgaatacacagcaattctgcttggtcagaatcgtgatggcattgtgttcagcactgatgactattttcaccatcaagatgggt

SEQ ID NO: 27987 - DNA, 101 bp, Homo sapiens
gaagaacagctgtggaaagaagttgcaaaacactgggtctccagaaatgctttgggttcatctttcattgctgcaaggaacttccatgcctctaacactca

SEQ ID NO: 27988 - DNA, 99 bp, Homo sapiens
tgaaattgttaggcgtggagagggagtgatgtcttccagactcggtgctgtacccgccggtgtgggccgaagatatgctcatgtggtgttgaggaaagc

SEQ ID NO: 27989 - DNA, 87 bp, Homo sapiens
atattgcatcttcctctggctctacagcggcctatatgaacccaatagcaatggcgagatcaaggggtccaatccagtcttcagggc

SEQ ID NO: 27990 - DNA, 100 bp, Homo sapiens
atgggaagataacacgtcaggagtttatcgatggcattttagcatccatgagaaagatcagtctaaagaaaaggagaagaaagtgaaaaaaacaattcct

SEQ ID NO: 27991 - DNA, 99 bp, Homo sapiens
ttcattctggattggtggatctgaagtacaaaatattttccagggttctcatgtatcagccatcttctgtaagggtgcccagtgtgacttcggttgatc

SEQ ID NO: 27992 - DNA, 100 bp, Homo sapiens
cagccacactctgcaccgctaggccgtccccgaccttgcctgaacaagtttgcctatctggggcgcctggctcacgaggttggctggaagtaccaggcag

SEQ ID NO: 27993 - DNA, 75 bp, Homo sapiens
taagtatttccacaagcgtttcccggagcacagggcagcggagatccgtgagatggaagattttcgaggtatagc

SEQ ID NO: 27994 - DNA, 100 bp, Homo sapiens
ctgatgaaagctatactccaagcaagatctcagtcagagtaggaaataattttcacaaccttcaagaaattcggtttaaggaagaaatctctaaacgttt

SEQ ID NO: 27995 - DNA, 75 bp, Homo sapiens
gcataatatatgtgtctgagagtgtaacttcattacttgaacatttaccagcagtagtggaagctaagaagttaa

SEQ ID NO: 27996 - DNA, 87 bp, Homo sapiens
gacgttgtggagatggggagcgtcctggggctgtgctccatggcgagctgggttgtctgcattcaaaagagcattctattaaagcta

SEQ ID NO: 27997 - DNA, 82 bp, Homo sapiens
agatggcgaaggtctcagagctttacgatgtcacttgggaagacaatcatgacatcatctccatgaagctgttccagctgat

SEQ ID NO: 27998 - DNA, 100 bp, Homo sapiens
ggctgccctgtggcctcgctcctcggagggtaaatatttccaactacagtctggtgatggagtctgacgcaggaaccttcttacccactgggctgcaatt

SEQ ID NO: 27999 - DNA, 97 bp, Homo sapiens
agatggaccttctaataatgcgagctgcttccgaaggctgaccgagtgcttcctgagccccaaacctatgagaaccccaaagacattaaagattgct

SEQ ID NO: 28000 - DNA, 73 bp, Homo sapiens
tggcacacccacttatgtggctccagaaatcattgctgaaactggaatccagactccaaaatgatgcaaatca

SEQ ID NO: 28001 - DNA, 100 bp, Homo sapiens
cagttacaactggagcctggattttaactggaggagtaaacacagtacgaattggagcaatgttggcttatacacctctggatgagaagagccttgcttt

SEQ ID NO: 28002 - DNA, 79 bp, Homo sapiens
gcggccccagcactcccagctgcgcagggcctgccaggtggcgctcggcataaatgaaatctcggaagatgtctatacg

SEQ ID NO: 28003 - DNA, 100 bp, Homo sapiens
tggggaggttgggctgaactgcagtgggagaggagaagagatgctggcgtgaagggacatatgtagagtgtgtcggtcagaaggaacacctgagaaaccg

SEQ ID NO: 28004 - DNA, 53 bp, Homo sapiens
gtcctcttgtcctcctcagcctcggggggaccttccttggagcagaggtttga

SEQ ID NO: 28005 - DNA, 90 bp, Homo sapiens
aagatggagacggcggcggctgtagcggcgtgacagtcatcagggccaagttcgtggggacaccagaagtcaaccagaccaccttatacc

SEQ ID NO: 28006 - DNA, 100 bp, Homo sapiens
tgctctctcgcggcggccggcggggcccgcgctgcagccggagacccggagaaaggattgaagaattggaggagaaacttaatgatgcacttcaccagaa

SEQ ID NO: 28007 - DNA, 103 bp, Homo sapiens
gatatgctaagaaagaatcttgtcactttagccactgctactacaggtgctggagaatctggtaaaagcaccattgtgaagcagatgaggatcctgcatgtta

SEQ ID NO: 28008 - DNA, 98 bp, Homo sapiens
cgcctgatcgagtccctccggaactcacactccagagagttaattgttaaatccagtatggccacaggaggaggtccctttgaagatggcatgaatga

SEQ ID NO: 28009 - DNA, 99 bp, Homo sapiens
cggttcatggctttggccgccgcgccaccatctttcgggctgccgagggtgttcttgacgattaatcaacaggtgaccaagaatatggcccaggtgacc

SEQ ID NO: 28010 - DNA, 110 bp, Homo sapiens
caggaccccagatgtctgacagccctgtgtgacaccaagataagtaacgatcttcagcctgttaaacaagaaaacgaaaaaccccttccagaaaacatggatgcatttga

SEQ ID NO: 28011 - DNA, 110 bp, Homo sapiens
cctggggagccgtggccctttcgggggaccttcgagacaaggctgtcagcccctagagtccggcagcgtcttctcttgagggagcaatttggagaagagctggaacccag

SEQ ID NO: 28012 - DNA, 87 bp, Homo sapiens
ctcgtctgggatctgacaagaggaccccgctgctaactcggctacaacatttggcagagcagttggccaaagacctccgccagtggc

SEQ ID NO: 28013 - DNA, 75 bp, Homo sapiens
cctttccagcccgtggtccttctccatattcgaggcattatattgtacttctagcaagtgcaccaacagaaaaac

SEQ ID NO: 28014 - DNA, 96 bp, Homo sapiens
cttgctggcccgcggggctgtccaggcacgcgaggcccctcaggtactactgagcgagtgtgcttgatccagggaacggttgaagcactgaatgca

SEQ ID NO: 28015 - DNA, 99 bp, Homo sapiens
actgcagcattgcagccgccaagacggttctcccatgggcaggtggtctctctggatgagctgcgccccttccaggacccagacctgagctccctgcag

SEQ ID NO: 28016 - DNA, 75 bp, Homo sapiens
ggcagaggcacttatgcttgtcaggaagccaccattcttcagagggcaatgaaggcacagaaatggaagtaccag

SEQ ID NO: 28017 - DNA, 76 bp, Homo sapiens
agaagcaccagttcaagtggccctcagggcatccccgttttcggacacatgacggaagtgtgtatttttgggccac

SEQ ID NO: 28018 - DNA, 90 bp, Homo sapiens
ccaacagaaggtttctgcaaggctgagagctccttttacccatggaccaggagcaaagtttgcagtcgttccccatcaggaagtcctcgc

SEQ ID NO: 28019 - DNA, 103 bp, Homo sapiens
tgttcttttgacaacgaacagctcttcaccatgaaatggatagatgaggaagtatatgaaaatgatgatcagctcctgtgggaccctgagtacttaccagaag

SEQ ID NO: 28020 - DNA, 51 bp, Homo sapiens
ggaatggatttctcctctaatgacagcaagtgcagccgcggagccctgtac

SEQ ID NO: 28021 - DNA, 90 bp, Homo sapiens
gttcagccgcgctgccgagaagctttacctcgctgaccctatgaaggagcagacgcctccgcctagacctgaagcctaccccatccccac

SEQ ID NO: 28022 - DNA, 100 bp, Homo sapiens
aagaagatgatacaaatgaatttgttagtgctgtgtgctggagggcactaccagatgggggtggtgattccactgaagcaactgccaaaccaaagagaag

SEQ ID NO: 28023 - DNA, 75 bp, Homo sapiens
agtgtagtggcgtattccacatagcaaacaggtgttgactttaaggtgaaaacaatttcagtggatggaaataag

SEQ ID NO: 28024 - DNA, 98 bp, Homo sapiens
tggtgccacctgaccagcaggacaaagtccagtggtcctgaggacaccgtgagccagccaggcctggccgctgggcctgaccggccccccagccccta

SEQ ID NO: 28025 - DNA, 75 bp, Homo sapiens
gaggcggacgcgcggctgcgtcagctgttctaaagaaatccaaatggcagttctgctgaaatttgtttcagaagg

SEQ ID NO: 28026 - DNA, 100 bp, Homo sapiens
ttggaggcctacttgcagcatattacctatcaggagaggagaaaatttttactactggagatgtcaacaaagatgggaagctggattttgaagaatttat

SEQ ID NO: 28027 - DNA, 107 bp, Homo sapiens
cgtggaggagctgtgcagccgcgaggaggcgcgggaggtgttcgagaacgaccccgagacgagacaagaggagcagcagcggcaccgcccctcaccctggagggtcc

SEQ ID NO: 28028 - DNA, 96 bp, Homo sapiens
gtcagtcatgactgtgaacaatgagattggagtgaagcagcctattgcagaaataggagtctcgctctcagtcaaaatctccaacgggaactcctg

SEQ ID NO: 28029 - DNA, 75 bp, Homo sapiens
tactctagtacagtagtatctctattggttttgccagtcagtcagatgatgatcaggtgaatgtaatgggttttc

SEQ ID NO: 28030 - DNA, 100 bp, Homo sapiens
tctagcaaaggacccagaaggttagaaaaatttccagatgaaaaggcagcttatttcagaaactttcataagggtccctgtgttcatgatgaggactctg

SEQ ID NO: 28031 - DNA, 75 bp, Homo sapiens
agcagccttcagcttttggcagcatgaaagttagcaaacccagcgggtgccgcttctccacccgaggcttccacc

SEQ ID NO: 28032 - DNA, 100 bp, Homo sapiens
cggaaggcgcgggcaggagcctggcgaggatgcaccttcccctgccttggaaagcacgagtacacgagacaggattgagaaaggagagattcaaattgtg

SEQ ID NO: 28033 - DNA, 100 bp, Homo sapiens
cggcctccggcgcagcccggaaatgtccggcaagatcgagaaagcaggggcaacaccctccactaaagagtcaagccagccggacgcattctcatctggt

SEQ ID NO: 28034 - DNA, 100 bp, Homo sapiens
ggattcaagttcgaaatatggcaactttgaaagatattccatgccattgcagtgtcaactaggcctcagttacttttcagtttgcccaaattgagcccat

SEQ ID NO: 28035 - DNA, 78 bp, Homo sapiens
gaggtagaggcagtggcgcttgagttggtcgggggcagcggcagggtgattctgggggtccacttgtctgtaatggtg

SEQ ID NO: 28036 - DNA, 100 bp, Homo sapiens
cacgcagccgcggcttccggagccctcggggcggcggactggctcgcggtgcagtttggatttaggtggcgagtagaaaaagaagtaatttcaggaaaag

SEQ ID NO: 28037 - DNA, 76 bp, Homo sapiens
atcctagacatctccagaagtgatgtgaccgcaacaagggaaaacatggcttatactgtggaatgcctgcggggtg

SEQ ID NO: 28038 - DNA, 74 bp, Homo sapiens
cagacgacgagctgagcttcaaaaggggggacatcctcaaggacaaggacacactcagcattcactacctcatg

SEQ ID NO: 28039 - DNA, 90 bp, Homo sapiens
cgccgccctctcccggctcggcgcagccgccgcccgcgcgcgactcgccccgggacccggcacaggaatgaagcaaagtcaggtggacga

SEQ ID NO: 28040 - DNA, 90 bp, Homo sapiens
gctctcctctggggactgcagagaagcaggacctcgggccatggggctctttgtgatggatgaggacgccaccctccaggaccttccccc

SEQ ID NO: 28041 - DNA, 75 bp, Homo sapiens
tcttctgggtccatcaccaaagagcagatgccaaatctggaaacagacgtggtaccagacaccaggcttttagac

SEQ ID NO: 28042 - DNA, 100 bp, Homo sapiens
ctacgagctgctggagcgcgtggaggagccggtgctgcagaaccagatccgggagcacgtcatcgccatcgaagttaaacacagtgggaatatcactttt

SEQ ID NO: 28043 - DNA, 83 bp, Homo sapiens
tgtgggatgagatcggaggtcttatacagccaggggatattattcggttgaccagaggaaaaggttaagaagttcttacaaga

SEQ ID NO: 28044 - DNA, 78 bp, Homo sapiens
tgaagaggagcgccagatggtggaggaatacacttatttatgaacatctgggctgatgggccgtaccctgcaccgtga

SEQ ID NO: 28045 - DNA, 78 bp, Homo sapiens
tttgaaccccaaataaggaagattgtggatcaaataagactgattgggcagaaagtggcccatgctctggcagaggga

SEQ ID NO: 28046 - DNA, 98 bp, Homo sapiens
gaaacaatggaagatatagataagaatgctgatggtttcattgatctagaagagtatattggccataggaaaaggatacagagtagagtttcatgaac

SEQ ID NO: 28047 - DNA, 98 bp, Homo sapiens
gccgccgccgcagcttgggaggtgctgccaccacaggtttaactatagatcaacacatcatcttgcatctcatgggttctatgaatttttaaattggt

SEQ ID NO: 28048 - DNA, 141 bp, Homo sapiens
ggataacgtgcagccgaaaataaaacatcgccccttctgcttcagtgtgaaaggccacgtgaagatgctgcggctgccctgtatgatgagattcgtcagtttcgcaaggcctgtggggaggctcatcttaaaactatatta

SEQ ID NO: 28049 - DNA, 101 bp, Homo sapiens
cagagctgtttgcggtggtgaagacaatgcaagccctggagaaggcctacatcaaggactgtgtctcccccagcgaggaagttcaagctcctggaacaggc

SEQ ID NO: 28050 - DNA, 75 bp, Homo sapiens
atctcctgatatgactaaaaacttccaacaggtcctggcattgatgtgcctgctccagacatgagcacaggtgag

SEQ ID NO: 28051 - DNA, 82 bp, Homo sapiens
ttctacatcggcagctaccagcagtgcataaacgaggcgcagcgggtgaaggtacaatgactcttcttgcttttcacctaag

SEQ ID NO: 28052 - DNA, 75 bp, Homo sapiens
ggccctgaggtgggccggacctgggagtggcaggttggatttggtctagggagtcccagaaagaagtagaaaaag

SEQ ID NO: 28053 - DNA, 82 bp, Homo sapiens
tccgagaacgagcggtggagattgatggggagcgcatcaagggcacctggacgatgacggattaccgcacgggttctgcaca

SEQ ID NO: 28054 - DNA, 101 bp, Homo sapiens
aggcaatgagccgacccatcttgtacagcaactggctgtcaaaggttggtgttcgaggaagagacattgttgttcttggtgtggagaagaagtcagtggcc

SEQ ID NO: 28055 - DNA, 130 bp, Homo sapiens
aagtaaaagacttgaaaaagaaatgcacaagcaactttttgagtccggaaaaacagcccaagatcatctggctgaagaacaagatggatatccaaggcaaccctaagtacagagccctgactcacctggg

SEQ ID NO: 28056 - DNA, 51 bp, Homo sapiens
tgctggctgtgggggctacaaaagagacgtctcccacaacctgctccgggc

SEQ ID NO: 28057 - DNA, 75 bp, Homo sapiens
catccatctaaagcaccagtaaaatatggtgaactcattgtcttaggcggaagatccatccaaaagctatgtgaa

SEQ ID NO: 28058 - DNA, 75 bp, Homo sapiens
ggggaggagtccagggagcccagcacagttcaggacctcaaggggctcggctatgagaaggggaagcctgtgggt

SEQ ID NO: 28059 - DNA, 100 bp, Homo sapiens
gaaccatctcagaagccatgcccctcaggctggaacttgccctgtctcctcgcagatgagcttgctcatcagtttggaaggaatttggctccgtgggacg

SEQ ID NO: 28060 - DNA, 97 bp, Homo sapiens
gaaggaactttgggtcctgaatcttctgggagctgaggaaccagatatcttgaaaagctgccagaaaggcacacggcacagcaggagaccaacaaga

SEQ ID NO: 28061 - DNA, 51 bp, Homo sapiens
gtgaggcttccccagccacgtggaactattgacatggtacatcgtaacaag

SEQ ID NO: 28062 - DNA, 100 bp, Homo sapiens
attgtactctcagagatgttgagaaaagatacatgggtcttggaagataattactcaaaatatgcagggaaggtatccatcatcccacgtggcaaaggac

SEQ ID NO: 28063 - DNA, 82 bp, Homo sapiens
gccgcgcgaggaaatggccgaggagccggagccgcagtgttatagttttgccgctggactcttccctcccttcccccacccc

SEQ ID NO: 28064 - DNA, 83 bp, Homo sapiens
ctggagaaggcctacatcaaggactgtgtctcccccagcgaacgctgagcagcgagctgtcccaggcccgagatgagaataag

SEQ ID NO: 28065 - DNA, 82 bp, Homo sapiens
gttcgttgtgccagcgactaaaaagagcagtgtttggccagcgcttggatgagactgtggcctatgaacagaaattcggccc

SEQ ID NO: 28066 - DNA, 82 bp, Homo sapiens
ggtataaatgatctcgtcactcctttctttgtggtcttcatttgtgaatacataggttgtgaccgagattcccgacgagaga

SEQ ID NO: 28067 - DNA, 82 bp, Homo sapiens
ccccgtatagacggcaaattagatttgaccgtaccctggggggcctggagatggagctccggcttcgagaacgcctggctgg

SEQ ID NO: 28068 - DNA, 74 bp, Homo sapiens
taaggatccccaaagtctcagacttcagtcataaagaaggaaactggattttggagagactttggatttgggat

SEQ ID NO: 28069 - DNA, 100 bp, Homo sapiens
ctcctgtctccagttctccacgctctgtctcctcaacctctacctggcggagatgcagttcttaatgaagctgctcaaattctgcgattgctgcacatag

SEQ ID NO: 28070 - DNA, 100 bp, Homo sapiens
caagaacttccagattgagttagaggggcggcaggtctctaattaacagaagatggcaaagcccagccacagcagctatgtccttcagcagctaaacaac

SEQ ID NO: 28071 - DNA, 98 bp, Homo sapiens
agccgcgggcccccgacgcgctgcagccggcagcccaccgccgccttcttggcgcgaccccaacccagccccaaacaaaatccagtctcatagcagag

SEQ ID NO: 28072 - DNA, 100 bp, Homo sapiens
ccaacctcaatctggtctgcgccaccaacgccacctaccactgcatcaaggatgatcggctgaatgtaacagaggaactaacgtccaacgacaagacgag

SEQ ID NO: 28073 - DNA, 109 bp, Homo sapiens
tggcgggcaattctattgggttttctcatcactctgcgtggctggtggtgctgccaggtcacgcatgaagggagcaccgtggagaagacagtggcccctacagaatgtt

SEQ ID NO: 28074 - DNA, 80 bp, Homo sapiens
tacaacatctacaatgttggctcaaggatctcattgactcagatgagctgctggatccagaagatttgaagaagccagat

SEQ ID NO: 28075 - DNA, 74 bp, Homo sapiens
cgggccctgcatgtggagctgccgtctcagcaggagtggtaaaatttcagccttccctttggccttgggactca

SEQ ID NO: 28076 - DNA, 88 bp, Homo sapiens
aagctgtaaggatcacgtggggtacatttttactaccgaccggtcagtcatatcatttggatcaaaaaatagaacaatcggagttgca

SEQ ID NO: 28077 - DNA, 90 bp, Homo sapiens
ctcttgcagtctgcagcttctcctgtcatcggaaatgccaggccaagtggtacaggagctgcagcaggccatctccaagctggaggcccg

SEQ ID NO: 28078 - DNA, 101 bp, Homo sapiens
ataatgatggccactgttgtgacaactatcacaggattgtctacttcagcaatagcaactaatggatttgtaagaggaggcactgcctccttacctgtgag

SEQ ID NO: 28079 - DNA, 75 bp, Homo sapiens
ctctcctccttcttcctcaactatctcgctgacacgcaggtgcacattcaggttcccgagcacaaacatcaagat

SEQ ID NO: 28080 - DNA, 78 bp, Homo sapiens
tgtgagttagtggtggacctgtttgtgcgcacagtgctggtctgcctgacattgatagctgaaaatatgtgggaccct

SEQ ID NO: 28081 - DNA, 50 bp, Homo sapiens
tgtttatctcagggaaatatcaagagttttccgtctgatgaaggttggcc

SEQ ID NO: 28082 - DNA, 75 bp, Homo sapiens
gcggcagcggagggacggcagtctcgcgcggaaagaccacagcaagattctttcattcgtctcctcctagcctgg

SEQ ID NO: 28083 - DNA, 100 bp, Homo sapiens
gaaaatgagaaagtagagctcgtgctgtgaataattccagcaagtgccaaggggctagttgaggaatggcttcatgaggaactgcaagcacatgttgacc

SEQ ID NO: 28084 - DNA, 98 bp, Homo sapiens
gtcctaggagagcatggccgaggagtcactgaacactatggaatcaattacctccctgcacttggctattcaaaacgggtccatctgatgaatcctat

SEQ ID NO: 28085 - DNA, 80 bp, Homo sapiens
ggccaaatggacgggactattaagttcatccatgagctcggatttcccacattacaacttcaggatgcctaatattggat

SEQ ID NO: 28086 - DNA, 97 bp, Homo sapiens
cggattcctccacaccacccacacaccagtcggcagcctccctgggttctcggaccagcagtgaccttcaaagtgagcgccaatgtccaaaacgtga

SEQ ID NO: 28087 - DNA, 105 bp, Homo sapiens
ccgcctcagccgccgccgccgccgttttcgcctgcagctgctcaccgcagatactttctgagtgcctactatgtgccagcctgtgctaggcactgaggacacagg

SEQ ID NO: 28088 - DNA, 51 bp, Homo sapiens
aggaactggcccggaaacaggaggacgccatgacgctgatggagtacctca

SEQ ID NO: 28089 - DNA, 129 bp, Homo sapiens
gaacggcgacctcaagaagcagctccacgaaaggcagccgcggatcgccgcgctcagcgacaaacaaggggggccctcagcctcttggccttgaacgggctgttcatcttgattcacaaacacaacctg

SEQ ID NO: 28090 - DNA, 75 bp, Homo sapiens
gcacgtccgcgagatggcttgctccattgtcgaccagaagacccaatgtctgtggatcacgttataatgcttact

SEQ ID NO: 28091 - DNA, 75 bp, Homo sapiens
ctcgcgtgagacagatcaagatcaagaccggcgtggtgaagcggtgtgatgaatgcagactctgctaccattttg

SEQ ID NO: 28092 - DNA, 75 bp, Homo sapiens
gtgcctttgaccttctgccatgattgtgaggcctccccagccacgtgaaactggacccagacatggagctgcggg

SEQ ID NO: 28093 - DNA, 100 bp, Homo sapiens
cccaaagtggttgatcgttggaacgagaaaagggccatgttcggagtgtatgacaacatcgggatcctggactgactttatggcctttcaccaagaacat

SEQ ID NO: 28094 - DNA, 100 bp, Homo sapiens
cagctgctggactggatgtgacgagcccagaaccactgcctacaaaccaccctctcctgaccctgaagaactgtgacgacaagtagatccagagtttgca

SEQ ID NO: 28095 - DNA, 82 bp, Homo sapiens
cgcgggagaggtaaacagaacaccaggacatcccagagtctgggaaatgtttctgtagaaaatgtttcctgactgcaatgag

SEQ ID NO: 28096 - DNA, 82 bp, Homo sapiens
tgaaccgcgcggccgaaccctccgggatcatagacggtatttctatgtaaacgaacagtcgggcgagtctcagtgggagttt

SEQ ID NO: 28097 - DNA, 90 bp, Homo sapiens
cctgatgctcatggcaagggacaagcacccaccagagaaaatgatgcatcctgttgccagcagtaatccagctttctgtgggcctggcaa

SEQ ID NO: 28098 - DNA, 85 bp, Homo sapiens
ggaaacaagacagttctgtctgcagaagcccattatggctgtaactggagatgacacagatcaatgtccgagttaccaccatgga

SEQ ID NO: 28099 - DNA, 82 bp, Homo sapiens
agagataagaacaccaaccaaattgtcgccattaagaaagagtcttttagtcctgctatacagctgcaccttgtacatcaag

SEQ ID NO: 28100 - DNA, 101 bp, Homo sapiens
accatcatctgggggctcattcagacctggtacacctgcacaggctcgattccttttgtccaaagtgaacccatctcagacacacaataacctgtatgctt

SEQ ID NO: 28101 - DNA, 110 bp, Homo sapiens
gacttcagcagcatcatccagacgtgcagcggcaacatccagcggatcagccaagccagttgtttttcaccattcagaacattgcctgaagcaggtccaccatgccgtta

SEQ ID NO: 28102 - DNA, 100 bp, Homo sapiens
tttcctgctcctcgtcatctcttctgatggacataatgggcttggaaagggtgccgtgagcgatgtggagatgcaggaacactatgatgagttttttgag

SEQ ID NO: 28103 - DNA, 73 bp, Homo sapiens
ctcgccatgtcctgctgcccgtggactgctgggacgggcccgatgggaagccggtcatctaccatggctggac

SEQ ID NO: 28104 - DNA, 98 bp, Homo sapiens
aatcaactgccatttcaaagaatatagatggttttgaaaagttcatgctgtcccttcattgaattttagccgttatggaacacctgaagagctacaag

SEQ ID NO: 28105 - DNA, 50 bp, Homo sapiens
cgtctccctcacaggagctggaaggtgcagtagacattgttgcaatcatg

SEQ ID NO: 28106 - DNA, 98 bp, Homo sapiens
agacagtgcagggaagagagaccttagaaaggatcaggactggcggatgccttcaattaagttgcagagttctgatggagagatatttgaagttgatg

SEQ ID NO: 28107 - DNA, 100 bp, Homo sapiens
acaagttcacgaaagcctacaaaagtgtggagaggttccttcaggaggatcagatatgttgatgatgtgatcagccgcattgacaggatgtttcctgaaa

SEQ ID NO: 28108 - DNA, 75 bp, Homo sapiens
agagccctttgcaggatgcagaagaagccaaaaacattctgggtctgctgagaacagacccagtccctgaggaag

SEQ ID NO: 28109 - DNA, 88 bp, Homo sapiens
ggagccacagcatttggtgactagggggaagccagggcgcaccctacgacgcgcacaccaccggcatgaccggcgccatcagctacca

SEQ ID NO: 28110 - DNA, 50 bp, Homo sapiens
ggagcctgaaaactgtgaatgatttgaaagttgagagcagcatgttttgc

SEQ ID NO: 28111 - DNA, 104 bp, Homo sapiens
gacatcagaagcttaaaggaagcagaaaatgtgtggcggattactgggacagatgtcaggaggcggagatcgctgcttctcacctactttctgaacttggcctc

SEQ ID NO: 28112 - DNA, 75 bp, Homo sapiens
gggccgggcagctagcagggcgcttcgggtgccaatgggtcatgtttggttagaaggtgacaatctacagaattc

SEQ ID NO: 28113 - DNA, 75 bp, Homo sapiens
ctaatccaagcaataacccaagcaaaacttcagatgcagcttttgaacacttgcagcaattagaattaataaagc

SEQ ID NO: 28114 - DNA, 74 bp, Homo sapiens
gaatgaacggagccgggactgactttgcctacggcaaggtggagccagccatcctgagacgtccgtacagcccg

SEQ ID NO: 28115 - DNA, 75 bp, Homo sapiens
cagcagcaacagcagctcagaagcagcccgacggccatggaggctgaagagacgatggaatgccttcaggagttc

SEQ ID NO: 28116 - DNA, 75 bp, Homo sapiens
agcgagctgtcagagcccggggacggcgaggccctcatgtaccacacgaacaccaatcagggtcttcaggcctgg

SEQ ID NO: 28117 - DNA, 90 bp, Homo sapiens
agaaataaggacaaaagccaagaggaggacagttcgctacacagcaatgcatcgagagatcccactggcattgttggtggtaggcctggg

SEQ ID NO: 28118 - DNA, 75 bp, Homo sapiens
ggattctcgctgtgacagagacaacaccgagtatgagaaaacttatctacaaggaagtaatgaattcagaagaaa

SEQ ID NO: 28119 - DNA, 82 bp, Homo sapiens
atcctgccgtccttctccactttcgccagcccgtgccgcgagcgcggcctgcaggaggccagttttaccaggaggtgctctg

SEQ ID NO: 28120 - DNA, 95 bp, Homo sapiens
ctgggctcgcggcgtctccggggaaagccgtggccccgagggcggatccgagaggctgggaggcggcagaatgcagccagaggagggcacaggct

SEQ ID NO: 28121 - DNA, 110 bp, Homo sapiens
ccctcagtgaagaactagtccagcttcgagcacaaggacgattactgagagccaatcagattagtttcaactgggacaggcttgctagctggatcaaccttactgagcag

SEQ ID NO: 28122 - DNA, 50 bp, Homo sapiens
ggagctttggttggaaggaccagcgcaagagctgctgctcttcctccaga

SEQ ID NO: 28123 - DNA, 100 bp, Homo sapiens
agacatccttacttttatgccccggaactccttttctttgctaaaaggtattcaagctaagacagttgcagaagtggattcagagtctcttccttcttcc

SEQ ID NO: 28124 - DNA, 98 bp, Homo sapiens
tgctcggcttcctgcgcgataaccaactctcagaggtggccaataagttcgccaaagcgacaggagctctgtttgcagacaaggtcccaaagacagca

SEQ ID NO: 28125 - DNA, 90 bp, Homo sapiens
ggccctcgtgctgatgctactgaggagccagcgtctagggcagcagccgcttcctagaagaccagattctggacaatcaggaagtccaag

SEQ ID NO: 28126 - DNA, 50 bp, Homo sapiens
gagcaggctgagcgatacgacggttatgccaaggacgccctgaatctggc

SEQ ID NO: 28127 - DNA, 75 bp, Homo sapiens
atctttccgttattccattggcccagatagtgccaaatcttgctgaagaatgatcttgcagaaatctgattgtga

SEQ ID NO: 28128 - DNA, 98 bp, Homo sapiens
actgaagaagaaaatacaacgtatactggaccagaagtttcagttcatacgttttatgaagctgtggggtacatgattggtgcacaaacagatcaaac

SEQ ID NO: 28129 - DNA, 74 bp, Homo sapiens
cctcctgtcccaaaagaccatcctgctctcaactacaacatcgtttcagggttgctaaccttcagggataagga

SEQ ID NO: 28130 - DNA, 83 bp, Homo sapiens
ttcgggcggaggaggaagtaggggtgcacctcagcactatcccaagactgctggcaacagcaagaggtggaaacatacagaag

SEQ ID NO: 28131 - DNA, 102 bp, Homo sapiens
cagcctgcgagggttccagggagatcaaggacttcaaggatttctacctttccatagcagctcttgcaagcttaggatatgaaaagagctgtgtgttgttca

SEQ ID NO: 28132 - DNA, 83 bp, Homo sapiens
agccgaaaacaccctgcaatctttcagacaggtactaactagggagctctggcagtgaaccttattgacgtggaaagttgtgg

SEQ ID NO: 28133 - DNA, 100 bp, Homo sapiens
ctcttgggcctcatcaaggatgagatgtgccgtcacttattccagaccactccccttcgatgacagccacccacttccccagggtgtatggggtgtcgct

SEQ ID NO: 28134 - DNA, 99 bp, Homo sapiens
gtcgtcttcagttaatggcaagacttgcagagggtttctctggaaacccccctggtaagtgtggaggaggcgggacactctgacccaagacgaaaggcc

SEQ ID NO: 28135 - DNA, 100 bp, Homo sapiens
acgaaaacatgtactacagccagtcttctatgtttccacatcggtcagaaaaagatatttgagttctgtgaacctgcatttgttgttggtaattgcctcc

SEQ ID NO: 28136 - DNA, 75 bp, Homo sapiens
tgctcaggtgccagatgcaaagattctgcctgatcaatgcaggagtcctgtacctctacttcagcaattacctac

SEQ ID NO: 28137 - DNA, 83 bp, Homo sapiens
gtggcgtcgttgtcgccccctcctcgtcgggaagaatcgtttggtctcctgccgtgcccggtgtggatgaggtcaccattgtc

SEQ ID NO: 28138 - DNA, 50 bp, Homo sapiens
cttgtgtctatcaggattccttgttggcgatgtatttccactacacaaaa

SEQ ID NO: 28139 - DNA, 82 bp, Homo sapiens
ttcctttttgcctctgtgatggctgataagaggctgacccgcggctgattgagtccctctcccagatgctgtccatgggctt

SEQ ID NO: 28140 - DNA, 51 bp, Homo sapiens
cttcctaggcagaatgcttggaaagtgaaggagaacgacctgctcagaatg

SEQ ID NO: 28141 - DNA, 78 bp, Homo sapiens
taccagaagtagatggagcagatgatgttggatggcaagcatgtggtgtttggcaaagtgaaagaaggcatgaatatt

SEQ ID NO: 28142 - DNA, 83 bp, Homo sapiens
gcatctgcaaacatagagaattctgggcttccacacaactccagtgctaactcaacagagcatgaataatctttcatttagtg

SEQ ID NO: 28143 - DNA, 100 bp, Homo sapiens
cttgcctcctaaacgtgtaccatttccacttgatgtcatcacgcagaaggggtgaaagagactcggtgacagatacaggaactatcccttcgacatagtg

SEQ ID NO: 28144 - DNA, 80 bp, Homo sapiens
cgggaggggcgaaggcgggcggcagaggcgatcaggctgaaggtgatgtggccgccctcaaccgacgcatccagctcgtt

SEQ ID NO: 28145 - DNA, 74 bp, Homo sapiens
agcagggagaggaaaggaggggcaaagaggtagaaaaacttttgagagcagttgctgatggagatctagaaatg

SEQ ID NO: 28146 - DNA, 90 bp, Homo sapiens
gggaaagggccggaaaacacacgttcctccgaaaccggtttgcaagtccttgtagagaacaccgaaaatctctcccagcactttagaaag

SEQ ID NO: 28147 - DNA, 98 bp, Homo sapiens
gcagttaccaccaaacccaggaggagactctccctggaaaacttcccttccctttcgtatgaagtgtaacagaacagactttaccacctgaaactgct

SEQ ID NO: 28148 - DNA, 82 bp, Homo sapiens
cgcaaacccaaagatccccgttcctggagattctgattgagcaagagtgagccatggagctacgtgtggggaacaagtaccg

SEQ ID NO: 28149 - DNA, 106 bp, Homo sapiens
cctcagcctcccaagtacctgggactacagtgttccaagatgtacatgttatgatatttgttgggtttggcttcctcatgaccttcctgaagaaatatggcttcag

SEQ ID NO: 28150 - DNA, 75 bp, Homo sapiens
agcaagaacgggaacaaaactctgctgttccaggagctctgagtcctttggccattccaaatgctgctgcagcag

SEQ ID NO: 28151 - DNA, 75 bp, Homo sapiens
cagtccctggatcaccgacagcacagacagaatccctgctaccagtctcttgtggctcagagcataatttggcaa

SEQ ID NO: 28152 - DNA, 101 bp, Homo sapiens
ccgaccctgcccctcccgcccgcaactccgccgcccaccatggcttccgaggagctgtacgagtcactcagcctctgaagaagcttcgggttcagactcag

SEQ ID NO: 28153 - DNA, 100 bp, Homo sapiens
cggagacgagtggtgggagaaccagccgactggagcaggcagcagcccagctattgacctgaaaagtggttctggaaaagtgtaccaaggccctgcaaaa

SEQ ID NO: 28154 - DNA, 100 bp, Homo sapiens
gcgacggggagcggcggagaccgcctctgctcccgcctggggaaaaggacccactctccgtcctctaaggatgagcagtcgatcggactgaaggactcct

SEQ ID NO: 28155 - DNA, 101 bp, Homo sapiens
cagctttcacagtttgcgggactcagtcccatcactccaaggagagaagctcctctggtgcaagtgtggtagctattgacaacaaaatcgagcaagctatg

SEQ ID NO: 28156 - DNA, 98 bp, Homo sapiens
atagaaaagcagaaagccgcctcttggtttgcgtcctgcactgaaaggaaatgacggattttacatcgctattgcggttccgaggcagtgggaagaga

SEQ ID NO: 28157 - DNA, 83 bp, Homo sapiens
ccgggacaccctggaagccaggaaatgatcacaagatttctgttgtgaaggatgtggctctgccatgaaggatgtcctgttgc

SEQ ID NO: 28158 - DNA, 97 bp, Homo sapiens
aaatggccaacggtggtaatcagaatctaaaggtggtcttccgggatccgtatcggtttaagaagcggacggagctgttcattgccgccgagggcat

SEQ ID NO: 28159 - DNA, 82 bp, Homo sapiens
aggcggcgcggcggccactgggcgcagcacccagggcgtgatggtgggcatgggtcagaaggattcctatgtgggcgacgag

SEQ ID NO: 28160 - DNA, 50 bp, Homo sapiens
gggcaatccgggcttgcagacgaggtatagctgtggaccaactgtatatg

SEQ ID NO: 28161 - DNA, 100 bp, Homo sapiens
tgggactgccccggcaactccagggtgtctggtccacgacctatcctaggcgccatggttttggaaggaaggatgttgtagaacacttactacagatggg

SEQ ID NO: 28162 - DNA, 75 bp, Homo sapiens
ctggggctgagaggagtcttctggtgcagtcttattttgaaaagaaatgcatcttctgcagacaccgggttaaga

SEQ ID NO: 28163 - DNA, 75 bp, Homo sapiens
acgtgcgccatctgcagggtccaggtgatgggagtgtatatgacaggaaaagaacttcgccagtgtatgctacca

SEQ ID NO: 28164 - DNA, 82 bp, Homo sapiens
gggcaccaaggcggtcaccaagtacaccagctcgaaacaatgcagatcttcgtgaagactctgactggtaagaccatcaccc

SEQ ID NO: 28165 - DNA, 109 bp, Homo sapiens
catcccggagcagctgccacaatgggacatgtgcaagaccggccagccttgcagctgtatgatccaggagctcgcttccgagcgcgagagtgtggcggaaacaggagga

SEQ ID NO: 28166 - DNA, 100 bp, Homo sapiens
tgctgcagcgggcgcggctggccgagcaggcggagcgctacgacgacatggcctccgctatgaaggcggccttgtgtcccgaaaccgccctgaggaggag

SEQ ID NO: 28167 - DNA, 97 bp, Homo sapiens
agagtccagggtttacactggctgaatctgactaccagtacaggcagggcaccgaaaaatgccgctgtgggccaggctggtctcaaactcctgggct

SEQ ID NO: 28168 - DNA, 100 bp, Homo sapiens
tttattcctcgttccttcttcagtcctgctcgtcggaggacccggttgccatggtgaaggaaaaaggtgacagagctgaatgaacctctctccaatgaag

SEQ ID NO: 28169 - DNA, 82 bp, Homo sapiens
gctggactagttcaactgaaattgtcttcataacagatcaaggaatcgaattttaccagtctgatctgaaatgtgtccagga

SEQ ID NO: 28170 - DNA, 100 bp, Homo sapiens
tccgggaagcactacaagggtcctgaagtcagttgttgcatcaaatacttcatatttggcttcaatgtcatattttgggaattacatgaatgacagtctt

SEQ ID NO: 28171 - DNA, 90 bp, Homo sapiens
gctggccacttgcttgggatcctttatcctggtcatcttctatttccaaacatgcttttcacttccactgcatctctcgctggctcaaaa

SEQ ID NO: 28172 - DNA, 90 bp, Homo sapiens
ctccgcgtcccgctcgctgggagagaggtacctctccttttccctctccctttccctaagagctgtaggtaaaacttgcctactgatcag

SEQ ID NO: 28173 - DNA, 85 bp, Homo sapiens
tgccttgcttggagctgacgccgacggtgagtccatgacagaagaaaccctgaaaagggcaaaggagattgggttctcagataag

SEQ ID NO: 28174 - DNA, 90 bp, Homo sapiens
tatttgggtccaactgtgaagccagatgataaggacctgaaggagaagaaggagaaggtggaggagaaggcaagccggaaagagcgaaag

SEQ ID NO: 28175 - DNA, 83 bp, Homo sapiens
tgtgggcaacggagacgacgaggcagctgagttgatgcagcaggagtctgcactatggaaacaacctgtcaatccagctcaag

SEQ ID NO: 28176 - DNA, 100 bp, Homo sapiens
cactgaccagcgcgcaggacagcgccttcctcaacgacgcggacatggtcatgagctttgtgaacctggccatcactggtgcaagctatatttaacggag

SEQ ID NO: 28177 - DNA, 100 bp, Homo sapiens
cttggatccttgtgggcatgatccataatcggtttcaaggttatcaatactctggctgaccatcatcatcgtgggactgactttggtggaagtccttggt

SEQ ID NO: 28178 - DNA, 73 bp, Homo sapiens
cacaggaggggcaggaaattctttgaagatttcattcatacctgtgaaaagctctgccatgaaggagactgtg

SEQ ID NO: 28179 - DNA, 75 bp, Homo sapiens
tgctgatcgagtggggcaacaaccccatcgagctgctcatcaacgacaagcagttccaagagcctctgagttcct

SEQ ID NO: 28180 - DNA, 122 bp, Homo sapiens
gcggccgggagggagttgtcggcgccgcggccgctgcggacggacgctcgcctgccggctgagattttaccaaatgttgcaagaactctggagttcttatggtagtaaaatgccggaaagaa

SEQ ID NO: 28181 - DNA, 90 bp, Homo sapiens
cgggtggtctacgaactgtgatggcggcggccgcggtgatgggcccggcgcaggagaactacgatgacccgcacaaaacccctgcctccc

SEQ ID NO: 28182 - DNA, 83 bp, Homo sapiens
ccgcggccgcaccttcccgccttctcaggtacaatggcttggtgaccggcacgagggctaagggcatcattgccatctgctgg

SEQ ID NO: 28183 - DNA, 127 bp, Homo sapiens
ctccaacgtgagctattacactcgtattctgccctctgtgcctaaagattgccccacacccatgggaaccaaaggcatgaaagaattactgatgtccttgatcaaaaaaattatgtggaagaactta

SEQ ID NO: 28184 - DNA, 100 bp, Homo sapiens
aggatccccagtatgcatctcaagatgtggtgcaagaattgtttatccgtgattatggagagatttttaatgtccagttaccggataaagaagaacggac

SEQ ID NO: 28185 - DNA, 100 bp, Homo sapiens
gcgctggaggcggaggaggagcctgacctccgagggcatctaccgcaagtgtgggcagacatcgaagacacagcggctgctggagagcctgcggcaggat

SEQ ID NO: 28186 - DNA, 50 bp, Homo sapiens
cggcaacggggcactgacctgggtggaatgcgatgttaattctggggcat

SEQ ID NO: 28187 - DNA, 101 bp, Homo sapiens
caggccctggcctacaggcccgtctccaggaacatcgatgtcccaaagagatggccaccatgtctgggagatggaagcgaaaactgaccgggacctgtgca

SEQ ID NO: 28188 - DNA, 51 bp, Homo sapiens
cgtcaggctctaaacaaaattctgggaagtctgttagaactgctgtgctga

SEQ ID NO: 28189 - DNA, 50 bp, Homo sapiens
gtttccgttaagctggacaacagcaaaagcgaaagcttcggatctacatt

SEQ ID NO: 28190 - DNA, 100 bp, Homo sapiens
taacctggatcccagaaggtcgcgaaggcagtaccgtttcctcagcggcggaagctgttgtgaaggcagagcagcatctgctgaagagacagaaaccagc

SEQ ID NO: 28191 - DNA, 75 bp, Homo sapiens
ggcggagcgagcgagcggccggcaggttgggaggagcggccgaaggttgcacagagcattgaggatcaccatcag

SEQ ID NO: 28192 - DNA, 50 bp, Homo sapiens
gcctcctacgtttacctgtccatgcctgactgccggaatcagagccgcgg

SEQ ID NO: 28193 - DNA, 96 bp, Homo sapiens
ctgctgagagggaaaaggacgccgcggtcttcccaggcgtcgcggagagcaggcatgtaatgaatttactacacatgtgatgaaccttctccgaga

SEQ ID NO: 28194 - DNA, 82 bp, Homo sapiens
acaaaggagcggaggagcagtcgcagctgctttccgaggaagccggtgttgccgagaaactatgttccaacttcctgtcaac

SEQ ID NO: 28195 - DNA, 154 bp, Homo sapiens
aaacaacaattaagtggattatgggaacaggaaaaccatcttactttggttccaggatatactggtaatatagctaaggagactgaagagccaattgtagagtgtcaggagtgtgaaactgaagtttccccttcacagactgggggctcctcag

SEQ ID NO: 28196 - DNA, 82 bp, Homo sapiens
cagcgccgccgggactccgagtgctggagaatctggtaaaagcaccattgtgaagcagatgaggatcctgcatgttaatggg

SEQ ID NO: 28197 - DNA, 98 bp, Homo sapiens
tttttcacttactgcaggattttcagcttcagcaagcaggtatccaaaatgttgaaagattatgactggattaatgcagagagacacctctttggcca

SEQ ID NO: 28198 - DNA, 78 bp, Homo sapiens
gaagaaaaacgctttttgcatacaagcaggaaaatgagatgttatccagcaacctgatctttttcctcataacttgcc

SEQ ID NO: 28199 - DNA, 74 bp, Homo sapiens
ggtggtcaagcgggccacgcacctcgtcaccaaggccaaggcctgtttaaagaagaaaacccgtatgctagatt

SEQ ID NO: 28200 - DNA, 56 bp, Homo sapiens
caggaggcgaaatgtgcaaatgtttatggataacagacgagtacctttggaaaggt

SEQ ID NO: 28201 - DNA, 74 bp, Homo sapiens
gctcccattgaacatgtgctcagtggctggaaggcctcccgaggagcccagacagctgcagccacagctccccg

SEQ ID NO: 28202 - DNA, 74 bp, Homo sapiens
cagccctgtgtgacaccaagataagtaaccattacagacatctttagttttttccagagatttcggtttgcttg

SEQ ID NO: 28203 - DNA, 100 bp, Homo sapiens
agccgatccagcctgcggagcctgtggggcagttggagtgcctcaagcttattgcctctcaaaaatttacagacaaacgcattggctatttaggggcaat

SEQ ID NO: 28204 - DNA, 50 bp, Homo sapiens
caggtggtggcgcgcgccgtgtgcttgttggattggatgctgctggcaag

SEQ ID NO: 28205 - DNA, 74 bp, Homo sapiens
tttgtcagtgcacaaaatggcgccctacagcctactggtgactcggctgcagatatacacctgaagaaattgag

SEQ ID NO: 28206 - DNA, 100 bp, Homo sapiens
gaaattgctaaattatacaaacagcttgatgacaagtttaatcccatggaatcaatcaaattaaatcatcatgactacattgattccccatcgctgaagg

SEQ ID NO: 28207 - DNA, 100 bp, Homo sapiens
gacggcgcctcctacgaggcagaaatcagggagctggaggccctgcggcaggatgggagtcccagcttctggagacggggttcctggggatcttcctgtg

SEQ ID NO: 28208 - DNA, 75 bp, Homo sapiens
ttaattttgccggaatatttcaagacaccgaaaggtacaatgtcagtcaactggaagaatggctgcgtgacaaga

SEQ ID NO: 28209 - DNA, 75 bp, Homo sapiens
ctaaaaatgattcgggaatatcggcaaatggtacttaaacttcacccttgtttagcccctattaaggttgctttg

SEQ ID NO: 28210 - DNA, 89 bp, Homo sapiens
ctcaaagctgctgccgccccttgggctaaaaggttgcactgctgtgatccatcctcatctcctaaagatgcatcctgacttatctccac

SEQ ID NO: 28211 - DNA, 74 bp, Homo sapiens
aagaatccaaagaaaacaaaatggtggtatcatgcttgctttgaccagatcaagttctttaagtgacttttcct

SEQ ID NO: 28212 - DNA, 75 bp, Homo sapiens
cagtacaagcacttgatgttatcacaagacaccttccctccatgagtgtccatgaaactgggaggcgaccgtgtt

SEQ ID NO: 28213 - DNA, 75 bp, Homo sapiens
gggcagggcacgaggcctctgagcctagagagtgaagtacctggagtagaacagaaaaattattatgtctgtgtt

SEQ ID NO: 28214 - DNA, 74 bp, Homo sapiens
acagctgagtttcaaaggcaagagcctcaaactcaacactgcagaagatggcctgcacagctgaccacagttgg

SEQ ID NO: 28215 - DNA, 95 bp, Homo sapiens
aaaggattcggatttattaagcttcatcctgaggttagcattacacttctcccagtggagcccatgacttctgatcaggacgctaaggttgtggc

SEQ ID NO: 28216 - DNA, 98 bp, Homo sapiens
cctgggctgcatgcttttcaaacttctgagagggtaaaaagatggcctatcagaaggtccatgcagatcaaagagctccaggacactcacagtactta

SEQ ID NO: 28217 - DNA, 75 bp, Homo sapiens
tcctcgtcagcactgactttcagctatggaatcggtctgtttctgtcgactgtggaccacttatgtgcgatccgt

SEQ ID NO: 28218 - DNA, 100 bp, Homo sapiens
atgatggccgatatgtacaacaggaataacatattgacttactgaactgaagcattctgagttgaaaggagccccagaggaaaggagttctgtgttgctc

SEQ ID NO: 28219 - DNA, 90 bp, Homo sapiens
gccgccgaagaagcatcgttaaagtctctcttcaccctgccgtcatgtctaagtcagaggagcgttacctgggtggcatcaaaaagcggc

SEQ ID NO: 28220 - DNA, 75 bp, Homo sapiens
ctcagttccacacaagatcatcacccaccttcgaaaagagacctacctggtggttctgtgccttcccctactctc

SEQ ID NO: 28221 - DNA, 82 bp, Homo sapiens
tcggctacagcgacacagcctggatctcctccatcctgctggccatgctctacgggacaggccctgtttgtgctcttcgtcc

SEQ ID NO: 28222 - DNA, 75 bp, Homo sapiens
ctctttctggcctggaggctatccagcgtcttattagtaggtaagaaacagctgctcctccacctccaccccagc

SEQ ID NO: 28223 - DNA, 82 bp, Homo sapiens
ccccgctggttataatccttcaatatatgcagaggccaggatgtgggcccagccctgtgccaggaggctggctggaataaag

SEQ ID NO: 28224 - DNA, 83 bp, Homo sapiens
gattgattaagtcttttatccgagacctgtctctctacctccagcacatccgggcatgttatgttacccagagaactttccaa

SEQ ID NO: 28225 - DNA, 97 bp, Homo sapiens
ttttggttggtgattttgatgatagccacaaagcaagcagggaaatgctgtctatgatttcttcattggccgtgaattaaaccctcgaattggtact

SEQ ID NO: 28226 - DNA, 73 bp, Homo sapiens
agttcagtgggaagcatgtcgtctttatcgctcagcctgtcaagttggctgttgtttgcagagatggtcaagt

SEQ ID NO: 28227 - DNA, 113 bp, Homo sapiens
gcgagcgctcgcgagcggctgcgggacgcgaggtttccgggtgctggagaatctggtaaaagcaccattgtgaagcagatgaggatcctgcatgttaatgggtttaatggaga

SEQ ID NO: 28228 - DNA, 103 bp, Homo sapiens
tcagggtcgcagggaactacttccgggggagcggcgcggcggcgcgggaggtgcactattgacaaccgggtcacccgggtggcctggctaaaccgcagcacca

SEQ ID NO: 28229 - DNA, 90 bp, Homo sapiens
cacaggtacatcagctgctaacgcctgcaagtgccatctcaaacaaagaggcaagcagtggctctgggattaatgaaaatcaagttccat

SEQ ID NO: 28230 - DNA, 122 bp, Homo sapiens
cttatctgtcagtgctgtgtgacagcatcgcaacgggatctgcagaacctgaactcgatatgaattgagaattcgttatttgccaaaaggatttctaaaccagtttactgaagataagccaa

SEQ ID NO: 28231 - DNA, 100 bp, Homo sapiens
ccagttctttattaaggatctctaccaagacgtgctgtgtctcaccctgtttgacagagaccagttttcaccagatgatcgcaagtgcggcggacatcaa

SEQ ID NO: 28232 - DNA, 75 bp, Homo sapiens
gccggaggaaagatggaagactaccaggctgcggaggaggccctgccctgggagaagccctgccacacgtcgtgc

SEQ ID NO: 28233 - DNA, 100 bp, Homo sapiens
cacccggcggcctctcattctgcagctcatcttctcaaaaacagtattaaaggtggaagaaggtccatatctttttctgtgggtgcttcaagtgttgttg

SEQ ID NO: 28234 - DNA, 99 bp, Homo sapiens
acaaatgtaacttctgaggacaaaaaggtgtctttcctgaagactatcttcccgtctcaaaatggacatgatggatccacggatgtacagcagagagcc

SEQ ID NO: 28235 - DNA, 90 bp, Homo sapiens
cgccccgcccgcctcgcccgccgtgagcgcccggagcggtccgcgagccaccgaggcccaggcccagggccccggccagtgcccagcccc

SEQ ID NO: 28236 - DNA, 74 bp, Homo sapiens
ctcaacagcatggatgccactagtgagcgggactttgtgggtacatcgagtacatgtgtgacatggtggcggag

SEQ ID NO: 28237 - DNA, 100 bp, Homo sapiens
actcttcagataatcagagtggaggaagtacagccagcaacaggggcaagtgtccgagtggtgaatcagctacttacagagatggatggtctggaagcac

SEQ ID NO: 28238 - DNA, 100 bp, Homo sapiens
caacccaatgttccgaggctatgcccagcagacaaggtctttactaggtgtatttgaagaagatgccacagctatttccaactatatgaaccagttgtat

SEQ ID NO: 28239 - DNA, 75 bp, Homo sapiens
caggattccacagtgtcctctggaaaatgactgcccttgaagtatgcagagcatttttacaggaagataaaggcg

SEQ ID NO: 28240 - DNA, 97 bp, Homo sapiens
aagcggacacgggaatatatccgaagcctgaagatggttccaagtattccctatctagagaccacagagctgggcagcaagaaggagctcaagtcca

SEQ ID NO: 28241 - DNA, 100 bp, Homo sapiens
tcgacttcaaactcgtctttggcgaggacggggcgccggcgccgccgcccccgggctcgcggcctgcagaccacaccaccccagagccaagtgcaccgag

SEQ ID NO: 28242 - DNA, 100 bp, Homo sapiens
gtaggtggtttggacccgccgggccgccgtcgtttccagaaagggtttgactggaggaacctctggagcagctatccagcggaggccctgcagctcccaa

SEQ ID NO: 28243 - DNA, 50 bp, Homo sapiens
ctcatccacagagccacatctgttagagaatcagccagaatctcatccaa

SEQ ID NO: 28244 - DNA, 100 bp, Homo sapiens
acaggaacttctgggtcctgcggctgcccccgggcagcaagggggaggcccccaaggaaaaatgaggaagctgtgagtaccagtggaaggaacgagccag

SEQ ID NO: 28245 - DNA, 75 bp, Homo sapiens
tccgagcagggaccgcctgctgcactttgggttcaaggcgacatgccggtggtggtgtgcacattgagccccggt

SEQ ID NO: 28246 - DNA, 99 bp, Homo sapiens
cagaaggttttgttttgacatagaagctgctgatcgtgagaaagatcagtctaaagaaaaggagaagaaagtgaaaaaaacaattccttcctgggctac

SEQ ID NO: 28247 - DNA, 75 bp, Homo sapiens
tgggacccaccgctgccctcagctccgagtccagggcgaggcagttgtgaaaaacttcaggacaaaaatgtttca

SEQ ID NO: 28248 - DNA, 83 bp, Homo sapiens
agtgttccttccgctagtgatcctttgcaccctgcttggagacggacttgcttccggttttacagacatttcaccagaggaat

SEQ ID NO: 28249 - DNA, 100 bp, Homo sapiens
gttttctctgccatgttgctattgcaggacggagctcactcagtaacttgatggattttgtgaagaaaacaggcatttgcgcttcaaagtgggaatgggg

SEQ ID NO: 28250 - DNA, 49 bp, Homo sapiens
tccacctctgcgtttttccctccagcacatcccgctctgggctttaaac

SEQ ID NO: 28251 - DNA, 74 bp, Homo sapiens
atcctggttctggaatcctcagttcaagatgcaaccttaaaatcagtgacaagaaacattccaaacaagcaaca

SEQ ID NO: 28252 - DNA, 100 bp, Homo sapiens
tgtgccctggcactgagcggccgcggccatggcgtacgcctatctcttcaagtacatcataatcggcgacacagcaagagtgagccatggagctacgtgt

SEQ ID NO: 28253 - DNA, 106 bp, Homo sapiens
aaagatctcaaaatctggacttgaaaagtcctattttgtaacggattatgatccaaccattgaagattcttacacaaagcagtgtgtgatagatgacagagcagcc

SEQ ID NO: 28254 - DNA, 96 bp, Homo sapiens
agtaccgcgagcaaggagcgcggaatcggggagcgtccggagctagctggatcctctaggcaggttcgtgctggccgtgggcagcgccgtctttga

SEQ ID NO: 28255 - DNA, 80 bp, Homo sapiens
agattttggtagagaagaatgaacattgtattgagaacaatatagatttgcagttcagagaagccgaactgggattacca

SEQ ID NO: 28256 - DNA, 100 bp, Homo sapiens
caacaattggatattacatcaaccaagctgaataaccagtgtgaggatcactactcttggaatcaaagataaatccaaatactgcatatcagaaacaaca

SEQ ID NO: 28257 - DNA, 50 bp, Homo sapiens
gggatatttgagagtccaactggcactggaggctgagaagacaaaactcc

SEQ ID NO: 28258 - DNA, 83 bp, Homo sapiens
cactggaccaggtgctgggccgcttcttcctctaccacatccacctgtggatcaacaatgcagatcttcgtgaagactctgac

SEQ ID NO: 28259 - DNA, 76 bp, Homo sapiens
acagtctgcatgtgcagttttcagatcatgagcgtcttgttgttcatcgagcactcagtagaggtggcccatggca

SEQ ID NO: 28260 - DNA, 83 bp, Homo sapiens
gccgtctgcaaagtgtccccggcaagaagcccgcggcgccatggctcacgtcggctcccgcaagcgctcgaggagtcgcagcc

SEQ ID NO: 28261 - DNA, 50 bp, Homo sapiens
cggagctggatccgcggtgcggctgtggcctccgcagcattcctagtgtc

SEQ ID NO: 28262 - DNA, 74 bp, Homo sapiens
ctgccaatcaagatgagtatggcttcagcgccagtcagcaaagtaaataaatactgtgcttcttccaactttca

SEQ ID NO: 28263 - DNA, 101 bp, Homo sapiens
ggctttgcagcggggacttcggcggcggcgcctcaggcacctcggcccgggactccagttcagttgtagaatggactcaggccccaaaagaaagaggtcat

SEQ ID NO: 28264 - DNA, 100 bp, Homo sapiens
gttgctcccgcctgagcccagcccccagaaaggattgtgacatatcgttggacccagaattgaggcagctaagaatggagcaacaggcgtggagttggac

SEQ ID NO: 28265 - DNA, 100 bp, Homo sapiens
ggaaagggacagggggcccaagtgatgctctggggtactggcgtgggagagtggatttccgaagctgacagatggtcttcccatgcacaagatgattaat

SEQ ID NO: 28266 - DNA, 101 bp, Homo sapiens
taagcgcctactagagcagggtttggagactcagatagattctgttgctgttaacatttcaaacttggtgcttgagaatcagccacctcggatatcaaaag

SEQ ID NO: 28267 - DNA, 74 bp, Homo sapiens
gttcctgctgacctggaaacatcttaaatggaagtggtgaatctggagctggcaagacggagaacaccaagaag

SEQ ID NO: 28268 - DNA, 97 bp, Homo sapiens
ctccgcgtcccgctcgctgggagagaggtacctctccttttccctctccctttccctaagtgcctccggagccagcgtggtggccatagacaacaag

SEQ ID NO: 28269 - DNA, 98 bp, Homo sapiens
gcagggcctggtagtgtggagcttcagcggcctggaggaggacgaggcgggcgaggttgcttatggaaccacagagaacagtcccgtgacattcgcgc

SEQ ID NO: 28270 - DNA, 98 bp, Homo sapiens
ccggcgggagcgcgaacgagcgacggcggaacccgtgggcctgtggactgcagcctcggcggtcagcagggcaaagtgcacctggagctgcggctgag

SEQ ID NO: 28271 - DNA, 135 bp, Homo sapiens
acagattgctgaccaggggcttgagagctgggttctattttccctcctcaaactgactttgcagccacggagagctttcgcgctgtagttcaatgagttcattatcacgtgaagtgagccagcattttaatcagg

SEQ ID NO: 28272 - DNA, 100 bp, Homo sapiens
gttcacggtgaccttcgcttggtgtcctcctggcctcagcaacctgacaattctgtcgtgtcccgattctggaacttttcaaagcctgactctcttcttg

SEQ ID NO: 28273 - DNA, 75 bp, Homo sapiens
gaatcagaggtgcagccgcaagaaagtctaccctgatgggagagtctgcatttccatcctccacgcgccaggcga

SEQ ID NO: 28274 - DNA, 83 bp, Homo sapiens
ctttaaataccctcaagaggagcaacctcgtcagcagcgaggaaggaaacagcggctggctgctggctctaccaggttctgtg

SEQ ID NO: 28275 - DNA, 100 bp, Homo sapiens
gaatgcaccacagccatctcacatttccaagtacattctcaggtggagacctgtagaacacctgaaggagaagctcattagccaggcccaggaagtgagc

SEQ ID NO: 28276 - DNA, 98 bp, Homo sapiens
ttgaccagaaaaccgacaaccttcccagaaagtccaagctcgtggtgggtggaaaagtgttcgccgagaacaagttgaaatcatcgcagaaggataaa

SEQ ID NO: 28277 - DNA, 118 bp, Homo sapiens
gcgccgtggctccggatctcttcgtctttgcagcgtagcccgagtcggtcagcgccggaggtattctctactgccgctgatggtcaaacgcaagtggaaattaaagtgtgtcagggtg

SEQ ID NO: 28278 - DNA, 82 bp, Homo sapiens
cagaccggcctggaagcctacgccctggggctggacaccgagaactacgatgacccgcacaaaacccctgcctccccagttg

SEQ ID NO: 28279 - DNA, 100 bp, Homo sapiens
agccaggaagagggactggaaccatctcagaagccatgcccctcaggctggaacttgccctgtctcctcgcagatgagggagtctccggtggactgcagc

SEQ ID NO: 28280 - DNA, 88 bp, Homo sapiens
tgtgtgccctgttcttcttgttatctttccttggctactgtaaagcatttagagaaatacaaggtgaatatcttaaccagacttgccg

SEQ ID NO: 28281 - DNA, 105 bp, Homo sapiens
tcctcacctccagcttcacgagctgccctgccctggaagtaatcttgcattcccatcaagagcaccatggacaaccccaccaccacccagtatgccagcctcatg

SEQ ID NO: 28282 - DNA, 100 bp, Homo sapiens
agtaagaagaaaaagagcaaagataagaagagaaaaagagaagatgaagaaacccagcttgatatgttggtatcttcaaagaacagtaaaacatccaact

SEQ ID NO: 28283 - DNA, 83 bp, Homo sapiens
ctgcgctcccatccacacgctcgggggatatgagactttctactcggaatatcctgagtgttgcgtggatgtaaaacccattt

SEQ ID NO: 28284 - DNA, 75 bp, Homo sapiens
gggagctggacggcgagcgcgagcggcgcgagaaaaaatggtggagtcaatgaagaaagtagcagggatggatgt

SEQ ID NO: 28285 - DNA, 83 bp, Homo sapiens
ctgaaaactgaggaatttgaagtgaccaaaacagcaggcgtcgacattccagatggctatcctgcttcagtacaacacggaag

SEQ ID NO: 28286 - DNA, 97 bp, Homo sapiens
ccggccggtgccagcacctttcggcttctgagacggcggcagcagcggcattcagaataatccagaatggctactctgatctatgttgataaggaaa

SEQ ID NO: 28287 - DNA, 88 bp, Homo sapiens
ccgactcggtgattgaggacaagaccatcgagctcatgacatggaagagaaggtgagaagttgtgaaacgctgaggctccagccctaa

SEQ ID NO: 28288 - DNA, 95 bp, Homo sapiens
aggcgccgaaatcaaagcgagagcgcctcggcctctccagctgtccgcggaagctggcagcagaccacccattcctgaaggagatgcaagatcaa

SEQ ID NO: 28289 - DNA, 75 bp, Homo sapiens
gcgccctgagagaacagggtggccgcttggtccagttcacagaagaaaagcttggccaggctgagaagacagaat

SEQ ID NO: 28290 - DNA, 75 bp, Homo sapiens
cttggagagattctgggagccaaacactccattgggatcctagctggtgcagtagacattgttgcaatcatgatc

SEQ ID NO: 28291 - DNA, 75 bp, Homo sapiens
aggcgggcctcccgtttctggctccgggctgagcttcctggagaagaggaaggcaggatgacgcaaaacacggtg

SEQ ID NO: 28292 - DNA, 100 bp, Homo sapiens
gtgattctgtcctaaacaagacagtgactccaggatttctgaagactattgtggaagaagcatccattaaggacccttcaaagttgtacaagaaagcaga

SEQ ID NO: 28293 - DNA, 100 bp, Homo sapiens
tcgcctatgtgggcgccgtccctcaccgcggcatcaagcaggtccggacccactggctgctggagcttgtcaccaccagccccttcgacaaggatgacca

SEQ ID NO: 28294 - DNA, 83 bp, Homo sapiens
gtttccctgtagcagctccttattgctggagaaggagaaaagtgcccaagatcctttcaggtcatgagtgacactgaatatgc

SEQ ID NO: 28295 - DNA, 100 bp, Homo sapiens
cgcgaacgagcgacggcggaacccgtgggcctgtggactgcagcctcggcggtcagcagggtggcaatgaccatgagatcttcacagaccccagaaccat

SEQ ID NO: 28296 - DNA, 100 bp, Homo sapiens
gcactgctgtaaaaactcagttactcaaactgaaacgtctcctgcatcaggcagtcgatgatgtgaagaaaggttacatcaaagcagaagaaaagtccta

SEQ ID NO: 28297 - DNA, 100 bp, Homo sapiens
gacagcatttccaactgtgacaccttgaacaaggcacctaacctcgccagagctttgtttttccagaaaggaggagtcaaggaagcccttagtgaacgag

SEQ ID NO: 28298 - DNA, 100 bp, Homo sapiens
ccacttcacacatggagagatgcaagaccagtccatttggggaaatccttcggatggtgaactcattagaagttatcaccaatctagtgaaaatgttgaa

SEQ ID NO: 28299 - DNA, 100 bp, Homo sapiens
aacgaaatttatgctgggagtggtaccaggaagttccttgttttaatgtaaatgctcagctgaaaccaatggagtcaattgaccctggccagcagttcac

SEQ ID NO: 28300 - DNA, 98 bp, Homo sapiens
cccgggctccctggaccacctggacctgatggacaatccattttttgatctgcacttcaagaaagtgtacagtttggaagcatatagctgtgcttcta

SEQ ID NO: 28301 - DNA, 83 bp, Homo sapiens
caagccgaggattctgctcatgggactccggcgcagcggcaagtcctccatccagaaggtcttccccagggaggtcctgaact

SEQ ID NO: 28302 - DNA, 100 bp, Homo sapiens
ggcggctgctgctgctgctgcccgcgtccgaggctcgcgggcggcgggcccggggccatgaagcccccaggaggagaatcgagcaatctttttggaagtc

SEQ ID NO: 28303 - DNA, 75 bp, Homo sapiens
cctgcatcaacctgatcaccagccaggagtacgccgtcaaggtaagcaaggcagctcgccaggagaagcggtttc

SEQ ID NO: 28304 - DNA, 100 bp, Homo sapiens
agaggttctacagcaggaacttcagggcattcacagtttccgccctccagaatacccatcatatagcccctgaggtggcatggtgatgtctccatgaggg

SEQ ID NO: 28305 - DNA, 117 bp, Homo sapiens
aaacccccacccaaccacgaacaagtgctcagaagggcaacatcccagaaagcttccaagaaggatctgagtctctccctgcggagacagccctgaagaactcctgtaacgtcaagc

SEQ ID NO: 28306 - DNA, 83 bp, Homo sapiens
agagcaagctcttcaagaactcggcaacaagcttagcgaggcagctgcaatgactctccgcacggtattattgtcattgcaag

SEQ ID NO: 28307 - DNA, 100 bp, Homo sapiens
ccgccaactctgacctggccaattctgacgccctcaaggtcgccaaggaggtggacccccaggctgataccccaatgtccttctttgactttgtggttga

SEQ ID NO: 28308 - DNA, 75 bp, Homo sapiens
aatacaccatcaacattcacaagcgcatccatggagttgagggtcgctgtctgcccattgatagaggccagattg

SEQ ID NO: 28309 - DNA, 100 bp, Homo sapiens
cagcaccggggctcaggacagttcccagcgggctccgtttcgtctccagaaccctggacagctcctccaggtggtcgtcggttttctgagggtacttcag

SEQ ID NO: 28310 - DNA, 96 bp, Homo sapiens
tacaacccgaccaccggagaattcctggggcgcaccgccaagagctggggtatgtgccgtccaggtgaaaaacactgggaagatgtatgcctgtaa

SEQ ID NO: 28311 - DNA, 100 bp, Homo sapiens
caaaaagacacaatgtgtcccagccacttttcccctggtcttcaatgccagaatggtgtttgaaaagctttagatccagctaaggatccatgcttaaaga

SEQ ID NO: 28312 - DNA, 104 bp, Homo sapiens
tgagggtgccctcaatgagcacatgaccagcttagcttctgtcctaaaggttcaaaccttgtactactcagctgatcacaagctgcttgatgggaacctactag

SEQ ID NO: 28313 - DNA, 51 bp, Homo sapiens
cactattccaaccaagaagagccaggtggggaagctgaggcaggaagccct

SEQ ID NO: 28314 - DNA, 87 bp, Homo sapiens
cagaattcccagtttcttttaacaaggatcactactcttggaatcaaagataaatccaaatactgcatatcagaaacaacaggcaag

SEQ ID NO: 28315 - DNA, 100 bp, Homo sapiens
gcaggataatatgctccaacgttacaacattaaaggctgaaagtttagaagagaagaatatggctaaaattcatcgtggtcagctggagaagttgaaatc

SEQ ID NO: 28316 - DNA, 100 bp, Homo sapiens
gactggctgcttggggagattgagtccaagttcaaccaagccatttgcatcctgtggacgatgaacacaaatgcagctgtggccgtgcctggcctgtgtg

SEQ ID NO: 28317 - DNA, 100 bp, Homo sapiens
ctaggtatccgcactgctcagggtcgaggctgtctgtcaacagcgtgactgctggagactactcccgacccctccacatctccaccttcatcaatgagct

SEQ ID NO: 28318 - DNA, 82 bp, Homo sapiens
ccgcagctgcagccgcctgaccacggcgactggacttacgaggagcagtttaagcaggtccggcctctttggcctacccccg

SEQ ID NO: 28319 - DNA, 90 bp, Homo sapiens
agacaaggagctcagtgacctcctggacttcagcatgcttgagtgtgcgtcagaatcccctgaagagcttgttaaaacacaaggtgctgg

SEQ ID NO: 28320 - DNA, 75 bp, Homo sapiens
gttgtattcagtattatttggaaaacaattggcttcaacatgagaaaggccagaacacaaagcgtgaatccggaa

SEQ ID NO: 28321 - DNA, 98 bp, Homo sapiens
ggatatgaagaaattgagggttcttgccatggctttctcctgtttctcagaggatttatcaattatgcaaaagttcggaagatgccagaaactttctc

SEQ ID NO: 28322 - DNA, 101 bp, Homo sapiens
aacggccaacttcggcaagatccagatcgggatttacgtggagatcaagcgcagcgatgagtcaacacagactgtccaagctctgcagtattcaactgttg

SEQ ID NO: 28323 - DNA, 100 bp, Homo sapiens
tcgaggtcaacggcgtcaacgtggagggcgagacgcaccaccaggacctgaaggagaagaaggagaaggtggaggagaaggcaagccggaaagagcgaaa

SEQ ID NO: 28324 - DNA, 96 bp, Homo sapiens
gagatggtcaggtctggagctcgaccgggccaggtgcctggaatacttattaagaaacgatgcaaatccagggatccgtgataagcaaggatacaa

SEQ ID NO: 28325 - DNA, 75 bp, Homo sapiens
gccagcaggaaatacagcatgggtacacatctttctggaatgactgcatatcatcaggcctgcgagggggcatcc

SEQ ID NO: 28326 - DNA, 74 bp, Homo sapiens
tgtacttacaaagtccatgctaacctactatgagggtcgagcagaggtttgtatacagagttcttcagggatcc

SEQ ID NO: 28327 - DNA, 100 bp, Homo sapiens
aatgcaaactgaaacctgggaaacagtgcagatgctaaagaaaacccttatggcgaggatgacaataagagtccattccccctgcagcccaaaaacaaac

SEQ ID NO: 28328 - DNA, 100 bp, Homo sapiens
ccgatccgatcacctttcaaggagtcctgtgatccatcactcggattggcaggacctggggccaaaagccaaggtgctgtgacatgtatatggatgaatg

SEQ ID NO: 28329 - DNA, 97 bp, Homo sapiens
tggaacatggctagcaggaatgcttactgttgcgtggttcgttattaacaggaatgcagacatggagatgactctggagcgagcagtgagtatgctc

SEQ ID NO: 28330 - DNA, 100 bp, Homo sapiens
ggacgtggccgtggtgtgcgaggagacggccctcatcacccgacccggggcgccgagccggaggaaggagaaacgcttcgttaagggactcaggcagtac

SEQ ID NO: 28331 - DNA, 100 bp, Homo sapiens
tgattgtgaggcctccccagccatgtggaactataacgaaggaggcccaacttcattcaataaggagcctgacggatttatcccagacggtagaacaaaa

SEQ ID NO: 28332 - DNA, 90 bp, Homo sapiens
ccctcctttaagccctgaggaaaaaactaaaatagaaaaatctccagctcctcaaaaggcagatgaagcatattccatcggccccgctcc

SEQ ID NO: 28333 - DNA, 102 bp, Homo sapiens
gtctcgacgtggggcggccagcgatgaagccgcttgtactcccagagtacctcatccacgctttcttctgtgtcatgtttctttgtgcagcagagtggctta

SEQ ID NO: 28334 - DNA, 75 bp, Homo sapiens
aaaaacatgattacagggacatctcaggaggcacggaaggcccagctagaaaaccacgaaccggaggaggaagag

SEQ ID NO: 28335 - DNA, 82 bp, Homo sapiens
atagcaaacttgatgagtggatgccaacaaaaagtccctgtgaagcaggaagagtgagggcaggttcactgcagctcagcag

SEQ ID NO: 28336 - DNA, 83 bp, Homo sapiens
aaggaaataggatttaaccgctctctgcctcccagaaaacctcggatcaattctcagctggtggcacaacaagtggcacaaca

SEQ ID NO: 28337 - DNA, 101 bp, Homo sapiens
ctatttcttgtggatattatggctaataacacaacaagtttagggagtccatggccagaaaacttttggggcgtcgggtttggagttcaagtcggtagccg

SEQ ID NO: 28338 - DNA, 115 bp, Homo sapiens
gcgggtggcggcgaacgcggagagcacgccatgaaggcctcgggcacgctctggaaaggaagagaaatggaagtgagaaagttgagcatttcctggcagttcttgatagttctgg

SEQ ID NO: 28339 - DNA, 100 bp, Homo sapiens
gcatgttggacgatatctaatattacagctggaaatagggcacagatccagagtggcagaatttagtgacatttggaagcttttcaaacatggttccctg

SEQ ID NO: 28340 - DNA, 92 bp, Homo sapiens
ggcggatgttgtgagccgggtcgctgcggccgaggctccggggaactctaatgatccaggacaaagaagttaccctggagtatgtatcaagc

SEQ ID NO: 28341 - DNA, 100 bp, Homo sapiens
agggtatagcagatacatggcaagttgttggaacagtgacttgcaagcccactttccttgtggaactgtccagagtgctggcaaatccaggaaacagtca

SEQ ID NO: 28342 - DNA, 101 bp, Homo sapiens
ctggacaccagcaatgagaggacccgcgtgggcaccctgcaggtggtcagacatgtcatcaactcagctggtacagcagggtcccggggagtccaggaggc

SEQ ID NO: 28343 - DNA, 100 bp, Homo sapiens
ttttttggacaatatgtttggaccgcgagattgaaaatcttcaagagcagcttagagacaaggaaaagcagatgagcagcttgaaagaacgggtcaaatc

SEQ ID NO: 28344 - DNA, 100 bp, Homo sapiens
ctgggttccaggaggacacgctgcagttggccttcatcgacttgagacaagtcatagcaaatgacagaagtcccttggtgggcaaaattcactgggagaa

SEQ ID NO: 28345 - DNA, 115 bp, Homo sapiens
cggacgggaaggcgggagacgagaagcctgaaaagtcgcagcgagctggagccgccggaggtgaccattgtgaggtagatattttgttctaattttccagatgaggaagctgaga

SEQ ID NO: 28346 - DNA, 50 bp, Homo sapiens
cagcgccggtgcatgtcgatggcggcgactggcggcgcgatggacctgac

SEQ ID NO: 28347 - DNA, 98 bp, Homo sapiens
gccttcacaccccggacatccgcgccacacgaggatcccttttcccccagaaattactcaatgctgaaacctctcaaagtggtattagagacgctgaa

SEQ ID NO: 28348 - DNA, 107 bp, Homo sapiens
gttctacaacaacctgttggagcacatgcagtcccatgcagagagtccggagggctgtgctaccccaagaagaggaaggatcagggggtgggcaactggtaactgaa

SEQ ID NO: 28349 - DNA, 89 bp, Homo sapiens
ctttccctctcccaacatggcggcctcagccatcgacgagtacaagccccaggatgctaccaccaacccgtccctgatcctggccgcag

SEQ ID NO: 28350 - DNA, 75 bp, Homo sapiens
ctgggtatcaaatatgacccaagcattggtatctacggcctggacttctatgtgatctcttccctgaagaacagg

SEQ ID NO: 28351 - DNA, 50 bp, Homo sapiens
gggaagatggccgtctttccttggtcgcaatggaagaagagatcgccgcg

SEQ ID NO: 28352 - DNA, 82 bp, Homo sapiens
tgaagctcaccgagacggcgatccgggcgctcgagacttaccagagccacaagtttttcagaagaagtgaagtcaagatgaa

SEQ ID NO: 28353 - DNA, 76 bp, Homo sapiens
aatctcagagaagctctgaaaaagcctctcctgggttgagcaacgagaagggcatggacgccgtgtcaccttggaa

SEQ ID NO: 28354 - DNA, 85 bp, Homo sapiens
ctggaggagaggccggacggcgcgggcgccggcgaggagagcccgcggctgcagacttcccaagtaagaagcggaagaggagccg

SEQ ID NO: 28355 - DNA, 100 bp, Homo sapiens
agattttgatgtggatgatgccaaagttttattaggtcgcagcagttgtggtagaaatttctgggttagtggactctcttctacaaccagagctacagat

SEQ ID NO: 28356 - DNA, 100 bp, Homo sapiens
ttcaccgcaagactgtgggcgtggagccggcagccgacggcaaaggtgtcgtggtggtcattaagcggagatccgggacagcatggacagtgtcaagcag

SEQ ID NO: 28357 - DNA, 100 bp, Homo sapiens
ccggggcaggggcggaggcggaggcagaggtggaggcgctttgaaaggggaatcacttgcaaggtccacacaagtccgcctatgtactctctggatcgaa

SEQ ID NO: 28358 - DNA, 100 bp, Homo sapiens
ctggcggtgatcaaactgctgaacgagaaggagcgggagctgcgggagactgagcacttgctgcacggtcttccactttcgccttggtgcctgtcttcgc

SEQ ID NO: 28359 - DNA, 100 bp, Homo sapiens
cgaatctttgacccagctccaccaggcagcagaaagcaggaaaccagtctcagtgtccaactctctaaccttggaactgtgagaactctgaggacaaagc

SEQ ID NO: 28360 - DNA, 100 bp, Homo sapiens
tactgcatgtgaagctcaccgagacggcgatccgggcgctcgagacttaccagagccacaagcgccgtgccgtccctgcagtgacaccgaggtgctccta

SEQ ID NO: 28361 - DNA, 99 bp, Homo sapiens
atctacgtgtgctttttcaagggagctgataaagaacttcttcccaaaatggatatcaacatggcaggagagcccaaaccatacagaccaaaacctgga

SEQ ID NO: 28362 - DNA, 90 bp, Homo sapiens
aacaataacaagactgtccttcggacaagttttagtagtttatgccaacgtgacttcattcatacagatgaaccaaggatcgggatagca

SEQ ID NO: 28363 - DNA, 91 bp, Homo sapiens
gagagtcggagccgaataccaagctcggatccctgaatttgatccaggtgtatcagttcctatccctgtgattggactgagggacgaagaa

SEQ ID NO: 28364 - DNA, 83 bp, Homo sapiens
gtcgaagcaccgcagcctggtgcagatcatctacgacgagaaccggcaggatgatgggcaggacagggagaggctgacctact

SEQ ID NO: 28365 - DNA, 75 bp, Homo sapiens
cggatttctgctatgatgacaggtttatggctacaaatgatttgatgacggaactgcagaaagattccatcaagt

SEQ ID NO: 28366 - DNA, 103 bp, Homo sapiens
ccaagccccagccccctgtggctgaggctacaccccggagccaggaggacaatgcagatcttcgtgaagactctgactggtaagaccatcaccctcgaggttg

SEQ ID NO: 28367 - DNA, 74 bp, Homo sapiens
ctctttgtagcgtggtgcttctgttgctcacaggtagagtacagagagatggatgaaagcttggccaacctctc

SEQ ID NO: 28368 - DNA, 74 bp, Homo sapiens
gaagacttcatcctcccagacactacagagggaactcctttgaaaaaagatggtgaagaatgtactaacgaagg

SEQ ID NO: 28369 - DNA, 50 bp, Homo sapiens
aatgcatcagaaccatgcacgattaaaatgtccctactgtccaatggaac

SEQ ID NO: 28370 - DNA, 88 bp, Homo sapiens
tgaagtatccagcgctcattgggaatttagttaaggtggacccccaaaagtacaagggcatatttaacggattctcagttacacttaa

SEQ ID NO: 28371 - DNA, 74 bp, Homo sapiens
tcttgggtttagcaaaagttcatctccttctgcatccttaactgagaatgagacttaattcagtgcacaaatga

SEQ ID NO: 28372 - DNA, 76 bp, Homo sapiens
ctcggacgcacggaccaggcccatttccctttcatctaaacctccacagctgttgagaaaaaggagaaacctcttc

SEQ ID NO: 28373 - DNA, 90 bp, Homo sapiens
ggcgccctgggggttcagattgcaaggtggcaaggagcagaagcagcccttacaagttgcaaagtctgacagcaatgcaagcttcctccg

SEQ ID NO: 28374 - DNA, 82 bp, Homo sapiens
cggggaaatggctgctgttgcttctgggccagaggaagagaatgagtatggtttgaagtggtgaacatggatttttctcggc

SEQ ID NO: 28375 - DNA, 71 bp, Homo sapiens
gtgacagtctgcatgtgcagttttcaggccatccggctgtccttagagcaagccctgcctcctgagccaaa

SEQ ID NO: 28376 - DNA, 101 bp, Homo sapiens
tttggggaccgggaccgggatcgtgaccgtggagggaggtcagtcctctcagcagccatcaaactactgaatgcagcaacagtaaatcaaagactgagttg

SEQ ID NO: 28377 - DNA, 98 bp, Homo sapiens
cgttgactatcctgcccctgagatccacccaagttgtgggtatgttagagcccaccaaggaaccactgaaaccactttctgctgcagaaaaaatagct

SEQ ID NO: 28378 - DNA, 100 bp, Homo sapiens
ctgcgcttcgccaagctcggctttgagatcttcctcagctccttccaggtcaacgtattgaaacttactgttgaagacttggagaaagagagggatttct

SEQ ID NO: 28379 - DNA, 100 bp, Homo sapiens
actggatttcctgaagatgtttacagtgcagtcttatcgaaggatgtgcatgaaggacagcctcttctcaatggaatactctgaagatagtaactccgag

SEQ ID NO: 28380 - DNA, 96 bp, Homo sapiens
ccagctccttggggtttccggctgcagggcggtaaggatttcaacatgcctctgacaatctctagtagccctaatttgtttagaactgtaatatgc

SEQ ID NO: 28381 - DNA, 75 bp, Homo sapiens
ctgtccctggagcatcctccgctggagctggagcttgacaggatgaaacaagtgaagatgctaactgtcttgctt

SEQ ID NO: 28382 - DNA, 100 bp, Homo sapiens
tcatagttcaccccagagcattttagatgatgttgccatggtggttgtgtcaaaccgattggtgacatctccatgctgtattgtcacaagcacatatggc

SEQ ID NO: 28383 - DNA, 75 bp, Homo sapiens
agcgagcggaggagcaggcgccggagcgcacgatgggatcgtgattaagatcgaggtacagaccaacgacgaggg

SEQ ID NO: 28384 - DNA, 88 bp, Homo sapiens
catcagtccttgaagagcagctttgaggcgcttctccaacgctgctccctgtctgcaactgacttaaggagaaggcagagccccccca

SEQ ID NO: 28385 - DNA, 88 bp, Homo sapiens
aaattgaaacagagcatgggactagcatcttgcagtctgttaagtgaaaactcaaatgcagcatggattaatctctatagcagcccgc

SEQ ID NO: 28386 - DNA, 90 bp, Homo sapiens
catgactcttttggcagaagaggctcgaaagcttgctgaacggacggctgtcctcagcgaggggccgtgcacccgctcctgagcagcgcc

SEQ ID NO: 28387 - DNA, 50 bp, Homo sapiens
ggcggccgcagctgccacaaaccaggtggatctatcttaacgaccagaat

SEQ ID NO: 28388 - DNA, 75 bp, Homo sapiens
gccatgcttcctgtacagcctgcaaaactctcctgacccctgaggattaccagcgatttctagacctgggcatct

SEQ ID NO: 28389 - DNA, 74 bp, Homo sapiens
agccaggaacctccctttccttatcaagaaggatgcacaagatgaggtgaagagtcttttgaagacctgaccga

SEQ ID NO: 28390 - DNA, 76 bp, Homo sapiens
ttgccatccccggctccagcttcctggttctcccatgggcaggtggtctctctggatgagctgcgccccttccagg

SEQ ID NO: 28391 - DNA, 83 bp, Homo sapiens
gcgcgaggtccgcgcagcccagcgcagccatgtctcaccaacggctttgggggtgcgaggagcgagcaggagccgggcggcgg

SEQ ID NO: 28392 - DNA, 74 bp, Homo sapiens
atgcagtccatcaaaacagacttcctgcagtgctgttccctcgtcacaccaatgccagtgctcgagacaacacc

SEQ ID NO: 28393 - DNA, 74 bp, Homo sapiens
tttttcacttactgcaggattttcagcttcagcaagcagcaagccagggctgagcaggaagaagaattcattag

SEQ ID NO: 28394 - DNA, 100 bp, Homo sapiens
ctgttttcctcacattcctcaagcagttctattgtttccaccctgctagctcttatggatggattggacagcagaggggaaattgtggtcattggtgcta

SEQ ID NO: 28395 - DNA, 95 bp, Homo sapiens
tggcgagtgctttgtgatcgaaaccctgaccggatcccataaacactgtcggtcagaagagatcaattctacagaaatttccagtggttctgttg

SEQ ID NO: 28396 - DNA, 101 bp, Homo sapiens
tagaggatgccgaggagaaaacagcaggcacccaagcgggcggcaggaagctgaatatggtgggcatgatcagatagatttgtatgacgatgtcatatctc

SEQ ID NO: 28397 - DNA, 100 bp, Homo sapiens
acggatcatggccgcagccgctctggggcaggtcttggacaagctcctcctttacctgcgcatcgtgcattccttggattattacaacacctgtgagtac

SEQ ID NO: 28398 - DNA, 75 bp, Homo sapiens
caacgaccgcaaccgcatcgtgctgcctttcagtttcgcctggccgggcccccagatgccgacggccctctctac

SEQ ID NO: 28399 - DNA, 75 bp, Homo sapiens
gaagacatcaagaagatcttcgagttcaaagagaccctcggaacgaatcttgtcgattggcctggctgctgccta

SEQ ID NO: 28400 - DNA, 98 bp, Homo sapiens
gtgtcggaggtctcatctttgaactactgccggagcttctgccagacactacaacaacaggagtgcaaacttctctacagccgaaaagagggtcaaag

SEQ ID NO: 28401 - DNA, 83 bp, Homo sapiens
atggaactgaagacagctgggcctaacaagtgcccaggtgactcagatcaatgtccgagttaccaccatggatgcagagctgg

SEQ ID NO: 28402 - DNA, 82 bp, Homo sapiens
cctcttcccaggacattaaaataaggaaactgtatgaatgtctgtgggcagatgccacaggtgttcaagagctagatgaagg

SEQ ID NO: 28403 - DNA, 75 bp, Homo sapiens
cgacgacacagagatggcttcccccaacccagacgaagactgacaggacttccacacccatgctcctctcggcac

SEQ ID NO: 28404 - DNA, 97 bp, Homo sapiens
tttaaccaagaaaaattaccgagccagccagcaggaaatacagcatcctttgacgacccctatgccctggtggtgctggctgaggaggagctggtgg

SEQ ID NO: 28405 - DNA, 100 bp, Homo sapiens
ctctaccttgcgagccgtcttccccaggcctgcgtccgagtctccgccgctgcgggcccgctccgacgcggaagtgaaggagaacgacctgctcagaatg

SEQ ID NO: 28406 - DNA, 98 bp, Homo sapiens
caaagcaaaccaactgagaatgcaggttgcttatcaagtgtcccacaaatgaaaaaaatttctacatcttacgaggaaagacggaagcaagctaccgc

SEQ ID NO: 28407 - DNA, 101 bp, Homo sapiens
tgggacttctcgatctctggaggcacctgttgcaagtgacaggtactccaaagattcaggtttactcacgtcatccagcagagaatggaaagtcaaatttc

SEQ ID NO: 28408 - DNA, 75 bp, Homo sapiens
ctcccatgagctcagttgttgtggaaaaacatcatccagtcacagtgtgaaccctggaggatgggcaccagcctc

SEQ ID NO: 28409 - DNA, 76 bp, Homo sapiens
caattggaggtgtccaggtacagattctgaaaaggacttcatagacctcacgttgtcgaagactcaacgaaagact

SEQ ID NO: 28410 - DNA, 100 bp, Homo sapiens
tctatatccatagattggaatattggtgggccagcaatcctcagacgcctcacttaggacaagttcaaaccttgtactactcagctgatcacaagctgct

SEQ ID NO: 28411 - DNA, 101 bp, Homo sapiens
ggactgattccaagacaaggcgcccaccccacagagcaagttttctgaaacgtatcgggagcggtgccgagaaaaatttccttactagatgacatttcatc

SEQ ID NO: 28412 - DNA, 100 bp, Homo sapiens
gggggtgtcctggtgcacccccagtgggtgctcacagctgcccattgcctaaagaagtatgagccagagcgggatgagtggcacttggtggccccaatgc

SEQ ID NO: 28413 - DNA, 97 bp, Homo sapiens
cagggccaggcgccgctcagaacggtattaccagagaaacggagtctgaaactcttgaagagccacaatctcaatgtgaattggtacatgtactgcc

SEQ ID NO: 28414 - DNA, 90 bp, Homo sapiens
ttatccccagcaaaaagctccgcaacaagatagcagggagctcgaggccatgagcagatataccagcccagtgaacccagctgtcttccc

SEQ ID NO: 28415 - DNA, 75 bp, Homo sapiens
ggaggagccgcgagcgctgagggaaaaagaagatgtccctgtggaaatgtccaatggtgaaccaggttgccacta

SEQ ID NO: 28416 - DNA, 83 bp, Homo sapiens
ttttctggtagctgcagatgctgtgcaaaacaggatgagtctgctccagctgacaaacagtgtaaaccagaggcgacccaggc

SEQ ID NO: 28417 - DNA, 98 bp, Homo sapiens
ttggatttcccacccagaatctttaggtaaatgagtgattcgcctttgccagtctcatctcgtgtctgctttgttaagttccatgatccagactcagc

SEQ ID NO: 28418 - DNA, 80 bp, Homo sapiens
cagggatgagcatttggactttatccagtcacacctgcggaggttctgccttcagtttgttattccctcagaggagactt

SEQ ID NO: 28419 - DNA, 50 bp, Homo sapiens
gagaagatcatcgagcatttcaaacgaaggtagaagatagcaccatgccg

SEQ ID NO: 28420 - DNA, 75 bp, Homo sapiens
ccagaacatccactagcctcactaaaggaatatcagaagctctttcctgacattcccatagggtattctgggcat

SEQ ID NO: 28421 - DNA, 100 bp, Homo sapiens
gaaaagacatgaaaaacatactattcctttggtagtccagaaagaaacatgtaattattcgaggtggaggacatattttaccctatgaccagcctctgag

SEQ ID NO: 28422 - DNA, 100 bp, Homo sapiens
gaatagattctcttgaccatgtgacatctgatgctgtggaacttgcaaatcgaagtgccggtggtggtgtgcacattgagccccggtatagacagttccc

SEQ ID NO: 28423 - DNA, 83 bp, Homo sapiens
ctttgagtaacattgccagagaggcttttaaagaagcagttttttcaccgagccctaaaagtaatgaaaatgaaatatgataa

SEQ ID NO: 28424 - DNA, 82 bp, Homo sapiens
tgacgaaattgaaattacctccgagggaaacaagaaaacatcaaagaggtctagcaaagttcctgtgccttaagaacattag

SEQ ID NO: 28425 - DNA, 100 bp, Homo sapiens
ccgagccggagcgccagctcagcgtgcccatcccggggggcagcaacggcgacatccagcaaggcctactctgtgaagagaacattgatgactgtgcccg

SEQ ID NO: 28426 - DNA, 50 bp, Homo sapiens
gtccctactacaaaatttttcaacctgcatgtagagcgcatgaagtacag

SEQ ID NO: 28427 - DNA, 87 bp, Homo sapiens
acgcgctcaaccagatcgcgcgggagacccaacatgagtgaagtttcctgcaagaaacgggacgactatttggaatggccagagtat

SEQ ID NO: 28428 - DNA, 98 bp, Homo sapiens
aggacatgagcagtttacacatctcacccaattcagactgaaatcgccaagagattgaatacgatttgtgcacaagtcatcccatttctgtctcagga

SEQ ID NO: 28429 - DNA, 100 bp, Homo sapiens
cctggacgctggcagcagtgacagcagcagccgccagcaccgtcctggccacggccatgctgctgtagaccctaacagcgtctcttcctggccaagagaa

SEQ ID NO: 28430 - DNA, 134 bp, Homo sapiens
ccctagcgccgctgggcctgcaggtctctgtcgagcagcggacgccggtctctgttccgcaggatgaaaaagcttgtggtgaaggggggcaaaaaaaagaagcaagttctgaagttcactcttgattgcaccca

SEQ ID NO: 28431 - DNA, 98 bp, Homo sapiens
gagcggctgcgggacgcgaggtttccgggtctggtgaagctgggggttcactgcgtcacctgccagaaggtggccatcaagatcgtcaaccgtgagaa

SEQ ID NO: 28432 - DNA, 82 bp, Homo sapiens
aggcttccagtacgagctggttaggaggcacagggcgtcggacctgcacgagctgtctgaaatggaagcaactgtcgagatt

SEQ ID NO: 28433 - DNA, 90 bp, Homo sapiens
tggacacggaggtggccagcaatagaatctactggtctgacctgtcccagagaatgatctgcagcagtggacgtcagctcagcgaggtct

SEQ ID NO: 28434 - DNA, 100 bp, Homo sapiens
gcgcggagcagaaagcagaacccgcaggagtcacagatgctgggaagtatggcccgaaagaaacctcgaaatacctcaaggttgcccctggctttaaacc

SEQ ID NO: 28435 - DNA, 100 bp, Homo sapiens
caggaagtggccgtagcggcttgttggataagcagtccagagcgtgagtccattcacatcctgagtgttgatgagaagaacaagttgggagccaagatta

SEQ ID NO: 28436 - DNA, 82 bp, Homo sapiens
cggccgcctggctccccatactagtcgccggtgacaaacagcatgtttggtgcttcaagaaagaagtttgtagagggggtcg

SEQ ID NO: 28437 - DNA, 83 bp, Homo sapiens
cagacgggagactgaacttgaggtttttagaacttcagccataaaaatgggcagaattttccttgatcatatcggtggtaccc

SEQ ID NO: 28438 - DNA, 90 bp, Homo sapiens
ggcgctccgggcccgggcggctggcctcaccgcccactgggaactgcaagcacatgttgaccagataactgaaatggcagcagtaatgag

SEQ ID NO: 28439 - DNA, 82 bp, Homo sapiens
caagagcgcaggcagtggccacaagagcgaggagaagcgagaaaagatgaaacggaccctgaagagcctaggctggatgtct

SEQ ID NO: 28440 - DNA, 98 bp, Homo sapiens
gattcactaatgtcccagaaaggacacaaatagatgtaggcagaatacctttacagaggttaaaattggttaccttgaggatagttttgtaaaatctg

SEQ ID NO: 28441 - DNA, 82 bp, Homo sapiens
cctgcctccgggcacacccggctccccggacgcctcggtgtggacactgccagcggctgcagccgacttggaatgacctggg

SEQ ID NO: 28442 - DNA, 51 bp, Homo sapiens
cgcttcggagagagaaatgctggggaaagaccacagcaagattctttcatt

SEQ ID NO: 28443 - DNA, 120 bp, Homo sapiens
gtgcctgagcccgtgcctgtcttcagatcttcacagcacagttcctgggaaggtggagccaccagcctctccttggggggcaacaacgccggccacacggtggtggtggatgggaaagag

SEQ ID NO: 28444 - DNA, 82 bp, Homo sapiens
caagtgatcgtgtgatgaaacttatcacttctgatgtattagagagagttggaaactcaactattggaacaatgtactgttg

SEQ ID NO: 28445 - DNA, 82 bp, Homo sapiens
tcccaagcagccgatgcccgcggccggagagctggaggagaggttcaaccgcgccctgatgtgaagttcatttccaatccgc

SEQ ID NO: 28446 - DNA, 90 bp, Homo sapiens
gctgcactgtctctccgacgcaagactgtcccggcccggcttcttccagaccagctggtcttgcttctggagcatctcttggagcagaag

SEQ ID NO: 28447 - DNA, 76 bp, Homo sapiens
cttttccagtccttttccaagatgtcatttatcaggttcaaaccttgtactactcagctgatcacaagctgcttga

SEQ ID NO: 28448 - DNA, 96 bp, Homo sapiens
tccagttcggagtcctgagtccggatgaactggtttatcatttaaaagtgcctgtgtgaagtcacttttgctggaaaactgcagcttgggagcttt

SEQ ID NO: 28449 - DNA, 74 bp, Homo sapiens
gttggatcgggttctaaaggaaagcagcagccgctcttctaaaacattcaaaccaaagaagaatatccctgaag

SEQ ID NO: 28450 - DNA, 100 bp, Homo sapiens
aggagtcgacccggagcgaggaggtgaccagggaggaaatggcggcagctgggctcaccgtgactgtcacccacagcagaatccagagaccacatttgaa

SEQ ID NO: 28451 - DNA, 99 bp, Homo sapiens
aagaccacttaagcaaacttaatataccagacactgcaactgtgttcaaagcttctttcagacaccagtgttattcagttctacccaagcaaatttgtc

SEQ ID NO: 28452 - DNA, 90 bp, Homo sapiens
atgatgatgacggccctgtgtccagccagggatacatgccctacctcaacaagtacatcctggacaagctccagtgacttctacattctc

SEQ ID NO: 28453 - DNA, 80 bp, Homo sapiens
gccgtgtggaccaggaggagcgctttgctggatttgtgcgactcggtgaaggatgatgcccggagggtgatctcgacctt

SEQ ID NO: 28454 - DNA, 100 bp, Homo sapiens
gttcgggcttgtcaggttctagttctgaatgcagtgatggggaatggtctgcttctttgcctcatcgattttctggtacagaaaaagatcaatcctcaag

SEQ ID NO: 28455 - DNA, 100 bp, Homo sapiens
aatcacgcccagaataaagccaagctcatctctgagacccggaggaggttcgaagctgagtatgtgacaggagagtggtagaggcacagaagatgatgag

SEQ ID NO: 28456 - DNA, 83 bp, Homo sapiens
ctcctgagtagctgggattgcagacagcccacctgaggatattgaccataaggactcatatctcattacaagaagcatcatgg

SEQ ID NO: 28457 - DNA, 96 bp, Homo sapiens
catttacctccctggtctcaggtgtctctcacaggcctcaggagtgcaagtagctgatgaagtatgtcgcattttttatgacatgaaagttcgtaa

SEQ ID NO: 28458 - DNA, 100 bp, Homo sapiens
ctggactcagtgtccccttgacagatcaaggcactacatcggctggctgtcggcaattggattcttccagtacagcccgggcgctgccgtggtcatgctg

SEQ ID NO: 28459 - DNA, 51 bp, Homo sapiens
agacgtgcaaagcaagtggttcacgaggaagcattgatggcagctgaaatt

SEQ ID NO: 28460 - DNA, 96 bp, Homo sapiens
cctgttgcgatggcgcagaaaccccgttgacaaggcactgctttttcatgacgcgtatctggtgcaggccgtgagagcagcgggcaagtgcgatgc

SEQ ID NO: 28461 - DNA, 100 bp, Homo sapiens
gaggaccagaaggagatcggtgacctccgtgcccagcagcagcaggttcagaatttaacattacgcagccagaagttgggtgtattatctagctcacaga

SEQ ID NO: 28462 - DNA, 83 bp, Homo sapiens
gtggtcgtctggtcctactacgcgtacgtggtggagctctgcgtgtacctgcctagagctggaacgttacctccagagcgagc

SEQ ID NO: 28463 - DNA, 100 bp, Homo sapiens
cattttttaaaatcattcgaaatgagggcattaaatctctatggagtggccttcctcctaccctgagtctgcactatggaaacaacctgtcaatccagct

SEQ ID NO: 28464 - DNA, 98 bp, Homo sapiens
tatatgttctctaggccttttagaaaacatggtcctgggaactccaacaagggagcaaatcagagaaatgaacccaaactacacagaatttaaattcc

SEQ ID NO: 28465 - DNA, 90 bp, Homo sapiens
ggccacctggtgctgattgggggccctgatgatggtgttattactccctggcagtccaggtatctggctaatacagttgaagaagatgaa

SEQ ID NO: 28466 - DNA, 76 bp, Homo sapiens
tggcagtccatcaaggggacccacctcaccatcacccagggtcagggctcatcttctaccggaaaggggtgaaggc

SEQ ID NO: 28467 - DNA, 100 bp, Homo sapiens
gcggcggcggcggctgcggcccaatataggtctacttccccagcaggacagcatcattctcctatatcttctagacatcactcatcttcctcacaatcag

SEQ ID NO: 28468 - DNA, 90 bp, Homo sapiens
tctggccagtggagagaggaattcctcaagacaccattccagctgacaggacttccacacccatgctcctctcggcacctttcacccagc

SEQ ID NO: 28469 - DNA, 75 bp, Homo sapiens
agaaggcggcggctctctggtccgcagcggcaacagtaacgaaaaacagggctgcttacggagttcctatgctag

SEQ ID NO: 28470 - DNA, 83 bp, Homo sapiens
cgacgaacactacgagtaccggtcagcccaaggccaaccccactgtcactctgttcccgccctcctctgaggagctccaagcc

SEQ ID NO: 28471 - DNA, 97 bp, Homo sapiens
aagaaggccctggacacagcaatatctctgggctttcacagcacgcaggtcttcatctgcaccagccccctgctgaagtaccaccactgtgtgggtg

SEQ ID NO: 28472 - DNA, 120 bp, Homo sapiens
ggtgcccttgtggccagtaggcaatcacctgaaggatctgacttccagaagagtccttcgatatctcctaatacgagtttcacatctgatggctccccgtctccattaggaggaattaag

SEQ ID NO: 28473 - DNA, 75 bp, Homo sapiens
aactggcatgccaagcccctcacgctcagggaggtcgaggtcatcgagctggttaagaagtatggcacaaagcag

SEQ ID NO: 28474 - DNA, 99 bp, Homo sapiens
gttgtaccgagactataaccacggtgtgctgaagataaccatctgttgagaaagatcagtctaaagaaaaggagaagaaagtgaaaaaaacaattcctt

SEQ ID NO: 28475 - DNA, 100 bp, Homo sapiens
aagaaagggaaggggaaaaagaagcagtatctatgcccatcgatttgtacacacagatatgacgaaagacttgaaagaagaacatttaaagaaaaatatt

SEQ ID NO: 28476 - DNA, 75 bp, Homo sapiens
ggctgtagcaggttccggcggacggcgttgcgaagatgtgaaatctggcaactatacagtgttacaagttgtgga

SEQ ID NO: 28477 - DNA, 75 bp, Homo sapiens
agcctatgtcatttcatccaccacattacttagaccacacctgtgacaatgcaggttggagaaggtcagcaggtg

SEQ ID NO: 28478 - DNA, 75 bp, Homo sapiens
tgaagcggcttgaagaaaaacatgaagctttacttaaggaaaaagagtgattcgcctttgccagtctcatctcgt

SEQ ID NO: 28479 - DNA, 100 bp, Homo sapiens
ctgttgtctcagggagcacagaaattgatctggatactattgatgtaagcaacctcaacagacagtttttgtttcaaaagaaacatgttggaagatcaaa

SEQ ID NO: 28480 - DNA, 75 bp, Homo sapiens
cgctgagctggtcgccacctggcgacccttcccctccagtcacctggatcctgataacttaagtgactctctctt

SEQ ID NO: 28481 - DNA, 82 bp, Homo sapiens
atgcagaagagaatttggaagatgccatggaggtgcgtcagcaatttcctgctcctcttggttggtcaggcactgaagctcc

SEQ ID NO: 28482 - DNA, 75 bp, Homo sapiens
cccggcccgactctatcacaagaaggtacagcagggaagaactggaaactcagagaaagaaactgcccttccatc

SEQ ID NO: 28483 - DNA, 90 bp, Homo sapiens
tcagattgcaaggtggcaaggagcagaagcagcccttacaagttgcaaagatccaggtgattgagaatgatagagccagcagaggaggac

SEQ ID NO: 28484 - DNA, 50 bp, Homo sapiens
cagaaatcacctatgtttacagcgacagattgatctggagccagaaggaa

SEQ ID NO: 28485 - DNA, 95 bp, Homo sapiens
atttagttctggggagcgcctcgtcgacatgagtgatgtggaggaaaacaacttcgagggcagactgatgaacttattagtcctaaagacattga

SEQ ID NO: 28486 - DNA, 83 bp, Homo sapiens
aaaagagaagacgctttacccgactctttgggccgttatctcacgtgcgcgcggagccatggttatcatgtcggagttcagcg

SEQ ID NO: 28487 - DNA, 75 bp, Homo sapiens
cacacctgcacacggcagacctggagcgccacgccatcttcacagagggcctgtgaactcggagctgttcctgcg

SEQ ID NO: 28488 - DNA, 82 bp, Homo sapiens
aaccaacattcccaacagccaccaccaccaccagatgggaaagcaggcaggatgggagagtcgccgatagaaccacctcttc

SEQ ID NO: 28489 - DNA, 75 bp, Homo sapiens
gagctagagttgccatttcgctgggatttttgggtggtgcaaagctgagatctgtatctgtggacctgaatgttg

SEQ ID NO: 28490 - DNA, 100 bp, Homo sapiens
cccggcaggtgggcgaggagggcgggcgcagtcgggctctgcaggagcgcgcggaggaaaccactgattgcttgtgtggagaaacagctattaggagaac

SEQ ID NO: 28491 - DNA, 50 bp, Homo sapiens
ggaaaaatttgggacaatatggtgaaaggtgtagcagtcactcggcctac

SEQ ID NO: 28492 - DNA, 87 bp, Homo sapiens
gatcgtcttgtctggggaaaccgcagcagccgtcggagcacttactggagtccaagatgctaatgaattaaacaaccaccatgtcga

SEQ ID NO: 28493 - DNA, 75 bp, Homo sapiens
aaagatgtacgaaatagtgacatgcacttattagatttggccaaagaggtgctgaaaaaatatttggagtccaag

SEQ ID NO: 28494 - DNA, 83 bp, Homo sapiens
aagacttggagttggagaaggaagcccccagccccttccaggccctgttctcagtgcagagcagagcgggcggaggaccccgg

SEQ ID NO: 28495 - DNA, 74 bp, Homo sapiens
ggcatccagggctcgtacttctgctcgcaggaaaatggcattcctatgaagaaagcacgaaatgatgaatatga

SEQ ID NO: 28496 - DNA, 71 bp, Homo sapiens
ccccctcgccgctgccccgggaaggagtattctaccttgtaaatactgttatttgtatatactgtaaatga

SEQ ID NO: 28497 - DNA, 101 bp, Homo sapiens
acatcctggagctgcccggagttccgctcctgcgggcttagcaggaaagggtgcctaagatcgcccaggaccacaccgcagcgtaactgcaggcctctcag

SEQ ID NO: 28498 - DNA, 82 bp, Homo sapiens
gtgagtcgctctcgtccctccagcactgtgacttctgccgtgttcaccgtgggagacaacgtggtttcaggcagcgatgacc

SEQ ID NO: 28499 - DNA, 75 bp, Homo sapiens
actctctcagatgacttcgtctcccaccgactgcctgtttaaggttggatggcaagcatgtggtgtttggcaaag

SEQ ID NO: 28500 - DNA, 98 bp, Homo sapiens
atatgacagacgggatgatcggtcgtggagctccagagatgattactctcgggatgattataggcgtgatgatagagcacctgtggccttgccgaaga

SEQ ID NO: 28501 - DNA, 80 bp, Homo sapiens
ccaggacaccccgaaagccggaaaacgactgtgccctgtccacggtgcctcctgcatgtcctgctgccctgagctgtccc

SEQ ID NO: 28502 - DNA, 100 bp, Homo sapiens
cgaggccttcaagtgcatgatgtgcgatgtgcggaagggcacctccacccgggcttaaaagacaaccttcttgcttctgggacatccagcctgacagcca

SEQ ID NO: 28503 - DNA, 50 bp, Homo sapiens
gagatcgtcagcgctgactccatgcagtgtgctggaattgatgttcgtct

SEQ ID NO: 28504 - DNA, 100 bp, Homo sapiens
atctataaatgcggtggcatcgacaaaagaaccattgaaaaatttgagaaggaggctgctgagatgggaaacgactctcggattatagcatcgggcccaa

SEQ ID NO: 28505 - DNA, 95 bp, Homo sapiens
cttctaactcattgtattcctcctgagataataatgaaggggagctgtgcagctgacctgtatcgacacccacagcttgatgcagacattgaagc

SEQ ID NO: 28506 - DNA, 75 bp, Homo sapiens
catgcttactgaccctgatttacctcaggagtttgaaaggattcctacaggaagcaagtagtaattgatggagaa

SEQ ID NO: 28507 - DNA, 99 bp, Homo sapiens
ggacccctgtctcccggaggagcgcgcaccgtatggtgacatggtgccaaaaaccatagcagggaagatttttggttctatctgttcgctgagtggggt

SEQ ID NO: 28508 - DNA, 83 bp, Homo sapiens
cgggtgtggacgccactacagttcatcaacatcaactacgtccctctgaagagtggtgaaaccagaacaatatctcactttca

SEQ ID NO: 28509 - DNA, 75 bp, Homo sapiens
ttcctcttgatccatatgtttcagaccccctcgaggacggtgccagactcggaggcccccccagggtgggatcgt

SEQ ID NO: 28510 - DNA, 100 bp, Homo sapiens
gggactcggaaggccgtatttgggtctatgacgttggagagaacctgcacttgttgccaagtcttccatcttactagatgtgaaaccttgggatgatgag

SEQ ID NO: 28511 - DNA, 100 bp, Homo sapiens
atccgctctccctgcgctctccgcaccgcggcttaaatgatgtattttgtgatcgcagcgatgaaaggtgtgcaactgaggaacatggctcaagaaacta

SEQ ID NO: 28512 - DNA, 90 bp, Homo sapiens
ggtcaatcatgacttcacccctctggaggtactgtctgatgagcgtgaaaggttgtttcaccgacttccacatcgactttggaggcactt

SEQ ID NO: 28513 - DNA, 83 bp, Homo sapiens
tgcaatatttaattcagcctttggaagttttttggcatggaagaggagatggttcgtgttacgcagtggccgtttaactggag

SEQ ID NO: 28514 - DNA, 76 bp, Homo sapiens
agaaggaggagtggattaagtgcattaaacaaaatagaagccacctggaggcaacttcctcacccatcgacaagct

SEQ ID NO: 28515 - DNA, 100 bp, Homo sapiens
gagaatgcatggctgcagatcgaagagtgtgtacctacagtgctgggacgcaccaaggatgacattgatcttgatgccttggctgcagaaatagaaggag

SEQ ID NO: 28516 - DNA, 100 bp, Homo sapiens
aaagcacaggggaatggcactaatctcaccagtaaggtgtgtagccaaaccagctgttccctgttaagcctgaagagttgagagaaatcattgagaagac

SEQ ID NO: 28517 - DNA, 90 bp, Homo sapiens
tcgcgggccacatgttcgacgtagtcgtgatcggaggtggcatttcagaatgtcgagtggtaaagtccacttcttacaccaaaatagctt

SEQ ID NO: 28518 - DNA, 74 bp, Homo sapiens
ttgcttgggatcctttatcctggtcatcttctatttccaaagtggaacggccgccttctccattctccatggcc

SEQ ID NO: 28519 - DNA, 90 bp, Homo sapiens
gccatctgaataactttactaagcctcgatgctgattcatatcctactgcccatggttttctgcgtcttgctcatcatggtcatgtgcta

SEQ ID NO: 28520 - DNA, 100 bp, Homo sapiens
tgatggtcacttcatgcctgtcctgggatttggcacctatgcgcctgcagagaataactgaagtgaagtgatggactccgatttggagagtagtaagacg

SEQ ID NO: 28521 - DNA, 88 bp, Homo sapiens
acccctggctttctgactatgatgaccttacgtcagctacctatgataaggagcttgaaattgtaattggagatgagcacatatcttt

SEQ ID NO: 28522 - DNA, 120 bp, Homo sapiens
gcggtttgtcgccagaaggaagatggcggatctggaggagcagttgtctgatgaagagaagtgtactaatggtcacttgatgtgcgctggctgttttatccacctactagcagatgcccg

SEQ ID NO: 28523 - DNA, 75 bp, Homo sapiens
gcaagcttagagcgtctggccaagaatcagaggaagtgggttggtggcactaaggctggtgtagtccggtttctt

SEQ ID NO: 28524 - DNA, 75 bp, Homo sapiens
ggcctgtgtacttgctgtagatgaaaatgctgcagaaccttggcctgaaaatgctacattatatcagcaattgaa

SEQ ID NO: 28525 - DNA, 100 bp, Homo sapiens
gtggaaaaactcagtgagacacaatttatcattgaataagtgttttaagaaagtggacaaagagaggagtcaggaaacacaaagatggtgcagacccagg

SEQ ID NO: 28526 - DNA, 75 bp, Homo sapiens
caccccggcccgaccccgacccggcccggtcaggccccatactcagacagaagcattaaaatgcgtggctcaggc

SEQ ID NO: 28527 - DNA, 82 bp, Homo sapiens
cagaaattggaggctcagcatagggtcctgggaagcctcctttctgctcacagaataataactgactccaagcagccctttg

SEQ ID NO: 28528 - DNA, 74 bp, Homo sapiens
gctcgccttgtatctcaacaccctgagtgcggatttctgctatgatgacaggacgcaaatcaatttcacagtgg

SEQ ID NO: 28529 - DNA, 83 bp, Homo sapiens
aggatggagaacccaccaagccccgctaggagccacctagactggatgcagagcatgatgtcgtgatctcaacagcttgtcac

SEQ ID NO: 28530 - DNA, 73 bp, Homo sapiens
ttggatcttgcacaggaaggaattaaaggtctgaaggggcgtctcgattacctgagctctctgaaggtgaagg

SEQ ID NO: 28531 - DNA, 98 bp, Homo sapiens
gatcgacttcctcacccgcgcctgcgacctcggcgaggccttcttgggcagctttgtggccagcgggatggggccctcggcctcgtcccatgggagcc

SEQ ID NO: 28532 - DNA, 88 bp, Homo sapiens
ctgcaggcggcccactggcagttcgaggctgaccccgcactacatctacccaccagccatcgtgcagcccagcgtggtgatcccagcc

SEQ ID NO: 28533 - DNA, 90 bp, Homo sapiens
acagttaagtgggcaatgctagaacaaatcagaaacccttcaccatgttttaaagaggaatgaatgtgatttgaactcattcatgttgag

SEQ ID NO: 28534 - DNA, 74 bp, Homo sapiens
gctcacagccaccggtaccttcttccagagtttatgtggccgaggcagacaagtggaattaggccttgctgcag

SEQ ID NO: 28535 - DNA, 51 bp, Homo sapiens
aacgagtattccaaatttgatggcaaggatggtgatcgagacatttttatt

SEQ ID NO: 28536 - DNA, 95 bp, Homo sapiens
tggcctctggacatccgagtggtgaacctccttggcctgggcgaagctgtgtggaccaagcaagtcaggagtgtggccatgttttctgagcaggc

SEQ ID NO: 28537 - DNA, 83 bp, Homo sapiens
ccctttgagaccgtgaagagaaagatgcagaataatccagaatggctactctgatctatgttgataaggaaaatggagaacca

SEQ ID NO: 28538 - DNA, 75 bp, Homo sapiens
gacttcatccggtcaccatctacctattcttcaaatgcttgggcaatggtagatggtggttcaaatgtgaaagcc

SEQ ID NO: 28539 - DNA, 73 bp, Homo sapiens
tggtcctactacgcgtacgtggtggagctctgcgtgtgtgtgactgaagaaatatcaaatgtttcctagtaag

SEQ ID NO: 28540 - DNA, 90 bp, Homo sapiens
gctggagggcactaccagatggggtatgcttcagaagtgtccttctgttgatgacttcgtaagtgccctcgtttccgacttggatctgga

SEQ ID NO: 28541 - DNA, 150 bp, Homo sapiens
gtctcggcccgtactcaggctccgggagatcaaccctctgctgttcagctacgtggaggagctggtggagattcgcatctctgttgaggagctggcgcggaatctggtcatcaaggtcaacagggatgctgtcatgaaaatcgcggtggc

SEQ ID NO: 28542 - DNA, 101 bp, Homo sapiens
agcgtagagtcgctggagcgggcggagctgtgcgagagcctcctcacttgggatgaaacgaggaggaagagatagtgaccgtaattcatcagaagaaggaa

SEQ ID NO: 28543 - DNA, 100 bp, Homo sapiens
gcggccgcggagacctacctgcggcgtcggcagctgctgctccgaggtgttggagcgggccggagagaagtagagtgggctgcgaggagaaggaaacagg

SEQ ID NO: 28544 - DNA, 80 bp, Homo sapiens
cattaacctgcgagaagtcatctgcacgtccagggtgagaagccctaccactgcaactgggacggctgcggctggaagtt

SEQ ID NO: 28545 - DNA, 75 bp, Homo sapiens
gaagaggaagcatataagtcagaattattccagaaagccaaggtgcactcaaaggaattaacaaatgtttttgag

SEQ ID NO: 28546 - DNA, 75 bp, Homo sapiens
gccgccgcagcgcgaacatggacgccgtcaacgccttcaaccaggagacaattcctcctcgcttcaagaagatga

SEQ ID NO: 28547 - DNA, 75 bp, Homo sapiens
aaccacggtgtgctgaagataaccatctgtgaaatcccctcagaatggcacattgaactgatgttagacagaggg

SEQ ID NO: 28548 - DNA, 83 bp, Homo sapiens
gcgagcagggtgcgggagagccccttgcagaagacgccgtacgaggcctggtctccaagtcctctcctaagaagcctcgtgga

SEQ ID NO: 28549 - DNA, 90 bp, Homo sapiens
agaactgtccagcgtcacgctcagcacttgccgaggaattaggtaccttgtggtctataatcctttagaacaagaccgaatctcgttggt

SEQ ID NO: 28550 - DNA, 75 bp, Homo sapiens
tgaaaccccttggtgaaggccctccagacccaaaccacggacagcatttagtgcttttactttctggaagaagaa

SEQ ID NO: 28551 - DNA, 73 bp, Homo sapiens
ggaacgctcacggactgtgtgagacagggcagggcattgttcatgcactgaccgacctcagcagccccggcat

SEQ ID NO: 28552 - DNA, 97 bp, Homo sapiens
ggcgtgcgcggacggtgtgcgggtatggtgtggtggactttctttgagtactgggatgcaggttccaagtgctgtgagaacacttcagaaaagtgaa

SEQ ID NO: 28553 - DNA, 90 bp, Homo sapiens
ctttctcatctgactcgtgatctgcccatcttgttactccctagcagtgtggtaaggttcgatacaagaggctgttttcctagcgtggct

SEQ ID NO: 28554 - DNA, 74 bp, Homo sapiens
tgcgcgtgggggtgatcagcttcgcccagaagaggcctaacatcgtgtcccagctcagccaagcctgcgatgga

SEQ ID NO: 28555 - DNA, 112 bp, Homo sapiens
cttgtggagccggagctgggcgcggattcgccgaggcaccgaggcactcagaggagatgtgaagttcatttccaatccgccctccatggtggcagcggggagcgtggtggcc

SEQ ID NO: 28556 - DNA, 90 bp, Homo sapiens
gttatttgaccctaaggaagcggccacaatcgacagggacaccgccttcgccattgggtcacgatcgtggagtaaactgggctgccttcc

SEQ ID NO: 28557 - DNA, 50 bp, Homo sapiens
ccagtttaagattctggtcagcttgttagcggaaggcagacagattgctg

SEQ ID NO: 28558 - DNA, 100 bp, Homo sapiens
ggcgtgtgacgcggggacgccgcgtgctcccaacgtcgccccggtttgacgcacacggcaccaaactaatcttcagctacttggagcaacagccattgag

SEQ ID NO: 28559 - DNA, 51 bp, Homo sapiens
gcatgcagcttactgcttgaaagtcaaggagaagctgcgccttgatcctga

SEQ ID NO: 28560 - DNA, 100 bp, Homo sapiens
gggggtccagtgcccgacctggtcctgaaagccagcagataccatcgcgcaggtatctgtaatgcgtgatgaggataaattactgaggattaaaattaat

SEQ ID NO: 28561 - DNA, 82 bp, Homo sapiens
cctgcagcgggagctggacggcgagcgcgagcggcgcgagaaacatccaagagttccggctgtcagggtggctggcccagca

SEQ ID NO: 28562 - DNA, 83 bp, Homo sapiens
atacgacacatccaggagtttattggagcgcagactgatggcgcaaaggatgtggaagttcacgcagagccgctgggtggtta

SEQ ID NO: 28563 - DNA, 82 bp, Homo sapiens
ttccccgtcagcatcccagccgtgctcacgtcaaggagaagctgcgccttgatcctgacagcgagatcgccaccaccggtgt

SEQ ID NO: 28564 - DNA, 100 bp, Homo sapiens
cctcatggatcaactgataagttgccttatgtcaccatggttcgtgccctcgtgaggctggcatgcaggatggcaggacagcccggccacatgccccatg

SEQ ID NO: 28565 - DNA, 116 bp, Homo sapiens
tcgtcttatagaaaggaaaagtgatttacatccaacattaccagctggccgatactctttgaatgtcacatacagaaacatgacagctgccctacaggcagctctgaagaaccccc

SEQ ID NO: 28566 - DNA, 119 bp, Homo sapiens
gctgacgccgcggacctccctgcgaccgtcgcggaccatgggcgacaaagggacccggtgcagattcactttataggaacagcttcagcttcagtgatgaaaaactgaattctccaaca

SEQ ID NO: 28567 - DNA, 82 bp, Homo sapiens
cgagcgcgagcggcgcgagaaacctgacatttaccccggtaactgctgggcatttaaaggctcccaggggtacctggtggtg

SEQ ID NO: 28568 - DNA, 90 bp, Homo sapiens
cagaagctcatccgcaaggtgtccacgtcgggtcagatccgacagaagcactcactgaaaatgaccgagacagccagtcgccgttgagga

SEQ ID NO: 28569 - DNA, 100 bp, Homo sapiens
cggcggaagtggggacaccagtagccgcggacctcgggagaaaatcctccacctccgggtttcataatgcatggaaatgttaatccaaatgctgctggtc

SEQ ID NO: 28570 - DNA, 102 bp, Homo sapiens
catggagtgttccttccgctagtgatcctttgcaccctgcttggagacggacttgcttccggtactaggttttgacaagcttgcatcatgcgtgagtataag

SEQ ID NO: 28571 - DNA, 100 bp, Homo sapiens
tattgcggcaactactcacgctcctacgggacgaggagagggaggtgaatccgtggcagaggctctgaacaagaaggaacacagagggtgcgacagccca

SEQ ID NO: 28572 - DNA, 96 bp, Homo sapiens
atcggttagacttctcaagtgcaattcaagatatccgaaggttcaattatgtggtcaaagtgtcatggagaaactccagctgggcccagagattct

SEQ ID NO: 28573 - DNA, 75 bp, Homo sapiens
cctgagttcaagttcatgccaccaccgacttatactgaggccattttaaatggaatagacagcataaacaaagtg

SEQ ID NO: 28574 - DNA, 97 bp, Homo sapiens
aaggtggtggtcaacgggcgggtgctggagctgttccgggccgcgcagctgccgaacgacgtggtcctacagatccagacatttaatgtggatgcac

SEQ ID NO: 28575 - DNA, 82 bp, Homo sapiens
ctggaatttagcgctcgcccagctagccgcagtgccctctggtggtcagaagatgctgtgctgtctcgttaggatgaatgga

SEQ ID NO: 28576 - DNA, 58 bp, Homo sapiens
ccgggctcaagcaattctcccacctcagcctgggagtatatgttgctgcagtacggga

SEQ ID NO: 28577 - DNA, 100 bp, Homo sapiens
ccattgctatagaagaagtcacacgctgtcatataagatttaccttccgacacaggtcatctcaggaaagcgcggatcaagaagatcatgcagacggacg

SEQ ID NO: 28578 - DNA, 75 bp, Homo sapiens
ttggatcttttcatgaactcctgctggagccacccaagctgcaagctttcttcctggtggcagatgacatcatgg

SEQ ID NO: 28579 - DNA, 50 bp, Homo sapiens
gccgctgccccggctgcctcctccctgagactatgtgaaagggtttggag

SEQ ID NO: 28580 - DNA, 75 bp, Homo sapiens
tccagtgagtccagctcctctgacagcgaagactccgaaacaggcatcttctcaggcagaggtgcaacctgtcgg

SEQ ID NO: 28581 - DNA, 100 bp, Homo sapiens
gctaaagaaattattcttgatgatgatgagtgtcctttacaaatcttcagggaatggccaagtgacaaaggaaatgggtcctgatgaatatgaagagatg

SEQ ID NO: 28582 - DNA, 82 bp, Homo sapiens
ctccaagggataggaagccctgccgggcagggctttatcctgtggataaacgcagagtgaacgagtttggggagtcctacga

SEQ ID NO: 28583 - DNA, 101 bp, Homo sapiens
cccaggagacccctctgctgcaccacttcatggacgggctccccgctcctagttggggcagataatgtcctggagctgcagatggacgcagccaacgaggg

SEQ ID NO: 28584 - DNA, 90 bp, Homo sapiens
tgcctcctgaggatttctgtgcctggaaaatatctgttaacagactgcttttacacctacggaactactggagaccacgtgccgcctggc

SEQ ID NO: 28585 - DNA, 83 bp, Homo sapiens
agaaggtagaggttctagagaacactaatagatcctgaacatcagagagctaatggtaacttaaaatattttgagtatataat

SEQ ID NO: 28586 - DNA, 98 bp, Homo sapiens
caggacacccctgaagccgagaaatgatttctacctggacaaggactggtactatacccacagataggagacaaattggatattatttgccccaaagt

SEQ ID NO: 28587 - DNA, 90 bp, Homo sapiens
tcggcctgggcaatggtcccggctgccggtcgacgaccgccccgcgtcatgcggctcctcggctggtggagatctattgggaaactgatt

SEQ ID NO: 28588 - DNA, 90 bp, Homo sapiens
gtccgcgaagatggcgggccggggagttttgaaaaataaatggtcaatactctacctcttgctgagcctcagtgaggacccacgcaggca

SEQ ID NO: 28589 - DNA, 75 bp, Homo sapiens
tttggtcagggtcttgctactggcatgccagccctgtatgatgagattcgtcagtttcgcaaggcctgtggggag

SEQ ID NO: 28590 - DNA, 100 bp, Homo sapiens
ccgagttctcggtactcttcagggatgagtcatgtggcagtggaaaatgcgctcgggctggaccagcaggttctgagtgcaaaagtagttacaaatgctc

SEQ ID NO: 28591 - DNA, 107 bp, Homo sapiens
atgtgtcatatccaccaatatttctgcaacgtctttgacaatagatggaatcagagcctacattcatcagtacacaaaatttggaatcgaagaagaggactttttag

SEQ ID NO: 28592 - DNA, 87 bp, Homo sapiens
ccccgcgggatacgcctcagcgcgtgttatagttttgccgctggactcttccctcccttcccccaccccatcaggatgatatgagac

SEQ ID NO: 28593 - DNA, 100 bp, Homo sapiens
caccttgtggccctgggctttaccatctttgtggctgtgcttgccaggcctggctccagagaccagcataaacactttggggactgagaggataagccat

SEQ ID NO: 28594 - DNA, 83 bp, Homo sapiens
cgggaggtgaagttgctgctgttggaaagttcaggagccctggaaaggagaaggaataagacggcaggaggaagagagagaga

SEQ ID NO: 28595 - DNA, 83 bp, Homo sapiens
tccctctgctcttcctcccttcgctcgcaccatgctattactataacaagcgcattctgcacaagaccaaggggaaacggttc

SEQ ID NO: 28596 - DNA, 100 bp, Homo sapiens
ggctgaggaggccgccaagatgccgcagtccaagtcccggaagatcgcgatcctgggctaccggtctgtggttggattggatgctgctggcaagacaacc

SEQ ID NO: 28597 - DNA, 74 bp, Homo sapiens
cggacgcgcccgggacgcgcggcggcaccgggaggccgggccgagcggagaatggggtactaagagaaaagcac

SEQ ID NO: 28598 - DNA, 100 bp, Homo sapiens
agcagaagaaacacttcctataaatctcgcccaaacaggaaaggagaatgaagtttctagattagaagacataatgcagcatttaaaatcaaagaagcgg

SEQ ID NO: 28599 - DNA, 90 bp, Homo sapiens
ccatcccgctggtgctatgtgcagatcttaactcattgccagattcagaagtaaccaagatccttctgtttgctgcacaagcatctcatc

SEQ ID NO: 28600 - DNA, 75 bp, Homo sapiens
ttcgcaaaactcagcaattttttgatgagatcaatgagctgagcaatgttcctgttcctgtcatgctaatgccag

SEQ ID NO: 28601 - DNA, 75 bp, Homo sapiens
aaaactccaccgtagcccttgccaaaggatcttttgccagaaatgagggcatactggcctgacgtaattcactcg

SEQ ID NO: 28602 - DNA, 90 bp, Homo sapiens
gagcaaagacaggagccctggaatgtgaagagacatgagaccatagccaaacccccaggtcacagtgagccgagatcatgccactccact

SEQ ID NO: 28603 - DNA, 74 bp, Homo sapiens
caagggaccaaggtggaaatcaaacgtcagaagagatcaattctacagaaatttccagtggttctgttgaggct

SEQ ID NO: 28604 - DNA, 98 bp, Homo sapiens
gtggatcgctgtgatcgtcacttgcacttgcactattactcagcagcagtaacatggtaacacttaaaatggtactcggggacctccaaagactaaac

SEQ ID NO: 28605 - DNA, 101 bp, Homo sapiens
ggtacacctggacaggtgtatgatgtggaggaggtggatgtgaaagatcctaactatgatgatgaccaggtgtcatttacaggaaaacaaggtgaaatgag

SEQ ID NO: 28606 - DNA, 74 bp, Homo sapiens
cgacaccatgcatctcctcggcccctggctcctgctcctggaatggttatgctcctgttgaatttttcctcgaa

SEQ ID NO: 28607 - DNA, 75 bp, Homo sapiens
ccactctaggagccccaatagcccaggagcttgggtgtgctgacgagcagggtgacaatgcagatcttcgtgaag

SEQ ID NO: 28608 - DNA, 100 bp, Homo sapiens
cctacatttagcgcatcatgtgatccggggcaaagtgcacctggagctgcggctgagcgaggtcatcacagacactggggtcgtctgccacaagctcgcc

SEQ ID NO: 28609 - DNA, 100 bp, Homo sapiens
cggagttcttgtacgacctgctgcagctccccaagggggtggagcccccagcggaggaggagctctcaaaagttaccgtgcagacggtctacgtgcagca

SEQ ID NO: 28610 - DNA, 80 bp, Homo sapiens
gggagcgcctcgtcgacatgagtgatgtggaggaaaacaacttcgagggcagataatctatgccagcaattatgacaatg

SEQ ID NO: 28611 - DNA, 98 bp, Homo sapiens
gaatgcccaacagcctgaaccaggggatcccagggagatacctgacaggccaccctggagaaatgtgccacgtgctcccagcccatcctggaccggat

SEQ ID NO: 28612 - DNA, 75 bp, Homo sapiens
cgcaactctcagttcgagagtaaaggttaatttggagtggcccctggagtcagtttcctacaccatccgaggccc

SEQ ID NO: 28613 - DNA, 96 bp, Homo sapiens
gccgccttcctgtgcggggccgtggcggccgcggcgatgactcggacccaggtccagtgcacgtgccaacattacactgtcagggaagaagcgcag

SEQ ID NO: 28614 - DNA, 50 bp, Homo sapiens
acctgcactttggggagcctaagtcctggctaaccttgccgcgggccgag

SEQ ID NO: 28615 - DNA, 80 bp, Homo sapiens
ggctccgcgcccggccggacccgggcccgagactgtgccctgtccacggtgcctcctgcatgtcctgctgccctgagctg

SEQ ID NO: 28616 - DNA, 100 bp, Homo sapiens
gccgacccgggccccgggctagcagagcggaggcgctgccacgaaactcgtacctgcggctaagagcagaactctaagaaggagctgatgtggaggagca

SEQ ID NO: 28617 - DNA, 117 bp, Homo sapiens
cagctgcagccgcctgaccacggcgactggacttacgaggagcagtttaagcaggctccagcccccttttggacatcgttggcggccggaaggcgaggccccgccagttcccgttcc

SEQ ID NO: 28618 - DNA, 81 bp, Homo sapiens
ttcagctcctctgtgtttgccgcctgggtatggtgacatggtgccaaaaaccatagcagggaagatttttggttctatctg

SEQ ID NO: 28619 - DNA, 74 bp, Homo sapiens
gagaaacttcagtctggaatggtgctgaaagcaaaatcagaggggaagcttgcaaaacagatttgcaaagttgt

SEQ ID NO: 28620 - DNA, 75 bp, Homo sapiens
ttcacgatccagaggctcggtggatcaatgggcaccagaactagcacctctgaaaagtaaaatgatctatgcaag

SEQ ID NO: 28621 - DNA, 90 bp, Homo sapiens
tggatgttcttcttcgagtatttgtagaaggggtctgactgcgtaccatgatatctccctggacaagtgctatgtcatcgaactcaacac

SEQ ID NO: 28622 - DNA, 100 bp, Homo sapiens
gaaaaattcaagaagttgaaaaacgcttttcacgtcacctggagagatgcacaggtaagaatgattgatgttggctgatattggagtgctcattcacatg

SEQ ID NO: 28623 - DNA, 106 bp, Homo sapiens
caacacccgctgctgcccgcccgctgcctgcctgcctggcatctctctctcccgttcctgctcattttccacaaggccgcggcaggggagctgcaggaggacagtg

SEQ ID NO: 28624 - DNA, 100 bp, Homo sapiens
gctcaaaagatctgcagagctcccagggcggacagcagcctcgggtgcaatcctggagccccccagtgaggactatatcatcatgtacatagaaaaatcc

SEQ ID NO: 28625 - DNA, 102 bp, Homo sapiens
cctttccaaatctgatgtgatctctcagctggagcaagaagaggacctgtgcagggcagagcaggaggccccccgagatgccgacaaaaggatcaaggtggc

SEQ ID NO: 28626 - DNA, 80 bp, Homo sapiens
ggggaccgcttgcagcggggacgcgaggacccgggctgggctttcctcacccgggaaggcgtggaagtgcgagtggccag

SEQ ID NO: 28627 - DNA, 96 bp, Homo sapiens
tcaagcagtcctaccatgtcagccttcccagtagctgggaccacagtgctgttgggacattcgccagagccctggattgcagcagttctgtgaggc

SEQ ID NO: 28628 - DNA, 75 bp, Homo sapiens
cggcgtggacttcagggagaagaccgtggaaatcgagggcgagaagatcaagtgccggaagctgcccagtgaccc

SEQ ID NO: 28629 - DNA, 87 bp, Homo sapiens
tctgaaatggtgatgaaattggaattgggtttacatgagctatcagttgagggatttgcagttgataaaatggctggagaggttaag

SEQ ID NO: 28630 - DNA, 100 bp, Homo sapiens
tagacaatggttagagaagaattttccaaatgaatttgcaaaacttactgtagatggagctggaccttcaccagaagcatgtcgtaaactcttgggaaat

SEQ ID NO: 28631 - DNA, 100 bp, Homo sapiens
attgcagggagaatcatgcatcaatgcctggaaaggtgtccactggtctccacataatgaaactattctggcttcaagtggtactgaccgccgcctgaat

SEQ ID NO: 28632 - DNA, 100 bp, Homo sapiens
ccgtgtgcgtgctgaagggcgacggcccagtgcagggcatcatcaatttcgagcagaagggaaacatggtggtccttgtgcacgacagtggagatgcgga

SEQ ID NO: 28633 - DNA, 80 bp, Homo sapiens
gactggctccccgtgtggatcaggagaagtgggcccagcgttcattcagcttggatttacactgggcaacgtggttggaa

SEQ ID NO: 28634 - DNA, 87 bp, Homo sapiens
cccggggctaatgttgacaacaggctcgagacctgcctagagctggaacgttacctccagagcgagccctgctatgtttcagcctca

SEQ ID NO: 28635 - DNA, 74 bp, Homo sapiens
aaatattgaacacaaaacttgcaggcgacattgactacagcaccgtgctcctcggcatgctggtgacgcaggac

SEQ ID NO: 28636 - DNA, 115 bp, Homo sapiens
agaacatccaggacatctgcaacagcaagcacatgcagaagaatcccccagggcccagagtttaattggttggggtcagataagaagaggagtgacaatcaagccaacagtagat

SEQ ID NO: 28637 - DNA, 74 bp, Homo sapiens
acaaaatgtcaacaaattgatggctgaggagtacctgtcatttgcctttgagcattgtcaccgttctagtcaga

SEQ ID NO: 28638 - DNA, 83 bp, Homo sapiens
atttaagatgccaaagcagctcattcacatacagcacccaagtcttggattgaggaacaggcaatgggatcattcctcagtgt

SEQ ID NO: 28639 - DNA, 96 bp, Homo sapiens
gctggactggatgtgacgagcccagaaccactgcctacaaaccaccctctcctgaccctgaagaactgtggctccaaccaggaatggagacgccat

SEQ ID NO: 28640 - DNA, 152 bp, Homo sapiens
tttagctgttactccagccaacactgatcttgcaaactcagatgcgctgaagctagctaaagaagttgatcctcaagatggactagaggcttttaccagatttcttaaaactgaattcagtgaagaaaatattgaattttggatagcctgtg

SEQ ID NO: 28641 - DNA, 100 bp, Homo sapiens
ataaaatgcacatatcccagtccattgaggcacctttcttggatgttctcaacaccatgatggacactacacttcctctgacattagaagaattagaaga

SEQ ID NO: 28642 - DNA, 90 bp, Homo sapiens
gtgaggagcccctccgcccggcagctgccccgtctgagaagtatcatatcaacgtttcttcacgtccatccttttggagccaacatagaa

SEQ ID NO: 28643 - DNA, 124 bp, Homo sapiens
gacggcgggcatgacggctacaggatgggcgcgaacaatggcaaacagtacggcagtgaggatgccagaccagtttgaccaggcggttgtgctgaaccagctgcggtactcagggatgctggag

SEQ ID NO: 28644 - DNA, 101 bp, Homo sapiens
cggatggccccaggtgtaagcgcagaaagcaggcgaacccgcggcgcaataacgcggagctggagtttgttcagatcatcatcatcgtggtggtgatgatg

SEQ ID NO: 28645 - DNA, 83 bp, Homo sapiens
gttagccccgcgcagccgccggcgtcgccgccatggacctagatcctggtgtatagcctggaagcaggacgccgcctcttgaa

SEQ ID NO: 28646 - DNA, 50 bp, Homo sapiens
tcttaacttccaaacatcatgaagatactgcttctaaactaggacccata

SEQ ID NO: 28647 - DNA, 100 bp, Homo sapiens
aaaaaaaaaaagaaagaaaactacaggcggggacggcttctcggaagtgcttcgggagatccaggatgcagtggccagggcggggcaggtggtgcgggaa

SEQ ID NO: 28648 - DNA, 98 bp, Homo sapiens
ggaattaccttcactctgggaaaaggcactgaagttggaattccatatttaaatcaggaagaagaaagacagttaagagagcagtatgatgaaaaacg

SEQ ID NO: 28649 - DNA, 100 bp, Homo sapiens
tacccccagcaccacctccagcccctgcgcctcgccgttgccgagagatggatgagcagattagactgatggaccagaacctgaagtgtctgagtgctgc

SEQ ID NO: 28650 - DNA, 100 bp, Homo sapiens
ctcccccatctcattgccacggctgaaccctccttctcaatcttggaacagcacccccttctttaaggtcgcaatgatgatgtcaaatgcttttgttgtg

SEQ ID NO: 28651 - DNA, 98 bp, Homo sapiens
tgcatcccaaccttccttctgacaagtcccagattgcttccaagtatgatcatcaggcagaagaagatcttcgcaattggatagaagaggtgacaggc

SEQ ID NO: 28652 - DNA, 97 bp, Homo sapiens
tccgttgaaaggagagccagttactaacttgtggcgacatgtctaagaatgtgagccagtcacagatggcaaaattgaaccaacaaatggccaaaat

SEQ ID NO: 28653 - DNA, 75 bp, Homo sapiens
ggcagagggaggaccctggaacatcccggaagccgggaaatgatggcagaaacggtggacacaagcgaaatggtc

SEQ ID NO: 28654 - DNA, 100 bp, Homo sapiens
ggtggccagacagcatcctttgcgctgaagaaggttgatccaactaatggaagaaataatggctgaaaaggaaaacaaaacaataatatttgtggagaca

SEQ ID NO: 28655 - DNA, 101 bp, Homo sapiens
ccacctgctgcacccacgaatctgcccacccctcctgtaacccagcctgtttcacttcttgatatgcaaagcctagagaagctattgaaagatgccattgt

SEQ ID NO: 28656 - DNA, 99 bp, Homo sapiens
gagcaggagcttcaggttgtccgagcatctgggaagttacaagtgaacctgaaatgattggagctgaagttatttcagagttcttaattaatggcgaag

SEQ ID NO: 28657 - DNA, 100 bp, Homo sapiens
ccagccccagccacgcaggctccctgcatgatgacctgaatcaggattccctcccaggctgtccctcgccgccttgctacagcccccaagactgaaaaac

SEQ ID NO: 28658 - DNA, 74 bp, Homo sapiens
cgaaaggaacggctgaaggccctacgggagaaaaccgggcgcaaggcagactcagtgggatcctcctacttggg

SEQ ID NO: 28659 - DNA, 50 bp, Homo sapiens
ttttctcattccactgtcaaaggtaagcctctgaacatcccctgcaaagc

SEQ ID NO: 28660 - DNA, 100 bp, Homo sapiens
gccgccagctccccttcggaggtggacagttttccttatttgcgaggattagacggaaatggaacaggaaaacgaatttgtgcaggagaaggacttgccc

SEQ ID NO: 28661 - DNA, 50 bp, Homo sapiens
agggagtgcatcaaaggtgtgaacgcagatatctcttccaaatgcatgat

SEQ ID NO: 28662 - DNA, 95 bp, Homo sapiens
aaccagcctccccctgaagattctgccgctgattgctatcacttctgcagaatccagtggtcaattcaccgtaccatgtggactccccagtgtgg

SEQ ID NO: 28663 - DNA, 100 bp, Homo sapiens
ctcccagggataaaacgctcctgaaggagaagaggaagcgacgcgaggagctgttcatcgaacagaaggtaccacgaaaggcagtggtagaaaagccagc

SEQ ID NO: 28664 - DNA, 75 bp, Homo sapiens
aaacatcgtgggggatctcttacggaaagtagggacaatgcagatcttcgtgaagactctgactggtaagaccat

SEQ ID NO: 28665 - DNA, 75 bp, Homo sapiens
gaatgcgctcttcaagcggatcttgattgtgataccattcttcagtctcttaatcaaagatatttatttcctcaa

SEQ ID NO: 28666 - DNA, 90 bp, Homo sapiens
gccctgcctctccctgggctctggacagtcattttgtttactcattcagccctgttgcaggtcccaataaactcttcataaggttgacag

SEQ ID NO: 28667 - DNA, 99 bp, Homo sapiens
ctggagcaccagggcatcaagatcgagttcatcgggcagatcggcacttctggatccagctgtgtgatagccgcactaggaaatacctggagtcacagt

SEQ ID NO: 28668 - DNA, 97 bp, Homo sapiens
tcctgcccgcaccctcccctggagcccggggaggacaaggcgagatgaggagactgtccttcctgtttcgcagatgaggaaactgaggcttagagaa

SEQ ID NO: 28669 - DNA, 100 bp, Homo sapiens
gccagaaatgcctgacacagtcctgcagtcagagaccttgaaggacactgccccggtgctggagggcttgaaggaggacattcctgctcttgaaatttcc

SEQ ID NO: 28670 - DNA, 75 bp, Homo sapiens
cgccacctgcgcggcagtcatcaaggttcgagaacttgtcttggacaattgcaaatcaaatgatggaaaaattga

SEQ ID NO: 28671 - DNA, 90 bp, Homo sapiens
agcgaagctgctgcggttcctgagccggagacgcaaacatgcagatctttgtgaagaccctcactggcaaaaccatcacccttgaggtcg

SEQ ID NO: 28672 - DNA, 100 bp, Homo sapiens
catcatggacaccagccgtgtgcagcctatcaagctggccagggtcctcagccctcgctctcgctggcggagcagcacctggagtcgcccgtgcccagcg

SEQ ID NO: 28673 - DNA, 100 bp, Homo sapiens
gcacgcccgagcggcctcgcctgagctccgggggtcgtcgccccgcagggaggcctagaaggagagccagagtgcgatcagaaaaccagccgtgcgctgg

SEQ ID NO: 28674 - DNA, 98 bp, Homo sapiens
ccgctgctgctgggggccttcccgccggccgccgccgcccgagactccgccgtggtcatggaggagggaagtccgggcgaggttcctgtgctggtgga

SEQ ID NO: 28675 - DNA, 100 bp, Homo sapiens
aattatactcaatcttatccaatgaggaacccaacggatacacccttcacaatagcaaacgtaaacgatggaattgatggaatcaaccgaaattgacgga

SEQ ID NO: 28676 - DNA, 100 bp, Homo sapiens
ggggaatttccttgtgcctccattcccgggaggggggagcggcgttggaggccaccgtttccagccgcttgatggcattgaaacgaatgggaattgtaag

SEQ ID NO: 28677 - DNA, 97 bp, Homo sapiens
tcgccgccgcccgggacagcccggaggtcagatgtaccaacagtaccagcaacaggccggctatggtgcacagcagccgcaggctccacctcagcag

SEQ ID NO: 28678 - DNA, 75 bp, Homo sapiens
cgggaagtcgacaggccgggatccaaggtgaagaaggcaggagagagacacaagctggcaaaggagcggcgagaa

SEQ ID NO: 28679 - DNA, 95 bp, Homo sapiens
cggccggtgccagcacctttcggcttctgagacggcggcagcagcggcattcaggacagagcgggatgccaccagcttgtccaaagggaagttcc

SEQ ID NO: 28680 - DNA, 83 bp, Homo sapiens
cataagagcaaagaacactgttgttgccacaggctgacacttcctccatggcccatctatcgccggcatcctctcaagtggtt

SEQ ID NO: 28681 - DNA, 97 bp, Homo sapiens
gccaaagaccatcatgcacctcatgatcaacaatggcccgtgactactctgcgccagtcaacttcatcagcgcagggctcaagaaaggggcagcgga

SEQ ID NO: 28682 - DNA, 74 bp, Homo sapiens
cctgttccgcttctcagaggacgccttcaacaccaccttcatctccaccatcgctgaactagatgcagagcacg

SEQ ID NO: 28683 - DNA, 80 bp, Homo sapiens
agcagggttacctggcgattggtgatccccgcagaaatgagccggcaggtggtccgctccagcaagttccgccacgtgtt

SEQ ID NO: 28684 - DNA, 100 bp, Homo sapiens
gccgcgctctcttccaggacatcaaggacagagcgggatgccaccagcttgtccaaagggaagttccaggagctcctggtgggcatcgttgtggagaatg

SEQ ID NO: 28685 - DNA, 75 bp, Homo sapiens
tggagcatgccctcagcgccatcgcatacttccacaggctgcactcgaggagatccacaaattctcaggaaccta

SEQ ID NO: 28686 - DNA, 72 bp, Homo sapiens
tggatgaggtggtgctgacaatcgagcaaggaaacctgggttgtctgcattcaaaagagcattctattaaag

SEQ ID NO: 28687 - DNA, 87 bp, Homo sapiens
ggacttcacctttgtctcctcagcagacgcggaagaggactactgagcccagccaggctgtatgccattgctgccaaagaaaaagat

SEQ ID NO: 28688 - DNA, 100 bp, Homo sapiens
caagcgagggcagaagcttcagagtcaggtaataaatctcctaatggaataagtgactatccaaagatcagagtgacagttacccgagatcagccacgca

SEQ ID NO: 28689 - DNA, 117 bp, Homo sapiens
cagcgcccgcgccccgccgctgagccgtcgcggagccgcgcagccctcggagcacgacaatgcagatcttcgtgaagactctgactggtaagaccatcaccctcgaggttgagccca

SEQ ID NO: 28690 - DNA, 100 bp, Homo sapiens
cgggacccaccagttcatcttctgcaggcgggggccggccccagcccagactggaagatgagattgacttcctggcccaggagcttgcccggaaggagtc

SEQ ID NO: 28691 - DNA, 83 bp, Homo sapiens
ggagctgcagtcggcactgctactgcgaagacagctggcagaattcagaaggagctggcggacatcactttagaccctccacc

SEQ ID NO: 28692 - DNA, 90 bp, Homo sapiens
ggcgggcagcggcagtcaaagccacgcagacactacaggccaatgagtcgcctcgatgacttacgagccctcaaggggaagcattttctc

SEQ ID NO: 28693 - DNA, 75 bp, Homo sapiens
aaaagatccctggaatatgaagagacacagtatggtagccacacccccaggtgatgatgaacagtctacacagat

SEQ ID NO: 28694 - DNA, 74 bp, Homo sapiens
ttttctctgaagaccgtgaagccactttcactttttgacagtaagaaaacaaccctttttgctgcacatgtaag

SEQ ID NO: 28695 - DNA, 100 bp, Homo sapiens
cgctgggagctgtagaccggagctgttcctattcggccatctttgctcctccctgcaactaactccattcttaattgatatgcacccaatgtccagggag

SEQ ID NO: 28696 - DNA, 83 bp, Homo sapiens
cgcgaggacagcgcgtgcccgcgaggagccgccgcgcgcccgcgccctccgcgcgacgccagaacatccagtcatggataaaa

SEQ ID NO: 28697 - DNA, 75 bp, Homo sapiens
agagaggaccccggtacatctgaaagccgggaaatgggcagctggtggaatttttgaagaaaatggaatctcgag

SEQ ID NO: 28698 - DNA, 75 bp, Homo sapiens
cgcggctcctgagggatcggtctcagccgcgcggaaccagctgctgacaaaaggcatggtgatccttcgggacaa

SEQ ID NO: 28699 - DNA, 90 bp, Homo sapiens
ctcggtcgccatgcatcagatcatgcccaaaggtggggaccaaggcatactgaacacattttttagcagctgggcaacaacagatatcag

SEQ ID NO: 28700 - DNA, 100 bp, Homo sapiens
ctgtattcagatcttcatgtgtctcttctaagctgaataaagctgttttggaactgtcaggtacctcaaagcccaacaagtcccaaatttggaaaagctg

SEQ ID NO: 28701 - DNA, 115 bp, Homo sapiens
gcccatcatgctatggaaaaaatggaagaatttgtttgtaagggggacgcttggaccagcttgcctgcaccctgcccaaggagctgagggggaaggacatgcggatggtccccat

SEQ ID NO: 28702 - DNA, 75 bp, Homo sapiens
caagtcaccaagaaattactgtctcaagtgatacggtttgccatctgcaaatctggccgcacctaacctcactgt

SEQ ID NO: 28703 - DNA, 74 bp, Homo sapiens
aagtggctgttcttgtagttttctgcatagataaaaacctccacagctgttgagaaaaaggagaaacctcttcc

SEQ ID NO: 28704 - DNA, 100 bp, Homo sapiens
gtgcaactgaagcctgaggtctccccaacgcaggacatcaggctccactttgaggctctgatgaacattccagtgctggtgttggatgtcaatgatgatt

SEQ ID NO: 28705 - DNA, 74 bp, Homo sapiens
tttccccacagcaagtcactctccttttcagccccaaactacagcgggcgatgatgagatctcatttgaccctg

SEQ ID NO: 28706 - DNA, 98 bp, Homo sapiens
ctcccagtatgacacatattgcttcaatgcttcagcgatgtgcattttgtaagcactttggagccactatcaaatgctgtgaagagaaatgtacccag

SEQ ID NO: 28707 - DNA, 100 bp, Homo sapiens
aaatgcagaattcacaagatccaatcccttgtccttaaaaggcaggatggggaagcagaatagcaaactggcccctgaagtgatggaggacctggtgaag

SEQ ID NO: 28708 - DNA, 75 bp, Homo sapiens
tacgctattacacgggagtaccaaaagaatgcaatggtgtaaagattccagttgatgccagtaaacctaatccaa

SEQ ID NO: 28709 - DNA, 116 bp, Homo sapiens
ccggccgccaggcgcctttgtgagcggcgcggacgacaaaggcgcgggcccgggcagccgaggatgagatggccttctgctacacccaggctccccacaagacaacgtccttgatc

SEQ ID NO: 28710 - DNA, 97 bp, Homo sapiens
gcagaaggcacagtgcctctgaccagcatcgtctgtaaagatcgaagcaaagctgagatggatttgaaggagctgagcgagtcggtccagcaacagt

SEQ ID NO: 28711 - DNA, 75 bp, Homo sapiens
tgcaagaagaaattcccacctgtcaaagagctcattatcaaattatagtgatttgaagaaagagtctgctgtgaa

SEQ ID NO: 28712 - DNA, 104 bp, Homo sapiens
gaaggaacgaggcaaggagctaaagcagcgtgcgttcagccctgggatgcggcattccaaaagaactcactgtcctgattgggatagcagagaaagctggggac

SEQ ID NO: 28713 - DNA, 100 bp, Homo sapiens
ccgccgtccccagccctgcctctccctgggctctggatttatgaccagaggaaaattgatgagaatgagaacaatggagtactcaagaagttctgtcctc

SEQ ID NO: 28714 - DNA, 75 bp, Homo sapiens
gcggctgcctttgacttccccacgagcttccagctcaccgaggaggagaccttctgccagaaagggggcctgttg

SEQ ID NO: 28715 - DNA, 75 bp, Homo sapiens
ctcacacccggtctggacacagaaagagaacatgtttgtgtcattagtgaaactggaaaagcaaaatacaaagcc

SEQ ID NO: 28716 - DNA, 50 bp, Homo sapiens
gaaaggttcgccctggtgctggacttgggaccctggaggactgacgctgc

SEQ ID NO: 28717 - DNA, 96 bp, Homo sapiens
cggcaactctttgatgtactactataatgggaaagcgcatggaaataaccagcctgcaagaactggcacactgtcgagaacaaatcctcctactca

SEQ ID NO: 28718 - DNA, 98 bp, Homo sapiens
tgggctggaggcggcggagcgcgagagcttcgagcggactcaggtggtcgtgtgatggtaacagatgctgacaggtcaatactatctccaggtggaag

SEQ ID NO: 28719 - DNA, 78 bp, Homo sapiens
acaggggcctcgtccagcagctcgtccagcacgaaggccacgctgtacccgccgagatggagtttcactatgttgccc

SEQ ID NO: 28720 - DNA, 83 bp, Homo sapiens
cttagacgctggatttttttcgggtagtggaaaaccagcacatctccatcccccagcctgactgccccgcagaggcgcggacg

SEQ ID NO: 28721 - DNA, 74 bp, Homo sapiens
gtggaaagagctactggggatgagagaaagaggaggaggcagatggaagatggtaccccaaagcatatcatcca

SEQ ID NO: 28722 - DNA, 80 bp, Homo sapiens
atctcttctccctccccttcttggaacaagatcactcaaggtgaaggataatctactaataccagcactttgaatgaaaa

SEQ ID NO: 28723 - DNA, 75 bp, Homo sapiens
gtcaagaacaagcctctcttctttgccgacaaactttacaaatccatgaagtgtgaaatcaaagttgcacaaccc

SEQ ID NO: 28724 - DNA, 90 bp, Homo sapiens
gtgactacttcgggatggagtttcaaaatactcagtcctactgggctttaaggagttttaagctgagtgtcactgtagaccccaaatacc

SEQ ID NO: 28725 - DNA, 82 bp, Homo sapiens
ccgggcggcattgccagggttggatgtggtttggtgcacctcgatttggaggaagtagggcagggcccttatctggaaagaa

SEQ ID NO: 28726 - DNA, 50 bp, Homo sapiens
accttgggcattgctgaatatgaaaaggaaagaaccggaggctgaagcag

SEQ ID NO: 28727 - DNA, 83 bp, Homo sapiens
tcctctccagagtgatcaagtgtgacccggcctccggtgtggctgtctctgatggtgtcatcaaggtgttcaacgacatgaag

SEQ ID NO: 28728 - DNA, 90 bp, Homo sapiens
ggccgcagtcggcaaggagagacgtcgctgaggggcttgcctgaagcgagggaattaaacaaccaccatgtcgagcaaaaaggcaaagac

SEQ ID NO: 28729 - DNA, 101 bp, Homo sapiens
gaatagcaatcacagagactcggagagcatcactggatgttcacggaagaccagggtgtagatgacaggctgctctatgacattgtattcaagcacttcaa

SEQ ID NO: 28730 - DNA, 100 bp, Homo sapiens
aggcacaccagcaggagtgctgccagaaatttgaacaactttccgaatctgcaaaagaaggtcatccccttgaaaggcctgtgggaggatgtggcaccca

SEQ ID NO: 28731 - DNA, 75 bp, Homo sapiens
ctgagcgatacatgatgaacagcgtcctggaaaacttcaccatcctccaggttccttgcagacctgacgatcctg

SEQ ID NO: 28732 - DNA, 74 bp, Homo sapiens
aatcagcttctctcattttctttccctgcaccaactagcaggtattagaaaactactcggatgctccaatgaca

SEQ ID NO: 28733 - DNA, 80 bp, Homo sapiens
aagagtttggcgagtcagtgactgaagcgcccgtccattccaaggtgatgggcagaggcttcagtgtccccttcgcctcc

SEQ ID NO: 28734 - DNA, 100 bp, Homo sapiens
cccagcgctaccttgtcattcaggcaaatatcttccttgctggttgtgtggaagtgatgggttgaggaaggaagactagatctccatttctggcttatgt

SEQ ID NO: 28735 - DNA, 90 bp, Homo sapiens
agagcttccataagcctgtcacctcgtaccaggactatacaggctccaacccaagttccagtggttgtgtctcctaggaatcagcagttg

SEQ ID NO: 28736 - DNA, 82 bp, Homo sapiens
cttaaaagatatattacatgctgcaaagcagatagaagccccatgtgccactcccctgatctgcagcttcggtaggccggtg

SEQ ID NO: 28737 - DNA, 139 bp, Homo sapiens
gaagatcgggtctggctccttcggggacatctatttggcgatcaacatcaccaacggcgaggaatgtatcctgtcaggtataatgtcagtgaatggcaagaaagttcttcatatggatcgaaacccttactacggagga

SEQ ID NO: 28738 - DNA, 75 bp, Homo sapiens
gttcctggtcatacaccagtactaccaaggacagcttttttcctgcaagatgtgtatatctcatgattgatatgg

SEQ ID NO: 28739 - DNA, 100 bp, Homo sapiens
aatagctgatgagggaacatggactttgggcgttcgtggcattcagggatgtggctgtgtacttcacccaggaggagtggaggttgttgagccctgctca

SEQ ID NO: 28740 - DNA, 117 bp, Homo sapiens
gaaaaggcagaggtgaaggagagaacagaggaacctatggagacagagcccaaagaccccccaagcccactggtgaaacagctgagtgaagtatttgaaactgaagactctaaatca

SEQ ID NO: 28741 - DNA, 76 bp, Homo sapiens
cggggctgacatcagcggctctttgtatgatgacgattatatctgtccaagatgcgagtctggttttatcgaggag

SEQ ID NO: 28742 - DNA, 51 bp, Homo sapiens
attcgcagtggtcgcttcttctccttgggacgcctcatcccaggcgcatac

SEQ ID NO: 28743 - DNA, 75 bp, Homo sapiens
ctggattgtcttaggaccataccatgacaagattctgtcccctctgggacgaattaatgaagcagtgaatgacct

SEQ ID NO: 28744 - DNA, 95 bp, Homo sapiens
agaaaattggaaaagttgttcatcaaccaggtgtcatggagaaactccagctgggcccagagattctgcagcgggaaaatccaaggcttatttat

SEQ ID NO: 28745 - DNA, 75 bp, Homo sapiens
tcatcaggacggaagcacaggggccactcagagtcgcccgagaaggtggttctcttcccaaagtggaagccaaat

SEQ ID NO: 28746 - DNA, 75 bp, Homo sapiens
gccggccccaggcgggcgcgcccagagccgccgggcgaatgccagaggattcaacatgagcatacctatgcctgg

SEQ ID NO: 28747 - DNA, 97 bp, Homo sapiens
tctacagggtgatccagcagcagctctgcttgagggaggcaaatacatgcaggcggtgattcagtatgggaagatagtgtcctggttagagatggaa

SEQ ID NO: 28748 - DNA, 74 bp, Homo sapiens
caacattgttcctggaacgccctctttttaaaaaagagaaacagcacccaggactatcttccaaagagttctgg

SEQ ID NO: 28749 - DNA, 74 bp, Homo sapiens
agagcttggctcacaattgacagtgatatattcatgtggaactatgaggatggatcattgccataccatgttca

SEQ ID NO: 28750 - DNA, 100 bp, Homo sapiens
cggccggtcaggctcgccgccgagctgaacatagataccctggagcgaatagccgggctggaacaggaggacttggtggaggcgcacggcaccttctaca

SEQ ID NO: 28751 - DNA, 83 bp, Homo sapiens
tgaccatggcaagaactggcgtcacgtttacaaggctactgcagcactggggtgtcagttgttggtccgacccagaacgcttc

SEQ ID NO: 28752 - DNA, 83 bp, Homo sapiens
tcggcagagcaaggggcttacgcagaaggacctggccacggaaccctcagtgctgcgtctagattctgcaggggaggtttgct

SEQ ID NO: 28753 - DNA, 50 bp, Homo sapiens
cttcgacatcgagatcaaccgggagccggctccagaaacatgacaaggag

SEQ ID NO: 28754 - DNA, 51 bp, Homo sapiens
catcattaaggacggaggcacgtggtgaaaatgtagggttggaatccaaat

SEQ ID NO: 28755 - DNA, 74 bp, Homo sapiens
cagaaagcaggcgaacccgcggcgcaataacggtgttgactttaaggtgaaaacaatttcagtggatggaaata

SEQ ID NO: 28756 - DNA, 100 bp, Homo sapiens
atagtgtcattaatggggaagggcctgtcggtgactcccgtggactgtggtggcagcagcagtggcagcagcagtggaggaagtgggacatggagccgcg

SEQ ID NO: 28757 - DNA, 50 bp, Homo sapiens
agccagaaatacatgagctttacaggtggagtctcgctctgtcacccagg

SEQ ID NO: 28758 - DNA, 100 bp, Homo sapiens
caacatctctcagagacgaaagggaagtgtgaaatcggctgggcctactactgcacgggagcaggtgccactgccgccatgctgctgtgcacgtggctgg

SEQ ID NO: 28759 - DNA, 75 bp, Homo sapiens
atggcgagcgcatcatggcgattgaagttggttgaatctggcgatgtggaacccatggatatggagggctgacta

SEQ ID NO: 28760 - DNA, 50 bp, Homo sapiens
aaggcagtaccgtttcctcagcggcgggcttgaagaaaatttgcctacac

SEQ ID NO: 28761 - DNA, 90 bp, Homo sapiens
gtccttttgtgaacttttaaaggaaattactacagaaggtcaagttcaggtgctcaaggtttcggtggaccgggtcttaaagaccctgaa

SEQ ID NO: 28762 - DNA, 75 bp, Homo sapiens
gagctccctcaagaagggagggaggctggtggagaaggcgttcgtggcattcagggatgtggctgtgtacttcac

SEQ ID NO: 28763 - DNA, 80 bp, Homo sapiens
agggacgtgatgctggagaattataggaacctcgtctccctgggtactggtcttcttggacattaatctttgaatacttg

SEQ ID NO: 28764 - DNA, 100 bp, Homo sapiens
atggaaacaccatggctgcggcggcccagctctctctgacacaggaacctacaagcagcaattggcgcctattatgactttgagagcccaaacatcagtg

SEQ ID NO: 28765 - DNA, 83 bp, Homo sapiens
attcactgtggtccagaagcagatatcggtgagctcacaggcgcctgaagtacatatccctagctgtgctggtggtccagaat

SEQ ID NO: 28766 - DNA, 76 bp, Homo sapiens
ggctggaccctgagccctgggacctctgaagtgaacactgcagggccatttgaattgtgaaaaattgggtgagctg

SEQ ID NO: 28767 - DNA, 75 bp, Homo sapiens
attccaagtaactcttatttgctcatttataatagctttgcccagttcctagttaaggagaaagggtacgataag

SEQ ID NO: 28768 - DNA, 137 bp, Homo sapiens
agaacccgctgccccccagcgttggcgtggttgacaagaaagaggagacgcagccgcccgtggcgcttaagaaagaaggagaaaatgcagaagtctccatggacgtttccctggcttaccgtgatgacgcgtttgct

SEQ ID NO: 28769 - DNA, 83 bp, Homo sapiens
atctccatcacccaccaacaacaccacaataatccacagccaagaacgcgtatcacaatgtgactgcagagcagctctttttg

SEQ ID NO: 28770 - DNA, 82 bp, Homo sapiens
tcgggttattcgagtgaccgagaccgcggccgggaccgagggttagctttatacgtctacgaatatttactgcacgtaggag

SEQ ID NO: 28771 - DNA, 50 bp, Homo sapiens
cgccaactccaccctctacatcaggctgctgcatctgaagccccccagga

SEQ ID NO: 28772 - DNA, 100 bp, Homo sapiens
caaaggtgtgcagtggatggagcttgtcaagattggttatcaatactctggctgaccatcatcatcgtgggactgactttggtggaagtccttggttaca

SEQ ID NO: 28773 - DNA, 101 bp, Homo sapiens
cgggatcttcaaccacctcgagcggctgctggacgaagggttacattttgccatctgcctttccagagtaagtggctctatgtgggcactgaacgaggtaa

SEQ ID NO: 28774 - DNA, 100 bp, Homo sapiens
cttttacaaaagtagtcaagctctgtatttcacagcaggaacgaatgcaggaatttgggaactgagctgtgcaagtgctgaagaaggagatttgtttgga

SEQ ID NO: 28775 - DNA, 90 bp, Homo sapiens
gcccctttccttactggatcctcaaaccagaagaaaacctgaatctctgaggctactgcagcactggggtgtcagttgttggtccgaccc

SEQ ID NO: 28776 - DNA, 90 bp, Homo sapiens
aagatggcgactcccatgcatcggctaatagcccggagacaagcatctgggttggaatttgcccctgacaaataataaaatgatgagtga

SEQ ID NO: 28777 - DNA, 120 bp, Homo sapiens
gcttgaaaagactgggcttgtccttgctggtgcatgcgtcgtcggcctctgggcagcaggatttggggtggaaggcaggcatggtcaaacccatttcactgacaggagagcagagacagg

SEQ ID NO: 28778 - DNA, 113 bp, Homo sapiens
caactgttcatcctcacctatgcaaagaaagggaagctattgctgggattttgaggagattcaaactcagatgactttgaccctgcttccaccaagagcaagtatgactctct

SEQ ID NO: 28779 - DNA, 96 bp, Homo sapiens
gcttgaccagttacggcaggaggccgagcaacttaagaaccagattcgacttgtcagctcatttgcagcttacatttttggtttcttccacaaaaa

SEQ ID NO: 28780 - DNA, 75 bp, Homo sapiens
cgtctctctgctgcggcgcggggaccgctgtgctctcgggcgaagctgtgctcaggcccgggctggacgcagagc

SEQ ID NO: 28781 - DNA, 124 bp, Homo sapiens
ctattgcacgaagttcagcccagaggagaaactcgctcgccttcagaagacaggggacggcaaaacagaacagaaaggcggagataaaaagaggggtgttaaaagaccacgagaagatcatggc

SEQ ID NO: 28782 - DNA, 51 bp, Homo sapiens
cactgcttttgaaacatcaaagcctgaagaaagttcgtggcaaagtctgga

SEQ ID NO: 28783 - DNA, 51 bp, Homo sapiens
ttgttttcttcattggcagtaaaaatgggggcattgagcaagtgcagcaaa

SEQ ID NO: 28784 - DNA, 90 bp, Homo sapiens
caaactttgggcacaagtcatgaagccgacaagcccgggagacacagtgtcagaattacaaggtgtctggtggcctgacatgcaccgcct

SEQ ID NO: 28785 - DNA, 85 bp, Homo sapiens
agctgttagtcattacaagttgctgcttcagcaaaacaagaaatttcaaaacttgatcaaggtttgtccagaggggttgcgttta

SEQ ID NO: 28786 - DNA, 98 bp, Homo sapiens
tatgtttacgcacagctgcctgtcaccccagatgtcctcatcatcccgtcagagctgaggtacttcgtgaaggtttttgtggaaactctggataagtg

SEQ ID NO: 28787 - DNA, 80 bp, Homo sapiens
catccagtaccagttccgcacagagacaaatggaggacaggtgacagaagaagtgcgtaagaatattgaagttcgtttaa

SEQ ID NO: 28788 - DNA, 75 bp, Homo sapiens
ggcaagatggcgcctcccaagaacgctccgagagatgccttgtttccacagagtgaaatagcctgtctttcaagc

SEQ ID NO: 28789 - DNA, 89 bp, Homo sapiens
ttcaggagcctaaagcgtggggaacaggagtacagctgtgtagtaaagatgccttctggtgaatttgcacgtatatgccgagatctcag

SEQ ID NO: 28790 - DNA, 100 bp, Homo sapiens
ggctgctgcgggccgcccggctgccgccgctgctttcgccgctgctgcttctgctggttggggaatttatccagttggcgaaggactttgaggatttccg

SEQ ID NO: 28791 - DNA, 100 bp, Homo sapiens
gttgtgcaagaggtactgtccatcaaacatcttccaccacagcttagagttggtgggttactacaatcaaaatttacaagtggagcttttctttcaccaa

SEQ ID NO: 28792 - DNA, 75 bp, Homo sapiens
cccgagctgccgccgcagccacagccgagggcactatggttggcgtgcagtggtgtgatctcagctcattgcaac

SEQ ID NO: 28793 - DNA, 126 bp, Homo sapiens
ccggacatctactgggtcagcttcatcctcggcggcggtggccgctagctccaaggaagtgctgtcaaagggaaaaccccccaagtaggtgacagagtattggttgaagctacttataatcctaat

SEQ ID NO: 28794 - DNA, 83 bp, Homo sapiens
aatcaactgagagagatgcttaaaaatcaccagttactttaatgagacgccaggaaagcatgtgcagatgcaactctctctca

SEQ ID NO: 28795 - DNA, 98 bp, Homo sapiens
ggcgctggtggccgtgctgctgctcgcagcgtgccacctcgcctcccgccgctaccgagcgagcacagccgacactggttcttcaagggccagctcca

SEQ ID NO: 28796 - DNA, 83 bp, Homo sapiens
gccaagcgaccacccaaagaagggtggaataattaatgatagttctgaattaattggtcctgctgaagctcactcagattccc

SEQ ID NO: 28797 - DNA, 90 bp, Homo sapiens
gaaactgatcagacgaactacgaacccctggacgggagagtctgccggcggagaatataaggaggacaagaagacctcattctttcctat

SEQ ID NO: 28798 - DNA, 96 bp, Homo sapiens
agcaaagtgctgctgtgccatggggagctgcggagcaagagtggacatgaatgtatcctgtcaggtataatgtcagtgaatggcaagaaagttctt

SEQ ID NO: 28799 - DNA, 90 bp, Homo sapiens
cacatttgcagctcattgaaggaaaggagccctccctaaggcatatcctgataatcatctcagtcaggtggatgtaaatgaattgttttc

SEQ ID NO: 28800 - DNA, 100 bp, Homo sapiens
aggagactcttagaagactggaaagcagattttttgaagaaaaggacctggacccttcccagggatcattgacatctttggtattggagggggcctcttg

SEQ ID NO: 28801 - DNA, 75 bp, Homo sapiens
agcggcttctcctcagcccacatgggcagtcacgttacctagaaaagtacgagaaagttcatcattttggggagg

SEQ ID NO: 28802 - DNA, 75 bp, Homo sapiens
ggcgagacgcgcagcgccggcgcccgggagacccaggaggagcccgcaggcaaaacccatttatggcggttggct

SEQ ID NO: 28803 - DNA, 75 bp, Homo sapiens
cggtttcccttccagccattggaacagcatttgccatctatcaatcgctgccttattttgaatcatttggcactt

SEQ ID NO: 28804 - DNA, 98 bp, Homo sapiens
gtggaccacagcattcctgaaatacatccaggaaagacatggagattctcttaaaaagttaagtgggcagaccaacatccacctcagcaaaaacttct

SEQ ID NO: 28805 - DNA, 87 bp, Homo sapiens
cagacattgatgaattggcatgtaattgtaccaggttacagcagctggacatattaggtaaaacttccttttcctgtagatcaaatc

SEQ ID NO: 28806 - DNA, 100 bp, Homo sapiens
tggatttaaaagacagtcctcgtcagcactgactttcagctatggaatcggactgggaggtgctggtcctagggaagctcaagtgggacctggctgctgt

SEQ ID NO: 28807 - DNA, 99 bp, Homo sapiens
ccgcagacctctgggcttcctgttacatgagcatgcagcataccttgtggatagcatgtgggactgtgctactgagctgctgaaagactgggaatgtat

SEQ ID NO: 28808 - DNA, 50 bp, Homo sapiens
ggacaatattcgcacccggctgaaggagccaccttcctcgtcacgtttgg

SEQ ID NO: 28809 - DNA, 90 bp, Homo sapiens
atgattgtttatcctaatcccaatgctgaagtaagattgtcttggaaatactaagttgggattaaaagtaagttggatcaaggaggagtg

SEQ ID NO: 28810 - DNA, 75 bp, Homo sapiens
atcttgcacttcttctgagtgagattcacaatcgctatgaaggcaaggatgtttcaaagcacaaacggaatttgg

SEQ ID NO: 28811 - DNA, 82 bp, Homo sapiens
gagcgcgagcggcgcgagaaaatcctggtggacctctcaaaccccggtggccggcctgccctggcctacgagagcgtcgtgg

SEQ ID NO: 28812 - DNA, 50 bp, Homo sapiens
ggtcaggaagcagaatattccttatatggggaaaaaagttgttccatgta

SEQ ID NO: 28813 - DNA, 50 bp, Homo sapiens
caatctccttttccttggctaccccattaaagggcagtatttaaagtcag

SEQ ID NO: 28814 - DNA, 99 bp, Homo sapiens
gaatttattgtaaaaagagaacatgcattaacatcaggcacgataaaagccatgttgagtggcccaggtgactctgacatcattagaagcatgccagaa

SEQ ID NO: 28815 - DNA, 98 bp, Homo sapiens
cgccggtggcgtgatggagcggcagcagcagcagcaacagcaactgcgaaacgtgctgggtaggccaggtttcagcatcgcagacaagaagcgcagga

SEQ ID NO: 28816 - DNA, 97 bp, Homo sapiens
cctcacccctttctacaaggagggcaagtttgcttccaagtccatctcaggttttgcgcacagctgcttccagtatgccatccagaagaaatggccg

SEQ ID NO: 28817 - DNA, 82 bp, Homo sapiens
ggacatgagccccctgaggccccagaactatcttttcggttcgttaccgtgaacgcatcaccattcttcgagggaatcatga

SEQ ID NO: 28818 - DNA, 95 bp, Homo sapiens
aagaccgtgtgaatcattgtctgacaatatgtgaaaacatagtggcacagtctgtcagtgtcagagatggctttggattccccgttctgtgtgct

SEQ ID NO: 28819 - DNA, 95 bp, Homo sapiens
atacgttagccagtttacttagaaggaccatgaaaaagctgaatttgaggtacatgaagtatatgctgtggatgttctcgtcagctcaggagagg

SEQ ID NO: 28820 - DNA, 100 bp, Homo sapiens
gccgggaactccccatcgcgttttgccagcgataatacgcctcaggtgctgactgggttacttttttaaacactaggaatggtaatttctactcttctgg

SEQ ID NO: 28821 - DNA, 110 bp, Homo sapiens
accaggggggcggcagcgctggacacccagcctccagtccgtagttcgtggtccttcgccggtgtccccggagcccagcggctgtggatggcagaagcccagagtgggac

SEQ ID NO: 28822 - DNA, 75 bp, Homo sapiens
cttggaagcagaacccatagaactcgtggaaactgcataccataaagtctccaaaggatggcacagtaaagaaag

SEQ ID NO: 28823 - DNA, 90 bp, Homo sapiens
cttgaagacagagatttattcgtaatgcgactcaaagctgcacggcagtctgtttatgagaatgaacttcatgagcttgaaaaagaaata

SEQ ID NO: 28824 - DNA, 74 bp, Homo sapiens
gtcctcgatccgcccacagacctcaaattcaaaggttcagcagctggacatggagaaccaacgctcatcacctc

SEQ ID NO: 28825 - DNA, 98 bp, Homo sapiens
tccacatcgcggacaccaaggtcgccaggcgttatggggatttcttcatccgtcagatccacaaatttgaggagacatagggcctgattacattccaa

SEQ ID NO: 28826 - DNA, 90 bp, Homo sapiens
cgaaatggaagatgggaaagttattgaacggctgggccagagcgtggttgctgaccagttgaaagttgctgatcatctgggctgtgatcc

SEQ ID NO: 28827 - DNA, 97 bp, Homo sapiens
caaacctggagccagaaacattaccgtcatattccacccattactaagctggaccagaccaattttgaggaaaggatacagacagcgcctggaattg

SEQ ID NO: 28828 - DNA, 83 bp, Homo sapiens
ctgacgccgtgtttcctctttcggccgcgctggtgaacaggattttttatcaagcagaaatgcatcgaacaacgagaatcaag

SEQ ID NO: 28829 - DNA, 90 bp, Homo sapiens
gtggccttcagcactgataagaatctattattgggtaatctacagttgctgcagaactgcctggcagtgttaaatggagacacataagcc

SEQ ID NO: 28830 - DNA, 75 bp, Homo sapiens
ggaacccgttcagctctccagtgggacagcgcatcggacatcatgtgaggctctgtaaaccatgcaagcttgagc

SEQ ID NO: 28831 - DNA, 75 bp, Homo sapiens
gcccgcttcacagtcgaggagagaaagcattcctctgaatattgatttgctgaatagcccagacttattggaagc

SEQ ID NO: 28832 - DNA, 100 bp, Homo sapiens
gctctggactggatatttctacctcggccccaggttctctgcagatgcagtaccagcagagcatgcaggtactgggcctaatcgctacgtgcctctttgg

SEQ ID NO: 28833 - DNA, 74 bp, Homo sapiens
gtgtaggtgatgaagacatctacagtggcctgtccgaccagatcgatcaagctcatcctcccgggaacgtctcc

SEQ ID NO: 28834 - DNA, 96 bp, Homo sapiens
ctctcaggctgctgtggttcatgccacagccaaagctgcgttctgaaatggaagaagaaaagagacaagctgtaaataaagctgtagccaacatgc

SEQ ID NO: 28835 - DNA, 125 bp, Homo sapiens
gagagccagctcatctgcgagccttctttcttccagcacctcaacaaggacaaggacatgctgaaggaaaccatctgccgtgtgactggtgggatgaaggtaaaggcagaccgagatgaatcctc

SEQ ID NO: 28836 - DNA, 100 bp, Homo sapiens
tgtccttccattcctgagtccagcacttcccaggccagaggaactcctccactctgaacacctgggtcccagtgaattggaagcccctgcccctgggggc

SEQ ID NO: 28837 - DNA, 52 bp, Homo sapiens
cctcctgagtagctgggatcacagggaccattgacatttatggatgtggcca

SEQ ID NO: 28838 - DNA, 100 bp, Homo sapiens
taacctttgtgcttcccacggagcagttccacttaggaaacttccattttagaagaatacagtatcaattggactcagaagctgggagctggaattagtg

SEQ ID NO: 28839 - DNA, 97 bp, Homo sapiens
tcttaattataaattcaatgatcaggacattgaagagtctcttgcatggcaccaagaatgttaccaattcaagcagtttaagattgccaagacaaaa

SEQ ID NO: 28840 - DNA, 100 bp, Homo sapiens
cctgcgccaccacgtcacgcacacgctcggcgctgcgatccgcgcatataacggaggagacatcacagctttcccagatcgggaggaaaaatatggaatg

SEQ ID NO: 28841 - DNA, 101 bp, Homo sapiens
tgatgtactccaacattcatcgcagctggtgggtgtacacactgctgtttaccttggcgaggcctttcaccaagtccatgttttatcttcaagacactaaa

SEQ ID NO: 28842 - DNA, 110 bp, Homo sapiens
aaatattggccttcccatcagtacaacacattgtaaagatttttgtcaaccgcagcctggcgctggggaagattcgttgctttggcttcgacatggactacactctggct

SEQ ID NO: 28843 - DNA, 74 bp, Homo sapiens
ggaagggaaccaacccactttctcggcgccgcggctcttttctaaaagtatccagctatgggacacagcaggac

SEQ ID NO: 28844 - DNA, 50 bp, Homo sapiens
ggaattcccataccaaccacagaggaaggccaacagctcaggagaagcca

SEQ ID NO: 28845 - DNA, 101 bp, Homo sapiens
caaggacatctttccaccgaatgccacctggtttataacaaaagggtcaaagaattgactgtagatccaactgctgctggtgatgttcgtccaataatgca

SEQ ID NO: 28846 - DNA, 75 bp, Homo sapiens
gaagcgggaattggagcagcagtttcattctgcttcagctcaggaagggtccccagccccaccccagccccaaag

SEQ ID NO: 28847 - DNA, 100 bp, Homo sapiens
tttccctttggaggggctgggctcctactgttcttagagatgtacctttctcaggtgaactccagaaagccattgacttattcacagatgccatcaagct

SEQ ID NO: 28848 - DNA, 100 bp, Homo sapiens
tgtgttgtttgtggaactccattgtttaagtttatggctacaaatgatttgatgacggaactgcagaaagattccatcaagttggatgatgatagtgaaa

SEQ ID NO: 28849 - DNA, 75 bp, Homo sapiens
cccgaccggagagcggagcgcgagcaggacccgcgtgtcgcccctcagcagtttgcaaatgagtctggaaaaaaa

SEQ ID NO: 28850 - DNA, 100 bp, Homo sapiens
cgatgtccctgatccctggagcgacgacggccgctgcctaagctggaaatttgctctgaaaacgagtccgaagccgaagctgaccagcagatggacaact

SEQ ID NO: 28851 - DNA, 123 bp, Homo sapiens
tgcaggaggaggaggaagaagagaagctggacgctctgcaggggatcctctctgctttcctgggtaatcactttgatcagtatgaggaaggacacttggaaattgaacaagcgtcacttgaca

SEQ ID NO: 28852 - DNA, 75 bp, Homo sapiens
ttggcaagggcatccgctacgtatcttttgagcagtacgggagagacgctgccgctgttccaggccagtgccttt

SEQ ID NO: 28853 - DNA, 60 bp, Homo sapiens
cgacgagggggccgaaaccgagaggcagcagcagcggaaccgcttaggcagtgggggaag

SEQ ID NO: 28854 - DNA, 74 bp, Homo sapiens
ctgtgatgtggaggaagaagagctcaggcacgttgcccctggcctcgcaggagtcggccgtggtggaggacctg

SEQ ID NO: 28855 - DNA, 98 bp, Homo sapiens
agaagggctacctggacgaggagctggactaccggaaacaggccttggaccaggccaacaaggagcagaagcggttgctggagctcggcatcactggc

SEQ ID NO: 28856 - DNA, 97 bp, Homo sapiens
gaaggtgaccaagttcatgctgtgtgctggacgctggacagggggcaaaagcacctgctcggaatgcagtttattctactccaagagattctgcctc

SEQ ID NO: 28857 - DNA, 83 bp, Homo sapiens
aataccacgacaaaaccaccctaaaagccagacagaggaagtgaccagagcaacaagaccaaccaacacaaggacaggacaga

SEQ ID NO: 28858 - DNA, 113 bp, Homo sapiens
ttaacaacctggatcttcgaacttttgacacggctttggaaacgacgtcatgtgttagggggatatgagactttctactcggaatatcctgagtgttgcgtggatgtaaaacc

SEQ ID NO: 28859 - DNA, 100 bp, Homo sapiens
ccagtgccaaccctgagactctgctgggggagatggaggcgaagacaagagagctcattggtgaatcaaaaactctggttttaagcaacctctcctacag

SEQ ID NO: 28860 - DNA, 109 bp, Homo sapiens
gcggatggccccaggtgtaagcgcagaaagcaggcgaacccgcggcgcaataacggcacctgaatggacagaagaggacctcagccaactgacaagaagtatggttaag

SEQ ID NO: 28861 - DNA, 74 bp, Homo sapiens
tgtaaagcaatatttcgagcagtttggcaagatggcgagcggctgcagctgcaggatgaggaagacgacagcct

SEQ ID NO: 28862 - DNA, 83 bp, Homo sapiens
cgacaagccgctggcagccgcggatctcaccgccgctcagggtaaaagtacacctgtaagccagcttggttccgcagactttc

SEQ ID NO: 28863 - DNA, 78 bp, Homo sapiens
ggcgctggagagggggcgctgagctgttggggctgcagcgctggtggaggaggaaactcgcagataccgacctactaa

SEQ ID NO: 28864 - DNA, 100 bp, Homo sapiens
gaagctatggcttcttctggacagattgatttattagagcgtcttaaagagcttgacaaaagatttgggaggcaatgcaaaatgctcagacttcacagag

SEQ ID NO: 28865 - DNA, 50 bp, Homo sapiens
ctccggccggtcagggcaagagccagctattccaatcaagttctctgaaa

SEQ ID NO: 28866 - DNA, 80 bp, Homo sapiens
atcgggagcgcaaggtcgccctcaaggccatgatcaaaacgttcctgacggagacttcgcccttcatgtggtccaacctg

SEQ ID NO: 28867 - DNA, 96 bp, Homo sapiens
tccaagaggagtttgaagctacccttggggcatctgatcctaattcccttgctgatgatattgcctgattacatcaaccccagagccgtgcagctg

SEQ ID NO: 28868 - DNA, 100 bp, Homo sapiens
attgcaatggaacagcagcagttaagggcagaaatccttctggctggtggacgggtcgactacgaggcaagcagggcctgttccccaacaactatgtgac

SEQ ID NO: 28869 - DNA, 100 bp, Homo sapiens
tacctcttgggtgaactctagcaattacaagatggcattgcagttgtcagatctcattaaggtcttatatctgaaacagttccactgtcttccataactt

SEQ ID NO: 28870 - DNA, 73 bp, Homo sapiens
aaaaatggtaccacttatgagggtatcttcaagacgctaagctcaaaggagtacgagacccaatctagtgcag

SEQ ID NO: 28871 - DNA, 74 bp, Homo sapiens
ttgagttatgttcttcaacgatgacatgcatgaaaggcacctatgagagtccggagtgttgtcatgtgaagcct

SEQ ID NO: 28872 - DNA, 97 bp, Homo sapiens
tctggaagacaaaaatttggattgtcagaaggaggctgctcatataattaatgccattgacttctgacagctctctccatggaaggaggcggcggcc

SEQ ID NO: 28873 - DNA, 99 bp, Homo sapiens
caaagtgctgggattataggcgtgagccaccgtgcctggctgaaggaatactcccccagttgcaagaggcgcaggaccgtggaagacttcaacaaattc

SEQ ID NO: 28874 - DNA, 99 bp, Homo sapiens
gctcgagcttccctcgtggccgacggaacaatgaagggacatgagagatggctttagaagaaaaagtttctactcttcccattatgcgagagagcggtc

SEQ ID NO: 28875 - DNA, 83 bp, Homo sapiens
gcaaggagctaaagcagcgtgcgttcagccctgggaacaccttccaccatgaccacctcagcaagttcccacttaaataaagg

SEQ ID NO: 28876 - DNA, 74 bp, Homo sapiens
ccgggccaggccgcggccggggcaggagcgcaggtctgccatcatggatgttctcgcagaagcaaatggcacct

SEQ ID NO: 28877 - DNA, 83 bp, Homo sapiens
actattagacaggaagccagaagatgtagacacagtgcagccaaaagattgctgcagcaaaaccaactccaccaaaaagccag

SEQ ID NO: 28878 - DNA, 89 bp, Homo sapiens
gcggtcgcagccctcagcccacttaggataatggcgacagctgaggtggcgagtaagaaaagaagctatgatgggtctggctcagcttt

SEQ ID NO: 28879 - DNA, 83 bp, Homo sapiens
ctttggaaaagctgttgacatctcataaacggctggttatgaaagacagtgcagtggccatcaaagtgattccccggaatcgt

SEQ ID NO: 28880 - DNA, 75 bp, Homo sapiens
acgctctgagcacagagaaggaggaagtaatggggctgtgcataggggaggactctgacaccaccataccaatgg

SEQ ID NO: 28881 - DNA, 96 bp, Homo sapiens
ggaacagcctatgtgggcttccacggagcagagcatcctggccagaacaagccaaggagccaagacgagagggacacacggacaaacaacagacag

SEQ ID NO: 28882 - DNA, 50 bp, Homo sapiens
cagagttagagagagggatggtgtgatggatgtaacagatataataaatg

SEQ ID NO: 28883 - DNA, 107 bp, Homo sapiens
cgcggggaggcggccccggagaaccgcggggacagcagccggccagccggggggcactgcccgcccgggctctggacccccgcagcaaacacaagtttaagatccac

SEQ ID NO: 28884 - DNA, 98 bp, Homo sapiens
cctactgcagccacgcgggcgagcggctgtgtggatgtcggcgaagccgcgggcgaggagcacggattcataccctcctgaaggacctgcagaggcag

SEQ ID NO: 28885 - DNA, 75 bp, Homo sapiens
agatgtgagccaccacactaggcctacaagatttggaatccagatatgacactaaaaagttatttcaaggaaagg

SEQ ID NO: 28886 - DNA, 100 bp, Homo sapiens
ggagcccctgcgggtgctggagctatacagcggcgtgggcggcatgcaccacgcgctgagaggatatggctttagttgcccctgaagctccttcagaaca

SEQ ID NO: 28887 - DNA, 75 bp, Homo sapiens
atgataccaaacctaaaaccacatgtgcatctaaagacagttggcacggaaagtgactgagaccgaagatgatag

SEQ ID NO: 28888 - DNA, 98 bp, Homo sapiens
ggagtaaattgaaaatattggggccatttagtaacttctttgcaagacatgcaagaaagcacttcagccaagcagaagggagccagctggacgaggtg

SEQ ID NO: 28889 - DNA, 100 bp, Homo sapiens
ggtgcatgttacgcagcggccagatgatgctggcacagggccttctgctgcatttcctgcccagagctgcccctgagcctggacctgcccagcccccggc

SEQ ID NO: 28890 - DNA, 100 bp, Homo sapiens
ctcgcgccggctatggccgtgccctggggctgagccctcagccatcccaggcctcaggacctgagttctccgacgcccacatgacatggctgaactttgt

SEQ ID NO: 28891 - DNA, 75 bp, Homo sapiens
ctctctgagttcttgggcacgttcatcttgattgaggatgaagaaggttataacgatggagaggtagatgacgag

SEQ ID NO: 28892 - DNA, 90 bp, Homo sapiens
aaaaaacattctgataatggccggtgatgaagcaagcacaatagctgaaataatagaggaatgtggagatgttgaacgtcgacgcattta

SEQ ID NO: 28893 - DNA, 51 bp, Homo sapiens
attcgcagtggtcgcttcttctccttgacatttatgcagtgtgtgattctt

SEQ ID NO: 28894 - DNA, 51 bp, Homo sapiens
gtgccaatggatggcaggaatgatccttgccagctcctaaaacctatggta

SEQ ID NO: 28895 - DNA, 75 bp, Homo sapiens
agaagaaactcaagggtcagagtcaacaagatgaccgcaatccccttcaagacactaagggcgactaccagaaag

SEQ ID NO: 28896 - DNA, 90 bp, Homo sapiens
ctttcatagcaagtgtgatcggcacccgagggcttgcggctgaaggtgctggagaatctggtaaaagcaccattgtgaagcagatgagga

SEQ ID NO: 28897 - DNA, 100 bp, Homo sapiens
ctcatgaaaatgaagagcaagctgcaaatcatttttatctgcaaggggttatctggctgtaacccttacataagcaagaccaactacggttgaaaacgta

SEQ ID NO: 28898 - DNA, 80 bp, Homo sapiens
atcgctactaccccgcagttcccggacatgatcctctccgcctctcgagtgtgaacgtggcatcactgacacaatcagaa

SEQ ID NO: 28899 - DNA, 83 bp, Homo sapiens
ccccggtgtgcctcggcagccttgcgctgctctaatggtccggacttccgtgtgaggagcagcccccacaacatcgatccaag

SEQ ID NO: 28900 - DNA, 89 bp, Homo sapiens
ccctattaaaacttgtacatggctccccattggtttttggagaaaagttcaagctttttaccttgttgtggacatcggatacccaagga

SEQ ID NO: 28901 - DNA, 75 bp, Homo sapiens
tggggggatggttccatcatggcgtcaatgcagaacaaaatccagtctcatagcagaggagaatataatgtttac

SEQ ID NO: 28902 - DNA, 90 bp, Homo sapiens
ctgaagtgctacttaccgaaattcatctgtcacctggaaaatttgagattcggcaacacaccagtgcaacaaagactcagctgcctggcc

SEQ ID NO: 28903 - DNA, 98 bp, Homo sapiens
gctccgtggatgaggctctgcggctggtccaggccttccagtacacagacgagcatggggaagccaatattcactggtggaagatgatgaagatttgc

SEQ ID NO: 28904 - DNA, 75 bp, Homo sapiens
agacctctatagaggagcgtgtggctcatctacgaagagtccagagtgctgcagcagctcccagtccagtgctag

SEQ ID NO: 28905 - DNA, 78 bp, Homo sapiens
actggatctgctgccagcattagcctggctcaatatctaatcaatgtcaggcgccccagcgggatcccagagaaggat

SEQ ID NO: 28906 - DNA, 100 bp, Homo sapiens
gaccctgctgctgccaagctgtggaccctctcagccaacgatatggaggacgacagcatgtttgcccagtatgcggagatcgtccacttcaccctcccag

SEQ ID NO: 28907 - DNA, 83 bp, Homo sapiens
ctcggaaggacattgttgctagactgcagactcagattgctaagaagcctcgaacgccaacctctggtccagtaatcacgaag

SEQ ID NO: 28908 - DNA, 116 bp, Homo sapiens
ttaggacctgttagcttggttgggcgactggcaaatccttccttccccggggtagaagtccaggacctagtgaaaccagtgtgtctgcccaacccaggcatgatgctgcagccaga

SEQ ID NO: 28909 - DNA, 90 bp, Homo sapiens
cgggcgagaggaggcgagaggcgcaaagagccccccaagatgaacccagtggtggagccactgtcctggatgctgggcacctggctgtcg

SEQ ID NO: 28910 - DNA, 143 bp, Homo sapiens
ctctgccttgctgatctgagctcagacctgccaatttaccagagataattgataacaccctgtaacagctgagttactcactataaacaatatccacccaacacaagcaaagtttattcctactttgaatgccgtgaaaagaa

SEQ ID NO: 28911 - DNA, 82 bp, Homo sapiens
ctgcgaaggtggcggcgctgctgctcgggctgctcttggagtattttaataagcggaaaacctactttgctcacgatgccct

SEQ ID NO: 28912 - DNA, 112 bp, Homo sapiens
ggccgggcacctccgagcgcaaggacagcgcgaggtccgcgcagcccagcgcagccatagacaagaggagcagcagcggcaccgcccctcaccctggagggtcctgtacaat

SEQ ID NO: 28913 - DNA, 75 bp, Homo sapiens
cctggagtaaccctcactggagaatccagagttcaactttagttggcttaccaagagtgaagcgtgacaagtact

SEQ ID NO: 28914 - DNA, 83 bp, Homo sapiens
tcatccgtaacctggagcagctgggaggcactgtcaccaaccccggggagaggcagcttccccccttgggtccaacaaacccg

SEQ ID NO: 28915 - DNA, 82 bp, Homo sapiens
gcggatcgaagtgatggccctgcccaaaccgggcggggcccacagcctagactctgaacaggaagtgcctcctggaaccaca

SEQ ID NO: 28916 - DNA, 75 bp, Homo sapiens
gtttgtttctctgtatggcacagaagaatatttgatctcaggaaacaggctcgacagctggaaaatgaacttgac

SEQ ID NO: 28917 - DNA, 83 bp, Homo sapiens
acggcgagcgcgagcggcgcgagaaagactcagtggcttttgaggatgtgtctgtgagcttcagccaggaggagtgggctctg

SEQ ID NO: 28918 - DNA, 74 bp, Homo sapiens
agaaatcaagattcttactgataaactcaaggaggctgggctgggcgagtatctcttcgaaaggctcactctca

SEQ ID NO: 28919 - DNA, 98 bp, Homo sapiens
cgccagctggtggtacaagacgggcttccgagtggacctgccaatcaagtcggcccgctaccgtggccagtacaacacctatcccatcaagctcttct

SEQ ID NO: 28920 - DNA, 82 bp, Homo sapiens
gagtaggagactcagaatcgaatctcttctccctccccttcttggtactccaaagattcaggtttactcacgtcatccagca

SEQ ID NO: 28921 - DNA, 100 bp, Homo sapiens
ggacacttttgggtagccatggacaagaactgcttatagaaggaacaaagatgacagtagtatttttgatgggttggtggaagaagatgacaaggacaaa

SEQ ID NO: 28922 - DNA, 50 bp, Homo sapiens
agcacttcacctgcaccatctggagtgactgtgaagtgctgaccacactc

SEQ ID NO: 28923 - DNA, 83 bp, Homo sapiens
cgcagaccagcccatccagatctatgagaagatcgtctctgggaagactctgggctgggaagccctgttggcccggcgcctgc

SEQ ID NO: 28924 - DNA, 82 bp, Homo sapiens
gtcttcttcaacagcgaggtggacgagaaagtgggggatatgagactttctactcggaatatcctgagtgttgcgtggatgt

SEQ ID NO: 28925 - DNA, 76 bp, Homo sapiens
ctccctagtagctgagattacagatccttcttagaaattcctaaggctcaatgctgtgtggaagattctgagaaag

SEQ ID NO: 28926 - DNA, 75 bp, Homo sapiens
ttgctattcctgcaatgattattggcattcctgtgtatgtgggccgcaaggtgcaagaaagcctttgaggtgaag

SEQ ID NO: 28927 - DNA, 74 bp, Homo sapiens
cgggatcgacgcggacagcgggctggagcctgacgagctggcggggtttcccaaactctcgattgcctcttgca

SEQ ID NO: 28928 - DNA, 50 bp, Homo sapiens
attttggaaagcagtttttaagacaaccttaatacagatattggcagctg

SEQ ID NO: 28929 - DNA, 80 bp, Homo sapiens
gagagaacaatgataaagaagaagaagagaagaaagatgaaacttcgagctcctctggtgaaaggtgtagcagtcactcg

SEQ ID NO: 28930 - DNA, 121 bp, Homo sapiens
gctgaatccaaacaagccactgaggaagttacatttcacttcacttcttaataacataggatcaagacttcaaatcccaaaagaacttcatcattaacatgacttgcagattttgctggca

SEQ ID NO: 28931 - DNA, 74 bp, Homo sapiens
ctgcactttggggagcctaagtcctgggccgcctgggcagaatgtcacgatggacgagggcggcacgcccctgc

SEQ ID NO: 28932 - DNA, 89 bp, Homo sapiens
gagcaaagctacttccattccagaaagatggcatcatttttgccctcaaaagaaatggcagggaccagttactctccacaagaaaattc

SEQ ID NO: 28933 - DNA, 83 bp, Homo sapiens
cttgcttctattaaaagtggtgatgaacttcaggatgagcgatgtgcattttgtaagcactttggagccactatcaaatgctg

SEQ ID NO: 28934 - DNA, 83 bp, Homo sapiens
cagaaagccgcctcttggtttgcgtcctgcactgaaaggaaatgacggattttgtgggtcctacgtgtatgaactcagcgcag

SEQ ID NO: 28935 - DNA, 96 bp, Homo sapiens
tcagtgtggcaaccagatcggtgccaaggtgctggagaatctggtaaaagcaccattgtgaagcagatgaggatcctgcatgttaatgggtttaat

SEQ ID NO: 28936 - DNA, 76 bp, Homo sapiens
tggttttggcccctttgctgcaaagtgttggatatgtcaagtgaccagatagctgccaatctgcaagcagttatta

SEQ ID NO: 28937 - DNA, 100 bp, Homo sapiens
gcgatggggcagccggggcttccctaaggagattgagatgctcaacaatctgaaggtggtcttcacggctctggaagaggatctgaaccagaagaagcgg

SEQ ID NO: 28938 - DNA, 74 bp, Homo sapiens
cagagccaggcagaaatttatcataaccggtttgatgctgtggtctcccatgagtttgccatcaacttcaaccc

SEQ ID NO: 28939 - DNA, 89 bp, Homo sapiens
ggaaatgtctgccgccgccggctctcgggagcgcaacactgcaggagctgttctatgaagaccgccatttccacgagggctgcttccgc

SEQ ID NO: 28940 - DNA, 98 bp, Homo sapiens
cggcccctcccctcgcctcctctcctaggtgccggccgggagggcggccgcagcaggtatgatctcgtgaaatcttgagagaaactgaatgacgaatg

SEQ ID NO: 28941 - DNA, 83 bp, Homo sapiens
cagaaattgagcaagcagcaagtcggctttcagatcagtttgttcatatcaacaacttaaaactcatctgcagagcacatcaa

SEQ ID NO: 28942 - DNA, 89 bp, Homo sapiens
tttaataaacctggggaaaaattatgagaaagctgtaaacggtccttatgtcgtcagaagatcgagaagctcaggaggatgaattgctg

SEQ ID NO: 28943 - DNA, 100 bp, Homo sapiens
gacccggagcacccgacccctgatgaaaatgcctcgtgtaaaagcagctcaagctggaagacagagctctgcaaagagacatcttgcagaacaatttgca

SEQ ID NO: 28944 - DNA, 75 bp, Homo sapiens
agcagacgatggggagcttgcagcccctttgccactcagcaacacagtcactcctggcggcaaaccaaacaaaac

SEQ ID NO: 28945 - DNA, 112 bp, Homo sapiens
ctcgagtgctcagcgagaggagggtggaaatggcggagaagaaatgggtgaccgttggtgacacatccctacgaatctacaaatgggtccctgtgacggagcccaaggttga

SEQ ID NO: 28946 - DNA, 100 bp, Homo sapiens
gccactgtagaagagccaaggaagagaaacttcagcaggcgatagcaatgcacagccaatttcatgctccactatagcaaacggggattcagcgtccgat

SEQ ID NO: 28947 - DNA, 75 bp, Homo sapiens
aggctgtcaagtatgtggagtgttctgcacttacacagatcatccgggaagcccacgggaccctcaggcgggcag

SEQ ID NO: 28948 - DNA, 73 bp, Homo sapiens
gctttttgcttagcactgaaaattctggataatggtgaatggaaaggagaagatgagtatgccaacgttgatg

SEQ ID NO: 28949 - DNA, 80 bp, Homo sapiens
ccagaaaccttatgttgcacttattcatggaattacaatgggtggggttctaaatgagaagaaacttcaagaggttgata

SEQ ID NO: 28950 - DNA, 48 bp, Homo sapiens
gcagacactgaactttgggcctgaatgttctgtggaagcaaatcattg

SEQ ID NO: 28951 - DNA, 100 bp, Homo sapiens
cctgtgtctctgcctccttccgcatgtggtcccaggcgctgagatgcgtctggagagccagagggcctgcctgaaggaatcacctgagcctgtccgtcca

SEQ ID NO: 28952 - DNA, 76 bp, Homo sapiens
accgcctacaggagtatgatgcaagagtgtgaacatggctacgcctcttcattcccgtccatgccgagcccccgac

SEQ ID NO: 28953 - DNA, 100 bp, Homo sapiens
aagacagccaagaaaacaggaagagggttggaggcaaagttccgaatagggatgaggcatacgtgacccaacatgagtgaagtttcctgcaagaaacggg

SEQ ID NO: 28954 - DNA, 75 bp, Homo sapiens
ctggattcctccatgactcaaggcacagactctccagatcccagatgcagtgactggttactacctgaaccgtgc

SEQ ID NO: 28955 - DNA, 74 bp, Homo sapiens
tgcctttgccgccaccatgcccaaaacgagtcgacttcaatgttcctatgaagaacaaccagataacaaacaac

SEQ ID NO: 28956 - DNA, 95 bp, Homo sapiens
cagctccccacactgcaccatgagctcagttggctgcaggagcagctagcacagtgtgaagcctcagtttaggtcatctggtggttcagaacact

SEQ ID NO: 28957 - DNA, 83 bp, Homo sapiens
tggaaggagaactaaatgggagaagaggaatgttccctgacaatttcgttaagacaatgcagatcttcgtgaagactctgact

SEQ ID NO: 28958 - DNA, 50 bp, Homo sapiens
gtgggcaccttgcgcttcttgcagtcggaggaaagctctccgcagtccga

SEQ ID NO: 28959 - DNA, 98 bp, Homo sapiens
tctcaacccccagccagggtcaccatcaaaatggaatgtaaccctagccaggtgaatggctcaagtactaaggctcgtacgtctgcatcgattatctt

SEQ ID NO: 28960 - DNA, 82 bp, Homo sapiens
aacagcagcaaattgaagactttcgacaaggaagtgaaacaccaatgcagagaatgtaaagctgtacagttatggcgacccc

SEQ ID NO: 28961 - DNA, 89 bp, Homo sapiens
tttgtggggaatacttccctcgggtgaaactgaagttaatttttttttttttccaaacacaaggtggctgctacaccccatgtaaaaag

SEQ ID NO: 28962 - DNA, 75 bp, Homo sapiens
cgcgccggaggaaagatggaagactaccaggctgcggaggagacgccttcctgagtcctggatctttcttccttc

SEQ ID NO: 28963 - DNA, 75 bp, Homo sapiens
cgaggccgctttggcgccaaatcctgaggtactccaaagattcaggtttactcacgtcatccagcagagaatgga

SEQ ID NO: 28964 - DNA, 96 bp, Homo sapiens
cctcagggctcccagacctcaagctcctccagctgcatcttcctcccgtgaggctggccgagctccacgctgatctgaagatacaggagagggacg

SEQ ID NO: 28965 - DNA, 101 bp, Homo sapiens
gctgatttcatgcaagaagtaggctatggcttttgtgcaaggtggagcggctgatcaaggagttctccatctacatgacaaaagatggccgcatctctgtg

SEQ ID NO: 28966 - DNA, 75 bp, Homo sapiens
gtgcatctggctgttagaagaattcatgctcatccgggttctaaatgagaagaaacttcaagaggttgatagttt

SEQ ID NO: 28967 - DNA, 75 bp, Homo sapiens
ctgaccctgtaacccaaaggaggaaacagctggctaagctcatcattgttactgatatgttgatgatgtgatcag

SEQ ID NO: 28968 - DNA, 101 bp, Homo sapiens
gaaaaggcggatggagaatattattgatcagtgtttgcaaaagccagcaaaactaatctggattcactccctctggttgatacccactcaaaaaggacact

SEQ ID NO: 28969 - DNA, 75 bp, Homo sapiens
ccggtcccggcgcccggcgagggcgcgcggctggtgtccgccccgcccgaaaggatgtctccccgttcaatgttg

SEQ ID NO: 28970 - DNA, 95 bp, Homo sapiens
ggcccctgttttagctgaaatatggtgtttggagaagagggattgaccctgaatcttgaagacgttcagcctcatgacttaggaaaagttggaga

SEQ ID NO: 28971 - DNA, 75 bp, Homo sapiens
tccacttagaccatcagcagcactaggttataaagaggcgttcaatgtcatcaatggcggttctcatgctggcaa

SEQ ID NO: 28972 - DNA, 100 bp, Homo sapiens
ggcttaccgagagtttgaaagtgcgattgtggaagctgctcggagttaatgttctcctcagaggtggaagaatatcctgataaagagaaagaaatcaaag

SEQ ID NO: 28973 - DNA, 50 bp, Homo sapiens
ctgaccgctctggcccagggtgaggcagaggaggtggacacggtggacgt

SEQ ID NO: 28974 - DNA, 82 bp, Homo sapiens
tggtcttggtagcggaggcacccgaatgctgcccgggtgaggtggatcttgaacgcaccttcacgtttcgaaattcaaagca

SEQ ID NO: 28975 - DNA, 50 bp, Homo sapiens
gctacgcctagacctgctggaaaggtgtgaacccacatccctgcccccag

SEQ ID NO: 28976 - DNA, 138 bp, Homo sapiens
cccaagtaagggaataaaccgcgaagaaggagcgccccgggccaccgcgcaaccaagtgttgcctggtgaggtgctggagaatctggtaaaagcaccattgtgaagcagatgaggatcctgcatgttaatgggtttaa

SEQ ID NO: 28977 - DNA, 74 bp, Homo sapiens
ggctgcggtgtctgctgctattctccgagcttcgcaatgagctggctttatgtgctggggcagaagagatccga

SEQ ID NO: 28978 - DNA, 100 bp, Homo sapiens
tcttctggggccagctggaggccgtcgaggtgaagtggagcgtgcgaatgaccctgcacagttggcgggcagctcccaggtctccatgagtacggcgccg

SEQ ID NO: 28979 - DNA, 50 bp, Homo sapiens
atcatagtcaactgcgtggaagagaaggaaatgagtggcttatactctcc

SEQ ID NO: 28980 - DNA, 85 bp, Homo sapiens
aatgtacaccctcgagagcggcctgattgggaagaaactcttagcgcaatgctgctgtgacttactcgaagcctcgattggccac

SEQ ID NO: 28981 - DNA, 90 bp, Homo sapiens
ccaagggtctcccttctcggtgaacgttcagctgctgcaggaccacggggaaattgccaagagcagtagatcatctaatgcaaaattgcc

SEQ ID NO: 28982 - DNA, 75 bp, Homo sapiens
caggtatccagcaatgaggacctgactggtattgctcgagttccacttgctggagctgccgggggcccagggatc

SEQ ID NO: 28983 - DNA, 100 bp, Homo sapiens
tagaaccacagactgaggacgacctcttcccttgtacttgccataggaaaaagaattacctgaagacatcaggagaatacaaacttgcaggtgtttttct

SEQ ID NO: 28984 - DNA, 101 bp, Homo sapiens
cttgtttaatgactttggtgccctcaacatctctcagagacgaaagctcaccagaacaagctagaagaaatgatcaatgagctagcagtggcgatgacagc

SEQ ID NO: 28985 - DNA, 90 bp, Homo sapiens
cttgtagacctcgctggatcagaaagacagaagaaaaccaaggctgaaggggatcgtctaaaagagggtcctgcaaccctggttccagtc

SEQ ID NO: 28986 - DNA, 90 bp, Homo sapiens
tcttcagaaaatccattggcattctcaacatttttaagatgaggagcgggaaggcctcctgcaccctggagaccgtgtgggaagacaagc

SEQ ID NO: 28987 - DNA, 88 bp, Homo sapiens
tcgcccggccgggagccgccgcgggcaggacgcgcgctgcaggccgactcgcgggccgctgcacccaccgccaaggacaaaaggagcc

SEQ ID NO: 28988 - DNA, 98 bp, Homo sapiens
gcagcttgaggcaattacatatgcagcccaggtggcgtgtgacgagcatggctcccggggtttcggctttgtccattttgagacccatgaggccgcac

SEQ ID NO: 28989 - DNA, 74 bp, Homo sapiens
atcgacgtcgtgatccagaagtccagagctgaggactgcctgtttgcagaaattccgggtagatatgcctggct

SEQ ID NO: 28990 - DNA, 87 bp, Homo sapiens
agaactcccatcagtttctgtatagtgtaaaagcctctgaagagccaatccattcaggatgggaaaccacgcaggcaaacgagaatt

SEQ ID NO: 28991 - DNA, 74 bp, Homo sapiens
aatttttggaacaatttgatgagctaggaggtcctatggcagcgtatacaaagctattcataaagagaccggcc

SEQ ID NO: 28992 - DNA, 98 bp, Homo sapiens
acaactggaaactgttttggatgatcttgaccccgagatggagggagcgaggaaccaccggatcgaagacagtcaagtgtagactctcgccaaagccg

SEQ ID NO: 28993 - DNA, 80 bp, Homo sapiens
gccaggcttgccgcttcatgaagtgtttaaaagtgggcatgctgaaagaaggatgggaaggccattgtgactatgtggtg

SEQ ID NO: 28994 - DNA, 75 bp, Homo sapiens
aaaccctcttggtaaataccgaatggacctggtgctccagctaaaggctcatgctgaagattcggttatggacca

SEQ ID NO: 28995 - DNA, 75 bp, Homo sapiens
gaaggaggtcgacgaggacacgacagtcacaatcccctcggccgtgtcttgggcgtctttggtactggctttttt

SEQ ID NO: 28996 - DNA, 150 bp, Homo sapiens
gccccggagagctgaatttcccctatctgtttcaactgctggaagatgaaggctacaaaggcttcgtgggctatcccaaagagaagattgatattgggctgcctccacccaaagtctcccggacccaacagctactggaacggaaacagg

SEQ ID NO: 28997 - DNA, 75 bp, Homo sapiens
gtgaggagccagacgacaagcacacactatggcgctgaaacggattaataaggactcctcctattttgaggactt

SEQ ID NO: 28998 - DNA, 100 bp, Homo sapiens
tctctgggctttgttgaggcggcagtatgaccgggtttctttgatgcgacctcaggaaggagatgagatcaggatcctcatgaccagccaaagagaagaa

SEQ ID NO: 28999 - DNA, 87 bp, Homo sapiens
gagtacggtctcacagacaacgttgagacttctgcgctgacccaggggctggagcgaatcccagaccagctcggctacctggtactg

SEQ ID NO: 29000 - DNA, 97 bp, Homo sapiens
ccaaaaactcaggcttcgccacctgcgtgcaaacctgacatttaccccggtaactgctgggcatttaaaggctcccaggggtacctggtggtgaggc

SEQ ID NO: 29001 - DNA, 75 bp, Homo sapiens
gcggccttcgttcctcccagaaagtctggctcttgctgattgaattcctttggtgcagtttagcatgttcctctg

SEQ ID NO: 29002 - DNA, 97 bp, Homo sapiens
aaatgccccaaggatgaagaacggagacgtgtggcaaagcgctccctggcctttcaaagcaagaggactgctgtggaactgtgggtacctcctgggg

SEQ ID NO: 29003 - DNA, 75 bp, Homo sapiens
gcgacagcggcgagcagaactacggcgagcgggttagagccacagctgaaacaactacaaacaaaatatgatgaa

SEQ ID NO: 29004 - DNA, 75 bp, Homo sapiens
cgaagctctgtttttgcactgagggcctttaatgtggaactggctcaggctgaaacactttgtgctactctgtgg

SEQ ID NO: 29005 - DNA, 82 bp, Homo sapiens
tggtggcgttcgggccgcacccgcgcgatgtgaagttcatttccaatccgccctccatggtggcagcggggagcgtggtggc

SEQ ID NO: 29006 - DNA, 82 bp, Homo sapiens
gagggagaaaggcgggcccgggaacaggaatatgcactttctggttggaatttgaataacatgcctgtcctggaacagtctg

SEQ ID NO: 29007 - DNA, 83 bp, Homo sapiens
ggacatcctggaagctgggaaaggtttctacagcagtataatcactacaaatccaatgtggagattttcaaattgcaaccaaa

SEQ ID NO: 29008 - DNA, 75 bp, Homo sapiens
tttggcatactacgtgcaggagcaagacttaattcagtgcacaaatgagatgaatgtgaacatcccacagttggc

SEQ ID NO: 29009 - DNA, 100 bp, Homo sapiens
cgccgctgcagccctagtgactgcggcctgcatcccgatacctgaaactgaccacctgagtacgttttcccattgctgagctgtttccctgatatctggc

SEQ ID NO: 29010 - DNA, 80 bp, Homo sapiens
tcttcctgccacccattacttcagcaggtggaccagttacagcacttctggggcccagtagccaactggggtcttcccat

SEQ ID NO: 29011 - DNA, 100 bp, Homo sapiens
ctcaaagcgggaaatgcgtcaaaggagtgggaatagctttgcgaaaaatgggcgcaatggccaagccagattgtatcatcacttgtgatggtaaaaacct

SEQ ID NO: 29012 - DNA, 75 bp, Homo sapiens
gagaacttgatcagtttgtgtcagccaccttgttctctaaagattttggggtaagtgcgttcctagcaacagggg

SEQ ID NO: 29013 - DNA, 100 bp, Homo sapiens
catccaggagagaatgctgacagtcctgcagattttgtggaagtataatactttgtcattatgagatgtcgtctctcggtgcctcctttgtgcaaattaa

SEQ ID NO: 29014 - DNA, 75 bp, Homo sapiens
tgcatgatgccatcatgatcgtcaggagggccatcaaggttgcccccaagtttcctggcagtgtgtgatactgag

SEQ ID NO: 29015 - DNA, 101 bp, Homo sapiens
tatttattgaagaaatgaaaggtgacaaaaggcagaaggagggagaccccaaaaagagtcaagccagcgcctttagaaataaaacctttgccagaatggga

SEQ ID NO: 29016 - DNA, 75 bp, Homo sapiens
tgctggctgaggttggccgtgtcctgcaggtggacagccgccacccccagggacagtggcgacaggacagcatgc

SEQ ID NO: 29017 - DNA, 75 bp, Homo sapiens
cccaaccgccgccagcaccatggccagcaccatttccggtgtgaacttcaacccggagcactgcagccccaatgg

SEQ ID NO: 29018 - DNA, 75 bp, Homo sapiens
tttgacccctttgacctcttcgatgtgcgagactttggaaagggtgacatccagcagctgctctttgtctcggac

SEQ ID NO: 29019 - DNA, 83 bp, Homo sapiens
ggagagcccacaggtgctaaagagagcagtaccctgatggagtcccttgcaggagtgagctgagtcgacagaaacttcatacc

SEQ ID NO: 29020 - DNA, 100 bp, Homo sapiens
gtgtttccgtcagtacgcgaaggatatcggtttcattaagggtatgttagagcccaccaaggaaccactgaaaccactttctgctgcagaaaaaatagct

SEQ ID NO: 29021 - DNA, 100 bp, Homo sapiens
cgcggcgtcttcaagccgtgggaggagcggaccgaccgctccaagccttttccccacgactctgaaagaggacagcgttcccaatgtcccagtttaagcg

SEQ ID NO: 29022 - DNA, 83 bp, Homo sapiens
atggctccctgcagtaccctttaacgccgctgctttgatgggagcacccctgtccatgcagcagcattttcgggcaatcagtg

SEQ ID NO: 29023 - DNA, 98 bp, Homo sapiens
tctgacatcgcgacgctgctcaaaacctcgctccggaaaggggacacctgggttatcaatgccgggaagagcacacacaatgaagaccaagccagctg

SEQ ID NO: 29024 - DNA, 75 bp, Homo sapiens
agctgaataacccttttaacgagtattccaaatttgatggcaagattgtctactatgaagcagggattattctat

SEQ ID NO: 29025 - DNA, 74 bp, Homo sapiens
ggcgtggcctgaggcttggataagtgggaacaccttccaccatgaccacctcagcaagttcccacttaaataaa

SEQ ID NO: 29026 - DNA, 100 bp, Homo sapiens
ccaggaccccctagaagcctagaaatgagggaatctggaaaaattgcaatcaaaacatcatttctctaagaaaattttgggtaaccgaagttctggacaa

SEQ ID NO: 29027 - DNA, 83 bp, Homo sapiens
gctccgtggccttagctgtgctcgcgctactctctctttctggcctggaggctatccagcctggcccgagataacttcttccg

SEQ ID NO: 29028 - DNA, 82 bp, Homo sapiens
tccttttcgtttccggaaacatggtttgtttgtaaaaacaatggtgtgttgtttgaaaaccagctgcttcaaattggactta

SEQ ID NO: 29029 - DNA, 51 bp, Homo sapiens
ctgaaaaggcaaaactgactttaagaactcaagacatggctgcccagtgtg

SEQ ID NO: 29030 - DNA, 51 bp, Homo sapiens
acggaggcaactcggcgacagcaggctacacttcgaggcagagaatgggcc

SEQ ID NO: 29031 - DNA, 75 bp, Homo sapiens
acatagacatttacgcggatgtcggcgaagagttcaaccagatttaaggaacagtgacaccccaccccagtcccg

SEQ ID NO: 29032 - DNA, 96 bp, Homo sapiens
gtggatggaagcatggtgcctcctgaatggtatcacagatgtcgtaagaatctgaatcctccaaaagacagatgatgcggaggttcctgggggaat

SEQ ID NO: 29033 - DNA, 100 bp, Homo sapiens
tgacgcttgatgagaaggacccacggcgtctgttcgaagaaatggtggagtcaatgaagaaagtagcagggatggatgtggagctgacagttgaagaaag

SEQ ID NO: 29034 - DNA, 107 bp, Homo sapiens
ttctcacatggcggcagatgtcagctggcatagtctgggccttgaacaaggattccttaggaccatgggagctattactcttgtctctgctgctcctgggaaagtga

SEQ ID NO: 29035 - DNA, 75 bp, Homo sapiens
cttcaaaacatggtgaaaacatgcaactctgaagaatcaggggttgtctgcattcaaaagagcattctattaaag

SEQ ID NO: 29036 - DNA, 98 bp, Homo sapiens
cttcctggagttcacgactctgagtgctgcttctgatcaagaatctgaagaatgagatcaccaaaaaggtacaggtgcccaactgtgatgagatcttc

SEQ ID NO: 29037 - DNA, 74 bp, Homo sapiens
atgtctgtgatgaggaaatggatttggccattgaagcttcagagcaagaggtggaaacatacagaagaagcaag

SEQ ID NO: 29038 - DNA, 74 bp, Homo sapiens
tttattcaccatcaacaaagaagaccacacactgggaaacatcattaaatcgagccctctggcacaaatggaag

SEQ ID NO: 29039 - DNA, 75 bp, Homo sapiens
ttcgaggtggagaagatcctggacatgaagaccgagggggcctggcagctgcgattcagccacctcgtggggtat

SEQ ID NO: 29040 - DNA, 98 bp, Homo sapiens
ggacactccaccgcatgtagcagctgggctgaaggctaagtgctatttatggaggtacctatatgctgaataaacccattgaagaaatcattgtacag

SEQ ID NO: 29041 - DNA, 75 bp, Homo sapiens
ggcggcgcaaccagccttctagggcggcggagttttggtaagcagtttggaggaaaaagaggatgtgattgtctt

SEQ ID NO: 29042 - DNA, 100 bp, Homo sapiens
gtgaatcagcagcattactttgctgtgaatgtgaagaatcagaaatctttactgattccaatgttgctaggatacttggagtctctgaagagatgaggag

SEQ ID NO: 29043 - DNA, 75 bp, Homo sapiens
cacagattgtctcttttttggagcaatcatctctgccactgacccaggtgccgtgagcgatgtggagatgcagga

SEQ ID NO: 29044 - DNA, 83 bp, Homo sapiens
tcatgcggcacatcttgggggagctctttttggaatgaatgaattcagatatttccagagaatgaccacaacctcttcagtag

SEQ ID NO: 29045 - DNA, 90 bp, Homo sapiens
cctgggtgaactttcacggacaacctcagaggacaacgaagtgttcgatccttgatgaatggtttggccggaccatcatccgctcctgca

SEQ ID NO: 29046 - DNA, 50 bp, Homo sapiens
accaaaattatcgccaagattcagcaagctgctgatactttggctgtgag

SEQ ID NO: 29047 - DNA, 75 bp, Homo sapiens
ttcgtttccagcctcaggaatttatggtcgcctttttgaatgagattgctagtcatagtggctatgtgcagattg

SEQ ID NO: 29048 - DNA, 96 bp, Homo sapiens
tcagtttcctggggttcttgctgctgttggtcaccttccccatttctggctggtttgccctgaagctgataccccaatgtccttctttgactttgt

SEQ ID NO: 29049 - DNA, 75 bp, Homo sapiens
cacgtacctacagtggatgtcctacatctcctatgtcagggctgtgggacagatgatgtctaccatgttctaccc

SEQ ID NO: 29050 - DNA, 113 bp, Homo sapiens
ggagccacttcttcagagcaacttgcccgcactggtgtcacagatcagaaattctccagaatttcagaaacttctgggcatcgctatggaactttttctgctgtgcagtgatg

SEQ ID NO: 29051 - DNA, 100 bp, Homo sapiens
ttgattacccgttaagtcccccaaagatgagatttacctgtgagatgtttcatcccaacaacatgtgcattgccattgcgatttctcttctcatgatcct

SEQ ID NO: 29052 - DNA, 82 bp, Homo sapiens
ggggcagagccgggggagcccagcccagccagcctccaggctgaaggggatgctaagggagataaagcaaaggtgaaggacg

SEQ ID NO: 29053 - DNA, 90 bp, Homo sapiens
atcgagaccactttggccgtacattctataatcaggcaattatgtcttctaaaaatattgcacaggaatcctatgaggatggttgtgagg

SEQ ID NO: 29054 - DNA, 100 bp, Homo sapiens
acaggacctgtctgacgatagtccaaaaactgaagaagatggtggataagcccacccagactctgatgccagtatggactggagatgatgggagccagtt

SEQ ID NO: 29055 - DNA, 98 bp, Homo sapiens
tggagtctgcgaaggccgggacccggttccccggcccacagtgggggtgtgcaaacccgagagaactgggggggctttctctgtggtccgacgctgtg

SEQ ID NO: 29056 - DNA, 100 bp, Homo sapiens
tggagcaatagctctaactggagtagacgaagcctatacgctagaagaatttcaacatcttctaccaaaaatgaaaggttttgatgtggccaagacaggt

SEQ ID NO: 29057 - DNA, 124 bp, Homo sapiens
caaagttgtgttggatcattttgaaaaacagtattccaaagaactcggagatgcctggaatacagtaagaagaaagccctcagaatccattctgtggaaggtgacctcaggagaaaatcagctg

SEQ ID NO: 29058 - DNA, 100 bp, Homo sapiens
tggtgatgctgaaacagatgatgaaattagtattgaagcatcagatggtgaaggagaaggagacacagaagtgatgcagcaggagacagttccagttcct

SEQ ID NO: 29059 - DNA, 98 bp, Homo sapiens
agacaaggacctcttccccctgctggaggccaggtcagagcagcccaccatgggatggggagggggtggaggctgcaccccgcgcccacccatccacc

SEQ ID NO: 29060 - DNA, 100 bp, Homo sapiens
agtatgcacaagtggttctttggttctctcattctgggcttttaccagaaggcataggtggcccacaaactctttaacaacttgaaataaatgtgtggac

SEQ ID NO: 29061 - DNA, 80 bp, Homo sapiens
caagactccacctcctggtgaagaaagcaaacagcctgcacagctgaccacagttgggaaacgttgctgtctttggattc

SEQ ID NO: 29062 - DNA, 101 bp, Homo sapiens
catcaggaccccagatgtctgacagccctgtgtgacaccaagataagtaacatttctctatgaatcatcatcaagaactctgggagaacttttgaattcat

SEQ ID NO: 29063 - DNA, 100 bp, Homo sapiens
ggcagggccagtccggccccgggcagcggacaccctgaaggtcccggtgctcacttggacatggtctcctctgagcctccggcctccataagacccaaaa

SEQ ID NO: 29064 - DNA, 75 bp, Homo sapiens
aagctgaaaatttacttctggatgccaatctgaatatcaaaatagcaggtgggatgtgtgtgggctgaaattccg

SEQ ID NO: 29065 - DNA, 101 bp, Homo sapiens
ccggagcgcgagcagagcggagacccccaggtcctgcgggcgcggctcttgtcaggatggtgaagctgttcatcggaaacctgccccgggaggctacagag

SEQ ID NO: 29066 - DNA, 87 bp, Homo sapiens
agcgcttcaaaggaccggacccagagaagaggaaaactctaccggtgcaggtctctaattaacagaagatggcaaagcccagccaca

SEQ ID NO: 29067 - DNA, 75 bp, Homo sapiens
gcagatatcatcagagcatctatgagaaagaagaggccccagatagcagaagtatcgatatcaagatgaggacgc

SEQ ID NO: 29068 - DNA, 75 bp, Homo sapiens
gtcggccccggcccgactctatcacaagaagcaacaagccctccaagggttgtaacatttgatgaagtgatggct

SEQ ID NO: 29069 - DNA, 82 bp, Homo sapiens
ttggaggttctggggcgcagaaccgctactgctgcttcggtctctccttgggggtgctctgtgctcacgcttcagtctgtga

SEQ ID NO: 29070 - DNA, 84 bp, Homo sapiens
gaaagtcagcatgtttgtcctgggaaccggagatgagcctcctaatcctgtgaagcagctccagctatgtgtgaagaagaggac

SEQ ID NO: 29071 - DNA, 52 bp, Homo sapiens
gagagcagcctgccggggcggaggtgcgtgagcatctgctccctggccttca

SEQ ID NO: 29072 - DNA, 77 bp, Homo sapiens
catggagggacaggatccggaggcgccagctcaaccgtaagaatgattgatgttggctgatattggagtgctcattc

SEQ ID NO: 29073 - DNA, 82 bp, Homo sapiens
cgccgctgctaaatatatccgtaggaatggagagggaccggatctcaggaatcccagtcagaagttccagcctgccactgtt

SEQ ID NO: 29074 - DNA, 115 bp, Homo sapiens
tttcctacagatgatgagtcggtggcagagatcaatggaaccatgaacgataccatacttgcagagctccttcagatacataaagaacacattgtaggataccatgaacatgatt

SEQ ID NO: 29075 - DNA, 75 bp, Homo sapiens
ccgagatgccgggggagcggggccttccacaccccctccgtgggtgtgtgatctggtggctggacccagagctga

SEQ ID NO: 29076 - DNA, 75 bp, Homo sapiens
cctgagatcagagtcacgcccttgggaactgtggctgcaccatctgtcttcatcttcccgccatctgatgagcag

SEQ ID NO: 29077 - DNA, 82 bp, Homo sapiens
cccagtcccacttcaaacattcgtctcggaaaccccgcctcttacagtcacgagagatgtgaactttgtccccataaggatg

SEQ ID NO: 29078 - DNA, 74 bp, Homo sapiens
aaaagagcaaaatccaccacctgcaagtccggcttcccatctacacttttcaataaagcatccacatacactgt

SEQ ID NO: 29079 - DNA, 98 bp, Homo sapiens
cgccaccgtgcacatccgaatggaaaagaggcacagttagatgaagaaggacagtttcttgtcagaataatatatgatgactccaaaacttatgattt

SEQ ID NO: 29080 - DNA, 90 bp, Homo sapiens
tccctgctccgcagcgacatcaccaagctggaggtggacgccatcgtcaacgccggttcatcatgcctagtggcgtataagaagaccccg

SEQ ID NO: 29081 - DNA, 96 bp, Homo sapiens
tttcggatcctggacctagaggattttgaaaagatgttttcagcctaccagaggcaccaggccaccctgcagttctgtgtggtgaagccactcatg

SEQ ID NO: 29082 - DNA, 51 bp, Homo sapiens
gtcttttcccttagaggcaccagagagaactcgatgccaccgcaacggtat

SEQ ID NO: 29083 - DNA, 75 bp, Homo sapiens
cttgggcctcgcgccggctatggccgtgccctggggctgagccctcaggtctcctccgggctggggctgagcaag

SEQ ID NO: 29084 - DNA, 74 bp, Homo sapiens
tgggctggtgagcaggttatgaagcggagggtgctgctcaaccaaacaactcattaatgctgcaaactagcaag

SEQ ID NO: 29085 - DNA, 75 bp, Homo sapiens
gagttgctgctgcagacacatcagattccctactggtaacagctggagtgcgaaatggaatctatttggaatttg

SEQ ID NO: 29086 - DNA, 142 bp, Homo sapiens
tttcttctatgaaaagatccagaaaagaggcaaagcaagcgagaagtcgcgggcccagcccacagcaggtttgggatatgagattgaaaatgacgactcggaattttcctgagagagaagtaccctgtgatgtagaagtgga

SEQ ID NO: 29087 - DNA, 50 bp, Homo sapiens
gcagtgatggggagagccatagcggcaccaccaggaccagctgatcattc

SEQ ID NO: 29088 - DNA, 98 bp, Homo sapiens
gccctttttgctagctggttttggaacagtttcagctggcatggtactggatatagtacaggagtgtgaggaagaggctgtctgtgtcattatgtgtg

SEQ ID NO: 29089 - DNA, 99 bp, Homo sapiens
agtggagagtgacatgcagttggatggcggtgactgcgtgttacatccttgctaagccccactccggctacagctcttgctgtcagatacgcatccaag

SEQ ID NO: 29090 - DNA, 51 bp, Homo sapiens
cacaccttattacatgtctcctatctgaagaagacacttgaatcatgggtg

SEQ ID NO: 29091 - DNA, 98 bp, Homo sapiens
ctataaaggatcgaatggccaagtaccaggcagctgtgtccaaacaaagcagctcaaccaactatacagtatcgaaggatgatcgcagtgatgtggag

SEQ ID NO: 29092 - DNA, 100 bp, Homo sapiens
tatgcttcagactctcaacgatgaggttccaaaataccgtgaccagattcctagcccagaacagtgcaaccctgaaactcgtcctgttgagaaaaaaata

SEQ ID NO: 29093 - DNA, 51 bp, Homo sapiens
tggaagggtggagtttcactttgaagctgccacacatgcctcatataagtg

SEQ ID NO: 29094 - DNA, 76 bp, Homo sapiens
cagccacgcatctgaccttgttggaatgggtaccacagaccatgtcatcgtcctggcgtccacgaaccgagctgac

SEQ ID NO: 29095 - DNA, 82 bp, Homo sapiens
caagagggtgttcgactgctagagccgagcgaagcaaaccgaagaagacatcttttgatcaggattcagatgtggacatctt

SEQ ID NO: 29096 - DNA, 98 bp, Homo sapiens
agaaactcatcccagagttcattaagaagggtcctgatgaagaagctgttgtggatcttggcaaaactagctcaactgtgaacaccaagtttgaaaaa

SEQ ID NO: 29097 - DNA, 75 bp, Homo sapiens
gaagtttctggtcactccccaggattatgcgcggtatttattacagtatcaggagccaataccttgtgagcagtt

SEQ ID NO: 29098 - DNA, 116 bp, Homo sapiens
gggccattggtgggggcggtggaccagggcaccagttcgacgcgctttttgatggactagaggcttttaccagatttcttaaaactgaattcagtgaagaaaatattgaattttgg

SEQ ID NO: 29099 - DNA, 100 bp, Homo sapiens
gaaccgagcgggcggcgggcgcgcgcaccatgggggagaaacccgggaccagtcaggatggctaaaggtgaccccaagaaaccaaagggcaagatgtccg

SEQ ID NO: 29100 - DNA, 95 bp, Homo sapiens
tgcaagaactggctcaagaaatttgcctcgaaaaccaaaatcaaaggcatgggaggttgatacctgccggggccattacaacaatgtatcttgtg

SEQ ID NO: 29101 - DNA, 75 bp, Homo sapiens
gccgcaaccaggaatgacttctaatcgaaagctgctttgcgtcgcagttggagcagcacccccaccgcaggtggc

SEQ ID NO: 29102 - DNA, 98 bp, Homo sapiens
acagccatgccccttccgattgggagggacaagcccagcagaccgggttatcccagtccgaggtccagcgaaggattttatcccagcccacagcacat

SEQ ID NO: 29103 - DNA, 101 bp, Homo sapiens
gcgccaaagcctactacaagtcctcgcacctaaagtcgcacctgcggacgcacacaggtgctggagaatctggtaaaagcaccattgtgaagcagatgagg

SEQ ID NO: 29104 - DNA, 125 bp, Homo sapiens
caagatggccgccgctgaggaaggctgtagtgtcggggccgaagcggacagggaattggaggagcttctggaaatggtctggagccgaaccggcaatatctctgaggtgtgactgttctctcagc

SEQ ID NO: 29105 - DNA, 100 bp, Homo sapiens
gctgagcctcagtatgtggacaagttcggcttccacacggtgacgtgctgcggcttcatcccgcagattttcagctgaactctcatctctcaacactggc

SEQ ID NO: 29106 - DNA, 82 bp, Homo sapiens
cctgagagtggcactgaggacaacgtctgcaggtttggtgcacctcgatttggaggaagtagggcagggcccttatctggaa

SEQ ID NO: 29107 - DNA, 76 bp, Homo sapiens
actgcctttctatttattttacctcagtataacattagcgtgcctacagcagaggatgaggacagtgaaggcccag

SEQ ID NO: 29108 - DNA, 71 bp, Homo sapiens
aaccagctgtgggagaaggcccagcgagagttccatctggaatatgacaaattagaagaacggcctcacct

SEQ ID NO: 29109 - DNA, 75 bp, Homo sapiens
agcacagtctgcagcatcttctttatgtctaccttgactgttacaagttgattgcactgccaacactaacacctg

SEQ ID NO: 29110 - DNA, 88 bp, Homo sapiens
ccatcaccccccagcagagcgccgagctggatatggatcagaaactttcgaagttggtagaagagctcacaacttcaggagaaccccg

SEQ ID NO: 29111 - DNA, 75 bp, Homo sapiens
ctgggagggagccgcgcgcctttgtgcgcgcgccgagctgtcacgaccggaggggggactcgcagccttaccagg

SEQ ID NO: 29112 - DNA, 82 bp, Homo sapiens
ctgcaaccctgaaaaagatgcagaagaggatcacctagcccgggtagaagaggcaatcacccgtatgcttgtgtgtgccctg

SEQ ID NO: 29113 - DNA, 50 bp, Homo sapiens
aaaggaagtaccaggacttgcacagagcaaactattcatggaaggattta

SEQ ID NO: 29114 - DNA, 75 bp, Homo sapiens
catgttgctggccaatccactgaagcggtgaaggagacctgtgcttggttcactgacaactacgagcaggcccgg

SEQ ID NO: 29115 - DNA, 87 bp, Homo sapiens
gcctcagcctttggagtggttacagctgggctcagtggcctgttcccccgtggactgccccatcacctgtacctaccctttccaccc

SEQ ID NO: 29116 - DNA, 100 bp, Homo sapiens
cagagtggcccctcacctgggcctttcctgtgccaacctgatgccccttccccaagaagggaaagcaggcaggatgggagagtcgccgatagaaccacct

SEQ ID NO: 29117 - DNA, 74 bp, Homo sapiens
tcgagcggtttcttttggctcacaattatcctagagtgaggacttatgtggaagatgtcaagtttgtgatcaac

SEQ ID NO: 29118 - DNA, 113 bp, Homo sapiens
ccgcgcgcagggcctgcagcgggagctggacggcgagcgcgagcggcgcgagaaagtcaaaatgcagatcttcgtgaaaacccttaccggcaagaccatcacccttgaggtgg

SEQ ID NO: 29119 - DNA, 112 bp, Homo sapiens
gtacataatggttgcattaaagcattaaaggatagttcttcaggaacagaacgaacagctattgacctgaaaagtggttctggaaaagtgtaccaaggccctgcaaaaggtg

SEQ ID NO: 29120 - DNA, 50 bp, Homo sapiens
catcattaaggacggaggcacgtgatgtcttggcattgcccattttcaag

SEQ ID NO: 29121 - DNA, 75 bp, Homo sapiens
gacagtattggccaagcgtataccatgcaatgccttgcattgtgtccagatctggcaccctgacttatgaagcag

SEQ ID NO: 29122 - DNA, 100 bp, Homo sapiens
ggtgaatggagatgcagctcagcagaggagttgaagccaaacagccaaattctgccattaggaagtgtgtaagggtccagctgatcaagaatggcaagaa

SEQ ID NO: 29123 - DNA, 89 bp, Homo sapiens
tggggaaacagcaagcggcgtggacgaccgttgctgagctggtgtggaacgtctgtgatcagctaagaagaaatttcctgacttgtttg

SEQ ID NO: 29124 - DNA, 82 bp, Homo sapiens
atgatgcggtggtgggggacctgccggcacgcgactccccccgggcccaaaagactctgacctgtttttgttggacacccgt

SEQ ID NO: 29125 - DNA, 74 bp, Homo sapiens
cctgtacctgttttatacttgcttttgcttcagcgttctgtggttgtcaacagaccccatatcatgtgaacctc

SEQ ID NO: 29126 - DNA, 50 bp, Homo sapiens
gttcagaccgcgctccgccgaggccggatcacctcaacagtcacgtcaga

SEQ ID NO: 29127 - DNA, 75 bp, Homo sapiens
ccgagtcccaggtcaagagcctctgcgagaagaagatggctgtgccacccacgtatgccgatcttggcaaatctg

SEQ ID NO: 29128 - DNA, 98 bp, Homo sapiens
ggtgggtgttccagctggaagtaaccccttccgggagcctagatcctgtgctttactctgaagactcgaaatgcttccagactgcacacttttactta

SEQ ID NO: 29129 - DNA, 82 bp, Homo sapiens
ccctggtccttcgcccccaagactgcgactctaaacggactcatgtactttgtcaggtgagacctggaaccccttcaaatta

SEQ ID NO: 29130 - DNA, 100 bp, Homo sapiens
tcttcagatcttcacagcacagttcctgggaaggtggagccaccagcctctccttgaaaaagcttgtggtgaaggggggcaaaaaaaagaagcaagttct

SEQ ID NO: 29131 - DNA, 100 bp, Homo sapiens
gtccaagcggcaccggttggacctaggggaggattacccctctggcaagaagcgtgcggggaccgatgggaatttcttcacatggctcctggagaagtga

SEQ ID NO: 29132 - DNA, 82 bp, Homo sapiens
ccacctccagcccctgcgcctcggcatcacgaaagagccaagttttatttcaaaaagaagagtcccttaccatgacccacag

SEQ ID NO: 29133 - DNA, 75 bp, Homo sapiens
gggggatttggaaatgtcatccgatggcacaatcagaaatatggctacacacacctttctgcaggagagctgctt

SEQ ID NO: 29134 - DNA, 96 bp, Homo sapiens
cagaatcgcatgaatgttcacaatctcgccactgtatttgggccaaattgctttcagagtggctatgaatctgcatgtaaagactttgtccctcat

SEQ ID NO: 29135 - DNA, 90 bp, Homo sapiens
acccgcctccgggcatcttcaactatgtgctctgtcctagcgttcgtgtagaaggagatcgctttaagcacaccaatggaggaaccaagg

SEQ ID NO: 29136 - DNA, 100 bp, Homo sapiens
tcgaagggctctcctgatactaacagttttacgatttaaaacttcgccagaatttaatcactgagcttcagctcaaacttgagagtgcccttactgaact

SEQ ID NO: 29137 - DNA, 50 bp, Homo sapiens
gcccgatgagccagagaagcttgatggtcctggtgctgcccaggaaccca

SEQ ID NO: 29138 - DNA, 82 bp, Homo sapiens
ccaccacctcagcctcctgagtagctggaaccatcatatgcaccagcacgcctggctaaaccccccagtgctctgggctcta

SEQ ID NO: 29139 - DNA, 75 bp, Homo sapiens
tgggggtgtgcaaacccgagagaactggcctctggttgaacggtttgagacattctgcctggacccttcccttgt

SEQ ID NO: 29140 - DNA, 100 bp, Homo sapiens
tcaagatgaggctgtgggacctgcagcagctgagaaaggagctcggggactcccccaaagacaagcctcatctagttgaatctgaagatgtggacctgct

SEQ ID NO: 29141 - DNA, 75 bp, Homo sapiens
agctgaagacatcaagaagatcttcgagttcaaagagaccctcggaaccttagaccatgctcagcctccaagcag

SEQ ID NO: 29142 - DNA, 90 bp, Homo sapiens
attcggggtggcccattcccaggcaggctgctaccgcccctccgcttccagacattctcagctgtcagattacgaagcggacactcaaag

SEQ ID NO: 29143 - DNA, 100 bp, Homo sapiens
gaaaaaccacagcatcattctttctgcaccaaacccggaaggaatttgagttcctgagatctagttggtgagagacatgatgttctaccggttgctgtcg

SEQ ID NO: 29144 - DNA, 100 bp, Homo sapiens
gactagccactttgcattgactggaaacaatggcatttacagaaagagtcaacagcagtggcaacagggcaggagcgatttggcaacatgacccgagtat

SEQ ID NO: 29145 - DNA, 83 bp, Homo sapiens
ccaggccacagatgagaagaaggagcccaaggctgccccctcggtcactctgttcccgccctcctctgaggagcttcaagcca

SEQ ID NO: 29146 - DNA, 101 bp, Homo sapiens
aggactgaacccgcaggagcgtcacgggcgccggggcggctgccgacggcgggactgggggtcaggcccagccccaggcccagtggtattactgaattcac

SEQ ID NO: 29147 - DNA, 113 bp, Homo sapiens
gagaaattaaggaaagaattttctccttttggatcaattaccagtgctaagtttggtcagatgaagactgggtggagaagtttgctgggaagaggataaagaggaaggtggtt

SEQ ID NO: 29148 - DNA, 73 bp, Homo sapiens
cctgaagtgcttgatatcacagaggaaactctgcattctcgcttcctggaggctatgtccaaactgggtcttc

SEQ ID NO: 29149 - DNA, 49 bp, Homo sapiens
gccacccattgtgtcttctcaagaagatgccttcaattaagttgcagag

SEQ ID NO: 29150 - DNA, 75 bp, Homo sapiens
caggctctaaacaaaattctggcatttccggagagttcttttgaagtcacttcagaaggatctacatgaggaaat

SEQ ID NO: 29151 - DNA, 74 bp, Homo sapiens
gtggtttctcgagatggaatctactgtctcacaccattttgctggtacagcctaccaagaggccagaaggcaga

SEQ ID NO: 29152 - DNA, 90 bp, Homo sapiens
ccgggtccgtgggcgagtcttcatctaagggaccaagattatctcctccactactactaatgctaatgtcattctgcagattgataatgc

SEQ ID NO: 29153 - DNA, 100 bp, Homo sapiens
tcgacgttggctgtggggaaacagcaagcggcgtggacgaccgttgctgagctggtgtggaacgtctgtgatcagggtcagtatagaccttctgatttgc

SEQ ID NO: 29154 - DNA, 100 bp, Homo sapiens
ggctgaaagaaacaaggggccagggcagagggcacctgagcggctggagagcctgttggagaaacacaaagaggagctgaagaagaagctgttcaaacgc

SEQ ID NO: 29155 - DNA, 74 bp, Homo sapiens
ttcaagaaaacacacagactccaactgtacaagaggagagtgaagaggaagagctgcagaggatgttgccaagc

SEQ ID NO: 29156 - DNA, 100 bp, Homo sapiens
gttagtgggagatccttgttgccgtcccttcgcctccttcaccgccgcagaccccttcaagttctagtcatggaggaagaggaagaggaggaattagtgg

SEQ ID NO: 29157 - DNA, 100 bp, Homo sapiens
gaaggcctctctcctgatacagcaggcgctcaccatgttccctggaggtgtctttcctgaagactatcttcccgtctcaaaatggacatgatggatccac

SEQ ID NO: 29158 - DNA, 101 bp, Homo sapiens
cgttgcttgcttgcctgtgcgcgcgtgcgcggacatggcctcaaacgcaattctgtggtgttcttggtcacacatttatggagtttctgaagggcagtgga

SEQ ID NO: 29159 - DNA, 89 bp, Homo sapiens
gcccaggagcaggggagacatggcaaccacgagacagacaacatgaaccagatctacggtttcgagggtgaggtgaaggccaagtacac

SEQ ID NO: 29160 - DNA, 50 bp, Homo sapiens
ccaggacccgcctggctgcgagatatgtcttgggcgtctttggtactggc

SEQ ID NO: 29161 - DNA, 100 bp, Homo sapiens
cgcggaaaacgtcttgcacgtgcgaggggcatttcaggagtttcctgtctgtcaggactcacaccacccggcaagaactgctcactacggctccctgccc

SEQ ID NO: 29162 - DNA, 75 bp, Homo sapiens
atgcctggcaccgccagcctcatcgaggacattgacaatgaccacaagcccatctggatgcatgcagaggagcgg

SEQ ID NO: 29163 - DNA, 100 bp, Homo sapiens
aagtggcagattggtgagcaggaatttgaagccctcatgcggatgctcgataatctgactatttggagttttcctcgtcttactggatgtcactctcgtc

SEQ ID NO: 29164 - DNA, 137 bp, Homo sapiens
ggctgggattccacctgtgcccaccctggcagcatcccacctcctgagtcctctcggcacccagcaaggtcaaaatgcagatcttcgtgaaaacccttaccggcaagaccatcacccttgaggtggagcccagtgac

SEQ ID NO: 29165 - DNA, 75 bp, Homo sapiens
ccctacttcaaggataagggcgacagcaacagctctgccggctggaagaccatcatcaaagaggggatgctgacc

SEQ ID NO: 29166 - DNA, 100 bp, Homo sapiens
ggaggcccctttgaccagatgaacggagtggccggagttcttggccaggctgactgagagatttgtgctgggagtggatatgttcgtggagacactgtgg

SEQ ID NO: 29167 - DNA, 98 bp, Homo sapiens
atcacattggagtcacaatcaaagaactggatctttatctggcttactttgtccacactccggggatgatcatggtgattttactgctgcttgtggct

SEQ ID NO: 29168 - DNA, 90 bp, Homo sapiens
cgccgccgcccgcggcgtccccggtttggtgttgcggcgcccaccttcgggaggatcagatctctactaagaatgtcactctggccgggc

SEQ ID NO: 29169 - DNA, 98 bp, Homo sapiens
gaactgggttctggactttgggcgtcccattgccatggggaactgtgtcaatctgacagaagcactgtcgctctatgaagaacagctggggcgcctgt

SEQ ID NO: 29170 - DNA, 74 bp, Homo sapiens
ggagcctcagttggaagcagccgatccagcctgcggagcctgtggggcaggaatcaagtactggaaatgtttga

SEQ ID NO: 29171 - DNA, 96 bp, Homo sapiens
actttaaaaataaggcagataagcccttgagcatccatcctcaaggaattaggtacagtaaattatcagaaggctgcgtcatcaccatctcgggac

SEQ ID NO: 29172 - DNA, 75 bp, Homo sapiens
ctctgggtcctcggtcggtacagtctctgcacctcgcgccccagcagtgtaaacaggaacatcgataagtagtgt

SEQ ID NO: 29173 - DNA, 100 bp, Homo sapiens
cagctttcactatggggtggagacgtggtactcagcaagctcgagttaaagttggatgtgctggaacaggcctgatcttttggccagaaggagattaaaa

SEQ ID NO: 29174 - DNA, 100 bp, Homo sapiens
gatggggcagcgcgagatgtggaggctcatgtcgagtctgcgctcctcagaccaccggcaggtgaacagcctgatgcagaccgaggagtgcccacctatg

SEQ ID NO: 29175 - DNA, 76 bp, Homo sapiens
ttatgctggcacaggctcaagaagtattttttttaaaagccacaagagatgtgaactatgaagactttactttcac

SEQ ID NO: 29176 - DNA, 74 bp, Homo sapiens
tgttacatacatttcagaaacagactgctctctctgtataagaaaatttctgtcctataaaactcagtgtccaa

SEQ ID NO: 29177 - DNA, 100 bp, Homo sapiens
gatgttcgccccccggctgctggatttccagaagacgaaatacgcgaggttggcgggacgaagactggcgtggtgcggtacgtgggggagacagactttg

SEQ ID NO: 29178 - DNA, 100 bp, Homo sapiens
tgaaaatgctgttgtatgcagtgaaagagttgctgaactacaaagaaagcccacttcgcctaagtttccagaagactttgacgatggagagcatgcaaag

SEQ ID NO: 29179 - DNA, 76 bp, Homo sapiens
cacgccatcgttgctgccttcttcgtcaagcctcccaagaatgagtccttggagacttacccagtgatgaagtata

SEQ ID NO: 29180 - DNA, 89 bp, Homo sapiens
ggaagctctttcacttcggaggattgctcaacaaccatgctgggcatctggaccctcctacctctggtcagtttgctgagaacgaaacc

SEQ ID NO: 29181 - DNA, 96 bp, Homo sapiens
ctcgattgtaaaacaagcatcattgggaatgtgtcacctcctctacattgcacggtgtcagaacgtagacccaaatgatttgtacattgtagaacc

SEQ ID NO: 29182 - DNA, 82 bp, Homo sapiens
gaggcagcctagtttgcatatgagtgctgctgcagcttcccgagacatcaccttgctccctgtgctgtcaggaatctacagg

SEQ ID NO: 29183 - DNA, 82 bp, Homo sapiens
gcccgggaggaaggaacgaggcaaggagctaaagcagcgtgcgttcagccctggggacatggatttgattgacatactttgg

SEQ ID NO: 29184 - DNA, 50 bp, Homo sapiens
aggaagacttaacactgcaacaacagtcctgtgcctcctgattgctgagt

SEQ ID NO: 29185 - DNA, 75 bp, Homo sapiens
caagtaatggtgcaaagcctgaagatggtgtgaactggttagcatttcttaataagtataaacttcatggaattc

SEQ ID NO: 29186 - DNA, 117 bp, Homo sapiens
gcccagggcagcggagcacgcgggctgctcatcgtcagcagggagaggctggtcacccttgtggttggagcgtcccaggacatcatcccccagctgaagaagaagtatgatgtggac

SEQ ID NO: 29187 - DNA, 98 bp, Homo sapiens
tatatggatacggagtacaaaaacggcccttggatgatggagtataagtctgtgtttaggtcctactcccaggatttcgtgcctcaccaccaagcttc

SEQ ID NO: 29188 - DNA, 110 bp, Homo sapiens
tctagctttgtaggagcatggcttggagcacttcctattccactggattgggaaagaccatggcaggtctaacttcaaacttgtggctgttaattcaaaactctatgcca

SEQ ID NO: 29189 - DNA, 100 bp, Homo sapiens
cgggccgctgcgtgttgtccacccaagatggagttcctcctggggaacccgttcagcacaccagtggggcagtgcctcgtggtttccagtgacagtgaca

SEQ ID NO: 29190 - DNA, 90 bp, Homo sapiens
cttcaagaacaagggccgcgatgtggaagtattatcgggggacccacggggtcattgtggtttacgacgtcaccagtgccgagtcctttg

SEQ ID NO: 29191 - DNA, 88 bp, Homo sapiens
tctccatcgcgcgcacggcagcctagcgcaatgaggcgggcagcactgcggatgcccaggctgaggaagagatcaagcaagagatgaa

SEQ ID NO: 29192 - DNA, 75 bp, Homo sapiens
tggcgccccgcccccactgctgtttctcaataagcaaaaagttgttctaccatctccagagggaacgctgcttcc

SEQ ID NO: 29193 - DNA, 76 bp, Homo sapiens
acatctatttggcgatcaacatcaccaacggcgaggcagaggcagaggtgaatgtggtttctaccaaagaagtttt

SEQ ID NO: 29194 - DNA, 83 bp, Homo sapiens
cttggatactggaatgattgataacctcttccatttataggcttgagaactcctgtgtgaattaaatcacgaccttctgatga

SEQ ID NO: 29195 - DNA, 82 bp, Homo sapiens
cccacggactacatcaggaacggggtgctctacgtcacggagaagaaatctggcattttttaaagtttgcgccccacaaaga

SEQ ID NO: 29196 - DNA, 98 bp, Homo sapiens
ctgtttttgtcatttgcaccagcttctttctccaggaaagatcaaaacgatgcactgcaagctacattcagaccaagataaaggagatggatcactca

SEQ ID NO: 29197 - DNA, 98 bp, Homo sapiens
ggacagcctcttcgtggaggaggtggccgcctccttggtcagggagttcctcagcagaaagcctcctctattggcccaggaagcccacccagccccgc

SEQ ID NO: 29198 - DNA, 98 bp, Homo sapiens
aaatggacctccgtgaaggcgtccgtcctgcgcatcgcaatcttcagtttagatcttggaggcatatcaactgtggttctaaatggctatgatgtagt

SEQ ID NO: 29199 - DNA, 75 bp, Homo sapiens
gcttcggcacaagggcccaactggaattccacttacggttagagatgtttatgattacttccgagctgtcctgca

SEQ ID NO: 29200 - DNA, 49 bp, Homo sapiens
gaacagggtggccgcttggtccagctagaacgagtaaatctgtctgcag

SEQ ID NO: 29201 - DNA, 114 bp, Homo sapiens
cttgctcctcacaagatttatcttttgttcagccaccatgaggatgcacaagatttttcggatcatcatggcaaaaccagctggtgggcccaagcctccaagtgggaagaaaga

SEQ ID NO: 29202 - DNA, 100 bp, Homo sapiens
tcctgtgcaagatggagagggagaagagcattgagatcgagaacctgcagaccagtcatccgtccttggctcaggatttggagagcttgcaccaccaaaa

SEQ ID NO: 29203 - DNA, 82 bp, Homo sapiens
cggcgtatgtggggccgtgtgcagacccgcgtgtggcgcaggttttaaaatcaaagatgggaaaatcggagaaaattgccct

SEQ ID NO: 29204 - DNA, 100 bp, Homo sapiens
cctgctccttctacatctgcagataaagtggagaggctggcagtgatggtgaaagcataggaaactgccccttttcccagaggctcttcatgattctttg

SEQ ID NO: 29205 - DNA, 82 bp, Homo sapiens
agctgcggtggcagctgctgagttctcggtgaaggaatcggaggcaacaagccagctctcatctcctgggtggaggaggagg

SEQ ID NO: 29206 - DNA, 98 bp, Homo sapiens
gcgctgctaggcattgaggagaaggcagcggacaaagaggacttcgtcttctatgctccccggctgcggattaacaagcggatcttggccttgtgcat

SEQ ID NO: 29207 - DNA, 105 bp, Homo sapiens
ggaggacatcgacatccaggcgaactcggcctatcgctaccctccgaagtccgcgggagatacagatgacccaccaagaattactcagaaccctgtgatcaatgg

SEQ ID NO: 29208 - DNA, 75 bp, Homo sapiens
cgcccggcagccttcgacgcgatgttccgccggagcttgaatcgttttaattgctcctgcgttgctaagacaagc

SEQ ID NO: 29209 - DNA, 51 bp, Homo sapiens
agcaggctgagcgatacgacggaatgggtaccacagaccatgtcatcgtcc

SEQ ID NO: 29210 - DNA, 100 bp, Homo sapiens
gcagaaagtgaagctgtttcgggccagcgacccgctgctcagcgtcctcatgtggggggtaaaccactcggcagcacacttctgcttttgttccttcatc

SEQ ID NO: 29211 - DNA, 83 bp, Homo sapiens
ggaaggagcatcccaggacctaccagaatctggttctccttactatgacaatgtccgccccctctcttaccctgattcggatg

SEQ ID NO: 29212 - DNA, 50 bp, Homo sapiens
ggaggaccggtaccggaatcccaaagaacctcagggcaagatgcttggaa

SEQ ID NO: 29213 - DNA, 100 bp, Homo sapiens
cgacaagattgaaagcaaattattagctaagaaagcagaggttaatacaatccctggctttgatggagtagtcaagagcctgcattgattctaatgaaga

SEQ ID NO: 29214 - DNA, 97 bp, Homo sapiens
ccacggcactccaactggcttcgcttcgttcatgaggcaccatctcaggagcagaagaacttggctgccattcaaggcaaatttattcggatcaact

SEQ ID NO: 29215 - DNA, 80 bp, Homo sapiens
gaccgcttcccccgagccagcagcagcctcccgcgacgatgcccctcaacgttagcttcaccaacaggaactatgacctc

SEQ ID NO: 29216 - DNA, 111 bp, Homo sapiens
atgggtgaccttcggaggccagatcaccgatgagccctggtacctgacagtgtaaagaaggagctcctacaaagaataagaacattccttgctcagcatgccagcctttaa

SEQ ID NO: 29217 - DNA, 98 bp, Homo sapiens
tgaccctcaaacagcagtatgatgaactggaggctgagtacgacagcctcaaacaggagctggagcagctcaaagagagcttttgaggagaaacgaaa

SEQ ID NO: 29218 - DNA, 76 bp, Homo sapiens
gtcttccctggcaagattcttctgaattgtgctgccttggccaaaagagtgagcctttgaatacatctttatcaat

SEQ ID NO: 29219 - DNA, 99 bp, Homo sapiens
acccccattcattctggattggtggatctgaagtacaaaatattttccagatgccttcaattaagttgcagagttctgatggagagatatttgaagttg

SEQ ID NO: 29220 - DNA, 98 bp, Homo sapiens
cgggagggctgcctccccgtccagaagcctgtaggaaagcggaagcggcctggcaggggaaggatcgaggtcatcagactagtgctgagtcttggggt

SEQ ID NO: 29221 - DNA, 83 bp, Homo sapiens
agattccagcttcggaacaagagaccctgactgtacaatttgttcaaggaatttttgtagaaaaatacgatcctacgatagaa

SEQ ID NO: 29222 - DNA, 100 bp, Homo sapiens
gaaaggggtagatcctaacttaatcaacaacctggaaacattctttgaattggattatcccaaaatttgaagaacccaagtgattcagcagtgcacagcc

SEQ ID NO: 29223 - DNA, 83 bp, Homo sapiens
tgttgtgactgctttggacgtgggagtcacctgaaagccaggaaatgatcatggaagggaagtggttgctgtgtatgttactg

SEQ ID NO: 29224 - DNA, 82 bp, Homo sapiens
cctctccgtatgcaggagctggtttccctcccacctttgccattcctcaagctgcaggatgatcggctgaatgtaacagagg

SEQ ID NO: 29225 - DNA, 100 bp, Homo sapiens
cttcttcaagagaaatggagcccttctccaaggcagcttggatcttaaaagcaagagcgctaacagaaatggtatacatagatgaaattgatgtagatca

SEQ ID NO: 29226 - DNA, 75 bp, Homo sapiens
ttggctctgcttctgggagcgtcccagagttcccagtcaccgagacttggagccagaatctgagcctcagctgga

SEQ ID NO: 29227 - DNA, 50 bp, Homo sapiens
atccattaaaaatttggaaccaaagtgaaattcgttattctacatggaag

SEQ ID NO: 29228 - DNA, 100 bp, Homo sapiens
aaataagccctttgcacagcagtgccaagacttggttaaagtcattgaggactttccagcaaaggagtgaaaaggctctcagtgtctgagttaaatgaaa

SEQ ID NO: 29229 - DNA, 74 bp, Homo sapiens
gagagctgcgggcacggatggggagtgcatccgccccaacccttttccccctcgtctcctgtgagaattccccg

SEQ ID NO: 29230 - DNA, 74 bp, Homo sapiens
gttacgttgttagaatgtagcagggtgaatcaccaggattttcaactgagaaatttaagaataattgaacctaa

SEQ ID NO: 29231 - DNA, 50 bp, Homo sapiens
aaaaccagttaaaaatgttgcctaacttccatgttgtgacctcaaagggg

SEQ ID NO: 29232 - DNA, 75 bp, Homo sapiens
cgagccttggcggcggacgtgcaggaagtgcacggctgtctataacgtgctgccgggtctcaggatggaggagtg

SEQ ID NO: 29233 - DNA, 82 bp, Homo sapiens
gggcggcagtgagctcggccggcaaccgagggacccgcgtccaggttggtgttcgaggaagagacattgttgttcttggtgt

SEQ ID NO: 29234 - DNA, 90 bp, Homo sapiens
gcgccgcggggcagccgccgctcctccggggtgctggagaatctggtaaaagcaccattgtgaagcagatgaggatcctgcatgttaatg

SEQ ID NO: 29235 - DNA, 95 bp, Homo sapiens
ccagcgctgcgcaggacttctcctggcggcgctgcggatccagggggtcggctgccaggtacagaaaacccatatagacagctgccttgtaactg

SEQ ID NO: 29236 - DNA, 75 bp, Homo sapiens
ggagccaaccagggctgcattggaggtgatgtgtccaatctagatcccaacttctcatttgaaggcaccaaactg

SEQ ID NO: 29237 - DNA, 73 bp, Homo sapiens
gcgccgaggcggccacccgagacgcggcgcgcacgctccggcctgcgacctcctgccccccgaggtctgcagt

SEQ ID NO: 29238 - DNA, 83 bp, Homo sapiens
gcaggaagaagaagggacacctttcacagctatcagggaagtgccccaccttagaacagtatgccatgagagcgtttgccgac

SEQ ID NO: 29239 - DNA, 100 bp, Homo sapiens
cggaggcgatcggtgctgattcggcgcgatttgaggagctgctgctgcaggatgaaaactttcggaagagaaagttgcctgtggtaagttcagttgttaa

SEQ ID NO: 29240 - DNA, 100 bp, Homo sapiens
aagctctgccggacatggtggtgtcccacctttttgggaagctcagccagacgtccaggatcccaccccttgcaaaagaccaggccgtggaagccatgtt

SEQ ID NO: 29241 - DNA, 97 bp, Homo sapiens
ctgctcaaagccctgggtcgcttggaagaagccaaggtgattgcccacagtgagtatcaaaagtccaaaagaatttccatctttctgagcatgcaag

SEQ ID NO: 29242 - DNA, 100 bp, Homo sapiens
tgtgaccgttgccagcctggattccattctctcactgaagcaggatgcagcttcagcgcctgctcctggtcatcactaaccagatttacttggagtacat

SEQ ID NO: 29243 - DNA, 83 bp, Homo sapiens
gcacacgctagatggccgaaacgttttaaaatcaaagatgggaaaatcggagaaaattgcccttccccatggccagcttgttc

SEQ ID NO: 29244 - DNA, 100 bp, Homo sapiens
gtgacgtgatggcggcagcggtgctgacggaccgggcccagctggacccacaaaccgtggagaccaagaactggcacacggacgtgattgagatgaacgg

SEQ ID NO: 29245 - DNA, 101 bp, Homo sapiens
tagtaaaagcgctcagaaagtattaactatcaccgccatccgggttgaaaaagtggacagaggactgcagaaaatcaacctatcctccttcaggaccaacg

SEQ ID NO: 29246 - DNA, 81 bp, Homo sapiens
caacatatgatgtatcttctatcttaacatcaattcagcatcaaagctaagccagaagatttatcacattttcatcatcag

SEQ ID NO: 29247 - DNA, 100 bp, Homo sapiens
cgtgcagctccaagagctgtggcccgggggcctcttctggaccaggaaactctccacgtgtttcaggcctcacctgaagatcatgaaaaatacggtgggg

SEQ ID NO: 29248 - DNA, 98 bp, Homo sapiens
tgggacccaatggcctctggatgaaacgtcaggaatttactacacaggggccaagttccccatcaagtggacagctcctgaagccatcaactttggct

SEQ ID NO: 29249 - DNA, 74 bp, Homo sapiens
ccgccgggaggaggaggaggagccgagaggagctgagcgagcgcggaaggagcatcagatccatgctgctgctg

SEQ ID NO: 29250 - DNA, 83 bp, Homo sapiens
ttggggatgagtatgcggaggacagctctgatgaggaggggttgtgtccactgtggtccccgactctgcccacaagctgttca

SEQ ID NO: 29251 - DNA, 51 bp, Homo sapiens
cgccatgggccgccgccccgcccgttggaaatctgaaatagagtactatgc

SEQ ID NO: 29252 - DNA, 100 bp, Homo sapiens
cgggcaagcgctgttcaaacccatgaaagcaaacgccctggaggagcagctgaaggagcaggagctgagagcctgcgagatggtcctggaagagacccgg

SEQ ID NO: 29253 - DNA, 87 bp, Homo sapiens
gcccgttcttcgcctacatccaagagttccgctaccgcccgccacccctgtactctgaggatttaagcgagagcctcactggttccc

SEQ ID NO: 29254 - DNA, 98 bp, Homo sapiens
agtctgttgtctgaattgtactgtcaagaggtgacatttgctctgaactggatgatacgaatgatgtcagatttggaatctaacatcgtggctgtgga

SEQ ID NO: 29255 - DNA, 83 bp, Homo sapiens
tggatgatggcctggatgaagcgttttcgaggtacatgtcccagagcaagcacacggaggcccgggagctcatgtactcggga

SEQ ID NO: 29256 - DNA, 100 bp, Homo sapiens
aatttctacgcagaagtctccctcaggatcagaccgtagcccttccggaaacctccatggtggtgagccggctgggcctggactccctgtgccccttcag

SEQ ID NO: 29257 - DNA, 95 bp, Homo sapiens
cgccgaccaggcctggctcgcgcctctcccaggacccgcctggctgcgagatatacaatgcagatcttcgtgaagactctgactggtaagaccat

SEQ ID NO: 29258 - DNA, 97 bp, Homo sapiens
gggcagctagcgcgaccctgagccggcgcccgtggtccggccatggacgacctcggcccctggccccaacatggcccgtcgctctcagagctcctcg

SEQ ID NO: 29259 - DNA, 101 bp, Homo sapiens
cgctcccatggcgcacattaccattaaccagtacctgcagcagtgttctaagaacggaagcatctgggctggatggaatttagcatcaagcagagtcccct

SEQ ID NO: 29260 - DNA, 82 bp, Homo sapiens
ggcctccaccctggcaggaatcccaatttgcctccacttagtgagcggaagaatggtagtgtcagtggctgagtatcaccgc

SEQ ID NO: 29261 - DNA, 74 bp, Homo sapiens
ggcgacttgtgcacacatgtagagacctttgtataacagcacatcccattataatgctggaacttggggcattg

SEQ ID NO: 29262 - DNA, 82 bp, Homo sapiens
gggcaggccactgggccagctggtaacatcatggcagactccctgcgacaaggactgtgtactgcatgaatgaggctgagat

SEQ ID NO: 29263 - DNA, 103 bp, Homo sapiens
gtgcggggtgcgccggcagaggatccagtgttcaccatcctggccccggaagatcatgatgctgccgccaccgccgccaccacggagcgagaagcccagatag

SEQ ID NO: 29264 - DNA, 88 bp, Homo sapiens
agagcgatgaggtcggagtgattcccagtaaacgcagattgtccagaacatcgtgggcacagctctgatgattttagtggccattggt

SEQ ID NO: 29265 - DNA, 100 bp, Homo sapiens
tttttcatacagctcccaatgtaccccactatgctagtggatcaagtttgaagaaaaagtggaacagggtggggaaagatggagcaagccccatgtggcc

SEQ ID NO: 29266 - DNA, 75 bp, Homo sapiens
gagccatctccacttaatgactgtctcacattggccggcaacttgttccaggatacatgatcccttaattcaggc

SEQ ID NO: 29267 - DNA, 75 bp, Homo sapiens
gattcgtatctaagactctgggacactcctgaagtcgggaaatggtttgccaagatggtggataagaatatttac

SEQ ID NO: 29268 - DNA, 100 bp, Homo sapiens
ggaacatgtacacctcatccctgtacgggtgcctggcctcgcttctgtcccagcgggatgtagctcattttgggatacgagtctccatcgtggagcctgg

SEQ ID NO: 29269 - DNA, 100 bp, Homo sapiens
aagaaagcatgatgtcctatgagggagacggtggggaggcttcccatggtttggaggatagcaacatcaggcatgaagaccccgtttggaaaggcagctg

SEQ ID NO: 29270 - DNA, 100 bp, Homo sapiens
cccgcgtcctcgtctgcctcggggcgctcctggccggctgggtcgccgtagagaaaggagccgaaaggcgaggccagctcttccaaccctgccacgccca

SEQ ID NO: 29271 - DNA, 50 bp, Homo sapiens
acccaggcctgctcggccctcacagggttaacacagaaatctgcctcctg

SEQ ID NO: 29272 - DNA, 75 bp, Homo sapiens
gaactacaggctttacttttgtggtagaccgtctaagagaagggcaaacttgaagataaatcttttgactccagc

SEQ ID NO: 29273 - DNA, 75 bp, Homo sapiens
tcaagggttctcttgtttatcgagggttttgggctggtggtctcggcagcttcataaacaagcagatatgcaaga

SEQ ID NO: 29274 - DNA, 90 bp, Homo sapiens
aacagctggagcaaggcgacgaaccttggagagaggagaacgaacatcttctggacctttgtccaggtaccaggatcatctatgaccgga

SEQ ID NO: 29275 - DNA, 96 bp, Homo sapiens
ttctcccgcctcagcctcagaagttgctggaattacaggattctcttcagaggacaagagaagatgttacattctctgcatgaggacaattctgca

SEQ ID NO: 29276 - DNA, 80 bp, Homo sapiens
gcaaggagctaaagcagcgtgcgttcagccctgggatataattggtgattacaactttcctctataaattaactcttgac

SEQ ID NO: 29277 - DNA, 98 bp, Homo sapiens
ctagtttgttgcaaaataatgtaaacgtcaatgcacaaaatggatttggaaggactgcgctgcaggtatgccattttgaagactgagacgttggagtt

SEQ ID NO: 29278 - DNA, 50 bp, Homo sapiens
catcaaggacttcaccaagcaggacagtcattttgtttactcattcagcc

SEQ ID NO: 29279 - DNA, 82 bp, Homo sapiens
gcccgagacacaccaggccggcaggctgagaaaagcgagaccgcgtgcgaggaccggtggagattctggacgcaaagacaag

SEQ ID NO: 29280 - DNA, 75 bp, Homo sapiens
atcaccccctacctcctggggcccgacaagaacttcacgcgggagcagatggccaccatgtctgggagatggaag

SEQ ID NO: 29281 - DNA, 89 bp, Homo sapiens
ccacagcacctgggtatgacccagagacagtaactgtgaccgtgggtcctgcggaaccaacgttgatgaagtcttgctctgtcgcccag

SEQ ID NO: 29282 - DNA, 74 bp, Homo sapiens
caagaacgagtgcgccttctcctacgactctccctgggaaagaagcctaaggaataaagtcatctctctagacc

SEQ ID NO: 29283 - DNA, 76 bp, Homo sapiens
cgccgcagcgcgaacatggacgccgtcaacgccttcaaccaggagccccatctgctttgatatgattgaagaagca

SEQ ID NO: 29284 - DNA, 98 bp, Homo sapiens
gagtacaccccgcagcacagccgcgacttcaagggtgcgaagtaccacattactgtcatctccctgtgagtgggattggcaccccggctgcagctcca

SEQ ID NO: 29285 - DNA, 100 bp, Homo sapiens
agtagtcagcaagtccagcgcgggggctatggaggtgatggacgtgttctccactgatgacctcaccggatttttacagagatgaggtctcactgtgttg

SEQ ID NO: 29286 - DNA, 100 bp, Homo sapiens
ccactcggctcctgtcgtccgttctctcaggctcccgttcaggcaatagccctctggaacaagacaattcatgtgagataagaaagaagagcccacaaga

SEQ ID NO: 29287 - DNA, 95 bp, Homo sapiens
gaaggctccggaactgcgcctgcgcttttcgctgagaagcttcagcttattgatgatcagtttgcagatgcttaccctcagcgtatcaagttcga

SEQ ID NO: 29288 - DNA, 98 bp, Homo sapiens
taaaagagcaaaatccaccacctgcaagtttgtcccgctggctggaagcctggcagtgacacgattaagcccaacgtggatgacagcaaggaatattt

SEQ ID NO: 29289 - DNA, 98 bp, Homo sapiens
gtctggagggctgagcagtcaactcaaatgcaagtccaagaggaggaggaggcggaggtccaagcggaaagacctacctggtggttctgtgccttccc

SEQ ID NO: 29290 - DNA, 80 bp, Homo sapiens
tgacccttggcctcatctggacaatcattctgcacttccaggttaacacagaaatctgcctcctgggccatgccgcttct

SEQ ID NO: 29291 - DNA, 90 bp, Homo sapiens
cctgcagtacctgcagaaggtctctggagacatcttcagcagactccaccaaaaaggtcagtgatgtcctaaagctcttcgaggatggcg

SEQ ID NO: 29292 - DNA, 76 bp, Homo sapiens
gccagagccaccagcgcagcgctgccatggagcccagcagcaaggtcatcatcagatttgaaatatttaaagtgga

SEQ ID NO: 29293 - DNA, 83 bp, Homo sapiens
ctgggaggtctggtagggctgagcttgcaagaggatcaacatgcctcgctggccgcgcgccgaacccgagtccggcggcaccg

SEQ ID NO: 29294 - DNA, 50 bp, Homo sapiens
atgtgaaatttgttctcaagcacaagttgctgcatctacctttatccctg

SEQ ID NO: 29295 - DNA, 75 bp, Homo sapiens
attcagaagaatgcaggccttgcttttatcgaacttgtcaatgaaggaaggggtgaccagtcccggaagagagct

SEQ ID NO: 29296 - DNA, 100 bp, Homo sapiens
tccaggccggccaccgctgccgctgccgctgccggctccagggagccccgtgtcaagcaaggaggcaagtgaggcctatctggttggcctttttgaagac

SEQ ID NO: 29297 - DNA, 75 bp, Homo sapiens
cggctgctgagcgtgcagcaggatttcacctccgggttcatatccagctttcagagtggcaccgtgcaatttttc

SEQ ID NO: 29298 - DNA, 94 bp, Homo sapiens
cgtccttctccactttcgccagcccgtgccgcgagcgcggcctgcaggagggaaagcaggcaggatgggagagtcgccgatagaaccacctctt

SEQ ID NO: 29299 - DNA, 75 bp, Homo sapiens
tcatataactcctgagaatagtggttcttaactctaatcatgtcaaccctgccatggacttcacgcagactccac

SEQ ID NO: 29300 - DNA, 74 bp, Homo sapiens
tcttctccaagctcatgtctgtgtgcgtcatgttcaccaactgcatgcaggatttgacgaaacgttcgagtcaa

SEQ ID NO: 29301 - DNA, 75 bp, Homo sapiens
cactgggaaatagaggataatcaggacctgaaggagaagaaggagaaggtggaggagaaggcaagccggaaagag

SEQ ID NO: 29302 - DNA, 92 bp, Homo sapiens
gcgggaggtgttcgagaacgaccccgagacgggtttgccttcccggattgggcctacaagccagagtcgtcccctggctcaaggcagatcca

SEQ ID NO: 29303 - DNA, 80 bp, Homo sapiens
cgaggaggatggcggagtcggggctcctgacgacaatgcagatcttcgtgaagactctgactggtaagaccatcaccctc

SEQ ID NO: 29304 - DNA, 100 bp, Homo sapiens
cgaaatgaagaggaggaagaggccatttacttctctgctgaaaagcaatggaaatctggcattttttaaagtttgcgccccacaaagaggaaatattcca

SEQ ID NO: 29305 - DNA, 100 bp, Homo sapiens
ttgctgccgggattttggaggccggggccgcgctgagggcgcccagctggtgtcatggagaaactccagctgggcccagagattctgcagcgggaaaatc

SEQ ID NO: 29306 - DNA, 98 bp, Homo sapiens
gttgtgttgtgccaatggtggagaagaaaacttcggcccagtgtttcccgggctctttgagttctgctcgcgttacacaggcgcatctctgcaaggag

SEQ ID NO: 29307 - DNA, 75 bp, Homo sapiens
actgactgccccgcatcaccggagcgtcccagctgcgaggaggttttcaaaaccctcggcacagatgtcgtgaag

SEQ ID NO: 29308 - DNA, 75 bp, Homo sapiens
tgattgggacaacattcagacccatttccagtcatgagaacttgtaatagctggcatcgttgagaatgaatggaa

SEQ ID NO: 29309 - DNA, 98 bp, Homo sapiens
cgaattttaagtcatcgttctaggatagggttttggccaaattgggcgagggcacaaaataaccacttaccccttctcaccgaggaagagcgggagaa

SEQ ID NO: 29310 - DNA, 90 bp, Homo sapiens
ctccatcgtgggactcagcagccttggtgctcaggtgccagatgcaaagtactatactggcaattgctggagaagattttgcaattgttg

SEQ ID NO: 29311 - DNA, 75 bp, Homo sapiens
attggaccctcctcccaactgtaggtatactgcaacatccagatggcacagttttgaaacagttacaaccacctc

SEQ ID NO: 29312 - DNA, 82 bp, Homo sapiens
ccgcccgccctaccccccaagcagcggcagctggattttttatcaagcagaaatgcatcgaacaacgagaatcaagatcact

SEQ ID NO: 29313 - DNA, 100 bp, Homo sapiens
ttctctgttggcatctccccatgctcacatcagtgaacaagctgtctgggctctaggaaacattgcagggtttggagaacattgattaaggaagcatttt

SEQ ID NO: 29314 - DNA, 147 bp, Homo sapiens
gttcagcagagaaatggcctaaccacagtgtgctctcatgtccagctcctttctggagaatctagaggtccctggtgatttgggtaaccaactggaagccaagctggacaagccgacagtggtgcactacctctgctccaagaagac

SEQ ID NO: 29315 - DNA, 82 bp, Homo sapiens
acttcaagatgaggaactattttttggacttcaatcagataagccaatggacacgtcagtgttatctgaagaaggaggagag

SEQ ID NO: 29316 - DNA, 83 bp, Homo sapiens
cctcagagaccaccaagtactggcaatgcagcttccgaagaactgaccattgctggcatgacgtttacaacttttgatctggg

SEQ ID NO: 29317 - DNA, 90 bp, Homo sapiens
catgaatggagcaaaatggcggatcatgtgcaggcggctatgagaggttttcctccgagtacccagaattctgttctaaaaccaaggccc

SEQ ID NO: 29318 - DNA, 101 bp, Homo sapiens
gttgggtccggccgctctgcgggactctgaggaaaagctcgcaccagactgtgccctgtccacggtgcctcctgcatgtcctgctgccctgagctgtcccg

SEQ ID NO: 29319 - DNA, 75 bp, Homo sapiens
ctcggcccctggctcctgctcctggagagactagcttgcaaaattttcctcatattgaggtggttcggaaaaaag

SEQ ID NO: 29320 - DNA, 83 bp, Homo sapiens
atttacgcgcacgttggaaccgaagagagctctgttgttgcaatgctgaaattttcttctaaggagaaatatcccttatttac

SEQ ID NO: 29321 - DNA, 100 bp, Homo sapiens
atttcaacatgcctctgacaatctctagtgagattacctggggcaattgatgttatcggtcagactataactatcagccgagtagaaggcaggcgacggg

SEQ ID NO: 29322 - DNA, 82 bp, Homo sapiens
cgtctctctgctgcggcgcggggaccgctgtgctctcggttaaacccatccagagtaatggctgcggccttacccaggaccc

SEQ ID NO: 29323 - DNA, 100 bp, Homo sapiens
gctctgtgcaatcctcacattcaagctgataggctgcgctaccggaatgtcatccagcgagtgattagaacaatgctaaagtagctgtgctaggggcctc

SEQ ID NO: 29324 - DNA, 75 bp, Homo sapiens
tgacacttacaagatggacagggatgataattgggcctccaagattggagctgatcacaacccaggccacaaagg

SEQ ID NO: 29325 - DNA, 100 bp, Homo sapiens
agcaatggatgcacaggaagctttagctagaaggtcttagtggtgcaatggctagtataagcgtgcgttcgagtaccccaggctctcctacacatgtaag

SEQ ID NO: 29326 - DNA, 105 bp, Homo sapiens
ccccgctaccggactacatgtcggaggagaagctgcaggagaaagctttctggtaaacttacagtaccgccgtctctaccgaagcatgaactcccagtatctgaa

SEQ ID NO: 29327 - DNA, 88 bp, Homo sapiens
gattcgcagtggtcgcttcttctccttgcttagtgatgctgaccttgccggaccactgcagaaggagacccagaaattacaagagatg

SEQ ID NO: 29328 - DNA, 99 bp, Homo sapiens
cgatgtcagtgccaagtaccgaggtgccttctgtgaggcaaagattaagactgtgaaaaggctggtgaaagttaagggttattggggctgtgccatcgg

SEQ ID NO: 29329 - DNA, 100 bp, Homo sapiens
cagtggtgctttcccgaatctcagaatgccgagtttccagatgtcttggaatgcactgtatctcatgcagtagaaaagataaatcctgatgaaagagaag

SEQ ID NO: 29330 - DNA, 82 bp, Homo sapiens
ggcctgttcataaaagatatcgaggatttagccggaagtgctagtgatgccataaaaggagaaggcttgcaagaaggtgtag

SEQ ID NO: 29331 - DNA, 83 bp, Homo sapiens
ggcataaggaactctatcccaggaatacagctttgcattaggttttgaacgaagaatgtgatcagaactggtacaaggcagag

SEQ ID NO: 29332 - DNA, 100 bp, Homo sapiens
cctgtatatgatgtaatttggaggcatctctgacgtatgctgaagctcagttgagaattgattcagcaaacatgaatgatgatattaccactagtctccg

SEQ ID NO: 29333 - DNA, 100 bp, Homo sapiens
cgatccatgcccatccgaaaggatgatgaagttcagctaatagatgatgtattggacttcacctcgtgttctgaccagatgggcaaaccaacatcagctg

SEQ ID NO: 29334 - DNA, 50 bp, Homo sapiens
tgaatgatgtcaaaatgtgtgtggagctacacccccacggtgtttgagcg

SEQ ID NO: 29335 - DNA, 100 bp, Homo sapiens
tggaccagctcatgggcacggctcgggacggacagttaatgattggacgtcatccaatgagaaagcagtgatgtctttactgcacacgttggaggagctg

SEQ ID NO: 29336 - DNA, 75 bp, Homo sapiens
gggagcgaaggctgaggtggcagcggcaggagagtccggccgcgacaggacgaaaaatggctacaaacttcctag

SEQ ID NO: 29337 - DNA, 100 bp, Homo sapiens
tggcacgtcgaaggggggctttatatggctgtatttgacttggcaattcctgctgaacaaataatttttcatggcggagacaggatcttgccatgttgcc

SEQ ID NO: 29338 - DNA, 75 bp, Homo sapiens
cggccactccggtcccgacacctagcctgcgctggacggcagtctggaaacgaccaatgagatcttggactctgc

SEQ ID NO: 29339 - DNA, 100 bp, Homo sapiens
caggatccctcagatctgtggagcagatccgatggagaggctgagctgctccaggacttggggtgcatcatttctggcatggcttcaggaagcattgtgc

SEQ ID NO: 29340 - DNA, 83 bp, Homo sapiens
gaaaattctcaacttcaggaaagccagaaacagggttatgtaccgaaggactctaccgtgtcagcgggaataaaactgaccaa

SEQ ID NO: 29341 - DNA, 82 bp, Homo sapiens
gtgctgacaccactcagggcaagggtgtccgacggctggagcgcaattctgtggtgttcttggtcacacatttatggagttt

SEQ ID NO: 29342 - DNA, 90 bp, Homo sapiens
agtagccaccactgtgtgccagggtctggaacagaatctgacagtgatgaatcagtaccagagcttgaagaacaggattccacccaggca

SEQ ID NO: 29343 - DNA, 100 bp, Homo sapiens
tgggtgaaaaatatatccgcagggttcggatgagaccagctttgcagttctcctggagttcgctgaggagcagctgcgagccgaccatgtcttcatttgc

SEQ ID NO: 29344 - DNA, 83 bp, Homo sapiens
cgggagacccagaagcacaagaaggaccttcacccattgtttgatgagacctttgaattgtctggccgtgggcctgggcttcg

SEQ ID NO: 29345 - DNA, 75 bp, Homo sapiens
tgactctcgaattgtcaagatgtggaataagaactccggaggatggacagctcttatgtgggcatgttacaaagg

SEQ ID NO: 29346 - DNA, 100 bp, Homo sapiens
ttaggcagtgcagtggattactactttattcaagatgacggaagcagatttaagtgcctgaagacgtacactggccacaagaatgagaaatactgcatat

SEQ ID NO: 29347 - DNA, 89 bp, Homo sapiens
tcctttcgtgctggcgccgcgacctccggatgacccgggcttcggcccccaccagagactcgtctctcatcacttttgtgaacaagcac

SEQ ID NO: 29348 - DNA, 75 bp, Homo sapiens
tcatgaggagccgagacctccaactcgaggttttcctttggaatatggataaatacaccatgatacggaaactag

SEQ ID NO: 29349 - DNA, 75 bp, Homo sapiens
acagctctttgcatccggagagtggacaagaaaatacgtgcttttcaacatgccttcagcactaatgactgctcc

SEQ ID NO: 29350 - DNA, 80 bp, Homo sapiens
ccggaccgcgcctcaggctcccccagtgggctgagggccatgtcagttttctgccacctacaggatagaccatgaagctg

SEQ ID NO: 29351 - DNA, 92 bp, Homo sapiens
cacagccgcacgcactgccgtgttctccctgcggctcggccgtttgagcaaggaagacattgaacgtatggtccaggaagctgagaagtaca

SEQ ID NO: 29352 - DNA, 75 bp, Homo sapiens
gctgtgggctgtgttccacaagttcaaaggtgctggagaatctggtaaaagcaccattgtgaagcagatgaggat

SEQ ID NO: 29353 - DNA, 100 bp, Homo sapiens
atttcgagaactttctaagatggatccagagggaagcaaattgttggatgatgaactagacaaagaactcccagtgcttaagccatattttatcactaac

SEQ ID NO: 29354 - DNA, 90 bp, Homo sapiens
ccggtactccaggtccgacccgcgaacccctctgggatccccgccgctctgtctacaacccgagttcccagtgacctgacagcagaggag

SEQ ID NO: 29355 - DNA, 97 bp, Homo sapiens
ggccccttcgacctgcgctccgcgctctggcgctacggtctggccgtcggctgcggcgccatcgtacctggagtagaacagaaaaattattatgtct

SEQ ID NO: 29356 - DNA, 100 bp, Homo sapiens
ctccaggccgcccgggacttcctctttcctcacctgcgggaggagatcctcagcggcgccttgcggagggaccccagttggattatctcaagatgcccag

SEQ ID NO: 29357 - DNA, 86 bp, Homo sapiens
gtcacactgccccggcggggaggacgagaatcggtgtgccccaggaccaaattaccatcacagggtacgaaaagaacacagaagct

SEQ ID NO: 29358 - DNA, 100 bp, Homo sapiens
tttgtacgatgcctaccagcctcagtactctttgccgtacccaccggagcctggcgcagcctccctctattaccagatgtggacgagtgctcactagcag

SEQ ID NO: 29359 - DNA, 75 bp, Homo sapiens
gatgtaaagcaatatttcgagcagtttggcaaggaagacagagatgtcaatgaccccatgcccaaccgaggcggc

SEQ ID NO: 29360 - DNA, 100 bp, Homo sapiens
atggtcagcgtgaacgcgcccctcggggctccagtggagagttcttacggaaattcgaaatgagtcccatgactatcctcatagagtggccaagtttcca

SEQ ID NO: 29361 - DNA, 83 bp, Homo sapiens
gcgaagaaaaggatcccagaaagtttcaggaagaggatcacctagcccgggtagaagaggcaatcacccgtatgcttgtgtgt

SEQ ID NO: 29362 - DNA, 100 bp, Homo sapiens
cctgcctcctgttccgcttctcagaggacgccttcaacaccaccttcatctccaccatcgtactatactggcaattgctggagaagattttgcaattgtt

SEQ ID NO: 29363 - DNA, 90 bp, Homo sapiens
gctgagtgtggacctggtggaagttgaggctgcctggtctaaatagctaactaactggtagaccagagtattacatcatcttattttggt

SEQ ID NO: 29364 - DNA, 90 bp, Homo sapiens
gaattctcactctctaagagaaagacaatgcctgtggaagacaagtcagaccccccagaggggtctgaggaagccgcagagccccggatg

SEQ ID NO: 29365 - DNA, 90 bp, Homo sapiens
cctgggaggccggccggtgccagcacctttcggcttctgagacggcggcagcagcggcattcagaaccaatgaggccattcttctggcac

SEQ ID NO: 29366 - DNA, 83 bp, Homo sapiens
tctactgttttgaagcgttcgatcttttaacatcacatcacatgctgacagcacaagaaggtgcaggagaacccggggaggag

SEQ ID NO: 29367 - DNA, 100 bp, Homo sapiens
ccgagctcatcagtgatgaggcccaggccgacctggcgctgcggagaaaggacccaggagcgataacagtaaatcaaataagatatttgtcggtggaatt

SEQ ID NO: 29368 - DNA, 90 bp, Homo sapiens
caagaaattagacaagaaacattggaaaagaaatcctgataagaactgctttgatcttatgaatccttcagtggtctcccttacacccac

SEQ ID NO: 29369 - DNA, 50 bp, Homo sapiens
ggcctagcttatgccacacttgccaaggaaagatgaatgggagggctgat

SEQ ID NO: 29370 - DNA, 98 bp, Homo sapiens
gtttgtggcagccctgcatggagcaagtctgtcagcaccatctttctaacaaaatttctgaataaattggcagaagaacgcagacagaagaaggaaac

SEQ ID NO: 29371 - DNA, 100 bp, Homo sapiens
ttgaattcagccagtggtcacagctggatgtttgcgacatcccagagagcttccagatgctctacggaaacgtattcgagaggacagaaaggccaccaca

SEQ ID NO: 29372 - DNA, 124 bp, Homo sapiens
cccagcgccaccatccacgccagccgcaccatgccgctcctaagcctgcacagccgcggcggcagcagcagtgagagcaaattgtggctactaatttgccccctgaagatcaagatggctctgg

SEQ ID NO: 29373 - DNA, 90 bp, Homo sapiens
tgtggcgtcttgaagaaggcattccccacccgccaaatggcgtccatgcccccgacgcccgaggcccagaggcccccagaatgagaagtg

SEQ ID NO: 29374 - DNA, 50 bp, Homo sapiens
ccggcacagtgacggcttcagagggacttctccagacaggttatgttacc

SEQ ID NO: 29375 - DNA, 87 bp, Homo sapiens
agaattggaactaaaacttgataaggaagatgagaatgtgcctactgctcctgatcctccaagtcaacatttacgtgggcatgggac

SEQ ID NO: 29376 - DNA, 74 bp, Homo sapiens
aagattggcccagacaacctgccttatgtccagatcttgaaggtccaagagtttggagtttgtgaagttcgtga

SEQ ID NO: 29377 - DNA, 82 bp, Homo sapiens
aggattccaagtaactcttatttggaggcatgtgagcgcagcctggcagagatggagtcctcgcaccagcaggtgatggagg

SEQ ID NO: 29378 - DNA, 98 bp, Homo sapiens
gggagctgctgtgtcccccgcctcctcctccccatttccgcgctcccgggaccatgtccgcgctggcgggatttccctggggaaagtcttcactcaga

SEQ ID NO: 29379 - DNA, 97 bp, Homo sapiens
gcacatgtgggtagaggacgtgttagacaagttcatgagtgaggagctggtttcacctgaggacctgctggagtggctgcggcctttctgtgctgat

SEQ ID NO: 29380 - DNA, 75 bp, Homo sapiens
caacctgaacgtcaccgaggagaagtaccaggaggcgttggccaagggctcgtgaagaagaaatgactgcaaaag

SEQ ID NO: 29381 - DNA, 84 bp, Homo sapiens
gagatcggcggagaccctcgaagtgcgcaaacttgacactcaccctgaccgacaatgcagatcttcgtgaagactctgactggt

SEQ ID NO: 29382 - DNA, 98 bp, Homo sapiens
cccatctcctccgacttcgctgtcaaaatccgtgagctgatccctcgggctggtggaagggccggcttcacggccaggagggccttttcccaggaaac

SEQ ID NO: 29383 - DNA, 49 bp, Homo sapiens
ggcagcggggttcgggcgatgctgcaggtaccaaatatgccccaacagc

SEQ ID NO: 29384 - DNA, 75 bp, Homo sapiens
gtcgcaggagaataaagacccctgtcaccactgactaaagaagagaaaactgcggcagagcaattcaaatttcac

SEQ ID NO: 29385 - DNA, 75 bp, Homo sapiens
gcaaaccctctctctaccacgagcagcgccctgggagccctcacgagtcccgcaccgacagtaaatggttcacgg

SEQ ID NO: 29386 - DNA, 90 bp, Homo sapiens
gcgagctggagaaggaggtccgcgcgggccaggttgcacgatgggaacacaagacccgcaagctgagcagggccttcggatccccctacc

SEQ ID NO: 29387 - DNA, 100 bp, Homo sapiens
ctgcctcactgagcaaccaagagtttgttcggacagtgttaccattttctcaggaatttcaaagagataagcagcctaatgcacagcctcagtatctgca

SEQ ID NO: 29388 - DNA, 100 bp, Homo sapiens
taagaagctgcgcggtagcgcggtgagattctgaaaaagagttccacgtcctcccttatcgagtctttgttccccttcctggatccactgtaatgttgtg

SEQ ID NO: 29389 - DNA, 74 bp, Homo sapiens
ggagacagcagggcagttctctctcgggttcaaaagctatccagtcagttcgctgctattcccatgggtcacag

SEQ ID NO: 29390 - DNA, 75 bp, Homo sapiens
cgttttcgcctgcagctgctcaccggagagcttgtttcatatccatatcccactgtattcctgctaatctgctaa

SEQ ID NO: 29391 - DNA, 100 bp, Homo sapiens
catttacagaaagagtcaacagcagtggcaacaggagcatttcctccctctgctatttatacacggaaagacttactacagcgatctacccatattgcca

SEQ ID NO: 29392 - DNA, 98 bp, Homo sapiens
gagactcctaaaggggaactcccctccagctgcgctgggaccccaggaccctgccccggcctgaaggccagtgcacacatggtcttctgaagaagcca

SEQ ID NO: 29393 - DNA, 90 bp, Homo sapiens
cgcaggcctcgtgccgttacggccatcacggcggccgcagtggcgtcctggagccctcctcaggaaatttacatgccacttatgtgatag

SEQ ID NO: 29394 - DNA, 50 bp, Homo sapiens
ggcgggcagggccgggctccgcaggagaagactttgcagttgtgcagcaa

SEQ ID NO: 29395 - DNA, 50 bp, Homo sapiens
ataaatttgaggaagctttgaagagctgtgactgatgagaattaaaggcc

SEQ ID NO: 29396 - DNA, 74 bp, Homo sapiens
atcaacaatgagtacaactaccgctgctggaccacaaaccgctgccagaaaatgcatcagagacctttgcccca

SEQ ID NO: 29397 - DNA, 100 bp, Homo sapiens
aaggtgtacgatttgaccaaatttctggaagaggttatgagtgccagtgagccgccttagatagaagcatcgtcagcactttattaatgatggatagtga

SEQ ID NO: 29398 - DNA, 82 bp, Homo sapiens
ccatgagagtttggcttggattatctcaacattctgttgattctccccgaggagaggcggagagctgagcttgactaccgaa

SEQ ID NO: 29399 - DNA, 100 bp, Homo sapiens
ccccaaggccaaccgcgagaagatgacccagaatcttggcacccctggtccagctctgtcccactctcgaggtcccagccatcccctggacctggggacc

SEQ ID NO: 29400 - DNA, 99 bp, Homo sapiens
gtgggactgagcggcccagccgccgtgccgccgccgccgccgccgcaggacagccccagcgaggttatgatgtgattgctcaagcccaatctgggactg

SEQ ID NO: 29401 - DNA, 49 bp, Homo sapiens
cctcattttctgctggaactgagcaacaagatatggatttggatataga

SEQ ID NO: 29402 - DNA, 98 bp, Homo sapiens
gatttttggcctaccctccaaagaaaaggtagctacagcaagctgggtagcaggcagatccaaaggatatcatgaagtttccagggcctttggaaaac

SEQ ID NO: 29403 - DNA, 76 bp, Homo sapiens
ttggggaccagagatggacggtcactcagcctatggaggtgctaccaagattgtgccagtggaggctgggccccct

SEQ ID NO: 29404 - DNA, 100 bp, Homo sapiens
ttatgaacgccttgttgcccagttccccagttctggcagattctggaaactgtacattgaagcagaggtatctctcctaaatgtgtgatcaaggaattac

SEQ ID NO: 29405 - DNA, 89 bp, Homo sapiens
tccccaggaaacttacgatgtgtattgttatgtggatcatctggatgttctaggcctgattcttcactacctgagacgtctaaaaagga

SEQ ID NO: 29406 - DNA, 75 bp, Homo sapiens
agatttaacattccaacacataaaaattatttatccaacagctcctcccagtgagtccatgacagaagaaaccct

SEQ ID NO: 29407 - DNA, 97 bp, Homo sapiens
agcggtagagcaaaattcctgaagacaatttcttcttccaaaatcctcggattctctacttctgctagtgaagtcaccctgctgagaaatgaagtgg

SEQ ID NO: 29408 - DNA, 82 bp, Homo sapiens
gtcagtcacagccatgtgggctacacactctcctacaatgaagagacgcttcgggggaaccctgttctacagctgaacccag

SEQ ID NO: 29409 - DNA, 97 bp, Homo sapiens
ctgggcgtggaaagggctctggcgctacccgagctccggaaccttctgttggaccctgcctctcacaagctactggtgttggctgggccctgcctgg

SEQ ID NO: 29410 - DNA, 75 bp, Homo sapiens
tgaaagacctgtcttgagaaaaggccagtgttgtccctactgcatagagtaagccatatcaaagacttcattgaa

SEQ ID NO: 29411 - DNA, 99 bp, Homo sapiens
ggccgctggcccggccatgtcgtcgtccttcttcaaccccagcttcgccttcagctcgcacttcgaccccgaccatcatggagcagttcaaccctagcc

SEQ ID NO: 29412 - DNA, 100 bp, Homo sapiens
caagcggctcagccagatttcagctggagaaactgaatataatactcaagattccaagatgtgtctagtccgaatgaagcaggaaggccggagtgggaag

SEQ ID NO: 29413 - DNA, 100 bp, Homo sapiens
aacggaacttgccgcgtcgaggactgtcgggacagtcattttgtttactcattcagccctgttgcaggtcccaataaactcttcataaggttgacagaag

SEQ ID NO: 29414 - DNA, 80 bp, Homo sapiens
ggaggctgcaacccagtgtgtgtggggcttccgctgagacctgccgtgctgggtgtggctagaagtgaccccaggatttt

SEQ ID NO: 29415 - DNA, 100 bp, Homo sapiens
ggcggcggaccttttggccatcttctcgcagagtgctccctgctaacggggacaggccgaatacatcaagcaatggtaacatctttaaatgaagataatg

SEQ ID NO: 29416 - DNA, 98 bp, Homo sapiens
ctcctgcagccgccgccgctgcagtggtcgtccctgccctccccggccccggggtgcaccccgcaaggccaggcctcatggggcgtctccagtcccca

SEQ ID NO: 29417 - DNA, 74 bp, Homo sapiens
gccagatcaacctggagctctacgcctcctacgtttacctgtccatgaaaaacacaccttgactttagtcagat

SEQ ID NO: 29418 - DNA, 100 bp, Homo sapiens
tccctggagcggccgccttccagcgaatcctttgtgtttgaacccaactgcctcttcaaagtggatgagtttggcttctttctgacatggagaagtgaag

SEQ ID NO: 29419 - DNA, 80 bp, Homo sapiens
gctgagtttcctggtagagccggccgagctgaggcggtcgcggccatgaagcttcgagagctgtgcccaggagtgaacaa

SEQ ID NO: 29420 - DNA, 87 bp, Homo sapiens
catggccaccttcatggacccagggattttccctcgaggagctatgaagacatgattggtgaggaggtgccatcggatcaatactac

SEQ ID NO: 29421 - DNA, 74 bp, Homo sapiens
acactcaccactccatggccacacaggtggcgacagacaaagttgcagaaaagctgagctctactctctcatgg

SEQ ID NO: 29422 - DNA, 108 bp, Homo sapiens
agtagatcctgtccagatgaaaaatgtcacctttgaacatgttaaagggggatcatagacggtatttctatgtaaacgaacagtcgggcgagtctcagtgggagtttc

SEQ ID NO: 29423 - DNA, 90 bp, Homo sapiens
tgagcgcgagtacggctcctgcagccaccactaccagcagctgctgcagagcctggaacagggtatggagatggtccacgtcctcccaag

SEQ ID NO: 29424 - DNA, 101 bp, Homo sapiens
agaggagcatgaatggagcaaaatggcggatcatgtgcaggctttgggggaccagatactatttgtaaatcgtcccgataagaagaaaatacttttcttca

SEQ ID NO: 29425 - DNA, 97 bp, Homo sapiens
ccggcgtggcgctcatcgagggacgcccggcccaagtgtttccacgggctcccttgctcagcagtatgcgcaccctaacgctaccctgcacccacat

SEQ ID NO: 29426 - DNA, 74 bp, Homo sapiens
gaagctggccgagcaggctgagcgatacgacgcgtcgagggcgaggcccccagcagtgagactggcacatccct

SEQ ID NO: 29427 - DNA, 100 bp, Homo sapiens
gaaccacgacgagacctacggcgtgccctccctggaggagctgggctttcttctagtcaagatgagtgataaaccagacttgtcggaagtggagaagttt

SEQ ID NO: 29428 - DNA, 75 bp, Homo sapiens
gcggccagcaggaggctgatgaagttccagggtctccctccactgctgtagtaacccgggtccggggcctcggtg

SEQ ID NO: 29429 - DNA, 100 bp, Homo sapiens
tgatggaaattgtcaagaggtgcaaaaatcttagctctctcaatctctgtctgaactggatcataaatgacagactgcttttggcttctggatgccctcc

SEQ ID NO: 29430 - DNA, 100 bp, Homo sapiens
ccccaccccgaagatattaagttccacttgtaccttgtccccagcgacgccttgctaacaaaggtgttggggatgtcctttgcactgaccctgaactgcc

SEQ ID NO: 29431 - DNA, 100 bp, Homo sapiens
ttaaggctaaaaacaaagcaaaaccagttaccactaatcttaagaagatagggtctctctctctgccacccaggccagagtgcagttgacgcagggcagg

SEQ ID NO: 29432 - DNA, 101 bp, Homo sapiens
caagaccgcgaggcgagacctcttgccccgccagcaggcgaagcagggagatgtcagactgctacacggagctggagaaggcagtcattgtcctggtggaa

SEQ ID NO: 29433 - DNA, 75 bp, Homo sapiens
agaaaggcaaaccattgatcaaaaaatcaacatgttgtacaatgaggtgcactttacaggtccccgatgaaccaa

SEQ ID NO: 29434 - DNA, 75 bp, Homo sapiens
gccgcgaggagcgcactccgtggccccgatggagcggtacaaagcttggctgaagaggaaataaaaacagaacag

SEQ ID NO: 29435 - DNA, 100 bp, Homo sapiens
tgtacctattgaacagattccacttgtgaaggtaaaataccatgaagattttgaaaaaacaaaggggagaggctttactcccgtcgtggacgatcctgtg

SEQ ID NO: 29436 - DNA, 75 bp, Homo sapiens
gtggaaccggggtttggagggcagaaattcatggaagatatgatgccaaagcagacctgcgcagtctgtctggaa

SEQ ID NO: 29437 - DNA, 100 bp, Homo sapiens
catccgtttccacgactttctgggagactcgcatctacatcctcatcgctgtgggcgctgtcatgatgttcgttggcttcctgggctgctacggggccat

SEQ ID NO: 29438 - DNA, 100 bp, Homo sapiens
gcggcggctggcgcttcctgcgcatcgtctgcaagaccgcgaggcgagacctcttgaatactcccccagttgcaagaggcgcaggaccgtggaagacttc

SEQ ID NO: 29439 - DNA, 132 bp, Homo sapiens
ctgaagtttgttgctgcttcctatgatataagaggaaattttctcaagtggcaaactttagaaggaggtgttttacagggatgaagactggaatgaattcaatgatattaacaagattatcatccggcagcc

SEQ ID NO: 29440 - DNA, 90 bp, Homo sapiens
cggcgtggaccacatagacatttacgcggatgtcggcgaagagttcaaccagggtgatgaattagaagacaatggaaagaatttctacga

SEQ ID NO: 29441 - DNA, 74 bp, Homo sapiens
gagatgcggttttcctcgcagaacgcctttatgcagaagctctagaggacaaaatcccagtccttggcacaaac

SEQ ID NO: 29442 - DNA, 82 bp, Homo sapiens
agaaggaggccttccccgggcggagagcccctctccagctggcagagaggctgatgacatcgtgaactggctgaagaagcgc

SEQ ID NO: 29443 - DNA, 119 bp, Homo sapiens
tgaatattgtgcctgtcattgcaaaagctgacactctcaccctgaaggaacgggagcggctgaagaaaagggtttgaaaaataacaggtcagcctcttcccagatttcttgacatcctt

SEQ ID NO: 29444 - DNA, 100 bp, Homo sapiens
caggaggaagcaggagcagcccaagcgccttccctcacatcaggatcctcatgaccagccaaagagaagaagaattaggaagcataaatcaaagaaaaaa

SEQ ID NO: 29445 - DNA, 49 bp, Homo sapiens
aagaccgcatgtgccattaataagataacatttggtcagccaggcttgg

SEQ ID NO: 29446 - DNA, 74 bp, Homo sapiens
ctcccgctcggccccgccagcagcactgtggaggccgtcctcgttgatattcactgatggactccaaagaatca

SEQ ID NO: 29447 - DNA, 75 bp, Homo sapiens
acaggggctcttctgcgagaggaacaagaccaatttcttcaacgcacccatggacttggagaactggtcggggac

SEQ ID NO: 29448 - DNA, 74 bp, Homo sapiens
tgcagagcctggagagcatgccccggccccctgagcaggatccctccccgcggcggcgatggcccgagccatga

SEQ ID NO: 29449 - DNA, 50 bp, Homo sapiens
tggaacgcctggctcttggacaagtattctaccttgtaaatactgttatt

SEQ ID NO: 29450 - DNA, 82 bp, Homo sapiens
acaaagcccagtctgtgtctcaaatcaaccacaagctggaggcagaagtcaattcatctggaaagactatctctgagtcaga

SEQ ID NO: 29451 - DNA, 100 bp, Homo sapiens
aggacaccgacatggaacagggactcactggggatctcaaagacggaattagattggttccttcaagatttggaaagagaaattaaaaaatggcaacagg

SEQ ID NO: 29452 - DNA, 73 bp, Homo sapiens
aagatggaaaaccagttattgaatatcaagaggaggagttgttggccaagcaatggggctggacacaaggtcg

SEQ ID NO: 29453 - DNA, 100 bp, Homo sapiens
cggctgggtaacccagatcgctactaccccgcagttcccggacatgatcctctccgcctctcgaggtacggactaagagaccccatccttggtggtcccc

SEQ ID NO: 29454 - DNA, 98 bp, Homo sapiens
gtataggtggagaaatagaaaaaaccagaattcatgtagatgaatttgctttgattgaagataaaactttccaagtccttggtaatctttacagcgag

SEQ ID NO: 29455 - DNA, 100 bp, Homo sapiens
cctcgtggtgtggtgtatggccgtgggcatctcctacattagcgtctacgaccaccaagggtgctgataagactgtgaaaggcccagatggactgaccgc

SEQ ID NO: 29456 - DNA, 76 bp, Homo sapiens
tctgattgtcgtttttacccggccaaagtcactgctgttaacaaggatgatgttcctcctgctgatcaagagaagc

SEQ ID NO: 29457 - DNA, 101 bp, Homo sapiens
gtcatcagtttggagttacatggcggggcaagattcttgccaagagaattaatgtgcgtattgagcacattaagcactctaagagccgagatagcttcctg

SEQ ID NO: 29458 - DNA, 51 bp, Homo sapiens
acgaagaccgaggaaaagctgcggcgccaaatcttaaaggcagaccacgca

SEQ ID NO: 29459 - DNA, 111 bp, Homo sapiens
tagtgagtcggcggctgatttagaaggaggttcaggctacggtgagccgaagcataccctcggggaagtctgggtacagaagacatctgaaatgaatacagataaacagta

SEQ ID NO: 29460 - DNA, 75 bp, Homo sapiens
ggctggtccaggccttccagtacacagacgagcatggggaaggtcggccggctggcggagctgggcgcggcgtca

SEQ ID NO: 29461 - DNA, 82 bp, Homo sapiens
ctcatcgacttcggttcgggtgcgctgctcaaggacacggtctacaccgacttcgacgggtgacgagaacaagtcagtgcgc

SEQ ID NO: 29462 - DNA, 83 bp, Homo sapiens
agtccacccaccgccgccgcctcccagtgtcttgggacaaggtgcgcattcctggtgtgctgcagcgattgggagtgacatac

SEQ ID NO: 29463 - DNA, 100 bp, Homo sapiens
tccagctccagtgctttggtctgttgtgctggcttggtgacgctcacagtgctgggaaggaatctatccaagggcggcgactggcggcgcgatggacctg

SEQ ID NO: 29464 - DNA, 97 bp, Homo sapiens
tgtctttacctggtggatgtttatgccatagaaaaatcaactgcttttcccagaacacagagagcagagagcattggggagtcagcaatgtccgttg

SEQ ID NO: 29465 - DNA, 100 bp, Homo sapiens
cgctaagagtgtttgatcttcctctgacttggtactattctctctcccagcttaacagagcgttccaaaaagaggactctccagctactttttattgcat

SEQ ID NO: 29466 - DNA, 80 bp, Homo sapiens
gggtgggctggacgcagatctccgggccacctgccttgaaggtcatctaatacatgggagaaacatggattttggagtat

SEQ ID NO: 29467 - DNA, 84 bp, Homo sapiens
gtggatattatttttcattatccttttctgggtgctatgggtgatcattccaagagtttttagaacttcagccataaaaatggg

SEQ ID NO: 29468 - DNA, 100 bp, Homo sapiens
cccactattattttggcacaacaggaaggtattcaaaacctttgaccacatggcccgtcaggatgatgagaagagaaggcaggaacttgaagagaaaatc

SEQ ID NO: 29469 - DNA, 100 bp, Homo sapiens
ctcggctcatgttctgggacttaggagggcaggaagagctgcagtctttgtgggacaagattttgcaagaacgaggctcaaggatgtgagggacacagta

SEQ ID NO: 29470 - DNA, 101 bp, Homo sapiens
ggcggcgtcagcaagaagttcgtgtgggaggcggcgcgcgactacgggctccaggtgttcaagcagccctggccagggatcatgcgcacagtctatgggaa

SEQ ID NO: 29471 - DNA, 100 bp, Homo sapiens
tgtctgcgtcctcgggggccagagcccgccagccctcgcggatcccggctcgcggccagcccgagcggctcgggaacggaaaacagttcttccttcaaag

SEQ ID NO: 29472 - DNA, 74 bp, Homo sapiens
tgtgaagatcgccagagagttctgtgtttcatcaccgccgaaaggtgttgacttcaaaatcaaaactgtagagc

SEQ ID NO: 29473 - DNA, 75 bp, Homo sapiens
cagagttcaaggaggccttccagctgtttgaccgaacaggacactgcccatctctaagataagaacctggaaagg

SEQ ID NO: 29474 - DNA, 75 bp, Homo sapiens
acaccagcagctctgctgcggagcgggaggaggaccgaaagcttcgagagctgtgcccaggagtgaacaaccagc

SEQ ID NO: 29475 - DNA, 76 bp, Homo sapiens
aagcagattacttccatcagtattgagccaggagttgaggtggttaccctaacagctaatgataagacaagtgttt

SEQ ID NO: 29476 - DNA, 75 bp, Homo sapiens
caacaagattgggaagaagttcggcctgaagtgtgagctctgaccaactgcccctgtaagtacagttttttggat

SEQ ID NO: 29477 - DNA, 50 bp, Homo sapiens
gagcctcaggcggcagcgcttctaggtgcttttgaagatgatgatatcac

SEQ ID NO: 29478 - DNA, 100 bp, Homo sapiens
atttattcggaggatttgctgactttggctcagctgctgcatcaggcagtttcccttcccaaggcttcacaggctgctcaagaagccgagatcaatgcca

SEQ ID NO: 29479 - DNA, 73 bp, Homo sapiens
actaaggcggaggaactgagacgtttcgaattccaggtctcctctgagcctccggcctccataagacccaaaa

SEQ ID NO: 29480 - DNA, 100 bp, Homo sapiens
atccccagtggagccggagtgcgggcgcgccccaccaccgccctcaccatgtataaccccgttttcacacgaatggccccttcacatatttgaagactac

SEQ ID NO: 29481 - DNA, 75 bp, Homo sapiens
agacgttagcgtgagtgatcactctcaatcccgggtattctttaggtgatgctagaaggcctcttcatgaaacag

SEQ ID NO: 29482 - DNA, 75 bp, Homo sapiens
ctggggcagtatcaacggagtctccggggtttatctggcaagactgaggcaaataagactacagaatttcaatga

SEQ ID NO: 29483 - DNA, 100 bp, Homo sapiens
tggcgcctcccctgccctcagaaatcaacagaggagtccacaggccgcacagctttaatggaagcgtcaagagaaggggtagtggaaatagttcgaggca

SEQ ID NO: 29484 - DNA, 142 bp, Homo sapiens
agacgggcgtcttctacctgacgctcgtcctcatcctggtcactagcggactcttcttcgccttcgaatggagtttcactcttgttgcccaggctggagtgcaatggcgtgacctcggctggctgcaaccttcacctcccgg

SEQ ID NO: 29485 - DNA, 100 bp, Homo sapiens
cacattggaacaaggagaagatccatggttattagagaaagagaaaggatttctaagcaggaactccccaggttcgccatcggtggtgtgaactcattgt

SEQ ID NO: 29486 - DNA, 90 bp, Homo sapiens
ccctgatttcctgcttctccttttcatgagtgttcctgtggtctctgcacctcctttctcagggaggagagagcgatggcttttttcacc

SEQ ID NO: 29487 - DNA, 100 bp, Homo sapiens
agttgacaccttttgacatgagcatccagggaagtttggttggcttagtggattatccagatgatgaagaggaagatgaagaagaagaatcgtcccccag

SEQ ID NO: 29488 - DNA, 100 bp, Homo sapiens
gctggaccctaggcactgttgaaacaactgcaccatctgcaggagcccagcaaggctaccaaagtgacagcagatggcgagcagaccggacaggatgctg

SEQ ID NO: 29489 - DNA, 84 bp, Homo sapiens
aagcaggcagaatttggacgccgggagattgagattgcagagcaaggctgtctcagcactgattcagcccttaggagtgtgtgc

SEQ ID NO: 29490 - DNA, 100 bp, Homo sapiens
gctttgccctgggaaatagtaaccctgccaaatacatcagcttgtaggagacagaggtgtgtacattctcacgaccggcctgatccctgtgctggagaaa

SEQ ID NO: 29491 - DNA, 73 bp, Homo sapiens
caagcccccagagagcattcaccctccagttccaggccgaccccgacgtgctgcacaacagctatgcattgca

SEQ ID NO: 29492 - DNA, 98 bp, Homo sapiens
aaagaatctaattgaaatgtctgaactggaaataaaacatgccagggcaggaccagatgctgtgttggggaggacaatctggggagttttaggtttag

SEQ ID NO: 29493 - DNA, 82 bp, Homo sapiens
aacactgtccgagggtgctcttatttctacaggccacagaaagcgaggctggtgatatggacctgagtgggttgccagaaac

SEQ ID NO: 29494 - DNA, 76 bp, Homo sapiens
gattgggtaactgtgattcccaggagaataaaaggaagccagttgagggaagttctccatgaatgtacgtcacaat

SEQ ID NO: 29495 - DNA, 100 bp, Homo sapiens
ccccggggaactagggagcgtctccggctgcacagcgctcaggcttggtttagaaagaggggaaacagctaaagaagccttagatgtcattgtctccttg

SEQ ID NO: 29496 - DNA, 98 bp, Homo sapiens
agctggtgctgctcaccttgggccaggcctggcagggctgtgagtggcaaggactttggagttaccttatcccatatcacacaactggtcctcagcca

SEQ ID NO: 29497 - DNA, 98 bp, Homo sapiens
ctgttttgcctgaatacatgatttaaacaagagatttccacagaagcggcctcccagccaacatccagctggacattgatggggaccgtgagacggag

SEQ ID NO: 29498 - DNA, 100 bp, Homo sapiens
tccgcccggcagccaccccgtccgggagggaggtggggggggtcagccccccgcccggccagccgccccgtccgggagctggatctaccatgaaagactt

SEQ ID NO: 29499 - DNA, 78 bp, Homo sapiens
cgcaaccaggaatgacttctagtcaacaacggttccagcctcagggatgagtgcatcacaaacctactggtgtttggc

SEQ ID NO: 29500 - DNA, 101 bp, Homo sapiens
ccaacacataaaaattatttatccaacagctcctcccagccaataggagctctgaacccaaaaagagcagcattcttcgctgagcgttatgaatcatggga

SEQ ID NO: 29501 - DNA, 96 bp, Homo sapiens
tggtctccagcactaactatttcaaaaggccttatgatgggaaatggagtaaaacaatggtgggatttgggcctgaggatgatcattttgtcgcag

SEQ ID NO: 29502 - DNA, 100 bp, Homo sapiens
tataactaaccaactggaaaaatggatgaaactcaatgtagaaatagcctaacatggcagaccagagacagcgctcactgtctacctctggggagtcatt

SEQ ID NO: 29503 - DNA, 90 bp, Homo sapiens
ctggcaagaatcaaactgaagggcaccgtgggacttcattagaggggtggtagactcggaggatctccctctaaacatatcccgtgagat

SEQ ID NO: 29504 - DNA, 98 bp, Homo sapiens
ggaggatgaggaacccggagtctgcatttcttagtaggtgcacgtctcatcgcacatgctggcagcctcaccaacctggccaagtatccagcatccac

SEQ ID NO: 29505 - DNA, 75 bp, Homo sapiens
ccagttatttgcctcagtaaaagattgaacaggtagttaagcccccccaaaacaagacggaaagtgaaaatactt

SEQ ID NO: 29506 - DNA, 75 bp, Homo sapiens
gtgagcagggctgagatgggcaccgcggatctggggccgtcctcaggtagtggctctttatgactacacagcgaa

SEQ ID NO: 29507 - DNA, 83 bp, Homo sapiens
cgccagcggccgagcgggcggcttcctggcctgggcgctccggtggcggcggagggacccagacatggagctgcgggaagaag

SEQ ID NO: 29508 - DNA, 100 bp, Homo sapiens
ggatttgttaaggattccaagtaactcttatttggtggtaagttttcttcatacagttcttttgtgtgacaaactggatttcagcacggcgttagtggtt

SEQ ID NO: 29509 - DNA, 87 bp, Homo sapiens
gtggccagcactggctccttgatggactccttctcctcccccacgtcggcgctcaccttctcctagaagatactctcctccaataca

SEQ ID NO: 29510 - DNA, 100 bp, Homo sapiens
ggggtttccggctgcagggcggtaaggatttcaacatgcctctgacaatctctagttcactgtgtgcccagtattctgcagacaaacgagaagatgagaa

SEQ ID NO: 29511 - DNA, 75 bp, Homo sapiens
cggagcataggaggaaaattcatcatctgagttgctggagaatgtaaccctaatccataaaccagtgtcgttgca

SEQ ID NO: 29512 - DNA, 98 bp, Homo sapiens
ctgctcggctggtcgcttcccgcgcgggtatctgtgcgtttcagcggcgacacgctatcatggtgaacttacttcagattgtgcgggaccactgggtt

SEQ ID NO: 29513 - DNA, 100 bp, Homo sapiens
cctggagcctcagttggaagcagccgatccagcctgcggagcctgtggggcagcaaccagcaggcctttttactggagaacgtcccttgtaataatgcaa

SEQ ID NO: 29514 - DNA, 95 bp, Homo sapiens
tactttatcaaccttaaaatcagtcaaaccctaaaggatgactcagaaagatatcacatttgttgctgaatttcttactgaacatttcaatgagg

SEQ ID NO: 29515 - DNA, 75 bp, Homo sapiens
gggttcctggggcatcgacgatctccatatttcattgcaaggcatttgcccccagcacagcaaacgtttcctgag

SEQ ID NO: 29516 - DNA, 74 bp, Homo sapiens
ctacaggacacggtgctggccgccggttgcaagcagatactggtgccttgcctgatttgagatggggtcccagg

SEQ ID NO: 29517 - DNA, 74 bp, Homo sapiens
actccagccagagcccccccacgccttcgtgaccctgctgaatggggagcaggccgaggccgcaatcaatgctt

SEQ ID NO: 29518 - DNA, 97 bp, Homo sapiens
agctgttaacacttcctagataacgggccaaagagtgtggccagatgcaaaataagtggctgatgataaacattcaaaatgttcaagactttgcatg

SEQ ID NO: 29519 - DNA, 82 bp, Homo sapiens
ctcagctctcggcgcacggcccaggtgagaagccctaccactgcaactgggacggctgcggctggaagtttgcgcgctcaga

SEQ ID NO: 29520 - DNA, 100 bp, Homo sapiens
ctttcctgttgagcactgcggcgcaactcgccttgctgcggttggtggtggcgatggagattgcagcgcggctgaagggcaccaaggatgacattgatct

SEQ ID NO: 29521 - DNA, 98 bp, Homo sapiens
cagagccggcgcctcctcggcagaatgaggagaaacctgtgcaaatgatgtttaagcaatctacttttaagaagacctatataggagaaatatttacc

SEQ ID NO: 29522 - DNA, 74 bp, Homo sapiens
tctttcgacaaggaatgctggatgtggctgaggagctctgtcaggaatctaagtcctttgctgtgggaatgttc

SEQ ID NO: 29523 - DNA, 75 bp, Homo sapiens
cagatacttctcaaaatacttgtaaaagtcctccaaaaatgagcaaggcgcagttgtgtagcagttgagtaatgc

SEQ ID NO: 29524 - DNA, 74 bp, Homo sapiens
tcgcagtggtcgcttcttctccttgtgcgtttgcttctgaggatctccagtgtcacaacaaacacatgccagcc

SEQ ID NO: 29525 - DNA, 88 bp, Homo sapiens
gacggaggaccatgatgggaacaagatcctcctacaggtgctgggactctggtgcccccaaccctgggcatcctcaggctttgaggag

SEQ ID NO: 29526 - DNA, 100 bp, Homo sapiens
ggagctggcggagagcggcctgcgggcgatcgggccgagaaaaatggctacaaacttcctagcacatgagaagatctggttcgacaagttcaaatatgac

SEQ ID NO: 29527 - DNA, 100 bp, Homo sapiens
taccagctgtagcaaaagtgggaagccaagcctttcctcccggtacctgcaaggtgtggagttacagtccgagacagtctaaagaaagcactgatgatga

SEQ ID NO: 29528 - DNA, 82 bp, Homo sapiens
tcggcatgaggccccttctcccaggaggggaggcacacaatgcagatcttcgtgaagactctgactggtaagaccatcaccc

SEQ ID NO: 29529 - DNA, 100 bp, Homo sapiens
tcctccgcagaggcccccgacggagacaaggacggaccttgttgctcgcctggatgaactcgggggcgtgtatctccagtttgaagaaggactggaaaca

SEQ ID NO: 29530 - DNA, 100 bp, Homo sapiens
ataagctggctgtccttcctcggctccgtagcctgacactccatgggaaccccatggaggaagagaaagggtataggttatatacaggcatgtagaggac

SEQ ID NO: 29531 - DNA, 50 bp, Homo sapiens
cagtgccacatggggtatttcagggattctcctgatgaatttcctgtata

SEQ ID NO: 29532 - DNA, 76 bp, Homo sapiens
tggacaagaatatgctgccaaaattatcaacaccaaaaagctttctgctagggtgtgctcggtatgataatgcctt

SEQ ID NO: 29533 - DNA, 50 bp, Homo sapiens
ctgtggaggtgaagacattgtggactctccagaaagagcaacagtaatgg

SEQ ID NO: 29534 - DNA, 75 bp, Homo sapiens
gtcggagtccggcggcgacctgcctctgaaacatggcaggctcggatgctgtgtttggtgctggcaccaactcgg

SEQ ID NO: 29535 - DNA, 100 bp, Homo sapiens
ggacaacagtgacgaagagaactgtctcctggtgaccgagcacccgcctccgggcatcttcaactatgaggagaaaaggcgacctgatattttccatgca

SEQ ID NO: 29536 - DNA, 98 bp, Homo sapiens
ggaggcagacagtggggaggaagaatgccggtcacagcccaggagctatgtggtggtaatgcctaaaaagagacaagcactggtggagtttgaagatg

SEQ ID NO: 29537 - DNA, 98 bp, Homo sapiens
agaggcgcaaacaagccaatcccaggaggaaaaacggtcgcccggctcatggagatgggattttccagaggtgatgctttggaagccctgagagcttc

SEQ ID NO: 29538 - DNA, 51 bp, Homo sapiens
gaggggccggggctgggctcgcagttcccatggagaatgttgcaacaattg

SEQ ID NO: 29539 - DNA, 75 bp, Homo sapiens
tgctgtggttcccctggatttagtgaaatgccgtatgcaggtggtcataatgtcacaatctccttgcagtccagg

SEQ ID NO: 29540 - DNA, 100 bp, Homo sapiens
ctgccccgtgaccgacaggccttggtcaaaaagcatgcccagacctttttggccctctgtgctacaggagctgctgctcttcctccagaacctgcccaca

SEQ ID NO: 29541 - DNA, 50 bp, Homo sapiens
cgcataatggatgaaaggaaccgacagtttcaccagtgatcattaaagaa

SEQ ID NO: 29542 - DNA, 101 bp, Homo sapiens
cgcggcttcctcaacttcacgctggcgcgagccccgtcctccttcgccgccgcgcacaaccgcacgtgcaggcagaaggagaagacagcctgaagaagatg

SEQ ID NO: 29543 - DNA, 100 bp, Homo sapiens
gtgaccacgcagtctgtgatggggtttgatcctctgcctccttcggacacaatctactcctacgtcaggccagagagatgcaccgtggcctggcggcgag

SEQ ID NO: 29544 - DNA, 122 bp, Homo sapiens
gaaggacgctggaaagtcggccaagaaagacaaagacccagtgaacaaatccgggggcaaggccaaaaagaagaacactcgtgaaactgctcaggccatcaagggtatgcatatacgaaaag

SEQ ID NO: 29545 - DNA, 80 bp, Homo sapiens
ggcccagatgcgcgcgatgctggaccagttgatgggcacctcccgggacggatggataaggtgggggatgccctggagga

SEQ ID NO: 29546 - DNA, 80 bp, Homo sapiens
ctactttccaacaccttcctgcagttcttcggccggggtttccaggcctgaggtgcccgccctggccccaggagaatgaa

SEQ ID NO: 29547 - DNA, 90 bp, Homo sapiens
caggactccagattatctacaacactgatgaggtgttaagtgtgatgcttccataatacatttggatgctgtcagctaagttcacttctg

SEQ ID NO: 29548 - DNA, 75 bp, Homo sapiens
tatgcagatttgatggcaatacattaaaaactactcatgtgatatgagtaaaattagcctaatcagaatgttagt

SEQ ID NO: 29549 - DNA, 109 bp, Homo sapiens
aggagtcagtgggtccactggtagcccccacccctctccgtccatggccccagatgacacttcaggtgaccaagaatatggcccaggtgaccaaagccctggacaaggc

SEQ ID NO: 29550 - DNA, 88 bp, Homo sapiens
aaagcccggcaggagaggaggctggccgagatcaaccggggtgtcaaattgagaaccaggtagatccccaccacctacagtaaaaagg

SEQ ID NO: 29551 - DNA, 78 bp, Homo sapiens
tagaactcagttgtgcgttgcggccagtcgccactgctgtgaggggaagtggcttcgaaacattgactattaccgttt

SEQ ID NO: 29552 - DNA, 100 bp, Homo sapiens
ttcagtgcaaaaataagagtgggtgacttctatgaagccagagatggaccgcagagctccttaataagcatttatagtcagtttttggcagcaatagaat

SEQ ID NO: 29553 - DNA, 74 bp, Homo sapiens
gcgggaagtgtgaagcggccaatggcacggaggcctgcgtcgccactggcttcaccacgcggtcagacattggg

SEQ ID NO: 29554 - DNA, 83 bp, Homo sapiens
gcagctccaaccatgggaggccgcgtctttctcgcgccctcacaaagccaatgctgaggagatgaccaagtaccacagcgatg

SEQ ID NO: 29555 - DNA, 110 bp, Homo sapiens
cagtatgtctcctatttctgcaagatgtcaagattgttgaacaccccaggctgctttgaatgctgcatcaagtgtctgggaggagtcccctacgcctccctggtggccac

SEQ ID NO: 29556 - DNA, 100 bp, Homo sapiens
tggaacgagttataggaagatgtagtccaacccacatcagcagatacgtgcttttcaacatgccttcagcactaatgactgctccaggaatgtctacatt

SEQ ID NO: 29557 - DNA, 75 bp, Homo sapiens
ctgtttgagaaaaggcctaagaattttggcattgagcacttggagctaccttctgtttctttgctgtagaagccg

SEQ ID NO: 29558 - DNA, 75 bp, Homo sapiens
atgcaaggaaattattagatgaattgtcagacccagaatcttcaatgtggtcaaaggtgaaaagattcttccggt

SEQ ID NO: 29559 - DNA, 82 bp, Homo sapiens
gtgaatgtcggaatccattatctttcgggaaagctctctggggcaggaagctgcacacatacatgtaagagaagcaaaaatg

SEQ ID NO: 29560 - DNA, 100 bp, Homo sapiens
cccagggaccaggcggaggcgtcgcgggagcctttggggcaccacagagatgcgggcaagtgaaccggagcaaacgacttccgatccagtctgcgctgtt

SEQ ID NO: 29561 - DNA, 98 bp, Homo sapiens
ggcggatttagataaactcaacatcgacagcattatccaacggctgctggaagggtggcccagttgaaatccttcccttcctctaccttggaagtgcc

SEQ ID NO: 29562 - DNA, 82 bp, Homo sapiens
ccccaaaagaccgagctctcttcaacggagcccaaaagtgtgttggagcgggccggagagaagtagagtgggctgcgaggag

SEQ ID NO: 29563 - DNA, 98 bp, Homo sapiens
gggaatgggagcctattgtccagcccctcaggagaataaacttaacacccttaaagacggacactccaccaagttctgtaccaaccagtgtgatttcc

SEQ ID NO: 29564 - DNA, 100 bp, Homo sapiens
tcagttacgacaagaagaaaaacggcaacgtgtaatcagaaggcacagattagaggaaggaagagggtgataaaagaaaatgtggctgaagttacccgaa

SEQ ID NO: 29565 - DNA, 82 bp, Homo sapiens
cgggcctcactggcttcaggagctgaataccctcccaggcacacacaggtgatgatcctgcaggaagtgcaggagagacccc

SEQ ID NO: 29566 - DNA, 100 bp, Homo sapiens
gattctccagggagtctttcaaggtcgaaaggggaagaggcaaccccagctttccagacagtcacttttcccagtggtcatacctggtctggaagattcc

SEQ ID NO: 29567 - DNA, 100 bp, Homo sapiens
agtttcaaaagaattggccaaagaagttgagaaaatgggagcagttttcatggatgcccctgtttctggtgggctccacgtgttccccacgtttgtggcg

SEQ ID NO: 29568 - DNA, 82 bp, Homo sapiens
cggagccgaagtgccattgtcatcaaggctggaggccgctacctggacaatgcagatcttcgtgaagactctgactggtaag

SEQ ID NO: 29569 - DNA, 88 bp, Homo sapiens
gataaagggaaggacaaggaattacataacatcaaacgtggaggaggagacccacccggtggacttgagctcgctctccagtaagcta

SEQ ID NO: 29570 - DNA, 83 bp, Homo sapiens
agccagtacatcaagttcatcagcgagactctgcggcgcatggaggaggaggagacaatgcagatcttcgtgaagactctgac

SEQ ID NO: 29571 - DNA, 75 bp, Homo sapiens
ccaagtcaagaagccgcggaattccaaaccctcacctgtagacaggtatgatgatattctgatcaatggacttcc

SEQ ID NO: 29572 - DNA, 80 bp, Homo sapiens
tgatccctggagcgacgacggccgctgcctaagctggaaactgtgagccgtgagctttgaggcggtgggatgtgtcagca

SEQ ID NO: 29573 - DNA, 100 bp, Homo sapiens
tcttcatctttacagaggaatagtctacaaaggaagacttgtaacctggagaagagttgactttggtgtgagtgctcagctggacaggactgtggggcgg

SEQ ID NO: 29574 - DNA, 83 bp, Homo sapiens
acacgtctctgttcgtcaggaacgtggccgacgacaccagggccgcgttcgcaccaaaaccgtgaagaaggcggcccgggtca

SEQ ID NO: 29575 - DNA, 75 bp, Homo sapiens
gatgaagacagcaccaggttccaaatcatcaatgaagcaagtaaggctgaagaactatgccctggttattctaat

SEQ ID NO: 29576 - DNA, 87 bp, Homo sapiens
tcctcccacttcagcctcttcagtaactgggactacagttgaagactgggatagtttccaagctattttggatcatacctacaaaat

SEQ ID NO: 29577 - DNA, 98 bp, Homo sapiens
aagtcctgttgcagatttctctgctattaaggaactagatactcttaacaatgaaatagttgacctacagagggaacttatagaaatgctggcaattt

SEQ ID NO: 29578 - DNA, 100 bp, Homo sapiens
gagcttggaaggatgcttcagctcatcttaggctgtgctgtgaactgtgaacagaagcaaggttactcaaatgagtcgtccagacttgattctctttctg

SEQ ID NO: 29579 - DNA, 83 bp, Homo sapiens
ccagggcccgcgggccaggagagcgctcggcgggttgtgaccgagattcccgacgagagagactgaggggaagagaggaagga

SEQ ID NO: 29580 - DNA, 80 bp, Homo sapiens
aagagaatgatgaagagaaaggcccggagactggaactgctcgcagaaagaagaaggtggttcatagaacagccacagca

SEQ ID NO: 29581 - DNA, 99 bp, Homo sapiens
gaagaatcttccaatgggagtctctcagtagaatttcgacatttgacatatctgaagagatggattaagaatgctttggattaaggattgtggagcaca

SEQ ID NO: 29582 - DNA, 75 bp, Homo sapiens
ccacgaggacttccaggtcacggaggaggtgaaagctaacatttccaatgatcactggccatctttggttcaaga

SEQ ID NO: 29583 - DNA, 100 bp, Homo sapiens
aggtgctggacccgaagaaggacgtgctgacccgcctgaagcacctgcgggcgctgctggttgcattaaaatcctcccctactgaaagaaacggaggcca

SEQ ID NO: 29584 - DNA, 75 bp, Homo sapiens
cccgggggcgggccggggtcaccacgcctgccccagggaaccgcacagaactcccccactggaaaggattctgaa

SEQ ID NO: 29585 - DNA, 75 bp, Homo sapiens
cctccccgggcccctgagccatgcccatcgcagccgccccgaaggagccagattgtcactgctgttccaagggca

SEQ ID NO: 29586 - DNA, 83 bp, Homo sapiens
cgctgattccccccgcatcgcctcccgtggaagcccaggcccgcttcgcaggaatcatattgacaggtcatgaaaatgagacc

SEQ ID NO: 29587 - DNA, 100 bp, Homo sapiens
gcgcctggcctgcagcttccagcacagctaccgcctgctggtgcctgagctctcagcatggcggctcctctacgtcacttgcgtccaccaaagtctgcag

SEQ ID NO: 29588 - DNA, 100 bp, Homo sapiens
cgctgtgaggcacctgccaagaacatcgccaccagcctgcatgagatctgctctaaggacccgggccctgcaaagccacagctccccagagggcaaggag

SEQ ID NO: 29589 - DNA, 100 bp, Homo sapiens
gaggaggagttccagaagcatgaaggtcggccacacacccggagcaccgtcatcacagcggtcaagttccttatctcggaccagccccatcccattgacc

SEQ ID NO: 29590 - DNA, 75 bp, Homo sapiens
gaggcaccccggacagagacgtgaagcactgaatctacaacagatgaggatgaggaagggaaattacctgaggac

SEQ ID NO: 29591 - DNA, 75 bp, Homo sapiens
cttccgcgtcggcaagaagatcggctgcggcaacttcggggagctccgcctagccccctcggaaaaccacactga

SEQ ID NO: 29592 - DNA, 100 bp, Homo sapiens
ctggagaagagcgaccagctcactaagaacatgtgatgatggccaaagagaagccaccgataactgtagttggagatgttggaggccgcatcgcaatcat

SEQ ID NO: 29593 - DNA, 75 bp, Homo sapiens
tgttacttgtaacagttcaaagactctgcttgcctcagcttgtaagctcaagactgcagtgcagatgacgacaac

SEQ ID NO: 29594 - DNA, 80 bp, Homo sapiens
agaaaaaggcggcagtggtagtttccaaatcagcatggaggagcaggacttggagcgaaggttcgagctgctgagccgcg

SEQ ID NO: 29595 - DNA, 75 bp, Homo sapiens
cagattcgcagtggtcgcttcttctccttgctggggccttctctgcacttggggccttccatcccgatcataggg

SEQ ID NO: 29596 - DNA, 100 bp, Homo sapiens
cagccaaccagcagcagccatcatggaggcctgacctctcgggacacacccagccctgtggacccagacaccgtggaggtgttgatgacctttgaacccg

SEQ ID NO: 29597 - DNA, 82 bp, Homo sapiens
cgctctgggtctccaggcccgcgaccgtccgccagtcgtcccgagggggtgagaacatcaaaagcatcaaccagcagtcagg

SEQ ID NO: 29598 - DNA, 89 bp, Homo sapiens
aaactacagtagtgggacacataacatagaagtaatcgtccagcaatctgcagagcgctgtgtaagcacattgcttgatctaatccaga

SEQ ID NO: 29599 - DNA, 82 bp, Homo sapiens
atgggatctgcagagttcgggcgagaggaggcgagaggcgcaaagccgttggacataccagatggtcgaagagctccacttc

SEQ ID NO: 29600 - DNA, 99 bp, Homo sapiens
aaagagctattgaaaaaatgaatggaatgctcctaaatgatcgcaaagtgttgaaattatccaatgacgaaatcaaacgggcaattctaacaatggacg

SEQ ID NO: 29601 - DNA, 75 bp, Homo sapiens
tggaagttgattactcagtctctaaaaagctaagaatggtggtttggcctggagtgatgatgcagatggaggccg

SEQ ID NO: 29602 - DNA, 83 bp, Homo sapiens
aaagccagaggctcgagttacccctcttaccaccgtcatggcagtcccaggttctcttagaagcacaagatatggcagtgaga

SEQ ID NO: 29603 - DNA, 90 bp, Homo sapiens
ggggccagcagctcctgtcctggctggcttcgaaaggctgagggtaaaaagctgggattggtaggctgggtccagaacactgaccggggc

SEQ ID NO: 29604 - DNA, 83 bp, Homo sapiens
cgcggcgacggcggcggtggcggcttggacgactcggagagccgatctctggaaacatggctacagaacatgttaatggaaat

SEQ ID NO: 29605 - DNA, 80 bp, Homo sapiens
gccaggctctggagcagttccatcagctcagccaggtcttgaggctactcacagtcgaactacaactccccggggtccgg

SEQ ID NO: 29606 - DNA, 83 bp, Homo sapiens
gggcggtgctgtcatggctggagtaaggcccctggctcccagaggtgcaccaaacccttatgccagcctggaccatcttggag

SEQ ID NO: 29607 - DNA, 75 bp, Homo sapiens
gtaaatatctttccctagctgctgtgaggtggagcagtgggactcggatgagcccatccctgccaaggagctaga

SEQ ID NO: 29608 - DNA, 82 bp, Homo sapiens
gggaaccgggcggagcggccaacatggcggaacgcaggagacacaagaagcggatccagtgtctttggtgcaacactaacaa

SEQ ID NO: 29609 - DNA, 97 bp, Homo sapiens
cgaaagcctacaaaagtgtggagaggttccttcaggaggatcagaagacccttttgaggacttctttgggaatcgaaggggtccccgaggaagcaga

SEQ ID NO: 29610 - DNA, 76 bp, Homo sapiens
cacaaatgctccttctcctggagacgcaactcaagatggctcagcgacttcttctgaggaggttcctggcctctgt

SEQ ID NO: 29611 - DNA, 49 bp, Homo sapiens
gagttatatttggctaaagagggacccccgcagcaaacacaagtttaag

SEQ ID NO: 29612 - DNA, 100 bp, Homo sapiens
gagagatggaacccgaagaagaaaggattcgttacagccagagattgccgccgccatgtctgcgcatctgcaatggatggtcgtgcggaactgctccagt

SEQ ID NO: 29613 - DNA, 100 bp, Homo sapiens
tgaggtgatttggatatccctagaacgttgagggcacgagtcgggtcctgagaccagaatgttggctaccagggtatttagcctagttggcaagcgagca

SEQ ID NO: 29614 - DNA, 82 bp, Homo sapiens
ttcaaaacgaatatccatgcaacactcagtgcatacaaagtggagttagcagaagatatagatcagctatcaggaagggact

SEQ ID NO: 29615 - DNA, 100 bp, Homo sapiens
acgccggccgtggacatcggggcagctgacctcgcccacgcccagcagcagcagcaacagggtatttgaagtataccatacaactgttttgaaaatccag

SEQ ID NO: 29616 - DNA, 75 bp, Homo sapiens
gcctcccaagtagctgggaccacaggcatatatggtgctggttgtctcattacggaaggatgtcgtggagaggga

SEQ ID NO: 29617 - DNA, 101 bp, Homo sapiens
cggaggtggcggcggcggcggcggcggctgctgctgctgctgcccgcgtccgaggctcgcgggcggcgggcccggatggcccactgcgtgaccttggttca

SEQ ID NO: 29618 - DNA, 100 bp, Homo sapiens
gtcatcacaaaagagttgattgaaattatctctggtgctgcagctctatgctctacccatggtaccccaggaccagaaggcaaccatatttcagatttac

SEQ ID NO: 29619 - DNA, 100 bp, Homo sapiens
aaatcaccaaccaaaagattcacctttggatttcatcgcttaggtgtaattattgaaacagatataattggttcagaccttttgaagaactctgacccag

SEQ ID NO: 29620 - DNA, 83 bp, Homo sapiens
caaaagtttgatgagattttttcagcaacaaggaattacatgaatgacagtcttcgaaccaatgtgtttgttcgatttcaacc

SEQ ID NO: 29621 - DNA, 98 bp, Homo sapiens
gatcccttgtgaggctgccctcatggagttccccctggcccagatatgtccccaaggagccgggtgtgggctgagccctgcctgattgatgctgccaa

SEQ ID NO: 29622 - DNA, 90 bp, Homo sapiens
aaccacctgctatgtcttctcgagggctctttaagaatttgggaatagaagcagttccttggacagcagatggagtctcgctctgtcgcc

SEQ ID NO: 29623 - DNA, 100 bp, Homo sapiens
actggctgggaagaagcatatacttttgaaggtgcaagatactatataaagcgatatgagtctcatccagtctgtgctgatctgcaggccaaaattcttc

SEQ ID NO: 29624 - DNA, 100 bp, Homo sapiens
tttatacactcttagtgctgtccaggaatttgctgacacaatatcttccgcctggtgctgggcatatcctaagaacttacaactttcctgtattatcctg

SEQ ID NO: 29625 - DNA, 98 bp, Homo sapiens
gcctcgcacccccagccagtccgtcgatccagctgccagcgcagccgccagcgccgggaggagaacatttgcctgcactgggcggcgttctccggctg

SEQ ID NO: 29626 - DNA, 100 bp, Homo sapiens
acaggactgctattctgctctcctgcccacggaaagaccacagcaagattctttcattcgtctcctcctagcctgggggaccaggctcgaactgaccctg

SEQ ID NO: 29627 - DNA, 88 bp, Homo sapiens
attccaagtaactcttatttgatgccgtgcgcgaaattcggaagtatgatgatgtgacggaaaaggtgaacctccagaacaatcccgg

SEQ ID NO: 29628 - DNA, 100 bp, Homo sapiens
aagaagtgatggagcaaagtgccggaaaggttatttgtcaatgaagaaaatgttaatgagtttcttgaagaggtcctgagctctccattcaaacagtcta

SEQ ID NO: 29629 - DNA, 100 bp, Homo sapiens
gctggctccgctctatccggctttgctaggggaggccaaacgtaccaagaaagtcgggatcgtcggtaaatacgggacccgctatggggcctccctccgg

SEQ ID NO: 29630 - DNA, 90 bp, Homo sapiens
tgactggccagatggttcttacccaacgtttgatggctcatcaaactgcaattgaacttgaagatgatttacttggagaagatttgctat

SEQ ID NO: 29631 - DNA, 73 bp, Homo sapiens
gatcccaaagccaaggagaagttctcccagctggcagaagcctatgaggtggcttctggcacagcagcttaat

SEQ ID NO: 29632 - DNA, 95 bp, Homo sapiens
ctgtcaaagttgtgtcagtgaatacaaacaggatgatcctcatactaacttagtaactgaagctataaaaaatgatcacctcaggcaaatggaac

SEQ ID NO: 29633 - DNA, 80 bp, Homo sapiens
gagaactgtctcctggtgaccgagcacccgcctccgggcatcttcaactgtgacttaagagattaaaattaatttggttg

SEQ ID NO: 29634 - DNA, 100 bp, Homo sapiens
gcggtgtgaagaagaaagcagcaaaacgaccactgaaaacaacgccgaggagaaggcagagcccccccaggctatgaatgccctgatgcggttgaaccag

SEQ ID NO: 29635 - DNA, 109 bp, Homo sapiens
ccggtgtgcctcggcagccttgcgctgctctaatggtccggacttccgtgtacaatgcagatcttcgtgaagactctgactggtaagaccatcaccctcgaggttgagc

SEQ ID NO: 29636 - DNA, 90 bp, Homo sapiens
acgagatggtggaggaggcggtggaaggattaccttgactgcatcagggaccaaacaaaacttcccctggggaccgaagaaagatcagcc

SEQ ID NO: 29637 - DNA, 82 bp, Homo sapiens
gtgaagatcttccgatatggataccctgttcgcctttccttctcggatttcctgtcaaggtcatttcatgggcaacaacaca

SEQ ID NO: 29638 - DNA, 98 bp, Homo sapiens
ccatggcctccgtctgccacacgctgatggtgcagcaccgcatgatggtacccaaagtcaggcgccaagcccatctttgtgtgcttgcatccaactgt

SEQ ID NO: 29639 - DNA, 90 bp, Homo sapiens
cacaatgtaaagcctgaatacctggatgcctacaacagcctcacgtatgagagtgtgattgccacactgtgtgagaatctggactccctg

SEQ ID NO: 29640 - DNA, 109 bp, Homo sapiens
agacaaaggcacagctggatgaatggaaagcaaagaagaaagcttctaatgggacctaatctgggagcctgcaagtgacaacagcctttgcggtccttagacagcttgg

SEQ ID NO: 29641 - DNA, 83 bp, Homo sapiens
gagaaaccaaccaaagccttgcccaggaagtccagagaccccctgctctctcagcgatagagccacgaaccccctgaacaagg

SEQ ID NO: 29642 - DNA, 100 bp, Homo sapiens
gtccacgggctctccttgcatcaggtaggggctttgcagagaccatcgacgggctgacttgagtgacctaaagaattaatgaccattcagaaataaagca

SEQ ID NO: 29643 - DNA, 90 bp, Homo sapiens
gcgacgcgcaccaacggtggaggtgttccccccacactggggctcccactactgcgaggagtgacccacgaaggccacagagatggccgg

SEQ ID NO: 29644 - DNA, 80 bp, Homo sapiens
ccgagagcgcgaatatcgtcatcgttagaaggtggcacaagaatggctcaactctccaaatagagagaatttctatcagt

SEQ ID NO: 29645 - DNA, 82 bp, Homo sapiens
catgacgtccgctttggagaactacatcaaccggcttggcaactcttgtgaaatttcatagatctcgtcgcttactgggagt

SEQ ID NO: 29646 - DNA, 127 bp, Homo sapiens
acgggcacgctgactggaggctggcggacaggcgacagcgacctgcggcagtgcctggatcaaagtggaacagctgaagccatatcatgctcataaagaggaaatgataaaaattaacaagggtaaa

SEQ ID NO: 29647 - DNA, 80 bp, Homo sapiens
cttctttcttcagccgaggccgccgccgcctctccttgctgcagccatggagatgcggtgacggtgctcctggccagaac

SEQ ID NO: 29648 - DNA, 101 bp, Homo sapiens
gagagtggaagagcattttgttggatatggctactcgtccagcagggaattacatgaatgacagtcttcgaaccaatgtgtttgttcgatttcaaccagag

SEQ ID NO: 29649 - DNA, 75 bp, Homo sapiens
cagcagcagcaccaccggacgcccgagcgggaagaagttccgcagcaagccgcagctggcgcgctacctgggcgg

SEQ ID NO: 29650 - DNA, 101 bp, Homo sapiens
ctgctgcaggcagccctgctctgcgtcaacgccatcgcagtgctgcacgaggagcgattcctcaagaacatgtgtgatccagtcttgggtgacaagtggga

SEQ ID NO: 29651 - DNA, 100 bp, Homo sapiens
aagcaggcgaacccgcggcgcaataacgtttctctgtttgaagaacataaggacatttctcacggcctgttgtgagacgtttggaatgaggaaaagtgaa

SEQ ID NO: 29652 - DNA, 98 bp, Homo sapiens
gaacggcggcgacaagggtgttcccgaactagagtggtttgcaatggattttggataaacaagatctgttgaaggagcgccaaaaggatttaaagttt

SEQ ID NO: 29653 - DNA, 100 bp, Homo sapiens
ctctatgatctctatgtgtcatgtagccacctcagaagtaaatttggagacctcttcagcccctcatatggaaaatttgaaatgcagaggggaaacagta

SEQ ID NO: 29654 - DNA, 100 bp, Homo sapiens
ggtggatctgacagatgccagcgtagctgaatccagtaccaaaaacgtcaacaacagttttacgtttggaaattttagcattcaggtgccaggaatgcag

SEQ ID NO: 29655 - DNA, 96 bp, Homo sapiens
ctcaatttgaagctccttctccatcacacaggagagtgggcgctccctttctcttcctggaagatcagtcccaccccccatttctacatctccttg

SEQ ID NO: 29656 - DNA, 100 bp, Homo sapiens
cagccgcatcttctggcggaccgtgcgaggccaaacgtaccaagaaagtcgggatcgtcggtaaatacgggacccgctatggggcctccctccggaaaat

SEQ ID NO: 29657 - DNA, 152 bp, Homo sapiens
cccaacctctcgcacacgggccgcggcatcctcagcatggccaactccgggcccaacagcaacaggtctcaattgcaaggatatcctgaaggatactatagttccaaaagtggatggagcagtcagagcgattactatgcaagctattactc

SEQ ID NO: 29658 - DNA, 75 bp, Homo sapiens
tagaccccagtggccctgcagccgcagcaggaatgaaggttaattatagaaaatgccaagtaggaaatttgccga

SEQ ID NO: 29659 - DNA, 75 bp, Homo sapiens
gctggctgaagatggctactctggagttgagctcgcaaaggatctccttcatccctctccagaagaggagaagag

SEQ ID NO: 29660 - DNA, 105 bp, Homo sapiens
ctctgcagccacatactatccgtttgttcaggaaccaccagtgacagagagtgaagtgcaaccagtggtctgaggaggcttctatggtgtttcgaaatcatgtgg

SEQ ID NO: 29661 - DNA, 100 bp, Homo sapiens
gagagctcagctgttgcccggcgcgtccgcgggcggctcggcggccggcggggctggggagcctcccggtgctggagaatctggtaaaagcaccattgtg

SEQ ID NO: 29662 - DNA, 75 bp, Homo sapiens
atttgctaaacttaaaagcaagctggttctctgggatataaataagggcaagtgtccagagaatggctgggatga

SEQ ID NO: 29663 - DNA, 150 bp, Homo sapiens
ttgagggggactggcctggcgtgcactccgcacctcggggacattattgcgcgtggaacggctgcttttggaagactcactgccacaacgacattgtcaaccttctcctggactgtggggccgacgtgaacaagtgctcagatgagggtc

SEQ ID NO: 29664 - DNA, 111 bp, Homo sapiens
gggtgagaggcatcctgactttggccatgattgcatttttcttcatcatcatttacctgggaccaatggttttgatgataatcgagcttctaagtaggacatccttagaaa

SEQ ID NO: 29665 - DNA, 100 bp, Homo sapiens
agaccgcaggaaggactggggccacgtggagctgctggaggccgactccacgggaacccactccctctacacgatgtaccaggactacgagatcatgttc

SEQ ID NO: 29666 - DNA, 90 bp, Homo sapiens
aggaaatcgcctcccgagaagaagttgaggcgctattaccaaaagaattggtggagctccatttgaagctgatgaggaaaattggcaaat

SEQ ID NO: 29667 - DNA, 75 bp, Homo sapiens
atgtagatttaccagaagtagatggagcagatgataatcctggttttgacttcagtggagcagaaatctcaggaa

SEQ ID NO: 29668 - DNA, 75 bp, Homo sapiens
tcaaggatgtcatatctatgagtaccgcgagagcaacaagatgaagcctgctgggagcgtgaatgacatggccct

SEQ ID NO: 29669 - DNA, 80 bp, Homo sapiens
agcttgcaagggttggaactgctgattatggaagtccctcggatcagcagtgattccagcagtagttcaagtgatgattc

SEQ ID NO: 29670 - DNA, 100 bp, Homo sapiens
tacctgcctccttcagcccactagtagtgcgctggtaaatgctacggaatgggactattagaagacacattagtgcagaagcttccaggctgtagagccc

SEQ ID NO: 29671 - DNA, 83 bp, Homo sapiens
taacatgcagatcgacttggtggaagcacacagtgtgggcaagagcagtttactgttgcgttttgcagacaacactttctcag

SEQ ID NO: 29672 - DNA, 75 bp, Homo sapiens
agatacaaacttggattttttccagtctgatccttttgttggcagggttgctgtggcactgaagcaagctatgac

SEQ ID NO: 29673 - DNA, 110 bp, Homo sapiens
ctcaattctgaatgctgccatcatgatcagtgtcattgttgtcatgactatcctcctggtggttctgtataaatacaggtgctataaggctttcgggtcacctccagcag

SEQ ID NO: 29674 - DNA, 80 bp, Homo sapiens
gatgcttttcagcagacattgattatctgtcccccagctattcaagcactgccagtgaaagatgtagaagataaacctga

SEQ ID NO: 29675 - DNA, 100 bp, Homo sapiens
gactgaagcacctgttgtgcaatctgaagaagctctggtgaaatgacaatggatgctctgttggctcgattgaaacttctgaatccagatgaccttagag

SEQ ID NO: 29676 - DNA, 83 bp, Homo sapiens
cgtctttccgtcctctgaggcgacggccgcggctgcacaggtgacagagctgaatgaacctctctccaatgaagatcgaaatc

SEQ ID NO: 29677 - DNA, 100 bp, Homo sapiens
atggtcaacattgatggaaaacaaatcaaactgcaaatctgggatacgaaatttctgaataaattggcagaagaacgcagacagaagaaggaaacttaag

SEQ ID NO: 29678 - DNA, 100 bp, Homo sapiens
tcttctccagacagtgaacaaaggcagtctgttgaggcatctggacaccacacacatcatcagtctggactgttgggaaagatcctgatggctatccgag

SEQ ID NO: 29679 - DNA, 101 bp, Homo sapiens
ctatccttacccgacctcagatgctcccttctgctcctggacccagatgatgtggtaccagttggccaaagaagagcctggtgttggtgcatgtgctttgg

SEQ ID NO: 29680 - DNA, 93 bp, Homo sapiens
cagccttgggcctcgcgccggctatggccgtgccctggggctgagccctcaggaagctcttcgtgggcggtcttgactggagcacgacccaag

SEQ ID NO: 29681 - DNA, 100 bp, Homo sapiens
ggtgtgcaaacccgagagaactggtctctgctggatgaaccgaatcctaacagtccagccaatagccaggcagcacagctttatcaggaaaacaaacgag

SEQ ID NO: 29682 - DNA, 75 bp, Homo sapiens
ctgagctctatctcagtgtacacgagatgagcttcctagagcaagaaaacagcagctcatggccatcaccagctg

SEQ ID NO: 29683 - DNA, 74 bp, Homo sapiens
gacatttaattttagggtcctttatatagaagggagagtagtggtagacggaggagaagtccatccccaccacc

SEQ ID NO: 29684 - DNA, 100 bp, Homo sapiens
gccacctcgagctgcggtagcagcgactcatgagagcgcggccggaggacaggagcggcctattgccaattcatggacatgctcttccctggctgcatta

SEQ ID NO: 29685 - DNA, 90 bp, Homo sapiens
gggatgtccacatgctcctggtggatctggagctgctgctgggcatagccaagtgctacaaggtgagctgcctggaaatccctgggccct

SEQ ID NO: 29686 - DNA, 99 bp, Homo sapiens
tggggaccagtgaagtacttgcggcctgtacccagaatcatgaagtttagcaactgcaatggaaaaagaaaagtacaatatgagagcagtgagcctgca

SEQ ID NO: 29687 - DNA, 75 bp, Homo sapiens
tgctggcgctctggctgtgctgcgcgacccccgcgcatggctgcctgctgtttcccggggagatcatgaaacgag

SEQ ID NO: 29688 - DNA, 100 bp, Homo sapiens
ctggatgacaacagactctccaaccccagttgctttgccagcctggctgggctcaggagagtcacctgatatgaaaaaggagcaagacccccctgccaag

SEQ ID NO: 29689 - DNA, 51 bp, Homo sapiens
cgaagtgttgtgtaaaggctaccctttggaaattgatgacttgaaaaaaat

SEQ ID NO: 29690 - DNA, 98 bp, Homo sapiens
agaaaaagagcaaagataagaagagaaaaagagaagatgaagaaacccagcttgatatgttggtgggcagtgtcaaaccgggaaatgcttatagctca

SEQ ID NO: 29691 - DNA, 51 bp, Homo sapiens
catccactatttcctccccagaagaaggcaatgatacaatttgaatggcac

SEQ ID NO: 29692 - DNA, 75 bp, Homo sapiens
gatgacaatggccacaatgctcttcttggttgacatcatggacatatgtgagtccatcctggagaggaagcggca

SEQ ID NO: 29693 - DNA, 83 bp, Homo sapiens
cgcgtctcggaaaccggtagcgcttgcagcatggactgggaggtgctggtcctagggaagctcaagtgggacctggctgctgt

SEQ ID NO: 29694 - DNA, 100 bp, Homo sapiens
ggatagctggccttggtggaggatttgaaataggaattgaggggtgagcccctccagactccgaataggagatcaagagtttgattcattgcctgcttta

SEQ ID NO: 29695 - DNA, 82 bp, Homo sapiens
ctggtgtcacctatcagtaaaagggaaactatgttcaagaaagcaaaaacaaaagctaaaaagaagccacgtaaacgttcag

SEQ ID NO: 29696 - DNA, 100 bp, Homo sapiens
agcgctatgcctgcggcggagactgcatcaggctctcggactgggccggggtctgcagggctcagctgagcccatgagctcccagagctaacccctgaac

SEQ ID NO: 29697 - DNA, 75 bp, Homo sapiens
cgggagacctaaccgccgaatgcgttcggaggtttggtgcacctcgatttggaggaagtagggcagggcccttat

SEQ ID NO: 29698 - DNA, 100 bp, Homo sapiens
caccagagttgggacggcagccctcagtgcctgccatggactgtttagacactctgcaatatcaccaaaaagttcgctgcatagaaaatcaagaagtaag

SEQ ID NO: 29699 - DNA, 82 bp, Homo sapiens
gaagtaggccgtctcgctctgggtctccaggcccgcgaccgtccgccagtcgtcccgagtaagactttgaccccgacgcagg

SEQ ID NO: 29700 - DNA, 95 bp, Homo sapiens
accttcacggccactggccagaggtacttcctcaaccctccttacagcctagaaaaaatgacagatctcgtagctgtttgggatgttgctttaag

SEQ ID NO: 29701 - DNA, 74 bp, Homo sapiens
caatgccatgatgcctggtgccccattacaacccgtgaagaagaagaggacagtgctccagtgaaagtggaaga

SEQ ID NO: 29702 - DNA, 83 bp, Homo sapiens
cttcagcgggccaggaagcgcatccaggagacacagaatgttcagcttaacaaagaaatgacacttgccagcaaccggagcct

SEQ ID NO: 29703 - DNA, 100 bp, Homo sapiens
agcggaggagcctggcggccaccccctcttcctcacttccctgtactctcatcgctctcggcctccgacacgctcaccatctgctacctggatatgctga

SEQ ID NO: 29704 - DNA, 100 bp, Homo sapiens
cccagcagaatttgtatagagatgtgatgttggagaactacagaaacctggtctccctagaatctgatgttccagcagaaatccaggtgttaaaagaacc

SEQ ID NO: 29705 - DNA, 82 bp, Homo sapiens
gggggagcccagcccagccagcctccaggacaagatcgcagaggaaggtgggcggcgggagtgcccagccgtgtgacagcat

SEQ ID NO: 29706 - DNA, 100 bp, Homo sapiens
tgggcttgtccaacacagtgatgcggctcatcgagaagcgggctttccaggacaagtactttatgatagggacaggagagagtggcaagagtacgtttat

SEQ ID NO: 29707 - DNA, 90 bp, Homo sapiens
cacactcgcctcccctcggcacccccggccccggagctgcctggaggcggccgcactcggacagacctcggctgcccgacaactacacgc

SEQ ID NO: 29708 - DNA, 100 bp, Homo sapiens
aggacggaggctgcatgcccgaggaccaggccggcgcagccatgtaactctgggtggattttaactacaactcttgtcctctcggtgatggtattgcttt

SEQ ID NO: 29709 - DNA, 82 bp, Homo sapiens
caagaaaccaacattcccaacagccaccaccaccaccagatgtgccctctggtggtcagaagatgctgtgctgtctcgttag

SEQ ID NO: 29710 - DNA, 113 bp, Homo sapiens
ctgggtgggcttggccatggtcagcgtgaacgcgcccctcggggctccagtggagagttcttacggttggaaaagagactgttcaaaccactgaggatcagattttgaagaga

SEQ ID NO: 29711 - DNA, 99 bp, Homo sapiens
ctcgctggcggaaggctacatgcggttagatgacagtgggattggaaatgagtggcttatactctcctgtcagtgaggatagcacagtgcctcaatttg

SEQ ID NO: 29712 - DNA, 82 bp, Homo sapiens
cgtggccaagcaggacacggtgcgcgtggccttctgctccggaaagcggagggaaaggccacttccaccactgagctgcccc

SEQ ID NO: 29713 - DNA, 74 bp, Homo sapiens
cagttcagtatcgctacttcaaagggtactttttagaaccaaaggagcatttcctccctctgctatttatacac

SEQ ID NO: 29714 - DNA, 83 bp, Homo sapiens
aagtttgtattgccaagtacactgttgatcagagcccccctccatgcgcctgaaggcccgacccagcagccctggcttttccg

SEQ ID NO: 29715 - DNA, 100 bp, Homo sapiens
gatgaaggtcctgaacgagctctactcgataatttgcggtaaaagcctttcagtgaatgaaatgactcttagcactttgaaagaaaaaggctacaaagct

SEQ ID NO: 29716 - DNA, 97 bp, Homo sapiens
aattggaccaagagaacaatgggaaccagtctttcaaaatgcagtggccattcaccaccgagtagcagtctcacttctccaagccacgtgaacttgt

SEQ ID NO: 29717 - DNA, 82 bp, Homo sapiens
tcccttctaccatagcacccccaccactggagcctggcaggaggtctggcgggaacagaggaatcagagatcattgatttct

SEQ ID NO: 29718 - DNA, 85 bp, Homo sapiens
gacatcgcggcttctctggcgttggccagtcagccacaggctgcctgataggggctgtaaatctcaaatccagcaatcgaacccc

SEQ ID NO: 29719 - DNA, 95 bp, Homo sapiens
cgcagcgacatcaccaagctggaggtggacgccatcgtcaacgccggttcttctgtgtggcagttcagaatgatggatcaagctagatcagcatt

SEQ ID NO: 29720 - DNA, 83 bp, Homo sapiens
cagaagaaactcaactggtgtcgagaagtccggaagcttgtggcgctgaaaacgaacgaacatgaaaggctcccggagcagcg

SEQ ID NO: 29721 - DNA, 100 bp, Homo sapiens
cgactgagtactcaacatattgactgtatttgggctgcagcacagggcatggtgctgatgtgaaatgtgtagactggcatccaaccaaagggttagttgt

SEQ ID NO: 29722 - DNA, 100 bp, Homo sapiens
gaaatgcacaagcaactttttgagtccggaaaaacagtcacaatatggagcttccgtttctgccaagcctgaactacccctcttttacactcctattgat

SEQ ID NO: 29723 - DNA, 100 bp, Homo sapiens
cccagagctagactacaccctcatgagggtctgcaagcagatgataaagaatctaggtcaacctattaagatacgtttccaggaatctgaagaacgacca

SEQ ID NO: 29724 - DNA, 95 bp, Homo sapiens
acatgggcagaggggaagagagtacaactacaaattacttaatcaccggcgtaatcaacccagcgttggacaaatactttccgtcagactctgga

SEQ ID NO: 29725 - DNA, 140 bp, Homo sapiens
cgccgcctcttccgccgccgggctcggggcctccgcagcgacaacatggaggccgtgaagaccttcaatagcgaggtgaagagcgattatatgttagagatagctgatcaagtggaccaggaaattgctttgaagttggg

SEQ ID NO: 29726 - DNA, 100 bp, Homo sapiens
aagggaaccaacccactttctcggcgccgcggctcttttctaaaagtcgatgaagaacgatacagatacagggaatatgcagaaagaggttatgagcgtc

SEQ ID NO: 29727 - DNA, 98 bp, Homo sapiens
ttgcagaagtaccacaacagggacacctggttccagctgcagcacgtggacgctgactcggaagtgcaggatgtagctgagctgattcgggccagagc

SEQ ID NO: 29728 - DNA, 75 bp, Homo sapiens
cgttgcctgctcccggagggagacgcgctgccgaggagaacccagcggggatgccaaggcctgcgtagtacacgg

SEQ ID NO: 29729 - DNA, 90 bp, Homo sapiens
aggaccccaagcagcggatcatcccctttctgccagcccagtgagtgcaaaaacaaaacctttaggatcaagagatgttttgccaaataa

SEQ ID NO: 29730 - DNA, 96 bp, Homo sapiens
gaggccggggggcggccaggggccgactgtgaaggcaccaacgtgtacatcacaagggcgcagctgatgaactgccacgtcagcgcaggcacgcgg

SEQ ID NO: 29731 - DNA, 98 bp, Homo sapiens
ccgagccgagcctcccgccgtcgccatgggccagaacgacctgatgggcacggccgaggacttcgccgaccagaacatacggtccctaatgagcacag

SEQ ID NO: 29732 - DNA, 99 bp, Homo sapiens
gaagtggtgaagccgtcttttgtacagcctcgtgttgttcgtccacaaggagaatttcctgttgagatataaaggcccatctgatcactggattgggct

SEQ ID NO: 29733 - DNA, 51 bp, Homo sapiens
ggacgtggtagtttattactgagtaacaatgatgatgttatgttgatttct

SEQ ID NO: 29734 - DNA, 97 bp, Homo sapiens
tgaagggcaccatcgacccgaagttgcggattgcagccgagaacgagctcaaccagggggcgacgatggccttctgaggggctgggacaccagggta

SEQ ID NO: 29735 - DNA, 74 bp, Homo sapiens
aaaaagagggttgtccccaaaaagcctcccccatcaccccaacctacaggccctcgggaccaaggatcacgtca

SEQ ID NO: 29736 - DNA, 83 bp, Homo sapiens
ctcttagcagcgcgcggagaagaacggggagccagtgatcaacaaatacaagcgcagacgatttcagaaaaccaagaacctgc

SEQ ID NO: 29737 - DNA, 75 bp, Homo sapiens
gagcgagagcgcgaaggaaatctggccgccgccgccgcgagcgctcccgtaccttccactggaagaatctcaaac

SEQ ID NO: 29738 - DNA, 83 bp, Homo sapiens
tggacgtctggggcaaagggaccacggtcaccgtctcctcagatacctgaaaaaagcggcagtctgcaacccagaagagggcc

SEQ ID NO: 29739 - DNA, 100 bp, Homo sapiens
tccttccaagggagccatggccgagcctacctgtttaactccgtccgcttacaaacacgcagatggcaagaagattgatggcaggagggtccttgtggac

SEQ ID NO: 29740 - DNA, 75 bp, Homo sapiens
gtggagtgttctgcacttacacagaataacaagcctttgtattcatttgaagataatgcagactatgtttatgat

SEQ ID NO: 29741 - DNA, 100 bp, Homo sapiens
agaagatggatgtgggtggcttatccggtgactgcttagaaaactgcacagcatctgatgaaattagcgaataagaacatcaaccatgtcttacactcca

SEQ ID NO: 29742 - DNA, 100 bp, Homo sapiens
cgggatgaagctgccaggcatggagtacgttgacggggactttcagtgccacaccttcgacagcagcaacgtaataatagacgtggatggaatacaacta

SEQ ID NO: 29743 - DNA, 50 bp, Homo sapiens
cagatgtctttaactgccaagcaccagggccgttgctccagggagaactg

SEQ ID NO: 29744 - DNA, 100 bp, Homo sapiens
aattaccattttatgatttactggatgaactgataaaacccaccagtctagggatcatagacggtatttctatgtaaacgaacagtcgggcgagtctcag

SEQ ID NO: 29745 - DNA, 75 bp, Homo sapiens
ccggctctggaaaatccgcaagaccatcatgcaggcaacatgagtgagaatgaggaagaggaaatttctcagcaa

SEQ ID NO: 29746 - DNA, 74 bp, Homo sapiens
cccaagagcagcggaaaatgatccagtcacaggctcaggcagctgtccaaggacctgttggtacagatttcaaa

SEQ ID NO: 29747 - DNA, 138 bp, Homo sapiens
ctactccacattattttgccttaattgatcaactaattgaaggacatcagtggctggaaaataatatagagcaatatactttgctgcttattcaaactgcaaggaaaagttgaatgatgtatttgatcctgattctac

SEQ ID NO: 29748 - DNA, 82 bp, Homo sapiens
cgctgcccgacgagcaggacttcatccaggcctacgaggaggtgcgcgagaagtacaaagatagcctgggctggaagctctt

SEQ ID NO: 29749 - DNA, 51 bp, Homo sapiens
cttacctctttgatctcgacaataaggcggccgcccgccttggcccgtctc

SEQ ID NO: 29750 - DNA, 98 bp, Homo sapiens
cgggcagtgctttccccaagtagtccgatggctgcggctgcgccgaggcgccctactcagagtccagcaagctaaaagtacagaaggtggagccctgg

SEQ ID NO: 29751 - DNA, 90 bp, Homo sapiens
aaacgctacgtgagctgggccctgggccagaggcagaaaacggacggaagaaaaggtctggccggcggctgagccagaggccaactgcag

SEQ ID NO: 29752 - DNA, 100 bp, Homo sapiens
cgtcggcccctgcgccggcctcggccaccgagatcctgctgacgccggctaggggtgtcaaattgagaaccaggtagatccccaccacctacagtaaaaa

SEQ ID NO: 29753 - DNA, 78 bp, Homo sapiens
aagatctgtctcctattggaacatctctggtatgcaggtgccttgagagcttcaggggaaatggcttcagcgcagtat

SEQ ID NO: 29754 - DNA, 75 bp, Homo sapiens
ggaaagtgatccaccttacatggaaatgaagaaacgttcctggatccgaacactgccccctgacgacctagagag

SEQ ID NO: 29755 - DNA, 88 bp, Homo sapiens
gatcatgtctgcgagccaggattcccggcttgggcactgtttaaaggaaagttccgagaaggcatcgacaagccggaccctcccacct

SEQ ID NO: 29756 - DNA, 83 bp, Homo sapiens
aggacgaggaggcagccacggggcccctggggagcatcgagtacagctgtccggcctccaacgagtgtgagatcaccaagcgg

SEQ ID NO: 29757 - DNA, 89 bp, Homo sapiens
tggcgctctggctgtgctgcgcgacccccgcgcatgcatgatgccttcttctgtagagtgggcgctttgcagaatacgtgttgaatgaa

SEQ ID NO: 29758 - DNA, 90 bp, Homo sapiens
gtgctgcctggtgcagaggatcctggaggcctgggaagccaacgaccacacgcagatcatccagcagctcgtcaacggcatcatcacgcc

SEQ ID NO: 29759 - DNA, 82 bp, Homo sapiens
tgtaacagctgaagtgtcttcaatgcctgcttacacttggcatttcacctgaagaaaaatttgttattacaacaacaagtag

SEQ ID NO: 29760 - DNA, 100 bp, Homo sapiens
gagcgaaccgcaccggcccgagcggagcgccgcacgttcccaaccgcgaggccaggaagcaatgaggctccccaagaacacacctgaggaaaaggacagg

SEQ ID NO: 29761 - DNA, 90 bp, Homo sapiens
gcggaaatctggaaccgggatggcgacgtctacactgagtcggaggcgaagagtgcctggtgaagaatgtgatgggatcactagcatgtc

SEQ ID NO: 29762 - DNA, 100 bp, Homo sapiens
gtctctgtggaggactgaggttttcaagtgaaagaggagctatgaagacatgattggtgaggaggtgccatcggatcaatactactgggctcctttggcc

SEQ ID NO: 29763 - DNA, 95 bp, Homo sapiens
ggcagtcccgggagaacctgcggcggccggagcgaaatcatgaccaccccaggaaaagagaactttcgcctgaaaagttacaagaacaaatctct

SEQ ID NO: 29764 - DNA, 87 bp, Homo sapiens
ataacaccattttcatattatactgggattatggaggggaaagcctcctgaagctgatggtgtggatagatcatttggcgagaaacg

SEQ ID NO: 29765 - DNA, 90 bp, Homo sapiens
ctggaggaatgtcagcaccagaccaaagctagagccggtgcaggccacgcagaacaagacagggaagtatgtgccgccgagcctgcgcga

SEQ ID NO: 29766 - DNA, 100 bp, Homo sapiens
gtgctcagttctggaatgccacttttgccaaagtgatgatgttggtttatcctgaagagttaaaggtaattgggatacttctggcagcgaactgagtgaa

SEQ ID NO: 29767 - DNA, 50 bp, Homo sapiens
gggaagttcctttttgaagtagttccagggacttcattgatggaaatgtt

SEQ ID NO: 29768 - DNA, 50 bp, Homo sapiens
aaagagaaagcatccaagctttcaccaccctgggccctgtggaacttgcc

SEQ ID NO: 29769 - DNA, 100 bp, Homo sapiens
tggaacatctagccgaattggtagctctatgaaaagtgtaggagagggtggagagattcaaccagttagcgtgaaagttggagataaagttcttctccca

SEQ ID NO: 29770 - DNA, 88 bp, Homo sapiens
ttcatctacaacccgcgcttctggccgcgggaaggagagaaggagaacttatggattgtgatggaaaatcagaatctagtcctgagcg

SEQ ID NO: 29771 - DNA, 80 bp, Homo sapiens
ccctttgaattaattatggctgagaaaagccttacagatgctcatgggaagggtgtgagtggcgttttgcaagaagtgat

SEQ ID NO: 29772 - DNA, 75 bp, Homo sapiens
tcccagtattacaaccacttctgcagtcctggccaagtggaagaactggccagagagtctggaagtttgggttct

SEQ ID NO: 29773 - DNA, 75 bp, Homo sapiens
gtcctgtcctcttctgaccaaagagtggatcacacaataataatgtacttgattggaccagatggtgagtttcta

SEQ ID NO: 29774 - DNA, 87 bp, Homo sapiens
aagcggtgccatgaatttgtcacattctcctgccctggcgctgacaagggtccagcctccgatttgatattcactgatggactccaa

SEQ ID NO: 29775 - DNA, 96 bp, Homo sapiens
gacgggtctggagtgcgtgggggaccggctgttggcggcctgggctggaagctcttctacgtcacaggctgcctgtttgtggctgtgcagaacttg

SEQ ID NO: 29776 - DNA, 100 bp, Homo sapiens
ccaaacgagtggctgaaactgcctacaagatacatagaaagtgaattttgtagaaggagaaggtgtcaacaggtgcctataagcgccaggtgcatgaggt

SEQ ID NO: 29777 - DNA, 74 bp, Homo sapiens
ctgaaaatgcactcggatgccgccgctagtcatcttagtgggatttggggaagcaacagggctgtgtggggtaa

SEQ ID NO: 29778 - DNA, 100 bp, Homo sapiens
gcccatcctgcttgcccagactccaatctgtgactgcttgggctttgatgtggaagatgtgaaatttgtcatcaattatgactaccctaactcctcagag

SEQ ID NO: 29779 - DNA, 100 bp, Homo sapiens
gcttctttgtctggagttgaaagccagatcaccaccttctgcatccgtacccttccgaagagcagaagaaacagttagcgcaagacacaggacttacaat

SEQ ID NO: 29780 - DNA, 50 bp, Homo sapiens
aaaaatcaccagttactttaatgaagtgcctggaagagctgggatgtctg

SEQ ID NO: 29781 - DNA, 154 bp, Homo sapiens
actattattatccccattttacagatgaggaatctgatgctcagagggttatgtagtttgttcaagttcccaaagcagagttcgaggaagggctgctggacagatgtcctgccccaggaccccatcccgcgctggtggagggtcgcaggagcag

SEQ ID NO: 29782 - DNA, 75 bp, Homo sapiens
acagaggctgttccctatggcaggacatgactacagagctggaggcatttgcacaccgcccagagcacaagacct

SEQ ID NO: 29783 - DNA, 100 bp, Homo sapiens
ctggagctcttcgacccacccaaggcatcagtgtttttctgaccgaagttctcatttcctgacaatggaaatggaacaagaaaaaatgaccatgaataag

SEQ ID NO: 29784 - DNA, 100 bp, Homo sapiens
ggcggacggtctaggcggggctggaggcggtggctgcggttgcgggaccgctgcatatctatgtgagactgaattttcctcttagacttcagctaaaact

SEQ ID NO: 29785 - DNA, 100 bp, Homo sapiens
gccggggacctgcatgtgtgtgcgcgcgaaggagcggaagaatggcagtgctcaaactcaccgaccaggtggaataacactcccatggatgaagcactgc

SEQ ID NO: 29786 - DNA, 98 bp, Homo sapiens
ccagcagaggtcttcacactttcagtaccaaatatttcactcccagctccctcgcaattccagccttctgtaggtttaagggaaaccacaggctccga

SEQ ID NO: 29787 - DNA, 98 bp, Homo sapiens
acagtaaggccaaaaatgtgcatactcacagagttagagagagggatggtgatgggtgagtcaagtgaagacatagaccaaatgttcagcactttgct

SEQ ID NO: 29788 - DNA, 101 bp, Homo sapiens
gttgcgcgctgggattgttgcggtgcgctggagccgatctttaatctcatgaagtacgacagctacagccgcttcttaaagtctgacttgtttttaaaaca

SEQ ID NO: 29789 - DNA, 75 bp, Homo sapiens
cgcccctgctaacgggaatgctgtatctcaggagattacatttcagcttgaaaaagggtcggtggaatttaaaag

SEQ ID NO: 29790 - DNA, 100 bp, Homo sapiens
agaaatgaagaattggaggaacagtgtgtccagcatgggagagtacatgagacgatgaagcaaaggaccctggttaggagtagaatgggacaatcccgag

SEQ ID NO: 29791 - DNA, 88 bp, Homo sapiens
aactacctgtacaacgtgctggagagaccccgcggctgggcgttcatctaccacgctttcgtgtaattccagtggagaagctagtgaa

SEQ ID NO: 29792 - DNA, 87 bp, Homo sapiens
tattcagttgcacatccccacatcaatgcactgccaatgtagccggatcgagctgggagatgtgacaccacacaatattaaacagtt

SEQ ID NO: 29793 - DNA, 80 bp, Homo sapiens
cagccggctgcaggccagagagggcctcgggaagagatgcgaggatgacaagctttcagagtccactgctgaatcccact

SEQ ID NO: 29794 - DNA, 89 bp, Homo sapiens
gggaattccacctctgcgtttttccctccagacataacagctgggagccggaggagaacatcctggacccgaggctgctcctggccttc

SEQ ID NO: 29795 - DNA, 88 bp, Homo sapiens
aaactggtgcagaagagagacttcctggtggacgatgcggaggtcgagcggttaagcctggaagctccgaccccaggagccagcccat

SEQ ID NO: 29796 - DNA, 100 bp, Homo sapiens
gtacctgtacctttcagctgcgccggccgcgaggccacggagagctcgccttggagagcccaggagcaggggagacatgtcctggtatctgggatagcaa

SEQ ID NO: 29797 - DNA, 75 bp, Homo sapiens
tggaagcagaagaagctgaggatgaagaagatggactctcgttggggagatagagattcagaaggcacctggaga

SEQ ID NO: 29798 - DNA, 137 bp, Homo sapiens
tttggacgtaactgatcaattgaatatggacccaagagtcagcggtatattagttcagttaccactaccagctgacttccctacacctagtatatctgactttgaaattccaacttctaatattagaaggataattt

SEQ ID NO: 29799 - DNA, 75 bp, Homo sapiens
cctgtacagcctgcagaactcaaattgtggctactaatttgccccctgaagatcaagatggctctggggatgact

SEQ ID NO: 29800 - DNA, 82 bp, Homo sapiens
gtgagtcttctggcaaacagtgtttgcctctggttcagctcatacaacagcttcttagaagcagctgtgcccccatgggttg

SEQ ID NO: 29801 - DNA, 83 bp, Homo sapiens
actgtagcgccaaaaaggaaggatgacagatttgaagatctggaagaggcaaatccattctcttttagagagtttctgaagac

SEQ ID NO: 29802 - DNA, 83 bp, Homo sapiens
cacagagccgcgggccctttgcagctgcgattttcgccctacgttttcaacggagggtcgggaaagaggttaaagaagacacg

SEQ ID NO: 29803 - DNA, 101 bp, Homo sapiens
cacggctccatcatcacccaggcgcggagggaagacgccctggtgctcaccaagcaagaaatgcccggcgaagccacagaaaccgtccctgctacagagca

SEQ ID NO: 29804 - DNA, 101 bp, Homo sapiens
cttggtccagaacatccactagcctcactaaagctatggaggttctgatgtcacttctggaaaagagctgagtgacagctgtgaaggcgcctttggagggg

SEQ ID NO: 29805 - DNA, 99 bp, Homo sapiens
tgaagctaatcctggcgttccaccagcaaccatgagtggttccatgatgggaagtgacatggcagccatgttgttcagttctggagtcttttggatggg

SEQ ID NO: 29806 - DNA, 100 bp, Homo sapiens
cgaatatcgtcatcgttagaagggacctgatgcccagaaccctggacgggcagatcaccatggagaagacgcccagttacttcgtcacgcgggaggcccc

SEQ ID NO: 29807 - DNA, 123 bp, Homo sapiens
atgtatggctctgccgtgccacctgctgcacccacgaatctgcccacccctcctgtaacccagcctgtttcacttcttgaactgataaatttcaaacggaagagagtggcagcatttagaaag

SEQ ID NO: 29808 - DNA, 74 bp, Homo sapiens
gccattcggtttttggttgggacgcagtctcttaaatatgataatcagtttttcagaagaagtgaagtcaagat

SEQ ID NO: 29809 - DNA, 51 bp, Homo sapiens
ggatccaggataacggaggctgggagctctgccagtgccggccgggagaag

SEQ ID NO: 29810 - DNA, 90 bp, Homo sapiens
cgggcctggactgtgggctggtgtgtggaactggggacaggcaaatggtatgaattacaagacctccaggtgactgacatccttccccag

SEQ ID NO: 29811 - DNA, 75 bp, Homo sapiens
gtacctgcagaaggtctctggagacatcttcagcagggaactactggagaccacgtgccgcctggccaacacgct

SEQ ID NO: 29812 - DNA, 98 bp, Homo sapiens
gcggggggcgggaggcttgccaccttcagcccccccgcgaacgcccaagagactccagtacttcacttatttgggaaaaaattgaagagccatccata

SEQ ID NO: 29813 - DNA, 75 bp, Homo sapiens
gggaaccctggtcaccgtctcctcagaacattaaccaggtggtatttgttggaaatttcttgagaattaatacga

SEQ ID NO: 29814 - DNA, 100 bp, Homo sapiens
gagccaccgggtgagctcaccgcccagcccaaaccaggagattgcgagggagcgatgcggtgcagcgcggccgagacgcatccagagctttcgtgaccgg

SEQ ID NO: 29815 - DNA, 75 bp, Homo sapiens
tcaggatgaacgaaatgtcccttaacaaggcctgtttaaagaagaaaacccgtatgctagatttgaaaacaacta

SEQ ID NO: 29816 - DNA, 75 bp, Homo sapiens
gttgccaatcattatcacaggttcagaagatggatgtcagtgggggaggacccgcacgttcttacccagttggag

SEQ ID NO: 29817 - DNA, 115 bp, Homo sapiens
tttacttcggattatagtctctgaccatgtggaattcccagtacgacaggcagtatctggagtccatctttcaccatcttctcctgagattgtactggaccgtgaccactcttct

SEQ ID NO: 29818 - DNA, 100 bp, Homo sapiens
gtggaggcgtgggattccagtaatgacaccgttcgcaaaggcagctcgagcatctcatctgacgtgagttcaagtacagatcacacgcccactaaagccc

SEQ ID NO: 29819 - DNA, 80 bp, Homo sapiens
gaaatactcttcattcaagtcaatcagtttgcattggcagcagtacctgtccaaagatcgctttagttccaccttgctcc

SEQ ID NO: 29820 - DNA, 75 bp, Homo sapiens
gtttgatactgacctgtaaatcatcctttaggtggataagattgtggaccagctgcagcagttaatgcaggtgta

SEQ ID NO: 29821 - DNA, 100 bp, Homo sapiens
catgggccttcctcgacccaaaagggttgaaaggaggagcaggaggtactgatggacaaggaggtaccttccggtacacctttcatggcgatcctcatgc

SEQ ID NO: 29822 - DNA, 145 bp, Homo sapiens
ttttctgcatctgtatccagctcctgaacaagacatggaaggaaatgagggcaacttctgaagacttcaacaagcacccagtcagcttgaagagtttcaaatggaccctaccactgagaaatcaagatggcagtctactatgggg

SEQ ID NO: 29823 - DNA, 100 bp, Homo sapiens
gaaattgcagccagggatattgagaaacttctgagcaacagatctaaagccctggtggtacagcagggaagaactggaaactcagagaaagaaactgccc

SEQ ID NO: 29824 - DNA, 100 bp, Homo sapiens
gcggtggtgagagcacacgtcctcgtctcgttcctgatcgaacgtggtggtgatcccattaagatactaatgccatcactgtctcctacaatggaagaag

SEQ ID NO: 29825 - DNA, 98 bp, Homo sapiens
acgccatcgttgctgccttcttcgtcaagattgaagatggaggcaaggcagctttgtcccagaagatgaggactggtgatgagctggtgaatatcaat

SEQ ID NO: 29826 - DNA, 75 bp, Homo sapiens
aaagaaacaagcagacggtatccagacttaattcagtgcacaaatgagatgaatgtgaacatcccacagttggca

SEQ ID NO: 29827 - DNA, 74 bp, Homo sapiens
gcggcgcgcagcgtgtcaggcggagagacccgccgccaggtccagcaagactatgaatctctgttccaaatgct

SEQ ID NO: 29828 - DNA, 75 bp, Homo sapiens
gaaggcctctctcctgatacagcaggcgctcaccatgttccctggagacctgatggccaaaagaaaggaagaaaa

SEQ ID NO: 29829 - DNA, 82 bp, Homo sapiens
ggcgggggtgctgcagaggacacgaggcggcgggctggagacatggaccgcggcgagcaagaatgtgacagtgatgataaca

SEQ ID NO: 29830 - DNA, 100 bp, Homo sapiens
gctgtgctggtcacagccacactctgcaccgctaggccgtccccgaccttgcctgaacaagattaataaagaactcttcagaattcctggtgtttcatca

SEQ ID NO: 29831 - DNA, 96 bp, Homo sapiens
aagatgaggaagctgagtcagctacgggcaagcgggcagctgaagatgatgaggctcaagtggtcctgtcgaagtatttatcactgagactccgag

SEQ ID NO: 29832 - DNA, 75 bp, Homo sapiens
gaccaccaatcagatccgtaaggacacattggcgtgagacctgggagtacgttgtgccaaatcattgccacttgc

SEQ ID NO: 29833 - DNA, 90 bp, Homo sapiens
cttggtacacctcagccgtgtgtcctctggggattttttatcaagcagaaatgcatcgaacaacgagaatcaagatcactgagctaaatc

SEQ ID NO: 29834 - DNA, 100 bp, Homo sapiens
ccgagaccgtgaccgagagcgtgaccgagagcgcgaatatcgtcatcgttagaagcctgtgcccctgtaggatgcagtgaagaccttggaagagacagca

SEQ ID NO: 29835 - DNA, 75 bp, Homo sapiens
cagaatatagaatggaacccttttgatcaagatgcggtgaacatgggagtaagccctgaaccaattcatcttaag

SEQ ID NO: 29836 - DNA, 98 bp, Homo sapiens
cacggggcgggcagcggctgcctgggcactatggaggtgaagagcaagatcctggctctgcagagagaacagcccagaaaagaaagttccccagccct

SEQ ID NO: 29837 - DNA, 90 bp, Homo sapiens
cgccgcgccgccatcatggacaccagccgtgtgcagcctatcaagctggccagggtgctggagaatctggtaaaagcaccattgtgaagc

SEQ ID NO: 29838 - DNA, 82 bp, Homo sapiens
cctggcctggccgggaccatggacgtagacaagtttggcaacgagatcacccagctggcccggcccctgcctgtggagtatc

SEQ ID NO: 29839 - DNA, 73 bp, Homo sapiens
gcgagctcctggaggcggcgggatggaggcggcggccggctgtcggctggcctgctgcgtcaggccacctaca

SEQ ID NO: 29840 - DNA, 98 bp, Homo sapiens
tgtccctggctccctcattaccgtcgccagcggagcgaacccgagagcgtggagcgggctgggccagagaaagcaattgagctgcgtctggcaaaaat

SEQ ID NO: 29841 - DNA, 100 bp, Homo sapiens
ctctgattgaagccaagaaaaaggatcaagtgactgctcaggaaattttccaagacaagtttggacatatttgactcttttccccccaggttgaattgac

SEQ ID NO: 29842 - DNA, 90 bp, Homo sapiens
ctctatcttattcattttccagtgtctgtaaagcttcacgagaagtttgaccttctaaagcggacacaccaagaagaaaagaagaaagtg

SEQ ID NO: 29843 - DNA, 90 bp, Homo sapiens
acctgttcgagatcagccagccgaccgaggacttcagaaatgggcttgggaaccagctgagttcaggatcccacacctctgctgcatctc

SEQ ID NO: 29844 - DNA, 100 bp, Homo sapiens
cagggctccagaaattatgttgaattccaaggttatcaatactctggctgaccatcatcatcgtgggactgactttggtggaagtccttggttacatgtc

SEQ ID NO: 29845 - DNA, 97 bp, Homo sapiens
aaacaaaattcgatttgcaaatcattcagtgaatcccaactgttatgccaaaggtgtggatgtggaagcagccaagcgggcagaagaggaattgctc

SEQ ID NO: 29846 - DNA, 75 bp, Homo sapiens
aataataccaaaatatcttcgtgcttccatgactaacttggtcaagaagttcagttctgcaagcaagtatgctgc

SEQ ID NO: 29847 - DNA, 100 bp, Homo sapiens
tcttgtctttggcaaaggattccaagcaaagatcttccctgagagaacttcacagaccagctgcggaagatttccaaggatgcggggatgcctatccagg

SEQ ID NO: 29848 - DNA, 74 bp, Homo sapiens
cctcccgagtacctgagattagcccagctagaaaattatggcatgccgtttagcagaactgaagatgggaagat

SEQ ID NO: 29849 - DNA, 75 bp, Homo sapiens
aaaggcaaaaatcccatctaccgcaactctcagttcgagagtaaaggaaataatgcaaaaggtgtcccaaggctc

SEQ ID NO: 29850 - DNA, 100 bp, Homo sapiens
gaagcccaaaaagctgaaggtggaggcgccgcaagcgctgagagttttccgtctgatgaaggttggccatttgcaaagtatcttggagcttgtggaagaa

SEQ ID NO: 29851 - DNA, 83 bp, Homo sapiens
gcctcgggacccgcggtccccgctcttgctgcaattctgtggtgttcttggtcacacatttatggagtttctgaagggcagtg

SEQ ID NO: 29852 - DNA, 57 bp, Homo sapiens
gcaagaccaccttcgtcaatgtcatcgcggaacccctgtttgctgctagagttattt

SEQ ID NO: 29853 - DNA, 75 bp, Homo sapiens
ggacagtggcattgctcgatcagtacaacaaacacctcttcgtgcacattgggcatgccaaccattcttacagtg

SEQ ID NO: 29854 - DNA, 75 bp, Homo sapiens
actacaactgttctaatgaggtcctatctattactgctatgttgtcagaagcagaagtgtcagaacactccacag

SEQ ID NO: 29855 - DNA, 82 bp, Homo sapiens
tagaacacagttatgggtcgcaagaagaagaagcagctgaagccgtggtgctgatgtgcttgcgatgactgcagtctctcac

SEQ ID NO: 29856 - DNA, 100 bp, Homo sapiens
ctggtaatagatgtctgacaaactaaagaaagacttgtgttacgatcctctacaccacatactacgagtccatcagcaacaggggccccttcttcggcta

SEQ ID NO: 29857 - DNA, 100 bp, Homo sapiens
gtgggaactgggtactatgtagagaagctctttgaaggtgtatgcagcctacttgatcgcctgggagcctggccccacctggccaacggcacagctgatc

SEQ ID NO: 29858 - DNA, 50 bp, Homo sapiens
ttcttcttcgagtatttgtagaagggacaatacatggcttgatatacaac

SEQ ID NO: 29859 - DNA, 90 bp, Homo sapiens
atttaccgtaaccctcaaaactcttcccagtctgctgacggtttgcgctgctccagcaggagaagacagacacggtccgctgcatcaagt

SEQ ID NO: 29860 - DNA, 100 bp, Homo sapiens
gagcacttcaacagttggaaccaaggcttcatcattcatcattatgctgggaagattggtggaacgagaatgcctacacgcagccacaggaatccagttt

SEQ ID NO: 29861 - DNA, 74 bp, Homo sapiens
ctgtgcagagatcagagtactaagagacagtcgattaagtgatgttctaaagagaaaacgactgccaaaacgag

SEQ ID NO: 29862 - DNA, 83 bp, Homo sapiens
caagatgaccacactccaggaatgccagtgcatcttttgcacagctgttggggtgactcagtgggaacgccatctgagcgggg

SEQ ID NO: 29863 - DNA, 82 bp, Homo sapiens
ataaatacaaaacaagtctgcttcttcaaaattctgctggccataaaattttgagtagaaaaatccagaaatttgaaaatca

SEQ ID NO: 29864 - DNA, 75 bp, Homo sapiens
ttctacggggccttctacagtgacggggagatcagcatttgcatggaacacatgcaaagccttctagacaagctc

SEQ ID NO: 29865 - DNA, 100 bp, Homo sapiens
gtggctgtagggagcatagctgctacactgaagatgaagcaaggcccaatgacccaggcggaagacgcgacatgtcaacatcttgctgtttatgggcttc

SEQ ID NO: 29866 - DNA, 92 bp, Homo sapiens
ctgctgcggcgcggggaccgctgtgctctcggttaacacagaaatctgcctcctgggccatgccgcttctaaggcctgtttcttctcatgag

SEQ ID NO: 29867 - DNA, 75 bp, Homo sapiens
gcgacagcggcgagcagaactacggcgagcggaagatggctgtgccacccacgtatgccgatcttggcaaatctg

SEQ ID NO: 29868 - DNA, 98 bp, Homo sapiens
acagagcggtcggtgacagcctcaagggcttcagcaccgcgcccatggcagagccagaccgggccagacccaagaggacgcagaggctgagcgcggag

SEQ ID NO: 29869 - DNA, 75 bp, Homo sapiens
gaatgtgtcagccgatgcaccgagtccagcccaggaaaatggagaggagacagcaatatgttgggaaggtcaagt

SEQ ID NO: 29870 - DNA, 90 bp, Homo sapiens
ccagaccctctgggagcttctcagccattttccacagatcaggtccaggtgcaggtacagcagtctccgcaacaggtctcggctcagctc

SEQ ID NO: 29871 - DNA, 98 bp, Homo sapiens
cccagagctcctggaccaatgcatcttcccaccaccttaaaccactggtcccaaaccagttgtcttcctgcaacatggcttgctggcagattctagta

SEQ ID NO: 29872 - DNA, 101 bp, Homo sapiens
ccgggcgctcgagacttaccagagccacaagaatgtgaaagatgttgcagaagtgttccagaagtggctgaagatagaaggaaaaaagtgccactgcctat

SEQ ID NO: 29873 - DNA, 50 bp, Homo sapiens
gggataatgaagatggccctcagcacacgatgagttttgatcatcctgag

SEQ ID NO: 29874 - DNA, 49 bp, Homo sapiens
aggttatagatggagagacctataaaggggtattccctcagcggatact

SEQ ID NO: 29875 - DNA, 80 bp, Homo sapiens
gcaggactgcgccgcgtcttcctcaaggagttggggacttttcccagccagacacctctccggacaccaatggtggaggc

SEQ ID NO: 29876 - DNA, 125 bp, Homo sapiens
accagcaacttctaatggatcctcttccaaaaccacaaacttgcctacgtcagtaacagccaccaaggttgatgctcaccttaagagtgagcaaacagaagcaagcaccaggcaaaattcccaag

SEQ ID NO: 29877 - DNA, 100 bp, Homo sapiens
atttggagaaaatctatcgtgaggttcagctgatgaagcttctgaaccatccacacatcataaagctttaccagtttccacgggctcccttgctcagcag

SEQ ID NO: 29878 - DNA, 100 bp, Homo sapiens
ctggctgtaggccatacatggcagtccacatcacgctgagcacccatgagtgtgccggcctttcagaacgggacataaacctggccagcttcatcgaaca

SEQ ID NO: 29879 - DNA, 100 bp, Homo sapiens
tggactgtataatgatccaaatagtaacccaaagatcgtgcagctcttggcaggagtagctgatcaaaccaaggatggtattgaaatggctgatggcaag

SEQ ID NO: 29880 - DNA, 100 bp, Homo sapiens
ggctccgctgtgcgcaggatcgcccaggaagtgcagcgctttgcccaggagaaaacaccttccaccatgaccacctcagcaagttcccacttaaataaag

SEQ ID NO: 29881 - DNA, 75 bp, Homo sapiens
aaaaggaattccaaagtctgaatcagaggccacctcagagagagtgttgaactgatagtgcatcagctgacccag

SEQ ID NO: 29882 - DNA, 100 bp, Homo sapiens
tggctagtgtacgtgtcgtacaaaaaaacctcgtctttgttgtaggtttatctcagcgcctagcagacccagaggcgcttaaattcctagcgaagtgccg

SEQ ID NO: 29883 - DNA, 90 bp, Homo sapiens
gttttgctggcagcaggatcatgtgacttcaaatgcagggttggggtgctggaggactgcttcaccttcctgggcatcttcctggccatc

SEQ ID NO: 29884 - DNA, 98 bp, Homo sapiens
cctgtgtgacagcaatgaggtgaacccaggggccgaagcccacccagggagttgatgctttaccgatttgttacaactcaagcaagggccagcagaaa

SEQ ID NO: 29885 - DNA, 73 bp, Homo sapiens
ggagagccaggattcatgctctacatccccatagagtttcggagcaacatcccctgtcacctggttgatatct

SEQ ID NO: 29886 - DNA, 100 bp, Homo sapiens
gcttggcagtatttcagctggctggaggaattggagaaaggccccaaccagtttgctgaggctaaacactatcatgccaagttggtgaatataagaaaag

SEQ ID NO: 29887 - DNA, 75 bp, Homo sapiens
ttctagtcaatctctgctccctaaagagaatgctctcatcactcagtcaaggctaatgcttttggaatcagtgtt

SEQ ID NO: 29888 - DNA, 74 bp, Homo sapiens
aaaaagctgccctgagacggtgtcccgccgaaagccaacattggtactcagaccacaggacccagtggggtagg

SEQ ID NO: 29889 - DNA, 129 bp, Homo sapiens
ggaggggcctttgtccgtgttcggtgaccgcagcactggggaaacgatccgctcccaaaacgacttcattagaggggtggtagactcggaggatctccctctaaacatatcccgtgagatgttgcaaca

SEQ ID NO: 29890 - DNA, 82 bp, Homo sapiens
tgagcagagccctgcgatactattatgacaaggctttaatccagtgtgaccagttgaggaaggagctggagaggcaggcgga

SEQ ID NO: 29891 - DNA, 111 bp, Homo sapiens
ccatgcaaaggcaggggaggaagccacctcgaggtccgaataaatactggaaagaataccactttaaaattcagtgaaaagaaagaagaagccaaacgtaaacgaaagaac

SEQ ID NO: 29892 - DNA, 100 bp, Homo sapiens
ccgatgaagcagctgcagccgcagccgcctccgaagatgggggatttctacgacccggagcacccgacccctgagtactgagtttgagggtgcagtcata

SEQ ID NO: 29893 - DNA, 97 bp, Homo sapiens
aaaagaaggccctgagtcaaagaagatgcctcgaactaaacaaattcatcccagaaatctaagaggctaaggcatcatcttcataaggactcctgga

SEQ ID NO: 29894 - DNA, 82 bp, Homo sapiens
ccaccctggcgcaggcggtgcaagcaggttcctggtagagttacacagttgtgccgccagtatagcgacatgcctcctttga

SEQ ID NO: 29895 - DNA, 100 bp, Homo sapiens
tgagatctctcatctaaagaagaagttggaaaatgaggtggaacaaaggcatacacttactagaaatctagatagttcctatcagactgagattgggcag

SEQ ID NO: 29896 - DNA, 75 bp, Homo sapiens
ggatccctcacagcccagctcgggaagtggacagactgggcgtcatgacccttggtttttaatgaccacaacaag

SEQ ID NO: 29897 - DNA, 75 bp, Homo sapiens
atttggagtgtgcgtgcgcgccgagcggacagagcgggatgccaccagcttgtccaaagggaagttccaggagct

SEQ ID NO: 29898 - DNA, 50 bp, Homo sapiens
cgtgcacgcgggccagaggcggtatacactgaatatcctcgaagaaattg

SEQ ID NO: 29899 - DNA, 75 bp, Homo sapiens
gtgaaacacttagagcagtttctggcacatggtaatggtttttacaaaggaccaaacagaaaaggaaatagatga

SEQ ID NO: 29900 - DNA, 100 bp, Homo sapiens
cccagatgtcctcatcatcccgtcagagctgaggtacttcgtgaaggaccagttgctcttctgtgatgactgcgatcgtggctaccacatgtactgtctc

SEQ ID NO: 29901 - DNA, 98 bp, Homo sapiens
aagaggaggaaactaaaacatttaaagacctgacaatgcagatcttcgtgaagactctgactggtaagaccatcaccctcgaggttgagcccagtgac

SEQ ID NO: 29902 - DNA, 82 bp, Homo sapiens
ggagctgtgcagccgcgaggaggcgcgggaggtgttcgagaacgaccccgagacgagctcaggccccggggcctccagcggc

SEQ ID NO: 29903 - DNA, 100 bp, Homo sapiens
ctgaggatcgaggaacgttgtctgccctgggcgctgcctatggcacagccaagagcggtaccggcattgcggccatgtctgtcatgcggccggagcagat

SEQ ID NO: 29904 - DNA, 90 bp, Homo sapiens
gccgcccctcaccagacagatcgctgtcaaaaccctaggtcctcgatgggcttcctggaatattggtgtgtttatttgcatcagatgtgc

SEQ ID NO: 29905 - DNA, 75 bp, Homo sapiens
atctcctctctggagcaccggggccaccaggagggaggattgtcagctgacctctgtcctgtgtgcccagtggcc

SEQ ID NO: 29906 - DNA, 100 bp, Homo sapiens
ctcgtcttccaggacttcgacctggagccgtcccaggactgtgcaggggactctgtcacaggcagcaggatgggtgtggaagcagtgatggcacttttgg

SEQ ID NO: 29907 - DNA, 100 bp, Homo sapiens
tgagcagatggaatgggagaatgctcttcaattcctgacaaaattatgggcagactgtttgctgacgaagatgccttcaattaagttgcagagttctgat

SEQ ID NO: 29908 - DNA, 100 bp, Homo sapiens
aacctcaggacttgagtaacagcaacatgagaaaattcctgttccaagagaaaataaggcaacatcaatgaaggagagaagagccagccagaaattatcc

SEQ ID NO: 29909 - DNA, 101 bp, Homo sapiens
caagagcaatcataaagtgttactggaaatcttatttagttttgggaatttttacgttaattgaggtcctaggcctacttacaagcctccagtctcaaatt

SEQ ID NO: 29910 - DNA, 98 bp, Homo sapiens
gacgccgtcgcggtggactgcaagtcttgtgaaaatgccattgtgtgctggaaacctggcaagatggaagatgatatagataaaattaaacccagtga

SEQ ID NO: 29911 - DNA, 98 bp, Homo sapiens
gctgaaaccacagacatgactgagtcctccatgaagagagtacgagagggcctccaaagtggaccagtttgtgacgcgcttcctgctgcgggagacgg

SEQ ID NO: 29912 - DNA, 100 bp, Homo sapiens
cgaactctgcaaagcctccagaggacataccacctccaggatcaggatgcagagctgaaatcagaagccatccagacctctcattttcaaggcagactta

SEQ ID NO: 29913 - DNA, 75 bp, Homo sapiens
tcacaactgctcgcgtgacgaccgcattcgtggcaggtttattgggcacttcctagcaccaggcactgcaataag

SEQ ID NO: 29914 - DNA, 91 bp, Homo sapiens
aaaaattcttcagattggaaaataccacaggatggagactacgagtttgactgagcagggggaggaacatttaagctgatggaagtggaag

SEQ ID NO: 29915 - DNA, 101 bp, Homo sapiens
gggagccgcacgcggcgatatggaagaggagggcaagaagggcaagaagctccacagcacctgttgccttcattagcagcttttcctcctcttccctgcac

SEQ ID NO: 29916 - DNA, 108 bp, Homo sapiens
catagggaactctttttgtcacgccagtatgaatctctgcccgcaacacatatcagcaattaccagctctggctgggtcgccacaacttgtttgacgacgaaaacaca

SEQ ID NO: 29917 - DNA, 100 bp, Homo sapiens
aatgtatgaagaacagtcacaggacagaatcctgctgcatcacagaagctggaagttctgatgttccactgaaatcacaatggaaagtcttgacttgact

SEQ ID NO: 29918 - DNA, 83 bp, Homo sapiens
ttggaattctgttcggtgtttaagccagcaatgccaagatctgttgtgtgtgctggaattgatgttcgtctgtgtgatgttgg

SEQ ID NO: 29919 - DNA, 49 bp, Homo sapiens
ctctgttccaaatgctttgctgctcaactgagaagtcatttccttggag

SEQ ID NO: 29920 - DNA, 100 bp, Homo sapiens
ctggtctttctcaacctcatcttctgggagacttcctgtgatcagagtgaaggttctggttcttcagaagaggatgaatggagaagtgacagaaaaagtg

SEQ ID NO: 29921 - DNA, 96 bp, Homo sapiens
ctcaggcctgcccggacggtgatggttggggacatctacgagaacctggacctccggcagagacgggcctccagcccggggtacatagactccccc

SEQ ID NO: 29922 - DNA, 100 bp, Homo sapiens
gttgaaccaagactctgaggctgatatgcaatgtcacttacaacattaatcagatactgcatttaaggtgaagcaaaaaatttattgccatatcttggac

SEQ ID NO: 29923 - DNA, 138 bp, Homo sapiens
caggccctttcccgcttcccatcatcgggaacctcttccagttggaattgaagaatattcccaagtccttcacccggataacgaaggaggcccaacttcattcaataaggagcctgacggatttatcccagacggtag

SEQ ID NO: 29924 - DNA, 100 bp, Homo sapiens
tccagaaaaggcagaggttcttaccgaaagcaggggttcaactagatatagcttcacaatctctggatcaagaaattttattaaaagttaaaactgaaat

SEQ ID NO: 29925 - DNA, 90 bp, Homo sapiens
tgaacaccaaggggcaactgggccatgagagggaaggaaacaagccagactcttagaaagaaccatccgatcagctgtagaacaacatct

SEQ ID NO: 29926 - DNA, 74 bp, Homo sapiens
gctgggcttgctttggcaacagagtgcctgacccaggtcaggtactgctataaccagaatttggtagaaaaagg

SEQ ID NO: 29927 - DNA, 100 bp, Homo sapiens
gaacaagtggtactaggattatacattgtaagaggtgacaacgtgagccctctggcacaaatggaagaagaaagaagggagcaagtagctaaaattaaga

SEQ ID NO: 29928 - DNA, 87 bp, Homo sapiens
attttggcattgacatttaattttagggtcctttatatagaagggagagtagttacaataaagaccttttagacaaggtgatggaaa

SEQ ID NO: 29929 - DNA, 75 bp, Homo sapiens
agatccatctgcaccacggtgctgatgaacacgtcactgctgggaagcatcggcatgctgaactcggcacctcag

SEQ ID NO: 29930 - DNA, 100 bp, Homo sapiens
tgaggacacacccaggaaaagactcaggacggacaagcacagtcttcggaagctcgccctcccctacctgcggaagagtcaagggaatgtcatcaacatc

SEQ ID NO: 29931 - DNA, 75 bp, Homo sapiens
agacctttgagccgcctgagcgactaactcctgcgcccctgagggctgtgaagcttcatggaggtatcgatatcc

SEQ ID NO: 29932 - DNA, 74 bp, Homo sapiens
aagctgaatatgctgcattagacaaacgagaggctgaaggggatgctaagggagataaagcaaaggtgaaggac

SEQ ID NO: 29933 - DNA, 100 bp, Homo sapiens
tgggtctccgggccaacctgaggcccgtggaacacagagcattcctaatgacagtcctgcccggggtgagggcacccattctgaagaggaaggctttgcc

SEQ ID NO: 29934 - DNA, 100 bp, Homo sapiens
ctgcgtgcacagcgccttgttccagcagggcctgatccagggactgttgacatttagggatgtggccatagaattctctctggaggagtggcaacacctg

SEQ ID NO: 29935 - DNA, 82 bp, Homo sapiens
cacttttcaccaaggaactggtgctgcagcgagagaaattcggaactatccgggcagatttgattgaacagatgagattcaa

SEQ ID NO: 29936 - DNA, 96 bp, Homo sapiens
tcctgtctatttcttctctctcagagactgcaggtcctcttcctgatggatgggaacaagccatgactcaggatggagaaatttactatataaacc

SEQ ID NO: 29937 - DNA, 83 bp, Homo sapiens
atgtgcttgtctctctgtgcccactcgatgccatggagaagttcctgacaggccattactgggcactgttcgatgggcacggc

SEQ ID NO: 29938 - DNA, 97 bp, Homo sapiens
gcccaccaccatcgagcgggagttcgaagagttggatactcagcgtcgctggcagccgctgtacttggttcttcagatagatcctgaagttacagat

SEQ ID NO: 29939 - DNA, 75 bp, Homo sapiens
cgagctcctcaagaatctcgtgctcaccggtttctcccacatcgacctgctggaagctctttgacatcctttgga

SEQ ID NO: 29940 - DNA, 75 bp, Homo sapiens
caaaatgaaaatttctccaaaaaggatgtcatgttcctggcctgaaaactctcccaccatgtcgcagaatggata

SEQ ID NO: 29941 - DNA, 99 bp, Homo sapiens
cttgcactctagaagggacaatggacttctggctttggccactttacttcctgccagcctacaacacagcagtcccctcaggatgagcaggaaaagctc

SEQ ID NO: 29942 - DNA, 90 bp, Homo sapiens
ttggcagccttatcattggttatgccagtgccggtggtggtgtgcacattgagccccggtatagacagttcccccagctgaccagatccc

SEQ ID NO: 29943 - DNA, 100 bp, Homo sapiens
ccgcctgcgttcgcggcgccactatcggcaggaccctcatcccccgttactttagcactgtgtttgaaggaggggtgaccgacctgtattacattctcaa

SEQ ID NO: 29944 - DNA, 75 bp, Homo sapiens
ctggattttttaactgaagatagtgcctttcagccctaccaggaaccaggaattaaagcagtgaacataacaaag

SEQ ID NO: 29945 - DNA, 100 bp, Homo sapiens
atgtggtgcttttgaaccactggaaagtgaggaattttgaagtacaccgtggtgacattgtatcattggtgtactactgagcgagtgtgcttgatccagg

SEQ ID NO: 29946 - DNA, 83 bp, Homo sapiens
tccgtggccttagctgtgctcgcgctactctctctttctggcctggaggctatccagcctctccactgtggtttgaatccacg

SEQ ID NO: 29947 - DNA, 75 bp, Homo sapiens
gagtgcactgaggacccatagaatacagattctacagggattacaaggacagtcattttgtttactcattcagcc

SEQ ID NO: 29948 - DNA, 83 bp, Homo sapiens
ccgccccctccggcgtgttcatgcccccgggcttccccgggcgctgcctggacaggcctgcctgcgtgctgggacatgtctgg

SEQ ID NO: 29949 - DNA, 100 bp, Homo sapiens
ggagactgcaggctacctcaggggccgtccccaggacactgtccggatcttccctccctgatctcccttgagtttagaaatctggctgagaaataccaaa

SEQ ID NO: 29950 - DNA, 96 bp, Homo sapiens
ctgcagctcagcagccgccgccagagcaggacgaaccgccaatcgcaaggcacctctgagaacttcaggttgggggccgtcccgctcctaaggcag

SEQ ID NO: 29951 - DNA, 104 bp, Homo sapiens
agacctctcatctgccagaatcagaaagaattcatcacactgttaacgaatccagaaaactctggagagcccttcagagcatacacaccacgtctacttctcag

SEQ ID NO: 29952 - DNA, 98 bp, Homo sapiens
ggaaccagcctgcacgcgctggctccgggtgacagccgcgcgcctcggccagcggagctggagtttgttcagatcatcatcatcgtggtggtgatgat

SEQ ID NO: 29953 - DNA, 97 bp, Homo sapiens
cagaccttcaagatagacattgaccccgaggagacggagcagctgcattggcatggaagaatcctatttcaagctggtttactgctatgctccactg

SEQ ID NO: 29954 - DNA, 51 bp, Homo sapiens
ggggcgcaggcgcccgtgcggaatggcagcggctatgtgactacgtttgtg

SEQ ID NO: 29955 - DNA, 75 bp, Homo sapiens
tgaaatatctttggcttgcagccaacaatgggacctgctgcggatgttctttgacgcactgtatgacgaggacgt

SEQ ID NO: 29956 - DNA, 90 bp, Homo sapiens
aggcccgggcgagacttcgggaccgtgtcctgagcgctctccatgcgcccggcgcgaggttttgcactgattgcaaaaataaagtcctcc

SEQ ID NO: 29957 - DNA, 96 bp, Homo sapiens
aagcccagacaatgccggtggaggaatttgtggctggctggatctctgctcatctttgggtgaaaaattgtcgggatcttctgcagtccagctaca

SEQ ID NO: 29958 - DNA, 100 bp, Homo sapiens
tgatgattcttgtagtatcaacagtgacccagaagccaagggcactccacagaaggatgttattatcaagtcagatgcaccggacactttgttattggag

SEQ ID NO: 29959 - DNA, 75 bp, Homo sapiens
gctttgcagtcagtggagaattgtccagaagacttggctcagaatgcctggtttcggaaatctcgattcaaagga

SEQ ID NO: 29960 - DNA, 100 bp, Homo sapiens
ctgggtgggggacgtgtaccctgtctaccagcctgtggagcttgaagaaatccgcaaatgtgggatgaaaaacttccgtaacatccaggttgatgaagct

SEQ ID NO: 29961 - DNA, 80 bp, Homo sapiens
cagggcattcatttcaggctccttctaaatggccaagtcgtgagatggagaataaagaaactctcaaagggttgcacaag

SEQ ID NO: 29962 - DNA, 83 bp, Homo sapiens
cgggaacatcctcctggactcaatcatggcttgtgtggagccatcgaagcccccacccacaggctgacagaggcaccgttcac

SEQ ID NO: 29963 - DNA, 100 bp, Homo sapiens
tgcgggcccgggccatggccgccgccgatgccgaggcatgtaatgaatttactacacatgtgatgaaccttctccgagaacagagtagaacacgtcccat

SEQ ID NO: 29964 - DNA, 49 bp, Homo sapiens
ggacccgctttctaccattaaggtatatccgcaccatgtacctggggat

SEQ ID NO: 29965 - DNA, 98 bp, Homo sapiens
gagagatcctgtttctcacatttgtttcattgaagaaatagttaagagttcgaaccaacgtggcctcaaccagatttggaatgtcaaaaagcagagtg

SEQ ID NO: 29966 - DNA, 75 bp, Homo sapiens
gctgtccccctgagatgaagaaagagaaacaccatctgattcagatcacaagaagaagaaaaagaaaaaagaaga

SEQ ID NO: 29967 - DNA, 97 bp, Homo sapiens
gggggctgactgtcgctctgcctttgacaggagaggctgcttcttgtagagggcttaccacccaaaagatgggaggcagaagatacccacctgagtt

SEQ ID NO: 29968 - DNA, 100 bp, Homo sapiens
ttggtactgagatagaaggggaggggttacagactgtggtgcctacccccatcactgcttccctcagccataacagacttcgcatatcatttaagtggat

SEQ ID NO: 29969 - DNA, 83 bp, Homo sapiens
ctgggagcttgctgcagcttcagatgaggacggggacttggttgccttttccagtgacgaggaattgacaatggccatgtcct

SEQ ID NO: 29970 - DNA, 50 bp, Homo sapiens
catgttacgaaccaactggaagagcagtaaacagtcctcagcgaagccgc

SEQ ID NO: 29971 - DNA, 98 bp, Homo sapiens
ttttaaccaccaacatttggctgcaaatggaaaatttgctgtttgatgaatatcataaattaaagctgattgactttggtctctgtgcaaaacccaag

SEQ ID NO: 29972 - DNA, 99 bp, Homo sapiens
cagctccagtgctttggtctgttgtgctggcttggtgacgctcacagtgctgggaaggaatctatccaagggattaaagcctgtggtttccacagaagc

SEQ ID NO: 29973 - DNA, 107 bp, Homo sapiens
attttagagtccaccagatcatccatgtgagtgaccatgcagcaaaagaaggagggtcctctcagtgattaagggagatacatctggggactataagaaagctcttc

SEQ ID NO: 29974 - DNA, 100 bp, Homo sapiens
gcgactgcagcgggtccggtgcaggtgaggggcgcgcgcctgcccagctttgcagcccccgaacgcggcctcgcacaggctactgcagcactggggtgtc

SEQ ID NO: 29975 - DNA, 82 bp, Homo sapiens
cgttgtacaaagatacgcggacccacctgcttttttaaaggctgcagaaaacttcactcttttggttaagaacaacatctgg

SEQ ID NO: 29976 - DNA, 75 bp, Homo sapiens
cgccgatctggaaaggcaaataggtgttgacttcaaaatcaaaactgtagagctaagaggaaagaaaattagatt

SEQ ID NO: 29977 - DNA, 75 bp, Homo sapiens
actccatggcaccgggctgagcgggatcaaaaccattcaagtgcaagatatgccattttgcaacagctcagcttg

SEQ ID NO: 29978 - DNA, 74 bp, Homo sapiens
tcaagttttacagtcgccagggacaagaacaggtggataatccagtttctgttttaacacaagaaatgagcaag

SEQ ID NO: 29979 - DNA, 100 bp, Homo sapiens
ggatcatgtctgcgagccaggattcccggtgtcgtgaaaactacccctaaaagccaaaatgggaaaggaaaagactcatatcaacattgtcgtcattgga

SEQ ID NO: 29980 - DNA, 75 bp, Homo sapiens
tggaagtccgggagagaatacacagagccagtggcacatttagaacgaacagggcattacttaactgtgaaagat

SEQ ID NO: 29981 - DNA, 103 bp, Homo sapiens
caaatgcttattttctgcttccaaaggtccagagcattcagctgtctcaaatgcaggacccagatgatgtggtaccagttggccaaagaagagcctggtgttg

SEQ ID NO: 29982 - DNA, 74 bp, Homo sapiens
aatacaaatcacacgcataatggatgaaaggaaccgacagcggaagatccatccaaaagctatgtgaaattacg

SEQ ID NO: 29983 - DNA, 100 bp, Homo sapiens
ccttttttcatttccatttctaccttgtatgcctcaatttgctggatttaagcactgctgcactttatgagcctcagtgtatgggcgctgttcatcctct

SEQ ID NO: 29984 - DNA, 90 bp, Homo sapiens
cttctgacctccgcgcgacgtacccgccgccgccgttggctggagaataacatagctgatccagaagaactgttcacaaaattagagcgc

SEQ ID NO: 29985 - DNA, 75 bp, Homo sapiens
gtgatattgctactgtgtgtgattcaggccgactgcagcagtggcccagggcaaagagtgtgcgtcatcgatgag

SEQ ID NO: 29986 - DNA, 96 bp, Homo sapiens
ctggggccggcgatgtgccaccgaggctgaggatgatggtagattgccagcgtttagtgggctacagatggcatggcatctaaaaccttacaatgc

SEQ ID NO: 29987 - DNA, 128 bp, Homo sapiens
aatagccagctccccagaaatgaacctgcccacggtgtccgcgctcaggcaccactgccggaactgtggccacatcttctgcaacacctgctccagcaacgagctggccctgccctcctaccccaagc

SEQ ID NO: 29988 - DNA, 90 bp, Homo sapiens
atgccatcattttctgcaccttcaggaacagttggcgttccgggccgcgtggcggtgaatgccttggctgtaggagaacccggaacggcc

SEQ ID NO: 29989 - DNA, 83 bp, Homo sapiens
cacgctactactttgggtgctgtgaaatgcaaggtgatcagcttgaaattcagctaaccgagcagctacggtccctcatcccc

SEQ ID NO: 29990 - DNA, 124 bp, Homo sapiens
gagaatgacagctgtgataaaaaaaaaattcatctgggcggtatctggaacttggcgctgcgtacacctgcttggaggctgcaacggggcgggctctgctgcgtcagcacatggacatcactgg

SEQ ID NO: 29991 - DNA, 82 bp, Homo sapiens
ctgccccccacgccgagctggccgcgccgaccaccatcccggtcaccacgagatgaagatctccttcaacgacaaaagcctg

SEQ ID NO: 29992 - DNA, 90 bp, Homo sapiens
ctgtgatcgaggacataaggaactagtcacagtgttgctgcaacatagagctgacattaactgtcagaatactgggatcttcagtggcag

SEQ ID NO: 29993 - DNA, 50 bp, Homo sapiens
catcgtgtggcaggaaacagaagatgctgagttcagcatttggacccggg

SEQ ID NO: 29994 - DNA, 75 bp, Homo sapiens
cagttggaagcagccgatccagcctgcggagcctgtggggcaggacttgcaattgtgaccaaatatattacaaag

SEQ ID NO: 29995 - DNA, 100 bp, Homo sapiens
ctttcccgtgaccatgcttccgggagacggtgtggggcctgagctgatgcacgccgtcaaggaggtgttcaagcttcttggacacttaatgattgttggc

SEQ ID NO: 29996 - DNA, 78 bp, Homo sapiens
cgggagagggggagtgcgcggcggccgcagctgccacaaaccagagtccttaaatgcactggaagaccaagatttaga

SEQ ID NO: 29997 - DNA, 125 bp, Homo sapiens
gaaaaccagctgaggtgtccgtaaagattccagagaagcctgtgaacaaaacacccaaggacaatgctgctactctacaaccatctgatgacaccgtgttacctggcggtgtcccttcccctggt

SEQ ID NO: 29998 - DNA, 75 bp, Homo sapiens
attccagagaagcctgtgaacaaaagaatggatcttggagaatgtctgaaagtccatgacctggctttaagagcg

SEQ ID NO: 29999 - DNA, 100 bp, Homo sapiens
aaagcagcaaatctacttttgggttacaaaaatccagaccaggttctgaagaaagtctccaaatacattcaagagcagaatgagaagatctatgctccac

SEQ ID NO: 30000 - DNA, 83 bp, Homo sapiens
gtgcgctgtcttcccgcttgcgtcagggacctgcccgactcagtgaaatctgacccggtcgtctcgtaccgcgagacggtcag

SEQ ID NO: 30001 - DNA, 75 bp, Homo sapiens
cctcgtcagcactgactttcagctatggaatcggtgctgcagggtgcacagctgatcgccgtggcctcctcggac

SEQ ID NO: 30002 - DNA, 99 bp, Homo sapiens
ccgcaaggagtttggaggccctgatggaggggacggaggcaacggtggacacgtcattctgagagagtatgcccagctttttgcagcactgattgcacg

SEQ ID NO: 30003 - DNA, 75 bp, Homo sapiens
gtcactactgcctgcctgcctgcctgctacgcaacaattgagtcacttcaaaaggagttcattgaaggggaacac

SEQ ID NO: 30004 - DNA, 74 bp, Homo sapiens
gcttctctgtgcatgcacatcagtcactgatctcacctactgctatgctaagaaggaatctgatcttaatggcg

SEQ ID NO: 30005 - DNA, 100 bp, Homo sapiens
cccattcggtgcaccaagagcaacctcacacggtgtgggctgaatgaagagctgccagatcccacagagagtccggagggctgtgctaccccaagaagag

SEQ ID NO: 30006 - DNA, 80 bp, Homo sapiens
cccagagggaaaagaagcccaaagttttaaagaattctcccagtccttggctacatcagcccacccctgtgacctcagca

SEQ ID NO: 30007 - DNA, 100 bp, Homo sapiens
gtatggggaccctgcagaaatgggtgccggaatctgtctcctgatcatcattcaggttcagcctggagaaggaaataaagctgctttcaatgacatgaga

SEQ ID NO: 30008 - DNA, 94 bp, Homo sapiens
aaaaagccctcagtaccagagacagaagcagatggattcgtccttttagggctggttgatatgtgaagagccaacctgtcgcaatcgaactcgt

SEQ ID NO: 30009 - DNA, 82 bp, Homo sapiens
cgagtaagccagcggcaggaccagcgggcgggggcccacgagtgacagagctgaatgaacctctctccaatgaagatcgaaa

SEQ ID NO: 30010 - DNA, 75 bp, Homo sapiens
cgtgccctggggctgagccctcaggttttgggatttgagattgacgcggtgaactctgtccagttttcaaaccac

SEQ ID NO: 30011 - DNA, 100 bp, Homo sapiens
aaatgattgtgtcctatgatgagcatgaagtcaacaacacattcaaattcggagtcatttatcaaaaagccaggcagcggatagcaggctccaagctctc

SEQ ID NO: 30012 - DNA, 132 bp, Homo sapiens
atggagaaaagtaggatgaacctgcccaaggggccggacacgctctgcttcgacaaggacgagttcatgaaggaatgggccttgacgaaggagaagtcggtgaagcacatggatttgtgccttactgtggtg

SEQ ID NO: 30013 - DNA, 82 bp, Homo sapiens
cccaccgctgccctcagctccgagtccagggcgagatctggtggctggacccagagctgacctatggctgcgccaagccctt

SEQ ID NO: 30014 - DNA, 97 bp, Homo sapiens
ttttaccccctcccccctgagcccgaggtgctgacgtcgcaaaaaaattggatagcttcaacggaccacaccaaaatgccatctcaaatggaacacg

SEQ ID NO: 30015 - DNA, 100 bp, Homo sapiens
gttttcttctactggagtctgctcaatagggacgtcagctttgctggggaactgcaagcacatgttgaccagataactgaaatggcagcagtaatgagga

SEQ ID NO: 30016 - DNA, 100 bp, Homo sapiens
caaaagaaccattgaaaaatttgagaaggaggctgctgaggaaggccgggacatggcgaaccggatcagtgcctttggctaccttgagtgctcagccaag

SEQ ID NO: 30017 - DNA, 75 bp, Homo sapiens
tgcagcagcaaccggatttcagcctgggcctcggacacctcggcctggatggagtgaaggtacctgagcgcagga

SEQ ID NO: 30018 - DNA, 82 bp, Homo sapiens
gcctcagttggaagcagccgatccagcctgcggagcctgtggggcagggtttgaacataatctttcatgtagctttggctct

SEQ ID NO: 30019 - DNA, 113 bp, Homo sapiens
gacggcaccatcatccacctcaagtacccgctgaactgctccgatcccactagtgagaggtacaatgccagggagtactacgaccacctgcccgagctgaagcaggccgtgga

SEQ ID NO: 30020 - DNA, 83 bp, Homo sapiens
ctgggccggagcaggcgaggtggccggagccgtgtggaccaggaggagcgctgtggcacaagaatggctcaactctccaaata

SEQ ID NO: 30021 - DNA, 100 bp, Homo sapiens
ctccacttccagcttctcctccatgtcagccagctcaaggcaggaggagaccaagaaggactacagagaggtacagcaatcatttgaaactccaagggcc

SEQ ID NO: 30022 - DNA, 83 bp, Homo sapiens
cgcagatatagaacatttcttttatcacagataatttcttgagaggagataactcccgtaaagttcagcaccagcagcagagg

SEQ ID NO: 30023 - DNA, 100 bp, Homo sapiens
ggtcttcaccaccatggcctccgtctgccacacgctgatggtgcagcaccgcatgatggtacccaaagtcagatgtgtatggactcagaaaaacatatga

SEQ ID NO: 30024 - DNA, 90 bp, Homo sapiens
ctgcaggcctgtctgctaccctatatccggggaagagccagaaaccatgctgtgacctacaagcaaactaaatagccaacatttctgaac

SEQ ID NO: 30025 - DNA, 100 bp, Homo sapiens
caacaccaacatcgatgggcggcggaaaatagcctttgccatcactgccattaaggaattcattgaagagttgctgtctcccccttttgggggtttagtg

SEQ ID NO: 30026 - DNA, 100 bp, Homo sapiens
ctcaaaacagacgtgttccagagcctgagggaagtgggcaatgccatcctcttctgcctcctcatagagcaagctctggcacagccacttcctgcctcct

SEQ ID NO: 30027 - DNA, 100 bp, Homo sapiens
gtaaaaggaaattggtacccctataatgggcagtgtctaccagatattggggtcttgctcctcagaacaaaccagaattgcagaaggtgatggaaaaaag

SEQ ID NO: 30028 - DNA, 50 bp, Homo sapiens
gccttcccagtagctgggaccacagacaattccaagctcgagtgtctcgg

SEQ ID NO: 30029 - DNA, 83 bp, Homo sapiens
ctgcttatggcggcgctggagagggggcgctgagctgttgggatccagcacacggaagacatggagaacgagatcgacgagct

SEQ ID NO: 30030 - DNA, 100 bp, Homo sapiens
acggatcatggccgcagccgctctggggcagggctccaaggtgggcaaactgaccctcaagaccacagagatggagaccatctacgacctgggcaccaag

SEQ ID NO: 30031 - DNA, 97 bp, Homo sapiens
aagcaagctggttctctgggatataaataagtaactctcaggagccttctccgcagttggcttcctcggtagcttccacacggagcatgcccgagag

SEQ ID NO: 30032 - DNA, 50 bp, Homo sapiens
ggtccttgttggctgcttgctggagaggcagcaattccatttccgtgagg

SEQ ID NO: 30033 - DNA, 83 bp, Homo sapiens
tgaactggaggctgagtacgacagcctcaaacaggagctggagcagctcaaagagggtttcacttccatcgcccaggctggag

SEQ ID NO: 30034 - DNA, 80 bp, Homo sapiens
ttctccaaataccagctcgacaaagatggggttgtcctctttaagaaggtggggaacgccaagcacaacgtgcatgtcat

SEQ ID NO: 30035 - DNA, 75 bp, Homo sapiens
agcaaaatcaaaacacacaggcatcctgaaagagggaagacactgatcaaggtggcagaagctgaaaagcaactg

SEQ ID NO: 30036 - DNA, 85 bp, Homo sapiens
gctcgcgctactctctctttctggcctggaggctatccagcgtgaatgaaaactttgccattgatttgatagcagagcagcccgt

SEQ ID NO: 30037 - DNA, 74 bp, Homo sapiens
ctgaaacagaagatccactcgattacagacgtgtactcatatgatgaggatgacatggtcctggaccccagcct

SEQ ID NO: 30038 - DNA, 98 bp, Homo sapiens
tggagagcctgcaggacggcgcggcagagtccccgtacgcctacagtaacggtgtcatggagaaactccagctgggcccagagattctgcagcgggaa

SEQ ID NO: 30039 - DNA, 58 bp, Homo sapiens
ctccctgtgtactttccatttgccttcctggatgccttcaattaagttgcagagttct

SEQ ID NO: 30040 - DNA, 100 bp, Homo sapiens
ttcgattctgttccagagagaagtggagatcctgatgtttctcagtgccattgtgatgatgaagaaccgcagatccagtgcagttagagcggatccggca

SEQ ID NO: 30041 - DNA, 101 bp, Homo sapiens
ggcgggggaagcagcgtgagcagccggaggatcgcggagtcccaatgaaacgggcagccatggccctccacagcccgcagtgcttcaccgatatagacaca

SEQ ID NO: 30042 - DNA, 101 bp, Homo sapiens
cttcagtccgaaggaggaagggaaccaacccactttctcggcgccgcggctcttttctaaaagtgtgattcctcctaaggagtggaagccaagacagtgct

SEQ ID NO: 30043 - DNA, 100 bp, Homo sapiens
caaatatgaactatgataagctgagcagagccctgcgatactattatgacaaggcgaacagctgcttggagaactacaagtgaagaaaagaaagcattag

SEQ ID NO: 30044 - DNA, 100 bp, Homo sapiens
cttggcacctgcaggaaacaagctcctacttccagaaaaagtgctcctgggactccaggataccaggtttcaaagtcaccctcccacctttcatgtgtaa

SEQ ID NO: 30045 - DNA, 98 bp, Homo sapiens
aaggccgcgtcgtgatcgactcggacacagaggacagcggcagcgacgagaacctggatcaggatgggaaggccattgtgactatgtggtgattacag

SEQ ID NO: 30046 - DNA, 97 bp, Homo sapiens
attatcgacatgttgcaaataccctttctgtttatagaagtgtcaagaggctaggtattcctgacaggtggcattggtagggtggtcaacggagcct

SEQ ID NO: 30047 - DNA, 100 bp, Homo sapiens
atcgtcaggaagcaagtgcagatttgccatcagaatattggcaaattcagaagctggtgaaatatttaaagcctctgcgcttagataccttcatgaaaac

SEQ ID NO: 30048 - DNA, 50 bp, Homo sapiens
ggccgagcaggctgagcgatacgacgaggctgtgatcaatagccaggaat

SEQ ID NO: 30049 - DNA, 80 bp, Homo sapiens
aggtgagaatgaaacttatcccagagctttgctacattggaacagggccgcctctcaagttctcctgtgcctcctgttgg

SEQ ID NO: 30050 - DNA, 100 bp, Homo sapiens
gatagattcccagaagtggaattgcttggtcaaacgggtgaaaatcctatttataagagtgccgtaacaactgtggtcaatccgaagtatgagggaaaat

SEQ ID NO: 30051 - DNA, 100 bp, Homo sapiens
ctggaagtcctatcagtaccttgtagagagtatccgaaggtttccgtctcaggtatcatgatattagctggtttgacatcaagtcatttgtgagtcatca

SEQ ID NO: 30052 - DNA, 75 bp, Homo sapiens
ttccagtaaggaccaagctagacaggcagcttttggcaaggagtctgaagttcttattgggaacctgggtgataa

SEQ ID NO: 30053 - DNA, 96 bp, Homo sapiens
ttacaattctccaagtaaacaactgggccatgatccaaaggaaccagagcagttgagaaaactgtttattggtggtctgagctttgaaactacaga

SEQ ID NO: 30054 - DNA, 98 bp, Homo sapiens
ttatacttctcaaatcttaatttcctaaagggcagagcggcttgggtaaatccaccttaatcaacaccctcttcaaatccaaaatcagccggaagtcg

SEQ ID NO: 30055 - DNA, 100 bp, Homo sapiens
cggtgacagagtggagccatggctagagagatgccctgtatccaagcccaatatgggacaccagcaccgagtccgggaccccgtgaccacctggcaagcg

SEQ ID NO: 30056 - DNA, 100 bp, Homo sapiens
ttggcgtggccatgccggcggccctcacagcaaccagcaccagatgaaggagcattcctcttggcaaagaatggctcaagaagtactgacacatttaaag

SEQ ID NO: 30057 - DNA, 100 bp, Homo sapiens
ctgatatgatggttgctgagtattcactgagagagaaattacctgcaaatcaatatacttggtcttctagaggacctagtacctaagactaatgctttct

SEQ ID NO: 30058 - DNA, 101 bp, Homo sapiens
ggggccggacgggcggagcgagagctggtgctcaagaccgaatcggctgggcttttggcctaggattagaaaggctagccatgatcctctacgacatccct

SEQ ID NO: 30059 - DNA, 101 bp, Homo sapiens
gccgctcaaagccgggagatcgactgtttgagcccggaagcgcagaagctgcaacatggccaacgccctggccagcgccacttgcgagcgctgcaagggcg

SEQ ID NO: 30060 - DNA, 74 bp, Homo sapiens
gagttcaagaagaacactccagagtgtggacaacagtgagtatatgcggaatggagacttcttacccaccaggc

SEQ ID NO: 30061 - DNA, 116 bp, Homo sapiens
ggagctcctaaaacctgtaccttactagaaaagttccccgagacaacaggatgcagaagaggacagcctggtccgacccccagtggcactaacgtgggatcctcagggcgctctcc

SEQ ID NO: 30062 - DNA, 82 bp, Homo sapiens
ggcaacgaaaatgagcctcgcgaggccgacaagagccacccggagcaggattttttatcaagcagaaatgcatcgaacaacg

SEQ ID NO: 30063 - DNA, 100 bp, Homo sapiens
gcaccaagtggcgaaggagccggctccaagacaaacgagggagcaggagacaccccctgactttttttatttctctgactacgagaggcacaatgcggag

SEQ ID NO: 30064 - DNA, 100 bp, Homo sapiens
ctacacactggtgtctcctgcggaagggcagctgggcacgccttccagaccgaggcatagaatgtcaagctaaccaggcgtccgctacttcagaagagtg

SEQ ID NO: 30065 - DNA, 82 bp, Homo sapiens
ccgaacctacggacaagacctccaccacgcagagaatccagcctggattggcacagctgcactggccgttcaggttgtgggc

SEQ ID NO: 30066 - DNA, 83 bp, Homo sapiens
caggactgcgccgcgtcttcctcaagtacctggagtagaacagaaaaattattatgtctgtgttcccttgggactcattggaa

SEQ ID NO: 30067 - DNA, 83 bp, Homo sapiens
gcgtctctctgctgcggcgcggggaccgctgtgctctcggctctgaaaattggaaaaccaagaaggttttgatgttttgtgtg

SEQ ID NO: 30068 - DNA, 98 bp, Homo sapiens
gcgtccgcgcgctgcacaatggcggctctgaagagttggctgtcgcgcagcgtaacttcattcttcaggggctatcaacagcaggacgcccatgaatt

SEQ ID NO: 30069 - DNA, 83 bp, Homo sapiens
aaggtggtacacaagttgatacagaaattgaaggcagaagctcctcctggggtagagacagatcttattgatgttggattcac

SEQ ID NO: 30070 - DNA, 82 bp, Homo sapiens
tggccgctatcatcccagcagtggagttcagcccactactctgaaccagcaggttacgggcaggacttgagtggcttcggac

SEQ ID NO: 30071 - DNA, 75 bp, Homo sapiens
tctacatcagctcgtgcccgtcttattgatcctggctttggaatatataaggtggaatatgtgatcaagtgtgac

SEQ ID NO: 30072 - DNA, 101 bp, Homo sapiens
aagcatgtgtcttccccagctctgcagccacatactatccgtttgttcaggaaccaccagtgacagactgaaccacaatctctacgaggtgatgagcaaac

SEQ ID NO: 30073 - DNA, 100 bp, Homo sapiens
gattgactacggcaaagtggccactcaggtgttctccctcgatgctccccacagcacctacaacctctactgccccttccgggcagaggagcgcacgcgg

SEQ ID NO: 30074 - DNA, 100 bp, Homo sapiens
atggacagcctccttctacatgactgtgaagtgctgaccacactcaccccagacactggccgtatcctgtccaagctacatactgtccaacccaagggca

SEQ ID NO: 30075 - DNA, 51 bp, Homo sapiens
gatgaacttctatcacagtttaagatgttatacatccaggctctaccaggg

SEQ ID NO: 30076 - DNA, 96 bp, Homo sapiens
cagtacctgggtgttccccaccttgggcatcatgcaccacaacaaacagaccccccaccccctggattttccttctccctccatcccttgacggtt

SEQ ID NO: 30077 - DNA, 103 bp, Homo sapiens
aaactttgtaagtggcagaacaaggatttgaagctggcagtctggttccaggcactgcctccttacctgtgaggaatgcaaaataaagcatggattaagtgag

SEQ ID NO: 30078 - DNA, 100 bp, Homo sapiens
cccgaagctaaagtggattcaggagtacctggagaaagctttaaacaaatgaggaaacagacttggagaggttaagtgacatgctcaagacaacactgct

SEQ ID NO: 30079 - DNA, 50 bp, Homo sapiens
ttttatgttgtgtcatttcgaaggatacctgtttccgaagtttacactgt

SEQ ID NO: 30080 - DNA, 75 bp, Homo sapiens
acgctaagttgctgatcgtggcggaaagatgaatgggagggctgattttcgagagccgaatgcagaggttccaag

SEQ ID NO: 30081 - DNA, 100 bp, Homo sapiens
tcaaaactttttctactggaagaaattacctcagaagaattaaaagaaaagctttcagcactcaacttccttcaaaatgtctactgttcacgaaatcctg

SEQ ID NO: 30082 - DNA, 100 bp, Homo sapiens
tggacatggacatgagccccctgaggccccagaactatcttttcggtgtgatgaatgcagactctgctaccattttggctgtttggatcctcctttgaaa

SEQ ID NO: 30083 - DNA, 100 bp, Homo sapiens
ccgcctacaggagtatgatgcaaggagttagaagccgctcttcacagagatgacgtggagtttatcagtgacctgattgcctgcctgcttcagggctgct

SEQ ID NO: 30084 - DNA, 75 bp, Homo sapiens
ctgttgctcatgcctcgtctcatttgcaagcatggcctgtatgagaagaaaaagacctcaagaaagcaacgaaag

SEQ ID NO: 30085 - DNA, 75 bp, Homo sapiens
caagccgggcggcctgccccgccggagcagcatcatcaagctttctcctctaaatcttggtctcttgtttggaag

SEQ ID NO: 30086 - DNA, 90 bp, Homo sapiens
tgtggatggacttgctacctcttgggtgaactctagcaattacaagctagagatgatcgctatggaaaatcctgcagacttgaagaagca

SEQ ID NO: 30087 - DNA, 100 bp, Homo sapiens
tcaccttcagctgtttcctgagttgctgtttcttgggactgcgaagctatacaggctatccagtccttctgtggaacttctgaacatcttttattagtgg

SEQ ID NO: 30088 - DNA, 108 bp, Homo sapiens
ctgcagtacctgcagaaggtctctggagacatcttcagcagagcttggggcttccttggtcgcacccaccacctgcctgcccactggtcagccttcagggaccctgag

SEQ ID NO: 30089 - DNA, 100 bp, Homo sapiens
tccgatgatgatgaagaggaggaatctgaggagaatagtagagactctgttggattggatgctgctggcaagacaaccattctgtataaactgaagttag

SEQ ID NO: 30090 - DNA, 106 bp, Homo sapiens
ggcgcggtagcgaaggccgccgaacctgcctggctagccggcgacttgagtgacgactcaccatggatgatgatatcgccgcgctcgtcgtcgacaacggctccgg

SEQ ID NO: 30091 - DNA, 82 bp, Homo sapiens
tccaatctgagcgtgctgcggacggcgctgcggtacatccaggctctgacgcccgctctgcggcttcggtgtttgaacaggc

SEQ ID NO: 30092 - DNA, 100 bp, Homo sapiens
gttaagtcccccaaagatgagatttacctgtgagatgtttcatcccaacaagatttaccgcattgtttctcagaagcaaatgtcagacagacgcgaaaat

SEQ ID NO: 30093 - DNA, 98 bp, Homo sapiens
tggtgcatgggaggggagccgggccaggaatctatccatactaatggaaatgtaactggaactgactctgatgataaaatcaaggaccatcaagcaag

SEQ ID NO: 30094 - DNA, 100 bp, Homo sapiens
aaaacctttgggcttcatggagtcgtcttagatgttgattcagtaaagctacttcttcttctaatccaagcagcccagctccagactggtacaaagattt

SEQ ID NO: 30095 - DNA, 76 bp, Homo sapiens
ccggctccggccgcgtttcccgggtaaaggggactttctgaagaccttttcccccgatgtcttccggttcttctgc

SEQ ID NO: 30096 - DNA, 75 bp, Homo sapiens
ccagggcagcatctctggtgcatgctgatgacgaaaaacaacagtccaggctctgcagacagcatcccacctgtc

SEQ ID NO: 30097 - DNA, 75 bp, Homo sapiens
acaacttaagggggaaattgcctggacaagagaggaaagcttagatatgccaacaacagcaattacaaaaatgat

SEQ ID NO: 30098 - DNA, 75 bp, Homo sapiens
ctcatgatagcttccaagggacaaggtgtcaacaatgtgccggtgcttgtttaaactgccaggaaaatagcaaag

SEQ ID NO: 30099 - DNA, 100 bp, Homo sapiens
tgtggcacaactaaatatagcagaacagaattggagtccggggcagccttctttcctgcaaccacgggaacttcgaggctacccacctttctgttctgag

SEQ ID NO: 30100 - DNA, 50 bp, Homo sapiens
tcctgtgctttactctgaagactcggctggtggactaggcctcaattttg

SEQ ID NO: 30101 - DNA, 95 bp, Homo sapiens
ggtattagaattacctaaaagatgggggaagaattctgaatttgaaggtggaaaatcaacagtgaattgtagggtcccctggcgatggcagaaat

SEQ ID NO: 30102 - DNA, 100 bp, Homo sapiens
gttgtctcctgatccagccggccctgccagactggggcagcacctactccgtgtcagtggtggagaccgactacgaccagtacgcgctgctgtacagcca

SEQ ID NO: 30103 - DNA, 75 bp, Homo sapiens
cggcccacagtgggggtgtgcaaacccgagagaactgggacacttgggttgaattcagtaagtttcctctgaagc

SEQ ID NO: 30104 - DNA, 79 bp, Homo sapiens
ccatccattccaggagccagctatctgagggccgttgctccagggagaactgcaaatatcttcatccacccccacattt

SEQ ID NO: 30105 - DNA, 50 bp, Homo sapiens
ggcgcgcgtgcgcagcgccggcccgagcccaataggggcacaaaacgtcc

SEQ ID NO: 30106 - DNA, 100 bp, Homo sapiens
caaaattctacgttagagagactgaaaagacatctaatttcattgctcggcagtatctttttgccacatacgttgctccttctgccactcttgacattgg

SEQ ID NO: 30107 - DNA, 94 bp, Homo sapiens
cgggaggaaggaacgaggcaaggagctaaagcagcgtgcgttcagccctggggactggcattgcggactgacctccagggagaggcccagatct

SEQ ID NO: 30108 - DNA, 100 bp, Homo sapiens
gaagaaccagcaggctctgtggttcaggactcccgacttgacacgatattttttgctaagcagccactcatctctgcccagctgctgccctccccaggag

SEQ ID NO: 30109 - DNA, 87 bp, Homo sapiens
actactttggattcacccacagcggggcggcggcggcggcggctgcggcccaatatagaacccagcgggtgccgcttctccacccga

SEQ ID NO: 30110 - DNA, 82 bp, Homo sapiens
acgaaaacgaagaaatcctcttttactgcctgtggacaaaatccatccttcgttgaaggttcatcttccttcctgtacagta

SEQ ID NO: 30111 - DNA, 99 bp, Homo sapiens
agaagaagaaatacatggaccgaagtctggacatcaatgcctttagggctccaccatctcttcccctaaaggcaaccaccattctgatttctctcacca

SEQ ID NO: 30112 - DNA, 100 bp, Homo sapiens
acaaggcgttcaagcgaaaacatgaccgctgagcccatgaggtctgaatttcctgctgctgttcacaaagatgctttttatctttaactttttgttttcc

SEQ ID NO: 30113 - DNA, 100 bp, Homo sapiens
acagagatgaaaacttggtgactatactggggaccagcctcttaatcggatgtatcttgtattcatggtgaaagaaaagatgttgtcccggttaagagta

SEQ ID NO: 30114 - DNA, 75 bp, Homo sapiens
gttctacgtgggagtctgtgcatttgtgagggtccagctgaagaatgatgtgagtgagaaggagcaaagatgggg

SEQ ID NO: 30115 - DNA, 101 bp, Homo sapiens
tgggtcgaccattccaaaaaaatcggtcttgtccaataagcatgtggctcctgatcatcttttgcaaatctgccagcgcatcggtcctatgttggataaag

SEQ ID NO: 30116 - DNA, 100 bp, Homo sapiens
atcagcagggagacctggataaggcacttttgctcacaaagaagcttcttgaactagtggtgctgattactatgattacggacatggactcagtgaggag

SEQ ID NO: 30117 - DNA, 80 bp, Homo sapiens
cctcaactttctgggcgttcatgatcctggccagcctgctcatcgcctactgcagtaactaggatttctacctcaaccgc

SEQ ID NO: 30118 - DNA, 96 bp, Homo sapiens
aatgtcttattgggctcctgtctgcaggatttacgcgcacgttggaaccgaagagagctctgttgttgcaggatctataaagggcactgcttccgg

SEQ ID NO: 30119 - DNA, 98 bp, Homo sapiens
ttccagtctgggagggaggcgtctgtcaccacgtgatgaatttcacccattcatcgaggcacttcttccacatgtccgtgcaattgcctatacttggt

SEQ ID NO: 30120 - DNA, 96 bp, Homo sapiens
cagtttgatgacattggagatgatgatgaagatattgatgacgtgatgtacctgctcccccttcaccttctgccataattggaagcttcctgaggc

SEQ ID NO: 30121 - DNA, 50 bp, Homo sapiens
cgagaagcccttactaaacaagctctggatgagggggatattgccttgtt

SEQ ID NO: 30122 - DNA, 95 bp, Homo sapiens
ctttccagggagggaacaaagcccacagcaccgaggtacttggaaggctccatcgcccctgaagacaaaggaagctgctcattgctgcctgggcc

SEQ ID NO: 30123 - DNA, 82 bp, Homo sapiens
cgtcgccgccgccaccatgcccaagagaaaggcgtccgacctccgatcatgaacgggcccctgcacccgcggcccctggtgg

SEQ ID NO: 30124 - DNA, 100 bp, Homo sapiens
gattttagctacatcaagtgatgaaaaacacccacctgaaaatatcattgatggcagcagccgctcttctaaaacattcaaaccaaagaagaatatccct

SEQ ID NO: 30125 - DNA, 75 bp, Homo sapiens
ctttggctgcaacaagtatgttgattactcaaggattaattagtaaaggttcttctgtgtggcagttcagaatga

SEQ ID NO: 30126 - DNA, 88 bp, Homo sapiens
gcgacatccgagtgcagaacctgcaagcgggctgacgcacgaggcacacaggaaggaggtggagcaggtgtatctgcgctgtgcggcg

SEQ ID NO: 30127 - DNA, 100 bp, Homo sapiens
gtaacctgcactgtgacctacactagtcgcgggagccacgcagaggacgccggaacaccctggaagccgagaaatgatttctcgaatgctggcagccaaa

SEQ ID NO: 30128 - DNA, 50 bp, Homo sapiens
tgtgtgaagagtatcattcgacagggtttgtggatgcacttagatgtttg

SEQ ID NO: 30129 - DNA, 100 bp, Homo sapiens
tgcggccagtcgccactgctagagaagaagaaggaggttcctgctgtgccagaaacccttaagaaaaagcgaaggaatttcgcagagctgaagatcaagc

SEQ ID NO: 30130 - DNA, 100 bp, Homo sapiens
cataatagaatgtctacattcctattctgaagaatatttctgtgtaaaaagaattttctcagggggagatcaaagcttttcacattactctagtccccag

SEQ ID NO: 30131 - DNA, 82 bp, Homo sapiens
attttggctgctgcaggagccattttagaaaggcctaaagaatgtatttgacgaagcaatattggctgccctggagcctcca

SEQ ID NO: 30132 - DNA, 100 bp, Homo sapiens
ttataaaagcaaacacaggattcaccacagtacttcacatcgtcgttcacatgggacattcactactttcactgcctaagaatcctggaccttctcaaag

SEQ ID NO: 30133 - DNA, 100 bp, Homo sapiens
acgtgtttcaagaccaaaaaacacaataccaggcatacatttggcagaataaatgaaccagacggcaaatggatacatcttgttttttcatattacatct

SEQ ID NO: 30134 - DNA, 80 bp, Homo sapiens
gccgaggagcgggaagagttgctgggcgtcgagggcgaggcccccagcagtgagactggcacatccctggacagcccctc

SEQ ID NO: 30135 - DNA, 98 bp, Homo sapiens
acccggactcttccgtcaatttcgcggaattctccaagaagtgttcggagagatggaaggaagttaaatgaagttcgaaagagattgaatgagctaag

SEQ ID NO: 30136 - DNA, 98 bp, Homo sapiens
aaccttaaatttttggaagaacaatatattcattttggcattgtgcagaggaatgtatcctgtcaggtataatgtcagtgaatggcaagaaagttctt

SEQ ID NO: 30137 - DNA, 100 bp, Homo sapiens
tgcagcgacgaaatccccctgaaggtaccgcggacctcgccccgggacagcgaggagctgagggaccctcgggctgacgcacgaggcacacaggaaggag

SEQ ID NO: 30138 - DNA, 83 bp, Homo sapiens
gccgccctctcgtcccactttccagaatggagatgtatgcatttcgattcttcatccgcctgtagatgacccacagagtggag

SEQ ID NO: 30139 - DNA, 90 bp, Homo sapiens
ggaggcattttggggcagaatacagagatatggaatcaggcaaaagatgtgattgaagagcatggtccttcagaaaaggcaataaacggc

SEQ ID NO: 30140 - DNA, 82 bp, Homo sapiens
cctcagcctgcagacagcctattgtgggaccttttgatcgtaggaaatactatgtgaagtatgccggaaaacatttaaacgc

SEQ ID NO: 30141 - DNA, 74 bp, Homo sapiens
aaaatcaaaacgctgattaaaagaagcacgaagctgaacatggttatgcctccatgttaccatacaataacaag

SEQ ID NO: 30142 - DNA, 75 bp, Homo sapiens
atcgtgagaacaccgacatcagtgagaaggaggctggctgcagagaccatggtccggcctctttggcctaccccc

SEQ ID NO: 30143 - DNA, 51 bp, Homo sapiens
ggaaaagtctttcagaataaaatggagttgatccccctcatattgtgtaca

SEQ ID NO: 30144 - DNA, 96 bp, Homo sapiens
tggaaatcctaatgacagtctccaaattcgcctccatctgtaccatgctatggcctgctgtgcagttagccaacttctacctggtcccccttcatt

SEQ ID NO: 30145 - DNA, 51 bp, Homo sapiens
ggagagccccgactcctggatccctgggtgggcaaacgcagaggcgggaac

SEQ ID NO: 30146 - DNA, 83 bp, Homo sapiens
gagaacgaggaggaaggagagaaaatggcgtccacgggtgacagagctgaatgaacctctctccaatgaagatcgaaatctcc

SEQ ID NO: 30147 - DNA, 100 bp, Homo sapiens
aggatcccagttttctctggatgacgtggtggccatcgcgggtgccccggtcaccgtctggatggcctacgacacagggtacactgagcgctacatggac

SEQ ID NO: 30148 - DNA, 108 bp, Homo sapiens
gaatttggagtagtttcaaatacaagattgattgctgctgctacttctgtatataaacaatcagattctgtatggaagaagtcaccaaaatgcatctgccattattaa

SEQ ID NO: 30149 - DNA, 100 bp, Homo sapiens
acggagcgctgccctgcagcccgagcccatcaaggtgtacggacagagtgaagatagtccaagtcctaagagacagcgcctctctcattcagtctttgat

SEQ ID NO: 30150 - DNA, 98 bp, Homo sapiens
accggcagaacacagcagggcggaggaaagtgcaggttgccatgtcaaatcttagcgaggctgtgcaggatgcagacctgctggtgtttgtcattccc

SEQ ID NO: 30151 - DNA, 75 bp, Homo sapiens
cttgggtttctttcttaaaggactgatttttagaactccacatttgagatatggaatgtgcagatgtcccactat

SEQ ID NO: 30152 - DNA, 75 bp, Homo sapiens
agaagcttgggctcacttccacaaatgaagcaagatttccagatgtagcaaatgggtttattgaggaaataattc

SEQ ID NO: 30153 - DNA, 100 bp, Homo sapiens
agcgagagcgagtgcctgagcaacatccgcgagttcctgcgcggctgcggggcttccctgcggctggaggtatagctgtggaccaactgtatatgatcat

SEQ ID NO: 30154 - DNA, 100 bp, Homo sapiens
cttctacgaaaaagccctggtggagctgaaggttgcagaaatgggacgtcggtcatcagatactgaagaagaaagcagaagcaagagaaaaaagaaacac

SEQ ID NO: 30155 - DNA, 74 bp, Homo sapiens
aaaagatgtcacaaaggaaaacgaggaaagtcccaggatgactactgtgtcaatagagatggggtttcaccatg

SEQ ID NO: 30156 - DNA, 75 bp, Homo sapiens
ccgcttctgtacccagaccctgggtgtcgacaagggctacaagaaccaggtagacaacaccaagtttacgatgga

SEQ ID NO: 30157 - DNA, 100 bp, Homo sapiens
cttttcatgtaccaagtcttgaagagcttgctggagaaatttctgaataaattggcagaagaacgcagacagaagaaggaaacttaagatgtgcaaggag

SEQ ID NO: 30158 - DNA, 82 bp, Homo sapiens
atttgacttgtttgatgttcgtgactttggaaaggtgaaaggtgtagcagtcactcggcctacacccacagcatcgaccttg

SEQ ID NO: 30159 - DNA, 97 bp, Homo sapiens
cgattctgcaaccaagcacctgaaacagcagggtggttctcttcccaaagtggaagccaaattcatcaattatgtgaagaattgcttccggatgact

SEQ ID NO: 30160 - DNA, 83 bp, Homo sapiens
agggcctcggccatccaagggtctcccagtcagactcagtcacatgcccactcgaagtcgcactgctatggaaagtgggtgca

SEQ ID NO: 30161 - DNA, 101 bp, Homo sapiens
ctcctgcccctgtccgggggatgactgattctcctccgccagttccagggtctccctccactgctgtagtaacccgggtccggggcctcggtggtgctcct

SEQ ID NO: 30162 - DNA, 100 bp, Homo sapiens
gtgtaagcgcagaaagcaggcgaacccgcggcgcaataacggtaatctgtaagtcagatgctccaacaggggatgttcttcttgatgaagctctgaagca

SEQ ID NO: 30163 - DNA, 75 bp, Homo sapiens
agtctgcaactgtgtctgatggcgacaatgcagatcttcgtgaagactctgactggtaagaccatcaccctcgag

SEQ ID NO: 30164 - DNA, 75 bp, Homo sapiens
ggcaggagccctctcatggtgaacagcaactattatgtcatgatggagaggagaaaacctatggtggctgtgaag

SEQ ID NO: 30165 - DNA, 101 bp, Homo sapiens
cacccctatccagacggctgcccttcaagtaccactggctccaaggctgcatctctccactggactagcgagagggttgtcagtgttttgctcctgggtct

SEQ ID NO: 30166 - DNA, 101 bp, Homo sapiens
ccggtttttagtccattgactatgcagcctaatgttaattggccttggtcctcacagctccaaaaagaaacaggatctcgataagctctatgagctgaagt

SEQ ID NO: 30167 - DNA, 75 bp, Homo sapiens
cctcacggagctgggcgacgagctgaccctgggagacatcgacgtgtactaatggtcacttgatgtgcgctggct

SEQ ID NO: 30168 - DNA, 80 bp, Homo sapiens
ctgctgagaatactgtcatcctacccaccataccacagacaaatcttcctattttcaagctgaaagaatctactgttaga

SEQ ID NO: 30169 - DNA, 76 bp, Homo sapiens
tggaggagttccgtcccagcccgcggtctcccgtctcgcccaagaacttcaaggtgaaaatgatcatgaagacatc

SEQ ID NO: 30170 - DNA, 100 bp, Homo sapiens
cgagctgattcagcgcatcggcagcggcacctacggcgacgtctacaaggtttattacccagaactctttgtctgggtcagtcaagaaccatttccaaac

SEQ ID NO: 30171 - DNA, 127 bp, Homo sapiens
acagaagaactgaagataggcaacaagatgatgagggcgcggcagtatccttggggcactgtgcagggaagatgagaatgtgcctactgctcctgatcctccaagtcaacatttacgtgggcatggg

SEQ ID NO: 30172 - DNA, 100 bp, Homo sapiens
tcagcccttcatttgacagtgtactgccccgttacttatttttacaaatcaatgaactgagccatgttcaaatccctgttatgttgatgccagatgactt

SEQ ID NO: 30173 - DNA, 83 bp, Homo sapiens
cacaattccactctctgccttctctgaccccaagaagaccaaaccatcccacggctccaagtgtctttggtgcaacactaaca

SEQ ID NO: 30174 - DNA, 83 bp, Homo sapiens
gaggccgggtacctgggctgggatccggagcaagcgggcgagggcagcgccctaagcagcgctggccgcgcgccgaacccgag

SEQ ID NO: 30175 - DNA, 75 bp, Homo sapiens
ggggacttctgcaaatacagagactcggattaaagtttgtgatggacgcctctgaccccacccagctctctgcat

SEQ ID NO: 30176 - DNA, 75 bp, Homo sapiens
gcactccatgagctaaaactggaagagtggctgcgggcctctcgggtgcttcttgtcggcttgaaaggacttggg

SEQ ID NO: 30177 - DNA, 46 bp, Homo sapiens
cgaactggcagacggatatttactacaacgactgaaagacctttca

SEQ ID NO: 30178 - DNA, 101 bp, Homo sapiens
cattgcttttgaagttattaaagtctgttggtgcacaaaaagacacttatactatgaaagagtcaagctacaacttcaagcagaagagagaggagttgtgt

SEQ ID NO: 30179 - DNA, 82 bp, Homo sapiens
caacactcaacattcaagaaatatttgtcaaagacctgctgtaagccagttgtcatttacgtgctgaagcatattgacttga

SEQ ID NO: 30180 - DNA, 83 bp, Homo sapiens
ccgcgctgcccgcactcctggtcctgctcggggctctgttcccagaatttcttgaggttggcaaaaagcagcctgctctggat

SEQ ID NO: 30181 - DNA, 100 bp, Homo sapiens
ttctgcagaaaaagaggctcttcctcctcctcccgcgacggttatcaatactctggctgaccatcatcatcgtgggactgactttggtggaagtccttgg

SEQ ID NO: 30182 - DNA, 100 bp, Homo sapiens
ggaagatggcggatctggaggagcagttgtctgatgaagagaaggaaccacgtgaatgttgagggggcgacacacaagcaggtggtggacctgattcgag

SEQ ID NO: 30183 - DNA, 100 bp, Homo sapiens
gtttgcagaagggctttacttcactctggcagatattgtgctcttgccctgtatccatcatttcttggagtcacagatgctgggaagtatggcccgaaag

SEQ ID NO: 30184 - DNA, 100 bp, Homo sapiens
cctgcattggcttcccaaagtgctgaaaatacagatttggattcaagatgtgaaataatcagcgatgggaaaatgcagctttataggaaacactcatgtg

SEQ ID NO: 30185 - DNA, 82 bp, Homo sapiens
catacgagaatggcttgtgaaatcatgcctctgcaaagcttaaagcttttcaagccaggccaagaagctgtgaagtaccagg

SEQ ID NO: 30186 - DNA, 103 bp, Homo sapiens
gtagaagcatcgaaagcgttggagaggtgttaccggaacggcggcgacaagggtgttcccgaactagagtgggtgtcatggagaaactccagctgggcccaga

SEQ ID NO: 30187 - DNA, 98 bp, Homo sapiens
agaaaaaggcgctggaaaaagtgaatttcgtaaccagaagccgaagccggagaaccaaggttcaggaagatttgactgaagagaaaaaaagggaactg

SEQ ID NO: 30188 - DNA, 100 bp, Homo sapiens
gaataattctgaaagaaagaaaacaaagaaaaacatactccagaattcctaatagaacagagtatgctgctgctgttccgctttgcgtcctcgctacaaa

SEQ ID NO: 30189 - DNA, 74 bp, Homo sapiens
ctggctctcctggcaaggaggaaggggctggacgcatggaatacctcgtgaaatggaagggatggtcgcagaag

SEQ ID NO: 30190 - DNA, 96 bp, Homo sapiens
gagcggcaacaagagcgttttgatggagcggctgaagaagactgtgccctgtccacggtgcctcctgcatgtcctgctgccctgagctgtcccgag

SEQ ID NO: 30191 - DNA, 51 bp, Homo sapiens
agccaaacaggaggaggaagtggaggttcctacaacagcagccagtacccc

SEQ ID NO: 30192 - DNA, 75 bp, Homo sapiens
ccaggactgcgcccccgggagcgggcgcccagaggttcttgggtgtctctggggagtccctgggccagaccttcc

SEQ ID NO: 30193 - DNA, 123 bp, Homo sapiens
cgactccgtaggagcgcgggggcggctcctgctcttcctggactcctgagcagaggttgtacatcctggagacctgaagaattctgttgaagtcgcactgaacaagttgctggatccaatccg

SEQ ID NO: 30194 - DNA, 77 bp, Homo sapiens
tgccagggtccctgaagagggaagacacgcggaaacagaaaacccgcctagtgccaagcaaccctccaagatgctag

SEQ ID NO: 30195 - DNA, 90 bp, Homo sapiens
tcacattgtgctcagactgtcagcagtgtttttaaagggttctttattggtgaaaacatgaatccagatggcatggttgctctattggac

SEQ ID NO: 30196 - DNA, 75 bp, Homo sapiens
ctactccggcttgcgttctggaaggagaaaagccttacagatgctcatgggaagggtgtgagtggcgttttgcaa

SEQ ID NO: 30197 - DNA, 90 bp, Homo sapiens
ggcgaggagtctctgtccgggggcctggctaaggaaaccctattacctccagcattggcgctctcataggcctgtccgtagcagcagtgg

SEQ ID NO: 30198 - DNA, 75 bp, Homo sapiens
tgcatctggaatgtttcctggacaaagaagatttgttcccgacaaggagttttctggttcagaccgtagacagag

SEQ ID NO: 30199 - DNA, 50 bp, Homo sapiens
ctttgtgactcctcgatcttcagttgagttttacagctcccagcacagta

SEQ ID NO: 30200 - DNA, 100 bp, Homo sapiens
gcgctaggtggcatctcctctcacggatgcctcgacattggcgaggaggctgggagatctgccggcgtccagcaaccagcgctgcttcgcgacagaagcc

SEQ ID NO: 30201 - DNA, 74 bp, Homo sapiens
atcctccacagctccagggaaggcactcaaaagtggggggcaggaaaggttttagctaaagaagatactgaggc

SEQ ID NO: 30202 - DNA, 75 bp, Homo sapiens
caaagcctcctggaccgtccaagaagtttggtgcacctcgatttggaggaagtagggcagggcccttatctggaa

SEQ ID NO: 30203 - DNA, 110 bp, Homo sapiens
ctggaccctgcccagcagaatttgtatagagatgtgatgttggagaactacagaaacctggtctccctaggtgtgatgaatgcagactctgctaccattttggctgtttg

SEQ ID NO: 30204 - DNA, 100 bp, Homo sapiens
cgataggagtggaagcccaccaggtacatctccgttcatggatgcattaacagccaatgggacaaccaacatacagacatctgttacaggagtgactgcc

SEQ ID NO: 30205 - DNA, 98 bp, Homo sapiens
ttgccgatttcatgactaaccagtaacctaaaggcagacccagaagagctttttacaaaactagagaaaattgggaagggctcctttggagaggtgtt

SEQ ID NO: 30206 - DNA, 100 bp, Homo sapiens
tggccatgtagaagttgatgaatcaagaggaatgcacatctgtgaagatgctgtaaaaagattgaaagctaagaagcagactacagtgcctttggtacag

SEQ ID NO: 30207 - DNA, 95 bp, Homo sapiens
tgaccgagagcgcgaatatcgtcatcgttagaaggccacatatgttcgacctgagagctgctatcttcccagctggttgacgcctcagtacttgg

SEQ ID NO: 30208 - DNA, 117 bp, Homo sapiens
accaggagaggccgggggcagccgccatcggcagcgccagttccagggtctccctccactgctgtagtaacccgggtccggggcctcggtggtgctcctgatgcccctcacccaccc

SEQ ID NO: 30209 - DNA, 50 bp, Homo sapiens
gcgcgctgcgcggactgcggcgccccggactcggtgaaatacctggagtg

SEQ ID NO: 30210 - DNA, 76 bp, Homo sapiens
gaactatagagtttgtggacagatttatattgattggcggcagtaagcacacaatgaatgatcacctgcatgtcgg

SEQ ID NO: 30211 - DNA, 83 bp, Homo sapiens
ggtggatgaagttgttcattgtttgtcaccacaaaaaggacaggttaaatggaagctgatcggcgttcacatggaatcctcct

SEQ ID NO: 30212 - DNA, 88 bp, Homo sapiens
tcccagatgaacacactggaagagcttcttccagaccagctggtcttgcttctggagcatctcttggagcagaagactctgagccccc

SEQ ID NO: 30213 - DNA, 75 bp, Homo sapiens
cgggtggagtgtaggtcatatcgccgcgagacctttggccagagcaagacataaaagattcttttcaacaagtga

SEQ ID NO: 30214 - DNA, 98 bp, Homo sapiens
gtcctccataaataatatggggctgaacagctgcaggaatgaaaaggactctgcccttgtccacaaggagagcacacaggagagaatggctgctgtgt

SEQ ID NO: 30215 - DNA, 100 bp, Homo sapiens
tctctggtgcaggaaaaatgttcactgcagagctaaaaaagtccctgtacgccatcttctcccagtttggccagatcctggatatcctggtatcacggag

SEQ ID NO: 30216 - DNA, 100 bp, Homo sapiens
gaagaaaattgtggatcaaaacacaaagacatttccactgggcctgggagatgggcaattctattcatggacagatggtttgagaagaaaggactggcat

SEQ ID NO: 30217 - DNA, 75 bp, Homo sapiens
cttattcccttcaattcaagtaacaggttacacgcatggggagatactctggaggaagcatttgagcaatgtgca

SEQ ID NO: 30218 - DNA, 100 bp, Homo sapiens
ctggcccggtatggctgaagtcagcatcgaccagtccaagctgcctggagtcaaggaagaggagcagggacatggcatctctccggctgcacgcggcccg

SEQ ID NO: 30219 - DNA, 127 bp, Homo sapiens
agcgaggacttctaccgctgcggctactgcaagaacgagtcgggcagccgctccaatggtgctggagaatctggtaaaagcaccattgtgaagcagatgaggatcctgcatgttaatgggtttaatg

SEQ ID NO: 30220 - DNA, 100 bp, Homo sapiens
tcttcgccaagaacgtccagaagcgactcaaccgcgcgcaggaaaaggctcttgagatctgtcaacagagaaactttgtagaagagacagtttatcttct

SEQ ID NO: 30221 - DNA, 100 bp, Homo sapiens
gcctgcccaacttctgcgggatcttcaaccacctcgagcggctgctggacgaagggtgggctttgacagcgagaatcccggggacgacgggcagatgcac

SEQ ID NO: 30222 - DNA, 98 bp, Homo sapiens
ttaccactgtctgtcggatatgaagaccctggagtagacagccattgatatcctgacaacagtagtacgaaatacaaagcctcccctttcccagcttc

SEQ ID NO: 30223 - DNA, 99 bp, Homo sapiens
ctggctttgttcccaatgacatgcaagttggacagacgggaaaaatagtagcaccagtatgggccagcagtttcctgccagatattgcccagcgtgagg

SEQ ID NO: 30224 - DNA, 131 bp, Homo sapiens
ggagaagaagatttgtttgtttctgccagtgaaaaccaccaaaacaatccagctgttccctcagcttcttaatgaagaggataactcagaatcatcggctatagagcagccacctacttcaaacccagcac

SEQ ID NO: 30225 - DNA, 98 bp, Homo sapiens
taaagaacgccttctacatcggcagctaccagcagtgcataaacgaggcgcagcgggtgaagaacccggcagtgggcaggtgtttgtgacttcagaga

SEQ ID NO: 30226 - DNA, 76 bp, Homo sapiens
aaactgaatataatactcaagattccaagcttccagacaagctgcaggaattccagggattactccaactgaagaa

SEQ ID NO: 30227 - DNA, 50 bp, Homo sapiens
caagttccaaggttacgtttcacttcctgcctgacacagctcacttcaag

SEQ ID NO: 30228 - DNA, 82 bp, Homo sapiens
gcggcgcctcaggcacctcggcccggatgaaggatttgggggcagagcacttggcaggtcatgaaggggtccaacttctcgg

SEQ ID NO: 30229 - DNA, 74 bp, Homo sapiens
ttcatgttgggaagaactgtgtgattacagattacatcaatgccagtttcatggatggctacaagcagaagaat

SEQ ID NO: 30230 - DNA, 75 bp, Homo sapiens
cgcgggtccgtgcgcccagcgtcccagggcccaggccgagcagggacacttgacattcagggacgtggccataga

SEQ ID NO: 30231 - DNA, 101 bp, Homo sapiens
gagaccctgcaaagatcctgggagaccaagaaggagcatttctaccagaggcagcaccggctgcccgagccctcctgcccacagctggccacactcaccag

SEQ ID NO: 30232 - DNA, 100 bp, Homo sapiens
acaaatccagcagggaggtccagatgaaaaagaaaagactaccgcactgaaaggaagaagaggaaaggctatgaagatgatgattacgtctcaaagaaat

SEQ ID NO: 30233 - DNA, 100 bp, Homo sapiens
ctcacgttcatcatggtgcctggctgccaggcaggtcatgaaacgagtgcgtaccgagcagattcagatggcagtgtcctgctacctcaaacgccggcag

SEQ ID NO: 30234 - DNA, 87 bp, Homo sapiens
gttattgaagacatcaagggaaaatggggtgaggaagattttgaagacaatcgtcacttatacagccagcagccagcttcgggtgta

SEQ ID NO: 30235 - DNA, 83 bp, Homo sapiens
acacaatccccatcagttgcacgtcttcgaaacctgctataaccccaaagtttgatgaaggccggaacaactttgaaggggag

SEQ ID NO: 30236 - DNA, 100 bp, Homo sapiens
acccgagtcgaagcgggaagatggctgcagacaagcctgcagcttttcggagactgggaagcccaactgcgaagaataatgaagctcattgctggaggtg

SEQ ID NO: 30237 - DNA, 85 bp, Homo sapiens
agtctgtcattgagaagttctcccacagccgcgtggagatcatggtcaaggacacccctgcccgcgatggccatcctcccgttgc

SEQ ID NO: 30238 - DNA, 75 bp, Homo sapiens
ctccagtcggtgttgagcacggcgagcagtctcaggcctttagtgatgatgaaatgggcaagttcatgaaacctg

SEQ ID NO: 30239 - DNA, 82 bp, Homo sapiens
ggcggagcttcgccaaggctggcgcagtcgcattccatattggaagaagagatttctacacatgaaaaaaatgcctttgttt

SEQ ID NO: 30240 - DNA, 82 bp, Homo sapiens
ctgtcaccaccagctcagccaagatcaagtgaattacatgaacgacagccttcgcaccgacgtcttcgtgcggttccagcca

SEQ ID NO: 30241 - DNA, 74 bp, Homo sapiens
ttgggtgctgcaccaaaactccagcagtgggctttcttcaagatacaaactggactctcaggacaaaacgacac

SEQ ID NO: 30242 - DNA, 100 bp, Homo sapiens
ggacctgcctcctggtgcgcattgtctttccatcgagagccaagcgacaaggagacatctggaacaaactgatggaaaatccctcctggataagggagat

SEQ ID NO: 30243 - DNA, 100 bp, Homo sapiens
gcaacttggaccaagaactcaaactttttgtatctcgacactctgcaagattctctcctgaagtcccaggcgcggatcaagaagatcatgcagacggacg

SEQ ID NO: 30244 - DNA, 74 bp, Homo sapiens
cagcgaaatcggaaaagaaaagctgaaccatatgaaactagccaagacaatgattgaagctcacgttgatgtca

SEQ ID NO: 30245 - DNA, 100 bp, Homo sapiens
gaggaagtagagcccgggaccgccaggccaccaccggccgcctcagccatggacgcgtccctggagaagggaagcctcttctcccactgcatctgtgatc

SEQ ID NO: 30246 - DNA, 90 bp, Homo sapiens
caggtgttgcaagctgacatgttaagaattaggacaaacagaacaacatttaggaatcgacgctctctgcagcctcccgcgacgatgccc

SEQ ID NO: 30247 - DNA, 80 bp, Homo sapiens
caacatcgacatcaagtcggccggggatttaggtacttcctatttaacagacattgtgtggtgggctggcacaatcgcaa

SEQ ID NO: 30248 - DNA, 74 bp, Homo sapiens
tgtatatcaaacggcaagatgtccagtaatgtcccggcggatatgggtggtgttggtatccaactatacacaaa

SEQ ID NO: 30249 - DNA, 82 bp, Homo sapiens
tttgaactggaccccgcgagcaccagagtcggcgtaactatcgcctgacaggtgtggacgaatgtggaacctcgctctgtgg

SEQ ID NO: 30250 - DNA, 50 bp, Homo sapiens
agaagaccgaagcgttcgtatctggaaggctgctctttggcgtaaattgc

SEQ ID NO: 30251 - DNA, 50 bp, Homo sapiens
acatcctggaagctgggaaatggctgacaaaccaagaggatttgccagag

SEQ ID NO: 30252 - DNA, 100 bp, Homo sapiens
tgtgaggaaaaatatcgagatatcctaaaatttcctgaagaactggaacacgtagaaagtgcaagcaaaggaatactcccccagttgcaagaggcgcagg

SEQ ID NO: 30253 - DNA, 90 bp, Homo sapiens
ctcgaagaactcgagcgacagagacaagctgagcttgccgcacaaaaagctagagaggcctcgaaaaagcccaagacagcagaagcagac

SEQ ID NO: 30254 - DNA, 96 bp, Homo sapiens
gggatgacaaaaagtcatagtggtgtgacaaacaggtgcagttcaggagcagatgagatccaagggaaaccgagataggccatggagcaattctag

SEQ ID NO: 30255 - DNA, 51 bp, Homo sapiens
ctcccaaggtgctgggattacagattttactatgagcagcgattactacgg

SEQ ID NO: 30256 - DNA, 100 bp, Homo sapiens
tatgtactgcgcctggatgtggccaggattaaagcaaggagagccaatcatgactggcaaaacacagaccagcaacgtcaccaataagaatgaccccaag

SEQ ID NO: 30257 - DNA, 98 bp, Homo sapiens
catagtacctacagcagcactccaggaagcagttcaggtacttttgaagcattctgcagatgttaatgctcgagacaaaaattggcaaacccctttac

SEQ ID NO: 30258 - DNA, 100 bp, Homo sapiens
gctccctacgatgagaactggttctacacgcgagctggtcatcatcagatttgaaatatttaaagtggatacaaaactatttcagcaatgcagacaatta

SEQ ID NO: 30259 - DNA, 90 bp, Homo sapiens
cgtcggccgagtacattcccctcacgcccgccgcagccgacgatgaaggcttgactattgacctgaagaattttagaaaaccaggagaga

SEQ ID NO: 30260 - DNA, 100 bp, Homo sapiens
ggacagggctgaggaaccatgtctccatccccgaccgccctcttctgtcttggtgtctgacttccagcaactgctggcctgtgccagggtgcaagctgag

SEQ ID NO: 30261 - DNA, 101 bp, Homo sapiens
ccactgccctggggcagctgaactgagcgtatgtgccacgccgcccaggagacccctctgctgcaccacttcatgcttttcctccgcaaccatgtctgaca

SEQ ID NO: 30262 - DNA, 136 bp, Homo sapiens
ggaaaggtggaaaccagctgcgctgtcctaaatgtggcgacttgtgcacacatgtagagacctttgtataatgtttcctatggactcaaagccttcactgttaaaccccactggatctatactcgtctcatctccg

SEQ ID NO: 30263 - DNA, 100 bp, Homo sapiens
ccacattgtccaggccttcgccaacagcggcaacgccatcaagcccgtctccttcatccgagacctgaaaagaaatgctgtctatgatttcttcattggc

SEQ ID NO: 30264 - DNA, 90 bp, Homo sapiens
catcaagaagaaagaatgcgtgtattttgtggaaagttccaaactgtctgatgctgggtgagccccaggtgtatcccagagggatccggg

SEQ ID NO: 30265 - DNA, 75 bp, Homo sapiens
ggagtatctggagagaaacagcttcatccacagagatctggtgttaaaccgcctgacttttgcgtctactctttc

SEQ ID NO: 30266 - DNA, 97 bp, Homo sapiens
atgtacttagaattattaatgagccaactgctgctgctattgcttacggcttagacaaaaagggttcagtttggcaaagacttggtgcagatgtgac

SEQ ID NO: 30267 - DNA, 75 bp, Homo sapiens
ggaaaaccagatccagaaactggaggagtcccgctcgaagctagatgccttcaattaagttgcagagttctgatg

SEQ ID NO: 30268 - DNA, 97 bp, Homo sapiens
gcgcggcctggacaagcggaccccggcccaggcggccttcgagaaaatgcaggagaagcggctcatgatggagcagtccaagaagtcctccctcatg

SEQ ID NO: 30269 - DNA, 100 bp, Homo sapiens
gagaaatccaattcagctttttgtgctgccagcaagaaatgatcagtagcaccagtgtttatgtgctgggcctaaaggagataacatttatgaatggaga

SEQ ID NO: 30270 - DNA, 75 bp, Homo sapiens
ctcggcctctccagctgtccgcgggaggttatattcaaaagaaaaaggaactgtggggaatctgtatctttattg

SEQ ID NO: 30271 - DNA, 102 bp, Homo sapiens
cgggctgcaggagaagatggcggtctccacaggtgacaaggcaactgtatgagccactagttatgcagctgattcactggttcactaacaacaagaaatttg

SEQ ID NO: 30272 - DNA, 100 bp, Homo sapiens
cgaaccgggtgcggagccaatacccgcggcagcagcaccagccagtgacaactacagatcccaattggccatgctgatgttaaacgttaaaggatggctg

SEQ ID NO: 30273 - DNA, 101 bp, Homo sapiens
cctgatgagtctcacccagggagttctgacagctctgcgtctcaggaatgcaatggaaaaacttcatagtatggatgatgcctttaaaagacaagttgatg

SEQ ID NO: 30274 - DNA, 76 bp, Homo sapiens
gtcaaggtccacagggcacgcaagaccatgccgaagtccgtcgtgggcctggcatctttcccggcaaacctgcagc

SEQ ID NO: 30275 - DNA, 159 bp, Homo sapiens
agcaacttgacctcggtcccagtgccccacaccaccgcactgtcgctgcccgcctgccctgaggagtccccgctgcttggaaaatctctgaaggaaatggaaacaccgttgtcagcacttggaatacaagatggttgccgggtcatgttaattgggaaa

SEQ ID NO: 30276 - DNA, 100 bp, Homo sapiens
tcacattcggaggctggtgtccagggtctcagcgcgggggacgactcagctgaggagtacctgtcatttgcctttgagcattgtcaccgttctagtcaga

SEQ ID NO: 30277 - DNA, 100 bp, Homo sapiens
agctcggcccgcgggggagccccgggagccgcacgagaagatggcgaattagaagatggtgaaatagacgatgcaggatttgaagaaatacaagaaaaag

SEQ ID NO: 30278 - DNA, 100 bp, Homo sapiens
cagcaggcacccaagcgggcggcagaagccccagggccatcaaaagttaagacagggaagcctgaagaagccagccttgattctagagagaagaaaacca

SEQ ID NO: 30279 - DNA, 75 bp, Homo sapiens
gactgcacccaccaggaagatgtggctgtcatctgctcaggaaaattgcctaagaattatgacccaaaagttacc

SEQ ID NO: 30280 - DNA, 75 bp, Homo sapiens
aaggcccagccaatgaagatgaagacataggaggtcaaaaggctgagtttcaaattctggataatgtagactcaa

SEQ ID NO: 30281 - DNA, 50 bp, Homo sapiens
tttcctccaggcctttgagataaataacagatgcgggtgaaagatccaac

SEQ ID NO: 30282 - DNA, 85 bp, Homo sapiens
tgccttgtggaggagttgagaaaaaccaagggaactcgaatcatttatgacagaaagtttctgttggatcgtcgcaattctccca

SEQ ID NO: 30283 - DNA, 100 bp, Homo sapiens
atatttcattaaaagatttacagtttctgcaatcattttgtccttcggaagttcagccattcctcaggcgtcgaccagaagattatgatattcataacag

SEQ ID NO: 30284 - DNA, 100 bp, Homo sapiens
cacacaagaagaaatagacgccttcccaagattgtggactccgaagccttggaatcctgccagactcgcatttctaagctggagctccaccagcaagagc

SEQ ID NO: 30285 - DNA, 100 bp, Homo sapiens
taccacccagcagcagggcatcaaggggtgatccattcatgttgcagcagtctacaaatccagcaccaggaattctgggacctccacctccctcatttca

SEQ ID NO: 30286 - DNA, 75 bp, Homo sapiens
ggagcctcagcggtctgcgcctggcagcagaaatgcactcggtgatggaaagagagccactattctgaagaacac

SEQ ID NO: 30287 - DNA, 100 bp, Homo sapiens
aggagctcagagctccacatctgaccttctagtcatgaccaggaccagggcagcactcctcctgttcacagactaatagggatgccaaaggaaaaatatg

SEQ ID NO: 30288 - DNA, 108 bp, Homo sapiens
atgaagtaatacagaactgccccatcgatgtgcggcgcccgctgtataagacctcgaagtagggggaaaactgcagtggaagatgaggacagcatggatgggctggag

SEQ ID NO: 30289 - DNA, 100 bp, Homo sapiens
ccacgacccacgagatcatggggcccaagaaaaagcacctggactctgttttcactcattagctcctgaggtaaacaaattgaaaaaatgagcgaactgg

SEQ ID NO: 30290 - DNA, 50 bp, Homo sapiens
tggtgttcgcccacgaccatggagtgattggggcagatgtgagagggcac

SEQ ID NO: 30291 - DNA, 100 bp, Homo sapiens
tccgtcaacaggaccctggggcagctttggggaagcagtactctctgacaagatactgtgagagtcgacgaagggttttgttacagcatgtgcatgaagg

SEQ ID NO: 30292 - DNA, 100 bp, Homo sapiens
atccgcaaggccgcccgggaactgctgacgcttgatgagaaggacccacggcgtctgttcgaaggccaagaagacgctggagggaggctgttaggaggga

SEQ ID NO: 30293 - DNA, 50 bp, Homo sapiens
gctcacaagatgaaagagcacaactgccattggatgtccagaatcccctg

SEQ ID NO: 30294 - DNA, 100 bp, Homo sapiens
atggagcccaacggcccgtcgctgcccagggatgaagggcccccgaccccaagctctgccacgaaggtgccaccggagggcacgcgtctgcggctgaacc

SEQ ID NO: 30295 - DNA, 75 bp, Homo sapiens
taaaagtggtgatgaacttcaggatgagtctatccagaagttaaaggagagattgctcgtaaagatgaaaagctg

SEQ ID NO: 30296 - DNA, 78 bp, Homo sapiens
catgaaatgattgaatctggtgttatcaacttaaaagatgccacctctaaggctcgtggtcccaagaagcatctgaag

SEQ ID NO: 30297 - DNA, 75 bp, Homo sapiens
ctcagggtgccagacctcatcctgctcaagaagccagaaaaaggagatgaaaaagaattggacaaaagagaaaaa

SEQ ID NO: 30298 - DNA, 89 bp, Homo sapiens
ctagttcgaactatgtggaggagatgtactgtgcttggctggaaaaccccaaaagtgtacataaggagtcgttcacgcctactgaggag

SEQ ID NO: 30299 - DNA, 80 bp, Homo sapiens
caaggcctgccgttggctatagcaaatgccccaggcagtggctctgccaatgatcctgtgagtattcaggaatcactgtt

SEQ ID NO: 30300 - DNA, 50 bp, Homo sapiens
ggccgtcccactgctggagttcctgtccaacgcaaacatgcagatctttg

SEQ ID NO: 30301 - DNA, 101 bp, Homo sapiens
cgagctgaggaggccggctgcagccccaagacagagcgctactcctggcagtgcgtcaatcagagcgtcctgtgcggttctgcggggagtgtctccagccc

SEQ ID NO: 30302 - DNA, 100 bp, Homo sapiens
gagaactacaggaacctggtctccctgggtatttattacagtatcaggagccaataccttgtgagcagttggttacagcgctgtgtgatatcaaacaagc

SEQ ID NO: 30303 - DNA, 74 bp, Homo sapiens
tggtggttgatctgactcacaatgactctgttgtgggagagctggtgacggcctccaaggccatcattgaaaag

SEQ ID NO: 30304 - DNA, 75 bp, Homo sapiens
aggaaaacctccttatgctgatatacatccaatgaggaaaatggtgtgaatggaacattaacttcaaatgtagca

SEQ ID NO: 30305 - DNA, 100 bp, Homo sapiens
aggccaacaacccattccaggctgtgcaggaagggcaatccctacatgtgcaataatgagtgtgatgcgagtacccctgagctggcacacccccctgagc

SEQ ID NO: 30306 - DNA, 95 bp, Homo sapiens
taggaggaaaattcatcatctgactgacttccttttggtagtactgcgtgatgttgttcaggcttatcctgaagttcgcattgttcttatgtctg

SEQ ID NO: 30307 - DNA, 75 bp, Homo sapiens
ctgactttcagctatggaatcggtttttagaacttcagccataaaaatgggcagaattttccttgatcatatcgg

SEQ ID NO: 30308 - DNA, 90 bp, Homo sapiens
tggaagagtaggtggctggtgctgcggaagccgtcgcccgtggcagggcagctggtggaatttttgaagaaaatggaatctcgaggcccc

SEQ ID NO: 30309 - DNA, 100 bp, Homo sapiens
gtggaggtggagacccacaggagccccggacttcacctgagctacctcagacctcctgccccccgaggtctgcagtctcctgaacccagcagccatctac

SEQ ID NO: 30310 - DNA, 100 bp, Homo sapiens
ctggagaagcggccgcggccagggaacggggcatcgcggttccaacgatgggacacgagtgggtttggctggattctgaacaagatcatcccaatgactc

SEQ ID NO: 30311 - DNA, 100 bp, Homo sapiens
taagggtgcaactaaaacagtttgcatgaagaatccacctcacttaaatgggactggaccattgaaagacacgccaagcagttccatgtcgagtcctaac

SEQ ID NO: 30312 - DNA, 75 bp, Homo sapiens
caggcgctgcgccgcaacgccgagcgcaccgacatctgcctgctcaaaggatagctggctatttggaatttaaag

SEQ ID NO: 30313 - DNA, 90 bp, Homo sapiens
caaggaacatctcaccaatttcaaatcggctacatccgatactcccagatctgtgcaaaagcagtgagagatgcactgaagacagaattc

SEQ ID NO: 30314 - DNA, 75 bp, Homo sapiens
ggaacacgtagatctgggtgcatactattatagaaaatttttctaccagaaggggccctccagaatttccacagc

SEQ ID NO: 30315 - DNA, 100 bp, Homo sapiens
tctgataaagccactatcatggcctttgatgccctggtgaccttctgtgaagaactggggagccaggtgagaatttcaaggattatcgacttcatattgc

SEQ ID NO: 30316 - DNA, 75 bp, Homo sapiens
ggccaatgagaaagccctgaagcagaagggcatcaccgtgaagcagaagaggatgaaacaggcgcctatttaatc

SEQ ID NO: 30317 - DNA, 76 bp, Homo sapiens
gcaaagagatccagcccccttataagccaaaagctattactacaagggaagacataaattcaaagcaggttgctac

SEQ ID NO: 30318 - DNA, 90 bp, Homo sapiens
gacctccagatttccttactgaaataagcgggttttgaaaacaaaaaaaagaaggagtggaagagggggccaggatccaggcctccatcc

SEQ ID NO: 30319 - DNA, 100 bp, Homo sapiens
agagtcctgaccacaatggggaggacaacttcgcccgggacttcatgagactgtatacaatttgagagaagagaatagacaactaaggaaagcacaccaa

SEQ ID NO: 30320 - DNA, 100 bp, Homo sapiens
cctgatcggaccggccctgccgcccggcttcaaggcccgcggaacagcggaggacgaagagcgggacccgagccctggcagccttaagtgccttgaaaca

SEQ ID NO: 30321 - DNA, 98 bp, Homo sapiens
ccgggaacaggatgtcatcacctgttatgagaaagcaggggacatcgcactcctgtatctccaagagatagaaagggctgatcagctgaccgaagaac

SEQ ID NO: 30322 - DNA, 74 bp, Homo sapiens
cggcgctgtgaggagctggagaagaccttcagaacctgaagggccgagaagtcctgctgtgtttggtgccatca

SEQ ID NO: 30323 - DNA, 75 bp, Homo sapiens
gtgatggtggtcgccgcggcggcgtgtgcgcccctcagggcatatcgatgcatttacttcaaaactttttctact

SEQ ID NO: 30324 - DNA, 75 bp, Homo sapiens
ggaacgccgacctgaaaccatctctgagcccaagacctagttgtgcccgtaagcagtgcagcgaggggaggacat

SEQ ID NO: 30325 - DNA, 75 bp, Homo sapiens
tggagagcccccaggtggaccatggcggtgagattccaggcgtccgacctccgatcatgaacgggcccctgcacc

SEQ ID NO: 30326 - DNA, 100 bp, Homo sapiens
gccttgggatccggagggaggaagctgggacacccgggagtcaggaaatgtgcaaggatgatgctgaaaggaataacaaggcttatctctaggatccata

SEQ ID NO: 30327 - DNA, 98 bp, Homo sapiens
tagtctctcgccacagcggcctcggcctccccttggattcagacgccgattcgcccagtgtgaaaaactcaaattactgtcttccatcatataccgct

SEQ ID NO: 30328 - DNA, 100 bp, Homo sapiens
aacaggctgggcggcgcaggcgaggacggcaagaggccgcagcctctctggcatgtcggtccacaggtcctggctaccctgggaagagacaagaagtaaa

SEQ ID NO: 30329 - DNA, 100 bp, Homo sapiens
caaacatgttcacaacgggcatgattgtcacggattctgcctctgtggagcgtttactggggaagacggacgtccagcggccccaggtggtagagtactg

SEQ ID NO: 30330 - DNA, 100 bp, Homo sapiens
tgttttggttttgatatggattatacccttgctgtgtttgccagctctgagcctgtgccaggattccagggggataccctgcagctagcattcattgacc

SEQ ID NO: 30331 - DNA, 98 bp, Homo sapiens
gtctatcagccacagtctctgcatgtttccaagagcaacaggaaatgaacacattgcagacattgatcgccctaaaggactggcattcactgatgtgg

SEQ ID NO: 30332 - DNA, 74 bp, Homo sapiens
tggctggtggatttgcggatgaagtcgtacggaatggccacatcaaaagaatcactgataatgacatccagtcc

SEQ ID NO: 30333 - DNA, 82 bp, Homo sapiens
accgaccaatcctcacgattgagtgtcaaagaaggtcacgagaagagaatgccttctagatgcaaaatcacctccaaaccag

SEQ ID NO: 30334 - DNA, 100 bp, Homo sapiens
aaaggaacttaatttgatattaacaactggaggaacaggatttgcaccacgagatgtcactccagaggtattgttgcagcatctggcagtgagactgagg

SEQ ID NO: 30335 - DNA, 75 bp, Homo sapiens
gttggagcccctgctttccactgaaaccaatagagccatggcgactccctctgctgccttcgaggcccttatgaa

SEQ ID NO: 30336 - DNA, 98 bp, Homo sapiens
ctgcccagatggtggctcccggagtccaggtgaccatggaggctggtggcctccccttggagctgtggcgcatgatcttagcctacttgcaccttccc

SEQ ID NO: 30337 - DNA, 100 bp, Homo sapiens
gtcgcctccaggccaagagggatccttcacccgtgtctgctgccgcagcgggaaccgcaagagcttggtggtaggaacgccctccccgaccctctcccgg

SEQ ID NO: 30338 - DNA, 75 bp, Homo sapiens
taggcagcggaggagcccgaccgacccggaccaagaatcgccttcagccctgtctggtgcatccttggcagaaag

SEQ ID NO: 30339 - DNA, 82 bp, Homo sapiens
cccgacccgggccccgcggccctcgatgaggtcagcccaaggccaaccccactgtcactctgttcccgccctcctctgagga

SEQ ID NO: 30340 - DNA, 98 bp, Homo sapiens
ccaaatggagagaattatgcacctgacagcatctattacctttgccttggaatacaggaggacaatgaaaagcgaaccccattgcacgccgcagctta

SEQ ID NO: 30341 - DNA, 100 bp, Homo sapiens
gggaattgcttcgtttgccattttcttatggagaactgtccttgttggtatattaagtcagagtcaggataaatcacttcggagaatagcagaattaaga

SEQ ID NO: 30342 - DNA, 94 bp, Homo sapiens
gcagatccagagactaagattcacctgcaggtgattcatttggtgtaaaaggcttaatctccagcctttagcttatctttggcagagaaaccag

SEQ ID NO: 30343 - DNA, 100 bp, Homo sapiens
gggcttcctccacaccttgtccataaactgcccctcagctaccttcagacccaggatacagacaacctctcctacattgagcacatctttgagatctccc

SEQ ID NO: 30344 - DNA, 95 bp, Homo sapiens
gtgggatccacacagctcagaacagttggatcttgctcagtctctgtcagaggaagatcccttgcaatggctgccatccggaagaaactggtgat

SEQ ID NO: 30345 - DNA, 100 bp, Homo sapiens
atcccagctctttgggaggccaaggtcacacctgggtcctgagctggcgccatcaccggagacgccaggtgatgtccattcatcagaaataatgagcaaa

SEQ ID NO: 30346 - DNA, 75 bp, Homo sapiens
ggaattccattcttttccttattcttctgatgtggatccaggtgaatgaaggcaaggaggagcctggaagacctg

SEQ ID NO: 30347 - DNA, 100 bp, Homo sapiens
cggagatcgcccgccatggctttacttactgcggccgcccggctcttgggaaccaagaaagtcccattacagaatcctcccattaagtgggctgaaggac

SEQ ID NO: 30348 - DNA, 99 bp, Homo sapiens
tggagtgttaacagtgtagggaaaatagagtgtgtatcagcagagaccaccgaagactgcatcgccaagatcatggcctcagtggctttagaggatgtg

SEQ ID NO: 30349 - DNA, 75 bp, Homo sapiens
gggaacgattgggctgagcagaggacgacatgttgcttttcgtggaggctaaggcagctggataagcacagccag

SEQ ID NO: 30350 - DNA, 100 bp, Homo sapiens
acggctccccgtcgtcctggtgctgcagcgcccaataggggcacaaaacgtccccgggatgatgaagaggaggagcagaagatgcgtcggaaacaaactg

SEQ ID NO: 30351 - DNA, 98 bp, Homo sapiens
gacggccgtgcccgaggggctcagcgccttcacccaagcgctgccttgctattttggaagctacaagaaaaaaatagaggaaggaaggtttggtcttt

SEQ ID NO: 30352 - DNA, 82 bp, Homo sapiens
tgcgggactccatgtttcagaaccctctcatcgtcaaggaacctcggagagctgatagatcggtttgtggctgatttcaaag

SEQ ID NO: 30353 - DNA, 100 bp, Homo sapiens
cctctccagctcagccgcgtagtattggtaaaggttttcaaggtgtcatgaaaagatggggatttaaaggccagcctgctacgcatggtcaaacgaaaac

SEQ ID NO: 30354 - DNA, 90 bp, Homo sapiens
ctgggacgtgccacagatcccatcagaggcaccccagacacagcattgaagttgatatcgatgtggagcacggagggaaaagaagccgcc

SEQ ID NO: 30355 - DNA, 83 bp, Homo sapiens
gcgctgcagaaccagatccgggagcacgtcatctccatcgagggttgtgaccgagattcccgacgagagagactgaggggaag

SEQ ID NO: 30356 - DNA, 74 bp, Homo sapiens
gaacacccccaccccgatttagacctgcgagacccctggcacaagatccctgccctggacccagagaagctcaa

SEQ ID NO: 30357 - DNA, 100 bp, Homo sapiens
tgaaggagtgcagaggcatcacctgaaagggatgattctctgaacgactgtcggatcatcttcgtggacgaagtcttcaagattgagcggccgggtgaag

SEQ ID NO: 30358 - DNA, 89 bp, Homo sapiens
caggtcttctgtgaggaatctggattgtcacctttgctgcaaaaaattacgggtattccaataactgtaccacctccaggtaaaacttt

SEQ ID NO: 30359 - DNA, 100 bp, Homo sapiens
gcggtggtcaagcgggccacgcacctcgtcaccaaggccaagctctttcagagttagagacacctgggaaatactcacttacaccaccaaaccactgggg

SEQ ID NO: 30360 - DNA, 75 bp, Homo sapiens
gttgtgcctcttcatattggcgatcctgttgtgtgtcgtgaaaactacccctaaaagccaaaatgggaaaggaaa

SEQ ID NO: 30361 - DNA, 90 bp, Homo sapiens
gtaaattcttcagctgctcggacagatgaagctccccaaggagctgcagatacgggaatatgaatggattcattcccaaaccaaaagatt

SEQ ID NO: 30362 - DNA, 100 bp, Homo sapiens
cccacaactgggcactggccgagggaccctgcggctccgatcccggggccccgccacggtggaggatctgatctctgcactcgtcctaagagcccaggcc

SEQ ID NO: 30363 - DNA, 100 bp, Homo sapiens
ctcagctacccccgcacccacgcggccctgctgaaagtggcgcaaatggggccaactcaccctatgcagcacagcccaccagctacgactatgatgcccc

SEQ ID NO: 30364 - DNA, 127 bp, Homo sapiens
cggcaacacggtggccatcgacctgattgtgcagcacgtgcacagccagctggaggagtggtggggtcagatgctgtggactctgggacctgcagctctgcctttgctggctgggaggtgcacacgc

SEQ ID NO: 30365 - DNA, 100 bp, Homo sapiens
cttcatccgggaagtgcttggggatggagtgcctccaaaggttgctgaggtacctttgacaggagcgtgaccctgctggaggtgtgcgggagctggcctg

SEQ ID NO: 30366 - DNA, 102 bp, Homo sapiens
ggccgctcagcctatgaattctaccatgcgctagactccgagaacatgaccaagagtcaccagaactgaagactatgaccgtctgaggcctttatcttaccc

SEQ ID NO: 30367 - DNA, 51 bp, Homo sapiens
gtaacttcttggagggtggaagtcggtaacctctattgaagaacgaacaag

SEQ ID NO: 30368 - DNA, 87 bp, Homo sapiens
ccagcggctcagacacaacatctgctgaggtgttcattgaagtgccggtggtggtgtgcacattgagccccggtatagacagttccc

SEQ ID NO: 30369 - DNA, 82 bp, Homo sapiens
aagacacagagcagtgggcctgggctgcagaagaataatccgaggaatgggcatgaactccccggagctgctcctgctggtg

SEQ ID NO: 30370 - DNA, 80 bp, Homo sapiens
ctcgccccggccgcggccgggtcctcagcatttcctgtgttacatctgcaaggaatacgtagaggatctggccaaaatcc

SEQ ID NO: 30371 - DNA, 100 bp, Homo sapiens
cccggttggtgcttcctgttcgcagctgcggcaggacaaaagtggctctcaatccagcacatgcacattgaagcaagttaaaggatttaatatgaagcac

SEQ ID NO: 30372 - DNA, 50 bp, Homo sapiens
gtggaggttaacagctatctttctccagcttaccaaaacctgaggcagaa

SEQ ID NO: 30373 - DNA, 75 bp, Homo sapiens
tttgtgtccaggcataagaaatttgacgcctcccgagcacaacaaggagaggtgatgaggttggcatgtcgtttg

SEQ ID NO: 30374 - DNA, 75 bp, Homo sapiens
gaggaaaacaacttcgagggcagaaaaacgagcctccatctccactggtctctgggattattgattacaacatgc

SEQ ID NO: 30375 - DNA, 75 bp, Homo sapiens
aagagtcaacagcagtggcaacagtgtaaacaggaacatcgataagtagtgtaaaaacttgcacaatgaaatccg

SEQ ID NO: 30376 - DNA, 76 bp, Homo sapiens
caactctgaggagtccactgcagcagctagagttgggaagacatcactgattatgtctctggtcagtgaagaattt

SEQ ID NO: 30377 - DNA, 100 bp, Homo sapiens
cctatctgcgagaacagagaagggagctctatagtcggagtggagaactgcaagaacactgatatttgcatttaatggggaacaaaagatgaagaaggaa

SEQ ID NO: 30378 - DNA, 74 bp, Homo sapiens
tttgaacaaactcgaagaacagctgtggaaagaagttgcaaaacactggtggcttttcatggcctgccactgaa

SEQ ID NO: 30379 - DNA, 100 bp, Homo sapiens
gaactgttcccttccttgactacaaacattttgctctgagaactttcttccctgaggcctcgaaaaagcccaagacagcagaagcagacacctccagtga

SEQ ID NO: 30380 - DNA, 75 bp, Homo sapiens
ctgcaccatgagctcagttggctgcaggagcagctagcacaggtgttggagcgggccggagagaagtagagtggg

SEQ ID NO: 30381 - DNA, 82 bp, Homo sapiens
accgtggaactaaaagcacttcggttactcaatttccagcgtcagacttatgtttaaagaggcatttgaatgcatgagaaag

SEQ ID NO: 30382 - DNA, 90 bp, Homo sapiens
cggtttacagcgaagtccacccagcgtttccgaggtgaaggcgccgcgccaggccgggcgggcggttcaaaccttgtactactcagctga

SEQ ID NO: 30383 - DNA, 75 bp, Homo sapiens
cagacgctcaaccagcttctggtagaaatggatggttgatgccggcccaggatggatcagacctgtgaactaccc

SEQ ID NO: 30384 - DNA, 100 bp, Homo sapiens
ctgagggacgatatgaatatgaaagaattccgagagaacgagcacctcctcgaagtcatcccagtcaggtaattgctgccatggaaacacaactgtctaa

SEQ ID NO: 30385 - DNA, 83 bp, Homo sapiens
cgcgggtctgctctgtgtgccatggacgggcagtcatggatcaggtaatgcagtttgttgagccaagtcggcagtttgtaaag

SEQ ID NO: 30386 - DNA, 75 bp, Homo sapiens
cgaggcaggagagaggaggaggagtgcggcgcggcggccccgggaccaaggagaagcaaccgtgacaagtggtgc

SEQ ID NO: 30387 - DNA, 100 bp, Homo sapiens
ctcgatctgaagaggcagaaggagcaggctctgcgggaggtggagcacctgaagagatgccagcaggtgaggcggaaccaaccctcctggccatgggagg

SEQ ID NO: 30388 - DNA, 134 bp, Homo sapiens
atctcattgccacggctgaaccctccttctcaatcttggaacagcacccccttctttaaggtgctcccgcagggacaaatgccaacaggcctgggaacctaatcgatttgctgccagcatcagccagtgtgtga

SEQ ID NO: 30389 - DNA, 100 bp, Homo sapiens
agcaaatctggctatcttctccatccagattttatggaaagaactcttcttatgtccatgggggattggattcaaatggaaagccagcagatgcagtcta

SEQ ID NO: 30390 - DNA, 83 bp, Homo sapiens
agacggagctggagcgaccgagagaggtctcggcgcggaagatggccggcggcgtggacggccccatcgggatcccgttcccc

SEQ ID NO: 30391 - DNA, 75 bp, Homo sapiens
cttgacctttctgttgatgtggagcagaatacatccattacccactgtctaagagcattggggagtcagcaatgt

SEQ ID NO: 30392 - DNA, 100 bp, Homo sapiens
gcggctctcccaaggaagataccgagtgggagaaaagatcctcttcattagggtttcagatcgacaaagctatcttgtcatatctttggttctttgtgtt

SEQ ID NO: 30393 - DNA, 100 bp, Homo sapiens
acctggcagccaccccgtctgggagaccctgtattcagtggatcagctggcaccacccaaatagataaattggcccatctggtcttgtggcccccaccca

SEQ ID NO: 30394 - DNA, 100 bp, Homo sapiens
gcagtttaagaagtgcaccatagcgggagttgcttatgggactgcatcgacgtaggctggtgggaaggagagctgaacggcagacgaggcgtgttccccg

SEQ ID NO: 30395 - DNA, 98 bp, Homo sapiens
cgggaagacgcggcggcggcggcggaggatgagcctgcagagcgcgcagtacctccgggctgacagatgaagagattgatatggccttccagcagtcg

SEQ ID NO: 30396 - DNA, 100 bp, Homo sapiens
gacattaacagggtctacagagaggagccagggtgagcgtcttctttctagagaagcaccagaggagctaaagcagcagcccctggcccttgggtatttt

SEQ ID NO: 30397 - DNA, 50 bp, Homo sapiens
gagacggcctcctgttccaccttcaacccgaggggaagctgcagccagcc

SEQ ID NO: 30398 - DNA, 100 bp, Homo sapiens
tagctgtttgtattttggctgctgcaggagccattttagaaaatggacccaagtggggtcaaagtgctggaaacagcagaggacatccaggagaggcggc

SEQ ID NO: 30399 - DNA, 90 bp, Homo sapiens
gttctggacaagatgaagtctttctgccaggatgatcggctgaatgtaacagaggaactaacgtccaacgacaagacgaggattctcaac

SEQ ID NO: 30400 - DNA, 83 bp, Homo sapiens
tttcccctgccgctcctgccggcagctccaaccatgggaggccgcgtctttctcggggacggcaaaacagaacagaaaggcgg

SEQ ID NO: 30401 - DNA, 50 bp, Homo sapiens
gtacaagaggctacttctactagacagagctgggaagaatttgaaaggag

SEQ ID NO: 30402 - DNA, 98 bp, Homo sapiens
aacctggatctgcgatctgtttgtgaatgattacggacctgaagccaaagaacaagatgcgctagtggacagattgctgaccaggggcttgagagctg

SEQ ID NO: 30403 - DNA, 101 bp, Homo sapiens
gccagttgggatcaaatgtgagcctatggatcaagatgcaaataatacggcactccgaacagacactaaaaacagctctcatctcaaagaacccagtgctt

SEQ ID NO: 30404 - DNA, 101 bp, Homo sapiens
gccaaggccaaatatgaatttttatttggcagatctgaagggaaagctccagatactagactcctctgatgatggcctgcacaaggaagaacctgggggtg

SEQ ID NO: 30405 - DNA, 100 bp, Homo sapiens
gaccatgtctctgtctcgctcagaggagatgcaccggctcacggaaaatgtctataagaacccttaggagaaatcttgagagtggacagcaattgtgaag

SEQ ID NO: 30406 - DNA, 95 bp, Homo sapiens
ttttggagaacatggaggtggagtgcaactaccactgctaccacgagaaggacccggacggttttggagatcatattcattggaggacactggaa

SEQ ID NO: 30407 - DNA, 90 bp, Homo sapiens
accacatagacatttacgcggatgtcggcgaagagttcaaccaggtttgcagaaccagcgagtattatatgtacaggattccttagaggg

SEQ ID NO: 30408 - DNA, 83 bp, Homo sapiens
ggaccggccaacaggatcgctcaggatggacgtcttctactcaaggagtaccctgacttctaccggaagctctacggcctctt

SEQ ID NO: 30409 - DNA, 50 bp, Homo sapiens
gacagaagcggacccagaaatgatcaaggctcgcgggattgatgtgcaac

SEQ ID NO: 30410 - DNA, 82 bp, Homo sapiens
cgcagccaggagaaggagttcgtgcaggcgtacgaggatgtgctggagcggtacaaagttgcagagctattttgctgcatgt

SEQ ID NO: 30411 - DNA, 83 bp, Homo sapiens
gctccgtggtcttcatccaccgccaggctcgggacgtgtacgaggaggccatccggacagtgatgaccgtgcgggacttcaca

SEQ ID NO: 30412 - DNA, 101 bp, Homo sapiens
ctctgggggtcctctctgagtcaaatccagtgcccgagcgggaagaagttccgcagcaagccgcagctggcgcgctacctgggcggctccatggacctgag

SEQ ID NO: 30413 - DNA, 75 bp, Homo sapiens
gcaactcctataaacacagtggacgtcaataatgaaagctcttcagaggtatcacagatgtcgtaagaatctgaa

SEQ ID NO: 30414 - DNA, 82 bp, Homo sapiens
ccagcttttcagaactgcagggaaacagccatcatgaggcagaatccagagaccacatttgaagtatatgttgaagtggcct

SEQ ID NO: 30415 - DNA, 90 bp, Homo sapiens
agtggggaggccttcgactggctgcttggggagattgagtccaagttcaaccaagccattgtgctgatattgatgcgttgtgtgttgcac

SEQ ID NO: 30416 - DNA, 98 bp, Homo sapiens
ttctgaatagcaataaatattttcccagcagagacaggagactctctccatcatgtgaagatacagcaaaacagcagctgtctgcaagccaggaaggg

SEQ ID NO: 30417 - DNA, 82 bp, Homo sapiens
caggcgccgcgggctccgcgcccggccggacccgggcccgaggatcctcccaccactggaaggcccccctgcccaggcatcc

SEQ ID NO: 30418 - DNA, 75 bp, Homo sapiens
cttggccgagcggatcctaataaggggaaaatgatttcaggtatgctgctgaaagtgggaatcctctacattggt

SEQ ID NO: 30419 - DNA, 98 bp, Homo sapiens
tggacggtttcgccggcagtctcgctggcataaccttgacaacagattgccttgaagatagcctccttacatgctactgggggtgcagtgttcaaaaa

SEQ ID NO: 30420 - DNA, 75 bp, Homo sapiens
ctttgatgtactactataatgggaaagcggtttcccaggcagctgcagacttgaaacagttctgtctgcagaatg

SEQ ID NO: 30421 - DNA, 75 bp, Homo sapiens
gagattcagcccggcgatattgtcattattgatcagttcattgacagcacgggctgtatattgggagttggactt

SEQ ID NO: 30422 - DNA, 90 bp, Homo sapiens
cgcagcccgccgggagctctgaccgaggcgcctcgctggggcggggaccttgccttgcccgggggtaaaatggtgcagaaggggacttac

SEQ ID NO: 30423 - DNA, 99 bp, Homo sapiens
ggcggaggagacggcggccttcgaggaggtcatgaaggacctgagcctgacgcgggccgcgcggaggctgcctaccacaaggactttagcttacttttt

SEQ ID NO: 30424 - DNA, 75 bp, Homo sapiens
agaggacacgaggcggcgggctggagacatggaccgcggcgagcaagccgtgcagtcggaggtccttgtgcatga

SEQ ID NO: 30425 - DNA, 98 bp, Homo sapiens
ggatgcaggaggagagcctgcagggcacagaagatctctgatgatctgatgcagaagatcagtactcagaaccgccgggccctagaccttgtagccgc

SEQ ID NO: 30426 - DNA, 75 bp, Homo sapiens
ctcttgccctcatcctggttctggaatcctcagttcaaggtgtttcccattaaacactaccaggacaaaatcagg

SEQ ID NO: 30427 - DNA, 74 bp, Homo sapiens
gccagagaaaggacgagcagcaagtcagggagcttaaggatcccaggatgctggtatcctgcatagatttcagg

SEQ ID NO: 30428 - DNA, 82 bp, Homo sapiens
agaagattaacctggagttaaggaacagatccccggaggaggtactccaaagattcaggtttactcacgtcatccagcagag

SEQ ID NO: 30429 - DNA, 90 bp, Homo sapiens
cacaccgaggacatggacctgtacagcatcaactacctgcactttggggagcctaagtcctggacatggatttgattgacatactttgga

SEQ ID NO: 30430 - DNA, 75 bp, Homo sapiens
atgcatctcctcggcccctggctcctgctcctggaattccaggttaccgagttggttgttattactgccttttcc

SEQ ID NO: 30431 - DNA, 89 bp, Homo sapiens
atttattggtgccaatcccctggccccagcagcggagtgagaccctgtcaaaaaaaaaagaaagaaagaaaatagaagccaagaatgga

SEQ ID NO: 30432 - DNA, 101 bp, Homo sapiens
cctccacccgtcgtgccggcgccgcccggaccgccagaacgacaaatcctccacccctgggctcaagtccaacacaccaaccccaaggaacgacgccccaa

SEQ ID NO: 30433 - DNA, 75 bp, Homo sapiens
gactgaaatgggggcgaccattcttagaggaatgttacggcatccggagtcatccctcagatttctctgatcatg

SEQ ID NO: 30434 - DNA, 82 bp, Homo sapiens
ttcagaagtcgacctgtggcaaatgtggctaccctgccaagcgcaagagaaagtattcgaactcgagccatctctgctaaag

SEQ ID NO: 30435 - DNA, 80 bp, Homo sapiens
ctggcagccgcggatctcaccgccgctcaggcaaatgcagccctgaggatttggctactgcatataacaacagggggcaa

SEQ ID NO: 30436 - DNA, 88 bp, Homo sapiens
gccaagatgaacatcagtgaagtcctggcggtcatggacactctcgtctctgttgctgctcgagagaaagcagagtgagggcactcac

SEQ ID NO: 30437 - DNA, 75 bp, Homo sapiens
catcattccttggggcaaaatgtggacaagggtatagaacaagatgcagtgaatacttttaccaaatatatatct

SEQ ID NO: 30438 - DNA, 97 bp, Homo sapiens
ctcgcctccgccctccgccacctcgagctgcggtagcagcgactcatgagagcgcggccggaggacaggtatcgagaaccttccctgcgaacttcag

SEQ ID NO: 30439 - DNA, 100 bp, Homo sapiens
tccttgcggccgtctccgcctccggctgcctggcgtccccggcccaccccgggggccgcgtgaagacgtggaaacggcgctggttcatcctgaccgacaa

SEQ ID NO: 30440 - DNA, 98 bp, Homo sapiens
gcagagaaaggtgaaagccaggttgaccattgctgccgttctgtacttgcttttcatgattggagaacttgtaggcatttgatctaacagagcaaaga

SEQ ID NO: 30441 - DNA, 96 bp, Homo sapiens
tttaggcttgctggcccgcggggctgtccaggcacgcgaggcccctcagcacaatcctggaggaagagaaggctcagcaagaagagcgcatgagga

SEQ ID NO: 30442 - DNA, 100 bp, Homo sapiens
gcgccggccgcgagcagaccggcctggaagcctacgccctggggctggacaccgagaatacttatctctggcgcacatcactatatttggctgcctctgc

SEQ ID NO: 30443 - DNA, 90 bp, Homo sapiens
gacagaagggagtttgctaaatttgaaaaggagaaaatgaatgccaaatgggacacggtagatgacattaatgctgataagaatatctct

SEQ ID NO: 30444 - DNA, 90 bp, Homo sapiens
cagggacgtcctcattgtcctcggaaaaccaattctgtgtcctcggaggaccacagcccagttgggccccaggcgaaacccagcctggag

SEQ ID NO: 30445 - DNA, 98 bp, Homo sapiens
ccgtcgccgtcggcagtcaagcagttctgcaaattctcagcagggtcagtgggagacaggtctccaggtcctgacctggccttcctgacttcctgtcc

SEQ ID NO: 30446 - DNA, 75 bp, Homo sapiens
cggggaccatggcggagccgcctcggatatccttggaacagaagatcttattgtggaagtgacttccaatgatgc

SEQ ID NO: 30447 - DNA, 82 bp, Homo sapiens
gtcgcagttcttgtttgtggatcgctgtgatcgtcacttggatgcactgcgcaactctggtggcgatgggctggggcagatg

SEQ ID NO: 30448 - DNA, 80 bp, Homo sapiens
tcagtcaacatctccttcgcagccgcgcaaaaaaattttacagctcccagcacagtaggaaagagaaatttgagtcctag

SEQ ID NO: 30449 - DNA, 100 bp, Homo sapiens
tacactgtacatgctttttattacaagactacggagcataggaggaaaattcatcatctggtgtcatggagaaactccagctgggcccagagattctgca

SEQ ID NO: 30450 - DNA, 90 bp, Homo sapiens
gtctggacaccatgattcaaaccgccaggttaccatgaggaggatttctggccttcgagtcttcatcctccaggtccacctttagcaaga

SEQ ID NO: 30451 - DNA, 88 bp, Homo sapiens
gaagatggacaagcccatgctgaagcaggccggctctggcgtccacgaaactggcgatggaatatgagaggagccctctggaaagaaa

SEQ ID NO: 30452 - DNA, 100 bp, Homo sapiens
ggaatatggagccctgggcgcgggggcggcgtgtcaggtggttgcggagctggtgtgtctcttgtaaacagcatatagctggattttgtaatcttatcca

SEQ ID NO: 30453 - DNA, 75 bp, Homo sapiens
ctggagcctcagttggaagcagccgatccagcctgcggagcctgtggggcagcttctagaggccacccgcatccc

SEQ ID NO: 30454 - DNA, 82 bp, Homo sapiens
agatgctggctggggaaatctggtgtatgttgtcaactatccaaaaggtaaaagttttgtttgtgagaaacttggctactac

SEQ ID NO: 30455 - DNA, 75 bp, Homo sapiens
gaaagagcaaaggaggggaaagatggggggctgcagatgggcactctggttttttaaaaatgataaaagcaaaac

SEQ ID NO: 30456 - DNA, 101 bp, Homo sapiens
cagcccgttcgctggactgcaaaccgagctcccgtctgccttgcaggtattatagctgcaaatgtccttgtattctgtttatggagagtaccttctctgca

SEQ ID NO: 30457 - DNA, 107 bp, Homo sapiens
tcctgatcttttataagacaaaagaaatagcaagaactgaggagcaccaggagacgcaactcatcggctgggaaaactcttcagatttttaacattgaaatgaaaag

SEQ ID NO: 30458 - DNA, 75 bp, Homo sapiens
gcgccttgggaaccgctcgagcctaccaggatttgtactgtgttcgcagtgacctggggaacctgctcaaagccc

SEQ ID NO: 30459 - DNA, 98 bp, Homo sapiens
tgctggagcaccaggcagatataaatgtcagccgggtgggcttggactgggcgtgctccatggcagagatcctgcggtcactcaacagtgccccactg

SEQ ID NO: 30460 - DNA, 50 bp, Homo sapiens
aagtaacttgtggaatgctgagaaagtggccctcatggagcacagcaact

SEQ ID NO: 30461 - DNA, 100 bp, Homo sapiens
cagaagagggaggtgaccaaggaggagtacaaggacatcctgcgcaaggccgtgcagaagccagctgttgcactgcctacaagccttagcctgtctactc

SEQ ID NO: 30462 - DNA, 98 bp, Homo sapiens
aacagacaagacacttttcagaaagacagagaacgtttgtctgcctgatgagagccacttgggttaagaaactacctgtgaatagtcatcatttctgt

SEQ ID NO: 30463 - DNA, 100 bp, Homo sapiens
aaggcactgctttttcatgacggaatgaatctgaagtctgctgcagtaaaacacagaaggctttaaaatgttttcttgcataaaattcaaaacttttaag

SEQ ID NO: 30464 - DNA, 71 bp, Homo sapiens
gaggacgttcccttcacggagaaagattttgaacaccatgaccacccttgatgataagttgctgggggaga

SEQ ID NO: 30465 - DNA, 114 bp, Homo sapiens
cgcctccgggctccttcggccccgccatgggctgctgcagctccgcctcctccgccgcgcaggttaaagctgaagctcaacaaagatatagtgatctctgtgggcatttataat

SEQ ID NO: 30466 - DNA, 76 bp, Homo sapiens
aagggtgtcaggatctgaagagctatggtgaaacaccactgaagcattgccaagtgcaattccaaaagccaaggtg

SEQ ID NO: 30467 - DNA, 101 bp, Homo sapiens
gagaccgtgaccgagagcgtgaccgagagcgcgaatatcgtcatcgttagaagcaggctctccccggaggctcagccccctctgctccccatgggcaactg

SEQ ID NO: 30468 - DNA, 98 bp, Homo sapiens
gcaagcccagacaatgccggtggaggaatttgtggctggctggatctctgattcggaggaacctgagtgcctcagtcatcgccgtcaccatccagggg

SEQ ID NO: 30469 - DNA, 51 bp, Homo sapiens
ccagcagggcccctgggctcccggaagggcctgcagttgccatcacccact

SEQ ID NO: 30470 - DNA, 90 bp, Homo sapiens
tccagccatgattttttggctccaggtaacagtcctttggacagcccccggaatttctctccaaatgcacctgctcacttttcttttgtt

SEQ ID NO: 30471 - DNA, 74 bp, Homo sapiens
cgcgctgggactgctgttcctgggggcgctacgagccttcccacagcgattgaacaggagaagcaagcaggcga

SEQ ID NO: 30472 - DNA, 75 bp, Homo sapiens
cgacggcgagcccttgggccgcgtctcctttgagcacaccaaatgaaaagctgttgggtcatttggtaaaggaaa

SEQ ID NO: 30473 - DNA, 74 bp, Homo sapiens
ctgtgaagacgcacggtgccaggaccaagtatctggggaaggagttcgagacacgactgaaggagaagaagcca

SEQ ID NO: 30474 - DNA, 100 bp, Homo sapiens
gcattttttccagaacacaaaagcggccctccaggcactgaagcgtaagaagaggtatgagaagcagctggcgcagatcgacggcacattatcaaccatc

SEQ ID NO: 30475 - DNA, 97 bp, Homo sapiens
gccaagggcgacagaggtttgcctggcagagatggtgttgcaggagtgccaaatgagctgaaagccagtggtggcgaaatcaaaattcataaaatgg

SEQ ID NO: 30476 - DNA, 90 bp, Homo sapiens
ctggggtgtggaaaaacccggtactgtgcactattctttcccaggaaccattggataaggataaaggtacatgatgttgattgatggcac

SEQ ID NO: 30477 - DNA, 75 bp, Homo sapiens
ccccatgcagtgacctgtgatgttaaattcaaaaactacctcatccccaagcaagccagggctgagcaggaagaa

SEQ ID NO: 30478 - DNA, 100 bp, Homo sapiens
atccgcccagacactgactggcagagtcctggcttctagtgaggacgttgccagctccccggagcgccactacacgcccttgccttctgcttccagggaa

SEQ ID NO: 30479 - DNA, 100 bp, Homo sapiens
cgcacgagcaccagcctagagccagggcagagcggcttgggtaaatccaccttaatcaacaccctcttcaaatccaaaatcagccggaagtcggtgcagc

SEQ ID NO: 30480 - DNA, 75 bp, Homo sapiens
tcctctttggctttctgaccacctggttcctgggtgagatgatgaggagtctgatgaggaagctgtgaagaaaac

SEQ ID NO: 30481 - DNA, 98 bp, Homo sapiens
tcagattccattagctgctgtcatcaagccctttgccaccattccttcaaatgaggttacaacctgccatattcattcatccagtgatgatgaaattg

SEQ ID NO: 30482 - DNA, 102 bp, Homo sapiens
ctggaatgtgaagagacaggaggcagcagacggacatccaggatgtttggatctggccgagaacataactttacacgacccaatgagaaaggagagtatgag

SEQ ID NO: 30483 - DNA, 100 bp, Homo sapiens
aagagctccacattcaggggaaccgcctcaccgttctgcccccagaactagaggactacactgaaacattcaaatgtgtggcgaaaacataattttcatt

SEQ ID NO: 30484 - DNA, 100 bp, Homo sapiens
ccgggacttcggtaacaatgaagaagacttcctcacggtaatggagattgtagtcagattgtcagaagatgcaggagacattttcaacattaaagaattg

SEQ ID NO: 30485 - DNA, 75 bp, Homo sapiens
aagagcggcggcggcagcggcgcccgcggcgccatggctcacgtcggctcccgcaagcgctcgaggagtcgcagc

SEQ ID NO: 30486 - DNA, 100 bp, Homo sapiens
cacctggacccgcgcgtgttcgtggacggcctgtgccggattcagaatggacagtttagaagaacctcagaaaaaagtctttaaggctcgaaaaacgatg

SEQ ID NO: 30487 - DNA, 100 bp, Homo sapiens
tgagactgtctggggagctctccgagggaagatggaagagttgagtcaggccctggctagtagcttttctgtgtctcaagatctgaacagcacagctgcc

SEQ ID NO: 30488 - DNA, 75 bp, Homo sapiens
gccggccgtacgcggtgctgcgagggcagaacctggattgtgacaccaggactgaagacaaggagtttcttcaca

SEQ ID NO: 30489 - DNA, 100 bp, Homo sapiens
cccctttcttcccaatgatgcttcctacttcctttccgtgcataagaagccgaatgacaatgcagatcttcgtgaagactctgactggtaagaccatcac

SEQ ID NO: 30490 - DNA, 127 bp, Homo sapiens
caccatccacgaccgaaaagaattcgctaaatttgaggaagaacgcgccagagcaaaatgggacacaggggtgctcaaaggatttaaaggagaactaattcatgtatttaacaaacatgatggtgcc

SEQ ID NO: 30491 - DNA, 98 bp, Homo sapiens
gtactggcacgctctatagccaaggaaggcttcgagaagattagcaaaggtgctaatccagtggaaatcaggagagggaagtttggttggcttagtgg

SEQ ID NO: 30492 - DNA, 95 bp, Homo sapiens
atgcggaggacagctctgatgaggaggtctcggcgcggaagatggccggcggcgtggacggccccatcgggatcccgttccccgaccacagcagc

SEQ ID NO: 30493 - DNA, 83 bp, Homo sapiens
atttcctgcacttcacctggcatgcgaagtccaaggatgaaaactttcggaagagaaagttgcctgtggtaagttcagttgtt

SEQ ID NO: 30494 - DNA, 83 bp, Homo sapiens
ggaaaacagagaaagaagtgataggagggctctgtagggcagtcagggcgacagcaagaatgccaagaagaagaacaacaaga

SEQ ID NO: 30495 - DNA, 51 bp, Homo sapiens
cttgaaggtagacaaagtaattcagatctggcatttccttgtgctcataat

SEQ ID NO: 30496 - DNA, 96 bp, Homo sapiens
tgccgtgaaagtgacgccttcgctcaacgaggacctgcaggtggaagtgatgaaggagtctactcttcatcttgtgttgagacttcgtggtggtgc

SEQ ID NO: 30497 - DNA, 90 bp, Homo sapiens
gagctgagaaacaaagccacccagccaatgaagttccacttattcaggaaatggaatccagaatcatgatcccactgaagacctcgcccc

SEQ ID NO: 30498 - DNA, 90 bp, Homo sapiens
gaaatgagtgccaataaaataaattcttttgaactagatcgagctgatagagaccctagtaacatggatcagttcgacagcttagacaag

SEQ ID NO: 30499 - DNA, 112 bp, Homo sapiens
gggcacgcacggcccgggccggcgctccaaggcccgcccgggagggccggggccgcgctcaggcagaggtggaggagacactgaagcgactgcagagccagaagggagtgca

SEQ ID NO: 30500 - DNA, 75 bp, Homo sapiens
actgtgacttgcagtcatcatccattaccacaaaattaggtgtggacactgccagcggctgcagccgacttggaa

SEQ ID NO: 30501 - DNA, 98 bp, Homo sapiens
gccaaggagaccaggaagcgagcactcagcagtgcatttgcccagtataacatggatcagttcacgcctgtgaagatagaaggatatgaagatcaggt

SEQ ID NO: 30502 - DNA, 49 bp, Homo sapiens
atcccgagcagcgtcatgtacccctgttgtccgcacaaaccagtgtgca

SEQ ID NO: 30503 - DNA, 80 bp, Homo sapiens
gtggagctggtcgcagatcctgagacccggacagtggcagtgaaacaggcagagaaaatcctgaaggagcaagagcggct

SEQ ID NO: 30504 - DNA, 98 bp, Homo sapiens
cacatctggtagtggtgaaggtggaaaaggctataccaaagaccaagtagatggagttctcagagttgggtatcagaaattaaaaaagaagaagataa

SEQ ID NO: 30505 - DNA, 75 bp, Homo sapiens
cttttggctttcggggggaagctctgagctcactttgtgcactgagactttgagaatcactacaagaaaaactcc

SEQ ID NO: 30506 - DNA, 75 bp, Homo sapiens
gtccgagctgagatccatctgcaccacggtgctgattaagatgttctacgaggagcatttgcacttggacgatga

SEQ ID NO: 30507 - DNA, 95 bp, Homo sapiens
ttgctgatcttgtacttggattcagcaaggaaccttccgtgccggtggtggtgtgcacattgagccccggtatagacagttcccccagctgacca

SEQ ID NO: 30508 - DNA, 75 bp, Homo sapiens
tcagccctgaggagttcaaacccattgctgagaagctaacaggttgtttttcaccattcagaacattgcctgaag

SEQ ID NO: 30509 - DNA, 75 bp, Homo sapiens
cataatggccgagctgttgactggaagaacattgtttcctggtacagacccacggatgataccatcggggacctt

SEQ ID NO: 30510 - DNA, 100 bp, Homo sapiens
acaccttcatccgtcacatcgccctgctgggctttgagaagcgcttcgtacccagccagcactatgcacacagttcgctgtggtcaggctgtctcagtcc

SEQ ID NO: 30511 - DNA, 95 bp, Homo sapiens
caagatcgtcggcaacaagtgggaggcttacctggggctgctgcaggccgagtacaccgaggggtctcagccttagatccaaggacagtccaagg

SEQ ID NO: 30512 - DNA, 100 bp, Homo sapiens
tgcactctcatcgctctcggcctcggcctcggcctccgacacggacaaggaagatggggagccaaagaccaagcatctcagagaagaggaggaagaaggc

SEQ ID NO: 30513 - DNA, 83 bp, Homo sapiens
acgatgacgtctaccgcagcctggaggagctggccgagtccgcgggagagctgtggggcttggtgagtgtttcgtggcctctc

SEQ ID NO: 30514 - DNA, 97 bp, Homo sapiens
ttacatgggctttagtctcggagcgcgttctgccagagtaatgtgggccatggagtcaggccacctcctctgggctctgctgttcatgcagtccttg

SEQ ID NO: 30515 - DNA, 74 bp, Homo sapiens
aagaatcttgtcactttagccactgctactacagatgagggttactaccagggtggaaaatttcagtttgaaac

SEQ ID NO: 30516 - DNA, 75 bp, Homo sapiens
aagcatgcagcttactgcttgaaaggcatctctcgggacaactggcacaagcgccgcaaaaccgggggcaagaga

SEQ ID NO: 30517 - DNA, 75 bp, Homo sapiens
tggtctcaatgttgccaaaatgtttcctaaagttcgtgaatctcaacttagcagcccgacggccatggaggctga

SEQ ID NO: 30518 - DNA, 105 bp, Homo sapiens
aaatccaactatcaaggcctcccagtacgttgtgtgaagagtatcattcgacaggcttctccagggaaagtgaccgaggcagtgaaagaggccattgacgcaggg

SEQ ID NO: 30519 - DNA, 90 bp, Homo sapiens
gcagcctgtggctgtgcagggccccgagccggcccgggtcgagagtgcttgtgatttcacgtatttttgctgaactcgtaaaagagacac

SEQ ID NO: 30520 - DNA, 97 bp, Homo sapiens
cagaaatcagaaaaacatttgggaggtgtctagcccagtggaccttctgaagaagtccatataatgcttgatggcctgttacctcctgacacctatt

SEQ ID NO: 30521 - DNA, 50 bp, Homo sapiens
cgcctggctcttctccacaaagacacctcctgtccaaatatgacccccag

SEQ ID NO: 30522 - DNA, 100 bp, Homo sapiens
atactttggttacctatgtacctgttaccactttcaaaaatgaagaggaagatgatgatgtagtggctcctaaaccacctattgaacctgaagaagagaa

SEQ ID NO: 30523 - DNA, 83 bp, Homo sapiens
caacaattttctgtacaccaatggaaagtgcgtcatcctaaggaacatcgactcaccttcaggccattcagaggaggaaagag

SEQ ID NO: 30524 - DNA, 96 bp, Homo sapiens
tccaggacagtgggaagagtggctggaggaattcagtttcttggggagacgaagaaatagcatggcatgaaacatggctcagttctattacaaaag

SEQ ID NO: 30525 - DNA, 82 bp, Homo sapiens
aacacttccttgaagaaacaagcttacaggaagggaaaaggccgaggcatcagcgtgtgaagaccgcaaagacgatcccgag

SEQ ID NO: 30526 - DNA, 100 bp, Homo sapiens
cctactttgatgtggagcctgctcaggtgcgaagcaggttgcccccaagtttcctggcagtgtgtgatactgaggaggtgagcttgtttctggagctgtg

SEQ ID NO: 30527 - DNA, 101 bp, Homo sapiens
cagaaataccagtccccagtgagggtgtacaaatacccctttgaattaattatggctatcctacgctatggagtacagaccatgtgcggcagtggctggag

SEQ ID NO: 30528 - DNA, 50 bp, Homo sapiens
tggtggaggtgttaaatgaaaaacccttaggagaaatcttgagagtggac

SEQ ID NO: 30529 - DNA, 82 bp, Homo sapiens
atccctgctcttcgctctcttcctggctgcgtccctagggacccccatcaaccgaatccccatcatggccaaacagatcctg

SEQ ID NO: 30530 - DNA, 75 bp, Homo sapiens
gagggagggagccgcaggcgcagacccacccgccatgaagccccccgcaggcttgaccactatgctatcatcaag

SEQ ID NO: 30531 - DNA, 51 bp, Homo sapiens
aggcaatgaaagcattacagcatgtgtcattccacacatccacaaatctct

SEQ ID NO: 30532 - DNA, 88 bp, Homo sapiens
ggacctagtggtgtgtgacggggctcctgatggccagaggcacccaatgagttctatgatggagaccatgacaatgacaaggaaagcg

SEQ ID NO: 30533 - DNA, 83 bp, Homo sapiens
gccgaaggcagttctgcaagaggagctattctgatcttgggggatatgagactttctactcggaatatcctgagtgttgcgtg

SEQ ID NO: 30534 - DNA, 100 bp, Homo sapiens
aggaattgttttggcctaggatcatccaggtgactctcctattccatctgtttcttcgggatcatcttcacctctttcagccacttctgccccaccaacg

SEQ ID NO: 30535 - DNA, 83 bp, Homo sapiens
caaaaaaggaggccaaagactttatgatatcatcaagttgaatcgaaaggaagggaagaagcagaattttccaagactaaata

SEQ ID NO: 30536 - DNA, 75 bp, Homo sapiens
gaagtgaaaaatggggagaaggatatccagacagccctaatggagcccacagtgaccatctccccatccaggaca

SEQ ID NO: 30537 - DNA, 100 bp, Homo sapiens
acaaagtctgtgctcagtcaaataaaggatttgtcgtcattaatcaaaagtctcttgcatggcaccaagaatgttaccaattcaagcagtttaagattgc

SEQ ID NO: 30538 - DNA, 87 bp, Homo sapiens
ttatggcttcgagggacatcctttccggaaagactttcctctatctggctatgttgagcagaagaagatctttacaatccaaggctg

SEQ ID NO: 30539 - DNA, 90 bp, Homo sapiens
ggaatcaaagataaatccaaatactgcatatcagaaacaacagattcatgatgttgctatcaaaagttgagaaattgtcagaagaaatca

SEQ ID NO: 30540 - DNA, 100 bp, Homo sapiens
agcttatgcaacatgctcagcaggagcttcatcaacgatatatgtcagatctaaagccaaatggtgcaaaatgcattccagtacgagaccgtggcttcct

SEQ ID NO: 30541 - DNA, 100 bp, Homo sapiens
cccggggcgcccagcaggagggtgtgcaactgaggaacatggctcaagaaactaatcacagccaagtgcctatgctttgttccactggctgtggatttta

SEQ ID NO: 30542 - DNA, 90 bp, Homo sapiens
acggggtggagcccatggaatcggtcctggaggacagatgctgagtttgtgtgtgaacggacactgaaatattttctaggaattgcggga

SEQ ID NO: 30543 - DNA, 87 bp, Homo sapiens
ggcacagccaggactgccaccagtaccaggagcaccaggaatgcctccaggtcagcacgagggaccattgcccaggcagcatgctgg

SEQ ID NO: 30544 - DNA, 98 bp, Homo sapiens
tgaaacctaccccagagcctcccgcggcccacagagcacaggtgctggagaatctggtaaaagcaccattgtgaagcagatgaggatcctgcatgtta

SEQ ID NO: 30545 - DNA, 100 bp, Homo sapiens
cagaaaaccactcattgttgcttcccctaagatgttactcaggctcccgtcctgaggctttctaccaatgcaggccagtggaaggaagcagctagcaagg

SEQ ID NO: 30546 - DNA, 112 bp, Homo sapiens
tgaccgtgtgtcagaacaatcttgaatcatgaagctactaaccagagccggctctttctcgaagttggtgagatggcaaagcagtatatagagaaaagtcttttggttccag

SEQ ID NO: 30547 - DNA, 100 bp, Homo sapiens
ggaacatccaaggcaagactggcacccagcacagcagagagcagagctgacatctgataaagacatgtaccttgacaacagctccattgaagaagcttca

SEQ ID NO: 30548 - DNA, 101 bp, Homo sapiens
ggaagacggggcggaagaccaagatcatcgagatgactctcttgagcctgagggatccattacagtttcaatgggtattgacttttgtgattctactcaga

SEQ ID NO: 30549 - DNA, 85 bp, Homo sapiens
agagacaaaagaaacgggccccgactgggaaaggcaggatcctggtttcaaaatctcagaagtgttcctggactctgtgcttcct

SEQ ID NO: 30550 - DNA, 90 bp, Homo sapiens
ccgccatgtcatccacttcgcccaacctccagcctcattgatgctactcacagagacgtggatgtgctgttactgctttctaactctgcc

SEQ ID NO: 30551 - DNA, 75 bp, Homo sapiens
agctgcagcagcgccgccttttgtgctgcggccgcggagcccccgaggacctgaaggagaagaaggagaaggtgg

SEQ ID NO: 30552 - DNA, 82 bp, Homo sapiens
ggaagatcgtcgccacctggatgctggaggtcaaaatgcagatcttcgtgaaaacccttaccggcaagaccatcacccttga

SEQ ID NO: 30553 - DNA, 114 bp, Homo sapiens
aagaaattgctgctttctgcgctcatgtgtcggaactagatctttctgacaacaaactcgaagactggcatgagtgttttacatgctctacctgccggaatcgcctggtcccgg

SEQ ID NO: 30554 - DNA, 83 bp, Homo sapiens
ctgaaattgcagaaaaatttgttttcttcattggcagtaaaaatgggatgcggcattccaaaagaactcactgtcctgattgg

SEQ ID NO: 30555 - DNA, 82 bp, Homo sapiens
ctggcggcggcggcggcggcggcggcggcgctgctcccgggggcgacggactctgagatttgcccacctgatgaccttgcca

SEQ ID NO: 30556 - DNA, 98 bp, Homo sapiens
gctccgctcgtcccgctcgtcatggcctacccgggatacggaggaggggcctgcactgcccaaagtcttggaaacttgctggatatgatgtaccggga

SEQ ID NO: 30557 - DNA, 80 bp, Homo sapiens
gcaaccccagatccatttacactttacatccgctgcctggcccggaagcggaggaactcacgggatggggacccgctgcc

SEQ ID NO: 30558 - DNA, 90 bp, Homo sapiens
cttttgcattgtacgtgggaaggcagttggtgctatgtaatgacatggatatgaacgagctgcctacgaacctccccgtggacactgtga

SEQ ID NO: 30559 - DNA, 46 bp, Homo sapiens
gggcaccaggaagcgaaggctgggtcgggattactgttcggaagaa

SEQ ID NO: 30560 - DNA, 80 bp, Homo sapiens
cagaagtccagagctgaggactgcctgtttgcaggggtctaatgtgatggaagagcaggacctgcgggacatcggcatca

SEQ ID NO: 30561 - DNA, 100 bp, Homo sapiens
cttatctcatctgcacaggaagcaggtctaagtggttggatttcatcccttactggtctcaaccaaaatattcctgttggaatcatgatgataatcatag

SEQ ID NO: 30562 - DNA, 83 bp, Homo sapiens
aagatggcatctggctggttcaggcgttcgtggcattcagggatgtggctgtgtacttcacccaggaggagtggaggttgttg

SEQ ID NO: 30563 - DNA, 75 bp, Homo sapiens
tgctggcgctctggctgtgctgcgcgacccccgcgcatggcagaaataaaacgtcttcaagaagccaataaggca

SEQ ID NO: 30564 - DNA, 97 bp, Homo sapiens
gatattgtaagaacaatgagagatcagcgagccatgatgatccaaacacctagatgaaaagatgggccaggagtccagtttctggaaggccaagaat

SEQ ID NO: 30565 - DNA, 101 bp, Homo sapiens
cagagggcaaggcaggcggcgcggccggcctcttcgccaagcaggtgcagaagaagtttagcagggcccaggagaaggtgaatacagcagtccagttaatc

SEQ ID NO: 30566 - DNA, 90 bp, Homo sapiens
gtgccctagcaccccgagaaccgtcagtttgagccagatggtactactgagcgagtgtgcttgatccagggaacggttgaagcactgaat

SEQ ID NO: 30567 - DNA, 100 bp, Homo sapiens
cacccacctgaaaatatcattgatggacagcatcgcacagaattattttaaaaaaaagcagtgatccaagcaattgaattggaagcactctggggaaacc

SEQ ID NO: 30568 - DNA, 88 bp, Homo sapiens
gcaagcgagaagtcgcgggcccagcccacagcaggatatccctcctaaatgtacaatcaaggatttgctaccaaaagagaagagcagt

SEQ ID NO: 30569 - DNA, 73 bp, Homo sapiens
gcgtggagcgctgcgcggcgcggcggccgggccctcgagacggggacgttactccacaggatccgctgaacat

SEQ ID NO: 30570 - DNA, 75 bp, Homo sapiens
gcggaaacgcagacactgaactttgggcctgaatggtctccatcatcaccagttccagtagtgaaaaacagaacc

SEQ ID NO: 30571 - DNA, 100 bp, Homo sapiens
gggctgcaagcctcctcaaatcgttgtgaaatgcctggccgccgccgccatctatgaggagcgggaaggcctcctgcaccctggagaccgtgtgggaaga

SEQ ID NO: 30572 - DNA, 76 bp, Homo sapiens
cgggggccacactgcaggcctccgcgctcagtgaaactatgtgaaattttggaaaccaacaaacaggatgctgtca

SEQ ID NO: 30573 - DNA, 89 bp, Homo sapiens
cttgggacccaccgctgccctcagctccgagtccagggcgaggtttggtgcacctcgatttggaggaagtagggcagggcccttatctg

SEQ ID NO: 30574 - DNA, 75 bp, Homo sapiens
ccgggtgatagttggagcggagactgtctctaattaacagaagatggcaaagcccagccacagcagctatgtcct

SEQ ID NO: 30575 - DNA, 97 bp, Homo sapiens
aggcgatagcaatgcacagccaatttcatgctccactatagccaagttctatagaaattttagagtattcatcagatagtgaaaaagaagatgattt

SEQ ID NO: 30576 - DNA, 100 bp, Homo sapiens
tttattcctccaaagcaaaccaactgagaatgcagccttcatctcgaaattctgcctcagcaacaacccctctaagtggaaactcatccagacgaggaag

SEQ ID NO: 30577 - DNA, 74 bp, Homo sapiens
tcctggggctgtgctccatggcgagctgggtagtcagatgcctccgcagccacccgggagccagtcagaatcca

SEQ ID NO: 30578 - DNA, 73 bp, Homo sapiens
cacgcagtgctttgcaacgctaattagactcatgccacttgaggtccaggagcacaacgggcacgtgttcgcc

SEQ ID NO: 30579 - DNA, 100 bp, Homo sapiens
cgttgccaacctgggtgctgcaggtgttcaagtgcagggagttcccgttacaatcactagtgttgcaggaggagcaactgaagtcacatgaaagtaagct

SEQ ID NO: 30580 - DNA, 83 bp, Homo sapiens
cgccgcgggacctctccgggccatgggataaggaagcctgtgtgggtaccaacaatcaaagctacatctgtgacacaggacac

SEQ ID NO: 30581 - DNA, 100 bp, Homo sapiens
gcagttccggcgcatgcgcgcggctgagcatatgctggccattggcagcctggaccatgcccacattgtaaggctgctgggactatgcccagggtcatct

SEQ ID NO: 30582 - DNA, 75 bp, Homo sapiens
aaggtggggaggaagaggaggaggaagaagaaggtgatggtgagcatcgcggtgggctgtgccacccgcaacagg

SEQ ID NO: 30583 - DNA, 75 bp, Homo sapiens
atgcttctcaccgaaggtgttcaccagcacactgctctgccaggcagcagtgaggatgccagagttcatgggttt

SEQ ID NO: 30584 - DNA, 82 bp, Homo sapiens
ccagctcccgcctccatctgaagagggctccaggcatccggtcctggtccctgctggttgccgcggcgagtcctttgcacat

SEQ ID NO: 30585 - DNA, 75 bp, Homo sapiens
atcgaagctctagaaatgaatgtttccatctcttcagagatgaaccagacactgttgtgaaggaccaggctcgaa

SEQ ID NO: 30586 - DNA, 97 bp, Homo sapiens
aaccatgaccgaggagagctctgacgttcccagggagttgatagatgctggttgccaacattgacttgggtcctactattttggacattgctggcta

SEQ ID NO: 30587 - DNA, 75 bp, Homo sapiens
ttggcttctcccagcatagccccaggtgatctttgcagagctgtttcaacttccagcaccccctcacattgatgt

SEQ ID NO: 30588 - DNA, 83 bp, Homo sapiens
gagacatggaccgcggcgagcaagaaatttaaaagcctgttgattcaagaactttctaaagtatttccggaagacatggctaa

SEQ ID NO: 30589 - DNA, 82 bp, Homo sapiens
gcgggaagcgggcggccccggccgcctccgcgagggcaccatggaggtgaatgcaggagcatcagatccatgctgctgctga

SEQ ID NO: 30590 - DNA, 82 bp, Homo sapiens
gccacgccggcgatggaggcggcggcggcggactggcggtcgtcattgaattttgagaagcattctgaaaactttgcatgga

SEQ ID NO: 30591 - DNA, 100 bp, Homo sapiens
ctcttggatttggctacacacttatagatcttctgcactgtttacaggcacagacacgaatgcagagtttgagtccagatcccaaagcccagtacacaag

SEQ ID NO: 30592 - DNA, 98 bp, Homo sapiens
agatccaagagattcagtatcactcgctcccttgatgatcttgagaccaagcggagcagccagctggcagtagcgccctgtaggacccccaggacccg

SEQ ID NO: 30593 - DNA, 82 bp, Homo sapiens
cgagcgcgagcggcgcgagaaagactggaaggatcaccagcacatatgcggccagtcagcagctgtcaccgtccaggcagac

SEQ ID NO: 30594 - DNA, 100 bp, Homo sapiens
ttgttataaaaaggaaaaacatcttgatctggagaaaaactggatgttggtagaaaaagcaagagtttgttatatagcattagcagacttgaagaaagag

SEQ ID NO: 30595 - DNA, 100 bp, Homo sapiens
cccgtgaagactctgagaagcctggtcaatatccgaaaggacacactgaggctcgtcaagctttcttcgagagtcacccagctccttcagctgagcgtac

SEQ ID NO: 30596 - DNA, 87 bp, Homo sapiens
tgcacccacgaatctgcccacccctcctgtaacccagcctgtttcacttcttgacaatgtttctcatgctccagtgatgtttgagac

SEQ ID NO: 30597 - DNA, 100 bp, Homo sapiens
aagatccccgggaaagcataggccgtgccccgaccggactggacgcatttttatacatagggtacatgtcccttgctgtgtgtgaacttgaccagcccgg

SEQ ID NO: 30598 - DNA, 87 bp, Homo sapiens
accccggtactgtcttcgtgatgaataaaaacatttcaactccctacagttgtgccatgctgccggtggtggtgtgcacattgagcc

SEQ ID NO: 30599 - DNA, 50 bp, Homo sapiens
agcatattacctatcaggagaggaggtatatttgaaggctcccatgattc

SEQ ID NO: 30600 - DNA, 100 bp, Homo sapiens
gtaattgagttctgacacggccttggatgtttctgtcctaaatagctgacattgcatcttcaagactgtaacccattaaaagagccagtaaatcctgtgg

SEQ ID NO: 30601 - DNA, 82 bp, Homo sapiens
cccgccgctgagggaccgcggggttagccactgctggctgcttccagtgttcgccgagaggagtgcctgtgaagaaaacggg

SEQ ID NO: 30602 - DNA, 100 bp, Homo sapiens
cgccgtgcaggcggccgtcagcaacctcgtccggcaggaactcctggatgtggtagataagaatgagtcagcagtgattgttgccccaacgtcctcaggc

SEQ ID NO: 30603 - DNA, 100 bp, Homo sapiens
tgaggtcacaccttcagtccttcgagcaagtgctggagaatctggtaaaagcaccattgtgaagcagatgaggatcctgcatgttaatgggtttaatgga

SEQ ID NO: 30604 - DNA, 74 bp, Homo sapiens
gacagcatgttttttgaccgctttctccagtggaagtggttggaaaggtttctgttgcttacaactcattagat

SEQ ID NO: 30605 - DNA, 82 bp, Homo sapiens
ccagcttggagaaccaccgcatcaagagcttcaagaacaagggccgcgatgtggaaaattaaacaaccaccatgtcgagcaa

SEQ ID NO: 30606 - DNA, 50 bp, Homo sapiens
cttgcggccctagtggaccactgccaaggactcagcccaggagagtgtta

SEQ ID NO: 30607 - DNA, 100 bp, Homo sapiens
gcatcacaggccgcgtctttgacgacaatgcctgtggaagacaagtcagaccccccagaggggtctgaggaagccgcagagccccggatggacacaccag

SEQ ID NO: 30608 - DNA, 90 bp, Homo sapiens
ggcaccccctgactgcaccactcagctcaaagctgttggccggccctgctacctgacgcgccagaagcacccagccctgcccagcaaccg

SEQ ID NO: 30609 - DNA, 100 bp, Homo sapiens
ctgacgataaggagacctgctttgccgaggaggctggctttccccctggtgtggtcaacattgtgcctggatttggccccacggctggggccgccattgc

SEQ ID NO: 30610 - DNA, 83 bp, Homo sapiens
ttcaactgctgtattgcagaacagcctcagcctgttcgttaccgtgaacgcatcaccattcttcgagggaatcatgagagcag

SEQ ID NO: 30611 - DNA, 100 bp, Homo sapiens
ctgttacattaaatatgaacgtggctatgccttcatgaaccagaaggaccctggtgtccttgaccgcatgatgaagaaactggacaccaacagtgatggt

SEQ ID NO: 30612 - DNA, 90 bp, Homo sapiens
ggtggctcctgcacatttttacagttctccagtccttctctttcgctgctctgttaaaagcgaaaatgaaacaattgcctgcggcaacag

SEQ ID NO: 30613 - DNA, 75 bp, Homo sapiens
ttcgagtgaccgagaccgcggccgggaccgagggtggagccatcgaagcccccacccacaggctgacagaggcac

SEQ ID NO: 30614 - DNA, 50 bp, Homo sapiens
ttgctgctgtactccttctccgactttggggttcttcatgaaagatgcaa

SEQ ID NO: 30615 - DNA, 100 bp, Homo sapiens
gcctactgtttggtgccattgtatcagcaactgatccagttgttgacctcctgtactggagagacattaagaagactggagtggtgtttggtgccagcct

SEQ ID NO: 30616 - DNA, 100 bp, Homo sapiens
ctattctctgctgcagtcagatatgatgcagagatttgggccaggcttagtcatctattggtatggatttatccaggagctggactgcaaccgggaaagg

SEQ ID NO: 30617 - DNA, 73 bp, Homo sapiens
agacgaggcctgaggcggcggcgcgagggcgaagctgtgctcaggcccgggctggacgcagagccagagctgt

SEQ ID NO: 30618 - DNA, 83 bp, Homo sapiens
acctcgctccggaaaggggacacctggcatgggcaagaaggacgaccccaagctgatgcaggagtggttcaagctagtgcagg

SEQ ID NO: 30619 - DNA, 50 bp, Homo sapiens
agcaggcgaacccgcggcgcaataacgattggcagtatggagttactcag

SEQ ID NO: 30620 - DNA, 78 bp, Homo sapiens
gccaatccagcatttttgaagtcagcaaaacggttactggaccagattgttgaaaaaggaagaccagctcctggcttc

SEQ ID NO: 30621 - DNA, 83 bp, Homo sapiens
cacttgtgaacattcaagtgaagcaaaagcctttcatgattataccatggtgaatccgggcagcagctcgcagccgcccccgg

SEQ ID NO: 30622 - DNA, 97 bp, Homo sapiens
aaggaattggatgccaccaacatatccattgataaagttgttggagcaggtgtttacagtcgagagttcagcagcttctcacaaactgttgagaaaa

SEQ ID NO: 30623 - DNA, 51 bp, Homo sapiens
tgtttgtggcaagtctgtggagcgatggggcacaatcatttttagctgctt

SEQ ID NO: 30624 - DNA, 100 bp, Homo sapiens
gccagaaggtggtgcgcttcggggacgagaatcccacgtggcgaagtctcgattttggaattatgccagaccgtcttgatacatctgtgtcttgtttcgt

SEQ ID NO: 30625 - DNA, 96 bp, Homo sapiens
caaggctccggcctgcgaggagcggagcgggcactggacacaatgaactttgagatgctcaaaggccagcctattcgcatcatgtggtcccagcga

SEQ ID NO: 30626 - DNA, 98 bp, Homo sapiens
cggcgagacgcgcagcgccggcgcccgggagacccaggaggagcccgcagcccacgacccttcctcagggcaccatcaacatgaaccagtgcacagat

SEQ ID NO: 30627 - DNA, 73 bp, Homo sapiens
ccagagctccttggccctccacaaggtgaagcggtgagtgctggagatgcattatgtgaaattgagactgaca

SEQ ID NO: 30628 - DNA, 75 bp, Homo sapiens
accgatttaaactgcacataccatatgctggagagacattaaagtatgctgatggaaagttaagcgtgaaatttg

SEQ ID NO: 30629 - DNA, 100 bp, Homo sapiens
ccgaggcgttcggtcctgctgttgcggccgctgccccagggctgcggggacgctgaactttgacctggaccggggcgtgtttccagtagtcatccaggct

SEQ ID NO: 30630 - DNA, 95 bp, Homo sapiens
cgacggctgctcaaacatcaggatgtgtatatctcatgattgatatggagaaactagtcatgggccaaaggtcaagatacttctctgggaaatgt

SEQ ID NO: 30631 - DNA, 100 bp, Homo sapiens
ctcggggacattattgcgcgtggaacggctgcttttggaagttgtgcatgcctaaagggctatctttcaggacacaaacggacaataaagacccccagtt

SEQ ID NO: 30632 - DNA, 141 bp, Homo sapiens
catgcggtctggctccagaacaactcttcttcatagttacgttatactgcccctgcattgttggtattgaaactcaggtgcctaaaaggccagaggggcttctcaggccaacctccttttgatggaatccacattgtcaac

SEQ ID NO: 30633 - DNA, 100 bp, Homo sapiens
aaattccttgtctggaagctgccaatccttggacaggtcagcagacagggtgtccgcaatgttgccagtgtctgtctgcagattggctacccaactgttg

SEQ ID NO: 30634 - DNA, 94 bp, Homo sapiens
ttggaaaaggcttcatggaagaagaaaactcagatgagccttggtggtatgcataattggttgtgcagtttctcttatattcctcacatatgtg

SEQ ID NO: 30635 - DNA, 82 bp, Homo sapiens
ttgccaaaacagcggtagctcccctggaccgaaccaaaatcatcttccaaggtctgggaggggctgaacgtggtgaagacag

SEQ ID NO: 30636 - DNA, 142 bp, Homo sapiens
ggaaatttagatgggttttccagagatgcaaaaatgcaccctactccagcatcgcaccccaagaaaccaggaaaaaggtcactggtcagaacagcaagaagaaagtagctcttgaagacaaaagttaaaaacagactttaaa

SEQ ID NO: 30637 - DNA, 98 bp, Homo sapiens
gaagccaaggagctgtcctttgttttggattacataaaccagtcacccaagtgcattgcctttggaaacgaggcaagacttcagcagtacatggtcac

SEQ ID NO: 30638 - DNA, 80 bp, Homo sapiens
cggcgcccctgagccggccgagcggcgacggaccgcgaggctcttgtcaggatggtgaagctgttcatcggaaacctgcc

SEQ ID NO: 30639 - DNA, 82 bp, Homo sapiens
gccgtccttctccactttcgccagcccgtgccgcgagcgcggcctgcaggagagactggctccagctttccttgaaatcctg

SEQ ID NO: 30640 - DNA, 100 bp, Homo sapiens
gctgtgtgggaagaagatttgtaaagaaaactcttagctctagaggacaaaatcccagtccttggcacaaactcaggaaatggaagccggagtctgtttt

SEQ ID NO: 30641 - DNA, 75 bp, Homo sapiens
tgactttcagtttttcgagcgggtttcaagcctgtgaagttgaagcagggaaagtataccaggtctcctcaaaag

SEQ ID NO: 30642 - DNA, 89 bp, Homo sapiens
aaactgaatgaactgataacggagaatggaactgtatgccagcagcttgttgtacagaaacctcgacctgtctcccagttggttgcaca

SEQ ID NO: 30643 - DNA, 75 bp, Homo sapiens
ttccatttttgccaaagtactctgctggattagaattacttagcaggttctcctgcgctgcccaacagcatggtg

SEQ ID NO: 30644 - DNA, 77 bp, Homo sapiens
ttcattctggattggtggatctgaagtacaaaatattttccaggtggtatggtcaggaaaaagactacaatgtacta

SEQ ID NO: 30645 - DNA, 98 bp, Homo sapiens
aacaccattacagttccagcctctttcatgttgaggatgttggcttcacttaatcatatccgagctgtttggtaactctcattcgacatccatctgaa

SEQ ID NO: 30646 - DNA, 74 bp, Homo sapiens
caaagcggatcagagagggctaccttgtgaagaaggtgtttcatcagtacagacgcctcaccttcccacgcacg

SEQ ID NO: 30647 - DNA, 100 bp, Homo sapiens
ctactattgtacacagattcttaattaaagcaacaatagaagaaagaatgcaggcaatgctgaaaactgctgagagaagctggaacacaagaagtgtttg

SEQ ID NO: 30648 - DNA, 99 bp, Homo sapiens
ggccgtgttgtttgtctacctgggactagacttcctcgttctgcccatcttcctaacaaggctatggctgataacagcagtgatgagtgtgaagaggaa

SEQ ID NO: 30649 - DNA, 100 bp, Homo sapiens
cgggccgcggcggcgcttggcagccaggagctctgcattgaaggcactggggtggtggtgaagtttattaagaaggagaaggtcttggaggattgttgga

SEQ ID NO: 30650 - DNA, 137 bp, Homo sapiens
cagcccgccgctgcgcccgacgctccctgtctgggaccttctccctgcctggacccctactattgcaacaaggtgttggtaaatcatgcttattgctacagtttacagacaagaggtttcagccagtgcatgacctt

SEQ ID NO: 30651 - DNA, 100 bp, Homo sapiens
cactaagctaccagagaatcaagctatccaaatgcgattagttgatgtggcctgcaagttttctggatatgccgcagaaggatccgtgccagaagcaagc

SEQ ID NO: 30652 - DNA, 96 bp, Homo sapiens
gccgagcaggctgagcgatacgacgttcgaggtcaggaaaatggattggatggcaccaagagtggagggccttctggaagaggaacagaaagaggc

SEQ ID NO: 30653 - DNA, 100 bp, Homo sapiens
ccagaatggattggaagtttcactaagtagtttgaacctggctgttcctccaccaagatttgaacaagttccagttccagtctaccacccaacacctagc

SEQ ID NO: 30654 - DNA, 75 bp, Homo sapiens
ggagccatgtacgcgaactattggatttgcacaagcagcctacagaagttaaatgaagttcgaaagagattgaat

SEQ ID NO: 30655 - DNA, 100 bp, Homo sapiens
gggagttcaagaagaacactccagagcagtctctggtcccagcccaccccatggcccctcccagtcccagcaccaccagcagtaataacaacagtagcag

SEQ ID NO: 30656 - DNA, 83 bp, Homo sapiens
gttctgtgcggcgacctcatccacgccatgccagctgtaaaatttggccgaatgtcaaaaaagcagagagacagcttgtatgc

SEQ ID NO: 30657 - DNA, 100 bp, Homo sapiens
ggggctcagcgccttcacccaagcgctaagcagctgacacaggatgatgatactgatgcggttgagattgctatcgacaacacggcttttatggacgagt

SEQ ID NO: 30658 - DNA, 113 bp, Homo sapiens
attttactttatgtgagaaaatctacaatttcttcgagacactcatataaagctcccctcccacccggtcactccgtccagcaagcacgcagacagcaagcccgcgccgctga

SEQ ID NO: 30659 - DNA, 50 bp, Homo sapiens
caagacgggacccattcaggatcacacagcttcttggacacttaatgatt

SEQ ID NO: 30660 - DNA, 101 bp, Homo sapiens
atccagtggaatgcaccacagccatctcacatttccaagtacattctcaggtggagacctgtgaccaagaatatggcccaggtgaccaaagccctggacaa

SEQ ID NO: 30661 - DNA, 100 bp, Homo sapiens
aagttgggaagaaactcaggacccgagaagctacaggattcagcccagtcacagagcttgtgcatacatagagacgtgaagccagaaaatatcctcatca

SEQ ID NO: 30662 - DNA, 96 bp, Homo sapiens
agcgactgagtccgcgatggaggccaagacccatgttcttgacattgagcagcgactacaaggtgtaatcaagactcgaaatagagtgacaggact

SEQ ID NO: 30663 - DNA, 90 bp, Homo sapiens
attcaaccgtacccgccaagctgtcatcacaaaagagttgattgaaattatctctggtgctgcagctcttaacgcatccccaattaatag

SEQ ID NO: 30664 - DNA, 90 bp, Homo sapiens
ggagaagtgggcccccccggaccaccagcaccagtggcagttcgcagcctccaggacttggctcgcatcgccatccggggcaccattaaa

SEQ ID NO: 30665 - DNA, 98 bp, Homo sapiens
cccgacctactcgccgaccttcatccgcggtcacagaagatgtgaattcaagtatcaagacatttttttgtcccaatgatacctacaatgacatggcc

SEQ ID NO: 30666 - DNA, 100 bp, Homo sapiens
ttgcttcctcccttaatgtggtcaccaccttctacgtcatggcggcttacagggagaacacagttggcctccaccgtttctgccccacagaaaacgtagc

SEQ ID NO: 30667 - DNA, 97 bp, Homo sapiens
gctgtttgtattttggctgctgcaggagccattttaggtcatattgaacattccagatacctatcattactcgatgctgttgataacagcaagatgg

SEQ ID NO: 30668 - DNA, 74 bp, Homo sapiens
gggcagccggaaggacaccaagatgcggatccgggcctttccggttatcaatactctggctgaccatcatcatc

SEQ ID NO: 30669 - DNA, 98 bp, Homo sapiens
gtgatgtccaggaaggaggaggaataatatttatggagcatatattatggaacacagccataaaattttgagtagaaaaatccagaaatttgaaaatc

SEQ ID NO: 30670 - DNA, 51 bp, Homo sapiens
tcggatccctgaatttgatccaggttcttgggtgtctctggggagtccctg

SEQ ID NO: 30671 - DNA, 82 bp, Homo sapiens
aggaaagaaaatttttgtcttggggcccaaatacagtcctcttgagtttttacgaaggtactgccaaatctgtcgaaaggga

SEQ ID NO: 30672 - DNA, 80 bp, Homo sapiens
cggagcgcggtccctgtattggtctcctgctcctagaggtacaatgactcttcttgcttttcacctaagttgaataagca

SEQ ID NO: 30673 - DNA, 74 bp, Homo sapiens
ggaagaccaaagaggatgagaaggacgacaagcccatccgaggtgtttcccatgatgaattgcttgacttagca

SEQ ID NO: 30674 - DNA, 100 bp, Homo sapiens
ggcgagagatggtcaggtctggagctcgaccgggccagtttcattcattggctcccatgtactatcgaggctcagctgcagctgttatcgtgtatgatat

SEQ ID NO: 30675 - DNA, 100 bp, Homo sapiens
gccgcgggcgcgatgcggcactgcagtttggagactgccagggaccatgttttgcccattgactattactttccaccccagaagacctgcctgatctgtg

SEQ ID NO: 30676 - DNA, 86 bp, Homo sapiens
ctgatggtttggaagttgtgcagtttcttaacaagcagacagggctggagcagcttcaccactggagccagccggtttgcctcggc

SEQ ID NO: 30677 - DNA, 50 bp, Homo sapiens
gtttggacacccgcaaggccggcatcgtgcctccggagccagcgtggtgg

SEQ ID NO: 30678 - DNA, 100 bp, Homo sapiens
cctgtctccgtcggaagggagcccaagctttgcagagatggagaggagaaaacctatggtggctgtgaaggacctgatgccatgtatgtcaaattgatat

SEQ ID NO: 30679 - DNA, 75 bp, Homo sapiens
gagcctgccccgccctggggacgaagagctgcagctcctcctgtgcggttggaggagagcagattagtgccattg

SEQ ID NO: 30680 - DNA, 100 bp, Homo sapiens
ttcaagaccaaaaaacacaataccaggcatacatttggcagaataaatgaaccaggtggcgacatgtctaagaatgtgagccagtcacagatggcaaaat

SEQ ID NO: 30681 - DNA, 75 bp, Homo sapiens
gaagatctttttcctcaattggtcaaaatgcagatcttcgtgaaaacccttaccggcaagaccatcacccttgag

SEQ ID NO: 30682 - DNA, 82 bp, Homo sapiens
aaaccacataatcctatggtaaatgctggagcaattgttgtgacttcactaataaagagccctatgagtttgtctctctgga

SEQ ID NO: 30683 - DNA, 100 bp, Homo sapiens
atggagagctccagtaccatgggatgccagcctggaagtacctgcagatgaaatggcccctcctcgatgtcccctccagcgccacagtcaaggacacgag

SEQ ID NO: 30684 - DNA, 82 bp, Homo sapiens
gatgcatggacccagctcagcgggacgcgccgctggagaatgaaggacggggaggtttactgcatcgacgcgcggttctacg

SEQ ID NO: 30685 - DNA, 100 bp, Homo sapiens
gcccaagcccccgtgaagatggtgtcctggatgatctccagagccgtggtgtccctccttgtggtccatttctgggcaccatgggctccacagtgtgcac

SEQ ID NO: 30686 - DNA, 101 bp, Homo sapiens
aaattgttcaaaccctgtgctgcccagagactctttcttccgattgaagactatgatgtgatagctagcatgataggagccaagtgtaaaaaactccggac

SEQ ID NO: 30687 - DNA, 75 bp, Homo sapiens
tgtcactcagccctgctggacctggagaagctcccagaattcaacagattgttgaacagataaatacgaaactgc

SEQ ID NO: 30688 - DNA, 75 bp, Homo sapiens
ggaatgcttgacagagatgagtttgcagttgtttatgatgataaagactacaggagaattcggtttgtaggtcgt

SEQ ID NO: 30689 - DNA, 101 bp, Homo sapiens
ggaggcccgaagcaagatggcggtgaatcagagccacaccgagaaccgccgcggagccctcatccctaacggtgaaaggtcctcgatgggcttcctggaat

SEQ ID NO: 30690 - DNA, 80 bp, Homo sapiens
cgtcgtggaagcaggactgcgccgcgtcttcctcaagacctcctgccccccgaggtctgcagtctcctgaacccagcagc

SEQ ID NO: 30691 - DNA, 100 bp, Homo sapiens
atgtgcctgacagaaggtcagtgccagctggcctgactttacagtctgttagtccccagagcctccaagggaaaacgtatcggttttatggagaacctgt

SEQ ID NO: 30692 - DNA, 74 bp, Homo sapiens
cgctgctgcccctgctgtcgctcctggtcggcgcgtggctcaagctagcttctgcagaaagccgtcattacacc

SEQ ID NO: 30693 - DNA, 90 bp, Homo sapiens
cccgcgtcggtcgccgcagtcacggagcgcacaaggaagaggcccagcagaagggactcgctgagccaccccccgccccactccatgttg

SEQ ID NO: 30694 - DNA, 100 bp, Homo sapiens
ggcatttcagtcactggtttgcagagtccagcttcttggacacttaatgattgttggcaagaaatgtgctgctgatctgggcctgaataagggttatcga

SEQ ID NO: 30695 - DNA, 100 bp, Homo sapiens
taatgacagtctccaaattcgcctccatctgtaccatgaccccatatcatgtgaacctcctcctggctggctatgatgagcatgaagggccagcgctgta

SEQ ID NO: 30696 - DNA, 75 bp, Homo sapiens
gagaagattagcaaaggtgctaatccagtggaaatcaggagagaagggacaatggagaacattgcagcccaggct

SEQ ID NO: 30697 - DNA, 75 bp, Homo sapiens
caggagggcgcaggagcgggactgagagcgcctggaggctcgagcggaggaatcctgttacacctgggatttagg

SEQ ID NO: 30698 - DNA, 75 bp, Homo sapiens
cacagtcttcagccctacattaggacattgtgacaaatgtttcccccagaatcatccggggaaccacctctggcc

SEQ ID NO: 30699 - DNA, 100 bp, Homo sapiens
gtggtagaccgtctaagagaagaagacccttttgaggacttctttgggaatcgaaggggtccccgaggaagcagaagccgagggacggggtcgtttttct

SEQ ID NO: 30700 - DNA, 100 bp, Homo sapiens
ggctgcttatttgaatccttgctctgcgatggactattccctggctgcagccctcactcttcatggtcactggaggcgattatgcagccccttgatcata

SEQ ID NO: 30701 - DNA, 88 bp, Homo sapiens
aacacgagcagtgtcaagtgccagccctcccgcgtccaccaccgcagcgtcaagtcgtccctcatggaccttgctgacgtcttcacgg

SEQ ID NO: 30702 - DNA, 100 bp, Homo sapiens
ttcaggatcttaattttatgctgtggattctgaacttaataatttggcctgtgagtcgatctttttagaaacctcctgcaaaagtggaagcgaagccgaa

SEQ ID NO: 30703 - DNA, 85 bp, Homo sapiens
ccgcccggcaccaccatgctcgccctggaggctgcacacaattaccagctctggctgggtcgccacaacttgtttgacgacgaaa

SEQ ID NO: 30704 - DNA, 75 bp, Homo sapiens
tgcctgcctgcctggcatctctctctcccgactgaggctgatgtgaatccaaaggcctatccccttgccgatgcc

SEQ ID NO: 30705 - DNA, 100 bp, Homo sapiens
tggtgcccactcagaaggtgccctctttgcaacatttcaggaaaacagagaaagaagtgataggagggctctgtagccagccgggccgcagctgatgccc

SEQ ID NO: 30706 - DNA, 154 bp, Homo sapiens
cttgatgtggtaggaaaaatccgcagagaaattcagaacctcaagcttttcaggcatcctcatataattaaactatatcgggaggcaattcagaagtgggatgaagcactacagttaactccaaatgatgctaccctatacgagatgaaatcac

SEQ ID NO: 30707 - DNA, 50 bp, Homo sapiens
ctgtggtctctgcacctcctttctgttgtttgatgtgtgcacagtgtcac

SEQ ID NO: 30708 - DNA, 98 bp, Homo sapiens
aaacaccagcaagccgtgagagagaataccagcatccaggggcgtgaactgtcagatgaagaagtggcgcattctacattctaaaggggagctcagtg

SEQ ID NO: 30709 - DNA, 80 bp, Homo sapiens
gctgggtcggatgtacagcaccatcccccaggcctctgctcttgacctcactcgacagccatcatcaatcctaaacagag

SEQ ID NO: 30710 - DNA, 115 bp, Homo sapiens
tccgcggtggaggtctgcgttgctcttgcttttcctcgctggggtgtacgaacatccagtcatggataaaaatgagctggttcagaaggccaaactggccgagcaggctgagcga

SEQ ID NO: 30711 - DNA, 75 bp, Homo sapiens
ggcgaggacggggcgccggcgccgccgcccccgggctcgcggcctgcagaaatcatagcccactaatgagttttg

SEQ ID NO: 30712 - DNA, 105 bp, Homo sapiens
ggcggatgccctgcagtacctgcagaaggtctctggagacatcttcagcagataacgaaggaggcccaacttcattcaataaggagcctgacggatttatcccag

SEQ ID NO: 30713 - DNA, 75 bp, Homo sapiens
cctcgacccaaccggcggccttgagcgctgagcaagcaaagggttaatccctatatcctgaagaagaacatgatc

SEQ ID NO: 30714 - DNA, 100 bp, Homo sapiens
cggcatgggcggcgctggccgagttctaatgccacctgtcgtcttatcatctgattgcagacaaatggaatcctgtgctgaacccgaatcttccaaaaaa

SEQ ID NO: 30715 - DNA, 50 bp, Homo sapiens
ctcagcctcctgagtagcaattacagtggattttgctctgaaggttctcc

SEQ ID NO: 30716 - DNA, 73 bp, Homo sapiens
cgccccgcccggcagcgagcggcgccttccaactccggctttaaggaagcctcctatttcagtttctcaacat

SEQ ID NO: 30717 - DNA, 82 bp, Homo sapiens
ccctgaggtgggccggacctgggagtggcaggtgagaagccctaccactgcaactgggacggctgcggctggaagtttgcgc

SEQ ID NO: 30718 - DNA, 100 bp, Homo sapiens
agtactttggagcagcaaaagatttgcctggtgttagagagctgtttgaaaaagaacttaaagggaaagattcagagggaagaaggaaaatccagaggag

SEQ ID NO: 30719 - DNA, 82 bp, Homo sapiens
ttacgtggctattgtctttgaaagcaacagctcctaccttggacgggaggtgacttaagagattaaaattaatttggttgct

SEQ ID NO: 30720 - DNA, 100 bp, Homo sapiens
tctcacttaaagacctttatgccatccaagagattcaagctgaagaaaacctgtttaaactcattgtcaatgagaaagatcagtctaaagaaaaggagaa

SEQ ID NO: 30721 - DNA, 74 bp, Homo sapiens
agagcctcagtttgtgcaggacaccgacatggaacagggactcactgggggttttaaatgcacagagagcagga

SEQ ID NO: 30722 - DNA, 74 bp, Homo sapiens
agaggcgacctccccgcgttccatgcgcacagggacagggagggaaaatggtccccgaggatctggagaggcag

SEQ ID NO: 30723 - DNA, 74 bp, Homo sapiens
gacatcagcgccatccccgagcagcggtggaagctggatcttttgccagaaatgagggcatactggcctgacgt

SEQ ID NO: 30724 - DNA, 82 bp, Homo sapiens
tggggaattagttggagcacggcttattgctcatgcaggtcaagttgaagaagcaagattaaaagaggcccaattgcgaaat

SEQ ID NO: 30725 - DNA, 74 bp, Homo sapiens
accccgccgcagctcctcggacgcagctccctcgtgaaagatgcttctgttcctctgattgatgttacaaacct

SEQ ID NO: 30726 - DNA, 75 bp, Homo sapiens
tctttgtacagaaattgaaaggcttcaaagctagcagacattacaagaagcggtgccaaggccgcatgcggaagc

SEQ ID NO: 30727 - DNA, 75 bp, Homo sapiens
gtgatcactggtttcgtggcctgaccaaggacctccaagaggtcatgacgccagtcagatcacactagccttggg

SEQ ID NO: 30728 - DNA, 139 bp, Homo sapiens
cagcctccggagctcgcccaagccgcgtccccagagagcgccctgagagaacagggtggccgcttggtccaggtactaggttttgacaagcttgcatcatgcgtgagtataagctagtcgttcttggctcaggaggcgt

SEQ ID NO: 30729 - DNA, 75 bp, Homo sapiens
cagagagagaggtggacagatctgagagatactgaggcattttttactgtctacagaaacttattgtaattcatt

SEQ ID NO: 30730 - DNA, 100 bp, Homo sapiens
tttaccagtgaaagtcatgtacattctttgctgtctattcttcgctatggtgccttatgcaatgattgttcaagtttagaagaatacaacattgccgcag

SEQ ID NO: 30731 - DNA, 100 bp, Homo sapiens
gctgggtgcagatgcagtgtggctctggatagcaccttatggacagaatggcattgtgcccatcgtggagcctgagatcctccctgatggggaccatgac

SEQ ID NO: 30732 - DNA, 75 bp, Homo sapiens
cggggacgaaacaataaagaccggaagctgagtttttatcctttaatgagtggtgttaagaataatgttggaaga

SEQ ID NO: 30733 - DNA, 76 bp, Homo sapiens
caggctcctgccctggactaccgaggtgagatcggactggaactgttcggctgcgaccagaaatttattttcctga

SEQ ID NO: 30734 - DNA, 90 bp, Homo sapiens
aagtacaggctcagtctgcggccaagactccatcctgcaaggccttccttcggtggctgccatctctgagcccagattgcatcaacgtcg

SEQ ID NO: 30735 - DNA, 48 bp, Homo sapiens
ctcaattatttgaagatacttacaaggactctagtatgggattccttt

SEQ ID NO: 30736 - DNA, 100 bp, Homo sapiens
gaactgatcatctgtctggaggcaaggaaagagccctggaacgtgaacacagagaagacagccagacactcagatcctgtttgaccaaactcagagatca

SEQ ID NO: 30737 - DNA, 87 bp, Homo sapiens
cagttgtggagagctgattcccaaatctaaagcccatcacctcttcatgaccactgcctgccaggaggctaactacggtgccctcct

SEQ ID NO: 30738 - DNA, 100 bp, Homo sapiens
aacgaggcaaggagctaaagcagcgtgcgttcagccctggggtaagtaaggaggtctctgtaccatggctcgtacaaagcagactgcccgcaaatcgacc

SEQ ID NO: 30739 - DNA, 75 bp, Homo sapiens
aaccataatgctacaaactctaggtttccatagatgattggaaaaacccaagagttggtcctctgttccagaccc

SEQ ID NO: 30740 - DNA, 100 bp, Homo sapiens
tggctctggggaggaggaggaagaggaagaggaggatgacccacttggcaacaattggcattgactttttatcaaaaactatgtacttggaggatcgaac

SEQ ID NO: 30741 - DNA, 100 bp, Homo sapiens
agaacagggtggccgcttggtccagagaccatggcgagcccagggaaagacaattatcgaatgaagagctataagaacaatgctctaaaccctgaagaaa

SEQ ID NO: 30742 - DNA, 74 bp, Homo sapiens
tcccgagtacctgagattagcccagttggggtttgaagaagtctcagagctgcagggggaccccggctacccac

SEQ ID NO: 30743 - DNA, 74 bp, Homo sapiens
cctgcgaggcctgacatcacttaccaggtcctggtgcttgatggtcgaggccatctcctgggccgcctggcggc

SEQ ID NO: 30744 - DNA, 100 bp, Homo sapiens
ggccagaagcgggcggcgcgggggagatgtttctcctggcggcgctggtcctgtctctcattctgccgaggagcagccagtacatcaagtggatcgtctc

SEQ ID NO: 30745 - DNA, 89 bp, Homo sapiens
agtcaagatggaggagtacgcgcgagagccttgggatgaactcaagcggcattacaacctgggggagtactggattgaggtggagatgg

SEQ ID NO: 30746 - DNA, 101 bp, Homo sapiens
ttagagggatccgtggagaggaggccaggacacctggaagccgggaaatggtcctggacccaagccagaagcctctgcaaagcttccttccagacctgcag

SEQ ID NO: 30747 - DNA, 101 bp, Homo sapiens
ctctcagtagccatgctcatgatcggcgtgtttggatgtactttacaggaagaagaaatgtttcgtccaaacatgtttttcctcctcctgcttccccctat

SEQ ID NO: 30748 - DNA, 100 bp, Homo sapiens
aagagcattttggaacacatccaggaaaagataactttcgacacacctgtagacgttcgccaggtaaagatattgatgatgttaagaagttcaaaccggg

SEQ ID NO: 30749 - DNA, 51 bp, Homo sapiens
tggctttccagagggcagtgtagaggctggagtgcaatggcgcaatctcgg

SEQ ID NO: 30750 - DNA, 82 bp, Homo sapiens
agacttttgtgttgcagttcgggtgagccgttctccaaccctttggcccccgatggccacgatgtggatgatcctcactcct

SEQ ID NO: 30751 - DNA, 90 bp, Homo sapiens
ggaaacctcacaacacaatccaggacaacatggaaaactacaggaagctgctctccctcggtgtcatctttaagaaatgaaaagcgaggc

SEQ ID NO: 30752 - DNA, 111 bp, Homo sapiens
ctgggcgccgccgcgggcgccgggagcgagctgggagggagccgcgcgcctttgtgcgcgcgccgagacctgcctagagctggaacgttacctccagagcgagccctgcta

SEQ ID NO: 30753 - DNA, 98 bp, Homo sapiens
ttgctactcgggacgctgcacctcccgcgccgcacggtggacgagaaattctccagaatttcagaaacttctgggcatcgctatggaactttttctgc

SEQ ID NO: 30754 - DNA, 74 bp, Homo sapiens
tgctcctttgagacccggcgccacctatgtatggtcatggaatacgtggaagcaacctacagctggagtcgaga

SEQ ID NO: 30755 - DNA, 89 bp, Homo sapiens
gctcccgtctccaggccccaaggagccacacctggaccagaccccaggaaaggtcttgttccgagcgagtggtggcaagcccatcgccg

SEQ ID NO: 30756 - DNA, 101 bp, Homo sapiens
cggccggcgggaccataagggcttaactcatatatttaacccccctccaaaaagatctaagcctttcccacgttatggttataaaccctccccaccgaatg

SEQ ID NO: 30757 - DNA, 87 bp, Homo sapiens
acaaaataaccacttaccccttctcaccgaggaagagcgggagaaaggattaacgtcttcaaggacccagttgctgatcccaacaaa

SEQ ID NO: 30758 - DNA, 75 bp, Homo sapiens
cgcctcgcctcgggacccgcggtccccgctcttgctggaattttggagagtaaaaggctgaaccttgttaaagag

SEQ ID NO: 30759 - DNA, 83 bp, Homo sapiens
caggaacaaatagagctgccagaggttccctccgagccccttcctgagaagatcccagtggagaccatcctgggcctcacagg

SEQ ID NO: 30760 - DNA, 75 bp, Homo sapiens
caaacatccatatcataagtggaattttggagatattcaaagatttggaaatagtgggatttattgatatagctg

SEQ ID NO: 30761 - DNA, 75 bp, Homo sapiens
tcgacctcaaggacatcaacttccggccgcagatgtcccagatgcatcactgtaagcgataccgctcccctgaac

SEQ ID NO: 30762 - DNA, 82 bp, Homo sapiens
ctacagttactatgcctcgaatcaaggtcctgaggcacgtgaatggccaggatcagattgtgcccggcctgtacgcctgtgg

SEQ ID NO: 30763 - DNA, 90 bp, Homo sapiens
ggggtccgcaaggccggagaaggccgccgggcccgggcatggtggtctggggcaacgcggaagcattcgttcagtcagagagcataatag

SEQ ID NO: 30764 - DNA, 100 bp, Homo sapiens
tcctgatacagcaggcgctcaccatgttccctggaggtgaccctggcaaagatgagagtgcacatttcgtcctgcctgaaggtccaggagcagatggcca

SEQ ID NO: 30765 - DNA, 90 bp, Homo sapiens
gggcagttatccattatagggatgatgagaccatcttttagagctctttgacagtgaagatcctcgggagagagattttcttaaaaccac

SEQ ID NO: 30766 - DNA, 101 bp, Homo sapiens
gcaagaccaaaatttgaacaggttaatctgttggattctaatgcagttcatcacatcattcatgattttcagagagacaagagagacacctccaacttcga

SEQ ID NO: 30767 - DNA, 101 bp, Homo sapiens
cccagatgatgcggtggtgggggacctgccggcacgcgactccccccgggcccaaagtttggtgcacctcgatttggaggaagtagggcagggcccttatc

SEQ ID NO: 30768 - DNA, 74 bp, Homo sapiens
gtggagtgagttggagaatctggtccttaaggatatgtcagatgggaatccctgtgctgatcgtggggcatcat

SEQ ID NO: 30769 - DNA, 100 bp, Homo sapiens
atgcctcgaactaaacaaattcatcccagaaatctaagagaataatcatgggccagactgggaagaaatctgagaagggaccagtttgttggcggaagcg

SEQ ID NO: 30770 - DNA, 51 bp, Homo sapiens
tcagctacgaggaggcgctgaggagagagatggggtcttgctatgttgccc

SEQ ID NO: 30771 - DNA, 90 bp, Homo sapiens
gggctgaagcgactgagtccgcgatggaggagttcatgatcaagtgttgcccacaccaaatgcttcatccagagtcatagtacatgtgga

SEQ ID NO: 30772 - DNA, 101 bp, Homo sapiens
cgcccactgccccgtgcccacatcaaggagtatttctacaccagtggcaagtgctccaacccagcagtcgtgtgtgggccatgtttgaggattgccccagc

SEQ ID NO: 30773 - DNA, 51 bp, Homo sapiens
tgtcagccttcccagtagctgggaccacagatgtgacttgctcctccttgc

SEQ ID NO: 30774 - DNA, 75 bp, Homo sapiens
gggagatagacgctgctgcctcagcccctgtcaaagggaacaggaagcagtccacggagggtgacgccctagacc

SEQ ID NO: 30775 - DNA, 83 bp, Homo sapiens
cttcattgctctgtgtgccaccggacttctgcacggacctggccgtctccagtgccaacttcattcccacggtcactgccatc

SEQ ID NO: 30776 - DNA, 100 bp, Homo sapiens
tttctgaagaagtggctgtagggagcatagctgctacactgaagatgaagcaaggcccaatgacccaggcgatgagctttgatccaaaccttctccacaa

SEQ ID NO: 30777 - DNA, 100 bp, Homo sapiens
tcggtgcaagaaaatccatgctggcgatgaagtgattcaagttaatcatcagactgtgtgggccacagttacatttcatcttcctcatcatgtgttgaag

SEQ ID NO: 30778 - DNA, 51 bp, Homo sapiens
cgggcgctggtctgctcccagccgcaatcatcctcttccagtggtagcgtg

SEQ ID NO: 30779 - DNA, 100 bp, Homo sapiens
gtcgctgtgggacatgacccgcatgctgaacatgctcatcgtgttccgcttcctgcgtatcatccccagcatgaagattttgagaagagggggaaaaagg

SEQ ID NO: 30780 - DNA, 74 bp, Homo sapiens
tggacgccactacagttcatcaacatcaactacgtccctctgaaggatgagaagagacgtagagttacatccag

SEQ ID NO: 30781 - DNA, 100 bp, Homo sapiens
agaagtatgtgttacggagacatgctcttattgtacagcaggatgaagttaaaggaagtagatcgtacagccatgcaggcatggagccctgcccagaatc

SEQ ID NO: 30782 - DNA, 83 bp, Homo sapiens
agaatcttgaatcagaaattgagaagctgtttttgaatcagagccgacaggcacttgaattgaaaatggaaaaccctactgct

SEQ ID NO: 30783 - DNA, 90 bp, Homo sapiens
gagcgctgcagggggctgcgcctgcctgctccgccccagacctgtcggcgaaagggattccagtggaatgacactggtgatgcttgccgc

SEQ ID NO: 30784 - DNA, 50 bp, Homo sapiens
gtgacagtctgcatgtgcagttttcagacatgcgtcgggatgtccaggaa

SEQ ID NO: 30785 - DNA, 59 bp, Homo sapiens
gcaccaaaatctcaggagaaatccaagccttccttgcaggtcaacaagatagaagtgat

SEQ ID NO: 30786 - DNA, 51 bp, Homo sapiens
ttcctaggcagaatgcttggaaaggagaccagttttgattttaaatgttct

SEQ ID NO: 30787 - DNA, 96 bp, Homo sapiens
aaaaggagaaggaagaagcagatcttcttttggagcagcagagactgggcacctgtgctggttgcacttgctttgattgaatgtggaatgaagtac

SEQ ID NO: 30788 - DNA, 100 bp, Homo sapiens
ttttgggctggtggtctcggcagactgcttttcaggaagccttggacgctgcaggtgataaacttgtagtagttgacttctcagccacgtggtgtgggcc

SEQ ID NO: 30789 - DNA, 150 bp, Homo sapiens
ttgcctcctaaacgtgtaccatttccacttgatgtcatcacgcagaaggggtgaaagagactcggtgacagatacagtttcagctcagctgcagctggtgatctcctcatactgggcacggacctcggcaaggatgccatttaaatcgag

SEQ ID NO: 30790 - DNA, 75 bp, Homo sapiens
cttcaacagaatgtggcaaccagaaacctcaaatatttgttgttaagtgatcttcctggagtaagagaaaaagaa

SEQ ID NO: 30791 - DNA, 82 bp, Homo sapiens
gggggtcttcctcctccgccgttgacaggctgaaggtgatgtggccgccctcaaccgacgcatccagctcgttgaggaggag

SEQ ID NO: 30792 - DNA, 75 bp, Homo sapiens
aagagaccacgaagccaccccccacgttttcaactgaaatagctctccagacccccagctggccatgtggtgagt

SEQ ID NO: 30793 - DNA, 95 bp, Homo sapiens
cttggagacagattctgacctcagatttctgacattcgattccccagaggggaaagcagaccagttgctcttctgtgatgactgcgatcgtggct

SEQ ID NO: 30794 - DNA, 97 bp, Homo sapiens
gaagacggtaacccgtgtgactttgactggagcagcccgacggccatggaggctgaagagacgatggaatgccttcaggagttccctgaacatcata

SEQ ID NO: 30795 - DNA, 100 bp, Homo sapiens
ggatcctctggccagctgactgcacttcttttttgagaaaggaaggaatatatcctgactgattccatgctggctggagccacagcagtttactcccagt

SEQ ID NO: 30796 - DNA, 50 bp, Homo sapiens
ttgtccagttactctaacaagtctggagacggagtctcgctttgtcgccc

SEQ ID NO: 30797 - DNA, 51 bp, Homo sapiens
gctctggaattggcatctttggggtggatgtggtgaactgcgttgggggta

SEQ ID NO: 30798 - DNA, 82 bp, Homo sapiens
gaaggtctacagagcggcctgcgccagcgaatctgactgcagccatgagcagcaatgagtgcttcaagtgtggacgatctgg

SEQ ID NO: 30799 - DNA, 75 bp, Homo sapiens
aatgagacccaaactgctcatacagaattacgcatttccacttctaatggaagcagcgagctccgtgtagacctg

SEQ ID NO: 30800 - DNA, 85 bp, Homo sapiens
gagagacaccttgagcagagagatgagcctcaagaaccttctaataaggcatctatcctttctctggtgacaaaaataaacaatg

SEQ ID NO: 30801 - DNA, 100 bp, Homo sapiens
ctccagagtagctgggattacaggatgaccggaaagaagggatgaccgcgtttgtggaaaagagaaaggccaacttcaaagaccagtgagaaccagctgc

SEQ ID NO: 30802 - DNA, 50 bp, Homo sapiens
ttaggatcaggaaaagtcatcaagccgtcatggaaatgatgagtcagaag

SEQ ID NO: 30803 - DNA, 118 bp, Homo sapiens
cagatgatctatccctcctgaaactctaccctccaggggatgaggaaggcggatgacccggacgacgggccagtgcctggcaccccggggttgccagggtccacggggaacccgaagt

SEQ ID NO: 30804 - DNA, 75 bp, Homo sapiens
agggtcctttatatagaagggagagtagactggattatggacagaacttggaaatattgagaataatttcttaaa

SEQ ID NO: 30805 - DNA, 106 bp, Homo sapiens
ggccgccgtcggcagcaagaacagagagagaggtggacagatctgagagatactgagacaatgcagatcttcgtgaagactctgactggtaagaccatcaccctcg

SEQ ID NO: 30806 - DNA, 82 bp, Homo sapiens
gtaaaggactcctactgaaaacaatggttacacatcattttggaatgactgtatatcatctggattacgtggctgtatgtta

SEQ ID NO: 30807 - DNA, 82 bp, Homo sapiens
gcaccatatactactttttccagaattcatacaaagagtgggtggcctatgtatgcacagctactgattgatttattcaaat

SEQ ID NO: 30808 - DNA, 100 bp, Homo sapiens
ccacttcacacatggagagatgcaagaccagtccatttggggaaatccttcggatggtgaactcattagaaaccaaaccaatgcacaactcctacgtact

SEQ ID NO: 30809 - DNA, 100 bp, Homo sapiens
gcgacagaatcccactgagacgcttcggagagtgttgccaaaagtcagagattggtcttgatttgagcaatggtaaacctcgagacaacaaacaagcagg

SEQ ID NO: 30810 - DNA, 90 bp, Homo sapiens
ggcaccgactcgagcttaaccagggtcagcgagatgaggccctgagcctgtgcaattatttcgagagtcaaaatgtggatttccgaggca

SEQ ID NO: 30811 - DNA, 100 bp, Homo sapiens
gcccgggctgcgggcgctgaagaagatggggtgtccgcaatgttgccagtgtctgtctgcagattggctacccaactgttgcatcagtaccccattctat

SEQ ID NO: 30812 - DNA, 75 bp, Homo sapiens
tctcctggctcccttctgccccagctccgtctcggcggcggcggcaactgaacgaggaagggatgctgttggctt

SEQ ID NO: 30813 - DNA, 100 bp, Homo sapiens
tgtcttccccaacgccccggagccgccggccgctagcgtcagcgccagccagatttatcagcaagactgttgaacgcataactgcccaagatgcctgtcc

SEQ ID NO: 30814 - DNA, 100 bp, Homo sapiens
gggtaatcactttgatcagtatgaggaaggacacttggaaattgaacaagcgtcacttgacaagcctatagaatcggtctgggaggggctgaacgtggtg

SEQ ID NO: 30815 - DNA, 100 bp, Homo sapiens
tgcgcgtggctggggaggcgaggccggacgcacctctgtttgggggtcctcaggtgacaactgttgatagatttcaaggtcaacagaatgactatattct

SEQ ID NO: 30816 - DNA, 74 bp, Homo sapiens
tgagaagcagaacccagctgaaggactgtggtttgatgataagaacccaatttgggccgggcgcggttgctcac

SEQ ID NO: 30817 - DNA, 82 bp, Homo sapiens
ttcggtaaaggcaacagattctgacgttttcccatcatatgattcccggtcctcctggtccccacacaactggcatccctca

SEQ ID NO: 30818 - DNA, 114 bp, Homo sapiens
caaacctgtgataacctgtctcaaaaccctcctcatcatctactccttcgtcttctggtgtgctggagaagagaaacgagttggcacacgcacagtgtttgttggcaatcatcc

SEQ ID NO: 30819 - DNA, 74 bp, Homo sapiens
tcatctccctgctctggatcatcgaactgaatggctctggaaggggaggctcaccgtgtgctatttgggtttgt

SEQ ID NO: 30820 - DNA, 98 bp, Homo sapiens
ggaaattcttcaggatcaattacatgtttgcaaaatggatggtcagcacaaccaatttgcattagaaggaaaatcacctcggcagtgtttgaaggaag

SEQ ID NO: 30821 - DNA, 74 bp, Homo sapiens
cctgatttctgcagctctgtgtgaagggtagatatccatagaaaagagaactctggagctgcagagaagcctgt

SEQ ID NO: 30822 - DNA, 98 bp, Homo sapiens
ctaaacacagcacgtaccttagaactctatggagttgaattccactatgcaaggcattcctctgaatattgatttgctgaatagcccagacttattgg

SEQ ID NO: 30823 - DNA, 51 bp, Homo sapiens
gaccacagtgctcaccacccaccaccactgaagggagttaagccccaagcc

SEQ ID NO: 30824 - DNA, 100 bp, Homo sapiens
gatgaaggagctcagagaagaggtggaacgtgtgatcaccattatgcagaatccacgccagtacaagatcccagactggttcttgaacagacagaaggat

SEQ ID NO: 30825 - DNA, 100 bp, Homo sapiens
agatgctcctgcgttctgatgtcgtgcccatgacagcagaggcttcgtgacggagttatcagagacattgagaggcaaattcggaaaaaagaaaacattc

SEQ ID NO: 30826 - DNA, 98 bp, Homo sapiens
cggagagcaatcgccgggacagctgcaaggctcaagcacggacatcagtgaggactgggagaaagactttgacttggacatgactgaagaggaggtgc

SEQ ID NO: 30827 - DNA, 75 bp, Homo sapiens
gggacaccaccacccacggccagacacttccaggagccggagctccctgggtcctcagcagtgaggctggcctcc

SEQ ID NO: 30828 - DNA, 100 bp, Homo sapiens
gggagacagaaatccagtgcagaccacaggttatacattggctcttcaaagacgttcacctcatcagagaaatccctgactcctttgcagtggtgtagac

SEQ ID NO: 30829 - DNA, 83 bp, Homo sapiens
tggtggagccggtgctctgggactacacggccgacctggatgtgcacggcaaggccgcggcgagtcctttgcacatgttggca

SEQ ID NO: 30830 - DNA, 75 bp, Homo sapiens
gagatcgtcagcgctgactccatgcaggtattctctactgccgctgatggtcaaacgcaagtggaaattaaagtg

SEQ ID NO: 30831 - DNA, 100 bp, Homo sapiens
atggagaatggctggtctcctactcccagatgcatccgtgtcagcagagatcctacaagaatccaggatgatgatcccagattgccagcgcaggttggaa

SEQ ID NO: 30832 - DNA, 82 bp, Homo sapiens
atccaacagcgcactcggattgaagatgaatatagaacccatcacacagtacaactatactgccaaatctgtcgaaagggag

SEQ ID NO: 30833 - DNA, 74 bp, Homo sapiens
gaagccgtgtcccagtccacacaggaggaagaacgtgcaaaacgtgaggagctagagcgaatactggaagagaa

SEQ ID NO: 30834 - DNA, 75 bp, Homo sapiens
cctggatcttcgaacttttgacacggctttggaaacgacgtcatgtgttagggaacttatagaaatgctggcaat

SEQ ID NO: 30835 - DNA, 82 bp, Homo sapiens
gaaagttattaagaagcctatggatttttccacaattagagagaaactaagtagtggacaggttttttgattaactcaaaac

SEQ ID NO: 30836 - DNA, 75 bp, Homo sapiens
gtgaccctgcagctcctcaaagagtggagtcaacatatcaatggagcaagtcacagtcgtcgatgccagcttctt

SEQ ID NO: 30837 - DNA, 90 bp, Homo sapiens
tatgtgcgtagaagacgacctattttggagaccgttgtggaaatcaaactgttcaaaggccctaaaggattcactccttctccagttgca

SEQ ID NO: 30838 - DNA, 83 bp, Homo sapiens
tataataaggctgagtgcggagccaagaacatatgctgtcaggaggataagagatgccttcagagaaaataaaaatgtaaagg

SEQ ID NO: 30839 - DNA, 50 bp, Homo sapiens
atctaaacttggcaccaagtatggtgacttaagagattaaaattaatttg

SEQ ID NO: 30840 - DNA, 90 bp, Homo sapiens
gcccactcgagccgcagccatgtctggggacgagccggtgatgaacaatgacaagcactgctttgaatgctatggctacgacatcatcat

SEQ ID NO: 30841 - DNA, 90 bp, Homo sapiens
caagaagatcatcaagcgcaagcacaccctaccgaattacaagatcaggccagccctccagatctctatattgaaagatttaatatagct

SEQ ID NO: 30842 - DNA, 90 bp, Homo sapiens
tggctgacccaatggaagatgtgatcatcaggaatctcgtgtgggcgctcgtccacaaacactccgtggctgagaggcagcggatccagg

SEQ ID NO: 30843 - DNA, 74 bp, Homo sapiens
tttggaccaaactgtaaaggaatttatcgtatttctaaagcaagcggcgtcttcgacatcttcggaacattgct

SEQ ID NO: 30844 - DNA, 83 bp, Homo sapiens
gagactcagaatcgaatctcttctccctccccttcttggcagaagctcctcctggggtagagacagatcttattgatgttgga

SEQ ID NO: 30845 - DNA, 82 bp, Homo sapiens
agaatgcatacttggaatgaatccttctagagacgtccacgcagttgaccaagctccaccagttggccatgcagcaaacccc

SEQ ID NO: 30846 - DNA, 89 bp, Homo sapiens
accgttatgtgggaagcgaatccaatgtgtatatctcatgattgatatggagaaactagtcatgggccaaaggtcaagatacttctctg

SEQ ID NO: 30847 - DNA, 100 bp, Homo sapiens
gggtgattctgaagagggtctggaggagccttctcaagaacagagagaaatggtcaatgcatggtttgctgagagagttcacaccatccctgtgtgcaag

SEQ ID NO: 30848 - DNA, 83 bp, Homo sapiens
gattatcgagcaaaactttgggcctgtaatttctgttttcaaagaaatcagaaatttctgaataaattggcagaagaacgcag

SEQ ID NO: 30849 - DNA, 82 bp, Homo sapiens
taatctcctcagaaatcactaaatactactctgaggggcttagaaattaacagggtgtcagctgtgatgcatgtttaaaagg

SEQ ID NO: 30850 - DNA, 135 bp, Homo sapiens
ggaagatggcggacggcgtggaccacatagacatttacgcggatgtcggcgaagagttcaaccagttttcggctttgtgagaaaccttaccatcaaacacgatggccagcaacgttaccaacaagacagatcctc

SEQ ID NO: 30851 - DNA, 51 bp, Homo sapiens
tgtggtccagcctccagtcccaggtgcccccttgtttctctcccatcctca

SEQ ID NO: 30852 - DNA, 100 bp, Homo sapiens
ttaagtatgcggcgccaggagctcctgccacagtgactcaggtcactcaaggaactatccgaccagctgccaacttcgatgctataagagatgcagaaat

SEQ ID NO: 30853 - DNA, 76 bp, Homo sapiens
tttagactaatgactgtccgaaacatcgcctccatctgtaatatgacccaacatgagtgaagtttcctgcaagaaa

SEQ ID NO: 30854 - DNA, 82 bp, Homo sapiens
cgcgaggagccgccgcgcgcccgcgccctccgcgcgacgccagggagtaccctgacttctaccggaagctctacggcctctt

SEQ ID NO: 30855 - DNA, 82 bp, Homo sapiens
ttttcatcctttgatcccgcggtcccttcctgtaccttgtcctcaggtgtgggtcctgtggtagctggagtgttggtggcca

SEQ ID NO: 30856 - DNA, 50 bp, Homo sapiens
aataagagactggacgctgtgagggcgtgatggtgggcatgggtcagaag

SEQ ID NO: 30857 - DNA, 75 bp, Homo sapiens
actaggattatacattgtaagaggtgacaacgtttacatccttaatgttcagtcaagcagtgatgacaccagtgg

SEQ ID NO: 30858 - DNA, 83 bp, Homo sapiens
ccaggcgactgcctcatcttcaagagcagccatcagcagggaccctttctacgaaatgctcgcagcacggaaaaagaaggtct

SEQ ID NO: 30859 - DNA, 75 bp, Homo sapiens
ggagcattgcttctcatacagtaagatatattcgactttatgggagaaaatttagcaaagaagatcatgttcttt

SEQ ID NO: 30860 - DNA, 73 bp, Homo sapiens
cttgctctgacagagtacaccttgtacttgggatttcacaggttgctacgatttctgcaaacggagacaaaga

SEQ ID NO: 30861 - DNA, 83 bp, Homo sapiens
tatccagattgtacaggttgcttgtggttactatcattcacttgcactttctaaaggtggatttgtttaaaaagagtcttctg

SEQ ID NO: 30862 - DNA, 100 bp, Homo sapiens
ggccatttagagaaaggaggaagctacgtagctctgactgatggcttagggaacctcaccatcatcattgaaaccatggggtcaggcccagccccaggcc

SEQ ID NO: 30863 - DNA, 90 bp, Homo sapiens
gagagcccggggcagagcagaggtgctcatcagcactgtaggcccggaagccaatcaacaatgctgacttcatagtgcctatagagattg

SEQ ID NO: 30864 - DNA, 51 bp, Homo sapiens
gggagagggtgaccgacatcccaactagatacttgccagaactaatacagc

SEQ ID NO: 30865 - DNA, 75 bp, Homo sapiens
tctgcctcggggacgaaagcagggcaatgtgtatgtgaagtgcccatcaattgctgcagctattgctgctgtcaa

SEQ ID NO: 30866 - DNA, 98 bp, Homo sapiens
gggagtagtgcgatcctgcgcgcgggggaactagctggagggcaaggcgggaacacagtcaaggaaacttttgagctatttacagcttgtagcaatta

SEQ ID NO: 30867 - DNA, 80 bp, Homo sapiens
gtacaggctctttgaatatgactctgcaaaggaaaatgtttataggaggccttagctgggacactacaaagaaagatctg

SEQ ID NO: 30868 - DNA, 103 bp, Homo sapiens
aaaatgattggcttttctgaaacagccaaatgtcaggccatgaagaaggtattattctcactaaggttggttactatactattccatctatggatgaccttgc

SEQ ID NO: 30869 - DNA, 98 bp, Homo sapiens
gcagccgagatgccgggggagcggggccttccacaccccctccgtgggtgtgtgatttggagcaagaggtggtggtggccttcccccgaagaaatttg

SEQ ID NO: 30870 - DNA, 75 bp, Homo sapiens
atcgagccttggcggcggacgtgcaggctcagccgcccagtgggctcaggcccagagcccagagcaaccagcaca

SEQ ID NO: 30871 - DNA, 90 bp, Homo sapiens
gcctggggacattatccggctcaccaaaggatattaataaggcagcggaaagaagaaatatgaatacggctccatcaagacccagcccca

SEQ ID NO: 30872 - DNA, 83 bp, Homo sapiens
aatgttcgagtccaacgtcatctgctacttatcagccatccttcgctgcagattgtagaaggcatgaaacaaaaaatgtggag

SEQ ID NO: 30873 - DNA, 80 bp, Homo sapiens
cgcgtcatcacggacgagaactggagagaactgctggaaggagactggatgatagaattatcaggatcctcatgaccagc

SEQ ID NO: 30874 - DNA, 98 bp, Homo sapiens
ctggcccttttgaagaggaaatgaagggtattgccgctgttactgatatacctttaggagaaaatgctgagaagcttctgcagttcaagcgttggttc

SEQ ID NO: 30875 - DNA, 100 bp, Homo sapiens
cgaagacgaggcaaagcacccagctttcttcactcttccggaatggacaaatgaggttttcagtttggcaacaaacctgctggcccaaaacatgtccagg

SEQ ID NO: 30876 - DNA, 90 bp, Homo sapiens
agatttcctctcggagcctgagggaggcccagcagtaagccgaaaggatgaagagttagaccccatggaccctagctcatactcagacgc

SEQ ID NO: 30877 - DNA, 100 bp, Homo sapiens
tgcgcttccagcttaccatgcggctgcgctccataaaggcagacgacaaggtatatgactgatgggatgttacttcgtgaagctatgaatgatcccctcc

SEQ ID NO: 30878 - DNA, 75 bp, Homo sapiens
ggcgcaggggctggaggtggtgctggggacaatgcagatcttcgtgaagactctgactggtaagaccatcaccct

SEQ ID NO: 30879 - DNA, 100 bp, Homo sapiens
taggagcccatgaaatcaagagcaccacagctacatttggaatacagattctataagcagttaggatctggagagttaccttgtacatgcccactatgta

SEQ ID NO: 30880 - DNA, 80 bp, Homo sapiens
gagggaggcccagggcctcatggcagggcaaattgtggctactaatttgccccctgaagatcaagatggctctggggatg

SEQ ID NO: 30881 - DNA, 109 bp, Homo sapiens
tggaaatagcttgtgctgctgctgctgctgctgctgcatgtctaccaggagaggagggaactgcggagcggactggctgctccttcaggcctctgctgaggtggtgatg

SEQ ID NO: 30882 - DNA, 49 bp, Homo sapiens
cctcattcgccgggtgaatgatgaccaggtatctcccagctccacattc

SEQ ID NO: 30883 - DNA, 83 bp, Homo sapiens
gccgtcggagaagaccttcaagcagcgccgcaccttcgctcatgatggagcagtccaagaagtcctccctcatggtggcccgc

SEQ ID NO: 30884 - DNA, 83 bp, Homo sapiens
gcaaaagaaagctttctgcacaggtgtgatgaatgcagactctgctaccattttggctgtttggatcctcctttgaaaaagtc

SEQ ID NO: 30885 - DNA, 51 bp, Homo sapiens
aacacaggttctggacggaagtttacccgaccattaaaaatctcaagtgac

SEQ ID NO: 30886 - DNA, 51 bp, Homo sapiens
gttcagtgcagtgtctgacttgtgacaggggtgaagttgaacaaattgcta

SEQ ID NO: 30887 - DNA, 83 bp, Homo sapiens
ccggcgagggcgcgcggctggtgtccgccccgcccgaaagctgagcgggctttggacaccatgaactttgatgtgattaaggg

SEQ ID NO: 30888 - DNA, 100 bp, Homo sapiens
cctgtacaaggccattcttgaatatgacaatgttggagaagcctctgagcaaaccgacctcacagggggcgcctttgaggacaacctgaggtcactgcac

SEQ ID NO: 30889 - DNA, 82 bp, Homo sapiens
ttggagagagtggtattatggtgtaaacaacgattctttggagtattacagagaggcttgaacacgctttggaaaaggcagc

SEQ ID NO: 30890 - DNA, 82 bp, Homo sapiens
ttggattatgacatcgaagaggataaactgtcccactctatgaccagtgggaggatgtgatgaaagggatgaaggtggaggt

SEQ ID NO: 30891 - DNA, 83 bp, Homo sapiens
cttgaagacagagatttattcgtaatgcgactcaaagctgcacggcagtctgtttatgagcgactttccggccagggatactg

SEQ ID NO: 30892 - DNA, 80 bp, Homo sapiens
cctccagcggccccggggacaccagcagctctgctgcggagcgggaggaggaccgaaagacatgtgctcaccgatatgaa

SEQ ID NO: 30893 - DNA, 74 bp, Homo sapiens
gagaagggccggcggattcgggaactgactgctgtagttcagaagaggtcagagcaagatgtgaagcccaagcc

SEQ ID NO: 30894 - DNA, 100 bp, Homo sapiens
tcgttccccgccaaccgcaaccattgacgccatgtcgggttattcgagtgaccgagaccgcggccgggaccgaggctttctgtatgagcccaatagccaa

SEQ ID NO: 30895 - DNA, 101 bp, Homo sapiens
ttgagccagaaggaagacaatgctggacagacaatgctgtgaagaatcactggaactctaccatcaaaaggaaggtggacacaggaggcttcttgagcgag

SEQ ID NO: 30896 - DNA, 90 bp, Homo sapiens
tcggagcggccgccggagcagcgccggagatggggcatgatgacctgaaggagatgctggacaccaacaaggattctctcaagctggagg

SEQ ID NO: 30897 - DNA, 100 bp, Homo sapiens
ggaggaagctgggacacccgggagtcaggaaatggccgacgcccccaacccatccctcatcccagagactgatgccgtgggtgtgactgtggtcctcatc

SEQ ID NO: 30898 - DNA, 86 bp, Homo sapiens
tgaaggaaatgtggatgaaacaggaaacaatccttctgtttctttaaaactggaagaaattggtaggaggacagtttgatctggaa

SEQ ID NO: 30899 - DNA, 75 bp, Homo sapiens
aatagcaaaaaaaagggggccaagaaggaagcgtcaccagtggctacctctacgtgaccatcatctacaacatct

SEQ ID NO: 30900 - DNA, 100 bp, Homo sapiens
cacttcttgccacaatgttacagagagctctcgatgttctgaagtatgaggaagttgacatggattcattagccaaggctgttccagagcccttgaagaa

SEQ ID NO: 30901 - DNA, 100 bp, Homo sapiens
ttcagttttatgatggagtaattcgttgtttaaaaagaatgcacattaaagccatgcccgaggatgctaaggggcagattattcttggagaaaccctgtc

SEQ ID NO: 30902 - DNA, 100 bp, Homo sapiens
ctatcctcggtgctgtggtgcagagctagttcctctccagctcagccgcgtagatatggctcgtggacagcagaaaattcagtctcagcagaaaaatgcc

SEQ ID NO: 30903 - DNA, 50 bp, Homo sapiens
ttctgatgaagaagttattcaagatggggaaagagtggtggcctttgctg

SEQ ID NO: 30904 - DNA, 75 bp, Homo sapiens
gggagcatgggttaccagcgacgcacccttttttgttccagcagctgggaatgttggtgtcctttgtgaagagcc

SEQ ID NO: 30905 - DNA, 98 bp, Homo sapiens
actactaatagaaaaatttattgataatcctcgtcatatagaaatccagaaacttgaggagaggctggagttctggatggagaaatacgataaggaca

SEQ ID NO: 30906 - DNA, 50 bp, Homo sapiens
gcttctgattaccagacagtccaggatatgtgaacttttgcaaagcggag

SEQ ID NO: 30907 - DNA, 90 bp, Homo sapiens
gatgattctaattcaacaaatcataacttggtatcaatataagtgatgaggattttcttttgctggagcttttgcactggtttaaggaag

SEQ ID NO: 30908 - DNA, 80 bp, Homo sapiens
cttcggcagtccacccaccgccgccgcctcccaggattgtcagtggcttcgccccgaggagagctgactgccctgggctg

SEQ ID NO: 30909 - DNA, 146 bp, Homo sapiens
caaaatttgccatccgagggatgctgaaaacctttgggcttcatggagtcgtcttagatgttgattcagtggctgccttactgtcggggaagttccagggtctgattgagaagttttatgtcattgattgtcgctatccatatgag

SEQ ID NO: 30910 - DNA, 80 bp, Homo sapiens
agatcagagtcacgcccttggggggggctgtcggggggctgttaggtgcctggatgacaagtggacagtttaagccggtt

SEQ ID NO: 30911 - DNA, 101 bp, Homo sapiens
cctcgcactgtgacatgtctgatcccttgctcccatccctgcagcatgaacaaggaaaacatttaaagttgatgatatgttatcaaaagtagagaaaatga

SEQ ID NO: 30912 - DNA, 74 bp, Homo sapiens
tggactgtcctctacagaaggaagcacaaaaagggacagtcggcaatgtctacttcgatctgaagtctagagga

SEQ ID NO: 30913 - DNA, 120 bp, Homo sapiens
aggagggacccacagggctgaaggaagctgccttgtacccacatctcccgccagggccaggaaggaatactgggagaatcttcggatagcctcaggccggccatacaacccttcaatgtc

SEQ ID NO: 30914 - DNA, 100 bp, Homo sapiens
tgataacccatggaccaccactgggagattagcagaggcatttcatatcagtgaggattctgatcctttcaatatacgttcttcagggtcaaaattcagt

SEQ ID NO: 30915 - DNA, 100 bp, Homo sapiens
cgggcaactacagcttctcctaccagctcgaccggcacagtcttcactaccgtagaagaccttggctccaagatactcctcacctgctccttgaatgaca

SEQ ID NO: 30916 - DNA, 100 bp, Homo sapiens
cgtctcctgaagatgcaaaaccagcgtggcggccgcgctctcttccaggacatcaaggtgcccactcccacatccggggactggggctggacgatgcctt

SEQ ID NO: 30917 - DNA, 96 bp, Homo sapiens
ctgtacgagctttcgccaaagagcttttcctaggcaaaatcaagaaggtattaatctctggagaagacacatccacagttagcactttcttcagat

SEQ ID NO: 30918 - DNA, 101 bp, Homo sapiens
ttagtgtcacccttcgcatcattcctcaggaggcaggtggagagtaagccatactttcacgttgaagattacatcccagcgagtctgatcgagaggatgac

SEQ ID NO: 30919 - DNA, 108 bp, Homo sapiens
cgtgacatccgaggtgcctttctccaaaagcagaagaaggaggaggagtcggcgggcggcaccaagggcagcagcaagaaggcgtcggcggcgcagctgcggatccag

SEQ ID NO: 30920 - DNA, 82 bp, Homo sapiens
ctgaagggcaaggaaagcagcatagagaatgagatagccgtcctgagaaacgggagatacagatgacccaccaagaattact

SEQ ID NO: 30921 - DNA, 88 bp, Homo sapiens
tctattctgcctagttgccgtcgctatatccgcagactccgggctatccgggagctcaatagttaacaagcacaagccctggctggag

SEQ ID NO: 30922 - DNA, 100 bp, Homo sapiens
ataacaatcagtgccgagcaattgtgatgagatattctgctgagtggaaggtgcgacgagattggtatgtgtatgcatttctgtcatctttgccctgggt

SEQ ID NO: 30923 - DNA, 100 bp, Homo sapiens
cggtggagcctttatatcatgggaagcactctcacttattaaagatcttgcgaatgtctgcgacaacgagctcctgcactgccagaacggagggacgtgc

SEQ ID NO: 30924 - DNA, 97 bp, Homo sapiens
ctgaaagggaagcagaaccatactatgcaatgctggacgtggctgcaaaccagggctggctggtgactgtcctgaatatcaccaacctgattcagat

SEQ ID NO: 30925 - DNA, 97 bp, Homo sapiens
tgggctgatcctatagaagatcctgatcctgaggttatggcaaagacagatgcaccatcaggaatggaattacagtcatggtatcctgttataaagc

SEQ ID NO: 30926 - DNA, 50 bp, Homo sapiens
aggattccagggtcgaacactcgaacatcgggtcagaagttgagatttcc

SEQ ID NO: 30927 - DNA, 88 bp, Homo sapiens
cgggtgtcgctgggctgtcggcctggaccttgcagccgcaatggactgatcctttgaaatactccagccatgactaaaagagaagcag

SEQ ID NO: 30928 - DNA, 100 bp, Homo sapiens
cgtgtctggctctggaattgctactgctgcctctgtcactcctggtgaccagcattcaagtggaggccatagtggagtttgactaccaggcccagcacga

SEQ ID NO: 30929 - DNA, 98 bp, Homo sapiens
aagaaacgagtggatgactatgtcagaagacatttgaactgaaggcagaagctagtctaatggaccagatgagtagttgtgatagttcatcagattcc

SEQ ID NO: 30930 - DNA, 83 bp, Homo sapiens
agccctacgagtgcaacatctgcaaggtccgcttcaccaggcctacagattcctggaggagatgcggcggcggcttcccttgg

SEQ ID NO: 30931 - DNA, 82 bp, Homo sapiens
aacgaggcaaggagctaaagcagcgtgcgttcagccctggggagcgcagctcagctgggctggaactgccctcctggaactc

SEQ ID NO: 30932 - DNA, 97 bp, Homo sapiens
tcatgggagaaagacactgtttcacttgtctcagagcatgtctgttcgatcctggcttccctcctgcggaacctgagagggcagcagcggacccggc

SEQ ID NO: 30933 - DNA, 100 bp, Homo sapiens
cccgccgcagcaaaccaggccatccgctggccttttagtttgccgcctcagttaccaggcagtgacattgccagtgggagtgatgtactttctgatgtca

SEQ ID NO: 30934 - DNA, 82 bp, Homo sapiens
gtacgtcactaccactgtctctgctcacagtgccaaggtactccaaagattcaggtttactcacgtcatccagcagagaatg

SEQ ID NO: 30935 - DNA, 74 bp, Homo sapiens
aattcagttactcaggcactttcttctcaatttcatatggcaacaaactttgatgctgatgtaacagttatagg

SEQ ID NO: 30936 - DNA, 118 bp, Homo sapiens
cgtggaagcggccaccgactactgtcagcagctgtgccaggtacctttaaaacagggcagaagccttatggattggattcgactgaccaaaagtggaaaggatctaacgggattaaaa

SEQ ID NO: 30937 - DNA, 80 bp, Homo sapiens
ccaagggcgagaatggaccctgatggacttggacatggagctgtccttgattcgtccagtccagccagttggccaatcat

SEQ ID NO: 30938 - DNA, 97 bp, Homo sapiens
aaataagaagaagcaactgtacaaaccattgagatggaagattttcgaggtatagcagaagaatcatttccaagctttctcaccaattcattatttg

SEQ ID NO: 30939 - DNA, 98 bp, Homo sapiens
ttcactcccgctgtctcagcagtctacagcacgatccagacatttaatgtggatgcaccatgccagaccgtggaagatttaacgaatggggttgtgat

SEQ ID NO: 30940 - DNA, 75 bp, Homo sapiens
tgcctctctggtctccaactagtattatgagaggagtcaatcagaggcatttatgtttgaatcatctttaagtct

SEQ ID NO: 30941 - DNA, 74 bp, Homo sapiens
tgtacctgttaccactttcaaaaatacagatccacgggttttagaaaaacaagaattacagcagccaacctatg

SEQ ID NO: 30942 - DNA, 51 bp, Homo sapiens
aggggatcctctctgctttcctgatgtgtcttgctgaatcagggctctctt

SEQ ID NO: 30943 - DNA, 75 bp, Homo sapiens
cgaaaccccagacatcaaccagctgccgccgtccatcctgctcaagggcggcgactggcggcgcgatggacctga

SEQ ID NO: 30944 - DNA, 100 bp, Homo sapiens
cgggacgtgcggcccagcgagttggtcggtcccggggtcacccgctacgggaagcaggcctcgccacaggctcctcctgctggaccctccagccccgggc

SEQ ID NO: 30945 - DNA, 82 bp, Homo sapiens
catccacactccgctgctcgacaggaatccatttatccccaggtgaatttcataaagaagtagaaaagtttttatctcaggc

SEQ ID NO: 30946 - DNA, 74 bp, Homo sapiens
cgagtgggagcaccaggatctcgggctcggaacgagactgcacgcgtgagtgcatctccatccacgttggccag

SEQ ID NO: 30947 - DNA, 73 bp, Homo sapiens
gattgtgaagaagaatttcgatctccgccctggggtcattgtcagcccagaagatgtccaggctttggtgagc

SEQ ID NO: 30948 - DNA, 82 bp, Homo sapiens
ggaggagtccaactcagaggacgaggcctccttcaagtccgaggagtgtggccatctggggccgtgtggtatttgccactca

SEQ ID NO: 30949 - DNA, 74 bp, Homo sapiens
aagaagtggctgtaaagatcatcagaaacaatgagctcatactgcttttcaggaagccttggacgctgcaggtg

SEQ ID NO: 30950 - DNA, 82 bp, Homo sapiens
tgaagcgatgtagccttttaaggacagccaaggggcgttgttttctgaccgtgtcttgccacagagaacaaagaagaaaggg

SEQ ID NO: 30951 - DNA, 89 bp, Homo sapiens
cggctatcaaggcaatgcaccaagcacagaccatggaggtgcacaaatggagtccagaggaggctgtaagagccatcgccaagatccgg

SEQ ID NO: 30952 - DNA, 100 bp, Homo sapiens
ccactccccccagagccgacctgcagcaaataattgtcagtctaacagaatcctgtcggagttgtagccatgccctagaaaggcctaaagaatgtatttg

SEQ ID NO: 30953 - DNA, 82 bp, Homo sapiens
aacaggctccgtgcagagctgggccgacccgaaagcttctcgtcagtgcctcgcaggatggtaaacttatcatctgggacag

SEQ ID NO: 30954 - DNA, 100 bp, Homo sapiens
ctccatcgacctcaaggacatcaacttccggccgcagatgtcccaggacatgaaagatcagatgtcaacttcatctgtgcaggcattagctgaaagaaaa

SEQ ID NO: 30955 - DNA, 100 bp, Homo sapiens
gccacaccccctgcagtttctcagagccagccccagtgcctgctgagccgtttgacaacactacctacaagaacctgcagcatcatgactacagcacgta

SEQ ID NO: 30956 - DNA, 74 bp, Homo sapiens
ttgcttatggcatctatgtcatccaccagggaactgctcgcagaaagaagaaggtggttcatagaacagccaca

SEQ ID NO: 30957 - DNA, 74 bp, Homo sapiens
ccagccccaccactccctgccgaagcccagcccctgatgtcccagcaggccctggccaacgtcaacattgggag

SEQ ID NO: 30958 - DNA, 96 bp, Homo sapiens
ttcagagcccggcaccacccatcttgagtatctgaagtcatcaatgggcagcatgttccggcaacagtccatcgaggacaaggaggacaagccccc

SEQ ID NO: 30959 - DNA, 75 bp, Homo sapiens
agacagcccaaatatcctcggaagagcgctcccaggagaaacaaaaaaatggctacaaacttcctagcacatgag

SEQ ID NO: 30960 - DNA, 98 bp, Homo sapiens
agagtcgagtgaagcctggcccgtgagtgcctcaacaactgagatgaacgtcgactcgcttgcaggaagaagagtgacaggaccaccctagattcaca

SEQ ID NO: 30961 - DNA, 83 bp, Homo sapiens
gtggtcgtttgtttctccaaggtttgaaaagcagctggcctgcaagggtaagcttgatgattaccaggaacgaatgaacaaag

SEQ ID NO: 30962 - DNA, 75 bp, Homo sapiens
cttttggcagcatgaaagttagcaagacggtaaagaacaggtccaagaaaagctcaaagaaagcaaataccagca

SEQ ID NO: 30963 - DNA, 90 bp, Homo sapiens
ggtcgctccccatccactctcacaagcatttttgaaacgttggggttgttggagtggttggattttccctggaattgagtgagaaattca

SEQ ID NO: 30964 - DNA, 101 bp, Homo sapiens
gtgatatcagacaccgagcttcagcaagctctctccaacgtcttaggaaaagtcctcagtgctgtgggcagtgcccagctactgatgtcccagaaattcca

SEQ ID NO: 30965 - DNA, 101 bp, Homo sapiens
ttcactgcctctggcatggatgaggaacaggagtacagctgtgtagtaaagatgccttctggtgaatttgcacgtatatgccgagatctcagccatattgg

SEQ ID NO: 30966 - DNA, 49 bp, Homo sapiens
ccgctgcgggcccgctccgacgcggaagtcgcctgctgctgtcgtcggg

SEQ ID NO: 30967 - DNA, 100 bp, Homo sapiens
gagggcgggccggcctgcggcggagggaaaaaggaagaggagaaggaaattgtcccgaatccctgcagaccccagagtcagaaggagtgagaaccctgac

SEQ ID NO: 30968 - DNA, 75 bp, Homo sapiens
ccttaacccattaatcactgcagtatttctagaggcctcctcgaaagatgttgtcagacagctgtgtcaagaaag

SEQ ID NO: 30969 - DNA, 83 bp, Homo sapiens
gccatcaccgacctcatcagtgagctgtccctgctggaggagcgcttccggggggatatgagactttctactcggaatatcct

SEQ ID NO: 30970 - DNA, 98 bp, Homo sapiens
gagcagccttgcccagaagtatgctgagaaagcaacccagttcatccagcgtgcaagctgtgaaagttgtgtagatttactgtttgtgagaggagctg

SEQ ID NO: 30971 - DNA, 50 bp, Homo sapiens
tatcaacaccaaaaagctttctgctagggtgatagatacagtgatgccag

SEQ ID NO: 30972 - DNA, 83 bp, Homo sapiens
cggggctgctggtgggccgcgtcgaagacatggaccagggctacggaggagatggtaacctgcacctcaatgtgacggcggag

SEQ ID NO: 30973 - DNA, 83 bp, Homo sapiens
cggatcctgaggaggcagctgcggtggcagctgctgagttctcggtgaaggaaaacgaagccccctcctgtattgacagctgg

SEQ ID NO: 30974 - DNA, 75 bp, Homo sapiens
ggactttccttacctgtttttccagctcacccactgccagcagaggtggcggtggaaatcgcaaaggcaaaagca

SEQ ID NO: 30975 - DNA, 75 bp, Homo sapiens
tgctgggcacccacggagcctccggggctggtgaaaggtgtagcagtcactcggcctacacccacagcatcgacc

SEQ ID NO: 30976 - DNA, 134 bp, Homo sapiens
gaggaacctcagaacatgggtccgtggtcgtttgtttctccaaggtttgaaaagcagctggcctgcaagggcttgtaactcagtattcactgcattagaaaacagtgaagatgcaattgaaattacaagcgaag

SEQ ID NO: 30977 - DNA, 90 bp, Homo sapiens
caggagaattcggtttgtaggtcgtcagaaagaggttgaaaggattgttgacaaaaggaaaaataaaaaagggaagacagagtatttggt

SEQ ID NO: 30978 - DNA, 100 bp, Homo sapiens
cagtacctcacccgggaggccaagctgatcctggcgctccaggatgaggtgtccgccatggctgatgaattctgcttggtcagaatcgtgatggcattgt

SEQ ID NO: 30979 - DNA, 98 bp, Homo sapiens
agcgcctcaccgccaccagctcctggaccaccatggccaagaaccgcagggacagaaacagttggggtgctggagaatctggtaaaagcaccattgtg

SEQ ID NO: 30980 - DNA, 75 bp, Homo sapiens
cctcaacagggagctgctgttgcaggaggacgacagcggcagtgacacgcgacgttgtggacgtttaccagcggg

SEQ ID NO: 30981 - DNA, 101 bp, Homo sapiens
ccacttcgacatcgagatcaaccgggagccgggtcagataccaggcccaggttccatgatgcccgggcagcacatgccaggccgcatgattcccactgttg

SEQ ID NO: 30982 - DNA, 100 bp, Homo sapiens
cgctcctccctgcggaccctggggtcaggacctgctgaagctcacacccgtggaccacccagactgcctgccgctacaggatgccctccgcatctcccag

SEQ ID NO: 30983 - DNA, 100 bp, Homo sapiens
caaacagcccagctcgcgcttcagcgtcccggcgccgtcgcgccactcctccgagtgaatgaaaactttgccattgatttgatagcagagcagcccgtga

SEQ ID NO: 30984 - DNA, 100 bp, Homo sapiens
cccagaattcaattaaagtggctcaggatttaggtcctgaatatgaaggtatatttaacacttcattgcagtggatcttagaaaatggaaaagatgttgg

SEQ ID NO: 30985 - DNA, 100 bp, Homo sapiens
gccgtgctgcttatggcggcgctggagagggggcgctgagctgttggggtgccccccactcggccagcagcgcatccctgcactctgagcgccccctcag

SEQ ID NO: 30986 - DNA, 148 bp, Homo sapiens
gccgccttcattatctcctacgtggtcgccgtgctctccgggcacgtcaaccccttcctcccgtatatcaggaagtggcagtttttgtctttgataaaaaactgattgacaagtatcaaaaatttgaaaaggatcaaatcattgattc

SEQ ID NO: 30987 - DNA, 100 bp, Homo sapiens
gcctggagcagggtggccgtggcagcgtcctgcagttcatgcccttcaccacctgagtgagatcattggccgagacctgagtggcttccctgcacctcct

SEQ ID NO: 30988 - DNA, 75 bp, Homo sapiens
gtcatggttccccttctactacatgctgaagtcgtcattgaattttgagaagcattctgaaaactttgcatggac

SEQ ID NO: 30989 - DNA, 90 bp, Homo sapiens
caatggtgagaagatcaactacaccgaggtgaggacaccagtgatgaattctgaagcaaaagttctggtgcctgggattcctggtcatca

SEQ ID NO: 30990 - DNA, 90 bp, Homo sapiens
ttttgaaggtgcaagatactatataaagctaatagctcgtcagcttgctaaaatccatgctattcatgcacacaatggctggatccccaa

SEQ ID NO: 30991 - DNA, 75 bp, Homo sapiens
tctccagatgctagggttatggggacaatgactcattcttcccaggacactggttcttgtggcattcaggaagat

SEQ ID NO: 30992 - DNA, 82 bp, Homo sapiens
gcagggaggatgacggagctgcagtcggcactgctactgcgaagacagctggcagtgagagaccgcggagtgttgggtcgtg

SEQ ID NO: 30993 - DNA, 97 bp, Homo sapiens
gattttctacgtgtttctctgctttggcgtcctgtacgtgaagctcggcctagaacattccatattctgcttcacacacggtgactcactcactact

SEQ ID NO: 30994 - DNA, 95 bp, Homo sapiens
ggcgttccgagcggcggcggaggcagtacatgccacactactacccttcctgctcttgtgcgcacacctaccctgatgatgcagccttcactgga

SEQ ID NO: 30995 - DNA, 100 bp, Homo sapiens
gagctccgaaccgccggcgcccggccatggcggtctccaggtccagtggtttacgtcttggatcttgcagatagactgatctcaaaagcctgtccatttg

SEQ ID NO: 30996 - DNA, 100 bp, Homo sapiens
aagcttgaaatgctacatttccaagtattgcctaagtgtaatcttgaacatgggcggtgctgtgagtgctggtgaagacaatgatgagctgatagataat

SEQ ID NO: 30997 - DNA, 100 bp, Homo sapiens
agaattaggaaggactatttcccagctcgttcatgcttttcagaccacggaggcgctgtgggccaaactgaaattgcagaaggcttcagaacgatggcag

SEQ ID NO: 30998 - DNA, 73 bp, Homo sapiens
acgtggttggagagctcatctggaattttgccgatttcatgactaaccagtcccgacggccatggaggctgaa

SEQ ID NO: 30999 - DNA, 83 bp, Homo sapiens
gcccacgtcccatttcgcccctcgcgtccggagtccccgtggccaggtttggtgcacctcgatttggaggaagtagggcaggg

SEQ ID NO: 31000 - DNA, 75 bp, Homo sapiens
ccggagccgcgccccaccccgccagctccagagccacgtacggtgggaggaggagctcgccaagcgcatgaacct

SEQ ID NO: 31001 - DNA, 100 bp, Homo sapiens
agaagctcaagcggaaggcggaggaggacccggaggccgcggatagcgggggctttggtgttaagatgttgagtactgccaacatgaagagcagtcagta

SEQ ID NO: 31002 - DNA, 50 bp, Homo sapiens
aaaatattcatgctggatattgaggcacctttcttggatgttctcaacac

SEQ ID NO: 31003 - DNA, 100 bp, Homo sapiens
gttaaagccatattggagtagcgaggaatctgattccaagcaaaaaccagagcccacaggcggttttgtgagctgcttccccaggagcagcggagcgtgg

SEQ ID NO: 31004 - DNA, 100 bp, Homo sapiens
aagggactgttgttccagaggatcgctgcaaatctccaacctctgccctaccacttatgtcttggatgaagatgaacctcgattccttgaagaagttgat

SEQ ID NO: 31005 - DNA, 74 bp, Homo sapiens
tctctgccctgctccatactacctgatctgggcacttgccagtcattgaaattatgagactatcattcaaatgg

SEQ ID NO: 31006 - DNA, 75 bp, Homo sapiens
gtcggtacagtctctgcacctcgcgccccagcaggaagccatcggtatcagattctacccctgcattctcagatt

SEQ ID NO: 31007 - DNA, 100 bp, Homo sapiens
cctgatccatggacccgatgaacatagacacaggtgaagatgcaatgaccggggacacagacaaatatcttgggccacaggaccttaaggaattgggtga

SEQ ID NO: 31008 - DNA, 100 bp, Homo sapiens
cctgatgttgctaaatgtagacaatggttagagaagaattttccaaatgaatttgcaaaacttactgtaggttcatacgttttatgaagctgtggggtac

SEQ ID NO: 31009 - DNA, 51 bp, Homo sapiens
aataccgcagcaagtctcctgctcctcacgattttgatgaatgtcgatttg

SEQ ID NO: 31010 - DNA, 75 bp, Homo sapiens
aagttccacaatatattgactactgccacaattccggaatttagataatgggctgtgtgcaatgtaaggataaag

SEQ ID NO: 31011 - DNA, 97 bp, Homo sapiens
aaattctggtgggagaacaaagctgaggtccagatgaaagagaagtttctggtcactccccaggattatgcgcgtgtgttgttggtggctgcaatgc

SEQ ID NO: 31012 - DNA, 100 bp, Homo sapiens
aaactcttggcatttggctttgcctttctggacacagaagtatttgtgacagagttgctggagaatgtaaccctaatccataaaccagtgtcgttgcaac

SEQ ID NO: 31013 - DNA, 98 bp, Homo sapiens
caggatgggatccggctcctccagctaccggcccaaggccatctacctggacatcgatggacgcattcagaaggtgaaatgacaatggatgctctgtt

SEQ ID NO: 31014 - DNA, 100 bp, Homo sapiens
gcccggtgcccgaggaggcagccaagctcgtggcctgcctctgcgtgcgtcatcatcagatttgaaatatttaaagtggatacaaaactatttcagcaat

SEQ ID NO: 31015 - DNA, 100 bp, Homo sapiens
tctttggcttgcagccaacaatggggctcatcggaacctgtcccagctccctaattttgccttctctgttccactggcgtatttcctgctgagccagcag

SEQ ID NO: 31016 - DNA, 90 bp, Homo sapiens
tcgacgatctccatatttcattgcaagagaagatggcgaattagaagatggtgaaatagacgatgcaggatttgaagaaatacaagaaaa

SEQ ID NO: 31017 - DNA, 101 bp, Homo sapiens
ggaactttgggtcctgaatcttctgggagctgaggaaccagatatcttgaaaagctgccagaaagagcttttctggaaaaagaagaaaagttcaaccacct

SEQ ID NO: 31018 - DNA, 75 bp, Homo sapiens
gccctcgtccagacgccccaaacaaacaggaagatcagttttcctgccatccaggctgctccctccttcagcaac

SEQ ID NO: 31019 - DNA, 75 bp, Homo sapiens
atggattctggggtcggcgcgaggcgctgagggccaattcctgtccccccagcagcatggcatcgtgtgctgaac

SEQ ID NO: 31020 - DNA, 100 bp, Homo sapiens
aaggcgctgctgaccacctacgggaaatctactttcttcaatgtgttaaccaatagtcaggcttcagcagaaaacttcccgttctgcactattgatccta

SEQ ID NO: 31021 - DNA, 82 bp, Homo sapiens
tctttttgtcgaatgtcagcagatagtcgtttaggatacgagttctgcagaatcagaagatttggcagtacatttatatcca

SEQ ID NO: 31022 - DNA, 78 bp, Homo sapiens
gagacgaaccgcaggaacactgtggacctggatgacaaggagtatgtgggctttgcaaccctccccaaccaagtccac

SEQ ID NO: 31023 - DNA, 101 bp, Homo sapiens
gaagaggtgaagctcaaggcacaggtggcccgatcccagcaggacattgaaaggatcccatgacagattctgttgtcacgtctccttacagagtttgagcg

SEQ ID NO: 31024 - DNA, 75 bp, Homo sapiens
ggctcatcagtgttgtcagtcacattggtagcacttcttcttcaggttgaagaagaggatgaacttgaatctgga

SEQ ID NO: 31025 - DNA, 76 bp, Homo sapiens
cgagaagcctgaaaagtcgcagcgagctggagccgccggagtggagatggctatttcgaaaacagcccactgatgt

SEQ ID NO: 31026 - DNA, 87 bp, Homo sapiens
cgcagcgccagacccaaggcccccgagtgagcgcgggcgccgagggtgaggtggctttgaccccgggttgcccggccagcacgaccg

SEQ ID NO: 31027 - DNA, 89 bp, Homo sapiens
catataataaaaatataaatgatgactttgaaatgatagattgtggggcactatgaacgaagaggagcagtttgtaaacattgatttga

SEQ ID NO: 31028 - DNA, 100 bp, Homo sapiens
ctgaagcgcacgacctccgactactttctccttcaagccaagccaaagccatgtactcctgtaaagcagagcacagtcatgagctttccttcccacaagg

SEQ ID NO: 31029 - DNA, 100 bp, Homo sapiens
gcaagatagcggcgcgggagcgtaccatacactgcctctaggactgggacagatagccactgagtacctgcttcaaatcaccctgcacgttttctctttg

SEQ ID NO: 31030 - DNA, 126 bp, Homo sapiens
gtgaggagctcatgaggatgctggccgaggacgagctccgggatgctgtcctcctggtgttcgccaacaagcaggacctaaggcagcagcttgcaggctgtcaagaggctgtgaacttgttgcaac

SEQ ID NO: 31031 - DNA, 74 bp, Homo sapiens
gagttgctgcagcagcaggaggaggaccgcagcaaggtttattgttggccaaaaccaggctttgattgaaccag

SEQ ID NO: 31032 - DNA, 99 bp, Homo sapiens
aagctgaacattatggcagccaaaagacaacagcaaagtggaagatgctttctacaaaggtgaactcaggctgaatgaggaaaaattatggaagaaaag

SEQ ID NO: 31033 - DNA, 99 bp, Homo sapiens
attgccttattttttctcatggatgttcttcttcgagtatttgtagaaggccctgtgtactgtgttgcatctgacagagagacttttccttgaccaccc

SEQ ID NO: 31034 - DNA, 95 bp, Homo sapiens
gttgagggagaaaggcgggcccgggaacagtgatcctgagcagctgaagaaggaactgaatgaactggtcagtgctattgaagaacattttttcc

SEQ ID NO: 31035 - DNA, 75 bp, Homo sapiens
tctctatccatctctcgaagacttgaaggtccttatgtcgtcagaagatcgagaagctcaggaggatgaattgct

SEQ ID NO: 31036 - DNA, 82 bp, Homo sapiens
gctgccgctgccgccatgcaaggggaggacgccagatacctcaaaagacagcccacctgaggatattgaccataaggactca

SEQ ID NO: 31037 - DNA, 75 bp, Homo sapiens
ctttgggaagtggagcaccgatgatgtgcagatcaatgacatttccctgcagtcccatgaagctgaggtcttgaa

SEQ ID NO: 31038 - DNA, 100 bp, Homo sapiens
tatctgtggcaggagcttttcgtaaagggaagtcatttctactggacttcatgcttagatacatgtataacaaggttttagctaaagaagatactgaggc

SEQ ID NO: 31039 - DNA, 101 bp, Homo sapiens
gcaatcatggtgcagaaataccagtccccagtgagggtgtacaaatacccctttgaattaattatggctggtaatcactttgatcagtatgaggaaggaca

SEQ ID NO: 31040 - DNA, 90 bp, Homo sapiens
ccggttggggctgctgtttctcttcgccgacggatgctggatgagtactttgaggagcagatgaaggagatcatccgaatgtgttcccac

SEQ ID NO: 31041 - DNA, 98 bp, Homo sapiens
tttgcaagaataagacttgaccaagaccgactgccagtaatagacattcactactttcactgcctaagaatcctggaccttctcaaaggcacagaggc

SEQ ID NO: 31042 - DNA, 100 bp, Homo sapiens
agccgcggcggcagcggggcggcggggaagcgtatggataaacacacttgttacctatgatatggttccagagcccaaaatcattgatgctgctttgcgg

SEQ ID NO: 31043 - DNA, 75 bp, Homo sapiens
ggcctctcattctgcagctcatcttctcaaaaacagctgggaatggaggaagaagatgtgattgaagtttatcag

SEQ ID NO: 31044 - DNA, 100 bp, Homo sapiens
ggggagttttcgtggtgggatcaggaaagcagggagatacttcaggggattaccggaagattctgctgaagatctgtggtggcaatgactgaacagtgac

SEQ ID NO: 31045 - DNA, 99 bp, Homo sapiens
ccggggtgatggcggtggagactctgtccccggactgggagtttgaccgcgttgacgacggctcgcagattcaaacacactccaccaggtggcatcata

SEQ ID NO: 31046 - DNA, 100 bp, Homo sapiens
tatgtgaaatcatgtccactgatcaaggtttcagcgttaaaaacaatggccagtcagggaggccccaagtatactctctcacagcagccttgggcacaac

SEQ ID NO: 31047 - DNA, 90 bp, Homo sapiens
tatctcgaaagcctatcagcatagttaaggattttttatcaagcagaaatgcatcgaacaacgagaatcaagatcactgagctaaatccc

SEQ ID NO: 31048 - DNA, 100 bp, Homo sapiens
ccaagtcccggaagatcgcgatcctgggctaccggtctgtgggcatgaacaaccgggaggtgctggagcaggtggagcgaggctacaggatgccctgccc

SEQ ID NO: 31049 - DNA, 75 bp, Homo sapiens
cgggccctctccatacagaggctgtggtacttctgctgggatagatgggcagcagaagatcatgtgcttcgtgat

SEQ ID NO: 31050 - DNA, 83 bp, Homo sapiens
ggccaagagaagaggcggtggaggacacgacgcgcttaaaggcactgctcagcacgcaggcatgtgaggaagctgggcttaaa

SEQ ID NO: 31051 - DNA, 82 bp, Homo sapiens
gggccgtggcccctgcagcggaaccggacccagtccctgagccgcccctacacccacaggactcagtggcctttgaggatgt

SEQ ID NO: 31052 - DNA, 100 bp, Homo sapiens
ctgatcttcgccaaactgtggagcctcttctgtaaccaagacctgcctagagctggaacgttacctccagagcgagccctgctatgtttcagcctcagaa

SEQ ID NO: 31053 - DNA, 74 bp, Homo sapiens
ctcccaagtagcagggactacagacctgtggatatctgggctttgggctgtatgatcattgagatggccactgg

SEQ ID NO: 31054 - DNA, 100 bp, Homo sapiens
gagttcaaactcaacaatattatccccatgtggtgaagcagtattttccaatttgaagattcatttgaaggtggctcctgccacctgctaatagcagttc

SEQ ID NO: 31055 - DNA, 88 bp, Homo sapiens
aggtcaagatcagctctggctagaacattgacatcaccaatttcagcagcagctggagcgatggcctggccttctgtgctctgctcca

SEQ ID NO: 31056 - DNA, 82 bp, Homo sapiens
gccggcccggcggctgctgctgctgctgacgctgctgctgcccggcctcggggagctcgaggccatgagcagatataccagc

SEQ ID NO: 31057 - DNA, 75 bp, Homo sapiens
attttctggttctgttgatgaccctcttccagggctgatcccttatccaacatggttctaaccttcagtactaaa

SEQ ID NO: 31058 - DNA, 98 bp, Homo sapiens
gcctgctcggcttcgtcgctgccaacctgctgttctgaaaccaatagagccatggcgactccctctgctgccttcgaggcccttatgaatggtgtgac

SEQ ID NO: 31059 - DNA, 132 bp, Homo sapiens
caacctggaatcatgggagaaaaccagacctccacttccaaggatatagagcagatggaccacacatccccgacctacatgcttgctaacttaacccacttgcattctgaacaacttctgcagggcttgaat

SEQ ID NO: 31060 - DNA, 100 bp, Homo sapiens
ttggttgtaaacttgacctaaagaccattgcacttcgtgcccgaaacgccgaatataatcccaaggtggagttttgatgaaacagtgactcatttcatct

SEQ ID NO: 31061 - DNA, 100 bp, Homo sapiens
aattttggaagaagagacgaactgtgaggagagtaaaccaagaagaaatccacagatttagttctgtaccccaattatgaatttattagtgataactcta

SEQ ID NO: 31062 - DNA, 48 bp, Homo sapiens
ggattgtagaacttctctctctgaatatattctatacttgtggccctg

SEQ ID NO: 31063 - DNA, 122 bp, Homo sapiens
gacctccccaactcgttgtttgcgtgcaatgttcaccagtcagtgtttgaaggagaagagagcaaggaaagaccacagcaagattctttcattcgtctcctcctagcctgggggaccaggct

SEQ ID NO: 31064 - DNA, 75 bp, Homo sapiens
ctcgtggtgggggcttgctggcaaggccccccggacagaccacccagccctgtacagggacctgctgaggaccag

SEQ ID NO: 31065 - DNA, 98 bp, Homo sapiens
gatggccagaccttggggaccaagaaaagcagcagcaggatggggaagcagaatagcaaactggcccctgaagtgatggaggacctggtgaagagcac

SEQ ID NO: 31066 - DNA, 74 bp, Homo sapiens
cgcgctgagggcgcccagctggcaacagcattattgagaaaagcccttacagaagagtgtggccgtaggtcagc

SEQ ID NO: 31067 - DNA, 101 bp, Homo sapiens
ggtgtcttctccctcgccagctgggcagtcttgattgatatggaagaaggggtagtgaatgaaattctgcagggaccactgagagatgtatttgatacgaa

SEQ ID NO: 31068 - DNA, 95 bp, Homo sapiens
ctctcgcgaggacggacgccattatcgcatctccccgacaaacaccacgagaattccgcagcccacacgacagccacaaccaaagtcccggagat

SEQ ID NO: 31069 - DNA, 82 bp, Homo sapiens
agaccctggagcctcagttggaagcagccgatccagcctgcggagcctgtggggcagatctgactgcagccatgagcagcaa

SEQ ID NO: 31070 - DNA, 100 bp, Homo sapiens
gctggtggcgggcccgggctgcggcgtgtgcgcgcccgccagctgctccggagatacgatgcagcagcttttttatgagaattacgagcagaacaaaaag

SEQ ID NO: 31071 - DNA, 100 bp, Homo sapiens
cctgacgggcctgcgagggttgaagattgtgaagcaatagcctaagaatagctgaaacctttggacttcaagaaaattatatcaaaattgtcataaataa

SEQ ID NO: 31072 - DNA, 90 bp, Homo sapiens
ctttacgaacagaaggactatttctcaacaatctgcagaaaattatatgaggacttgctgtgttgcccaggctgggctctaactcctgga

SEQ ID NO: 31073 - DNA, 100 bp, Homo sapiens
gttcctgccgtctgctcttctgcctcttgatctccgccaccgtcttcaggccagaacatgggcctggaattgatatattcacacctggtaaacctggaga

SEQ ID NO: 31074 - DNA, 100 bp, Homo sapiens
aggcccatgacaatccacaggagaagagacttgcagcagagacccttccagaagagcagctcacgtcctgtggggccagtgactgcctgatggccaccac

SEQ ID NO: 31075 - DNA, 140 bp, Homo sapiens
agcatgccttcttccggaggatcgactgggaaaaactggagaacagggagatccagccaccattcaagcccaaagtggaagctgcagtaaaggaagatgaagaagaagtttcagataagggcagtgattctgaagaagaa

SEQ ID NO: 31076 - DNA, 83 bp, Homo sapiens
ccttaattgatcaactaattgaaggacatcagtggctggaaaataatatagatcatccagacttgaaacatatcgacccagtg

SEQ ID NO: 31077 - DNA, 101 bp, Homo sapiens
cctgtgctcacgccgggttctttacctccgagccaggccgccgcaaagcaggatcctaagcacttcaagtcagagaagacaggacggggacagttgaggga

SEQ ID NO: 31078 - DNA, 75 bp, Homo sapiens
tgctcagccctgggactcctcgctccttggatggcagtggttctgagccagatctccagtctatgtgctgaagaa

SEQ ID NO: 31079 - DNA, 83 bp, Homo sapiens
tcggcggcgccctgcaccgcgcctcgcaaaatgaggacggggacttggttgccttttccagtgacgaggaattgacaatggcc

SEQ ID NO: 31080 - DNA, 97 bp, Homo sapiens
acggcgagaagcccctccatgtttactactgtttgtgcggccagatggtcctagtgctggggcggcgactggcggcgcgatggacctgaccgggctc

SEQ ID NO: 31081 - DNA, 96 bp, Homo sapiens
gcgggaggcgcgtctccccggcccagtccgcgcccggccccgcggggccgctccggcccgctccgagtatgccgagattttgctgtcctggaggac

SEQ ID NO: 31082 - DNA, 100 bp, Homo sapiens
ggattccggcgccgctctccgagctcgatccgctgctcgcacgggagccagctgggtgttggtgcttcccgtgctgctgttgatgctggctttgttccca

SEQ ID NO: 31083 - DNA, 83 bp, Homo sapiens
gtcaaccatctcacacctttccaaaggacgcgaccataactctaaaagctgcggttggatttctcacgatgtccagtgttatc

SEQ ID NO: 31084 - DNA, 100 bp, Homo sapiens
gcgccccagggcaagccccgctccggccaacaagccctgagcctgtgcaattatttcgagagtcaaaatgtggatttccgaggcaagaaggtgatcgaac

SEQ ID NO: 31085 - DNA, 90 bp, Homo sapiens
tggacactctgggcagtgctggcgctaagaaagaggtttgagcacaaaatgaacataattagggaaaataaggatctggcatgtttctac

SEQ ID NO: 31086 - DNA, 87 bp, Homo sapiens
gtgcctcttcaccatgttcggaatgctgctgttcgctggtgggaagggactggtgattgcagctggaagtgcccatgaccgagctgg

SEQ ID NO: 31087 - DNA, 98 bp, Homo sapiens
gacagcagccggccagccggggggcactgcccgcccgggctctggactcacaccacccggcaagaactgctcactacggctccctgccccagaagtca

SEQ ID NO: 31088 - DNA, 101 bp, Homo sapiens
cacacccaggagctcctgaaagagcacgaggagttccagataactgcaaagtcactattccaggtcctcaggatatagccgtgacctaaacacagaaatct

SEQ ID NO: 31089 - DNA, 82 bp, Homo sapiens
cccgctgcacagtgtgccgctgcctgcccaggaggactactacaggttttaaaatcaaagatgggaaaatcggagaaaattg

SEQ ID NO: 31090 - DNA, 100 bp, Homo sapiens
ccgccgccgccgccgccatcatgagggaaatcgtgcacttgcaggccgggcagtgcggcaaccaaatcggcgccaagatctttgccagcattgctccttc

SEQ ID NO: 31091 - DNA, 83 bp, Homo sapiens
catagattgtgtaggcgttggtcttctgatagcaactttaatgtggtctagatccagaagaagctcccgaaggcattataccc

SEQ ID NO: 31092 - DNA, 88 bp, Homo sapiens
gggttacaagcagcaagtgcgcggttggggccactgcgaggccgttttagagctgctgcccaaagggagcaaggaggaacagcgggat

SEQ ID NO: 31093 - DNA, 51 bp, Homo sapiens
agacatttcccatttccagtgtcaggtatattttggaacttcacatccaag

SEQ ID NO: 31094 - DNA, 100 bp, Homo sapiens
cgagatcttccgcaacctggagaacgccaagcgcttcgccatcgacatagatgtgaagttcatttccaatccgccctccatggtggcagcggggagcgtg

SEQ ID NO: 31095 - DNA, 100 bp, Homo sapiens
atgcacaccgtgattgctcactccaactgcatcgaggtctttcccgaagttatgcagctcccagagatcaagatacctgaaaaaagcggcagtctgcaac

SEQ ID NO: 31096 - DNA, 75 bp, Homo sapiens
acatccagtttgatgtttactacaaggagggtgaggacaaaatcttcttaatcaacaagcttcactccatctacg

SEQ ID NO: 31097 - DNA, 75 bp, Homo sapiens
cacggtcctaagagctgggcaccaggaagcgaaggctggattttaaacaatttgaacctaatgacttttatttga

SEQ ID NO: 31098 - DNA, 100 bp, Homo sapiens
tccgtgaaattcagcccgaatggagagtggctggcaagttcatgtccctttctagagataggagaagagagagatcgctgtctcgggagagaaatcacaa

SEQ ID NO: 31099 - DNA, 51 bp, Homo sapiens
cactgcagaggtgctggagctggcagccgtgttgccgcccgctgtgctatg

SEQ ID NO: 31100 - DNA, 75 bp, Homo sapiens
caaggagtcacggatcggattcctcagctacgaggaggcgctgaggagaggtggtggctaatgccgtagcggcat

SEQ ID NO: 31101 - DNA, 50 bp, Homo sapiens
ccctgagcagctttcagcactggaggaccaagaatcgccttcagccctgt

SEQ ID NO: 31102 - DNA, 100 bp, Homo sapiens
gaggagccgcccctttctcagccttgctcggctcttccccgctctggtcgccggggctgcgccgtccccagctcagtgaatggtagtgtctagaaagggt

SEQ ID NO: 31103 - DNA, 75 bp, Homo sapiens
ttttggcattgctgctaagtacatgctggattgtagaacttctctctctttgaggagctcaagcttgggaaaatg

SEQ ID NO: 31104 - DNA, 100 bp, Homo sapiens
gggaatgccattattgcttcagaaacagcaagaaatagcatctattacggagcagcttatgactactccacctgtctttaccagtttccaagactatgtt

SEQ ID NO: 31105 - DNA, 75 bp, Homo sapiens
cgggccgtgggggccggaggagaagccggctccacgcgcagctgctgtggatctccttacgtagcagccaaaata

SEQ ID NO: 31106 - DNA, 100 bp, Homo sapiens
attttttatggttctcagactggaacagcgaagaataacctccatctcctgggtcccagcgattctcctgcctcagcctcttcctatttcacaagtaggg

SEQ ID NO: 31107 - DNA, 100 bp, Homo sapiens
accagtgaaagtcatgtacattctttgctgtctattcttcgctatggtgccttatgcaatgaaatgggtcctgatgaatatgaagagatggaagaagagg

SEQ ID NO: 31108 - DNA, 75 bp, Homo sapiens
tctggcgcctttgctgctcctctctctgcacgattgaaaaggaagatcaggccaaccccaaagaagaagtgacca

SEQ ID NO: 31109 - DNA, 75 bp, Homo sapiens
aggagcgcttccgccctcagtggagggaaaagactactttgtgtgtatccattctggagagattgctccaagcta

SEQ ID NO: 31110 - DNA, 100 bp, Homo sapiens
atggagactgcagctcgacaggaatggcaaggattactgcaaagtaatatttccatatgaggcacagaatgatgatgaattgacaatcaaagaaggagat

SEQ ID NO: 31111 - DNA, 83 bp, Homo sapiens
gccgcatggaggccggctgaggagcgccgctgcctcgcctcgcgggctgacgcacgaggcacacaggaaggaggtggagcagg

SEQ ID NO: 31112 - DNA, 100 bp, Homo sapiens
aagccgcccgccccccaccgccgccccctccggcgtgttcatgcccccggggtttggtgcacctcgatttggaggaagtagggcagggcccttatctgga

SEQ ID NO: 31113 - DNA, 75 bp, Homo sapiens
cggccccggggtgcaccccgcaaggagaataaaggcagccccgttgatgactgaaaatgacaaagcatccaccta

SEQ ID NO: 31114 - DNA, 87 bp, Homo sapiens
cagctgcagcgtgtagtgcgagtggggcggacgcgcgcagcccgcccgcccggcgaccagcaagtattctaccttgtaaatactgtt

SEQ ID NO: 31115 - DNA, 90 bp, Homo sapiens
gctgtacttgcgtccgctacagtatgtcaatcgcttgccccagcacaggttatgaagacagtatggagtttccagaccatagtagacatt

SEQ ID NO: 31116 - DNA, 75 bp, Homo sapiens
gcagaggcttaaggtcttcagcggggcgctccaggaggcactcacaggaacttcaagattcctacctgttgccca

SEQ ID NO: 31117 - DNA, 87 bp, Homo sapiens
cctgtaacccagcctgtttcacttcttgagccagagcccagaggtggagcagttagggagggttgtggaactggacagtgacatggt

SEQ ID NO: 31118 - DNA, 75 bp, Homo sapiens
gggagcagaagggaggctccaagacctcatcaacaattaagagaatggatcttggagaatgtctgaaagtccatg

SEQ ID NO: 31119 - DNA, 76 bp, Homo sapiens
attggagggcgcggggactgcaaccctaatcaggttgatgccggcccaggatggatcagacctgtgaactacccag

SEQ ID NO: 31120 - DNA, 106 bp, Homo sapiens
aggacgtcacggccatcattttctgtgtcgcgctcagcggctatgaccaggtgctccacgaagacgaaaccacggtactccaaagattcaggtttactcacgtcat

SEQ ID NO: 31121 - DNA, 100 bp, Homo sapiens
aattgagtgaagatcactataagaaatatttggcaaaactcaggtctattaatccaccatgtgtgcctttctttggcactgtgaagacagtggtgtgcaa

SEQ ID NO: 31122 - DNA, 100 bp, Homo sapiens
tcatgccaggccgctgaaaggcaacaatgacattttaagtataactcagcctgatgtcatttaccaaatccataaggagacactgtctggacacaaggat

SEQ ID NO: 31123 - DNA, 126 bp, Homo sapiens
ccgctgttgtgacaagaaaagctgtggcaaccgaaatgagactccctcagatccagtgataattgacagaaaacctcggatcaattctcagctggtggcacaacaagtggcacaacagtatgccac

SEQ ID NO: 31124 - DNA, 73 bp, Homo sapiens
ggaagggagcccaagctttgcagagtccgcaaccatccctctgttcatgcgaaacaaagatgtcgctgcagaa

SEQ ID NO: 31125 - DNA, 82 bp, Homo sapiens
ggcccccgctgaaccccaggcccagcataccaggagccgggaaagagcagacggcaccgaacaaaatccagtctcatagcag

SEQ ID NO: 31126 - DNA, 83 bp, Homo sapiens
ctgggatcttgctgggtgagatggcagtgtgtgcaaaaaagcgccccccaggtacatgtcccttgctgtgtgtgaacttgacc

SEQ ID NO: 31127 - DNA, 75 bp, Homo sapiens
atgcgccgcgccagctcctactcctccctcaactccctcatcgtacgtagagaaatcgacactcttaatgaacgt

SEQ ID NO: 31128 - DNA, 100 bp, Homo sapiens
ctcaaatgcaagtccaagaggaggaggaggcggaggtccaagcggaaagggctaccagggcatggtggacggaggctcaaacatcgcagaggccgactgg

SEQ ID NO: 31129 - DNA, 100 bp, Homo sapiens
cttgcccttgtcctcccctttcatccctatgtggaaaacgatctcaaggcttttgagaggagacttactgaatatattcattgtttgcaacctgctactg

SEQ ID NO: 31130 - DNA, 100 bp, Homo sapiens
gttttgctgcgcagtacagcaacagtggatgttcaagattaagattagagtcaagttgtgtgattaagacagcatgaatgtcagcatcatcattcaaaga

SEQ ID NO: 31131 - DNA, 101 bp, Homo sapiens
actccctgcatccaggacagtctgttattcaagcggagaaatgttgctacagcagaagaagaaacagaagaagaagttatgtcagatggaggctttcatga

SEQ ID NO: 31132 - DNA, 75 bp, Homo sapiens
acctcatcccctggatgggggaccacaagatcctcatcgacagactcggtgaaatacctggagtgctcagctctc

SEQ ID NO: 31133 - DNA, 82 bp, Homo sapiens
ctgagtggtttttcggatcatgtctggtggctccgcggattataacaggtgatggcatcagctgagaagggaaggaagccca

SEQ ID NO: 31134 - DNA, 123 bp, Homo sapiens
gaggcctctcacaggtgaatctctcctttcttcattccatggacagcaataagcaacaactccaggcccagcatttatcacatggacatggtctccccgtacctctgactccacacccttcag

SEQ ID NO: 31135 - DNA, 83 bp, Homo sapiens
ctggcagggcctcctcgagctccacggacatggtgtggacactgccagcggctgcagccgacttggaatgacctgggagacaa

SEQ ID NO: 31136 - DNA, 75 bp, Homo sapiens
agagaaccacaaccgaactcagcagcaggtagaagcagagacccgagagggactcacttatgggaattcatccgc

SEQ ID NO: 31137 - DNA, 90 bp, Homo sapiens
gaaaattaggaagactgaaaggcaaggccatttaaatgtacctgctttcaaatatcgtcatgtatgcacccttagttcttcaaagttgtt

SEQ ID NO: 31138 - DNA, 75 bp, Homo sapiens
tgcagacattgaagctgcttggcttgctcttaggacaagtaacagtgtatcatgtatgccactgattccagggga

SEQ ID NO: 31139 - DNA, 83 bp, Homo sapiens
tgatgtcgaacttcctccttgggccaaaacctcagaagaatttgttcacataaacagattgatccagctatgggacacagcag

SEQ ID NO: 31140 - DNA, 100 bp, Homo sapiens
ctgctggaggaggataacaagttttgtgcagattgccagtctaaaggtgccctacgagacgctgaacaaacgctttcgcgccgctcagaagaacattgac

SEQ ID NO: 31141 - DNA, 75 bp, Homo sapiens
tgaaggaccgaacccaggagctccgcacgatctcacattcttgaaggtggcattgaagagcactaagatcggaag

SEQ ID NO: 31142 - DNA, 76 bp, Homo sapiens
cttccagtggaggcattttggggcagaatacagagatatggaatcaggagaaaatgcagaagtctccatggacgtt

SEQ ID NO: 31143 - DNA, 74 bp, Homo sapiens
agattcagcccagagggatgacatgatttttgaagattgtggcggttgttcagcagaagtcttggagtgcattt

SEQ ID NO: 31144 - DNA, 82 bp, Homo sapiens
atgcctccatgaacaatctcacccaattactctgctcaggagtccatagaggccactgtattctattgaagaacatgtctaa

SEQ ID NO: 31145 - DNA, 83 bp, Homo sapiens
agggagtggagcttggtttcgggatctcggtgctgcagacggcgagacctcctgcacagtacgctacttcctgaagaataagg

SEQ ID NO: 31146 - DNA, 75 bp, Homo sapiens
ctatcctcggtgctgtggtgcagagctagttcctctccagctcagccgcgtagccggcacagtcttcactaccgt

SEQ ID NO: 31147 - DNA, 83 bp, Homo sapiens
tattgttacaattttttttcaagaactgccgtcttctttgcctgcactaatggagagtcaagccctacccgtcgagaagctgt

SEQ ID NO: 31148 - DNA, 82 bp, Homo sapiens
cgacgaccggatcctgaggaggcagctgcggtggcagctgctgagttctcggtgaagccattcaaactcctccccacgacac

SEQ ID NO: 31149 - DNA, 74 bp, Homo sapiens
tgggcctggctaatctccatgccatgggcattgctcccccggttccaaaaggtcccaggtgtcctctccgtgca

SEQ ID NO: 31150 - DNA, 90 bp, Homo sapiens
atcgccctggaatcacttttgagattggtgctcgtttggaggcactggactacttacaaaaatgagtttttggtcatgaagaggaagaga

SEQ ID NO: 31151 - DNA, 132 bp, Homo sapiens
ggcaacatgaaagtgatggggaccatcatgcatccctctgacagccgggcaaagcagaatatccaggagactgtacaatttgttcaaggaatttttgtagaaaaatacgatcctacgatagaagattcttat

SEQ ID NO: 31152 - DNA, 82 bp, Homo sapiens
tgactaccaacgtttggaccagaaggagccctctggcacaaatggaagaagaaagaagggagcaagtagctaaaattaagaa

SEQ ID NO: 31153 - DNA, 83 bp, Homo sapiens
gctgctgctgacgctgctgctgcccggcctcgggttgattcgatgtcatcagtcccgtggtggagcctgtggagacaacattc

SEQ ID NO: 31154 - DNA, 82 bp, Homo sapiens
gtcttctatggttctgacaaagatgaaggaaattgcagaagcctaccttgggaagctggtactcctggttaatcaacagctt

SEQ ID NO: 31155 - DNA, 95 bp, Homo sapiens
gtatatgatatcactaagaaggagacatttgatgatttgccgaaatggatgaagatgattgataaggtctggcgtgctcctgatcagagttactc

SEQ ID NO: 31156 - DNA, 100 bp, Homo sapiens
aggacaatggacctgcctgggcatagacttccttaaggtgaaaggaaagcaagccaggatggatatttacgacactcaaaccttgggggttgtggtcttt

SEQ ID NO: 31157 - DNA, 98 bp, Homo sapiens
gcggatcgccgcgctcagcgacaaacaaaaatgagccgtcagactgctacagcattacctaccggtacctcgaagtgtccaccatcccagagggtgcc

SEQ ID NO: 31158 - DNA, 75 bp, Homo sapiens
cgctccctgtctgggaccttctccctgcctggacccctactattgcaacaagagtcactgctagttggattgaag

SEQ ID NO: 31159 - DNA, 73 bp, Homo sapiens
gggagctgaaacagaacctgtccaggagctggcatgacgtgcaggtcctggtgcttgatggtcgaggccatct

SEQ ID NO: 31160 - DNA, 74 bp, Homo sapiens
aactgcaggagcaagtggcgctgtccctgtgccgtctcctctctgcccagagcctccaggatacactggccctg

SEQ ID NO: 31161 - DNA, 118 bp, Homo sapiens
gcagacgcgggcgagctgcggctcggacgccagcggacacgcgggcgagttccagctattcttcagatgctctggattttgagacggagcacaaattggaccctgtatttgattctcc

SEQ ID NO: 31162 - DNA, 82 bp, Homo sapiens
gaacctgggcgagcagcggcgggggcccgaggggtcacaggcgcgagatggagtccccaagagggtggaccctgcaggtggc

SEQ ID NO: 31163 - DNA, 100 bp, Homo sapiens
gtggaaatgagacgcattaacttccagactccagccttccctgagcctgggcaccatcacagatgaggagatgaaaactggagacccccaagagaccctg

SEQ ID NO: 31164 - DNA, 90 bp, Homo sapiens
aatgtgtcagccgatgcaccgagtccagcccaggaaaatggagagcagcagccgctcttctaaaacattcaaaccaaagaagaatatccc

SEQ ID NO: 31165 - DNA, 80 bp, Homo sapiens
gctacttcatattttggaaagcagtttttaagacaagtgtatgcaacagcgttattgcaacaggctaacgaaaacagaca

SEQ ID NO: 31166 - DNA, 75 bp, Homo sapiens
ctttatgctgtgttcggggctgtctgtcggcgccacagggaatgggggctgatcttcgggggcctggtgtggatc

SEQ ID NO: 31167 - DNA, 100 bp, Homo sapiens
caggcgcggctgccggcggctgggactgaagagggacgggtcccgcggcgagcgagctcctgagtactatactggcaattgctggagaagattttgcaat

SEQ ID NO: 31168 - DNA, 75 bp, Homo sapiens
gggctgaacggtcaaagacattcacaacatggatgcaagaggcggagtccaacctgcgcaaggccaagcagggtt

SEQ ID NO: 31169 - DNA, 98 bp, Homo sapiens
cagaccagttccagcttggcgtgtcccatgtttttgagtatatccgttctgagacatacaaatagatatggctttagttgcccctgaagctccttcag

SEQ ID NO: 31170 - DNA, 131 bp, Homo sapiens
taggtatccctcctgatgatgaagactgaaggtgtagactcagcctcactctgtacaacaaacggggattcagcgtccgatcctttggaacagggactcacgtgaagcttccaggaccagctcccgacaag

SEQ ID NO: 31171 - DNA, 98 bp, Homo sapiens
aaggaagtaaaatggcggacctggcgaacgaagttggatatgtcaagtgaccagatagctgccaatctgcaagcagttattaatgaagtttgtaggca

SEQ ID NO: 31172 - DNA, 98 bp, Homo sapiens
atcggctgcggcaacttcggggagctccgcctaggctgggaagagatgctgatttctgcgataaaatcagtaggtacattttttggaatgttcgctat

SEQ ID NO: 31173 - DNA, 90 bp, Homo sapiens
ggctcagcatggtcagtgccgtttaacctttattgtggtggagtccaccccgctgtgaattggatttgcaactcaaaaccaaaggctccc

SEQ ID NO: 31174 - DNA, 75 bp, Homo sapiens
gcaaaagtgggaagccaagcctttcctcccgtttgtggggacattcatggacaattctttgatttgatgaagctc

SEQ ID NO: 31175 - DNA, 83 bp, Homo sapiens
gttccatcatggcgtcaatgcaggtgtagagttcggtgctcgaatgataactattgatgggaaacagataaaacttcagatat

SEQ ID NO: 31176 - DNA, 51 bp, Homo sapiens
cattctttctgcaccaaacccggaaggaaacacgatgaggcgagtggtacg

SEQ ID NO: 31177 - DNA, 74 bp, Homo sapiens
ggagatggtggagtccgtcacttcggaaccaaaaagaagcttcccagagccggggccaggagccccaagcgccc

SEQ ID NO: 31178 - DNA, 90 bp, Homo sapiens
acgctgggacagcaggaagtggaagtggacggtctgacggcctacgtggcaggatgaaacaggcgcctatttaatcgacagagaccccac

SEQ ID NO: 31179 - DNA, 82 bp, Homo sapiens
tggagtgcgttcggtgtgccgtgggtccgcgctgcttccacccaacttcctgttaggccaaatagttgcatcacatgtatct

SEQ ID NO: 31180 - DNA, 82 bp, Homo sapiens
ctgagctaaagcagaaatttaaagatatgaatgctgagtatctgactgtcttctctcagatgattgcatttcatgatccaga

SEQ ID NO: 31181 - DNA, 100 bp, Homo sapiens
cgatacagaaagtgcactgactggtggtgtcaacccatggctcaactggaagcactgtggaagaagatggagggtgtgggcctactctaggtgcggtact

SEQ ID NO: 31182 - DNA, 100 bp, Homo sapiens
gggttatctgcgaacacagtagtggaagatgtaaagcaatatttcgagcagtttggcaagaaatgcactcggtgatggaaagagagccactattctgaag

SEQ ID NO: 31183 - DNA, 83 bp, Homo sapiens
gaagatcgcaccgcggacgcccgctgagcttggcgcacgggccgaccaggtaactaggatttctacctcaaccgcgagaccta

SEQ ID NO: 31184 - DNA, 75 bp, Homo sapiens
gtcggctgagggaaaagcgaggcaaggcaggcggactatgtcttcagcagtggtgcagttatatgcagcagatcg

SEQ ID NO: 31185 - DNA, 98 bp, Homo sapiens
ccaggggcccgagggcggggaccggcggcgctggaggagcgaggcagctgtactaggactgggaacggcttccttgtggtcatagatgcaaagagatg

SEQ ID NO: 31186 - DNA, 102 bp, Homo sapiens
cagcctcccgagtagctgagattacaggactcaatgatctttgaggatgtggctgtgaactttacccaggaggagtgggctttgctggatccgtcccagaag

SEQ ID NO: 31187 - DNA, 98 bp, Homo sapiens
ctgtctcgccgagcgcacgccttgccgccgccccgcaggtatctgaacttaggactggagctgcagaaggactagccaagctgatgttctctgggctt

SEQ ID NO: 31188 - DNA, 75 bp, Homo sapiens
ccttgggccgcgtctcctttgagtctattatcctcccagtccacaacgctgaaccgtggctggacgaatgtttga

SEQ ID NO: 31189 - DNA, 75 bp, Homo sapiens
ctctggctaccagtacaagagactagaagagtgtctacccacagggactgaccactgagcagatgctgagaaaag

SEQ ID NO: 31190 - DNA, 75 bp, Homo sapiens
tgcagaggacacgaggcggcgggctggagacatggaccgcggcgagcaagctgctctgttaaaagcgaaaatgaa

SEQ ID NO: 31191 - DNA, 104 bp, Homo sapiens
ttagctgtgctcgcgctactctctctttctggcctggaggctatccagcttacagaatgtctgaaggggacagtgtgggagaatccgtccatgggaaaccttcg

SEQ ID NO: 31192 - DNA, 74 bp, Homo sapiens
ggagaaacatgaagttcgggactatcttctggaaaatgatgctgctgctctatgaagaaggcctccgggttgtc

SEQ ID NO: 31193 - DNA, 133 bp, Homo sapiens
cgccgggtcaccttcgaggcggacgagaatgagaacatcaccgtggtgaagggcatccgggtgtcagcagttgagtctttggagggccccctgctccaggtggaaggactgagtgaccttcgactagagcttc

SEQ ID NO: 31194 - DNA, 80 bp, Homo sapiens
acatgatcaagcaggtgttggttgagaacttcagtaactttaccaacagaatggaaagaatacccacctcatgtccaaaa

SEQ ID NO: 31195 - DNA, 73 bp, Homo sapiens
tatgccgtcgacctcatgctgaagtgggacaacggcccagatgctccggaccaaaatttaacagtgccatccg

SEQ ID NO: 31196 - DNA, 98 bp, Homo sapiens
cgggcgagcggctgtgtggatgtcggcgaagccgcgggcgagccggcgcgacctggagattgagcgaccaatgccgggaacccacacagtcaccctgc

SEQ ID NO: 31197 - DNA, 80 bp, Homo sapiens
ctcagctctgccagaacaaagcagccgcccaccccagcatcactgaaggggacaacagccacctccgctcaggccaactc

SEQ ID NO: 31198 - DNA, 81 bp, Homo sapiens
ctcaatttaagcctgatctaacccctagaaacaggtacatcaggaacgtctctatcaagaatacaatttcagcaaggctga

SEQ ID NO: 31199 - DNA, 90 bp, Homo sapiens
tggcagcctgaacggagtgtgcgacggattgggagattgtttgctacatgaggagaacttctcggtgaggtgccctaagcacaaggtgag

SEQ ID NO: 31200 - DNA, 100 bp, Homo sapiens
cttggagacggacttgcttccggctaaacatatttttgactggtatgaacccattctactttcatgcagtaaatataattttacactgcttagtgactct

SEQ ID NO: 31201 - DNA, 90 bp, Homo sapiens
tgcatgtaacatggatctgtctaaataccccatggacacacagacatgcaagttgcagctggaaagctggcaactccaacaacattgcca

SEQ ID NO: 31202 - DNA, 71 bp, Homo sapiens
gtagctgggactccaagtgggtgccactacagccaaataatcatgggccagactgggaagaaatctgagaa

SEQ ID NO: 31203 - DNA, 101 bp, Homo sapiens
attaaatgccgagaaggccagtacgcattggggctttccagctctcacagaaccttcagcatccccagctgccggtcttggcatcttcgaagtaaggagag

SEQ ID NO: 31204 - DNA, 74 bp, Homo sapiens
gcaccccgagaaccgtcagtttgagccagatggtagttgatgtcacttggcgatattcctgcaaacatgaagag

SEQ ID NO: 31205 - DNA, 50 bp, Homo sapiens
gaggtggagttctgtgtggaagaaatggtggagtcaatgaagaaagtagc

SEQ ID NO: 31206 - DNA, 90 bp, Homo sapiens
gtcactgcctgcgcagctccggccgcctggctccccatactagtcgccggctgagatatttggcaaagttcttcaaagtgatgaatatga

SEQ ID NO: 31207 - DNA, 100 bp, Homo sapiens
gcagcacattgaaggaggagaacaaatcgtggaagatggaattggaatggctcacacagaacatgatgaaatctgtaagtacagacctgagaattctgtt

SEQ ID NO: 31208 - DNA, 95 bp, Homo sapiens
gacggtggaggttcgcggctctaacggggctttctacaagacagagctgtgaaccaaccccgctcacggctaacaagcccacccaccatggcgag

SEQ ID NO: 31209 - DNA, 100 bp, Homo sapiens
gatttgagagaaaacagaaatcttgaaacagtgtctcctgaaaggaagctggtggtagattggttagagagtattgccaaagatgaaattggagaatttt

SEQ ID NO: 31210 - DNA, 75 bp, Homo sapiens
agaaacacaaagcagcccaaccaaagggtacggttgacatttagggatgtggccatagaattctctcaggaggag

SEQ ID NO: 31211 - DNA, 100 bp, Homo sapiens
ttgagctcggtatcctagtgcacacgccttgcaagcgacggcgccatgagtctgacttccagttccagcgtacgagaagaagccattgaagatgttgaag

SEQ ID NO: 31212 - DNA, 100 bp, Homo sapiens
gaaatacgtggtggtgactgggtgtggcatgcagcattttggaaggaaaattgaagacgtgttcaagaaaacatgaacagaagcaaatgatgaaaatgag

SEQ ID NO: 31213 - DNA, 82 bp, Homo sapiens
gcagaggatcagaaccggtacctggatggcatgatcaatgtccgagttaccaccatggatgcagagctggagtttgcaatcc

SEQ ID NO: 31214 - DNA, 90 bp, Homo sapiens
agccaagtgcgggagtccacgacctcccagtgccaagtgtataagcgtgtccagaattggtgggtctcactgacttcaagaatgaagccg

SEQ ID NO: 31215 - DNA, 98 bp, Homo sapiens
ttctacctgtgtagtcacgctggcatccagattagtatccaatggaattcgatccatcaaaaattccacatttctttgggaactgttggcccaaactc

SEQ ID NO: 31216 - DNA, 100 bp, Homo sapiens
gccaagagggatccttcacccgtgtctggtcatattgaacattccagatacctatcattactcgatgctgttgataacagcaagatggctttgaactcag

SEQ ID NO: 31217 - DNA, 100 bp, Homo sapiens
aaagaccaagaagtgggattactggattatatgcgaattgaacagagggatgtgaggaaagccaacttgaaagaaaagaaggagaggaatcagaatgagg

SEQ ID NO: 31218 - DNA, 147 bp, Homo sapiens
gctatgagtgtggcgaaaagggacattatgcttatgattgtcatcgttacagccggcgaagaagaagcaggaatttatctcactaatatcttgaaaacagaagaaggcaaccctgaggtcctaaaaagacatggaaaagagcttata

SEQ ID NO: 31219 - DNA, 75 bp, Homo sapiens
ggagctgagcaaagtgcgtgaggagtttaaggagctgaaagcgcgtaatgaagaagttagtactattattatctc

SEQ ID NO: 31220 - DNA, 98 bp, Homo sapiens
gcggcctcactgggacccccaggaggtgaccctgcagatggctattcatatgaaaaggaagcaatggaaaattggatcagcaaaaagaaacgtacaag

SEQ ID NO: 31221 - DNA, 100 bp, Homo sapiens
cctgcctcaggtttatttgtacaaatagcacaggaggacccgctgttcgtgctggagcacagcctgcccattgacacgcagtactacctggagcagcagc

SEQ ID NO: 31222 - DNA, 50 bp, Homo sapiens
ctcgtggcgcctcctgtctgtggggagaaagagagagcgcgaaagagaga

SEQ ID NO: 31223 - DNA, 100 bp, Homo sapiens
gttggtgtgattagcttcgcagtctggaaagctttaggagttcacagtcccttacgtcgtcctgactcatctgatgaccgttatgtaatgacaaaacatg

SEQ ID NO: 31224 - DNA, 51 bp, Homo sapiens
agtaaattaacttcaaaactcacaaggagacggagtctcactctgtcgccc

SEQ ID NO: 31225 - DNA, 50 bp, Homo sapiens
gggtgtgcaaacccgagagaactgggatgagctttctgatgttagccaag

SEQ ID NO: 31226 - DNA, 90 bp, Homo sapiens
ggggtccgagggcagtctgtgtcaaacgcagacactgtgcatcttagccaacatagcggatgggacaacagcaaaagatcttattatgac

SEQ ID NO: 31227 - DNA, 90 bp, Homo sapiens
gctcccttcccggaggactgcgattggactgcacaggattgagggggtggcccgattctacaggtcacggaaaaagcacttgatcaccac

SEQ ID NO: 31228 - DNA, 96 bp, Homo sapiens
gcggagcgccagctcaatgaactgactggaaataccggcatgcaggattgatggccttatctgccattggtgaagggtgccaccagcaaatggaag

SEQ ID NO: 31229 - DNA, 100 bp, Homo sapiens
ggagcccggttaggaagaatggagttggcgactcgctaccagaaaacgttgtgtgacgtgatcctcatggtccaggaaagaaagatacctgctcatcgtg

SEQ ID NO: 31230 - DNA, 100 bp, Homo sapiens
ctagttactagagggcctacaaagacttgtgcaccatggacaattttgctgagggagatttcactgtggcggattatgccttgttagaagattgccctca

SEQ ID NO: 31231 - DNA, 83 bp, Homo sapiens
ccaccctgggcttcagcactggcagcccccagatggtcagtaggacagaaggtaacattgatgactcgctcattggtggaaat

SEQ ID NO: 31232 - DNA, 82 bp, Homo sapiens
cacgcaaccccagatccatttacactttacactggggatgttcaaaagaagtctggctaaacatgttaaaaaaggagagcag

SEQ ID NO: 31233 - DNA, 100 bp, Homo sapiens
ctgagcagagccctgcgatactattatgacaaggtggcagtagagaagagcatcacagaagttgctcaggagctgacagagctggtggaacatcttgtag

SEQ ID NO: 31234 - DNA, 100 bp, Homo sapiens
ctgaagcattgcttcaaagcatggggctaactccagaatcccccattgaattgctggaatccacaaataccaaactatggccattgaagctgaccttgga

SEQ ID NO: 31235 - DNA, 95 bp, Homo sapiens
acaatagggtatcatttttacgggccttctggagatgcttccgaactgtgggcaaaaatggcgggggctagagagctgaaggagagccagtttcc

SEQ ID NO: 31236 - DNA, 75 bp, Homo sapiens
tgggaagcaccgagactctagaagaaatgccctccgggtcacaggataagatcttagcaaagcaatgtctcaaga

SEQ ID NO: 31237 - DNA, 100 bp, Homo sapiens
gtccagcggtcacctacccccagcaccacctccagcccctgcgcctcggttcatcttccttcctgtacagtattttcaaacttcccagtcattaaaaata

SEQ ID NO: 31238 - DNA, 98 bp, Homo sapiens
ctttacaaaccctgaatttataactgagaaatgcttccagactgcacacttttacttagaggacagtacatcccctagagttatatccacacctccaa

SEQ ID NO: 31239 - DNA, 50 bp, Homo sapiens
aggaactggtgctgcagcgagagtataatggaatgtgcttacaagggcca

SEQ ID NO: 31240 - DNA, 76 bp, Homo sapiens
gagtaccagtacatagaagtggctcatagttccctccagattgtcctcgcagtttgttggagactgaaccgttgca

SEQ ID NO: 31241 - DNA, 98 bp, Homo sapiens
cgaaaggcagccgcggatcgccgcgctcagcgacaaacaactctgatccagtatatacggcctgtgttcgtgtcccggtcagaccaggattctcgcag

SEQ ID NO: 31242 - DNA, 97 bp, Homo sapiens
gtccgctttgtgtctttgaggggagcatctgagaggacagcaaagccaaagagctgaaggaccggcaccgggacttcccagacgtgatctcaggagc

SEQ ID NO: 31243 - DNA, 51 bp, Homo sapiens
ggaggctccaagacctcatcaacaattaagtgtctatgaaccagatagaaa

SEQ ID NO: 31244 - DNA, 75 bp, Homo sapiens
ttgcggagaggtcagtaactaaattggagaaaagcattgatgacttagaaggcggttcaggaccatcatcctcca

SEQ ID NO: 31245 - DNA, 75 bp, Homo sapiens
gtgcgcccagcgtcccagggcccaggccgagcagcctgccctcctatacctggtccccgcctgcatcggttttcc

SEQ ID NO: 31246 - DNA, 82 bp, Homo sapiens
ccgctctcagctggtgaagacatgacgaccctggactccaacaacaacacagccccatggctgggggttatggagtgatggg

SEQ ID NO: 31247 - DNA, 99 bp, Homo sapiens
cacttcctacacagcctgctgaagaagcagcacgaaagagagaggtccgtctaatgaagaacagggttccattaacttcaaatgatgatgaagatgaag

SEQ ID NO: 31248 - DNA, 83 bp, Homo sapiens
aaatccctccacctgcatatgttccggtgtctcgcccggtcctcaccctcagggctcccgggacccatgctgcggtgggggac

SEQ ID NO: 31249 - DNA, 83 bp, Homo sapiens
ccagtaccggctgacctcgctgtacgccgagcacccaggcgactgcctcatcttcaaggtgaggcggaaccaaccctcctggc

SEQ ID NO: 31250 - DNA, 101 bp, Homo sapiens
agaggtcccaatcccccactctttccgccctaatggaggtctccagtttcggtgagaagccctaccactgcaactgggacggctgcggctggaagtttgcg

SEQ ID NO: 31251 - DNA, 90 bp, Homo sapiens
tcttagacagtcgtggttcctgtgatctgtgtcctctttgcagaagaaaaggtactttgtggactatcggagagtgcttgtctgtggagg

SEQ ID NO: 31252 - DNA, 59 bp, Homo sapiens
ctggatctggggtgtaagaactgtgacttcagtgttcctggaaaacaatggaaaggaca

SEQ ID NO: 31253 - DNA, 90 bp, Homo sapiens
atgggatacctgttcatgtgttttggaggcaccgtctctccctgggaccaggtgaatgaaaactttgccattgatttgatagcagagcag

SEQ ID NO: 31254 - DNA, 98 bp, Homo sapiens
ttcctagcttccctgtatgtgatgatgaccgtcaccaactggttcaagggtgatccattcatgttgcagcagtctacaaatccagcaccaggaattct

SEQ ID NO: 31255 - DNA, 98 bp, Homo sapiens
caaaacctggaccttctggattacaggccaaattagcaaaaatggcgaaaagtcttttgaagacagcctctctgtctggaaggacaaaattgctacat

SEQ ID NO: 31256 - DNA, 75 bp, Homo sapiens
tggactggaaatacctaggccggaagccagctgaagatgagtggggtaaaaccccagacgccatgaaagctgcca

SEQ ID NO: 31257 - DNA, 75 bp, Homo sapiens
aagtcattttaaactatggacgactccgaggaacattgagggtcaaagaattgactgtagatccaactgctgctg

SEQ ID NO: 31258 - DNA, 100 bp, Homo sapiens
gatttttggcctcatactctgttatagataaacaagtttcctgttttccagcacccaacataacttgtaaggattccagtggcaatgaaacacattttac

SEQ ID NO: 31259 - DNA, 100 bp, Homo sapiens
agacatcactggctacacatttccagcaggctgcagatacgagtggacaaaattaaacaaccaccatgtcgagcaaaaaggcaaagaccaagaccaccaa

SEQ ID NO: 31260 - DNA, 100 bp, Homo sapiens
ccattgtcatgcaagccgtccagtggcaaacacgtctacaaaagaagatgggaaaggaatctcgccagcagccctgtggtggcgacgacgatggaccagg

SEQ ID NO: 31261 - DNA, 90 bp, Homo sapiens
ctcctcctagttccacctatgagaagtttgtgaaagagacagacaatgaagtaagaatgcgactattgcagttcgtcactggaacctgcc

SEQ ID NO: 31262 - DNA, 90 bp, Homo sapiens
cggctcacctggcggtgcccgaggagtagtcgctggagtccgcgcctccctggccctcggcgttgctgacgcccccaatgtcgtcgagca

SEQ ID NO: 31263 - DNA, 87 bp, Homo sapiens
ctgctcctcggcgtcggaccccccgagaaaatggtgaccccctccgcttccacgcccattatatcgctcagtgctgggcccccgagg

SEQ ID NO: 31264 - DNA, 50 bp, Homo sapiens
gttttgactctattatgaaacagcaaagttacctgaccttaaagatgctg

SEQ ID NO: 31265 - DNA, 102 bp, Homo sapiens
cctgcgagccttcttcccggggcgccataaacgcccccaatttcccagctgctaaaggaagaggaaggtgctggagaatctggtaaaagcaccattgtgaag

SEQ ID NO: 31266 - DNA, 90 bp, Homo sapiens
cacgaggaaagactagtcgagagacagaccccccccggaattctgagcaccaaaaggtggaagcagggaaaggcctggagatgaggaagc

SEQ ID NO: 31267 - DNA, 51 bp, Homo sapiens
ataaaccagaacatcgttcttcaagacacgttggtcgtcattgcctccgag

SEQ ID NO: 31268 - DNA, 98 bp, Homo sapiens
gaacactttggaacaacggaagctacagaagccttctttgcaatgacgcgattgtttcaatctaatgatgtcacatgtgccaatttaacgaacggtgg

SEQ ID NO: 31269 - DNA, 100 bp, Homo sapiens
ccattggatttaaaagacagtcctcgtcagcactgactttcagctatggaatcggtgtaatcctgagagattcacatggtgttgcacaagtacgttttgt

SEQ ID NO: 31270 - DNA, 100 bp, Homo sapiens
agagatccaagtgcgcgccctggcgggtccggaccaaggcttcccagcagcggcttatggaccagtggcagcagcggcggtggcggcagcaagaggatca

SEQ ID NO: 31271 - DNA, 100 bp, Homo sapiens
tggattctaatggaatcaggcagttttgtgtccatgtgaacaactcatcaacaacagcaacttgtgattggcggtgaccggatattcagttgcacatccc

SEQ ID NO: 31272 - DNA, 80 bp, Homo sapiens
agccaccctcgctccctctgctcttcctcccttcgctcgcaccatggtttggggaaaggtgctgctgaagcaatggaaga

SEQ ID NO: 31273 - DNA, 82 bp, Homo sapiens
gccggggccagcggagccggagccgccgggacatggggagtgcatccgccccaacccttttccccctcgtctcctgtgagaa

SEQ ID NO: 31274 - DNA, 100 bp, Homo sapiens
cgaggtgtgcgctgactgcagcgggccgggttactataacaacagtaccaaggtggctgtgaaaaccctgaagccaggaactatgtctgtgcaagccttc

SEQ ID NO: 31275 - DNA, 75 bp, Homo sapiens
ggacacatctttagaagacctaagagaatttagttgagagcaaacaccacaagcttgcccggagtttaagaagtg

SEQ ID NO: 31276 - DNA, 82 bp, Homo sapiens
ctcgcgactgacggagctgcggtggcgtctccacacggttctgtttcaagctgattccagccatttgggattgccgcccact

SEQ ID NO: 31277 - DNA, 90 bp, Homo sapiens
tcactagacgtcaaagctgttgcctcccgtgcaactgaagttctccaaggagaggcacatcatggacaggacccccgagaaactgaagaa

SEQ ID NO: 31278 - DNA, 100 bp, Homo sapiens
gataaatctcaaagatctcgtacaagatccttctttgaaagaccacagcaagattctttcattcgtctcctcctagcctgggggaccaggctcgaactga

SEQ ID NO: 31279 - DNA, 100 bp, Homo sapiens
agcatcccgtcaggggttgcaggtgtgtgggagggccgttgctccagggagaactgcaaatatcttcatccacccccacatttaaaaacgcagttggaga

SEQ ID NO: 31280 - DNA, 87 bp, Homo sapiens
tcgttctgccgatgatcaaggaacacattatgcaaatgcttcaaaatcctgctgataaacttattaaaatttggggcgcgtatgatg

SEQ ID NO: 31281 - DNA, 96 bp, Homo sapiens
cggcagcctccacccaccggcccaccctacatttagcgcatcatgtgatccggtgtccgagctgcaggaggagggaatgaacgccatcaacctgcc

SEQ ID NO: 31282 - DNA, 99 bp, Homo sapiens
ggccgcccccgtggatctagagctgaagaaggtcagttctcctcgggtctcggggacttgacatatcccacatctcccagcgattggagagtctgagtg

SEQ ID NO: 31283 - DNA, 75 bp, Homo sapiens
catccaaaaccggcagctgttagccgagcaaggagttacccagggagattatacacctatggaagacagtgaaga

SEQ ID NO: 31284 - DNA, 50 bp, Homo sapiens
ctggtggagagccaaagatcaaagtattgatgaagatgaccctactgctg

SEQ ID NO: 31285 - DNA, 50 bp, Homo sapiens
tcttccatcaatcatatctcacaggttcttgcacgcattgcaaatgccac

SEQ ID NO: 31286 - DNA, 74 bp, Homo sapiens
tctcagctttaccatccctggaggagacctggcagcaggagcaggccgggctctcgccatgggtcactgtcgcc

SEQ ID NO: 31287 - DNA, 87 bp, Homo sapiens
gtgaagagagttcgcctgagccagatcccaggcagtggctttgaagcgtatgttgaatttcaatgtgcctcatattaaaaacagcac

SEQ ID NO: 31288 - DNA, 97 bp, Homo sapiens
tttccctagcgaggacttctaccgctgcggctactgcaagaacgagtcgggcagccgctccaatggtcaaaaccgctttccgggatgccgctgcaaa

SEQ ID NO: 31289 - DNA, 100 bp, Homo sapiens
cactcggccaaggaaactcccagggcccgcccaggacccccaagccgccgcggacgcagatctctagctcctataccaccaccaccaccattacagcgcc

SEQ ID NO: 31290 - DNA, 75 bp, Homo sapiens
catgtaaagtcagtgacagccccatcttcagaggatgattccgaagaagacggagaccataacaggacatttgat

SEQ ID NO: 31291 - DNA, 75 bp, Homo sapiens
gcaaaagcagcaaacaggcagtaatcgaggcaagatcatgctctgtcagtcacccaggctggaataccgtgacac

SEQ ID NO: 31292 - DNA, 96 bp, Homo sapiens
ctcaagtgatcttctcgcctcagcctcctgagtagctggagctacagtgcacgatctgattttctggagagatgtgaagaagactgggtttgtctt

SEQ ID NO: 31293 - DNA, 82 bp, Homo sapiens
tgatcaggatttttggcctaccctccaaagaaaagcatggcggacaccgacctgttcatggaatgtgaggaggaggagttgg

SEQ ID NO: 31294 - DNA, 75 bp, Homo sapiens
ctgatggcagtgttttagctgctgggaagagagaagggcacagttacctaagtatcaacgtaatcttcctcggcc

SEQ ID NO: 31295 - DNA, 93 bp, Homo sapiens
cttcctgtcatggttccccttctactacatgctgaagacctttccaaagtgaaactgatgagatttgatgatccactgttggggcctcgacga

SEQ ID NO: 31296 - DNA, 80 bp, Homo sapiens
aggagcaccaggagacgcaactcatcggctctggagcctcccagctcaattgcctgggatttatacaagataaaattaca

SEQ ID NO: 31297 - DNA, 50 bp, Homo sapiens
ccggaacaccctggaagccgagaaatggcccgggtggaacgcatggagca

SEQ ID NO: 31298 - DNA, 51 bp, Homo sapiens
ggagatcgacaaccccgagctcagttatgcaaagggtgacctggacatatc

SEQ ID NO: 31299 - DNA, 83 bp, Homo sapiens
gggaaagatctaccttctggaagctactactacgtggtgcttggaaaggttatcaatactctggctgaccatcatcatcgtgg

SEQ ID NO: 31300 - DNA, 80 bp, Homo sapiens
atttttggtattgcagatgacatcctgataacttaagtgactctctcttttccggtgatgaagaaaatgctgggactgag

SEQ ID NO: 31301 - DNA, 100 bp, Homo sapiens
agagtagcgacccggggggagcgcggggcgacgctggctgcagggacccggtgacagcgtgagagaaactgccaagttttggaccttatctggaacagcg

SEQ ID NO: 31302 - DNA, 98 bp, Homo sapiens
aaaaacgatgaaatgaaagctatggatgttttaccaattttgaaggaaaaagttgcatacctttcagcccttcaacaggcacatttattgaaaaacat

SEQ ID NO: 31303 - DNA, 74 bp, Homo sapiens
cgcagctccgcgtcccccgcgcctcctcccagcgcagtgcgtcagcatttatcccgtttgccaaccattgatcc

SEQ ID NO: 31304 - DNA, 100 bp, Homo sapiens
ggctgccgtcatcaccatcaccttcaatccgctctactggaatgtgggcgctacgtcttgtcctttgttggctgcggtttggctgtcgtgggtacctacc

SEQ ID NO: 31305 - DNA, 87 bp, Homo sapiens
acatttgccctcagtggtggggttactgctgtttcggagcctcctgacaaggtgatccgggcgggccccgcaggaattttatcccct

SEQ ID NO: 31306 - DNA, 100 bp, Homo sapiens
tcaaatgccttctcatccccacataatagccgcaatggctgaaaatggtgataatgaaaagatggctgccctggaggccaaaatctgtcatcaaattgag

SEQ ID NO: 31307 - DNA, 100 bp, Homo sapiens
gccgccgccgcctcggccgaccagggacctgcccgcctgcggctgctccgggaggaactctctggaatgaaaaataaaatacaagtagttgtgcttgaaa

SEQ ID NO: 31308 - DNA, 89 bp, Homo sapiens
agttttccggggccctctcagcaagaacgggaacaaaactctgaaaatgcttggacagaagagatgagtactatttccactaaggccta

SEQ ID NO: 31309 - DNA, 100 bp, Homo sapiens
cagagctttaacaactatgataaatccaaaccagtcacctccccacccccaccgccaagcagccacgagaaaggtcttgggtctccgagggtctcccggg

SEQ ID NO: 31310 - DNA, 74 bp, Homo sapiens
ctaaacggactcatgtactttgtcaggaaaattgcctaagaattatgacccaaaagttaccccagatccagaaa

SEQ ID NO: 31311 - DNA, 100 bp, Homo sapiens
ggagggtacttcattgatgccacaaccataatagaatgtctacattcctgtgtgatgaatgcagactctgctaccattttggctgtttggatcctccttt

SEQ ID NO: 31312 - DNA, 76 bp, Homo sapiens
ggccatttaggagctctgctcaaagccagacggctgaagggtatgtgattggcagctgtattaaacacattccaat

SEQ ID NO: 31313 - DNA, 75 bp, Homo sapiens
caccgggcaggatgaaggcagagcgtgtggcatctccacctcaagggcggttcagctgctgaagccagagggtgt

SEQ ID NO: 31314 - DNA, 74 bp, Homo sapiens
tgggaaccaagaagcgggtgctcaccctccgcaaggttcaaattcagctgttagcatggaactttcagaaccta

SEQ ID NO: 31315 - DNA, 100 bp, Homo sapiens
ttacttggagcaaagggcagtcggcggagcttcgccaaggctggcgcagtcgaaactggcgatggaatatgagaggagccctctggaaagaaaaggacag

SEQ ID NO: 31316 - DNA, 128 bp, Homo sapiens
cagccatgtaacgcctgtggtgaccagtgccctgggttcgccttgcataaatggaggaaagtagtagatcatccaaaaaggcgatttggtatccccatggatcggattggtagaaaccggctttcaaa

SEQ ID NO: 31317 - DNA, 75 bp, Homo sapiens
gtctgcgagccaggattcccggtggtctttgggaagaagcttcctgcctttgccaccatccccatccaccagctg

SEQ ID NO: 31318 - DNA, 48 bp, Homo sapiens
tccagggcctaagggtgacagaggtgctgctggtcaacctggtgctaa

SEQ ID NO: 31319 - DNA, 100 bp, Homo sapiens
aaaagagctaccttttcccacgagttggagcctgagatttccatgaggacaacttacaaggacctgtatggcctcattttagctgcttcagtgtgttgga

SEQ ID NO: 31320 - DNA, 82 bp, Homo sapiens
ccttcctcaacgacgcggacatggtcatgagctttgtgaacctggaatcaagccagggaggacttcaaccaggacatcggct

SEQ ID NO: 31321 - DNA, 89 bp, Homo sapiens
caggactgtgtcaaggagatcggcctcttgaaggtctcagccttggatcaggagattattgaagtagatcctgacactaaggaaatgct

SEQ ID NO: 31322 - DNA, 55 bp, Homo sapiens
aactacagaaacctggtctccctgggtattgctgtctctaagccagacctgatca

SEQ ID NO: 31323 - DNA, 101 bp, Homo sapiens
agtcatgctcgcttcacggaggcaatagctagccggtatcattgcccagtgcctaagatcttttatgttcagctcactgtaggaaataatgaattttttgg

SEQ ID NO: 31324 - DNA, 96 bp, Homo sapiens
ggggactgcaaaggccaatgttggtgctggcaaaaagagggagaaccgaagattacaggaggccagcatgaggttggaacaagagaatgatgacct

SEQ ID NO: 31325 - DNA, 76 bp, Homo sapiens
ttggagaatggtatttagaaaccaagatctggacatcagatgcatcatcccattcagatgaaacctgcagatagtg

SEQ ID NO: 31326 - DNA, 132 bp, Homo sapiens
gtgaagtgctgaccaattgccactggacatacttgaaacaaaataggaaaatggcagcaaactcttcaggacaaggtgctgttccagaattcaaagaagagaaactgcagctgcaaccaaaaccacgttctg

SEQ ID NO: 31327 - DNA, 100 bp, Homo sapiens
cagggccccagctactgatgaagtggcaggagtccacagaagcctacttcgaagttcccggggcttccaggggagggccctccagaatttccacagcata

SEQ ID NO: 31328 - DNA, 75 bp, Homo sapiens
ccggaatgtcatccagcgagtgattaggtgggaagaagagcgctatcctgaaggcatcaagtggaaattcctaga

SEQ ID NO: 31329 - DNA, 80 bp, Homo sapiens
ctcctgtttcgccggacttgaatcttttgcctggccgcaacccgccagcctgcaatgtggtccgcaacatgacctccgag

SEQ ID NO: 31330 - DNA, 97 bp, Homo sapiens
cgcgccctcgcctctgggcgcctgcgagtctgcggcccgcaggtgacggagctcacggtgtgatgtttgaggcaccatcagagttaacacaaagacc

SEQ ID NO: 31331 - DNA, 76 bp, Homo sapiens
aggacggacaagcacagtcttcggaaggcagcctggcatcctcgctacaacctcattgttgtgggccgatacccag

SEQ ID NO: 31332 - DNA, 98 bp, Homo sapiens
gcaccgttaaactcctgctctgtttactgtggattggatattctcaaggaaccacacatgtattaagatttgacactcctagaatatgcagagaaatg

SEQ ID NO: 31333 - DNA, 75 bp, Homo sapiens
tcctcgtcgagcgcaacccaagttcctggtccagaactttacacagaaaaggtgctcaaaggatatttgtttaat

SEQ ID NO: 31334 - DNA, 99 bp, Homo sapiens
cagccagttcgtgattcacaggagcctctgtatcagcaccatgcagaagagccgaatgcacataaggtcgccagcccaccctccggacccgcatacccc

SEQ ID NO: 31335 - DNA, 75 bp, Homo sapiens
aatcatctttcggccgtcagcgaaagcatccctgcccttggatggatagctgtgatggagtctcgctctgttgcc

SEQ ID NO: 31336 - DNA, 98 bp, Homo sapiens
ccgctcgcggcctggcccttggcctcctcctgctgctactgtgtccagcgcaggatgtacagttacccagcacgtgtacctcctcctcctcctattgc

SEQ ID NO: 31337 - DNA, 75 bp, Homo sapiens
cgagcagagccgcccagccctgccagctgcgccgggacggactttccttatcccagttgattgtgcagaatacac

SEQ ID NO: 31338 - DNA, 51 bp, Homo sapiens
actgctggagatggtggagtccgtcatgataacctcctaaggagagcagcc

SEQ ID NO: 31339 - DNA, 100 bp, Homo sapiens
tgggctggggctccctgttgatcattctgaagaacgagggcttctattccagcacgtgcccaggaaatgaatcctcctgataacatcaaggatacaaaaa

SEQ ID NO: 31340 - DNA, 90 bp, Homo sapiens
cgcgtacccggcgcagccagagccaccagcgcagcgctgccatggagcccagcagcaagaatccaactcaagtcggaacagctcttcagg

SEQ ID NO: 31341 - DNA, 90 bp, Homo sapiens
tcgctgtgaatgagttcattctccttaacctgctaaaggtccaggtgcaggtacagcagtctccgcaacaggtctcggctcagctctccc

SEQ ID NO: 31342 - DNA, 100 bp, Homo sapiens
ggtcggggcggcggccgcgctgggcgtgaggggggccttagagggcctccccaggccgcctccgcccgtgaaggtgtgggcccatcgctggatggatctg

SEQ ID NO: 31343 - DNA, 88 bp, Homo sapiens
ccaaggccaaccgcgagaagatgacccaggtcctgatccggttccccatgcagaggaacttggtggtgatccccaagtctgtgacacc

SEQ ID NO: 31344 - DNA, 100 bp, Homo sapiens
gacgatgctggagtccattcgcgtgacgggtgtgatgaatgcagactctgctaccattttggctgtttggatcctcctttgaaaaagtctcctaaacaga

SEQ ID NO: 31345 - DNA, 82 bp, Homo sapiens
gccacgcttctcatcctggacatctgacctcctgccccccgaggtctgcagtctcctgaacccagcagccatctacgccaac

SEQ ID NO: 31346 - DNA, 101 bp, Homo sapiens
gtcagcaaccgaattccagtttgactgggaggtgctggtcctagggaagctcaagtgggacctggctgctgtgattgcacatgatttcctggccttcattc

SEQ ID NO: 31347 - DNA, 97 bp, Homo sapiens
tatggctgcagagtggaggattacgacgcggcagatgacgtgcagctctccaagacgctggagctgcgcgtggccttggatatcaaagtattgcaga

SEQ ID NO: 31348 - DNA, 98 bp, Homo sapiens
cagcaaggaaaatccaaggcggctcattttgtgttcaggacctcggcccagcccacagccatcccagtgtggaaattggtgaaagtgtacgtggagag

SEQ ID NO: 31349 - DNA, 98 bp, Homo sapiens
ctcctcagtatccaccgacagcattccaagacatctatgccatcggggtgggcaagctggatgtggactggagagaactgaatgagctagggtccaag

SEQ ID NO: 31350 - DNA, 100 bp, Homo sapiens
ccgccgcccgtctcctgtcgcgcagcttcctccgtgcgaaattcatccacacttctctttagtgccttgatcacaagaatttttggagttaaaagggcaa

SEQ ID NO: 31351 - DNA, 133 bp, Homo sapiens
cgctgaatgggctgaaggaggaggacaaagagcccctcatcgagctcttcgtcaagacaatgcagatcttcgtgaagactctgactggtaagaccatcaccctcgaggttgagcccagtgacaccatcgagaa

SEQ ID NO: 31352 - DNA, 96 bp, Homo sapiens
gcccccgggcagaccctgttccgagctgccactgggcccaagagatgggtgctctcctaggcgccccttcccctggcaggggccgaggacgctgct

SEQ ID NO: 31353 - DNA, 90 bp, Homo sapiens
cagccacccttggtgatgagcctcggaaagtgctcctgcggctgtatggagcgattttgcagatgagttcttcagatgctatatatttgg

SEQ ID NO: 31354 - DNA, 90 bp, Homo sapiens
ctgccgcccaccttgtggccctgggctttaccatctttgtggctgtgcttgccaggcctggctccacaccctggaggagaagaggttctg

SEQ ID NO: 31355 - DNA, 83 bp, Homo sapiens
gcaagaccagtccatttggggaaatccttcggatggtgaactcattagaagtcaaaatgcagatcttcgtgaaaacccttacc

SEQ ID NO: 31356 - DNA, 75 bp, Homo sapiens
gtcaccttcgacctggagctgggccaggcgctggagatgatgaaccaggtggaagggcagcagaagaaccttgtg

SEQ ID NO: 31357 - DNA, 100 bp, Homo sapiens
tggtggtggctgccatgatgatttccattgtgggttgaatctggtatcaagtgtcactctctccaagtccgcatcggaggcttctccacagagcttacct

SEQ ID NO: 31358 - DNA, 95 bp, Homo sapiens
tctgattcccgagtgtctgcagggtatatgagggtgggagcaacgtggaccagtttgtgacccgcttcctcctgaaggagacggccaatcagatc

SEQ ID NO: 31359 - DNA, 106 bp, Homo sapiens
gtctcatgaaccatcctgatttagcaaaagacttaacagaattctgcttggtcagaatcgtgatggcattgtgttcagcactgatgactattttcaccatcaagat

SEQ ID NO: 31360 - DNA, 100 bp, Homo sapiens
tggtggacagaaagtcagcctcttgtgccctgtatgatgagattcgtcagtttcgcaaggcctgtggggaggctcatcttaaaactatattagcgacagg

SEQ ID NO: 31361 - DNA, 99 bp, Homo sapiens
ctttttgagattggcttttttcgttgactatcctgcccctgagatccacccaagttgtggcttgaagaaaatttgcctacacgttgtggattttgtcat

SEQ ID NO: 31362 - DNA, 50 bp, Homo sapiens
ggcctacgcagagctcatcgtccttggggttgtgtccactgtggtccccg

SEQ ID NO: 31363 - DNA, 100 bp, Homo sapiens
cgccgcctggctttcgtattcgttgttctcggcgggctgtggggcctccgcgccgcggccgttagtcatgtcggctgacaatggcaccatgcatctttgg

SEQ ID NO: 31364 - DNA, 75 bp, Homo sapiens
gctgctgctgccgctgctgctgggcctgaacgcagagctcaggccccggggcctccagcggcaccagcggagacc

SEQ ID NO: 31365 - DNA, 96 bp, Homo sapiens
cacatcgaggacgtcctccgggcactcccacgaccagaaagccttgagccgggccatgcttctcacatcttacctgcctcctcccttgttgagaca

SEQ ID NO: 31366 - DNA, 83 bp, Homo sapiens
agcgccggcgtgcgctactcctcacctgccaacctctacgtgcgagaacccagtgacttgattgtaaaaatttacagagcgga

SEQ ID NO: 31367 - DNA, 75 bp, Homo sapiens
gtggaaagaaaccatgtgctgaaatgtttgacgacactgatggtttgaccgaagccaggacagcacagccgtagc

SEQ ID NO: 31368 - DNA, 76 bp, Homo sapiens
gctttgcgcaacgccaacctcaggcgagatgatgttgtgaacacaaagatgtttgaggagctcaagagccgtctgg

SEQ ID NO: 31369 - DNA, 75 bp, Homo sapiens
agatggctcgcgagcaaaaccaccatacctgggaccagggcgccaataacagtctgcagatgtggatcctgactc

SEQ ID NO: 31370 - DNA, 74 bp, Homo sapiens
cgagcaggaggcgccatcatggaacgtgttgtgggctttcacgtactgggtccaaatgctggagaagttacaca

SEQ ID NO: 31371 - DNA, 135 bp, Homo sapiens
ggcagatgatgcagaggagcgagctgagcgcctccagcgagaagttgagggagaaaggcgggcccgggaacaggggtattccctcagcggatactacacccatccatttcaaggctatgagcacagacagctcag

SEQ ID NO: 31372 - DNA, 100 bp, Homo sapiens
ccagcttctttgtcttacttgtcatttgaaggtgcaactaaaagaaacagaccaaatgtgcaggagagctcaaaggatggctactgacatgcagaggaag

SEQ ID NO: 31373 - DNA, 100 bp, Homo sapiens
agagcactgcaaaggaaaatctgatcactactgggtggttggtatccatgaaaatccccagcaactaagatacatattcaggagtgaaaagaaagtggga

SEQ ID NO: 31374 - DNA, 100 bp, Homo sapiens
gccctcttcaacagacagccagaatgctgtttcatgtggtaaaccggctattccagaaaatggttgcattgaggagttagcatttacttttggcagcaaa

SEQ ID NO: 31375 - DNA, 100 bp, Homo sapiens
ggatgatcaatgcaaatggatatggagctttcttggaatgaaacattatcccgtaacaccaggcatttccggagagttcttttgaagtcacttcagaagg

SEQ ID NO: 31376 - DNA, 98 bp, Homo sapiens
caggagatcttctccttcctcatttccctcatcttcatctatgagactttctccaagctgatcaagggatagctgggagtatggccaccctgctccac

SEQ ID NO: 31377 - DNA, 75 bp, Homo sapiens
ctgcgggaaggtcaccagggagaaaaggtgtgagcggtactgggcccaggagcaggagccactgcagactgggct

SEQ ID NO: 31378 - DNA, 50 bp, Homo sapiens
tcgaaagcctgaggaaaaagcggccgcggacctcggaccgtcccccagac

SEQ ID NO: 31379 - DNA, 51 bp, Homo sapiens
cgtcaccaccatccctaccattgattcatgttacatgtaaagctgtcctca

SEQ ID NO: 31380 - DNA, 100 bp, Homo sapiens
cccccaattacaatccagacatcatcttcaaggacgaggagaacacaggcgccgaccgcctcatgacccaggtttacccaaggtccagcctagcccctag

SEQ ID NO: 31381 - DNA, 75 bp, Homo sapiens
ggaccctctggaagcctagaaatgtatcttaaatagcgaagatggagaaatactcaataatgaagagcatgaata

SEQ ID NO: 31382 - DNA, 82 bp, Homo sapiens
gtccgggctgtgagcaagaggaagctgcagcccacccgggcagccctcaccctgccgcacggttgtttatggagctttgggc

SEQ ID NO: 31383 - DNA, 88 bp, Homo sapiens
caatgagtatgcctacctcaaagccatcatcttctttgacccaggtgaaaagccatacaagtgtacctgggaaggctgcgactggagg

SEQ ID NO: 31384 - DNA, 100 bp, Homo sapiens
cagaacctagcctatcagctggggctggatgagttgatcctgccatgaagcagtttctgctgtacttggatgagtccaatgccctggggaagaagttcat

SEQ ID NO: 31385 - DNA, 75 bp, Homo sapiens
caaatggcaagacgaactcaaccagcacaacagacaatgcagatcttcgtgaagactctgactggtaagaccatc

SEQ ID NO: 31386 - DNA, 80 bp, Homo sapiens
tgttaccagccaatcattaaagaaattttaaaaaattttccaaaagagagatggtatttaacatgaagtcgctccagatt

SEQ ID NO: 31387 - DNA, 73 bp, Homo sapiens
gaagggctgactcaggacgaggaaagagagccaggagcctcagccctgtatgatgagattcgtcagtttcgca

SEQ ID NO: 31388 - DNA, 128 bp, Homo sapiens
atcgaccgcaacttacgggaggacggggaaaaagcggccaaagaagtgaagctgctgctactcggctggagccagacatcctgcttcgggccaagcaagatttcctgaagacggacagtgactcggac

SEQ ID NO: 31389 - DNA, 83 bp, Homo sapiens
ccagcaccaacaggatccaaacatatctgaagagatggattaagaatgctttggattaaggattgtggagcacatttcaatca

SEQ ID NO: 31390 - DNA, 101 bp, Homo sapiens
gtggccccgagggcggatccgaggtgtggatgaggtcaccattgtcaacattttgaccaaccgcagcaatgcacagagacaggatattgccttcgcctacc

SEQ ID NO: 31391 - DNA, 82 bp, Homo sapiens
cccgaccctggccgccccgagcggagcctggaggagtgtggccatctggggccgtgtggtatttgccactcaggagacatgt

SEQ ID NO: 31392 - DNA, 90 bp, Homo sapiens
gtccccggaagcagacggatcccaataaagagaagcagggccctgagcggaagaggattaagaaggagcctgtcacccggaaggccgggc

SEQ ID NO: 31393 - DNA, 75 bp, Homo sapiens
ggggcgagctgagcacctgtagtcaatcacacgcagctggtctgatcagcccctggaatttgccactctacttgc

SEQ ID NO: 31394 - DNA, 90 bp, Homo sapiens
cagcaacagagctgggtccgggtgtacgatttgatggtagagtggtggcaaagcttccttttacccctctttcttacatccaaggactgt

SEQ ID NO: 31395 - DNA, 98 bp, Homo sapiens
tgaagacaccgcggtgggattccagctgtctgattaatgagaaacataatgtattttggtcaaaatgcagatcttcgtgaaaacccttaccggcaaga

SEQ ID NO: 31396 - DNA, 99 bp, Homo sapiens
agctgatgctcaactccagcctcatgcggatcaccctgcggaacctggaggaggtggagttctgtgtggaaggatctcgaggacctggaagaagcagag

SEQ ID NO: 31397 - DNA, 100 bp, Homo sapiens
tggctttgtccccacccagcactgatgatattataaagcttctagtgaggacgttgccagctccccggagcgccactacacgcccttgccttctgcttcc

SEQ ID NO: 31398 - DNA, 96 bp, Homo sapiens
atgctgggaaatctcctgctcgaaatagaagtccaaggcttgcgagaaggtcatttccgtgggtcaaacggtcatcacgaagcatcggaacacccg

SEQ ID NO: 31399 - DNA, 74 bp, Homo sapiens
acgcacacccaccccacagtgcccggctcggctgcggttgacatcatggacatatgtgagtccatcctggagag

SEQ ID NO: 31400 - DNA, 50 bp, Homo sapiens
tcaccggcgccgcggtggtccatgcatatgcgctagaacttctatttgat

SEQ ID NO: 31401 - DNA, 100 bp, Homo sapiens
attgtatgccaggttattatggagatccaaccaatggtggacagtgcacagcctcaagtactacagccttccagcagccttcccagacccacagatcaca

SEQ ID NO: 31402 - DNA, 75 bp, Homo sapiens
actgaagcagccaaacactctattgtaggtgcacgtctcatcgcacatgctggcagcctcaccaacctggccaag

SEQ ID NO: 31403 - DNA, 100 bp, Homo sapiens
ctaagacaccgggacctcctggaagccaaaaatgccagggaaaatgattgtgggccgatcggacagcaccaattctgaagacaactatgtgcccatgaat

SEQ ID NO: 31404 - DNA, 96 bp, Homo sapiens
cagacctacccgggcgaagcgggcgagcggtggtttggacgccggcggagacgcgggcgagggaagtcgttgcatatgatgatcccaaaattccac

SEQ ID NO: 31405 - DNA, 101 bp, Homo sapiens
aactaggcataaggaagaatgtctcatgttcgagtctggggctgtcgctgtgctctgctgacaaacgggctcatcataatgcactggaacgaaaacgtagg

SEQ ID NO: 31406 - DNA, 100 bp, Homo sapiens
agaacgccccgggccaacacctggcctgcccgagcaagagcctggagctgcgcaagtcctccacctcagatatatgacaagcagttggatgaaagagaac

SEQ ID NO: 31407 - DNA, 75 bp, Homo sapiens
tataagatttgatgaaattaaacttgtccagataaaaagaccagcatgctgatgatgtcaaagaagactttgaag

SEQ ID NO: 31408 - DNA, 100 bp, Homo sapiens
gctcagtacatattcaccttgaagaggaagacggggcggaagaccaagatcatcgagatgattcaaccctatgaaaagataaaggccaggggcttgcctg

SEQ ID NO: 31409 - DNA, 98 bp, Homo sapiens
tggacaacaacaagcttaccagagtacctggtgggctggcagagcataagtacatccaggtggaggagaaccgccagtaccgcatgcacagcctgcag

SEQ ID NO: 31410 - DNA, 83 bp, Homo sapiens
tataaagctttggaagatgcagatgagaaggttcagttggcaaaccagatatatgacttgttatcatttaacatggaagaaga

SEQ ID NO: 31411 - DNA, 75 bp, Homo sapiens
cccgccgccccgggcctcggggcgacgatgctggagtccattcgcgtgacgggagcctcagggaacccagccagc

SEQ ID NO: 31412 - DNA, 82 bp, Homo sapiens
cctgcggcctcactgggacccccaggaggtgaccctgcagaatgagtccctggaacgccagatgcgtgaaatggaagagaac

SEQ ID NO: 31413 - DNA, 83 bp, Homo sapiens
ttcaagctgaagactataagttcgactttcctgtctcctacctgcctaatgaggaaaatggggagcaggaggctgacaatgag

SEQ ID NO: 31414 - DNA, 75 bp, Homo sapiens
cccggcccacagtgggggtgtgcaaacccgagagaactgggacagaatgctttgacctccaagctgttttaaatc

SEQ ID NO: 31415 - DNA, 75 bp, Homo sapiens
gcctcctgagtagcagggattacaggtaacaaggacgtctttgtgtgcatgcccacaggggcaggaaaatcccta

SEQ ID NO: 31416 - DNA, 75 bp, Homo sapiens
ggctgtttggaaagacccaggagaagccgcccaaagaactgattgtggatttcttaaagaagaagcatgattttg

SEQ ID NO: 31417 - DNA, 98 bp, Homo sapiens
cagggtataaatcaactacctaatgttatacaggctctggaaaaacatgaaggaagaattccaaagtccctttgcaagtcaaagtcgaggatattttt

SEQ ID NO: 31418 - DNA, 101 bp, Homo sapiens
gcttttgatgcatttccaagtagaataagggcttctttcgccgcacaatccagaagaacctccatcccacctattcctgcaaatatgacagctgctgtgtc

SEQ ID NO: 31419 - DNA, 101 bp, Homo sapiens
tctacatcctgcgggtgcctttgaaaatcaacgacaacttgagcacaggtttttcgttggaatatacgttgcacatttatggcgattctgagtgtgagggc

SEQ ID NO: 31420 - DNA, 83 bp, Homo sapiens
ctgaaggtgatcaggctgcaggaagaagaagggacacctttcacagctatcagggaagatgatgataattccgaagaaggctt

SEQ ID NO: 31421 - DNA, 100 bp, Homo sapiens
tagagaagttttccaagagcaagaaatcacccattggctacctgggtactccgaaaacaaataggacaaataaaccttctacccctacaactgctactcg

SEQ ID NO: 31422 - DNA, 100 bp, Homo sapiens
aagagtacgagaagcacagtccctaatttctgctgctatagaaccagggtgattctgggggtccacttgtctgtaatggtgtgcttcaaggtatcacatc

SEQ ID NO: 31423 - DNA, 100 bp, Homo sapiens
agccagcagaggtcagagagagacagctcacgttccgggtatccacaaattacccattatcaaaaacaaatagttcatcaaatgatttggaagttgaaga

SEQ ID NO: 31424 - DNA, 99 bp, Homo sapiens
actgggtgcttccagcaggaatgagtgctaaaatgctgggaggtgtctttaaaattgactggatttgcaggaaaatgtttataggaggccttagctggg

SEQ ID NO: 31425 - DNA, 90 bp, Homo sapiens
aaagcgcagaccacagttacatgtatggagaatggctggtctcctactcccagatgcatccgtgtcattgctctaggtcgtaaccagcct

SEQ ID NO: 31426 - DNA, 100 bp, Homo sapiens
ctctggtgttgagtggtcggcttggtgtggtgtgcggaggagctccaggcccgtcggcgcggaggtggagattctggacgcaaagacaagggagaagctg

SEQ ID NO: 31427 - DNA, 100 bp, Homo sapiens
cgacagttgtgttgtgccaatggtggagaagaaaacttcgggtattctctactgccgctgatggtcaaacgcaagtggaaattaaagtgtgtcagggtga

SEQ ID NO: 31428 - DNA, 100 bp, Homo sapiens
tgcctccccacaccaccgaccaggacctggtgaagctctgtcaaccgttcatatttggtgcttagacaaattcaaaatgaggaaacatcggcacttgccc

SEQ ID NO: 31429 - DNA, 75 bp, Homo sapiens
aacggggcgagcctggaggattgtcactccaacctcttttcgctggatgaccagtgtcccagtgaaggaacgagt

SEQ ID NO: 31430 - DNA, 88 bp, Homo sapiens
gtcaacgaaacctggcacggctcttgcttccgtgctctggtctggggtctctctgtgaaacacaatcctcagaaagtgggtaaagacc

SEQ ID NO: 31431 - DNA, 89 bp, Homo sapiens
agccgaatccgcgtcgggctgtaactcgagtgccagtccacaagaatcggaatgtcagttaatgctattcgcaagcagagtacagatga

SEQ ID NO: 31432 - DNA, 83 bp, Homo sapiens
tcccacaacgccttcccgaacgataggttggaaaggctcctggatccaaactcgctgagggaggctgccggcgtggaccgcgg

SEQ ID NO: 31433 - DNA, 101 bp, Homo sapiens
tgacacctcccaccatggacagcttcgacttagccctgctccaggaatgggacctcgagtcactgtgacagcccacctgaggatattgaccataaggactc

SEQ ID NO: 31434 - DNA, 51 bp, Homo sapiens
ctgacggtgaccaacttattagaaaagggtgcctgcagaactacattcctg

SEQ ID NO: 31435 - DNA, 83 bp, Homo sapiens
ggacgccttatggagccagcatattccagatgcaaataatacggcactccgaacagacactaaaaacagctctcatctcaaag

SEQ ID NO: 31436 - DNA, 100 bp, Homo sapiens
aagacattcggtcctatcgctactgggatgcagagaagagaggattggacctccagggcttcctgaatgatctggagcttagcagtgtctgcaaaaacga

SEQ ID NO: 31437 - DNA, 100 bp, Homo sapiens
gaagaagacaaccatcttcccccccagaccaaaagaagtagcagaaaccctgtctttcaggattcctgggacacagagggaagtgacagcgagtacgagg

SEQ ID NO: 31438 - DNA, 49 bp, Homo sapiens
gagatgatgatgaagatattgatgacaattcaattcgtcataatctgtc

SEQ ID NO: 31439 - DNA, 75 bp, Homo sapiens
ggagctctacgcctcctacgtttacctgtccatggactcagttgcctttgaggatgtggctgtgaacttcaccca

SEQ ID NO: 31440 - DNA, 100 bp, Homo sapiens
gcctgtcagccaggaatgttttgagacactccgaggaggatgaagcggatcccaaacggcagaagacagaaaatggggcatcggcgtgagcccctgccaa

SEQ ID NO: 31441 - DNA, 82 bp, Homo sapiens
cgaggccctcatgtaccacacggtttattcactggatctctgaatacccaggccccctccaccatggccagccggggtgggg

SEQ ID NO: 31442 - DNA, 75 bp, Homo sapiens
cgtctctctgctgcggcgcggggaccgctgtgctctcgatttctgaggggagcacagctctatggatcaacactt

SEQ ID NO: 31443 - DNA, 75 bp, Homo sapiens
ttagaggccgctacagaagtccttagcatccagagatgagtttccatgtggctttacttcacctgccaatagagg

SEQ ID NO: 31444 - DNA, 82 bp, Homo sapiens
tgatcaggtggaacagattcagaaggagcaggattaccaaagggttcctttgcccaaagactcaacaggtgcagcagatccc

SEQ ID NO: 31445 - DNA, 96 bp, Homo sapiens
gcctcgttcacggttctatgctgcagaggtcacatcggccctcatgttcctccaccagcatggagtcatctacagacatgggatgtagagctggaa

SEQ ID NO: 31446 - DNA, 51 bp, Homo sapiens
ctattatctcccctgcccagagatcttagacggggtctcactatgttgccc

SEQ ID NO: 31447 - DNA, 96 bp, Homo sapiens
gaagaggatggcaaaggtggctaaggacctcaacccaggagttaaaaagagatggtgaccttgctctgtggcccaggctggtctcgaactcctgga

SEQ ID NO: 31448 - DNA, 82 bp, Homo sapiens
ccggacggtacttctgccactgctgctccgtggagatcgtcccgcgcctgccgcttccccgggcgctgcctggacaggcctg

SEQ ID NO: 31449 - DNA, 75 bp, Homo sapiens
attttactttcgctacccaatcattgaagtcaacaagagagacatagtcttcctggtggatggctcatctgcact

SEQ ID NO: 31450 - DNA, 74 bp, Homo sapiens
ctcacctctcaccgcgcatgtttggagtgaaactggaacgccaagctgaagaagaacgaatacggaagcacaaa

SEQ ID NO: 31451 - DNA, 101 bp, Homo sapiens
cctgaatggcgggaagtgtgaagcggccaatggcacggaggcctgcgtgtacttccagtgcccacccaagtttggtctcttcgcgcccatccacaaagtga

SEQ ID NO: 31452 - DNA, 75 bp, Homo sapiens
ggatcatgtctggtggctccgcggattataacagggatagtaaagctctgaaggatgaaaatctacctcctgtca

SEQ ID NO: 31453 - DNA, 75 bp, Homo sapiens
aagccttttccgttgccggtgccggcctagcgtcctggaattacttcaatcaagcaattcgaagttttcaagtag

SEQ ID NO: 31454 - DNA, 90 bp, Homo sapiens
gaatttctctttagttctttgcaagaaggcagaggtgatcatgaactaccatgtcggggagacggtgctgtccttgcagaagaccacgct

SEQ ID NO: 31455 - DNA, 100 bp, Homo sapiens
gacaactggtgccggagggacaaaaagcaatgcaagagtcgctttgttacacctttcaagtgtctcgggaaatcctcattgacgattcaatttgttgaag

SEQ ID NO: 31456 - DNA, 90 bp, Homo sapiens
cagcctcagagctggtggggagacagcatgccactgattttgcaaaggatgaaaatattacaaaaggcggtgaagtgacagatcattctg

SEQ ID NO: 31457 - DNA, 75 bp, Homo sapiens
gggccccatctgccagctggccttcccgaaaactacccctgagtgtggtcccacaggatatgtagagaaaatcac

SEQ ID NO: 31458 - DNA, 87 bp, Homo sapiens
gcaacatggtgcggtcggggaataaggagcttcagtttcagcgactcacccgagaactggaagtggaaaggcagattgttgccagtc

SEQ ID NO: 31459 - DNA, 90 bp, Homo sapiens
caccggaggtgctgctctcttcgcaccgtcggtcctgaccgccagcctgtcgtacatggtggggatgatcgccagcttctacaacaccga

SEQ ID NO: 31460 - DNA, 75 bp, Homo sapiens
gatcctgggctgcacatccccccgactgtccaaagaggtggaggccgttgttttgaacaggaaaatcagcgacta

SEQ ID NO: 31461 - DNA, 49 bp, Homo sapiens
caagcctccagtctcaaattatccagcattgcagtgtcgagatggctat

SEQ ID NO: 31462 - DNA, 75 bp, Homo sapiens
aaaacacctacagaatctttttgtaccaagcgcctgattgaggaagagaacatgctggcaccatctctgaagcag

SEQ ID NO: 31463 - DNA, 92 bp, Homo sapiens
tctggctaccactacggcgtggcctcctgcgaggcttgcaaggccttcttcaagaggactatccaaggaacgtcaaggtcgtgggaaataaa

SEQ ID NO: 31464 - DNA, 97 bp, Homo sapiens
aaacaaaattctgaactcaggacttggcaaaattacatgatgcgtaatgctgtgctggcagccatggcggagatggtgctgcaggttctcagtggcg

SEQ ID NO: 31465 - DNA, 100 bp, Homo sapiens
tgaattttggaagaagagacgaactgtgaggagagtaaaccaagaagaaatccacagatttagttctgtggaagtgctgcatcagtaaatgctaattttg

SEQ ID NO: 31466 - DNA, 75 bp, Homo sapiens
tcagcagggggccagctcaggacacacagacccagctggaactcgatgcctgaggaagtgcaccatggagaggag

SEQ ID NO: 31467 - DNA, 74 bp, Homo sapiens
ggggcacagttgaagaagcgaccgagggactgggagtcgttagtgaggaggaattttgttgtcagagaataaaa

SEQ ID NO: 31468 - DNA, 75 bp, Homo sapiens
ggaagatactgcagagatattctactccatctcattcattgtacaggtatcgccgggcaggtgtccatagatgcc

SEQ ID NO: 31469 - DNA, 80 bp, Homo sapiens
cgcctgatcgagtccctccggaactcacactccaggtacagaggtgcagttccatggtacaccataaatcttgacttacc

SEQ ID NO: 31470 - DNA, 75 bp, Homo sapiens
gagagaaaatgatgtcttgtgacatttccagataactggtgctggagaatctggtaaaagcaccattgtgaagca

SEQ ID NO: 31471 - DNA, 100 bp, Homo sapiens
cgactcttcctggtgaagcatctgatgcacgttccatccggcgctcagctgggcttgaggtctggtgtggcagatgtggatagctggaccctcctgggtg

SEQ ID NO: 31472 - DNA, 74 bp, Homo sapiens
ttggactgaacttaaatactgataggtcctcagccagcagagccacgttccttatgagcaccgtgggtttattt

SEQ ID NO: 31473 - DNA, 75 bp, Homo sapiens
gttgccttggaaaatgccaacgccgtgtctgaagttggccaagtgaaatttgatccacccttaagaaaggagaca

SEQ ID NO: 31474 - DNA, 95 bp, Homo sapiens
catccaagtggaggttcctacagagattcatatgagagttatggacttatcaaactggtttcaaagcacagagctcaagtaatttacaccagaaa

SEQ ID NO: 31475 - DNA, 100 bp, Homo sapiens
gcaagtgcagatagatggccttgtagatcgacacttgagaaagctggatcaggaactggctaagtttaaaatggagctggaagctgataatgctggaatt

SEQ ID NO: 31476 - DNA, 126 bp, Homo sapiens
gcgctgcttgctaaagagccgagcacgcgggtctgtcatcatgtcgcgttacgggcggtacggaggaggtttggtgcacctcgatttggaggaagtagggcagggcccttatctggaaagaagttt

SEQ ID NO: 31477 - DNA, 75 bp, Homo sapiens
ctccctctgggcgtcctctcaggaggcaagcagactatcgagacagaattcttccatctctatgacaacaagccc

SEQ ID NO: 31478 - DNA, 90 bp, Homo sapiens
atcagcagatcaaaggataaacttgaccaggtttccagtgaaataagcagtaagctcctacaggacattttaaaactacataaatgtgcc

SEQ ID NO: 31479 - DNA, 90 bp, Homo sapiens
ctggaaaaagagaagtcaagggaacagatgagctcccaacccaagtcagcttgtggaaacgaaggatttgatgccctggatccctttatt

SEQ ID NO: 31480 - DNA, 75 bp, Homo sapiens
gaaagaagtgggaaggatctgcgcgggaaaggacttagaagccttacaaatacatctgtgcattcttgcttcaga

SEQ ID NO: 31481 - DNA, 73 bp, Homo sapiens
tacatgaactcagggccggttgtggccatgattgttgcctgccctgatgtgcttcctcggaagatggcaacac

SEQ ID NO: 31482 - DNA, 100 bp, Homo sapiens
aacagaagtatgaggccagccgggaggacatctacaagcggatggtgaaaggcttttctaaccgtgctcggaaagcccgacttgctgagccccagctgcg

SEQ ID NO: 31483 - DNA, 76 bp, Homo sapiens
aaaacaagctcagaacgctcgccgattctaccattatggtgtggggatattcagctttgccaggtatggcagtgat

SEQ ID NO: 31484 - DNA, 83 bp, Homo sapiens
ggactgcgagggaaagggggccttgttgagtccgccaggtctggctgccgtcgtcccgcccttgccctcagcgcccacaccag

SEQ ID NO: 31485 - DNA, 76 bp, Homo sapiens
agcggccgcgacgctatggcgcactggagtaccctgttcctggcatatgcactggaacggctgaaggtcatgtgcg

SEQ ID NO: 31486 - DNA, 100 bp, Homo sapiens
caggaattgaattataaacttgaattgcactccagtgaggaagctgacaaaaaccaaactcttggagaagctgttaagacacgtgctcccgagtcagaag

SEQ ID NO: 31487 - DNA, 75 bp, Homo sapiens
gtctgtgtcaaacatccatatcataagtggaattttggagatattcaaaggtttttagaacttcagccataaaaa

SEQ ID NO: 31488 - DNA, 75 bp, Homo sapiens
tggaggtggatctgaagaacggaaggaagactcgccagccagatgccaaagatggggattcatacgacccctatg

SEQ ID NO: 31489 - DNA, 100 bp, Homo sapiens
atcgaggctgtcctctggtgagaaggtggtgaggcttcccgtcatattccagatggaatcagtgtgagtggctttcccctgtccagtccttttcggcagg

SEQ ID NO: 31490 - DNA, 100 bp, Homo sapiens
cggaagcagcacatggtgaatgccacacccttcaagattgctcgaggccaggtgaatgaaatcctgtgccgttcttcagtctggagtgccttcaaagatc

SEQ ID NO: 31491 - DNA, 100 bp, Homo sapiens
ccctgacatcctgcttgggtccacggactactccactcagattgacatgtgtcatctggggacctggagaatgatgagcaggcagccagtgccatctctg

SEQ ID NO: 31492 - DNA, 83 bp, Homo sapiens
gttcgaggagtgcgtcaaggactccccgcgcttcagcccgcggcgccatggctcacgtcggctcccgcaagcgctcgaggagt

SEQ ID NO: 31493 - DNA, 75 bp, Homo sapiens
agcaaaaattcccgtaccaatgtcagtgctagggaagaaagacatgagtcacggaggcctttatctacatcacat

SEQ ID NO: 31494 - DNA, 75 bp, Homo sapiens
tctggtccgcagcggcaacagtaacgaaaaacagggctgtgagacgtggtcttgtaacacagtggttaagaatgt

SEQ ID NO: 31495 - DNA, 90 bp, Homo sapiens
gggttccggagcgccgccgccgccgccgcggacaatgagaggtgtgttccagagaacaagccttcagacatttgctatattgacgctgag

SEQ ID NO: 31496 - DNA, 100 bp, Homo sapiens
gatgattctttgggattgggacttaaaacaatggtataagcctcattatcaagaacaaatgtggtatctggggctggcggtctgagaagatggaaactgt

SEQ ID NO: 31497 - DNA, 50 bp, Homo sapiens
aatctgttcgccaggcaaccaagcggtacatgtcccagagcaagcacacg

SEQ ID NO: 31498 - DNA, 82 bp, Homo sapiens
ggaggaagaacgggagttcagaaaacagttccccctgcatgaaaagattactgacagccctgtcctaggagcacaacgtccg

SEQ ID NO: 31499 - DNA, 75 bp, Homo sapiens
agacccccgggtgaagccaccgtcatcatgtctgaccagcgagtaaccagctcataaatcacatcgaacagtttt

SEQ ID NO: 31500 - DNA, 80 bp, Homo sapiens
ccatcgaacccatccgcgacttcctggccatcgttttcttcgcctccataggtgaatggaagagaatccgaagaagaaaa

SEQ ID NO: 31501 - DNA, 75 bp, Homo sapiens
ggtggtctgtctgctcctggcatgccctgccacagccactgcatggtaagtttagcgatggctgttcttgcggaa

SEQ ID NO: 31502 - DNA, 75 bp, Homo sapiens
cgcctggcaggccctgcgcaccagaggagcaggagcggcttcgcttggagcaggagcgagagcaggaacagaaga

SEQ ID NO: 31503 - DNA, 75 bp, Homo sapiens
cgacgggccgagcctgccactctcttattttagccttaaaaactcttcaggaaaaaattcatcgtttagagctgg

SEQ ID NO: 31504 - DNA, 100 bp, Homo sapiens
ggatccgacttgccggcagaacttacgctgcgggaccccgggcactgttgctgctgcgggagattggcggcagtaagcacacaatgaatgatcacctgca

SEQ ID NO: 31505 - DNA, 90 bp, Homo sapiens
ctttagatgacgtgatggattatcttgttaacaacacgcccctcaactggctggggacccaagtaacagggaggaaagcagatgttatta

SEQ ID NO: 31506 - DNA, 98 bp, Homo sapiens
ctgccttgggatccggagggaggaagctgggacacccgggagtcaggaaatggcaaactcagctttcaccagacccaggtgtcccagcgcctggccac

SEQ ID NO: 31507 - DNA, 90 bp, Homo sapiens
cagttatcaagctttagagcctggctactcacagttgaagcctgattgcaggtcgtggagggcccccaagacccaacagagggatgccgc

SEQ ID NO: 31508 - DNA, 76 bp, Homo sapiens
ctgcagccacatactatccgtttgttcaggaaccaccagtgacagagggagggatgctgtgcacactgtggaaggc

SEQ ID NO: 31509 - DNA, 75 bp, Homo sapiens
ttgcgtcctagagtgggaaaaaagcagaggccagggcgccggtagatgacattaatgctgataagaatatctctt

SEQ ID NO: 31510 - DNA, 80 bp, Homo sapiens
agagactaaagctggacacccgcccgccgaacactctgctccagccaaggtggtgagggcagctgttcctaaacagcgca

SEQ ID NO: 31511 - DNA, 90 bp, Homo sapiens
tcgtggaccacaacagccgcaccactacgtggaacgacccgcgcgtgccctctgagggccccaagtacggcaagaagaagctgaaatacc

SEQ ID NO: 31512 - DNA, 71 bp, Homo sapiens
gggaacgattgggctgagcagaggacgacatgttgcttttcgtggagaaatctccaacctgctggtggcta

SEQ ID NO: 31513 - DNA, 101 bp, Homo sapiens
agaccctacagaccaggcactccgtcagtgagatggcctccaacaaggaaagaaaggagaggctatccaaatttgaatctattcgtcattcaattgctgga

SEQ ID NO: 31514 - DNA, 90 bp, Homo sapiens
cgcggcgcttgttggcggcgctgcgaggccagagcctagggctagcggccatgattcgacggaggcgccttgcacgacttgctggtggac

SEQ ID NO: 31515 - DNA, 75 bp, Homo sapiens
gtgggatcgatgtttcaatattggaagcgctttgatttacagcagctgcagctgcctgtggaggaaccgattgtg

SEQ ID NO: 31516 - DNA, 100 bp, Homo sapiens
gacccccaggtgagccccatgcactgcctggacgaggaaggcgatgactcagatgggacccggcgacaggaggcatgaggggcccccggccgaaatgaca

SEQ ID NO: 31517 - DNA, 71 bp, Homo sapiens
gacgatggctcttttcatatcagagtggaagtatgcgagacttaagagctcaagtgactagtggtctcctg

SEQ ID NO: 31518 - DNA, 82 bp, Homo sapiens
tttgaacaggttaatctgttggattctaatgcagttcatcacatcattcatgattttcaggactctccttcagcaactccag

SEQ ID NO: 31519 - DNA, 100 bp, Homo sapiens
acagcggcaaggtctccaagtcccagctcaagattttctggcatccttaaatcttgtgtcaaggattggttataatataaccagaaaccatgacggcggc

SEQ ID NO: 31520 - DNA, 74 bp, Homo sapiens
tgagaccaccgcagcccactccctagatttctccacccaggtgaactcctccctcacctccccgacggggcgag

SEQ ID NO: 31521 - DNA, 75 bp, Homo sapiens
cagtcctcgccggcgagttcagcgaagttctactacatcaccctgctacgagaccccgtgtcccgctacctgagc

SEQ ID NO: 31522 - DNA, 100 bp, Homo sapiens
gtttctgtcacttgtgtgatggtcagggaactgctcgcagaaagaagaaggtggttcatagaacagccacagcagatgacaaaaaacttcagttctcctt

SEQ ID NO: 31523 - DNA, 50 bp, Homo sapiens
gaaaaagggccagtgtctcccaggtagcaaattatggagttggaggacag

SEQ ID NO: 31524 - DNA, 101 bp, Homo sapiens
tccaacacataaaaattatttatccaacagctcctcccaggtgcggcggggagagaagtttgttccttggggatttctatcaaggttgatcatacactaaa

SEQ ID NO: 31525 - DNA, 89 bp, Homo sapiens
gaagagcagagctttggtatcctactcacagcgccaaaactgcaggggccaagttggagtgcctcaagcttattgcctctcaaaaattt

SEQ ID NO: 31526 - DNA, 50 bp, Homo sapiens
tttgagctactgggctgtgagctgaacgcaccgggtgctcagcagttctg

SEQ ID NO: 31527 - DNA, 80 bp, Homo sapiens
gtgattctcgtgcctcagcctcctgagtagccgggactacagaaactggcgatggaatatgagaggagccctctggaaag

SEQ ID NO: 31528 - DNA, 100 bp, Homo sapiens
gcaccacgacggcgccatcaccgagcgcttgatgtgcgcggagagcaatcgccgggacagctgcaagttgattatggaagattcccacaagagtaccacg

SEQ ID NO: 31529 - DNA, 75 bp, Homo sapiens
ctttccctgcctatttacaagtaatgagagatccaaacaccaagcgctccaggggctttgggtttgtcacatatg

SEQ ID NO: 31530 - DNA, 83 bp, Homo sapiens
accccttctgcccggcgcttcggcccgggccgctcaggtgcagacaatgcagatcttcgtgaagactctgactggtaagacca

SEQ ID NO: 31531 - DNA, 75 bp, Homo sapiens
atttttgtcacctccaacaacatccgcgagatcgagagtggtgaaaccagaacaatatctcactttcattatact

SEQ ID NO: 31532 - DNA, 98 bp, Homo sapiens
caggctctcctggatccgtacctaaaaatacatctcagacggcagctattactacaaaggatagaccctttttccggtaactaaacttcttgcgggca

SEQ ID NO: 31533 - DNA, 50 bp, Homo sapiens
cgtcaatcagagcgtcctgtgcgcttggatcctagcatgactatacattg

SEQ ID NO: 31534 - DNA, 75 bp, Homo sapiens
ccgccatccagccaccattccaagaatacttcagagagtcagagttgtgccagaagtctcttaatggcagataga

SEQ ID NO: 31535 - DNA, 100 bp, Homo sapiens
tttagttgagcaccggaaagaacagaaagatgctggtttcgagttttggagatccttgttttttatggaacacagttctgtaaaattttcataagattcc

SEQ ID NO: 31536 - DNA, 100 bp, Homo sapiens
gttcacacaaactggtcagcgtttccctggagaggaagaggcaagagaaaatgctgctgtgaagacccaattaaagctttcacataaatgaagctacagc

SEQ ID NO: 31537 - DNA, 82 bp, Homo sapiens
acccagcctgtttcacttcttggtccctttctagagataggagaagagagagatcgctgtctcgggagagaaatcacaagcc

SEQ ID NO: 31538 - DNA, 100 bp, Homo sapiens
caaatgcaaaaaataaaggaacagtttctccaacaaaaggtgatgacaatgggaagaaggccaacaaccccaaccactgcaactgcatcatagaccagat

SEQ ID NO: 31539 - DNA, 90 bp, Homo sapiens
gcggggcagaggcggcggccgcagcggcgcagctgatagcaggaacaggtggagcccccagaaccatgtgccgagcccgctgcttttgga

SEQ ID NO: 31540 - DNA, 83 bp, Homo sapiens
ctcagcatgcttagcattcgagagaacaaaattaaacaactacctgctgaaattggagaagacagactgctgctttggacctg

SEQ ID NO: 31541 - DNA, 74 bp, Homo sapiens
ggatggaggacgttaactctaacgtgaacgcggaccaggagatgccatggacaatattaccaggcagaaccaat

SEQ ID NO: 31542 - DNA, 90 bp, Homo sapiens
cactctctgaggacatctctgcaaaggccccagcggcccaggtatctgtgcctaggtttgctgtggggattgtaataggaagaaacgggg

SEQ ID NO: 31543 - DNA, 101 bp, Homo sapiens
tttttctggatgaacctgggcggatgtcagaccagagaagagcacagaatgtaccagagaggtcctgcatgccagtaaaactactcatgtcagctgttctg

SEQ ID NO: 31544 - DNA, 75 bp, Homo sapiens
ggagcggagtctgccaggtggtgtccatcatggacatgaacaagctgagtggaggcggcgggcgcaggactcggg

SEQ ID NO: 31545 - DNA, 78 bp, Homo sapiens
gatttgttaaggattccaagtaactcttatttgtacctttgtgttggatgaatttaagcgcaagtactccaatgagga

SEQ ID NO: 31546 - DNA, 78 bp, Homo sapiens
ccccatatatgattttctttaaggatggtttagaaatggaaaaatgtatttcatctgctgcttgcggctatggattca

SEQ ID NO: 31547 - DNA, 50 bp, Homo sapiens
ttaaggattccaagtaactcttatttgttgatcgaatctacagatgcaga

SEQ ID NO: 31548 - DNA, 90 bp, Homo sapiens
ttcgcgctcttcttcttcttccagggactcagcacctggcagttgacagtgaaagccttacacgtgtgtccagaatctggcaggtcccca

SEQ ID NO: 31549 - DNA, 83 bp, Homo sapiens
gggacaatggtcaccgtctcttcagcagttggaattgatcacaccttttcagttgtacttcaatcctgaattaatctttaaac

SEQ ID NO: 31550 - DNA, 50 bp, Homo sapiens
tcagatcagagtgtggtcgaatgtaaggtgattgcccacagtgagtatca

SEQ ID NO: 31551 - DNA, 74 bp, Homo sapiens
tgaaattatggtgatgctgggggaaaatgctgtagtgatggtcctaaatagcatgagtgtcagctggagcgccc

SEQ ID NO: 31552 - DNA, 100 bp, Homo sapiens
aactggccaagaacatcttctacatgccctattggatgatttatggggaagtgtttgcggaccagatagaccgatgagattgtctgaaacgaagaatagg

SEQ ID NO: 31553 - DNA, 99 bp, Homo sapiens
tggtgtgctttgagaccctgttcgccaacacctgcgaggagtgtgggaagcccatcggctgtgactgcaaggtccatgtgaaatctgaggtccttgctg

SEQ ID NO: 31554 - DNA, 100 bp, Homo sapiens
gttccacaagaagtgcagcttataatccaagctattactcagagtccagaggaagtatttatggcaatccggaatcctctggagtggcactgcaagcaaa

SEQ ID NO: 31555 - DNA, 100 bp, Homo sapiens
gtgtgagacacacgccatgctgccctatgaccagtacctgcaccgctttgctgcgtacttccagcagaattatatccagatcgagagacagaagattctg

SEQ ID NO: 31556 - DNA, 80 bp, Homo sapiens
gttttggccactggacatcagaaccacattttgggtttgaagaatcttctacatgatctgttagtcaagtgtattggtga

SEQ ID NO: 31557 - DNA, 74 bp, Homo sapiens
ccagggtgtctggtccacgacctatcctaggcgccatgttggtagctggcagtgttgtgatggcttttgaagaa

SEQ ID NO: 31558 - DNA, 82 bp, Homo sapiens
gattacagatgtgagccacttcgcccagcccaccgttttatttttacctgcctagagctggaacgttacctccagagcgagc

SEQ ID NO: 31559 - DNA, 83 bp, Homo sapiens
acctgcagaaggtctctggagacatcttcagcaggttcaagaagacgtggaagctgcgggctctgaaggaaggcaagacaagc

SEQ ID NO: 31560 - DNA, 90 bp, Homo sapiens
ctgcaccacaaggtgtacgatttgaccaaatttctggaagagtctcaaaccatgaattatgtgggacagctggctgggcaggtgattgtc

SEQ ID NO: 31561 - DNA, 75 bp, Homo sapiens
aggacatctctgtgccaggccagaaaccgcccacctgcaggtgaggtcccagcttgaagagaaagaaaacaagaa

SEQ ID NO: 31562 - DNA, 100 bp, Homo sapiens
tccaaacacagactgtttgacttagaatcttcccttttttactccattcaagagcagcattcataaatttccaggtcctggacccaagccagaagcctct

SEQ ID NO: 31563 - DNA, 100 bp, Homo sapiens
gtgatattgaccatgatggaatgcttgacagagatgagtttgcagttgtgaacatgattaaagatgatgggacagttattcatttcaacaatcccaaagt

SEQ ID NO: 31564 - DNA, 100 bp, Homo sapiens
ggctggggcggctggagagccgggagtcgctgggtgcgtggggctgcctcgccgcgtctcgccacggtcgtttggactgggagactcttgtgcacgaaaa

SEQ ID NO: 31565 - DNA, 74 bp, Homo sapiens
atgatgttgtgattgagtttatattcaaccagctggaagtgaagaatataacgggcgcctggcagcagaactgg

SEQ ID NO: 31566 - DNA, 98 bp, Homo sapiens
ggggaggaggcggtggccctgctggaggagctctggggctgaagaagatgcagagcagcctgaagctggtggactgtatcatcgaggtccacgatgcc

SEQ ID NO: 31567 - DNA, 98 bp, Homo sapiens
atcttcaaagctgaactgaatgagtttcttactcgggagctggctgaagatggctactctggagttgaggtgtttatctcagtggatgatctggaacc

SEQ ID NO: 31568 - DNA, 100 bp, Homo sapiens
ttttgatgtggatgatgccaaagttttattagcctttctgagaaaagtctacagcattctttctctgcaggttctcttaactacagtgacttcaacagtt

SEQ ID NO: 31569 - DNA, 82 bp, Homo sapiens
agaaaacctgcagaagaactggcttcgggaattttaccagcctcccggcatggtgctcaaggccttcttccccacgtgctgc

SEQ ID NO: 31570 - DNA, 100 bp, Homo sapiens
caggcctgcattgaggccaagcacgatgcagcactgggcccggcgtctggagcaggaggtcgacggcgtgatgcggatttttggaggcgtccagcagctc

SEQ ID NO: 31571 - DNA, 133 bp, Homo sapiens
ggacctccaaggaagccacgtgcagacatctacaaccttcgatctcctgacgaagacgagttgtactgctgtcacaggaaatggacgctggattacaagcatggcagctcaggcagcagaagttgcaggaaga

SEQ ID NO: 31572 - DNA, 83 bp, Homo sapiens
ctctcatctcgctcggctgcgggaaatcgggctgaagcgactgagtccgcgatggaggctatggtgaactaaacggtaatgct

SEQ ID NO: 31573 - DNA, 75 bp, Homo sapiens
atcgtggcaagcgagcccggggtagagatataatgaagatctggaacttgaagatgccattcatacagccatctt

SEQ ID NO: 31574 - DNA, 83 bp, Homo sapiens
cctccatcaggtacaacctcgaggagctctaccaggttgcccgaagctcagcagagagtcggaggctgctttttaaacctgat

SEQ ID NO: 31575 - DNA, 75 bp, Homo sapiens
gaaccctggtcaccgtctcctcagaaattccaacagaatgggtttcctgaaacggatttgcaggaattcctgaag

SEQ ID NO: 31576 - DNA, 50 bp, Homo sapiens
gttctacttcaccagcagcagcggcgtgaattacccttcactaagtcggc

SEQ ID NO: 31577 - DNA, 80 bp, Homo sapiens
gcaggtggtcaactgcagccgtgtattcagccttaggacatggatttgattgacatactttggaggcaagatatagatct

SEQ ID NO: 31578 - DNA, 101 bp, Homo sapiens
ttgcagatcgggagcgcaaggtcgccctcaaggccatgatcaaaacggatcatagacggtatttctatgtaaacgaacagtcgggcgagtctcagtgggag

SEQ ID NO: 31579 - DNA, 88 bp, Homo sapiens
ttactccagtaaaaattgaaggttatgaagatcaggttgtggtttctcgatcaggaccatcaacccctcatgtgaattttctcctgga

SEQ ID NO: 31580 - DNA, 100 bp, Homo sapiens
gatcttgaaacgttgagaaatataattcaaggaagaccgctgcctgctgatctgagggccaaagtttggaagctctcaaaggtctatggccctgtgttca

SEQ ID NO: 31581 - DNA, 100 bp, Homo sapiens
gagaaattgcccatgggctccataaaaaatgtggtcagtgaacctatcgaaggacatgaagactaccacatgatgaatgtgacagtgatgataacatggg

SEQ ID NO: 31582 - DNA, 100 bp, Homo sapiens
ctactccatgatctcctcggtcctgggtgggcagacgggaggcaccatcgggctgctctatgtgtttggacaggaggcaaaaccttcaactgaggacttg

SEQ ID NO: 31583 - DNA, 100 bp, Homo sapiens
ccttctctgctgtctccttctcttcctcagggctcccgtgtctgctcgccctccgacgctgctcagcctcccaaagtgaaatgcctgaccaagatctggc

SEQ ID NO: 31584 - DNA, 124 bp, Homo sapiens
ctgtcttcagatcttcacagcacagttcctgggaaggtggagccaccagcctctccctgacaatgcagatcttcgtgaagactctgactggtaagaccatcaccctcgaggttgagcccagtga

SEQ ID NO: 31585 - DNA, 75 bp, Homo sapiens
tatggcgttccctcacctgcagcagcccagctttctactgtggaatgcagtagccctctgggcctgggatattgt

SEQ ID NO: 31586 - DNA, 97 bp, Homo sapiens
caaatttttggatgatgatggatccatttctcctattgaggagtcaaccaacgcacctcttgctttttcctccaaagtatgttatgttaagtttcgt

SEQ ID NO: 31587 - DNA, 98 bp, Homo sapiens
gaagagagaccttagaaaggatcaggactggcggatagacgatcagctgaacactctcttgaaggagttccagctaacagaggagaacactaagctcc

SEQ ID NO: 31588 - DNA, 82 bp, Homo sapiens
tcttccggtcaatcctgagtactcatcaacacgaaatcaggaattgaatgatctggcacgggaccctccagcacagtgttca

SEQ ID NO: 31589 - DNA, 90 bp, Homo sapiens
gacgttaactctaacgtgaacgcggaccaggagaaaccaatagagccatggcgactccctctgctgccttcgaggcccttatgaatggtg

SEQ ID NO: 31590 - DNA, 88 bp, Homo sapiens
cgacgccaaatacgtctgggcagccacggccgggggcgtctttcagagcattacggagtcggagaggatggcaggggccggaggccag

SEQ ID NO: 31591 - DNA, 83 bp, Homo sapiens
ctggcatattagcgctagccctgcagacagaggtgtgctgacgacctgctacaacagaactggatgctgacaaatatgagaat

SEQ ID NO: 31592 - DNA, 74 bp, Homo sapiens
agcgcgcctagccggctcgcgaccctggacccatccaaggacccctgcctgaaggtaaaatgcagccctcacaa

SEQ ID NO: 31593 - DNA, 75 bp, Homo sapiens
cgccggccgagggtggccctaggggcagcgagcaagacagcaagcagatgtgtatatctcatgattgatatggag

SEQ ID NO: 31594 - DNA, 100 bp, Homo sapiens
ctgtgtcagatttctatgttcctgtctctgaaatgcctgaacacaagatccagtcatctgggggcccactgcaggtgatcgaggagttctacaaccagac

SEQ ID NO: 31595 - DNA, 85 bp, Homo sapiens
acttatatttccgtgagaaaaaatttgctgttgaagttcatgatccacgaagggagcttcaggtcaacttagtacgctcacattc

SEQ ID NO: 31596 - DNA, 100 bp, Homo sapiens
tatatgaaaagatcgtacattgtcagaaggcagggctaagttctaaaaacatcagttcatctccaagcgttgagagtttgcctggaggaagagaattcac

SEQ ID NO: 31597 - DNA, 75 bp, Homo sapiens
agaagaccccggcgctggtgaacgccatacacactgctgctatggatatgctgggaggacctggtatcgaaagcc

SEQ ID NO: 31598 - DNA, 100 bp, Homo sapiens
catcaggtccacccatctggccgggcagtaccttcttcaagagaaatggagcccttctccaaggtgtcatggagaaactccagctgggcccagagattct

SEQ ID NO: 31599 - DNA, 86 bp, Homo sapiens
gagaacggcaacccatccagatcaccatgccgaaaaagaaggggagcgttcaattccaaacagctgctttatttggagaaataccg

SEQ ID NO: 31600 - DNA, 51 bp, Homo sapiens
atggagagtggctggcaagttcatgaaaatgtttcaacgtgcgcaagagtt

SEQ ID NO: 31601 - DNA, 87 bp, Homo sapiens
ataagattttaattgaagctggaaagcttggacttgtgtatactcttgatgtaccagatgcattctattactgttatagtccagacc

SEQ ID NO: 31602 - DNA, 100 bp, Homo sapiens
gggacattccaacacagagattgacgtgagtgaagtggcccaaaaggctgcccaatctctgagaagcctgcatggcaccaagtacaaagtgggaccaatc

SEQ ID NO: 31603 - DNA, 100 bp, Homo sapiens
gacagatcctctgctcattgccatgaaggaactcaagaatatacagatgttgccacaggaatctaatctgaaatcgtacaaatggaaatgacgctacagg

SEQ ID NO: 31604 - DNA, 50 bp, Homo sapiens
ctgatagactgattaaaccacagaaaagagtctcatcgtggaaggcaaga

SEQ ID NO: 31605 - DNA, 98 bp, Homo sapiens
aagacattcagtttcaccagatttaaaatatgtccttctggcatatgatgtcaaacaggagctccagaggagatgtaataccttaattactttgattg

SEQ ID NO: 31606 - DNA, 100 bp, Homo sapiens
cctgcgcagccatgcctggtaccacggccgcatcccccgacaggtgtcgtgaaaactacccctaaaagccaaaatgggaaaggaaaagactcatatcaac

SEQ ID NO: 31607 - DNA, 75 bp, Homo sapiens
cgtgaccgagagcgcgaatatcgtcatcgttagaagagttgcatgctgagaatttgaaaaatgaagatgatgtag

SEQ ID NO: 31608 - DNA, 83 bp, Homo sapiens
cgaggaacgagagcgcgaagctaagaatatactgatgataatgctctgattcctaagaattcttctgtaattgttagaagaat

SEQ ID NO: 31609 - DNA, 127 bp, Homo sapiens
gcagtattgagctcaggaggcagtgagtgttaaggaatgggtgtaaaactccaaatagattgggagaaaatcaaagccaaaattgagatggaaattacaaaagaaagagagcaatcatcaagcagcc

SEQ ID NO: 31610 - DNA, 100 bp, Homo sapiens
atattgagaatggtggtgtggctgtcctcactgggaagaagagggtacaccacccggactacaacaatgagttgacccagtttctgccccgaaccatcac

SEQ ID NO: 31611 - DNA, 101 bp, Homo sapiens
ccgcagcgccccgcagagcagtcgaggaacatcatcttcagcgggctatttcagcacagcaggtgtatggcgagaagagggataatatggttataccggtc

SEQ ID NO: 31612 - DNA, 100 bp, Homo sapiens
tttctcatggatgttcttcttcgagtatttgtagaagggacctgctgtcctttgagctgttggatataaacattgttcaagagttggagagagtgcccca

SEQ ID NO: 31613 - DNA, 100 bp, Homo sapiens
gttatacctgaaggggaatgctgcccggtctgctccgctactggaattcctcctgatcagcagagactgatctttgctggcaagcagctggaagatggac

SEQ ID NO: 31614 - DNA, 74 bp, Homo sapiens
gtgcccatgtcaagaggtttgtgttaaggtaacaaatgctgttttaaagctgattgaaaaggaaaggaatggtg

SEQ ID NO: 31615 - DNA, 75 bp, Homo sapiens
ctgcgctgtcagcgatagcccagtggatggccattccaggagttggtaaaatattaaagaagatcaacaaggcca

SEQ ID NO: 31616 - DNA, 75 bp, Homo sapiens
ctgtgactatcaggtcctcgcgctgccgcggcatccaggcgttcagcctacttctgcttcctcctggccgctctg

SEQ ID NO: 31617 - DNA, 100 bp, Homo sapiens
tcattggccggcgatatgatgatcctgaagtacagaaagacatgtgcccaaagctgaggaaacttgtcctgaacaagaaccacctggtgaccctcccaga

SEQ ID NO: 31618 - DNA, 82 bp, Homo sapiens
cagaaatacatgcaacatggtgactggtggaaccaaagttttaatcaaagaaggtggtgttcagttgctgcttacaatagtt

SEQ ID NO: 31619 - DNA, 100 bp, Homo sapiens
ggtatctaccttagatggagttttagaagtccgaaatgaacatttttggaccctaggttttggctcattggatgagaacaagttgagcagtgccaacggc

SEQ ID NO: 31620 - DNA, 137 bp, Homo sapiens
cccgggtgctgctggttagtgtgctctgagggagggtccgagccagccgctgttttgccggaggagcccctcaggccaactgataaatttcaaacggaagagagtggcagcatttagaaagaatctaattgaaatgt

SEQ ID NO: 31621 - DNA, 83 bp, Homo sapiens
caatgagaggacccgcgtgggcaccctgcaggtggtcagacatgtcatcaactcagctgaaaaccgtgaggacatactgaatg

SEQ ID NO: 31622 - DNA, 82 bp, Homo sapiens
gtggagcttggtttcgggatctcggtgctgcagacggcgagacctcctgcacagaatttcgctaaggagtttgtgatcagtg

SEQ ID NO: 31623 - DNA, 88 bp, Homo sapiens
ccctcacccagaaacccaggacagtagcacacagactgacacatctcacagtgggctgccactgcagagccccgccatggaagacacg

SEQ ID NO: 31624 - DNA, 50 bp, Homo sapiens
gccgcctagagtggttcagccacaaggagagctgatgttcctggagacca

SEQ ID NO: 31625 - DNA, 101 bp, Homo sapiens
atttgatcccgcctcctatatcatagctttctctcctttgaaaacactaagaataatgtcactgcatcagtttttactagagccaatcacctgtcatgcct

SEQ ID NO: 31626 - DNA, 98 bp, Homo sapiens
gggtttacctgctgttaagaaagatccttcttcgaaagttttgccagtcctggtacctgggataaaagttgcagcgtcccaccatccaccagacagac

SEQ ID NO: 31627 - DNA, 83 bp, Homo sapiens
ctcccgggtggcttacagacgctgccagcatcgccgccgccaggaagccagttgagggaagttctccatgaatgtacgtcaca

SEQ ID NO: 31628 - DNA, 90 bp, Homo sapiens
gttctggatttaagaaccgctcaagaaacaaagcaggcttttaaagaagcagttttttcaccgagccctaaaagtaatgaaaatgaaata

SEQ ID NO: 31629 - DNA, 50 bp, Homo sapiens
aaaggaaaggaagagttctagagagcgggaagagagagagcgcgccgaac

SEQ ID NO: 31630 - DNA, 100 bp, Homo sapiens
tgtgaagctaaactcaatgctgctgtgtgggaagaagatttgtaaagaaaactcttaggccgagacgcatccagagctttcgtgaccggggactgttctg

SEQ ID NO: 31631 - DNA, 90 bp, Homo sapiens
caggaacagggacagcacctcatcccctggatgggggaccacaagatcctcatcgacagagttgcatgctgagaatttgaaaaatgaaga

SEQ ID NO: 31632 - DNA, 99 bp, Homo sapiens
caggcaagtcgccaagcccatcacccaccagcccaggaagcctgcggaagcagaggccaattgcatgatttctggcgtttggattactgggaagatgat

SEQ ID NO: 31633 - DNA, 100 bp, Homo sapiens
cacaggtcacagtaaggccaaaaatgtgcatactcacagagttagagagagggatggtgatacagtttatgtaacttgatggaagaaaatggaattactc

SEQ ID NO: 31634 - DNA, 100 bp, Homo sapiens
ctgggggcgagctgagcacctgtagtcaatcacacgcaggttattcagcttctcaaggctggaaaagcgaaggaagtttcctacaatgcactagcctcac

SEQ ID NO: 31635 - DNA, 71 bp, Homo sapiens
tgaagctccccatcaagggaatgaacttcacactttaccgatttgttacaactcaagcaagggccagcaga

SEQ ID NO: 31636 - DNA, 83 bp, Homo sapiens
ggatatcgacgtcgtgatccagaagtccagagctgaggactgcctgtttgcagagatcctgaaggagctagacgagtgctacg

SEQ ID NO: 31637 - DNA, 100 bp, Homo sapiens
gctcttagcgctcaggtcttttccttccgccgacccgaagtcatcgctgggagtactggttgccctttcctcaggcggagatggacatggtggcctgggg

SEQ ID NO: 31638 - DNA, 75 bp, Homo sapiens
gatgttcatgaagattcaataacagttgcatttgaaaacaatttccaacatggctagatccatcagaaactgaag

SEQ ID NO: 31639 - DNA, 100 bp, Homo sapiens
gccttttccgttgccggtgccggcctagcgtcctggaattacttcaatcaagacgggctctacgagtgcattctctgtgcctgctgtagcaccagctgcc

SEQ ID NO: 31640 - DNA, 50 bp, Homo sapiens
aaaatcaatggccggacgaaagattttggccccaaacagtaattatcaag

SEQ ID NO: 31641 - DNA, 75 bp, Homo sapiens
cgggcactgggcgactctgtgcctcgctgagggttctgcggggagtgtctccagccctgcctgcaggtgccatcc

SEQ ID NO: 31642 - DNA, 74 bp, Homo sapiens
tgagcttgccagagacgggcggcgcaagggtttgtgaaacaggatctgataatcaacctcttggtaataatcaa

SEQ ID NO: 31643 - DNA, 75 bp, Homo sapiens
cgggagcaatgctgacctcggtttcctggacccattccgactcagggcgtctctggccgagcctctttttgtgga

SEQ ID NO: 31644 - DNA, 75 bp, Homo sapiens
aggacctctccagcaatgattacttcagaattaccagtgttacatactatccttttctgggggatcctaggcaga

SEQ ID NO: 31645 - DNA, 51 bp, Homo sapiens
ccatgaggccaaaggcagttgtattgcttattttgtaatagcagtctccgg

SEQ ID NO: 31646 - DNA, 75 bp, Homo sapiens
aatttcctacagttcttgatattacaggaactgaagttattgcttcatcgttctactctgttgttttcacaaggc

SEQ ID NO: 31647 - DNA, 82 bp, Homo sapiens
ctctttgccgtacccaccggagcctggcgcagcctccctctattaccagccgctgccatggcccagacactgcagatggaga

SEQ ID NO: 31648 - DNA, 90 bp, Homo sapiens
cggcagcgctggacacccagcctccagtacagtgctgtggataccaatccactttctctgtatgtcatgcatccattctggaacactata

SEQ ID NO: 31649 - DNA, 100 bp, Homo sapiens
gtttattcgcaccagggtggaaaaaaagggaatagtgttcaaatcactgatggaactggatgacgcttctatttccagatggagtctcgccctgtcaccc

SEQ ID NO: 31650 - DNA, 75 bp, Homo sapiens
tccccagatgggaggacaaacaggattgagaggcccccagcctcttaaggcaagctgactgacagaacagccagc

SEQ ID NO: 31651 - DNA, 98 bp, Homo sapiens
ctgtcacctgggggaccacctggccacccttaccagcaaccatgtccaagggacctgcagttggtattgatcttggcaccacctactcttgtgtgggt

SEQ ID NO: 31652 - DNA, 74 bp, Homo sapiens
agagacaagtttgggattacctttttggaaaagaaatgtatcagggggtgaatctctacattaagaacttggat

SEQ ID NO: 31653 - DNA, 75 bp, Homo sapiens
cgcttattatcggcgagtgaagagactgtacagcaattggcgggttgatgaaaaaaccgtaggagaacctggttg

SEQ ID NO: 31654 - DNA, 75 bp, Homo sapiens
ctactgtccactctgattcaggcctctgacagctcttggaagcaattagacggcatccatgtcaccatcttacac

SEQ ID NO: 31655 - DNA, 100 bp, Homo sapiens
aactcttagataaaatgacgacgtccttctggaagaggcgaaactggtcaaaatgcagatcttcgtgaaaacccttaccggcaagaccatcacccttgag

SEQ ID NO: 31656 - DNA, 90 bp, Homo sapiens
gcagagcctgtccgtcagtccctaggtatccgcactgctcagggtccttcagtgaatctacagacctattttctcaggagctcagcctgg

SEQ ID NO: 31657 - DNA, 100 bp, Homo sapiens
atgaatctgaaaggaaatccggaattatcacagaaatctggacattaatgggaaggccctagccctaatgataaaggcagtggtgccagaaatggagaaa

SEQ ID NO: 31658 - DNA, 83 bp, Homo sapiens
ccagtggggggcttgtgcagtggatctgatggccgcggtgagcttcccatcgacggtcagtgcgcacgttgtaatcagctgag

SEQ ID NO: 31659 - DNA, 82 bp, Homo sapiens
gagtgcgaggcgaggtggctcctgacgctaagagggtcatcgagcagctcggtgggaagcagctggtcatgaaccacatgca

SEQ ID NO: 31660 - DNA, 97 bp, Homo sapiens
gagaggccagctcagacctcccggctcgacaggcggcgcgggcggcggccttgaaccggggcattgctgctgtcaaggaggatgcagtcgagatgct

SEQ ID NO: 31661 - DNA, 100 bp, Homo sapiens
cgagttcctggaccgtgagagcatcaagctcgtgtccatcgggcctcctcccaaggagaacatgagaccacttcatatctggaactctagaaacactggc

SEQ ID NO: 31662 - DNA, 83 bp, Homo sapiens
atcatgacagcagacggatatttgtgggccaggataatggagctgtaatgactctcagcgttctcatctctcttccttcacca

SEQ ID NO: 31663 - DNA, 82 bp, Homo sapiens
ctttcccgagaccgtcctggcgcgatgcgtcaagtacactgaaattcatcctgagatgagcaagagtgagccatggagctac

SEQ ID NO: 31664 - DNA, 50 bp, Homo sapiens
cccaagacacccagagagggacagtgcacctatgatatgtgttttagaaa

SEQ ID NO: 31665 - DNA, 90 bp, Homo sapiens
ctggagagggacgtcctgcagccactcagcaggctgagtgagcaagaggcggagtccaacctgcgcaaggccaagcagggttacgtgcag

SEQ ID NO: 31666 - DNA, 75 bp, Homo sapiens
ctcgaatcattctttgtacagaaattgaaaggcttcaaagctagcagtacaaaattggacagctgtacatgatca

SEQ ID NO: 31667 - DNA, 87 bp, Homo sapiens
aaaattctcttcattctcttggactgaacttaaatactgataggttagaaaatggatttctgactggaatctcaccactgaaaaaaa

SEQ ID NO: 31668 - DNA, 75 bp, Homo sapiens
gagaaaggatttctaagcaggaactccccagaatttggaggttttggttcagttagtggaaaaattgaaatagaa

SEQ ID NO: 31669 - DNA, 83 bp, Homo sapiens
gggaccgccgccgccgccgccaccatgctctccctgtccagccgcctgcagctgaccctgtaccagtacaagacgtgtccctt

SEQ ID NO: 31670 - DNA, 98 bp, Homo sapiens
agtctgcggccaagactccgtcctgcaagggcaagcgacttggtaatgaaggtggatgctcttctgtcagcgcaaccaaaaggagatccaagaatcga

SEQ ID NO: 31671 - DNA, 82 bp, Homo sapiens
ccgcttctcccgcttcaacgaagaccgagactttcaggcatttccggagagttcttttgaagtcacttcagaaggatctaca

SEQ ID NO: 31672 - DNA, 82 bp, Homo sapiens
cgggaagcgggcggccccggccgcctccgcgagggcaccatggaggtgaatgcaggtcctcgaggccacacgggttaatcga

SEQ ID NO: 31673 - DNA, 83 bp, Homo sapiens
ccgatggctctgtgcaacggagactccaaggtgagaagccctaccactgcaactgggacggctgcggctggaagtttgcgcgc

SEQ ID NO: 31674 - DNA, 100 bp, Homo sapiens
cagggggtacacatatctgtatataggagaatcctcattgacactggagaaccagcaattccagaatacatcagctgtttaaagcaggctctaactgaat

SEQ ID NO: 31675 - DNA, 100 bp, Homo sapiens
ggggagactcctcaagcaggccctgttggaattgaagaagataatggtcataagcatgaagcgcagttcagtttccagcggtggtgctggccgcctctcc

SEQ ID NO: 31676 - DNA, 50 bp, Homo sapiens
acaagacaaggtgaagcctcggaaggtactccaaagattcaggtttactc

SEQ ID NO: 31677 - DNA, 74 bp, Homo sapiens
gccttcttcccgctggccgccatctgctgcagactggagcctgagagcaggtgtgtcgtttggactggtgatga

SEQ ID NO: 31678 - DNA, 100 bp, Homo sapiens
cacacacgtcgccgctggggactgggaaatcagggcatcggagagtgccacattaatggggggcttgtacatgacagctggaatagcctccagttgaggg

SEQ ID NO: 31679 - DNA, 100 bp, Homo sapiens
gactgctgaaaagctggcccgtgacctgaaggctgtcaagtatgtggagtgttctgcacttacacagatcatgcatgcattttcagttgctccttttgac

SEQ ID NO: 31680 - DNA, 82 bp, Homo sapiens
cctgtctctgccctcctggcgggcccggcggctctcactatccaggtgacagagttagtccttgataattgcctgtgtgtca

SEQ ID NO: 31681 - DNA, 75 bp, Homo sapiens
cctggttctgccttctggacaatctttccgggaaatcgtgatgagaaccagagtataaaccaccaaatggctcag

SEQ ID NO: 31682 - DNA, 100 bp, Homo sapiens
gttctcgctccggagccgctgcacatttcggcctgtctacaagtcattttgcttgggcatttcactcagtagcagaagaagaactgctgaacatgttgcc

SEQ ID NO: 31683 - DNA, 101 bp, Homo sapiens
tgagagaatagccccattggctgagggggccttaccttacaacctggcagaacttcagagacagggacagagcagaatgggctgatatagatccggtgccg

SEQ ID NO: 31684 - DNA, 75 bp, Homo sapiens
atgtagaatacttgggtgacatctgcctgagagatctccaagaattacaggttatgtctagagaagatatttcca

SEQ ID NO: 31685 - DNA, 100 bp, Homo sapiens
agcacataacggggttcgggtgtctcgtgtgtgaacatcacaggagtatgctgctgctgttccgctttgcgtcctcgctacaaacgcctggtggacaaca

SEQ ID NO: 31686 - DNA, 75 bp, Homo sapiens
cgcagaccccttcaagttctagtcatgggcagctgcaatgactctccgcacggtattattgtcattgcaagcact

SEQ ID NO: 31687 - DNA, 50 bp, Homo sapiens
gtcctgctgcaggtggcaagctctgacattccacttcttccatctattac

SEQ ID NO: 31688 - DNA, 82 bp, Homo sapiens
ctcactccctttcctctgctgccgctcggtcacgcttgatgatttaagccagaagttaaaacccttgggtgaagcagaacga

SEQ ID NO: 31689 - DNA, 75 bp, Homo sapiens
caggccctgccaattgactgcttttacagtgagtgcatacttccacaggctgcactcgaggagatccacaaattc

SEQ ID NO: 31690 - DNA, 75 bp, Homo sapiens
gacttcttggcttctcccagcatagccccagatggagtctcattctgtcgctcaagctgaagggcagtgccgtga

SEQ ID NO: 31691 - DNA, 82 bp, Homo sapiens
accggctcctgctcaagatctcagagaaggaggaggtgaccacgcgcgagagtgtgaacatggctacgcctcttcattcccg

SEQ ID NO: 31692 - DNA, 100 bp, Homo sapiens
ctgaatatttctcaagttcaagggacttataaatatgggtccttatgtcgtcagaagatcgagaagctcaggaggatgaattgctggccctggcaagtat

SEQ ID NO: 31693 - DNA, 97 bp, Homo sapiens
gctcctcgtgcctggcggcgtgggcccgggcgagcagccctgcctccggacggacggggaggtttactgcatcgacgcgcggttctacgggaacgtc

SEQ ID NO: 31694 - DNA, 50 bp, Homo sapiens
ctggcttcttacctcacgaacaagtttatacatgaaagcatccatgatga

SEQ ID NO: 31695 - DNA, 51 bp, Homo sapiens
ggatctgatttagtcagtcaggggtccactggacggggcctgagctacaac

SEQ ID NO: 31696 - DNA, 100 bp, Homo sapiens
gggcgcctcggccgccatggtcttcagcggattgtcagtggcttcgccccgaggagagctgactgccctgggctgctgcctccggcagagctgagccaaa

SEQ ID NO: 31697 - DNA, 100 bp, Homo sapiens
tggctctcaaggttctgatttagattcatcagcaactcctataaacacagtggacgtcaataatgaaagctcttcagagctccgcaaggctattatagat

SEQ ID NO: 31698 - DNA, 80 bp, Homo sapiens
cgaggcaaggagctaaagcagcgtgcgttcagccctgggctgctggccaacgcagtcatcttcctgtgtgggaacctgac

SEQ ID NO: 31699 - DNA, 90 bp, Homo sapiens
gatgaatctctaatcggtggccgccagacacccgcggcgaaggcggctcgggctcgggctccgggcgccctgcgtccggcagaggaggcg

SEQ ID NO: 31700 - DNA, 119 bp, Homo sapiens
tttaagtgtagttgccgacgcaatggcagcctttgcagtggaacctcaggggcccgcgttagtgctgggcctaaaggagataacatttatgaatggagatcaactatacttggtccacc

SEQ ID NO: 31701 - DNA, 76 bp, Homo sapiens
taccacgaaagaatctggatgtcatgaaggaagcaatggttcaggctgactgtgctgtcctgattgttgctgctgg

SEQ ID NO: 31702 - DNA, 100 bp, Homo sapiens
ggcgtctccgccggctactgccgcttcagttctcccggtgtggccacgagtcggcccccaggctccgctcttgccagagggacaggagccatggctcaga

SEQ ID NO: 31703 - DNA, 82 bp, Homo sapiens
aagagagcaaggggaaggatcgggagtacacagacatcatccggaagcggggagaggtggtgagagatgacccctgttgagg

SEQ ID NO: 31704 - DNA, 100 bp, Homo sapiens
ctcagcccttctgagctctgtgctgaacaagtctgaacaacccagtcctgccagctccagctccagctccagctccagcttcacaccatcccagaccagg

SEQ ID NO: 31705 - DNA, 100 bp, Homo sapiens
aaatacaaatcacacgcataatggatgaaaggaaccgacaggtcgtcatggagatggaggttattggccagttgatactaatttgattgatagaagcacc

SEQ ID NO: 31706 - DNA, 100 bp, Homo sapiens
cggcgttcttccgctggctcagccgcaagtacccgtccatcatagtcaactgcgtggaagagaagtaatttgccatcttccatgtatgaatggtggccag

SEQ ID NO: 31707 - DNA, 50 bp, Homo sapiens
gctgccccgcaggatcatcaagtttggtgccctggttgtcagatgttgga

SEQ ID NO: 31708 - DNA, 50 bp, Homo sapiens
aggcgcttctgcatctgtgggccgaggggaaactgactctactctgtgat

SEQ ID NO: 31709 - DNA, 74 bp, Homo sapiens
atttatataggaatgtgatgttagagaactacagaaacctggccttcctggggaccattgacatttacagatgt

SEQ ID NO: 31710 - DNA, 75 bp, Homo sapiens
ctcgccgcccgcccgcccgacggagacggttcactattatgaagatggcaatgttcagttggttagtcataaaga

SEQ ID NO: 31711 - DNA, 100 bp, Homo sapiens
ctctgggcacagccttggaaagtcaggaccgcgacggcagcagagcagtcttttgccaactcctattactcagcaagccagtttgacatctctggcacag

SEQ ID NO: 31712 - DNA, 100 bp, Homo sapiens
tgatgatcacgcagctggctggcttcagtggaccaggaccactgacatttagggatgtggccatagaattctctctggaggagtggcaatgcctggacac

SEQ ID NO: 31713 - DNA, 83 bp, Homo sapiens
ggtgcagaggatcctggaggcctgggaagccaacgaccacacgcagtctcctctgagcctccggcctccataagacccaaaac

SEQ ID NO: 31714 - DNA, 90 bp, Homo sapiens
tagatgcaagtgatgatggaatcttggccaaaatcgtgctttgtgctgatgaacatggtcaccttgaaaggtgtgttgaatatggcagag

SEQ ID NO: 31715 - DNA, 96 bp, Homo sapiens
cccgcgcccccgccgcgccctcaggtatttcagtgtctgtagacaagatggaatcatctccatttaatagacggcaatggacctcactatcattga

SEQ ID NO: 31716 - DNA, 82 bp, Homo sapiens
gggattgctggctacagcttcagaagaccgaagcgttcgtatctggaaggggaacgcccttttgcttgtgactggcagggct

SEQ ID NO: 31717 - DNA, 100 bp, Homo sapiens
gggatctcagtggaccagcaagataatgacaaagccagctgtgaggactacctaatgatttcgtgtgaaacagtcgcaaatggaattccaagaaacattc

SEQ ID NO: 31718 - DNA, 82 bp, Homo sapiens
gtccgacagccaggcccgggagaatgacagacatcacacctccagtgcaatccctgttcctaagagacaaagctccatattt

SEQ ID NO: 31719 - DNA, 82 bp, Homo sapiens
ccacagagccatcaaaatcacagtggatgggccccgagaacctcgaaatgcctttgaagatgagaaacccccaaagaagagc

SEQ ID NO: 31720 - DNA, 96 bp, Homo sapiens
agctttctccttcacagcattgcaggagaaatgggacgtcggtcatcagatactgaagaagaaagcagaagcaagagaaaaaagaaacaccgtaga

SEQ ID NO: 31721 - DNA, 75 bp, Homo sapiens
gaaaattatggatcaatacaaattttatgacccatctcctcctagaagccaggaggaagaagaggaggatgagga

SEQ ID NO: 31722 - DNA, 100 bp, Homo sapiens
ggatatggtcgtgatcgtgactattcagatcatccaagtggaggttcctacagagattcatatgagagttatggtggatccataaagaacccagccaacc

SEQ ID NO: 31723 - DNA, 100 bp, Homo sapiens
gaaaggatgacaagttgggagtcacaggtattaagtcatgatgcaggaatctgcgacagagacaataagcaacagttcaatgaatcaaaatggaatgagc

SEQ ID NO: 31724 - DNA, 100 bp, Homo sapiens
ctagaggaagaatgggtgatagaaagagacagcctgctggatactcatccagataacgtgaaggactggagcaaggtcgtcctggcctatgagcctgtgt

SEQ ID NO: 31725 - DNA, 51 bp, Homo sapiens
gttggggaaggagctgtaaagagatcatgttgtcataggaacaactggaga

SEQ ID NO: 31726 - DNA, 98 bp, Homo sapiens
aaagatgcacattttgcctctggttggtggaaaggatcagttcttaagagcagccccggtaactggaggaatgggagccgttttgatgagaaaaatgg

SEQ ID NO: 31727 - DNA, 100 bp, Homo sapiens
aagctatcatcctgccaaactccaggctcagatgtcacagttgccaaaacaaaggggatttggtgatggaggctttgttagaaggaatacaaaatcgagg

SEQ ID NO: 31728 - DNA, 100 bp, Homo sapiens
gaactgcgcaaggaggaggagacgctgctgcggttgaaggcagccctgcacgaccagctgaaccgcctcaaggatcaaagttctgatcgtaccagtcttt

SEQ ID NO: 31729 - DNA, 75 bp, Homo sapiens
catttagagctgcggaacaggacgccctctgattgaaaattgctaccaaggccaatccatggattgggaactccc

SEQ ID NO: 31730 - DNA, 75 bp, Homo sapiens
gggccttttgggcagcttttccggcctgacaacttcatctttgatgcacagtctctgacatcagctctcctggga

SEQ ID NO: 31731 - DNA, 100 bp, Homo sapiens
gctggaagacgaggccacagacacttctgatagtgaagatgaagattatggaagagattcgggccctcccactaagaaaattcgatcatctccccgagaa

SEQ ID NO: 31732 - DNA, 102 bp, Homo sapiens
gaaaactgggatagattgcaccctggagagcttctcaataggtttggcatggacaagatctatgaaggccaagtggaggtgactggtgatgaatacaatgtg

SEQ ID NO: 31733 - DNA, 100 bp, Homo sapiens
gcgaccgtgaggacaggcttttgctctgcgacggctgcgatgcggggcccactgctcagtggagcgtggaggacgaggaggaggccgtccacgagcaatg

SEQ ID NO: 31734 - DNA, 100 bp, Homo sapiens
cttcaggctgcaaaccggttaatcaagaatttggtcaaggaggcagagacccgtgctgagtttgctgagagatcggtagccaagctggaaaagacaattg

SEQ ID NO: 31735 - DNA, 132 bp, Homo sapiens
acatcagggtgatgttctctccatttggccagatagaagaatgccggatcctccggggacctgatgggctgagtcgaggcactactgcagtcttcagttaagcaacaagtagaagctattgaaaaacagtac

SEQ ID NO: 31736 - DNA, 100 bp, Homo sapiens
ccaaaatctgcatgtggtgtgtgcccaggcagacttcgagggggagatacatctggggactataagaaagctcttctgctgctctgtggagaagatgact

SEQ ID NO: 31737 - DNA, 83 bp, Homo sapiens
cctggagggggcagtcccgggagaacctgcggcggccggagcgttttccaagagataacttcaccaagatgtccagtgatagg

SEQ ID NO: 31738 - DNA, 83 bp, Homo sapiens
gcgcgcagggcctgcagcgggagctggacggcgagcgcgagcggcgcgagaaaacacattcctgaaggcgctaaaagacgaaa

SEQ ID NO: 31739 - DNA, 100 bp, Homo sapiens
ggttttgagagattacctgaagttgcactcaaaagcaagatatactactaactttgaaatggaataagacctaatctgggagcctgcaagtgacaacagc

SEQ ID NO: 31740 - DNA, 75 bp, Homo sapiens
aagacagggaagtggcagaaggaggccttccccgggcggagagcccctctccagcattttgaaagcgaagcagaa

SEQ ID NO: 31741 - DNA, 123 bp, Homo sapiens
ttccagggcgttagcgactcatgcaccggacccgttaacgcgttgattcgttccgtgctgctgcagctcccctcccacccggtcactccgtccagcaagcacgcagacagcaagcccgcgccg

SEQ ID NO: 31742 - DNA, 98 bp, Homo sapiens
aaaatgtcaacaaattgatggatgatgaagaacgagagcttcaaatggatcctgcagactatggaaagcaacatttcaatgatgtcctttaagtccta

SEQ ID NO: 31743 - DNA, 49 bp, Homo sapiens
aaccagcggagctgacacagccaactaactgccttctatgaaagcagtc

SEQ ID NO: 31744 - DNA, 97 bp, Homo sapiens
aaggagactgaagaaagaagttgaatcccagcttcccgaaaaagtgaaaagccatacaagtgtacctgggaaggctgcgactggaggttcgcgcgat

SEQ ID NO: 31745 - DNA, 50 bp, Homo sapiens
tgcactttctcaaaccaaggctgctgctgcttctgatgcttggaagatat

SEQ ID NO: 31746 - DNA, 74 bp, Homo sapiens
gcggatactctcccttcggagtttgatgtgatcgtaatagggacgggtgctggagaatctggtaaaagcaccat

SEQ ID NO: 31747 - DNA, 90 bp, Homo sapiens
attccaattccaacatggtcattatgcttattggaaataaaagtaatgggggcctagcagacatcttcacggtctttgccaagacaccag

SEQ ID NO: 31748 - DNA, 100 bp, Homo sapiens
aggatcagaccgtagcccttccggaaacctccatgggagtaccctgacttctaccggaagctctacggcctcttggacccctctgtctttcacgtcaagt

SEQ ID NO: 31749 - DNA, 74 bp, Homo sapiens
ggaaaacatcgtggccaacacggtcttgctgaaagccagggaaggtggtatggtcaggaaaaagactacaatgt

SEQ ID NO: 31750 - DNA, 100 bp, Homo sapiens
cgggtccgggagcgcggcggagacgatgcctgagatcagagtcacgcccttgggtggaatttaatgacccagtgctgggctcaagaacccgaccaaagac

SEQ ID NO: 31751 - DNA, 83 bp, Homo sapiens
actcctggactgaaacgatcctctcatctcagcctccaaaagtgctggcattacaggaactgtggaaggtgcatcagtgaaga

SEQ ID NO: 31752 - DNA, 100 bp, Homo sapiens
cgacaagcacacactatggcgctgaaacggattaataagtatattcggtgctcttcgaactggtgcttatatggtgtacattttgatgaccaaaggcctg

SEQ ID NO: 31753 - DNA, 90 bp, Homo sapiens
accttggccagaagtctgggcctccagatgcccgtggtggtgcagagcatgtacatctttaaggtgatctttgcagagctgtttcaactt

SEQ ID NO: 31754 - DNA, 83 bp, Homo sapiens
ccaacgcgaggagctcatcgggcagattagcgacatccgagtgcagaacctgcaaggcaggtgacagcagggacatgtctcgg

SEQ ID NO: 31755 - DNA, 76 bp, Homo sapiens
gtctctcccattctgattcttgacaccagatgcagcctgagcggtgcatccccgttcctgggcgagaccaagcagg

SEQ ID NO: 31756 - DNA, 75 bp, Homo sapiens
ggccgtcctaaacgcggtgtgggacttgtgggccaagcaggagggaaaggcattagacagaaagctggaagttga

SEQ ID NO: 31757 - DNA, 74 bp, Homo sapiens
cccacggatagcaagagtgtgcaaggtggccacagggcagccccatgagggctccagctactcttcgaggaagg

SEQ ID NO: 31758 - DNA, 101 bp, Homo sapiens
gcaacagccacgatgtgaagcggggcagagccgggggagcccagcccagccagcctccaggggaacgcccttttgcttgtgactggcagggctgcgacaag

SEQ ID NO: 31759 - DNA, 100 bp, Homo sapiens
ggatcaacgccgagatcgagaagcagctgcggcgggacaagcgcgacgcccggcgcgagctcaagctgctgctgctcgcacttcagcctcctctacaaga

SEQ ID NO: 31760 - DNA, 83 bp, Homo sapiens
atttccctgagaaccgtttacttccagaagattggtggagcttgatctgaagctctggattaatcgaattacagctgctagcc

SEQ ID NO: 31761 - DNA, 100 bp, Homo sapiens
gaaaaatcggcagatgttacagctgctcatgaaccacttggcaaaacagtatgctggctatgactattcgcagcaaggcagatttgtccctccagacatg

SEQ ID NO: 31762 - DNA, 96 bp, Homo sapiens
gaggatgtggtgctgcccgagaaggtggacgtgctggtgtctgagtggatggggacctgcctgctggttcgctttgtgaacagcacatggatattt

SEQ ID NO: 31763 - DNA, 75 bp, Homo sapiens
gcggggcgtccgaggagagccaggccatgcaggcccacgtggtgcacagcgacttcaccgcggcagccaccaggg

SEQ ID NO: 31764 - DNA, 50 bp, Homo sapiens
ctgctgctgagaccaaggaatgatggaatgcagtagccctctgggcctgg

SEQ ID NO: 31765 - DNA, 78 bp, Homo sapiens
gtgatgaaactctggaatctccatgtcatgaagcatgggaaggagtcaagactgagaacaacgatcatattaatttga

SEQ ID NO: 31766 - DNA, 83 bp, Homo sapiens
ggggaccaagctggagatcaaactgaacactagtctgaatgtataccgaaataaagatgccttaagccattttgtaattgcag

SEQ ID NO: 31767 - DNA, 82 bp, Homo sapiens
ccacgctgtccgtccgcagtaccgacgcctgcagcccgcggcgccatggctcacgtcggctcccgcaagcgctcgaggagtc

SEQ ID NO: 31768 - DNA, 75 bp, Homo sapiens
ccagcgggcctggactgtgggctggtgtgtggaactgattccaactccacagagtgaccagagagaggacgtggc

SEQ ID NO: 31769 - DNA, 132 bp, Homo sapiens
gcaaattttaacagaagagtcgaagctctgcgagacccaatatttgccaataagaatggttatgtaagactttgaccccgacgcaggcttcagtgattgccgcggatcagaagcctgagcactttggctcga

SEQ ID NO: 31770 - DNA, 88 bp, Homo sapiens
ccccactgagtatgtcggaggagagcgacatggacaaagccatcaaggtggcggatgaggcgttgaaggtagatgattgtgactgtca

SEQ ID NO: 31771 - DNA, 80 bp, Homo sapiens
tggataaccatgctttatatgacaagaccaaggtcatggaggcggagcagaccaagaccaggagcgagctggtgcataag

SEQ ID NO: 31772 - DNA, 90 bp, Homo sapiens
caggaaaaataaagccatgaaataatgagtctgctgtattagaggttggtcttggacaactgcacctgcacggagggcgtggagtagaac

SEQ ID NO: 31773 - DNA, 100 bp, Homo sapiens
agaggaggaattacaacttcattttacttatgaagaaaaatctcctggcaattacagtcatcagaagattgagagaaagaggagaaccaatcagactatt

SEQ ID NO: 31774 - DNA, 90 bp, Homo sapiens
ctacctggggatatacatgcatgcaccaaaacgaggacaggtaatttctcactatcagtgtaaagagcagcgtgatgcccatagatttga

SEQ ID NO: 31775 - DNA, 131 bp, Homo sapiens
cggagctgttcctattcggccatctttgctcctccctgcaactaactccattcttaattgaggaaacgacatttgaagcaggagtgaaagttcagatccacagtcagtctgagccacctttcatccaagag

SEQ ID NO: 31776 - DNA, 80 bp, Homo sapiens
caaatgtctgactctgactctcggactgagaaacgcaagcactccttgctcaagacccctccccagtacctacccttcca

SEQ ID NO: 31777 - DNA, 76 bp, Homo sapiens
tattttatattgaaatggatcctccaggtacatgtcccagagcaagcacacggaggcccgggagctcatgtactcg

SEQ ID NO: 31778 - DNA, 100 bp, Homo sapiens
aacagaactttctaatttagccaaggaagcctgcagaattttcttcctgccccttgaactctgatgaagaagtgaataaatggttgcatttttatgaaat

SEQ ID NO: 31779 - DNA, 87 bp, Homo sapiens
atgctctgaccacaaaagaaaagccaaagcactagtggcttgccagattgttctaccagacccagctcggtcaaggagtgtgatgac

SEQ ID NO: 31780 - DNA, 82 bp, Homo sapiens
ccggaggcggcggagggcaccccgggcgggcggcggctgctattggtttatcttggaagctaaagggcattgctcatcctga

SEQ ID NO: 31781 - DNA, 82 bp, Homo sapiens
ggagaatggagcgggcgggcggcgggagtaccctgacttctaccggaagctctacggcctcttggacccctctgtctttcac

SEQ ID NO: 31782 - DNA, 101 bp, Homo sapiens
cagggcatcccgggcgcggccagtggtgtcttcctggcgctgataaagcagtttgtgtccgacgtggcctggggggagctggactacctggtggtggacac

SEQ ID NO: 31783 - DNA, 149 bp, Homo sapiens
gctggagcacaaaagagtctccgcggtggaggtctgcgttgctcttgcttttcctcgctggggtgtacgatcgtcagtatttaaacagatcacatcatgcgtgagtacaagctagtggtccttggttcaggaggcgttgggaagtctgc

SEQ ID NO: 31784 - DNA, 100 bp, Homo sapiens
aaaggattcggatttattaagcttgccaaatttgagtttcatcatggtgactatgaaaaacagtttctgcatgtactgagccgcaaggacaagactggaa

SEQ ID NO: 31785 - DNA, 90 bp, Homo sapiens
agtggccggaagatccacagccaggaggaagccttgcggcaatggtggatgtgatctttgctgatgtggcccagccagaccagacccgga

SEQ ID NO: 31786 - DNA, 74 bp, Homo sapiens
gctaacagaactggaccttttcggttggtcaaagaaaaagtgatgtatgaaaaagaggcaaaacaacaagaaga

SEQ ID NO: 31787 - DNA, 93 bp, Homo sapiens
gctggccgggctggctgcggccgccctgggccgggccccaccggacgcccgtggaccgggagcccgtggaccgggagccggtggtgtgccacc

SEQ ID NO: 31788 - DNA, 100 bp, Homo sapiens
gccaagcgcgtcacattcccgtccgacgaggatatcgtgtctggagcagtggagcccaaagacccctggagacatggcagcgtctatcccagactaccgg

SEQ ID NO: 31789 - DNA, 74 bp, Homo sapiens
aagaatatgctgccaaaattatcaacaccaaaaagctttctgctagggtcattcctgtattccatcaaccagac

SEQ ID NO: 31790 - DNA, 123 bp, Homo sapiens
ccaactcattcgtgggaacagcgcagtacgtttctccagagctgctcacggagaagtccgcctgtaagaggtttggtgcacctcgatttggaggaagtagggcagggcccttatctggaaaga

SEQ ID NO: 31791 - DNA, 98 bp, Homo sapiens
gacttgaacaacctaccaagtgatgtggttccatcaggcttgttcatccccagcatggccattggagcgatcgcaggaaggattgtggggattgcggt

SEQ ID NO: 31792 - DNA, 80 bp, Homo sapiens
gtgccgtttaacctttattgtggtggagtccaccccgctgtgcccagctcaacattggcaatgtgctccctgtgggcacc

SEQ ID NO: 31793 - DNA, 50 bp, Homo sapiens
cctgcaagtactggatcctcgacctagccgaggcctgcctggagccccag

SEQ ID NO: 31794 - DNA, 113 bp, Homo sapiens
gaccgcgcgcagggcctgcagcgggagctggacggcgagcgcgagcggcgcgagaaaggagtgcatccgccccaacccttttccccctcgtctcctgtgagaattccccgtcg

SEQ ID NO: 31795 - DNA, 82 bp, Homo sapiens
gcgggagatcatggacgcggcggaagcagcggaggaggagaaagagatggacctcccggactcggcctcgagggtcttctgc

SEQ ID NO: 31796 - DNA, 100 bp, Homo sapiens
cgactccggagacagcccaaatatcctcggaagagcgctcccaggagaaacaacccagatggctacctgtatgagcgtgaggccatcctggagtacattc

SEQ ID NO: 31797 - DNA, 50 bp, Homo sapiens
ttcctaagtcagcccctcctgtcctcttgtgtgccggtccaacaaaagcc

SEQ ID NO: 31798 - DNA, 75 bp, Homo sapiens
ggccgaaaagatcctcccacttcagcctcccgagtagctggaaccacagggcaatttggttttgatgctgtgcca

SEQ ID NO: 31799 - DNA, 75 bp, Homo sapiens
aaggagccatttttccatggacatgacaattatgatcaggtatggaacctggctaactgcaagctgaagaccaac

SEQ ID NO: 31800 - DNA, 83 bp, Homo sapiens
ccgccgtcgcggcggcggggccaggcggcccgaggtatatgaatgacctaaaggtacaaataaagacggagagagaacagtgc

SEQ ID NO: 31801 - DNA, 98 bp, Homo sapiens
tagtgatcctgagtacaacacggtggcaagcaagtttaatcagacctgctcacacttcagaatagagaaggttacaggaattaactgtttgttcagaa

SEQ ID NO: 31802 - DNA, 50 bp, Homo sapiens
cagtgaagagcttcgactccaagtttacgtttaataagaaggagacctgt

SEQ ID NO: 31803 - DNA, 75 bp, Homo sapiens
cttcgatgtgcgagactttggaaagagttgtctgctggttctcagcttgaagaagattctgcagtccttattgat

SEQ ID NO: 31804 - DNA, 82 bp, Homo sapiens
agacgctccgtgcctgcgaggagtatctgcggcagcatgacaagactgattcttgctattccaaatcctcttccacgttgac

SEQ ID NO: 31805 - DNA, 76 bp, Homo sapiens
cggagaacacgggctacacgtatgcgctcaggtggtgatctttgtgaagtctgtgcagcggtgcattgccttggcc

SEQ ID NO: 31806 - DNA, 90 bp, Homo sapiens
tcttcggaccccccaacaccctctacgaaggcggctacttcaaggtacatggactatatcgcacaacaggtgctagttttgagaaggccc

SEQ ID NO: 31807 - DNA, 75 bp, Homo sapiens
cgaggcggacgacgaccggctcaacaagtccctagagcgtccaagatttttggtttcaaaccaatttcctgctga

SEQ ID NO: 31808 - DNA, 75 bp, Homo sapiens
cgtgtggccaacgagctcaacgccaggcgccgctcctttacagacctgcctagagctggaacgttacctccagag

SEQ ID NO: 31809 - DNA, 98 bp, Homo sapiens
cccttcctgaccccgtacctgctggggccggacaagaacctgaccgagagggagagttcagcaagaccagcagattggaagtatcaaagtggattatc

SEQ ID NO: 31810 - DNA, 100 bp, Homo sapiens
agctgaccggccggggcctggtccgggcggtgcaggtcttagtggtgcaatggctagtataagcgtgcgttcgagtaccccaggctctcctacacatgta

SEQ ID NO: 31811 - DNA, 75 bp, Homo sapiens
ggccgtggaagcggccaccgactactgtcagcagctgtgccagctacttgaaggaaattttgccaaagaagtgag

SEQ ID NO: 31812 - DNA, 100 bp, Homo sapiens
agattctctttgtggccagatgggtttgtatggacaggcttgtccatctgtaacttcattaagatcatgcaacagatgagtgaccaccgctacgacaaac

SEQ ID NO: 31813 - DNA, 51 bp, Homo sapiens
gacatcccggaagctgggaaatgatctccagtctatgtgctgaagaagcag

SEQ ID NO: 31814 - DNA, 98 bp, Homo sapiens
gccatgggcctcactatctcctccctcttctcccgactatttggcaagaagcagatgcgcattttgatggtttgtagataaagttggagaaagcaaca

SEQ ID NO: 31815 - DNA, 100 bp, Homo sapiens
ctggaggaccagggggagagtttggagtgaagtttaatgttgccaatggagatcctggccaatttggagcaaggcttagcagaagacggcggcatgagca

SEQ ID NO: 31816 - DNA, 75 bp, Homo sapiens
cagagttctaggagtggaagaggagacaatcatgacatcatctccatgaagctgttccagctgatggtggagcac

SEQ ID NO: 31817 - DNA, 104 bp, Homo sapiens
gacctcttcaccaactacatctcactctacaacacgtgtatgaagactgatgatgcttcggatgcacaatctgcatgggacaaagcccccaccctcagagggca

SEQ ID NO: 31818 - DNA, 75 bp, Homo sapiens
gggtggctgcgcccctgcctcgcttcccaggcgccggcggctgcaggtgctggagaatctggtaaaagcaccatt

SEQ ID NO: 31819 - DNA, 74 bp, Homo sapiens
gaaggaacgaggcaaggagctaaagcagcgtgcgttcagccctggggtcagggaagtcaaagatgcatccctga

SEQ ID NO: 31820 - DNA, 100 bp, Homo sapiens
cacggagtgtatgaccacaaacagccatcaagagtaatcaagtcagaggattatatgacttttatctgcctagagaagaactatggatctacaacatgga

SEQ ID NO: 31821 - DNA, 100 bp, Homo sapiens
ccttggctcactgaggaggtttgtaccttctccaggcaaattccgttcccctgcagcaccatctcctttggctcttcggcaaccagtgaaagcatttagt

SEQ ID NO: 31822 - DNA, 83 bp, Homo sapiens
tggttttttaaaatggaagccagattatgacagtgccgcttctgaatatggaaaagcagcttgccaagaagtatcaccctgac

SEQ ID NO: 31823 - DNA, 74 bp, Homo sapiens
gggcggagaaagattctgccagaagaagagcgaggtgctcagtcccctctgatctttctctatgtggttgacac

SEQ ID NO: 31824 - DNA, 95 bp, Homo sapiens
aaggcaagaagaacatcccgcggatcacggcgggcgctaatattgacacctgctcagaagaccagaggaccccgttgatggaagcagccgaaaac

SEQ ID NO: 31825 - DNA, 75 bp, Homo sapiens
ccccgttgtttttcgattgcaagagggcattttgtcagtgatgctgatctttgccttcttccaggaacttgtaat

SEQ ID NO: 31826 - DNA, 80 bp, Homo sapiens
caaccattcttctcagagcaagaaacctaccatactgactggtgatgtacatcgagagagacagcagaaagaccactcca

SEQ ID NO: 31827 - DNA, 75 bp, Homo sapiens
agatgtggtggcttccgtttgttggtggaggaggtggcaggcctcggcgaaagcacacctgagctgctcttaata

SEQ ID NO: 31828 - DNA, 113 bp, Homo sapiens
ggagacgattgttcatcaacatgagtatggaccagaagaaaacctagaagatgacatgtaccgcctttgccctttttgtcaaaaccaaagaagttccaacaaaaaggagtttt

SEQ ID NO: 31829 - DNA, 75 bp, Homo sapiens
ctgggcctggccaaggaccccctggaggggtaattaaaaccatggaggcgatcagcgaggttctccaggacctta

SEQ ID NO: 31830 - DNA, 75 bp, Homo sapiens
cgcacggtgccaggaccaagtatctggcagcactaacaccagaataacactgatgttgccatcagcagtcacacg

SEQ ID NO: 31831 - DNA, 132 bp, Homo sapiens
ctgctctgggacacacctccattggatttaaaagacagtcctcgtcagcactgactttcagctatggaatcgccgccaagctgagccaccaaagaaggaggctgccaccacggggccgcaggtgaagagagc

SEQ ID NO: 31832 - DNA, 121 bp, Homo sapiens
gctcagtacatattcaccttgaagaggaagacggggcggaagaccaagatcatcgagatgaatcatgtcaaccctgccatggacttcacgcagactccacctgggatgttggctctggaca

SEQ ID NO: 31833 - DNA, 88 bp, Homo sapiens
actaacctctccagaaacgttgagaggagcaatagaagacatgggatttgatgctaccttgtcagagacggggttttgccatgttgcc

SEQ ID NO: 31834 - DNA, 78 bp, Homo sapiens
gagctcagaaagctgtatggacctctgtgtggctgttctgtaggaagttatacaatcaattttcgggtaatgagttgt

SEQ ID NO: 31835 - DNA, 98 bp, Homo sapiens
caaggagctaaagcagcgtgcgttcagccctggggttgctgcttttgctcagaggacatccatgaccctaatggtctttttgttcaagataaagtgat

SEQ ID NO: 31836 - DNA, 83 bp, Homo sapiens
ttgctcttctccgccgcggcactgatccccacagaaatgcttcggttacccacagtctttcgccagatgagaccggtgtccag

SEQ ID NO: 31837 - DNA, 100 bp, Homo sapiens
tgaagcgctgggaggcggacattaaagtgaagtggttgcggtaacctggcctgggcctgaagctgaagtgcaatgttgtgatctcggctcactgcaacct

SEQ ID NO: 31838 - DNA, 100 bp, Homo sapiens
tgcttgtcaacaaggcgctgctgaccacctacggagttgtggaaagtaaaaatgtagccctaccaaaaggaactattgtactggcttctccaggctggac

SEQ ID NO: 31839 - DNA, 50 bp, Homo sapiens
catcgcctttctggtgggaggcttgattgattacatgaagcagatgacat

SEQ ID NO: 31840 - DNA, 100 bp, Homo sapiens
ccgggcccaggccccggcagcgcctgggacaaggtcacttcatcctggcccaggtactgcagctccaaatcgtggggattctgtaagagcttgctacctg

SEQ ID NO: 31841 - DNA, 83 bp, Homo sapiens
cggggagcagtatgccggaagctggttttcaggccacaaatgctttcacagatgcgagccacccctctggctgctcctgcggg

SEQ ID NO: 31842 - DNA, 100 bp, Homo sapiens
gctgctgcccgcgtccgaggctcgcgggcggcgggcccggatcactccaagaactgaggcccctgtcagcagtgtcagtaatagtttggagaatgccctg

SEQ ID NO: 31843 - DNA, 100 bp, Homo sapiens
ctgtgattcaccaactggacaaggctttggcaaagctggggattggccagctgactgctcaggaagtaaaatcgtgagtttactgggacctgtgaccact

SEQ ID NO: 31844 - DNA, 96 bp, Homo sapiens
ggaaatgtgaaacgaataacatgatggaatatttggaagatgctggctcaagtagtttagataatctactaagtagatacatctcaggcagtcacc

SEQ ID NO: 31845 - DNA, 83 bp, Homo sapiens
ccgacgaccggatcctgaggaggcagctgcggtggcagctgctgagttctcggtgaaggtgctgggcgtcctcttctttgcca

SEQ ID NO: 31846 - DNA, 100 bp, Homo sapiens
gcgctgagcggcggccagccggcaggtcagaagttacgtcaagagagctcttgctgaaggtgcccaaatttggtgcggtgagggagtggataagttgagc

SEQ ID NO: 31847 - DNA, 96 bp, Homo sapiens
tccggctcctccagctaccggcccaaggccatctacctggacatcgatggacgcattcagaagactatgttaggtcttaatggtgggaggacgccc

SEQ ID NO: 31848 - DNA, 88 bp, Homo sapiens
ttatcctaatcccaatgctgaagtaagattgtcttggaaatactaagttgggttctggaggacacgtgccggcggcaggacttcaacc

SEQ ID NO: 31849 - DNA, 75 bp, Homo sapiens
tttattacaagactacggagcataggaggaaaattcatcatctgatgaactctttgccagcagagaggatccagg

SEQ ID NO: 31850 - DNA, 98 bp, Homo sapiens
agctgcagctgcgatctctgtggtaggcccagtctttagctctcatggattgggagctgggaaaggaatgagaagacagaagtcagagacaagaagag

SEQ ID NO: 31851 - DNA, 75 bp, Homo sapiens
agaaagttccgccatgagctggggcacggagctgtgggtggagataagtaattaacatttcgaaacaggaaatga

SEQ ID NO: 31852 - DNA, 100 bp, Homo sapiens
ttcatccccattttccaaggggacgacagcgtcgttattgggtattggtaaaggttttcaaggtgtcatgaaaagatggggatttaaaggccagcctgct

SEQ ID NO: 31853 - DNA, 83 bp, Homo sapiens
ccccttcctcagcagccctttgcggactctcaaccagctgccaagccagcccttcactgtgagatgaacccggtacctcagat

SEQ ID NO: 31854 - DNA, 135 bp, Homo sapiens
atggtgcagaaataccagtccccagtgagggtgtacaaatacccctttgaattaattatggcttacctggagtagaacagaaaaattattatgtctgtgttcccttgggactcattggaaattgtacagtgacat

SEQ ID NO: 31855 - DNA, 76 bp, Homo sapiens
ggaatctgagggtgccctcaatgagcacatgaccagcttagcttctgtcctaaagagatgtggtctcactatgttg

SEQ ID NO: 31856 - DNA, 90 bp, Homo sapiens
aatctgtacccattattggtggtttttgggagactatctttggcaacaggtaaatcaacagactgggaagatgatggttggggagcatgg

SEQ ID NO: 31857 - DNA, 50 bp, Homo sapiens
tctcagccagaagatgaagatttaaaattcttcaacgacctggatctgct

SEQ ID NO: 31858 - DNA, 82 bp, Homo sapiens
agctgtaatagaatgccagcaaccagaagcagacttatacagatgtacctgtgtggtctaagctggaatctggtcaccttcc

SEQ ID NO: 31859 - DNA, 75 bp, Homo sapiens
caggctggtcagtgtggcaaccagatcggtgccaagtgaatggtagtgtctagaaagggtatgtcccttcaagag

SEQ ID NO: 31860 - DNA, 75 bp, Homo sapiens
cctagatgtcaataaccagtccttcagagaacaagagcttaaagcttttcaagccaggccaagaagctgtgaagt

SEQ ID NO: 31861 - DNA, 82 bp, Homo sapiens
ggtctccggggccgctggattctgaggaccagcagatggccagtcacgagaacccagggtttgccttcccggattgggccta

SEQ ID NO: 31862 - DNA, 122 bp, Homo sapiens
tctaaaggaaggcgtccgttggccttcgtacccgtcttgattgagactatagggtatgaccccatcatttccccagaggtctcggcctcctttggtgttcagcagctgcccctggaggagat

SEQ ID NO: 31863 - DNA, 83 bp, Homo sapiens
gtacctttatgaaccagtgtatcccaaagggagaaccgaagattacaggaggccagcatgaggttggaacaagagaatgatga

SEQ ID NO: 31864 - DNA, 100 bp, Homo sapiens
ctctggtaggctttgtccttctcaccgtgggagctctcctcatgctgacagatcagacagcagatggaagaacaggttgctcaaaagtcctctgaactgg

SEQ ID NO: 31865 - DNA, 80 bp, Homo sapiens
aggggaccagaggaactcagccctgattgcgatactgaccgagctttatcattactggaagaatactgcaaaaaattaag

SEQ ID NO: 31866 - DNA, 90 bp, Homo sapiens
tgccctgcagtacctgcagaaggtctctggagacatcttcagcagctttgcccgaagtttttacatacaaattctactagtcacacctgg

SEQ ID NO: 31867 - DNA, 75 bp, Homo sapiens
ggatcgctgtgatcgtcacttggggccctggtgaaaacagatgaacaagaagtaatcaactttttattaacaaca

SEQ ID NO: 31868 - DNA, 49 bp, Homo sapiens
ttctattttgactccagcacggggttgctccttgagggcaggacagttc

SEQ ID NO: 31869 - DNA, 90 bp, Homo sapiens
tgagcactattttggattagtcaattttcattcattggctcccatgtactatcgaggctcagctgcagctgttatcgtgtatgatattac

SEQ ID NO: 31870 - DNA, 98 bp, Homo sapiens
ctttcgacacacctgtagacgttcgccaggtaaagatggaacttgctaaggaagaaaagtgtgaatttctgccattcctgtccccacggaaggttata

SEQ ID NO: 31871 - DNA, 100 bp, Homo sapiens
gctgccgctgccgccctgagtcactgcctgcgcagctccggccgcctggctccccatactagtcgccgtgaatgatttgggaggggacttcaaaggagtt

SEQ ID NO: 31872 - DNA, 97 bp, Homo sapiens
acgcagcccagcggcacggagaaaggtgtcatggagaaactccagctgggcccagagattctgcagcgggaaaatccaaggcttatttatgccaggc

SEQ ID NO: 31873 - DNA, 101 bp, Homo sapiens
agcgccgctcccagccacagcctcccgcgcctcgctcagctccaacatggtcgtacctagctcagctgcaaccatcaaacttcatgatcaatcaattggca

SEQ ID NO: 31874 - DNA, 98 bp, Homo sapiens
accctttctatgtactgcgcctggatgtggccagctcccctcccacccggtcactccgtccagcaagcacgcagacagcaagcccgcgccgctgacgc

SEQ ID NO: 31875 - DNA, 96 bp, Homo sapiens
caggcggggcacgcgctgcccctgctgccacaggagagctaaagttgcagacaagatccagctcatcaataatatgctggacaaagtcaatgagat

SEQ ID NO: 31876 - DNA, 88 bp, Homo sapiens
cgcagcagcactactacgagcgcgaccccaaggatctaaaatgtccactgaggcacaaagagttgatgacagtccaagcactagtgga

SEQ ID NO: 31877 - DNA, 100 bp, Homo sapiens
ccaagattaaccaggacccccagtggatcaatcttcctgtcctacaactgacaaaggatcccctaaagacccctggaaggctggaccatggcacaagaac

SEQ ID NO: 31878 - DNA, 89 bp, Homo sapiens
caggcagtcccgcggcagcaggatcacagctccaccgggggacggctacgtgcaggcggacgcccggggccccccggaccacgaggagc

SEQ ID NO: 31879 - DNA, 100 bp, Homo sapiens
tggaacgacacaacaagccggaagtggaagtcagagacgagttgtactgctgtcacaggaaatggacgctggattacaagcatggcagctcaggcagcag

SEQ ID NO: 31880 - DNA, 87 bp, Homo sapiens
gaagcacaggggccactcagagtcgcccgagaagatacagttgatatattagttggatggcatatagatcatactcagaaaccttcg

SEQ ID NO: 31881 - DNA, 82 bp, Homo sapiens
cggacggtacttctgccactgctgctccgtggagatcgtcccgcgcctgccgccgccctgatcgtgcgcgaccagaccgagc

SEQ ID NO: 31882 - DNA, 100 bp, Homo sapiens
cggaactcgggcatcatggcctcaggaattggtggagagaaggcgcaccatgatggaagatttccggaagtaccggaaaatggcccaggagctctatatg

SEQ ID NO: 31883 - DNA, 100 bp, Homo sapiens
ccgccgccgccgcggtttgtcgccagaaggaagatggcggatctggaggagcagttgtctgatgaagagaaggtatacagaccagggcggcgaggaggag

SEQ ID NO: 31884 - DNA, 104 bp, Homo sapiens
gacgttgacatttatgttaacagcattggtcctgtgtcatcaataaacatggattataccttaaccatgtattttcaacaatattggagagataaaaggctcgc

SEQ ID NO: 31885 - DNA, 82 bp, Homo sapiens
aataatggtgcacagctaaagcagttcattcaggggaatctgcaacattaagaagcttattgctcaatccacacctcaggca

SEQ ID NO: 31886 - DNA, 97 bp, Homo sapiens
tgagtacaaagcccgggctctgcccacgctcccttcctcccagcacgactggctgtcgttggacggaattgaatgatctggcacgggaccctccagc

SEQ ID NO: 31887 - DNA, 87 bp, Homo sapiens
tacatggacgtctggggcaaagggaccacggtcaccgtctcctcagatacgtttgaaatggtttctgaagatgaagatgggaaattg

SEQ ID NO: 31888 - DNA, 83 bp, Homo sapiens
ctgcagcctgccccgcggccaacatgagcttcttgttcttcctgcctgacacagctcacttcaagaagtgcacaatgtcagaa

SEQ ID NO: 31889 - DNA, 100 bp, Homo sapiens
gggcgtccgctcctcagcggatgtggcagccccgagccatggctctcgccgtccgagtcgtttattggcgctccaggcccctgcctgtcacgagaacatg

SEQ ID NO: 31890 - DNA, 100 bp, Homo sapiens
ggagattttgatgtggatgatgccaaagttttattaggctcttgtcaggatggtgaagctgttcatcggaaacctgccccgggaggctacagagcaggag

SEQ ID NO: 31891 - DNA, 82 bp, Homo sapiens
tcatagtcaactgcgtggaagagaagggcagccgatgaagtgcaaccttcacatgaatgggaatgttatcacctcagaccag

SEQ ID NO: 31892 - DNA, 75 bp, Homo sapiens
agtacggccgaggagacctcgtcggcgtggaaagcggagggaaaggccacttccaccactgagctgccccccgag

SEQ ID NO: 31893 - DNA, 100 bp, Homo sapiens
atcccattctcctcactaaccaaaggtcctgatatccgaaggcttgggacgctatgcaagggacccaaaatttgtgtcagcaacaaaacacgaaatcgct

SEQ ID NO: 31894 - DNA, 75 bp, Homo sapiens
gaaagaccgagtgaagaaaggtggatcctacatgtgccataggatgatcaagttccagatgatcctcagtgaggg

SEQ ID NO: 31895 - DNA, 100 bp, Homo sapiens
ccggcctcgtgcgccgcgctttgagggcctcggcttcacaggatggggctgccagtgtcctgggcccctcctgccctctgggttctagggtgctgcgccc

SEQ ID NO: 31896 - DNA, 100 bp, Homo sapiens
cgtgattgggatcaaccagacggaaaacccgggcaaccttcgcccagaagaggcacttcaggctctcaccatatatgaggggaagtttggtaggctgaag

SEQ ID NO: 31897 - DNA, 99 bp, Homo sapiens
gacgtgggcaagggcgagatcctggagagcctgcaggacggcgcggcagagtccccgtacgcctacagtaacgaaaccagcccaaaagacttcctcttt

SEQ ID NO: 31898 - DNA, 75 bp, Homo sapiens
gtggaaagtctggaccgagctcttggatgttcttggacttgacggttttaaaatcaaagatgggaaaatcggaga

SEQ ID NO: 31899 - DNA, 95 bp, Homo sapiens
gttgggacagaaataacccagagccctggaacaaactgggtcccaatgatcaatacaagatataccttagatgaatttggaacagccagaagaag

SEQ ID NO: 31900 - DNA, 72 bp, Homo sapiens
gtgaaggcacgagtgtggaacagcaccttcatcgaggcttcactgtataaataggagaggatgagagcccag

SEQ ID NO: 31901 - DNA, 98 bp, Homo sapiens
ccagcctcctcaagttattcagtctcgtctcctcggtcagtggactcttattcttcaactcagcatgttccttgaagaaattgccttttacaatggga

SEQ ID NO: 31902 - DNA, 103 bp, Homo sapiens
cgtcctgtttggagatgtctggctctgtagtgggcagagtaacatgcagatgactgtgttacaggtttcagcagccagggaagaggtacctggtcgacgaggt

SEQ ID NO: 31903 - DNA, 100 bp, Homo sapiens
agcgccgcgcgtggggctgtggtggccgcggctctcaggacctcagcaatggagaatatccccatcatcacaactgtcatcactctgccgcacgtgattg

SEQ ID NO: 31904 - DNA, 100 bp, Homo sapiens
gcagactgcggagtcagacggcgctatgtacgccctcttcctcctggccagcctcctgggcgcgggttttctgtctcaactggtctctgacaagcctctg

SEQ ID NO: 31905 - DNA, 75 bp, Homo sapiens
tgagccccgagtgcgaggagccgccgccccccctcgcagcttggtttatggcagctccaggacctcgcaccccga

SEQ ID NO: 31906 - DNA, 100 bp, Homo sapiens
aagagcttcagaaacagagactggaatgtatcctgtcaggtataatgtcagtgaatggcaagaaagttcttcatatggatcgaaacccttactacggagg

SEQ ID NO: 31907 - DNA, 83 bp, Homo sapiens
agtcacccaaacaatcggctgagaatgagaagaggacttgaaagaggagattgatattcgactctccagggttcaggatatca

SEQ ID NO: 31908 - DNA, 100 bp, Homo sapiens
ctgatcgaaggggagtttccacagtgattgatgctgcctcaggtttccgccagctgtggatgcctttgacattatgaccgcagaggattccaccgcagcc

SEQ ID NO: 31909 - DNA, 101 bp, Homo sapiens
gacatgagatggtagccaaacccccaggtcctcttcctgatggatgggaacaagccatgactcaggatggagaaatttactatataaaccataagaacaag

SEQ ID NO: 31910 - DNA, 50 bp, Homo sapiens
ccaaaattgtggaaaagtcactctggtttgacatctacaggaaggtgccc

SEQ ID NO: 31911 - DNA, 113 bp, Homo sapiens
ccgggatcgtgaggatgctgtgatgcatcatctgctctgcggaggcctctacaagccgcgccgtagggagtcagtggatcggtggggaaaatgctgcttaccctgggccctgg

SEQ ID NO: 31912 - DNA, 100 bp, Homo sapiens
ttgaaaaaacagacttgaaagtgcctgccaaagccaagctcaccaaactgaagatgccttctcagtcagttgaggttgcagatgaatacatgttttccct

SEQ ID NO: 31913 - DNA, 75 bp, Homo sapiens
tataaagttattgctaagtgtgggaattttagctaagtatgttgagtctaaaaaggacagagtcacagtagtctt

SEQ ID NO: 31914 - DNA, 100 bp, Homo sapiens
ctgcagtcgatccggaacatgcgcgggaactcccactgtgtggactgcgagacccagagcgaggattaaatccaccacacagggtgaaatctatctccat

SEQ ID NO: 31915 - DNA, 100 bp, Homo sapiens
ggaacaaacaactttatcagaagacggaaattctgtcactggagaagatcgagttttggttcgggttagagacttgacaatacaaaaagctgatgaagtt

SEQ ID NO: 31916 - DNA, 75 bp, Homo sapiens
ggctgtctgattctccttcgctgtggcgggaagatggccggatttgaagggcagctgcaatgactctccgcacgg

SEQ ID NO: 31917 - DNA, 82 bp, Homo sapiens
attcaagttcaagttcacaattggcgattttttatcaagcagaaatgcatcgaacaacgagaatcaagatcactgagctaaa

SEQ ID NO: 31918 - DNA, 100 bp, Homo sapiens
ctcaactaactacaattgtattggcagctagagaggacccctccctcctgaacagcagagtcttgctgcaccacgccaaagctggcaccatcattgcccg

SEQ ID NO: 31919 - DNA, 87 bp, Homo sapiens
ggattccagccccgagcgggacagcgcggcggggagcgacgagcatatcacacctgaaaaattttatgtggaagcttgtgatgatgg

SEQ ID NO: 31920 - DNA, 82 bp, Homo sapiens
ccccctgagcccgaggtgctgacgtcgcaaaaaaattggataacctgcctagagctggaacgttacctccagagcgagccct

SEQ ID NO: 31921 - DNA, 80 bp, Homo sapiens
tccggggacagccagccctcgctggaccagaccatggccgcggccttcgccatgcagtttggtcagctcctgacacactt

SEQ ID NO: 31922 - DNA, 50 bp, Homo sapiens
taatgaagatggccctcagcacacggaattgagttcttctcagactttat

SEQ ID NO: 31923 - DNA, 71 bp, Homo sapiens
aatggcaggacggggaacctacgttttgagtatccgaggagcccaggaggaggaacccacagacccccagc

SEQ ID NO: 31924 - DNA, 75 bp, Homo sapiens
cgtcaacctgatcttaccaggaatcactcactcaggtgatctgtgaaaatggttcgctattcacttgacccggag

SEQ ID NO: 31925 - DNA, 83 bp, Homo sapiens
ataaccagctaagcaaaccagacgcactggtcagtaagacctatacccaccggcgcctgaagttcctctcctccaagttccag

SEQ ID NO: 31926 - DNA, 51 bp, Homo sapiens
ttaaacaagagatttccacagaaggagccaaaaacctgtatatcatctccg

SEQ ID NO: 31927 - DNA, 82 bp, Homo sapiens
cctggatattcctgcaaacccaacagtgagaaagatcagtctaaagaaaaggagaagaaagtgaaaaaaacaattccttcct

SEQ ID NO: 31928 - DNA, 100 bp, Homo sapiens
ggcaaggccaactccgtgcgcaatgccgtcactcaggagtttggccccgtccctgacactgcccgctactacaaggtgttcctgcatgaagccaccgtgc

SEQ ID NO: 31929 - DNA, 50 bp, Homo sapiens
caaggccttccagtatttcatgtgtgctggagaatctggtaaaagcacca

SEQ ID NO: 31930 - DNA, 89 bp, Homo sapiens
ggttccgggaagatggtgctgatcaaggaattgtgacagagctgaatgaacctctctccaatgaagatcgaaatctcctctctgtggcc

SEQ ID NO: 31931 - DNA, 74 bp, Homo sapiens
acttcctgcgtttaactgggtgaaggccagtcaaactgaggtgatctgtgaaaatggttcgctattcacttgac

SEQ ID NO: 31932 - DNA, 74 bp, Homo sapiens
tcgaggtcaagaacacgatcacgttctagatcacatactccaagaagacaattgaccctgctacgggaatggtt

SEQ ID NO: 31933 - DNA, 100 bp, Homo sapiens
aacgcattcaagaaagccgacccccaaggtcggccctcctccacgctgacttccgggtctcactctcccacgcctgtaagaacgctgtgaagacggatgc

SEQ ID NO: 31934 - DNA, 90 bp, Homo sapiens
cgcgaaatgatgggatagcgttgcaaatccttaaaagagtcttaacgtgctacctgggcgatgccttccgctgtgccagctgcccctacc

SEQ ID NO: 31935 - DNA, 100 bp, Homo sapiens
ggggcgacttgcggaagtccaggactcttccatgccaaatgatggtcgactgaggttgagccgtcagggcatcatcttcaagaatagcaagacaggcaaa

SEQ ID NO: 31936 - DNA, 100 bp, Homo sapiens
gactttgtagccatcaacccgagtgcagtttcgatggaaaatgaagggctacaggggaagaattgaaagtgaaggcatacctaccaacaggcaaacaatt

SEQ ID NO: 31937 - DNA, 100 bp, Homo sapiens
catccaagtgcaggaaaacttcaatatctctcggggaaagctactattacctccaggcacggatggtggcaaagaaggcccgcgagtcctgaatggcaac

SEQ ID NO: 31938 - DNA, 74 bp, Homo sapiens
ctacccgcagggcctggcactggccaaggagattgcagttggaattgatcacaccttttcagttgtacttcaat

SEQ ID NO: 31939 - DNA, 100 bp, Homo sapiens
cgttcctgctgctctgcctgctccacaagcggcgccgcgccctcggcctgcacggaataccctctaccatctgctttggtcagggtgccgctcgaggatt

SEQ ID NO: 31940 - DNA, 76 bp, Homo sapiens
ggacatattcgatgccatcgtgatggcggatgagaggagtctactcttcatcttgtgttgagacttcgtggtggtg

SEQ ID NO: 31941 - DNA, 50 bp, Homo sapiens
cagggctctgcaggctgccttggcagggttccgagtctgaggaagacata

SEQ ID NO: 31942 - DNA, 100 bp, Homo sapiens
cagcaaccatgagtggttccatgatgggaagtgacatggttctctacttaaaagacaatgactactgatgaaggtgccaagaacaatgaagaaagcccca

SEQ ID NO: 31943 - DNA, 98 bp, Homo sapiens
ccttgcacaggcctggtttaacactcatagggagcttttggagagcaactttactttagtggcagctgagccagtaccagcagccagatcggaggacc

SEQ ID NO: 31944 - DNA, 87 bp, Homo sapiens
gccccagacggaaagagctacttgctgatgagaaagatcagtctaaagaaaaggagaagaaagtgaaaaaaacaattccttcctggg

SEQ ID NO: 31945 - DNA, 82 bp, Homo sapiens
ggaaatgaccccaacgccaccgagagggcgcctggaatcatcaagatggtgctcatgtggaccagtggtgacgccttcaaga

SEQ ID NO: 31946 - DNA, 80 bp, Homo sapiens
aatcttgtctttggcaaaggattccaagcaaagatcttccctgagacggagtttaagagagctgtgaaagtagcaacagg

SEQ ID NO: 31947 - DNA, 101 bp, Homo sapiens
gaaatacctcgacatccccaagatgctggatgcagagggcggcatgcgttcctgcggacgatcgcatcttgtgtcgctgaagcgcctcccccagggaccgg

SEQ ID NO: 31948 - DNA, 82 bp, Homo sapiens
gtgaaccacagcaagttcatggtcacggagaaggcagcctacataggtgccccacctcaaccagaatgcctggaacaacctg

SEQ ID NO: 31949 - DNA, 75 bp, Homo sapiens
cagccgccttccccaggcagtggaaccttcgggctcctagcattccccatatggtccctcaccattgggttggcc

SEQ ID NO: 31950 - DNA, 51 bp, Homo sapiens
ctcgacactgccagctggaaccagaccattcttctaataggttgtctcaac

SEQ ID NO: 31951 - DNA, 100 bp, Homo sapiens
tcgggaaggagacagccaaagagctggctcagagagagtggtggatatgttcttggctttaaaatagatcctgtggaaaaactacaagaatcagttaagg

SEQ ID NO: 31952 - DNA, 100 bp, Homo sapiens
ccctggagaagccacagcttctgcaaagacaggaggagtgggccctttgtgcgcaatgtccctgctcttctctcgatgcaactctatcgtcacagtcaag

SEQ ID NO: 31953 - DNA, 75 bp, Homo sapiens
agcgatgaaagagatgtctgctgattacagtggcgagatcttgaacaactgctgcgtcatggagtaccaccaagc

SEQ ID NO: 31954 - DNA, 50 bp, Homo sapiens
gcgaatatcgtcatcgttagaaggttacaggaggttccagtggcatcggg

SEQ ID NO: 31955 - DNA, 100 bp, Homo sapiens
gagatttagtcaacttgttgaagagctattgaaaatcatttgtgcttttcagcttgacacaggtttggagtgtcccgttcaagaagttcttccagttcgc

SEQ ID NO: 31956 - DNA, 100 bp, Homo sapiens
ggatgctctacaagcctcatgatctacagcctggaaagaaatatcctactgtgctgttcatatatggtggtcctcagattacgtgtgaaaatgaacttgt

SEQ ID NO: 31957 - DNA, 90 bp, Homo sapiens
ctatgctgaacggtgcagcagtgatggatgcagctcttctgttgataggtgtccttaagtttgctcgcttggtcaagtcctacgaagccc

SEQ ID NO: 31958 - DNA, 51 bp, Homo sapiens
tgaagatggctactctggagttgagatcctgtgccggtatcagaatatctg

SEQ ID NO: 31959 - DNA, 101 bp, Homo sapiens
ttcacctctggttcctacatctggattgtagccataagtggacttcttcgcaagtctgttttcagcatcagggcaaggaaccttctggaaaaggagaccgc

SEQ ID NO: 31960 - DNA, 51 bp, Homo sapiens
gaattgcctttgggactctgaaggctgaagttgtcatggatgcactggtag

SEQ ID NO: 31961 - DNA, 75 bp, Homo sapiens
aaagcatccagctcagaaggttccatgaaagtcaaagctgtggaggaagatgcagagtcagaagatgaagaggag

SEQ ID NO: 31962 - DNA, 100 bp, Homo sapiens
tcatgctttgcggtctgtaatgtcagcagaacaggagaaggatcccatttcgctgaagagagttcgaggtcagcaatagtcctgaacctcagaaggctgt

SEQ ID NO: 31963 - DNA, 87 bp, Homo sapiens
ggatcctgaggaggcagctgcggtggcagctgctgagttctcggtgaaggagcgggacggtatgcgggccatcctggggtcctacga

SEQ ID NO: 31964 - DNA, 75 bp, Homo sapiens
cattgctgatcttgtacttggattcagcaaggaaccttccgcttgaattcggagtgatttaccactgcacagagg

SEQ ID NO: 31965 - DNA, 101 bp, Homo sapiens
atttccgggagaggctgctgtggaggctgaggaggcggcggcggagatctgggagagaagaccaagaggtcggagaagaggtagaaaatgtggcagaggcc

SEQ ID NO: 31966 - DNA, 50 bp, Homo sapiens
tcttctggatgtccctggattgaagcggtctatgcttgcttggtgcttat

SEQ ID NO: 31967 - DNA, 51 bp, Homo sapiens
acctggaggaggtggagttctgtgtggaagaaactggcgatggaatatgag

SEQ ID NO: 31968 - DNA, 100 bp, Homo sapiens
aaagccacgaataacctataatggaggctaagaagtcccgcttgccaatcctaataaaaccatcccggtcattaggaaatatgtatcgtctccctgccac

SEQ ID NO: 31969 - DNA, 85 bp, Homo sapiens
agctacctgacagccccggattattctgcctttgaactgtcggaaaaggtaacagaagatggaactcgaaatcccaatgaaaaac

SEQ ID NO: 31970 - DNA, 101 bp, Homo sapiens
cttcaaccctttcccacaaaagctaattgagtacacgttcctgttgagtacacgttcctgttagtctgtgtaaagaaatctactcaagaacggtttgcgct

SEQ ID NO: 31971 - DNA, 105 bp, Homo sapiens
cacctgttcaccggggagtccctcgccacctgcaagagcctgcagcagtcgcttctccgcagcatagcttggaggagactgcagcctcggactctcacctgcctc

SEQ ID NO: 31972 - DNA, 50 bp, Homo sapiens
tggctgcgcgcgccgggagagatgctgagatttccttgatagctgccgtg

SEQ ID NO: 31973 - DNA, 75 bp, Homo sapiens
gcagactgaaatcacttgtccaaagaccaaagagagtctacagtatgcattagaaaccttgactatgaatggctg

SEQ ID NO: 31974 - DNA, 123 bp, Homo sapiens
gaagaacccatcgggcagctacacatcttgaaagagaagctcttcctgtgaggagagaagatgactgaggaggaggtggagaccgttctggcaggacacgaggacagcaacggctgcatcaac

SEQ ID NO: 31975 - DNA, 107 bp, Homo sapiens
gatcgtgtcgcacacgcacctcggagtctcaccaagctcctgtatctactggaaaatggaagtccagccttaccaacttgtgaaccttgtctgaagggagccagggc

SEQ ID NO: 31976 - DNA, 74 bp, Homo sapiens
ccaggcgtccatgcccgacaacacagtgaacagcagagaatttcaaaggaccttgctaatatctgtaagacggc

SEQ ID NO: 31977 - DNA, 101 bp, Homo sapiens
gaactacagtggatgggtgcagttcaggaaaagggagatttcattgccctggatcttggtgggtcttcctttcgaattctgcgggtgcaagtgaatcatga

SEQ ID NO: 31978 - DNA, 50 bp, Homo sapiens
gtttggatatcctgaaagatcaatggataacgtcattagcagaatctcaa

SEQ ID NO: 31979 - DNA, 98 bp, Homo sapiens
gatcctcacggagaacctgctgatgccaagggcacgtgaagttgttgactggaggaaatatgaacaagaacaggagaaaggtcaggaggatctgaaaa

SEQ ID NO: 31980 - DNA, 100 bp, Homo sapiens
ctctcccccggctccatcgacctcaaggacatcaacttccggccgcagatgtcccagtgccggtggtggtgtgcacattgagccccggtatagacagttc

SEQ ID NO: 31981 - DNA, 87 bp, Homo sapiens
ccatgaactacttgctcagtcatcccgaggtaaaaggcccaggcattgggcttttgggcatttctctaggagctgatatttgtctct

SEQ ID NO: 31982 - DNA, 74 bp, Homo sapiens
tggcgggaagtgtgaagcggccaatggcacggaggcctgcgtatcctcgttcctagctgcctgccagcgtcctc

SEQ ID NO: 31983 - DNA, 96 bp, Homo sapiens
tgacagaagggtaattcgaggtaacacttatgcactccagacagggccactggcatccagtaccctgctgactctgacatgcccccagcctccccc

SEQ ID NO: 31984 - DNA, 101 bp, Homo sapiens
gtggagtattacaacgacagtaacggtctgtgagaactcctgacgtctgaagcttgactcccaagtttccatagcaacaggaaaaaaaaaaatctatccaa

SEQ ID NO: 31985 - DNA, 98 bp, Homo sapiens
tttacattttggacttccagcctccgaaatgcaaagtaaagcagcggttcggctgaaagaagacatgaaaaagatagtggcagtgccattaaatgaac

SEQ ID NO: 31986 - DNA, 101 bp, Homo sapiens
ttgaagatgatgaagatatgacacttacaaggtggacaggcatgattattgggccaccaaggatttggattcaagatgtgaaataatcagcgatgggaaaa

SEQ ID NO: 31987 - DNA, 50 bp, Homo sapiens
cactgcacgacggggctggacggccaattcctgtccccccagcagcatgg

SEQ ID NO: 31988 - DNA, 100 bp, Homo sapiens
gagacgctcaccatagaagcccgattccagcctctgctcccggagaccatgaccaagagcaaagatggcttcctagggatgccgcatcctcgaaggtacc

SEQ ID NO: 31989 - DNA, 83 bp, Homo sapiens
ctgggtctccaggcccgcgaccgtccgccagtcgtcccgaggacacctgctccacttcaccttttgccatgagtaaaagctcc

SEQ ID NO: 31990 - DNA, 90 bp, Homo sapiens
ctgctgcagacacatcagattccctactggtaacagctggagtgcggcctccttggagcggggaaggagagctcttcagttcctttggca

SEQ ID NO: 31991 - DNA, 83 bp, Homo sapiens
cagacctgcatcaacctgatcaccagccaggagtacgccgtcaagaaacgcttcgttaagggactcaggcagtacgggaagaa

SEQ ID NO: 31992 - DNA, 82 bp, Homo sapiens
ttgtagcaggtctaaaagttcaggtccaggctgcatggctgagaggttgaaggaggagattctcaacagagagaaaatggta

SEQ ID NO: 31993 - DNA, 101 bp, Homo sapiens
aacaaccttctgtgagcctagggacccatttctcctcctttgacagggacatcagtggagccttctcagacccacagacacgatgaggcgagtggtacgac

SEQ ID NO: 31994 - DNA, 75 bp, Homo sapiens
gacgtgcacattactccggggacccatgcctcagagcatgcagagaccccaggcatggaggagagcctggcagaa

SEQ ID NO: 31995 - DNA, 90 bp, Homo sapiens
ccacgctgaacgagagggacacggagcagggtaagcttgatgattaccaggaacgaatgaacaaaggggaaaggcttaatcaagatcagc

SEQ ID NO: 31996 - DNA, 75 bp, Homo sapiens
gagtgagcccttcagccccggggaaggtccccttcccctgagcccatctacaatagcgaggggaagcggcttaac

SEQ ID NO: 31997 - DNA, 92 bp, Homo sapiens
gacaaggaccctgacctgcctgtcgtcgtggtggccaacaagcaggatctcactggcatcgaatctatggatcagtgtcgccataccttgga

SEQ ID NO: 31998 - DNA, 89 bp, Homo sapiens
ctagccttccagctgccagggggcttaatgaactgcaaagctctgcattctccagactctgtgctttcctaagataggaacccagaaga

SEQ ID NO: 31999 - DNA, 73 bp, Homo sapiens
tcaccagtgagctggagaagttccagacagctggaaatgatccctattgttttgtggagtttcatgagcatcg

SEQ ID NO: 32000 - DNA, 75 bp, Homo sapiens
gtttccagtatatacatcaagtcactgagtttggtgccctggttgtcagatgttggaaagcagtaggacggaaca

SEQ ID NO: 32001 - DNA, 50 bp, Homo sapiens
ccatccctcgaggaagtttcatcaggtgtggcggggcgccctgctcctgg

SEQ ID NO: 32002 - DNA, 100 bp, Homo sapiens
aagaaaccaatttcctggcggcactgtcttgggccctcctgtgatagtagaacaagtcagccagttggctgtgttcatagaggcagcattagactatcac

SEQ ID NO: 32003 - DNA, 100 bp, Homo sapiens
cttcgccggtcaccggctcctgcaggatccccttggaaaggacttccagaactgaccaatgagaatgcccagtactgtcctttcagctgtgaaacacaag

SEQ ID NO: 32004 - DNA, 98 bp, Homo sapiens
aaactcccaattgcaccattaattatggggtcacatccagttgacaataaatggttggcaaaagcagcttttgatgatgcaattgcagaactggatac

SEQ ID NO: 32005 - DNA, 100 bp, Homo sapiens
gacagaaccagtcagcattctacaaccccagaccaccgttaatccagatcgcatcaaacaaatgccttcaattaagttgcagagttctgatggagagata

SEQ ID NO: 32006 - DNA, 75 bp, Homo sapiens
cagacatggggaacagggtcacagctctcacccagccgattccacgactcttctttgcgggagaacatacgatcc

SEQ ID NO: 32007 - DNA, 75 bp, Homo sapiens
ctgaccgcgggccctgccctgggctggaacgaccctgctgctgataaacttattaaaatttggggcgcgtatgat

SEQ ID NO: 32008 - DNA, 74 bp, Homo sapiens
ggaaaatgccaacgccgtgtctgaagagtaactggaatgagattgttgacagctttgatgacatgaacctctcg

SEQ ID NO: 32009 - DNA, 88 bp, Homo sapiens
tgggaaaggcggctgatggtggtgggcgatgcacccgagagcatccaggtgataaaagaaaatgtggctgaagttacccgaagttcag

SEQ ID NO: 32010 - DNA, 100 bp, Homo sapiens
aagatgaagagcaagcccctaggaatctgcctgataatcgattgcattggcaatgagacagttctcacaataccttcatgaaaatgcgtcctatgtccgc

SEQ ID NO: 32011 - DNA, 50 bp, Homo sapiens
ggctagccggcgagttgagtggcgagcagaagattttcgcaagctctgga

SEQ ID NO: 32012 - DNA, 100 bp, Homo sapiens
cctacggcgtgggccgctaccaggaggtcaaccccggtccctgggcgtgaccatctgggagctctttgagctgggcacgcagccctatccccagcactcg

SEQ ID NO: 32013 - DNA, 100 bp, Homo sapiens
tttttcttaacagcaattgctttgaacatctcatacgactgctacagaactgcaagaaacgatggaaagaactttctaaggaagacttatctcctgcctt

SEQ ID NO: 32014 - DNA, 51 bp, Homo sapiens
tgagcctcaagtgcttctgcattacattgcagatctgatctcttctgaaca

SEQ ID NO: 32015 - DNA, 73 bp, Homo sapiens
ttttattccacaaacttatacaacctgatcatccgcagatatctcagcaggctggtaatcctggtggacctgg

SEQ ID NO: 32016 - DNA, 60 bp, Homo sapiens
ctccacatgaatattctgttttgctgcccgaagcttggttgacatcatggacatatgtga

SEQ ID NO: 32017 - DNA, 100 bp, Homo sapiens
tcactctccaattctgttgttgcctccatgcgccaatccaaaccgaaagccagaagcaatttttccagctagtcaaattacgaaagcttggacttagtga

SEQ ID NO: 32018 - DNA, 97 bp, Homo sapiens
aagcaggcctcatctcagagctgggtgccaggctgaaggatcactgaggaaggggaagtgggcaaagcagagtaaaaggccaagctatgatagcaac

SEQ ID NO: 32019 - DNA, 50 bp, Homo sapiens
cttccacagtgcaaggaagacgccgaggactccaacctgtctgtgcacac

SEQ ID NO: 32020 - DNA, 100 bp, Homo sapiens
ggagagccacgcaggatctcacagctgcagtctaatagtaacacagagatgtccagaaggcttcttgggggaatattgtcaacatcgagacccctgtgag

SEQ ID NO: 32021 - DNA, 82 bp, Homo sapiens
ataacatcgtatggggtcatcgcagaggctttgctcaggttgcaattgatgcaaaagtggagagcaagccctggaggttcac

SEQ ID NO: 32022 - DNA, 76 bp, Homo sapiens
ctcgtacttctggccactgggcgagcgtctggcagcatgcaatgatgctacctgttctgacccatcatatccgcta

SEQ ID NO: 32023 - DNA, 90 bp, Homo sapiens
cagcgccgcgcccggggccgtgcgctctcgggccactcggccgcaggtcacccctggttcgacttgtgctgtctttggcctaggaggtgt

SEQ ID NO: 32024 - DNA, 75 bp, Homo sapiens
gtaaaagattgtaaaggtttgggattcagcattttggattaccagtgcaccaggtggcggagcgggtggaggccc

SEQ ID NO: 32025 - DNA, 95 bp, Homo sapiens
ttcgttgcttgcttgcctgtgcgcgcgtgcgcggacatggcctcaaacggcataagatgcacatttttctgctctggagccgggaatgaaatatt

SEQ ID NO: 32026 - DNA, 100 bp, Homo sapiens
cgccataagcataatcaagaaatcattttgcaaatgatggtatgttacttacggtcatgaactgatttggaagaacagggagccgctagtgaaaatctgg

SEQ ID NO: 32027 - DNA, 75 bp, Homo sapiens
tcatcctggttctggaatcctcagttcaagaatagctctccagacccccagctggccatgtggtgagttcagggc

SEQ ID NO: 32028 - DNA, 74 bp, Homo sapiens
tagaccactgcctgtgtctcgtcttgtatctctaattggaagcagaactgttgccgttattacatcagatggga

SEQ ID NO: 32029 - DNA, 75 bp, Homo sapiens
agagacctctacttagctcagcaattcttaccttgtctacttccccagcaggacagcatcattctcctatatctt

SEQ ID NO: 32030 - DNA, 100 bp, Homo sapiens
ggcgccttcgacccctacaccctggtccggcagccgcacaccatcctgcgcgtcgtgtcttgggggcactatggcagacaaagttaggaggcagaggccg

SEQ ID NO: 32031 - DNA, 87 bp, Homo sapiens
ggctggagcgaatcccagaccagctcggctacctggtactgagtgaaggtgcagtgctggcgatcaaagatctgcgagaccacaagc

SEQ ID NO: 32032 - DNA, 98 bp, Homo sapiens
tctggtgtgggtttcccaagcaaggttccttggaagaagatgtctgcagagaaatcatgagtggaggatctcaagtccacattttttggggtgctcca

SEQ ID NO: 32033 - DNA, 88 bp, Homo sapiens
ctgaatgatctctacatctcagactactgtgtgtggattcagaaagtcaatagccggatcgagctgggagatgtgacaccacacaata

SEQ ID NO: 32034 - DNA, 82 bp, Homo sapiens
tctccctgtcctagctctgtaactgtttacagttttcctttggaatatggataaatacaccatgatacggaaactagaagga

SEQ ID NO: 32035 - DNA, 100 bp, Homo sapiens
cggctggtgaaggtcaatgaggacacaatggagctgctgcgggatgcccagggcctctgcatcccctgccaggccgacgcatcttctctccagactgccg

SEQ ID NO: 32036 - DNA, 96 bp, Homo sapiens
ttggatgtcaatgatgatttttctgaggaagtaaccaaacaagaagacctcatgagagaggtctctgcatggattcccccagccctatggaccccc

SEQ ID NO: 32037 - DNA, 98 bp, Homo sapiens
ttacatcgaatgaatcctactaagcaagaaacacaggatgccctggatcttcatcactggtccagctgtaataccagggtacttctccgttgatgtga

SEQ ID NO: 32038 - DNA, 100 bp, Homo sapiens
ggaagagcggccccgcggggggcgatgaccgtgcgctgaccctgactcactccagaattcctagaggacctgtgcaacaacctcttgaggatcgaatctt

SEQ ID NO: 32039 - DNA, 75 bp, Homo sapiens
ttttttggaacagaagatcaggagccgatatgtggatttactcccttgatggaagcagctgctgctggccatgag

SEQ ID NO: 32040 - DNA, 87 bp, Homo sapiens
agaaactctttcatctgctgctaaaagcttcctgcctgacacagctcacttcaagaagtgcacaatgtcagaacgtggaattaagtg

SEQ ID NO: 32041 - DNA, 100 bp, Homo sapiens
tgaggtagatcatgaaagagatcctggacctatgaatatccagtttgagccatcggatctaagatccaaaagctatgaagacggccaagtgggagatgca

SEQ ID NO: 32042 - DNA, 82 bp, Homo sapiens
tcattcacttctagacgacaaaatgcaaaaaaggaggccaaagactttctcctggggagtttgcttcacctacggcacctgg

SEQ ID NO: 32043 - DNA, 100 bp, Homo sapiens
gtcgtccaggaggcctcctccaagccggccaattccccccgcaccaaattgcatcgtttcccaggtaaggagtgccaatggaccgatgcctgcctgtctc

SEQ ID NO: 32044 - DNA, 100 bp, Homo sapiens
ctcctcgctcccgccaccgccggacttcaatgcccagtccccagctcgccagcgtagaagaaggctggtggagtggaaccctgaataacaagttgggact

SEQ ID NO: 32045 - DNA, 100 bp, Homo sapiens
tcggctgttcagctgcgctccagtcggcccaggcgccgcggcgaggagcgagcgctgcgaggtggcggcctgaggaaaccagaacttcctcagagagcat

SEQ ID NO: 32046 - DNA, 140 bp, Homo sapiens
ccctctccttccaccaaggagcgcccagaggccggcgggagctccaggttcacctcctcctcctccaggtatgatgaatatcatcctgaggaggatctgcagcacacggccagtgactttgtggccaaagtggatgaccc

SEQ ID NO: 32047 - DNA, 100 bp, Homo sapiens
tcgttcgccttcggggccccagcggcggcggcgaagagcccgccctgtcccagtaccaggaaactagcagagttgttcacatcatggattttcaacgagg

SEQ ID NO: 32048 - DNA, 101 bp, Homo sapiens
tttccatcaaaaagtgattaagcagagaatggagaagaaggttgattccagctccagtggctgttggacaattatgagacagcagaaggagtgagccttcc

SEQ ID NO: 32049 - DNA, 75 bp, Homo sapiens
ctctttgacgctgcctacttcgggcagaaggactctgtgtgtggttctacctacagcgtcctgtccaccatgccc

SEQ ID NO: 32050 - DNA, 75 bp, Homo sapiens
ggagctggacgcgggaggaggcggcggcggcgtacccggcagtgtcacctgctcctggatgtcttcaactccacc

SEQ ID NO: 32051 - DNA, 98 bp, Homo sapiens
tctgcgctacgagatcttcaagacagaagtgggtttcaccatgttggccaggctggtctcgaactcctgacttcaagtgattggactcccaaagtgct

SEQ ID NO: 32052 - DNA, 97 bp, Homo sapiens
gggactgaacaccgcacaggcaggaggcatggccaagctttcggaaaatgtgattgatcgaatgaaggaatcctctccatctggttcgaagtctcag

SEQ ID NO: 32053 - DNA, 100 bp, Homo sapiens
ctgaaagtacagaggaccagaataatgaaactcagcaattggtggccattttatgtcagttcctcagagaaattgactacaaaacagcgtttaaatctct

SEQ ID NO: 32054 - DNA, 82 bp, Homo sapiens
gcaaaccaaggatctggggatcttcgcactatcccaagacagtactactggtatgacgagcgggggaagaaggtcaagtgca

SEQ ID NO: 32055 - DNA, 74 bp, Homo sapiens
cggcttcggagcgggagtgttcgttgtgccagcgactaaaaagagagttctgccttctccgagggaagcaaggt

SEQ ID NO: 32056 - DNA, 50 bp, Homo sapiens
cctgaccaagtccagccccagcatggcaatcagtacctgggaagtacgcc

SEQ ID NO: 32057 - DNA, 100 bp, Homo sapiens
ccgtttctggctccgggctgagcttcctggagaagaggaagcttcggaaccaaaaagaagcttcccagagccggggccaggagccccaagcgccctctag

SEQ ID NO: 32058 - DNA, 82 bp, Homo sapiens
gatcgattcaactatgtggtcatgcagttgcagattaaagagtctattgttggggaaatcagacgggaaattgtaagtggac

SEQ ID NO: 32059 - DNA, 75 bp, Homo sapiens
tccgtccgccgccaccacccactccggacacaggtcagttcaccgggacctggaggcccagattgcgatcgtgac

SEQ ID NO: 32060 - DNA, 100 bp, Homo sapiens
cttcttccatgattttttgaatctagactgggctgttctctgtgttaaaccaatcagttgcgaccttctcttaacaggcgcccagacaccatgtcacaac

SEQ ID NO: 32061 - DNA, 101 bp, Homo sapiens
aaccagccgactggagcaggcagcagcccaggacccactgatctcagcatgaagagacaattggcgactagctcaggatcctccagcagctcaaactccag

SEQ ID NO: 32062 - DNA, 75 bp, Homo sapiens
gccattggggtgcagcagctgcaccccaccttgatccagcggacttacggataacgaaggaggcccaacttcatt

SEQ ID NO: 32063 - DNA, 97 bp, Homo sapiens
cctaccaggaacgcttggcacgtctagaaggggataaggagtccctcatattgcagggcatcaggtactgtttatacagcactagacattgcaacag

SEQ ID NO: 32064 - DNA, 50 bp, Homo sapiens
atctccgctggacacaccgcctccgaggtgtttcagtcacctccagtaac

SEQ ID NO: 32065 - DNA, 89 bp, Homo sapiens
acgatcaataaacttgatcgcattatggccagcactattaaggttgaaatcacaaagattagacacctttttagataggtgttcttcag

SEQ ID NO: 32066 - DNA, 98 bp, Homo sapiens
caggagctacggcccagcgccgggcgctggccacgtgcaggttggcaaaagcagcttttgatgatgcaattgcagaactggatacgctgagtgaagaa

SEQ ID NO: 32067 - DNA, 83 bp, Homo sapiens
tcctagctgaacagcgcgaggcggcggcagcgagccgggtcccaccatggccgcgaatgggatgtggagacgctggtagcggg

SEQ ID NO: 32068 - DNA, 78 bp, Homo sapiens
atgatgcaagatgtggcagaagaacaagaagttgagaccgagaatgtggaaacaggaatcatgggtaaagaaggaaga

SEQ ID NO: 32069 - DNA, 100 bp, Homo sapiens
ctggaagcagaacctgcgggccatctaccagtgcttcgtgtggagcggcacggctgaggcccgcaagcgcaaggtcgggaaagaggttaaagaagacacg

SEQ ID NO: 32070 - DNA, 100 bp, Homo sapiens
tctccaaacatgatcgtttactgcaaagtaactcaactggacccaaataaatcattattggaggtaaagttgttccctcaagaaacccttttccttgaag

SEQ ID NO: 32071 - DNA, 51 bp, Homo sapiens
gtgctttgctggctgtgggggctacaaaagatgctattaacattctgaagg

SEQ ID NO: 32072 - DNA, 83 bp, Homo sapiens
agatgtttgtcgactggaatggatttggtgttgtactgcgaggcattcctgaccacctacaggaccttcatctccccagagga

SEQ ID NO: 32073 - DNA, 75 bp, Homo sapiens
aaggattccaagtaactcttatttggtgatctgcaactctttcaccatctgtaatgcggagatgcaggaagttgg

SEQ ID NO: 32074 - DNA, 101 bp, Homo sapiens
gaagaagaaacgggccgcgaaccgcagtatcatgctggccaagaagatcatcattaaggacggaggcacgagtatgatcggttgggcttcctcctgaatct

SEQ ID NO: 32075 - DNA, 75 bp, Homo sapiens
tgcagcgaatcaagcgggagttcaaggaggtgctgaagagcgaggagtctgcagatctccaggggagcccaccag

SEQ ID NO: 32076 - DNA, 100 bp, Homo sapiens
tctgccttcctgttcacggtgaccttcgcttggtgtcctcctggcctcagcaacctgacaattctgtcgtgtcccgatcacctgaaagaaccattcttag

SEQ ID NO: 32077 - DNA, 100 bp, Homo sapiens
aggaagttgtatattccaataaacagtcactactaggaaaactcaaatctttggcaaccaagccggaagtcggtgcagcccacctcagaggagcgcatcc

SEQ ID NO: 32078 - DNA, 101 bp, Homo sapiens
ggagtcccgtatggcccaatcaacaacatgaagaatgtatttgcagaacctcaggaaggttatagagatggaatagatgctggcaaagcagttactcttca

SEQ ID NO: 32079 - DNA, 75 bp, Homo sapiens
cataacaagcagcagtgaggacaccaaaggttcgatacaagaggctgttttcctagcgtggcttgctgcctttgg

SEQ ID NO: 32080 - DNA, 98 bp, Homo sapiens
cagacatcctccggaacatctgccagcacttcagcaccaaggtgagccagtggtacgagctggtggtgtttacagcaagcatggagatctatggctct

SEQ ID NO: 32081 - DNA, 98 bp, Homo sapiens
aaagattcttaagctgcctcattcttccatcctcagaacgttttttgcatgtctgacacccatgactccacctggaccttatggctccacccagaagc

SEQ ID NO: 32082 - DNA, 74 bp, Homo sapiens
agtcttcagcctcatctactgcacacttgagtccatgagattttagagtggttgcagaggcagtgttaacatcc

SEQ ID NO: 32083 - DNA, 98 bp, Homo sapiens
gtgtgaattggatttgatcttccatatggataagaacctaaaggcagacccagaagagctttttacaaaactagagaaaattgggaagggctcctttg

SEQ ID NO: 32084 - DNA, 144 bp, Homo sapiens
tgagaaccagcaaggaaaatccaaggcggctcattttgtgttcaggacctcggcccagcccacagccatcccagccaatttaattcaggagatgaattctgatgacccagttgtgcaacagaaagctgtcctggagacagaaaa

SEQ ID NO: 32085 - DNA, 75 bp, Homo sapiens
tttaactgaagatagtgcctttcagccctaccagagtgaagatgaagctggatgtagctcagttgatgaagaaag

SEQ ID NO: 32086 - DNA, 80 bp, Homo sapiens
atgagcgacagcggcgagcagaactacggcgagcggatagtcgcagaggaccagttttgtggccaccaagggaatgacat

SEQ ID NO: 32087 - DNA, 80 bp, Homo sapiens
caaaggggaagaccagagcattgaagatcagtacaaaaattcttcaagaaatctaagaattgttggtgaggatgatggag

SEQ ID NO: 32088 - DNA, 100 bp, Homo sapiens
ccgtggacagctccaaggccaggacctccctggatgccctgaagatcagcatccgccagctcaagtggaaggagattctgctctctttgctgaactcggt

SEQ ID NO: 32089 - DNA, 50 bp, Homo sapiens
ccaaattagaagaaatgcttgggtctcgctctgtcacccaagctggagtg

SEQ ID NO: 32090 - DNA, 102 bp, Homo sapiens
ggggaagttcaggaaacatccaagaaaaatgtccttaaagcaattgagcaggctgatctactgcaggagtaggggagactgcattgctgagtcctggccctc

SEQ ID NO: 32091 - DNA, 90 bp, Homo sapiens
gcttcatcttctggagaaagaagagtcgactttatgtactacaaggtggccttgcccagcaagaatggagagtgcctgaactattgcaca

SEQ ID NO: 32092 - DNA, 75 bp, Homo sapiens
gcaatggcacaaagttctctcgatcagggcatacatctttcttcgacaaaggaagctccaccatgaggcgaggtg

SEQ ID NO: 32093 - DNA, 100 bp, Homo sapiens
tggaggacgaacgtgttgtgcctgctgaggatggccggaggctcgccgacgaccttgatcctgaggaggatgaaggggctggccctggaggccgagagtg

SEQ ID NO: 32094 - DNA, 82 bp, Homo sapiens
ctggccaagaagatcatcattaaggacggaggcacggatattagaaatggctactccccagtcaattttcatctttgcaatc

SEQ ID NO: 32095 - DNA, 75 bp, Homo sapiens
tatccaggagccacaaagtgaggcagatccagttcctaatggtttgcgagctttgccagttttctatgcctgcac

SEQ ID NO: 32096 - DNA, 48 bp, Homo sapiens
aacatgcagtccctgcttcctgccggacatgaattttataatccccag

SEQ ID NO: 32097 - DNA, 90 bp, Homo sapiens
gatgacgatttggatgaatatacccttagaaaaaatgtggcagtggtgaatctgtaaaatatttcctggataacttggataaacttggag

SEQ ID NO: 32098 - DNA, 98 bp, Homo sapiens
tcagcgtcgctgcccccagctcagctcttactgcgggccgctccgacggcggtccatcctggtgtatgtgctcaagaggccttatgtggatgagttcc

SEQ ID NO: 32099 - DNA, 113 bp, Homo sapiens
cagcggaagatggtgttgctgagagtgttaattctgctcctctcctgggcggcggggatgggaggttgggggccgtcccgctcctaaggcaggaagatggtggccgcaaagaa

SEQ ID NO: 32100 - DNA, 100 bp, Homo sapiens
acgaggcacagggaagttctgaatctggcccaaggctccaggaggccagagctctactgaagcggcggcggccccgggggccagggggccggggactact

SEQ ID NO: 32101 - DNA, 50 bp, Homo sapiens
tatagtccgagttgtctctgcagggcaaatcctgatcctaactgttgtct

SEQ ID NO: 32102 - DNA, 90 bp, Homo sapiens
ccaatcttgaaacacctgcaggatattaaagtgaaattttctgaccctggacagcctatgacttaattcagtgcacaaatgagatgaatg

SEQ ID NO: 32103 - DNA, 98 bp, Homo sapiens
ctggcagctgggccggcctgcctccgagtccccacatcaccacactgccccggtacagccaaagaccggagctttggagagatgaagtttaaacagtg

SEQ ID NO: 32104 - DNA, 100 bp, Homo sapiens
cagggatgttgcctagtggagtgttagctggaggacggcagaccctgcaaagtggtcacggtctagatcacattctcgatccagaggaaggcgatactct

SEQ ID NO: 32105 - DNA, 75 bp, Homo sapiens
atgattttgaaccttacttgagtccacaggcaaggcccgtatggtttaggaatgatttattacaagcaagaaaaa

SEQ ID NO: 32106 - DNA, 111 bp, Homo sapiens
gggacctctaccgggatttcaggaaggagaatgttgggaacgtggtctccctgggtgcttgtgaatgacttcttcttggtggcttgtcttgaggatttcattgaaaatgcc

SEQ ID NO: 32107 - DNA, 50 bp, Homo sapiens
gttctctaggccttttagaaaacatgggatgccagatgatatgaacttca

SEQ ID NO: 32108 - DNA, 75 bp, Homo sapiens
ttagaagctaccgagttaccctaagaaagtttaagctatgaagaaggacatccctcacactctgaaacagatctc

SEQ ID NO: 32109 - DNA, 83 bp, Homo sapiens
gtgctgacgtcgcaaaaaaattggatagttgctatcaagatcatagataagacccagctggatgaagaaaacttgaagaagat

SEQ ID NO: 32110 - DNA, 80 bp, Homo sapiens
ttcctagtgagtcggcggctgatttagaaggaggttcaggctacggcccctcgggaggcattggcacagaccgtgctcgc

SEQ ID NO: 32111 - DNA, 75 bp, Homo sapiens
attcagtgtcatgtgaggacgtgcttcctgcttcatagataagagatccgagtgaagcctgacaggaccggtgtg

SEQ ID NO: 32112 - DNA, 83 bp, Homo sapiens
atggaccccgatggtgtcatcgagatttatttaattgcccaactaccactgatgaagatatattggagtgactgctgaaattg

SEQ ID NO: 32113 - DNA, 101 bp, Homo sapiens
atttttcgcttctcttcagggatgagtcatgtggtggtgaaaaatgaccctgaactggaccagcagctgcactgggtgttcaacagccatcactccttgga

SEQ ID NO: 32114 - DNA, 100 bp, Homo sapiens
tggcacggagcaaccccaagtcaccacaaaaacctatcgttagagtcttcctgcccaacaaacagaggacagtgggcacacgtgtttcacgttgacaggt

SEQ ID NO: 32115 - DNA, 100 bp, Homo sapiens
tttttatccaaccctaagattacttcacaaatgcgctaatgtgcatgctacaacagcaacaggagacacagccttaacctatgcttgtgaaaatggacat

SEQ ID NO: 32116 - DNA, 83 bp, Homo sapiens
cggaggaggaggagaggatgatttttggatcctgagaattgatctatgttggatcatcgctgtcccagcagaagctgctgaca

SEQ ID NO: 32117 - DNA, 76 bp, Homo sapiens
ccttggccaagatgacccaactccctcgaggactcagcccaaaaccatgtttgcccaagttgaatctgatgatgag

SEQ ID NO: 32118 - DNA, 75 bp, Homo sapiens
gcactacaacaggaaaatcatattatagatggagtaaagacccaccggagctggagtatcaggaggcagtcagca

SEQ ID NO: 32119 - DNA, 100 bp, Homo sapiens
gctgacgttcctcagagcagccctgggctgtcagatgtgtcgtggaggccgaatgtttgcaccaaccaaaacctggcgccgttggcatcgtagagtgaac

SEQ ID NO: 32120 - DNA, 98 bp, Homo sapiens
ccaccatggcgcggagcgaggcagcggcggcggggccgggcccggggcccccccgggctggcctaggcgaggacttctaccgcgaggccatcgagcac

SEQ ID NO: 32121 - DNA, 75 bp, Homo sapiens
ccagcccggccccagtgaacggaactttatattgctgttggaatatctggagccatccaacatttagctgggatg

SEQ ID NO: 32122 - DNA, 98 bp, Homo sapiens
ggtgtaaggaaggtgatgtcgtaaagccgggagtgtcgtaaaccaggaccttaaagaagccaacttcgacatcaatcagctatatgactgcaattggg

SEQ ID NO: 32123 - DNA, 98 bp, Homo sapiens
gtggccttggccaaccagtgcctctcccaagtactgtaaaaccatgcctagatcttttggttaactggctgcacatataccttaataaccaggattcg

SEQ ID NO: 32124 - DNA, 101 bp, Homo sapiens
gtgagggactccgccctcgagttcctgacccagctgagcaggcactggggagggctcaagggttcttgttgatgcacgagataagcttggcattccttggc

SEQ ID NO: 32125 - DNA, 74 bp, Homo sapiens
cgaatacagctgtgacctggaggaagttatccctatgcacctggccacctcccccatcctgtcagaaggagctt

SEQ ID NO: 32126 - DNA, 100 bp, Homo sapiens
accttgaaggccctacgcagttccgacaaaggtcgcctttgctactaccgcgactggctgctgcggcgcgagctgctggaaacgcgttctgccaggctgc

SEQ ID NO: 32127 - DNA, 87 bp, Homo sapiens
tgttcataaacagtaccctgccaatcaaggatatacgccatttctcacagagagatgctctgtctctgcagtttgaaccagtactac

SEQ ID NO: 32128 - DNA, 82 bp, Homo sapiens
ccgacgcgaggcagggagcttccaggttataggaagatgttaccgagtacttcagtgaattccttagtgcaggggaacggag

SEQ ID NO: 32129 - DNA, 141 bp, Homo sapiens
ttcccagaaaaaatggtctccagctgtctcgatgcacacactggtatatcccatgaagacctcatccaggtccgtgggccacatccacaggcgagtcactgaccacctgggtgtcgtctactatgtgggagacactttctc

SEQ ID NO: 32130 - DNA, 90 bp, Homo sapiens
gctctttggaaagaagccaaagtttaatcccatggaatcaatcaaattaaatcatcatgactacattgattccccatcgctgaaggacag

SEQ ID NO: 32131 - DNA, 100 bp, Homo sapiens
ctgatgagctgagaaacaaagccacccagccaatgaaggatgtgatggtggcaggtgggatggagagcatgtccaatgttccatatgtaatgaacagagg

SEQ ID NO: 32132 - DNA, 98 bp, Homo sapiens
tatgccctgcgtaaactggatgacaccaaattccgctctcatgagggcgctgatggacgagaccatgaaggagttgaaggcctacaaatcggaactgg

SEQ ID NO: 32133 - DNA, 90 bp, Homo sapiens
tcaggatgacacagtgcctgagagcagccgtgtcctggacagcaaggggcaggagctggcggtcctgtggatgtcaatattctagctaag

SEQ ID NO: 32134 - DNA, 75 bp, Homo sapiens
cttgactttactcaagaaagcgagatactgggtcgtcaggatggagttttgcaagactgggtcattgacgattgc

SEQ ID NO: 32135 - DNA, 100 bp, Homo sapiens
atttcccgcacatgattactttaaagatactggaggagatggtcaagaatcgctctataagatctgcaagactgtagactccactccactttcagttcac

SEQ ID NO: 32136 - DNA, 82 bp, Homo sapiens
ctttgagatgtagttatcatttaatgagaggagagaggcgaccactttggtctaatataaatgggcctgggacacccaggcc

SEQ ID NO: 32137 - DNA, 100 bp, Homo sapiens
ataaagtagacacaatgattgttcaggcaatttcatgtatgctctatacaatccataacacttatgatgacattgaaaataaagtcgttgcagatctagg

SEQ ID NO: 32138 - DNA, 95 bp, Homo sapiens
aacggattaacagggtcattcaagagttaggtctggataaagtggcagactccaaggtgtgcctacaggggttgtggaaggagacgctgcccccg

SEQ ID NO: 32139 - DNA, 75 bp, Homo sapiens
caagttggctgatttaatcgaaagagatcgtctgctgctggcggtggatgctctccgattgcgtttggaagagaa

SEQ ID NO: 32140 - DNA, 101 bp, Homo sapiens
gtcagggacacggggtgctgcgctgcgccgacggctccacctacaaggaaacttttgagaagaactttgaaagagaaacccataaaataagtgagcaaaat

SEQ ID NO: 32141 - DNA, 100 bp, Homo sapiens
agagaccctctcgggagcgagatcgagaaaaagttactcaaagatctgtttctccatcacctgtgcctatccgagtgaagcctgacaggaccggtgtggt

SEQ ID NO: 32142 - DNA, 100 bp, Homo sapiens
gggccgcgaaccgcagtatcatgctggccaagaagatcatcattaaggacggaggcacgattgcttccaagtatgatcatcaggcagaagaagatcttcg

SEQ ID NO: 32143 - DNA, 75 bp, Homo sapiens
cccctctttcccgcccaccaggcaattccagattgtctaaagccccaggaaaaatggtggaaaattcaccgtcgc

SEQ ID NO: 32144 - DNA, 100 bp, Homo sapiens
aaagcggccaaagaagtgaagctgctgctactcgctagccacagtgcagcctggccagaatttccacatgttcacaaaggaagaacttgaagaggttatc

SEQ ID NO: 32145 - DNA, 100 bp, Homo sapiens
cccgaaacccccatctccggcggagagaccgtccgaggtaattgtctgccacgagtgcacattctgaaaacagcatgccccaggatttgtcagaggccct

SEQ ID NO: 32146 - DNA, 71 bp, Homo sapiens
atgatgctcagtttgatgcgtcacactacgacagtgagaaaggagaatggagatctcctctcatcagtctc

SEQ ID NO: 32147 - DNA, 98 bp, Homo sapiens
acgcggatttggctggcgtcccgcgttgctggatctttccaatgaagggtttacaaactgggaattcatgactgtccactgctggggagaaaaggctg

SEQ ID NO: 32148 - DNA, 100 bp, Homo sapiens
agaagtatatgcaggaaattttgtggaagtctatgttaacaatgaatgggcaaccagtgttggggaaggagggagctttggagaacttgctttgatttat

SEQ ID NO: 32149 - DNA, 100 bp, Homo sapiens
ccgcggccaggccccccaacatggactgtctctgtatagtgacaaccaagaattctggccagttttatctccggcctcttcaatttctacgaggacttgt

SEQ ID NO: 32150 - DNA, 76 bp, Homo sapiens
gctcttcaaagcgatccacaatctgttagaaagggaggttcccctgaaggatgctaaggaatacgctgaatccata

SEQ ID NO: 32151 - DNA, 50 bp, Homo sapiens
ggaattacactgtgatacgactgactatatttggagttcttacaacatgg

SEQ ID NO: 32152 - DNA, 75 bp, Homo sapiens
ccatcagcttcagagaatggcagccatttatttgtcccgtgccgtggtccttcagcatatctctgtgctgcagac

SEQ ID NO: 32153 - DNA, 90 bp, Homo sapiens
tccaagctctactgtgacttcagagacactgccaagcagccttagccctagtgtagaggctgtgtgggtatccccccttctactccaacc

SEQ ID NO: 32154 - DNA, 100 bp, Homo sapiens
tgagccatttcgaatcacttaaaggagtggacattgctagcaatgagctcccaaagccatccagatcccagcatggtgagtgcctacatgtacccagcag

SEQ ID NO: 32155 - DNA, 88 bp, Homo sapiens
gaactcattagaaagatctatagcactctggctggcaccaggaaagatgttgaagtgactaagggttttacagacatttcaccagagg

SEQ ID NO: 32156 - DNA, 90 bp, Homo sapiens
tgccttccgcgcacctcagtggtacctgcacctgtctggcctgggcgccagcgcggctgcaggccaagatcgaaagctgctttgcgtcgc

SEQ ID NO: 32157 - DNA, 109 bp, Homo sapiens
cagccgccactctgcctctgaagggaaggaagggaaagggtgcagtcagcctcagtttccaaagccggaaaaggatcctctagtagccacggtgtggcagctgctctga

SEQ ID NO: 32158 - DNA, 51 bp, Homo sapiens
agaccttgggcatcatcggacttggggccaccaaggacatggggaagatgc

SEQ ID NO: 32159 - DNA, 90 bp, Homo sapiens
ggaggacacagcagcatgggacagtcagggaggcttccttcaaaatgtctactgttcacgaaatcctgtgcaagctcagcttggagggtg

SEQ ID NO: 32160 - DNA, 100 bp, Homo sapiens
acgccacattaaccctttcattttgtttggaagatggaccaaagcgatacatattgctgacagacagaacgccttggaggctgagtggaggacggtgcag

SEQ ID NO: 32161 - DNA, 82 bp, Homo sapiens
ggagtggacatcagccccaaacaggacgaaggcgtgctgaagttgattatggaagattcccacaagagtaccacgtcagaga

SEQ ID NO: 32162 - DNA, 97 bp, Homo sapiens
ccgcgtgtggggcgtgggccgcgacaatggccgatggtagtgaaaacctttatggatatggatcaggactcagaagatgaaaaacagcagtatctcc

SEQ ID NO: 32163 - DNA, 100 bp, Homo sapiens
gcggcttcatactgagggccgagccgaggcggcgcgggtgcaggagcaggacttacggcagtgggggctgacagatgagccccgctagggccgccccgcg

SEQ ID NO: 32164 - DNA, 75 bp, Homo sapiens
aggaaactcccagggcccgcccaggacccccaagccgccgcggacgcagcttccttcaaaatgtctactgttcac

SEQ ID NO: 32165 - DNA, 100 bp, Homo sapiens
ctcatcatcagtctatttagaagagaaaatatttacaccagcagctccagttcataccaataaagaagatcctgctacccaaactaatttgggatttatc

SEQ ID NO: 32166 - DNA, 91 bp, Homo sapiens
gtgttgacaaatctcttagtcatccctggctacagcaagattaccttatgctggctactttggatgagaatgaggaagtgatagatggagg

SEQ ID NO: 32167 - DNA, 87 bp, Homo sapiens
actccaccacggaagagaaagaagatagtggttgaagccccagcaaagggattttgtgtggatgagggctcggctacagcaagaagt

SEQ ID NO: 32168 - DNA, 99 bp, Homo sapiens
gacagaggtgcctggggcaacctccaccttgacggttccaggcagtatttggcagtcgtattcagagataaacccctggagctatgggatgttaggact

SEQ ID NO: 32169 - DNA, 101 bp, Homo sapiens
ccgagaaggagggaggggaaacacaaagccggctacgcgctgcgaggaaacctgtccagtttaagtcgtcttggtctgagatataacagactgtcagcaat

SEQ ID NO: 32170 - DNA, 75 bp, Homo sapiens
tctggtgtaccaggcgaagctggccgagcaggctgagcgatacgacggtcatgttggccccccttatttccattg

SEQ ID NO: 32171 - DNA, 100 bp, Homo sapiens
gccgcctccgggctccttcggccccgccatgggctgctgcagctccgcctcctccgccgcgcagatcagcttgaacgggtctttttacgacttggccatg

SEQ ID NO: 32172 - DNA, 83 bp, Homo sapiens
acagaatcagccagcaccggcactttacagagaagcaagccagccaagtaacaaagcagagatcctgaaggagctagacgagt

SEQ ID NO: 32173 - DNA, 100 bp, Homo sapiens
ggccaaagcctgcccagacggctcacctgtgcgggatggaacaaaaggaatcttttgggtgagttgtgaggctggcacctacattcggacattatgtgtg

SEQ ID NO: 32174 - DNA, 82 bp, Homo sapiens
gggccccgacgatagcgaggtcacctttgcattgcactcagccgcttacaaacacgcagatggcaagaagattgatggcagg

SEQ ID NO: 32175 - DNA, 98 bp, Homo sapiens
taccagaccacaaacaccagcaacccgggttaccgtctgatcgggcagtggacagacgaacttcagctcaatgtcctttgtcatccagcaaatcccaa

SEQ ID NO: 32176 - DNA, 75 bp, Homo sapiens
agaaacttgttaaagacattattgatggagaggagaaaacctatggtggctgtgaaggacctgatgccatgtatg

SEQ ID NO: 32177 - DNA, 83 bp, Homo sapiens
gcggttggggccactgcgaggccgttttaggctggcctgccactcctcctgctatgatgcctgggcagatcccggacccttcg

SEQ ID NO: 32178 - DNA, 73 bp, Homo sapiens
aaagatgacagattgggccaacatgttccaacactacatccgagaccctgatgctcccataagacagaaaatg

SEQ ID NO: 32179 - DNA, 73 bp, Homo sapiens
tcttaacatgcttcaaataaatcaggtgtgagcctcagcagcgatttcattgctggcttttgtggtgagacgg

SEQ ID NO: 32180 - DNA, 87 bp, Homo sapiens
ttctctgcattttgtccacatgagaggattacctttccaagccaatgcccaagacattataaacttgatgggtgacacatgtacaag

SEQ ID NO: 32181 - DNA, 90 bp, Homo sapiens
accagctgtgggagaaggcccagcgagacatggatttgattgacatactttggaggcaagatatagatcttggagtaagtcgagaagtat

SEQ ID NO: 32182 - DNA, 101 bp, Homo sapiens
ccttgagctccaggagttcgtctcttacgtctgcggaagtgcagctgcctcagttcttagcgcagtgtaataatccgatgaccaaagagccgaaactggaa

SEQ ID NO: 32183 - DNA, 82 bp, Homo sapiens
cgccgccccctccggcgtgttcatgcccccgggaccatggtgaatccgggcagcagctcgcagccgcccccggtgacggccg

SEQ ID NO: 32184 - DNA, 90 bp, Homo sapiens
tcaaaatggaggaagagagcggcgcgcccggcgtgccgagcggcaacggggctccgggccctaaggggaggctactcacagtcgaactac

SEQ ID NO: 32185 - DNA, 100 bp, Homo sapiens
cctgatacgccactgtaacgggaagctgggcagctacaaaatcaatggccggacgaaattcgatcctttggtacagaagacagaccgacagatcgtccaa

SEQ ID NO: 32186 - DNA, 74 bp, Homo sapiens
ttgttttcagctaacagtaaccccagatttcctttcctggatgaaaatgttgtctcctttctaaattctctgcc

SEQ ID NO: 32187 - DNA, 75 bp, Homo sapiens
cgtgatgacggacgctacccgcccaggcccaggccacggccgcctgcaggccctgggaggagcggggacactgag

SEQ ID NO: 32188 - DNA, 100 bp, Homo sapiens
gtgcaacatatgatgacgaacatcacagtacattggtatctacaagacattatagagcacctgaagttattttagggatgatccaccaacacattctcag

SEQ ID NO: 32189 - DNA, 50 bp, Homo sapiens
tgatactgacctgtaaatcatcctttagcacttttccagccattaactcc

SEQ ID NO: 32190 - DNA, 97 bp, Homo sapiens
atgtgatattagagaactatagcaacttggtgtcactgggattcagtccccgtgggggtggctttggcggccgagggggctttggtgaccgtggtgg

SEQ ID NO: 32191 - DNA, 98 bp, Homo sapiens
taaaaagctgcacgcaagtgttaaacttctggttcgagaacttgtcttggacaattgcaaatcaaatgatggaaaaattgagggcttaacagctgaat

SEQ ID NO: 32192 - DNA, 101 bp, Homo sapiens
tgggactgaagagggacgggtcccgcggcgagcgagctcctgaggtacggcgtcgggaagccccatgtgccactcccctgatctgcagcttcggtaggccg

SEQ ID NO: 32193 - DNA, 122 bp, Homo sapiens
acggcggaacccgtgggcctgtggactgcagcctcggcggtcagcaggttcgagaacttgtcttggacaattgcaaatcaaatgatggaaaaattgagggcttaacagctgaatttgtgaac

SEQ ID NO: 32194 - DNA, 100 bp, Homo sapiens
ggcctgagaggatcacagaccaggaggccagtgaaaaccatgttgctgccacagggagtcacctctgcgttctcagatggaatcttgctctgtcacccag

SEQ ID NO: 32195 - DNA, 80 bp, Homo sapiens
tttggatgatgatggatccatttctcctattgaggagtcaacgcctgagacctgggaggaagctggagaaaagatgccct

SEQ ID NO: 32196 - DNA, 82 bp, Homo sapiens
ccgggcggccacgttcccgctgcagattgcaagggagcatggtattaggttttttgagactagtgcaaaagcaaatataaac

SEQ ID NO: 32197 - DNA, 80 bp, Homo sapiens
tcctgattcaagtgttggcggatggaagggaggagactcctgaccctcagaatgccacataaagaagatccctaatagtc

SEQ ID NO: 32198 - DNA, 90 bp, Homo sapiens
catttggcgagaaggctggcgttagtgaagcgcgcccggcgtcacggtggacagtctagttgcaggaaaacaagctcagagatcccactg

SEQ ID NO: 32199 - DNA, 88 bp, Homo sapiens
cgtgaaggagcagatttacaaactggccaagaagggccttactccttcacagatcgcaagccctggtgatccgggaaggtgagaagat

SEQ ID NO: 32200 - DNA, 100 bp, Homo sapiens
cgggagtgtgcccgctcccagggcttccctgacacctaccggctcttcggcaacatcctggacaagcaccggcagacaaatgtgtcaccagcgagctcct

SEQ ID NO: 32201 - DNA, 132 bp, Homo sapiens
attttgaccaatttaaagaagcattaatactcatcttgtccagaactctgtcaaatgaagaacactttcaagaaccaggccagaaatgtacacacaggagagctggctgcagtaaaaatcattaaattggag

SEQ ID NO: 32202 - DNA, 98 bp, Homo sapiens
cctagatggatgtacagccatcaagaggatcttaaagtgtggtctttagtggaaaaaaagttaaaggcattaggatttcctgaaggacttgtgataca

SEQ ID NO: 32203 - DNA, 98 bp, Homo sapiens
cgctgtctcagcagtctacagcacgaccattactgggacttccacccccaccacgtgcacagcgagttcgagagcttcgccgagaacaacttcacgga

SEQ ID NO: 32204 - DNA, 98 bp, Homo sapiens
actagacatcctctgcagccagaagaacaagaagtaggcattgaccccttgtccagttactctaacaagtctggagacaattactacggtaccccaaa

SEQ ID NO: 32205 - DNA, 100 bp, Homo sapiens
gcgctctggatcctcgtggccagcttggccaagatcgctttgcttgtcaggcccttggggaaggagcacaccgtgtcccgattgctgcgggttatgcagt

SEQ ID NO: 32206 - DNA, 100 bp, Homo sapiens
gatttattaacacctcttgccactcagctgacatatgaaggactcattgatgaaatttatggcattcagaacagtcttagtggtgcaatggctagtataa

SEQ ID NO: 32207 - DNA, 100 bp, Homo sapiens
aaaaacaagaattacagcagccaacctatgttgccctgagttacataaatagtcactcagcctctgaagaagcttcgggttcagactcaggcagtcagtc

SEQ ID NO: 32208 - DNA, 75 bp, Homo sapiens
cctcaactgccgcctcgcctactcactctggagcctgaactttgaggcgctgatcatcaccatgtcggtagtcgg

SEQ ID NO: 32209 - DNA, 74 bp, Homo sapiens
ttttgtctctgcctttgaggttggcgggaactgaaactggtgaaggccatggaggtggacatagaggagaggcc

SEQ ID NO: 32210 - DNA, 100 bp, Homo sapiens
ggagctcgtccgccagcccccaggagcaagaccaagaccgcaggaaggactggggccacgtggagctgctggaggggatgttcaatagcccagaaatgca

SEQ ID NO: 32211 - DNA, 101 bp, Homo sapiens
ggcgcccagcaatcacagaagccgacaaggcgttcaagcgaaaacatgaccgctgagcccatgaggtctcctctgagcctccggcctccataagacccaaa

SEQ ID NO: 32212 - DNA, 83 bp, Homo sapiens
cttaggaatggtgcttttatgtgaagctgctacctctgacatggatattggaaagcgaaagacacgagaagccctgccaacgt

SEQ ID NO: 32213 - DNA, 100 bp, Homo sapiens
ccccgagccggaggacagccccaaaaaggatctgtttgacatgcagcactagacaaactgaatggatttcagttagagaatttcaccttgaaagtagcct

SEQ ID NO: 32214 - DNA, 96 bp, Homo sapiens
catatgtcgagggaatgcagaaagagttaaggaaggcaggtgaatgaaaactttgccattgatttgatagcagagcagcccgtgagcgaggtggag

SEQ ID NO: 32215 - DNA, 82 bp, Homo sapiens
cgccgtgccgcatgagcatcgcggagcttgacccgtccatcgctgtgccttaactcagccccaactccagcttgtggcagca

SEQ ID NO: 32216 - DNA, 75 bp, Homo sapiens
catgaagattcaataacagttgcatttgaaaacaagctgccaaacgagggattctttcatctggtcggggcagag

SEQ ID NO: 32217 - DNA, 97 bp, Homo sapiens
ggcttctttgagactgaaatggcaggtttgcgagagaacaggagacaccctgcctcctacctggtccatggtggcaaagccttgaacttggccttta

SEQ ID NO: 32218 - DNA, 82 bp, Homo sapiens
gaaagaggaacaagtggggacataagccttttaacaaggaactctttttacaggccaaggatgctgagaacttgctggagtc

SEQ ID NO: 32219 - DNA, 98 bp, Homo sapiens
gaatcttctgggagctgaggaaccagatatcttgaaaagctgccagaaaggccagaagcggactcctagaagaggggagcagcaaggatggaatgaca

SEQ ID NO: 32220 - DNA, 75 bp, Homo sapiens
tggcagtgctcaaactcaccgaccaggtatgaaaatgaaagtcttcagaatggaaggaagtcaactgaatttcca

SEQ ID NO: 32221 - DNA, 75 bp, Homo sapiens
gaaccaataaaagaaggagataatgactacttcacttgcataactaaaggtttcatggacccaggcactacggac

SEQ ID NO: 32222 - DNA, 83 bp, Homo sapiens
ctgaaggactcgccccgcttcagggagttctgggaaatcgttcattcatttacagatgaacagaaaagactcttcttgcagtt

SEQ ID NO: 32223 - DNA, 82 bp, Homo sapiens
cgtggcccgcttcgctgagggccttgagaaacttaaggagtgtgtgttgcgtgacggctaccggctctctgaccagttccac

SEQ ID NO: 32224 - DNA, 80 bp, Homo sapiens
cttactttaatgagaagatctccattcctgaggaggagtcatcagtgagttctgcctcagtcagctcccaagtgaggacg

SEQ ID NO: 32225 - DNA, 100 bp, Homo sapiens
cctgaattgctgaaggaaacaactgaagcaaggaatgccttaattgaacaaagtcaccatcatgtctcttctcaccaccctctgaatctgcattagccag

SEQ ID NO: 32226 - DNA, 75 bp, Homo sapiens
tgcttcagttgccatgagagccatgaacggagagagaggcggatttggtcgtggacgtggtcagccacctcagta

SEQ ID NO: 32227 - DNA, 82 bp, Homo sapiens
tgggtcagtccgccgctcaccccgcggccgcaccttcccgccttctcaggctggcctgccactcctcctgctatgatgcctg

SEQ ID NO: 32228 - DNA, 74 bp, Homo sapiens
acggaggagctctttgacttcttgcatgcgagggaccattgcgtgcccagtcccctggaaggcagtgaagggga

SEQ ID NO: 32229 - DNA, 74 bp, Homo sapiens
atccacgcacctgcagctctgctgagagagtgcaagccgtgggagtccgaatgtcattcagaatttgaaaatac

SEQ ID NO: 32230 - DNA, 100 bp, Homo sapiens
ccttaccttagtgcagtttgccttttactccatatttggcctaatagaacttcagcttattcaggacaaaaggaggagataaagcttcaccaagaaggtt

SEQ ID NO: 32231 - DNA, 74 bp, Homo sapiens
aagcagctgcggaaaatgctagaagcgccatcatgaccgggtcctataacaacttcttcaggatgtttgataga

SEQ ID NO: 32232 - DNA, 100 bp, Homo sapiens
gggtctggttccaagacactgtcactgagcagcaattccatttccgtgagggcgtttctagatgaagatgacatgagcttggaagaaataaaaaatcggc

SEQ ID NO: 32233 - DNA, 100 bp, Homo sapiens
cgaggacggggacagcgacgacgcggaggcagagaagggaacgcccggcccagccccctgtcctgagagcacgtctctacatctctacctgcattctgga

SEQ ID NO: 32234 - DNA, 51 bp, Homo sapiens
ggaatatatcctgactgattgtaagaatgattgatgttggctgatattgga

SEQ ID NO: 32235 - DNA, 90 bp, Homo sapiens
ttcctgtccagtctgctattgaaactatagagaagaagatcttattctgcaatgtagacaatgtgatagatggatgcatgcagtttgtca

SEQ ID NO: 32236 - DNA, 90 bp, Homo sapiens
catcacatggggacttctgcaaatacagagactcggattaaagatgaagctactgaatctttacatcaaacgtgcacaaacaggttctgg

SEQ ID NO: 32237 - DNA, 50 bp, Homo sapiens
gtcctccacccgctgcccccgccatccccactcaaaggcatcccgaagca

SEQ ID NO: 32238 - DNA, 100 bp, Homo sapiens
agtgctatgtcacagaaattgaccaaggcgaggaggaggtgactgctgtggatggttatgagacagaccaccaggactattgcgaggtgtgccagcaagg

SEQ ID NO: 32239 - DNA, 96 bp, Homo sapiens
gcaggacagaaatgaccaacagataactgaggacaatggacctgcctgggcatagacttccttaagtctccggagtagagatgaagagagaatttc

SEQ ID NO: 32240 - DNA, 82 bp, Homo sapiens
tgtcctcacggctggatttctctctggaaaggattttcattcatcatgagtaaaggtgggattctatccaaagcttgtgatt

SEQ ID NO: 32241 - DNA, 90 bp, Homo sapiens
acatgttgtctcttagaagtgggagctgaacgtgcttgacagaagacaagatcagtcttctcctacacttgcttgaagatgaacttgatc

SEQ ID NO: 32242 - DNA, 119 bp, Homo sapiens
ctggtgtgggagcggccagctaggagcgctctgtggtgcctggggctgaacgcggctttctgaatccacattcatctcaatggaaggatcctgccttaagtcaacttatttgtttttgc

SEQ ID NO: 32243 - DNA, 75 bp, Homo sapiens
cttcaagcttaggaccacccaccatgcctatccagtctctcatcacttttgtgaacaagcacctgaacaagctga

SEQ ID NO: 32244 - DNA, 82 bp, Homo sapiens
tgcagtgaaggctccttcctgctaaccacagttgttagcggttctcgagatgccactcttagggtttgggatattgagacag

SEQ ID NO: 32245 - DNA, 100 bp, Homo sapiens
tctggttttaaaaaatacatatctggttttgttcttggccaggctgactgagagatttgtgctgggagtggatatgttcgtggagacactgtggaaagtc

SEQ ID NO: 32246 - DNA, 83 bp, Homo sapiens
attctctcccaggccacaagacatttcctgctcggaaccttgtttactaattgatttttagactctgaggagcagttggagct

SEQ ID NO: 32247 - DNA, 98 bp, Homo sapiens
caagaatctcgtgctcaccggtttctcccacatcgacctgcctagatattatcctactgaagatgtgcctcgaaagctgttgagccacggcaaaaaac

SEQ ID NO: 32248 - DNA, 100 bp, Homo sapiens
cagcgcggccgccagcagcgggaacagattggaccagaccctgaattcttctagctcctccaatcccattttatcccatggaaccactaaaaacaaggtc

SEQ ID NO: 32249 - DNA, 97 bp, Homo sapiens
tttggttctcccggcagcagcccgacgcaaaccaaggatctggggatcttcgcactatcccaagccctccagaatacccatcatatagcccctgagg

SEQ ID NO: 32250 - DNA, 83 bp, Homo sapiens
gttcggcgggactgtgatggccagagagatgacgatcttaggtgacaaccaaagccaagcaactgaaggattcagtgacctgc

SEQ ID NO: 32251 - DNA, 75 bp, Homo sapiens
cccacttcgttcaagacaggtgtttaagcggaaatgtttcaacgtgcgcaagcgttgcggcggcgggcagaggac

SEQ ID NO: 32252 - DNA, 100 bp, Homo sapiens
gagatacaacagatgagcaaagaatgacagcaagaggcaaaacttcggacatagaggccaaccaacctttggaggtggttggaggcaaagtaaagaagcc

SEQ ID NO: 32253 - DNA, 99 bp, Homo sapiens
tggccaaggccgttctgcggagaaaaggcatgctgggggcctcgccgaaccgcccagactcttcagggaaaagggtgaggtggctttgaccccgggttg

SEQ ID NO: 32254 - DNA, 80 bp, Homo sapiens
ctggaattttgccgatttcatgactaaccagtgtgttctgttccagtagagccaggagatatcattcatttggagggaga

SEQ ID NO: 32255 - DNA, 82 bp, Homo sapiens
cttcgcccggctttgcagcggggacttcggcggcggcgcctcaggcacctcggcccgggaattctgtggccacactgcgagg

SEQ ID NO: 32256 - DNA, 96 bp, Homo sapiens
tttcccggctgtggtttggctgcgggcggcttgggcagcccgcgggcgcctcagatcaagcttcaggagtctccggaagacatgcctgcagggcag

SEQ ID NO: 32257 - DNA, 100 bp, Homo sapiens
gtatagcttgcctttcaaggacatggacaaattttcagttttatccctgcagtgaatgatttgacctctgatctctttcgtaccaaatccaaaagtgaag

SEQ ID NO: 32258 - DNA, 90 bp, Homo sapiens
gtgggatgcactttctcaaaccaaggctgctgtcaaagttggaaattgtaatactcctaaaccaagcttctttgattttgaaggaaagca

SEQ ID NO: 32259 - DNA, 100 bp, Homo sapiens
ttttcatggcaccatggcaagaagaagctgtatcttatctatggaagataaagcatggagttggctaatggatgctggtaatttatcctcagcattccaa

SEQ ID NO: 32260 - DNA, 75 bp, Homo sapiens
cagagtggctatggtgggcaaactaagccgattttccggaaaaagcacgtagacagactatgctcttttctgcca

SEQ ID NO: 32261 - DNA, 100 bp, Homo sapiens
agtttcttagatgagctgggattcctagagaacctaaaggcagacccagaagagctttttacaaaactagagaaaattgggaagggctcctttggagagg

SEQ ID NO: 32262 - DNA, 96 bp, Homo sapiens
gaacgtcaccgaggagaagtaccaggaggcgttggccaagggagtagatcccataatagatcacgttcaagacagaaagacagacgtagatctaag

SEQ ID NO: 32263 - DNA, 74 bp, Homo sapiens
cggtacagtctctgcacctcgcgccccagcaggtgctggagaatctggtaaaagcaccattgtgaagcagatga

SEQ ID NO: 32264 - DNA, 97 bp, Homo sapiens
cctcccaagtggctgggattacagactgacatcaatttgccctatcttacaatggattcttctggacccaagcatttgaatatgaagttgacccgtg

SEQ ID NO: 32265 - DNA, 108 bp, Homo sapiens
ccaaccccagccgaccttgagctccaggagttcgtctcttacgtctgcggaagtgcagctgcctcagttcttagcgcagacctaatctgggagcctgcaagtgacaac

SEQ ID NO: 32266 - DNA, 48 bp, Homo sapiens
agaagcagttctacaaggcgagccagaaaaatggctacaaacttccta

SEQ ID NO: 32267 - DNA, 90 bp, Homo sapiens
gcagaaggcgtggccgcccagtccccagttccgcgcttgctcggcagtcacgttccggcagccacctggacagccaccggaggatggcgc

SEQ ID NO: 32268 - DNA, 89 bp, Homo sapiens
ctgtctgcagctagatgatattttgttgaatgttgggtcacgaagatctcaacctggccaaagaagagaacccagaaagatcatcacag

SEQ ID NO: 32269 - DNA, 100 bp, Homo sapiens
agacaacgtgtgtaccccaagtgcacatggctgaccacccctaaaagcacctggccccgctacagcaaaccagggtcaatgtctgtggagggcggtgctg

SEQ ID NO: 32270 - DNA, 82 bp, Homo sapiens
cgctgagtggtttttcggatcatgtctggtggctccgcggattataacaggtgtggcggggcaccctggcccgcatgcggta

SEQ ID NO: 32271 - DNA, 100 bp, Homo sapiens
ttcctcggcaagctatgggcgctggtgggggacccaggcacagaccacctgatccgctggagcccgaaatacccgcagcccaaagggcagaagaagaaga

SEQ ID NO: 32272 - DNA, 111 bp, Homo sapiens
gaggtttgcctggcagagatggtgttgcaggagtgccaggtgacgtagggcagccgggacccaacgggattccatcagacaccctccaccccatcatcgcgcccacaggag

SEQ ID NO: 32273 - DNA, 101 bp, Homo sapiens
gcgccgcggggcccaggccgggagccgaccggcacagcaggaaatgcacaattttgaggaagagttaacttgtcccatatgttatagtatttttgaagatc

SEQ ID NO: 32274 - DNA, 78 bp, Homo sapiens
aagagcttccccagtggacattcttcctgctagagtaccgtggcacaatctcagctcattgcaacctctgcttcctgg

SEQ ID NO: 32275 - DNA, 75 bp, Homo sapiens
atggacagacatctggaccagttattaatgtgtgccatttatgtgatggcaaagaaattcatctgttgccatggg

SEQ ID NO: 32276 - DNA, 74 bp, Homo sapiens
ggtgaagaagcctcatcgctacagatgtgacaagccgaggcggtgagccgggcaggaggaaggagcctccctca

SEQ ID NO: 32277 - DNA, 100 bp, Homo sapiens
gatgctttaacatacagccactagaatacagtcgttttgaagctaaaatacatgatttacgggagcagatgatgaatagtagtattagttcagggtcagg

SEQ ID NO: 32278 - DNA, 75 bp, Homo sapiens
gggtctgggcttcccgggcgagcggtggaccggagtacactgggaagcatcaaagaaggaatcttgaaaatcaaa

SEQ ID NO: 32279 - DNA, 100 bp, Homo sapiens
ttgcttttttgcagctcacgtctaccatcattacttggaaccccatgcatcccagctcaaggtggtcagagctagaccttcttattctgttggggacggc

SEQ ID NO: 32280 - DNA, 100 bp, Homo sapiens
caggaccccagatgtctgacagccctgtgtgacaccaagataagtaacccaatggagatcttcgtggatgatgagacgaagttgacgctgcatgggttgc

SEQ ID NO: 32281 - DNA, 75 bp, Homo sapiens
accgccatcaccacctcggaacccagggtaacgctgtcagtctttgattcatgatgttgctatcaaaagttgaga

SEQ ID NO: 32282 - DNA, 100 bp, Homo sapiens
tgcaggaactctacaacccaatccaggacccccgcagcaaacacaagtttaagatccacacgtactccagccccacgttttgtgaccactgtgggtcact

SEQ ID NO: 32283 - DNA, 90 bp, Homo sapiens
aagacgcggggaagaggaggcggaaaaggacgcaaagttctccggcgagatgttgtaaattttgatgacatagcttcctcagaaaacttg

SEQ ID NO: 32284 - DNA, 74 bp, Homo sapiens
cgcagtggtcgcttcttctccttggtgctggagaatgccgaaggtgccagaaccaccccttcagttgtggcctt

SEQ ID NO: 32285 - DNA, 99 bp, Homo sapiens
tttggttctcccggcagcagcccgacgcaaaccaaggatctggggatcttcgcactatcccaagtgtcttgggacaaggtgcgcattcctggtgtgctg

SEQ ID NO: 32286 - DNA, 75 bp, Homo sapiens
gtcgccggctctccttttccggactctggggatctcttgctgcaactgacaagaggctgaaggatgagatagcag

SEQ ID NO: 32287 - DNA, 100 bp, Homo sapiens
attagctttagtgaaatgggctaataatgctggcaaagtggaaaaatgtgcgatccgcaaggatgctctccgggcgctcaactttgcgtacacggtgagc

SEQ ID NO: 32288 - DNA, 89 bp, Homo sapiens
atagacatgggggcctcaaacgtggagatcaactcctctctgttaatggagtggagctggggacccccagtgagaaaatctggcccggc

SEQ ID NO: 32289 - DNA, 88 bp, Homo sapiens
gcggccgagtccccgtacggccacccggcgggatattgactgggtacagacagagaagcacgtgtttgagcaggcatccagcaacccc

SEQ ID NO: 32290 - DNA, 96 bp, Homo sapiens
accctgcttcctttaagagttttcctggcactattcaggctcctcactttgccttgctatggcttaaggctctcaccacacacttgttcatgggcg

SEQ ID NO: 32291 - DNA, 74 bp, Homo sapiens
ctaacatgtatcctggagcgaatcctaccttccaaacagctgacgaagaatttgatgaactatgttttgaattt

SEQ ID NO: 32292 - DNA, 75 bp, Homo sapiens
agttcgctacacagcaatgcatcgaggttccatcataatgaatggatccaatatggcaaatacatcaccgagtgt

SEQ ID NO: 32293 - DNA, 96 bp, Homo sapiens
agagatccatggattcctacctaaaccagtcatatggcatggacaatcacagtggtggtggtgggggtagcagaacaagtttgccttctcctatgt

SEQ ID NO: 32294 - DNA, 100 bp, Homo sapiens
gctctccagtttggggtgtctacttctctgtggaagtattacactagccctgggaaatgcacagaaattgccaaaagaacttaaggcatacagaacgatg

SEQ ID NO: 32295 - DNA, 76 bp, Homo sapiens
aaaggtgtgctgtgcctgaggccagtgctactatatcggggccacagatgatgcagccaccaaaatcatcaatgag

SEQ ID NO: 32296 - DNA, 50 bp, Homo sapiens
tgcacctgatgcatataataatcagggaagagacttccaccttaggatag

SEQ ID NO: 32297 - DNA, 75 bp, Homo sapiens
gagagtgagcgtcccctatccaagtagcctgctgtcgcccagccgcgagaagcaaatgctggcacaaggataccc

SEQ ID NO: 32298 - DNA, 100 bp, Homo sapiens
ccaacaccgggaccaagtggattgacactcaagcgggcgctaatattgacacctgctcagaagaccagaggaccccgttgatggaagcagccgaaaacaa

SEQ ID NO: 32299 - DNA, 100 bp, Homo sapiens
gatttctgcatttccatctgaggagtcggatggtcagggctgccctttctgtcgttgtgaaataaaaggaactgagcccataatcgtggacccctttgat

SEQ ID NO: 32300 - DNA, 90 bp, Homo sapiens
ccgggatcgtgaccgagaccgtgaccgagagcgtgaccgagagcgcgaatatcgtcatcgttagaagaacaagccttaccagtggcttca

SEQ ID NO: 32301 - DNA, 90 bp, Homo sapiens
cttttgaaaggtgtactgcaaggaacaaaatgtttgtaaattctccttttaccaaggttcaaaccttgtactactcagctgatcacaagc

SEQ ID NO: 32302 - DNA, 83 bp, Homo sapiens
caaccacgagacggccttccaagttgcaccaccagcaccaccttccagtagtcagctctgccgttacttccctgcttgtaaga

SEQ ID NO: 32303 - DNA, 73 bp, Homo sapiens
gacggaagaaaaggtctggccggagcctgtggtgctgaccgacacaaatcttgtgtatcctgccctgaaatgg

SEQ ID NO: 32304 - DNA, 82 bp, Homo sapiens
gggaagctgggcagctacaaaatcaatggccggacgaaaatttgaaaaagggcgcatctatacgttcattggagaagtcgtc

SEQ ID NO: 32305 - DNA, 100 bp, Homo sapiens
gagagatggagatgggcagacggattcatttagagctgcggaacaggacgccctctgatgttgaccagtatctctaccacatgcgcctctctgatgagac

SEQ ID NO: 32306 - DNA, 100 bp, Homo sapiens
agagtccaccgcaaagcagactggcatgaaatataggtattttgaaggtggcgtctcatctgtctacctctgggatctggatcatggctttgctggagtg

SEQ ID NO: 32307 - DNA, 96 bp, Homo sapiens
ggaaagagacagcttgagaaaagggactttggaaaaaggctgtctctagacagcagtcttgtggtgaaattgatcttcaaattctctccaaagttc

SEQ ID NO: 32308 - DNA, 100 bp, Homo sapiens
catgccggccgccgggagtaacgagccggacggcgtcctcagctatcagagacctcatccttcaacagctgaatcaaaggctccaacaccaaagtttgac

SEQ ID NO: 32309 - DNA, 82 bp, Homo sapiens
ccgagtcatacccccaggagtaagagcccatagcagtctgccagacaatagagcatatggtatgatgcaatcagaatcaatc

SEQ ID NO: 32310 - DNA, 75 bp, Homo sapiens
ctgcgggccgctccgacggcggtccatcctggagcacaggagggttttccaggccatgtggctcagcttcctcaa

SEQ ID NO: 32311 - DNA, 95 bp, Homo sapiens
gcagtgctggaggaagaccactacggcatggaggacgtcaagaaacgcatcctggacagagcgggatgccaccagcttgtccaaagggaagttcc

SEQ ID NO: 32312 - DNA, 100 bp, Homo sapiens
tacgccttcgagctgagctgggagcactccattctgcctgggtgacaatgccttggtttcaacactatcggaatggacatcggcagaaactagatgatca

SEQ ID NO: 32313 - DNA, 83 bp, Homo sapiens
cccgcgcgcgctcccgcgcgcgctgagtgggcggagcgaacagggggctggacagggaggaggtacaggagaactgtgtgcgg

SEQ ID NO: 32314 - DNA, 83 bp, Homo sapiens
tcccaggtgaactcgtggcgagagaaggaaaatgcgcgtcccgggcgcgggtagacctgcctagagctggaacgttacctcca

SEQ ID NO: 32315 - DNA, 100 bp, Homo sapiens
tggaggagtcccgctcgaagctaggaatgtttacccttgcggaagttgcatcacttaatgacattcagccaacttaccgaatcctgaaaccatggtggga

SEQ ID NO: 32316 - DNA, 97 bp, Homo sapiens
atgtatactggcgattgtggggaacaatcaattggctgacttgttcaagatgttatcaggccttgtgaaaaagggtaaagaacaaaacacacagcga

SEQ ID NO: 32317 - DNA, 75 bp, Homo sapiens
tgttccacctcattcaacttcagggtttgccttcccggattgggcctacaagccagagtcgtcccctggctcaag

SEQ ID NO: 32318 - DNA, 96 bp, Homo sapiens
aaatggagaaaagcaatacaaactgggtggacattacccaagattttgaagaagcttgtcgaggagtccttcaataatgttaaacagtggctgcag

SEQ ID NO: 32319 - DNA, 82 bp, Homo sapiens
caaggataagtctcatgacacctttcttaaacaattaggtctacatcctaactggcaattcgttgatgtatatggaatggat

SEQ ID NO: 32320 - DNA, 82 bp, Homo sapiens
ttggaaacgctttcctgaatcggtacggacattgctgcaggagaagaggttgccatcaagcttgaatgtgtcaaaaccaaac

SEQ ID NO: 32321 - DNA, 115 bp, Homo sapiens
actctccgggagtacgtggccgtggagcccttggccacgggacgccctggccaaggcactgtattcccgcctcttccaccggcttctgaggagaaccaatgcacggctggcacca

SEQ ID NO: 32322 - DNA, 82 bp, Homo sapiens
tgcaaggtgctggtggagaaatgttaagatcccagatgcagcttttattcaggcagcccgcagaaaacgtgaattggccagg

SEQ ID NO: 32323 - DNA, 100 bp, Homo sapiens
cgctccgtggccttagctgtgctcgcgctactctctctttctggcctggaggctatccagctgtggaggaatgaacgtaattaactttgaacatcttgat

SEQ ID NO: 32324 - DNA, 83 bp, Homo sapiens
agacaccatggggaaggtgaaggtcggagtcaacggcttcctaaccaagcgaagccggcaggtctgtgctgaccccagtgagg

SEQ ID NO: 32325 - DNA, 100 bp, Homo sapiens
gggagaccctgtgcccctaaatcgcggtccactgcgcgcgtcagaattaaacaaccaccatgtcgagcaaaaaggcaaagaccaagaccaccaagaagcg

SEQ ID NO: 32326 - DNA, 92 bp, Homo sapiens
ccataacaagttccgatcagaggtgaaaccaacagccagtgatatgctatacatggagaatggggtactaagagaaaagcacgaagctgtgg

SEQ ID NO: 32327 - DNA, 75 bp, Homo sapiens
agccggccagccggggggcactgcccgcccgggctctggagaagaatttggattggtttcctcggatgcgagcca

SEQ ID NO: 32328 - DNA, 96 bp, Homo sapiens
gaaagcagtgacggaggagcttgtaccaccgtggccgtcctacgggtggaagcactgaccgtatccagaagttgcggaaagagtattatcaggctc

SEQ ID NO: 32329 - DNA, 73 bp, Homo sapiens
acgacgagtactggcatgcgcacgtggacaaggaaactactttccagagaaaaacagccccccatagacaaca

SEQ ID NO: 32330 - DNA, 75 bp, Homo sapiens
aatttgggaatagaagcagttccttggacagcaggcttgccttttgtcactgctccgaataaatttgaagctctg

SEQ ID NO: 32331 - DNA, 100 bp, Homo sapiens
cggggctactgtgcgctgtgctgggcgctgtcatgatcgtgatggtgccgtcgctcatcaagcagcaggtccttaagggccatgctatgatagtggaagc

SEQ ID NO: 32332 - DNA, 100 bp, Homo sapiens
cgaagctggccgagcaggctgagcgatacgacgatgagcagcaccagcagtaagagggctccgaccacggcaacccagaggctgaagcaggactaccttc

SEQ ID NO: 32333 - DNA, 74 bp, Homo sapiens
ggaggagaaaacctggaccaggcacgggaagatgcccaggacctgcgcgaagtctggctcaattatcctctcca

SEQ ID NO: 32334 - DNA, 148 bp, Homo sapiens
acgtaatcatacctctagtcatagcataccatttatcgggctcggcgcaggcccgcggggagcgcagcccggcggagagttgtggaaagtaaaaatgtagccctaccaaaaggaactattgtactggcttctccaggctggacaacgc

SEQ ID NO: 32335 - DNA, 83 bp, Homo sapiens
ggccctgcccctacatttggagcctggacacgcagtacagcaagatgtgaacgagtgtgaaacactacagggtgtatgtggag

SEQ ID NO: 32336 - DNA, 82 bp, Homo sapiens
gcctcctcgcagcagcgccatggagggtgaggacaaaatcttcttaatcaacaagcttcactccatctacgagaggaaggag

SEQ ID NO: 32337 - DNA, 73 bp, Homo sapiens
aaccagccgactggagcaggcagcagcccaggaatttgctgattcccttggaattccgtttttggaaaccagt

SEQ ID NO: 32338 - DNA, 100 bp, Homo sapiens
ctggatgtgtcggtgaccatctcgcaggatgccggcagctacatcatggagaaagcagatcttgtcatagttggtgctgaaggagttgttgaaaacggag

SEQ ID NO: 32339 - DNA, 98 bp, Homo sapiens
ctgaactgactgccccgcatcaccggagcgtcccagctgcgaggaggccaatggaagcactgttgtgaagaacttatgaaaattgagattatgtcacc

SEQ ID NO: 32340 - DNA, 101 bp, Homo sapiens
gttccaaccttgaaggctcctacatgtgttcatgccacaaaggctatacccggactccggaccacaagcactgtagaggtgtggatccggagttgtatgag

SEQ ID NO: 32341 - DNA, 98 bp, Homo sapiens
atcatggaaggaggagatgaagggcaagggccaaaatgatgatcactttgggaagcagtgacatccaacctgtatcaagtcttctaatctgtgaacat

SEQ ID NO: 32342 - DNA, 51 bp, Homo sapiens
gggtgtttggggtgtgttttacaaaggggcgtgaatactttttctcccgaa

SEQ ID NO: 32343 - DNA, 50 bp, Homo sapiens
cacgacgggccgagcctgccactttccagggtctccctccactgctgtag

SEQ ID NO: 32344 - DNA, 100 bp, Homo sapiens
ctcggcgacaactgccctgctcttcatcccaggcatgctgcagacagacctttccgtccttcatgaacacacgtgtggtagacagatgactgtcctgtac

SEQ ID NO: 32345 - DNA, 99 bp, Homo sapiens
cgatttgaccaaatttctggaagaggatgctgacctgttggatgttgaaagcaaacactttgaagacctggagttccagcagcttgaacatgagagccg

SEQ ID NO: 32346 - DNA, 82 bp, Homo sapiens
cgcgggacggctctgtaggaaggaacttggttccccctccctcagcttccgccccaaaagaacactcctatgccaccttcac

SEQ ID NO: 32347 - DNA, 100 bp, Homo sapiens
actgccagttcctggtgccgcagcagggcagcccgcactcgctgccgccgccactcacgctccactgcaacatcacggttgagactgagctaaagttaat

SEQ ID NO: 32348 - DNA, 100 bp, Homo sapiens
gatgaactgcgcaaaaagctataccagacgtttaaggatcggggtatactggatacactcaaggggtttaaagccaatttgtctctcttgaggaggcctg

SEQ ID NO: 32349 - DNA, 75 bp, Homo sapiens
gacctccctggatgccctgaagatcagcatccgccagctcaagtggaaggagggcttcctcagccgccgcctcaa

SEQ ID NO: 32350 - DNA, 100 bp, Homo sapiens
ggaggggctccggctggtctgtggtgaggatcgacgagaacgtgctaggagcccagctggacgttgaggccgcccattcagagatcctcaagtacttcca

SEQ ID NO: 32351 - DNA, 100 bp, Homo sapiens
tgaatggtgtgcatcacattaagattgtcactgctgttccaagggcacacgcagagggatttggaattcctggagagttgcctttgtgagaagctggaaa

SEQ ID NO: 32352 - DNA, 75 bp, Homo sapiens
ctggaatgtctatgacacactcttctgtgagctgcggcttgatgagacccaggaggcagagttccaggcccttcg

SEQ ID NO: 32353 - DNA, 113 bp, Homo sapiens
tgatctgcactgctgtggggccaaacgcatcatgaagtgagcaaattggggtttcctggggacaagtcaagtcctaattcgaagcagagtcctcagggaaaatggaaaataca

SEQ ID NO: 32354 - DNA, 74 bp, Homo sapiens
ctgtaaccacctcacagattccagcttcggaacaagagaccctgccctacctcacaagcacccgaagcttgtct

SEQ ID NO: 32355 - DNA, 100 bp, Homo sapiens
agtgaccggaggcggcggcggcgagcggttccttgtgggctaggactaccgaccagactcccggaaatcatgttggtaggatcccagtctttttcgcctg

SEQ ID NO: 32356 - DNA, 75 bp, Homo sapiens
gccttatcatctgtcaacatcatcagtttttcgattagaggcacagagctttggcctgctggatcccaaactctg

SEQ ID NO: 32357 - DNA, 80 bp, Homo sapiens
catggatcggcgctggacgtgctcctctccatggggttccccagagcccgcgcgtcaaaatgcagatcttcgtgaaaacc

SEQ ID NO: 32358 - DNA, 100 bp, Homo sapiens
taaagacccaacagaatacactggacctgaaagttatgtggctcaaatgattgtgcatgactatatgaaggaagaggaaggttttcctgaagatgaggcg

SEQ ID NO: 32359 - DNA, 50 bp, Homo sapiens
gaaaagatgaaacggacccttactactataattccttgacccagcagtac

SEQ ID NO: 32360 - DNA, 75 bp, Homo sapiens
caaacttggattttttccagtctgatccttttgttggcagctacccacctttctgttctgagacccctcaagaga

SEQ ID NO: 32361 - DNA, 100 bp, Homo sapiens
ggagatacctactcaggcggcagctcgggcagggggtagatcatgccactaatcgtacccagtttggggagaaaattcacaactttgggctgatccagga

SEQ ID NO: 32362 - DNA, 82 bp, Homo sapiens
cacgctggccctgaggcaacggctcatcaggaaggaagcagccaccctcgccatggcctccccgcccgcctgcccctcggag

SEQ ID NO: 32363 - DNA, 100 bp, Homo sapiens
ggaagcgcggctgctgtcgcccagcgccgccccgtcgtcgtctgccttcgcttcacggcgccgagccgcggtccgatgccaccatggcaactgcaccata

SEQ ID NO: 32364 - DNA, 114 bp, Homo sapiens
cgacaaccttcccagaaagtccaagctcgtggtgggtggaaaagtgttcgccgagatcttgaagatactcacagggaagatagtggtggggcatgccatccacaacgacttcaa

SEQ ID NO: 32365 - DNA, 101 bp, Homo sapiens
ctctcgttatctgacctcatggatgaacttcaggatgttcagctcacagagatcaaaccacttctaaatgataaggcccgaggtatgaagaagcaaatcat

SEQ ID NO: 32366 - DNA, 100 bp, Homo sapiens
tcgctctgcctttgacaggagaggctgcttcttgtagagggctctgcttcaaaaacaacgaccacctcaggtaggaatatatccaagcctgactcctgcg

SEQ ID NO: 32367 - DNA, 83 bp, Homo sapiens
cggacgggccatacccaataaccaggtgcttggcaaaatcgagcgggccattgcgccgtgccgtccctgcagtgacaccgagg

SEQ ID NO: 32368 - DNA, 83 bp, Homo sapiens
aggaaaaactggagagcttcatcaaaaatagtgatagctttgataaaccctacagcttggggcctgggctcctctgaccatcc

SEQ ID NO: 32369 - DNA, 100 bp, Homo sapiens
agctccttcccctctgatccattcacacctagataccggaggaggatcttctgcggattgttggaatctaccgatgacaattgtgttgtgtaaagagttg

SEQ ID NO: 32370 - DNA, 75 bp, Homo sapiens
cagatacaaacttggattttttccagtctgatccttttgttggcattgcatttgctggtctggcctttgcgtcct

SEQ ID NO: 32371 - DNA, 83 bp, Homo sapiens
taccacgagctagtgttggagtgcaccaagaaatggtgatgggcagaggcttcagtgtccccttcgcctccgcaggagaggag

SEQ ID NO: 32372 - DNA, 75 bp, Homo sapiens
gtgttcgagaacgaccccgagacgggaactgttaagaggagacaagaagaagaccacttccagtttccagacatg

SEQ ID NO: 32373 - DNA, 98 bp, Homo sapiens
ggacagaggccagagccggagaatagagggtgtgaaaaaaaaggtgcagtttgatggaacaaattccgcatttaaagagctgaagtttttaacaccag

SEQ ID NO: 32374 - DNA, 97 bp, Homo sapiens
caaagggggctgctgaccgagagagctcactcagccagtcaggtagcattggtgctgcagatagtcctgagaactgggagaaagtctgggacaactg

SEQ ID NO: 32375 - DNA, 75 bp, Homo sapiens
tgaacggcagccccaagaacggaaaggactcgctcagcagcagcctgaaaacttgctacaagtatctcaatcaga

SEQ ID NO: 32376 - DNA, 100 bp, Homo sapiens
gccgcagtgtgctgtggtggatgagagctttttatgcagattgaagctctctttccacaaaaatttggaagatggaccgactatgcaaaaagatactgta

SEQ ID NO: 32377 - DNA, 101 bp, Homo sapiens
ataatgatgaagaagatccttcaaaattaaaagaggagcagcatggcatttcagtcactggtttgcagagtccaggtgtggatgtggaagcagccaagcgg

SEQ ID NO: 32378 - DNA, 97 bp, Homo sapiens
gttttgatgatggagggctactacaggctactgctttacaaaaccagaactgatcttcacattggaacaaggagaagatccatggttattagagaaa

SEQ ID NO: 32379 - DNA, 82 bp, Homo sapiens
cgcaggggcgcgcagcgcggggagctgccaggtttccagccaatggattctggtcaactggtggagattggctgacaccctg

SEQ ID NO: 32380 - DNA, 75 bp, Homo sapiens
acaaaaatattatggtctttgtgcacatttacatcaagtggtccttacaccagattaatttatcttgaaatggcg

SEQ ID NO: 32381 - DNA, 130 bp, Homo sapiens
acctcaccagagatcaaactcaagtggacaagttctattgcccagctgctgtggagacaggcagcccacaacaaggaaaccagcctggacaccaagtctgtgtcagaaggccacctcaagaggaacatcg

SEQ ID NO: 32382 - DNA, 90 bp, Homo sapiens
agttttgatcccctggcatcatttattctccgtactgatcactacatcatggagggagcactggcagttgctgggtaatttgaagacgac

SEQ ID NO: 32383 - DNA, 100 bp, Homo sapiens
gatcctctccgtgggagccagcgagcctctctccctgatcttacgtgctcaagtatgttccagtaaaaggagaccatgtgattggcatagtgacagctaa

SEQ ID NO: 32384 - DNA, 82 bp, Homo sapiens
ccagcaccctcatcgccctggccgacaagcacgcaagtccggcctctttggcctacccccgttggctccgctgccccaggtc

SEQ ID NO: 32385 - DNA, 90 bp, Homo sapiens
gagtcagtgtgacagtccatatgtaaccaaatattatggatcctatctgaaggcagcaaaggaacagactcaagatttaatagtaaaaac

SEQ ID NO: 32386 - DNA, 100 bp, Homo sapiens
cgtcgcgggggagaccgtggcccggcccctcttcctggatgagggccccaaggctgttgcagctcctcgacctgatcggttggtcaatcgcttgaagaat

SEQ ID NO: 32387 - DNA, 98 bp, Homo sapiens
tgcgcttccccacgtcgcttgggggccacggcgcggacgccatggtctcctctgagcctccggcctccataagacccaaaacagatgacacctcttcc

SEQ ID NO: 32388 - DNA, 100 bp, Homo sapiens
gctatcgaaaatgtcttcaggctggaatgaacctggaaggattaaagcaaggagagccaatcatgactggcaaaacacagaccagcaacgtcaccaataa

SEQ ID NO: 32389 - DNA, 98 bp, Homo sapiens
cagattccagaaaaggcttctcttgatacatcaaggagtccgcatgtgtgaaagtggtggctgctgtgagcatgtgggatgtgtgcatggagagagga

SEQ ID NO: 32390 - DNA, 100 bp, Homo sapiens
ctggagcctcagttggaagcagccgatccagcctgcggagcctgtggggcaggacaagaaggggctttccgggaaacagaataatttcgagcgcaaagct

SEQ ID NO: 32391 - DNA, 50 bp, Homo sapiens
catcaccggcacacattgtcgggaatcccggaggcaagacacttgaggag

SEQ ID NO: 32392 - DNA, 59 bp, Homo sapiens
ctatggaaaaaatggaagaatttgtttgtaaggcaagaagctcttctggctgccattag

SEQ ID NO: 32393 - DNA, 75 bp, Homo sapiens
gtagtgccggcgccgccgcgtcttcccggtctcctttcccggccgcacaggttggtcctgagaaaagggtgccag

SEQ ID NO: 32394 - DNA, 140 bp, Homo sapiens
atgcttccagaaaaatctcaaggaaaagtattgcaagcaacagtagtcgctgttggatcgggttctaaaggaaaggtgtttggagaagagggattgaccctgaatcttgaagacgttcagcctcatgacttaggaaaagt

SEQ ID NO: 32395 - DNA, 75 bp, Homo sapiens
caagccaaatggtgacaaggaactctctgaggctgagggcggcgactggcggcgcgatggacctgaccgggctcc

SEQ ID NO: 32396 - DNA, 75 bp, Homo sapiens
tctacccggcagactttaacatccaggtagatgatgagctggagatcaaggcctactatgcaggccacgtgctgg

SEQ ID NO: 32397 - DNA, 90 bp, Homo sapiens
tcaagggctgaaaataaatagggaagatggagacaccctctgggggtcctctctgagtcaaatccagtgagttgaaactgtgggacagcc

SEQ ID NO: 32398 - DNA, 50 bp, Homo sapiens
gctgaggcatgaaaatatcttaggtgttggtaaatcatgcttattgctac

SEQ ID NO: 32399 - DNA, 74 bp, Homo sapiens
aagggttgtatcgaggctataaaagcacagttttaagagagctctttccaacaactgatcctgtgggtactttg

SEQ ID NO: 32400 - DNA, 97 bp, Homo sapiens
cgcccgccttccgccgtctcttcgagttcttcgtgctgctcaagaaaggacccaggagcgataacagtaaatcaaataagatatttgtcggtggaat

SEQ ID NO: 32401 - DNA, 73 bp, Homo sapiens
tgccttagcttccaagaatgctgaggttacagcctacaacacagcagtcccctcaggatgagcaggaaaagct

SEQ ID NO: 32402 - DNA, 98 bp, Homo sapiens
cgcaggcctgggaatttccgtcccccaccaagtccggatgctcactccaaagtctcagcagttgtggaagctgatcgaggaagcctaagcaggctctg

SEQ ID NO: 32403 - DNA, 100 bp, Homo sapiens
ttcctgttcacggtgaccttcgcttggtgtcctcctggcctcagcaacctgacaattctgtcgtgtcccggtctggagcccccaactcccttgacagtgt

SEQ ID NO: 32404 - DNA, 50 bp, Homo sapiens
gccaaatggacgggactattaagataacatgcctggacatttccagcaga

SEQ ID NO: 32405 - DNA, 100 bp, Homo sapiens
acacgaaaaaacttccagaacatctgggagaatatttaatggaaaatcgcttggttaaaacctgacacttttaacaggatgccaaagaagaccatgaaag

SEQ ID NO: 32406 - DNA, 90 bp, Homo sapiens
agggtatcatactttttgtcttcaaccagttatgaaatcagtaccaaccaatggctggaaatgcaaaacagaacctccactcaatacacc

SEQ ID NO: 32407 - DNA, 75 bp, Homo sapiens
atttttgttgcaacttggagtgccagtgaatgataaagacgatggtttggagaacattgattaaggaagcatttt

SEQ ID NO: 32408 - DNA, 114 bp, Homo sapiens
cgcggagccatggccgaggtgttgcggacgctggccggtactccaaagattcaggtttactcacgtcatccagcagagaatggaaagtcaaatttcctgaattgctatgtgtct

SEQ ID NO: 32409 - DNA, 100 bp, Homo sapiens
gcagtcacagtccaggctgtcctgcacgacctcactagtgaacctgtcactgttcgggaagtcacctggttattttggagctgttggagcactccttgag

SEQ ID NO: 32410 - DNA, 95 bp, Homo sapiens
agacatggccactccagtcggtgttgagcacggcgagcagtctcaggcctttagtgatgatggtcaaaatgcagatcttcgtgaaaacccttacc

SEQ ID NO: 32411 - DNA, 83 bp, Homo sapiens
gcagaggctcccgggctggactcaggcttctcaggcaagtgaaccggagcaaacgacttccgatccagtctgcgctgttgcgg

SEQ ID NO: 32412 - DNA, 100 bp, Homo sapiens
tatagacccaatcaaaaaagaaactagcaaactttttaatgaggaaatgttcctcctgctgatcaagagaagctttttatccagaagttacgtcagtgtt

SEQ ID NO: 32413 - DNA, 100 bp, Homo sapiens
aaatgtggccagattgcagggagtatcaaatatgagaaagctaggccatctgaataactttactaaggttaaaaagatcaagtggcatgagcagcctttt

SEQ ID NO: 32414 - DNA, 83 bp, Homo sapiens
atcagaatggcagatggcttatgaaccacaggtttggtgcacctcgatttggaggaagtagggcagggcccttatctggaaag

SEQ ID NO: 32415 - DNA, 90 bp, Homo sapiens
ggcatacagaatgcctatgaccggcgtcgagaatttcaactgccaaggccacctttgatgccatttctaagacctacagctacctgaccc

SEQ ID NO: 32416 - DNA, 100 bp, Homo sapiens
aaggacattccaggcagaggcaaggctccaccgaggacaccgcgtccagcttgtgtggcgaggaggacacagaggacgaggagctggaagccgcggccag

SEQ ID NO: 32417 - DNA, 100 bp, Homo sapiens
ggctacacttgccactgtgtgctgccatacacagctcagcaaaacccagcagctcagattcctgccaggcagcgggagattgaaatgaaccgacagcaac

SEQ ID NO: 32418 - DNA, 100 bp, Homo sapiens
ttttggaagagggagtcaccactggacctccaaggaagccacgtgcagacatctacaaccttcgatctcctgacgagatatccgtagaggtttggagagc

SEQ ID NO: 32419 - DNA, 75 bp, Homo sapiens
ccgtgaccgagagcgtgaccgagagcgcgaatatcgtcatcgttagaaggtgttccatttggtttaaaaaatact

SEQ ID NO: 32420 - DNA, 97 bp, Homo sapiens
ccattgctgcctggctggaaaagtgaacgaaccccacaagaattccatattggaggaggaggaaggtgaggacggcgatccatcgtcagggccccca

SEQ ID NO: 32421 - DNA, 90 bp, Homo sapiens
tcagtgactgaagcgcccgtccattccaagttaaacacagtgggaatatcacttttgatgagattgtcaacattgctcgacagatgcggc

SEQ ID NO: 32422 - DNA, 83 bp, Homo sapiens
tgtttctctgctgcaccgacctcgacgtcttgcctgtgtcccacttgttcgcggcctatagtttttaatgttgaagatcagaa

SEQ ID NO: 32423 - DNA, 75 bp, Homo sapiens
agcggcgttggaggccaccgtttccagatgcaggacaagtactccaaaagtggcattgcttgtttcttaaaagaa

SEQ ID NO: 32424 - DNA, 102 bp, Homo sapiens
cccggtgctcgtgatggggctgatcttcgccaaactgtggagcctcttctgtaaccaagtaccacatgcggatccacaaggaggaacggaagtacctgtgcc

SEQ ID NO: 32425 - DNA, 51 bp, Homo sapiens
gcggcgcgagcgccccgccatcgtcccggtttttggattcaaagcataaaa

SEQ ID NO: 32426 - DNA, 90 bp, Homo sapiens
ttggaggtatcaactgtaagaagaggaaagacttgtctcagcaaagcagttgagagcttagctgaagcaggtggctctgaaatccagcgg

SEQ ID NO: 32427 - DNA, 98 bp, Homo sapiens
ttgccctcaccatcgccctcttcaccatctatgtcctctggacgctgttggtgaggtaacatacgtggagctcttaatggacgctgaaggaaagtcaa

SEQ ID NO: 32428 - DNA, 100 bp, Homo sapiens
cgacgggtttgtgagcctggactcgccctcctatgtcctgtacagttacagaatgtctgaaggggacagtgtgggagaatccgtccatgggaaaccttcg

SEQ ID NO: 32429 - DNA, 49 bp, Homo sapiens
tggtcccggaacctctcgtaaaccagatcctgaggtactccggagactg

SEQ ID NO: 32430 - DNA, 74 bp, Homo sapiens
gctggggctggcattgccctcaacgaccactttgtcaagctcatttcctgagggaaggctcctgcatggctgag

SEQ ID NO: 32431 - DNA, 75 bp, Homo sapiens
aatttccaaggggattcaaacttcaacagaatgtggcaaccaggtgactctcctattccatctgtttcttcggga

SEQ ID NO: 32432 - DNA, 75 bp, Homo sapiens
ttcagattacgaggattatggatgaacgtaacagacagagcagcccgacggccatggaggctgaagagacgatgg

SEQ ID NO: 32433 - DNA, 100 bp, Homo sapiens
cattatccttcagtggggctattggactgacttttcttatgctgggatgtgccttagaggattatgggctccatgaagcaacagattacccttggaggcc

SEQ ID NO: 32434 - DNA, 78 bp, Homo sapiens
gcgacgcccggcgcgagctcaagctgctgctgctcggcaccgtctgcgtcctgctgtccttccccttcatcttcagcc

SEQ ID NO: 32435 - DNA, 75 bp, Homo sapiens
cgcagatcctgagacccggacagtggcagtgaaacaggtctataagaaggagaaagctcgagtcatcactgagga

SEQ ID NO: 32436 - DNA, 75 bp, Homo sapiens
ctgggagccgttattggctgccgttaaggaccgttacgtttcccgggtttggtgcacctcgatttggaggaagta

SEQ ID NO: 32437 - DNA, 99 bp, Homo sapiens
ggccactatggaattctaatttgaaccatgtttggattgaagccgcctctgtattacttaccagttgtgaaaaacttcaggacaaaaatgtttcattta

SEQ ID NO: 32438 - DNA, 71 bp, Homo sapiens
gagccgtgcgatctggacgcggcgctgctgaccgacatcgaaggttgcctatccctcgtccaggtgaagtt

SEQ ID NO: 32439 - DNA, 82 bp, Homo sapiens
ctggggctggaaattgcgctggaccgtcgccttgctcctcgccgcggcggggactgcaggctgaaggtgatgtggccgccct

SEQ ID NO: 32440 - DNA, 89 bp, Homo sapiens
cagtgatgtctaacagttctgttatccatttaaaaccaagacgagttgtactgctgtcacaggaaatggacgctggattacaagcatgg

SEQ ID NO: 32441 - DNA, 97 bp, Homo sapiens
atttgttagtgctgtgtgctggagggcactaccagatgggaaaatgtgccagaggaacttcaagaaccattttacacagatcagtatgaccaggaac

SEQ ID NO: 32442 - DNA, 100 bp, Homo sapiens
cagcctcatcctacagccccctagctctggccaggctgccgcacctctacaggaactttgccgcggagcagtatgccagtgtgttcgccatctccctgcc

SEQ ID NO: 32443 - DNA, 75 bp, Homo sapiens
acttcggtgcctctctccagcagactgcgatgaaggatttgggggcagagcacttggcaggtcatgaaggggtcc

SEQ ID NO: 32444 - DNA, 80 bp, Homo sapiens
agctcatttggaaggcaaaaaggataatcagttcatctggaaaccagctcggcaagatgtcggtgaaggagggcgcacag

SEQ ID NO: 32445 - DNA, 51 bp, Homo sapiens
cctggcacatcagattgactgagattgtgttctcctgaaaagaaagctgaa

SEQ ID NO: 32446 - DNA, 90 bp, Homo sapiens
gctgtttccatatgacccttatgaacgagctcgccaaaagatgttattggagctattttgtaagctgtcctgagagcacgtctctacatc

SEQ ID NO: 32447 - DNA, 100 bp, Homo sapiens
agaaaatgaccgcaatctctgccagcaccttgggaagagaaagaaaatgccgaaggcactcagacagtggaagatagatgataagcctgtaaaaattgac

SEQ ID NO: 32448 - DNA, 78 bp, Homo sapiens
tcgaatgaggcacctaaaaattgtataccgcagattcagagctaaagttgcagacaagatccagctcatcaataatat

SEQ ID NO: 32449 - DNA, 83 bp, Homo sapiens
ttccgtgggtctgtgaagaggtcggcggcccctgcgggcgccagtcagggtcagagaggagggagaaggctgtgctaaacaag

SEQ ID NO: 32450 - DNA, 87 bp, Homo sapiens
tgcagcccgggatcagctctctgttttggaaaatggactctggtagctgaagaacatctcacagtggacgccagggtctattcctac

SEQ ID NO: 32451 - DNA, 75 bp, Homo sapiens
gccactgcagcttatcaagtagaagggacaggagagagtggcaagagtacgtttatcaagcagatgagaatcatc

SEQ ID NO: 32452 - DNA, 129 bp, Homo sapiens
tcagtccctcaagctcatctcctgtcattcctgcccatttctggaccccagccactcctcaaacaggtaaacaaatccgagctatgctgggccagttcagccaggcagaagccttattaatgaaagctg

SEQ ID NO: 32453 - DNA, 50 bp, Homo sapiens
gtgcctataccaatagttgccttgaattaaacatgtggacatgaaccaaa

SEQ ID NO: 32454 - DNA, 133 bp, Homo sapiens
ggcaaaagcccatacctttatccactctatggccttggagaactgccccaaggatttgcaagggctgttgataatcaggtgtatgtggccacagcctctcctgcccgggatgacaaagcctcctatgttgcct

SEQ ID NO: 32455 - DNA, 88 bp, Homo sapiens
agccagagccggccggcggggccacgcccggggccaccctccccaagtccccatctcaggaagtaaaaggcctacaagcccagattgc

SEQ ID NO: 32456 - DNA, 100 bp, Homo sapiens
ggggaggggacgctgagggcccatgtgctgaaaatccgaagtgccgcggaaagtggagttctaggcacgggcgcggaggtggattacctggagcagtttg

SEQ ID NO: 32457 - DNA, 75 bp, Homo sapiens
cagaacatgatcaagggtgttacactggagccagatgaccaagatgctccagatgaacatgagtcgcctccacct

SEQ ID NO: 32458 - DNA, 100 bp, Homo sapiens
aaaccctagtgaataaagccaagagagaccttggagtaattcgtcgacagtttttcagaagaagtgaagtcaagatgaagaaccatttgcttttctgggg

SEQ ID NO: 32459 - DNA, 83 bp, Homo sapiens
ggcgtctcatggcgttggaataccggctctcagcggctgtgccgtgagcgatgtggagatgcaggaacactatgatgagtttt

SEQ ID NO: 32460 - DNA, 75 bp, Homo sapiens
tgatggtgatggagattttgatgtggatgatgccaaagttttattaggccaagctataacatcagaaatggtgaa

SEQ ID NO: 32461 - DNA, 80 bp, Homo sapiens
gagagcggccaggtggaggaggagcgcggaggcgaccgcaggttatgaagacagtatggagtttccagaccatagtagac

SEQ ID NO: 32462 - DNA, 82 bp, Homo sapiens
gcctcccggctctcgtcagcctcccgccggccgtctccttaacaccgaacaccccactatcgaaaacgatcggcatcccggg

SEQ ID NO: 32463 - DNA, 75 bp, Homo sapiens
ggccaccgacttcctcacctgccacggcctcaccgtttccgacggaatctggtgggccctttattgaccaggttt

SEQ ID NO: 32464 - DNA, 100 bp, Homo sapiens
catggggttgttctcataataattcagatggagaatatatggctggacagctagctgcttatggctataaaattacagacttggcttcaaccaactcagg

SEQ ID NO: 32465 - DNA, 50 bp, Homo sapiens
gagcggtcccgcatcaaggctctggcagtaatcctaaattggagagtcag

SEQ ID NO: 32466 - DNA, 50 bp, Homo sapiens
gcggtggcgcccggagcccgagccctgtgtctaggtcgtttgggaaacgc

SEQ ID NO: 32467 - DNA, 89 bp, Homo sapiens
gtgaggacgtgcttcctgcttcatagataagaggtgctggaagcccaggaagcacacatcaaggctcccttgccagcagggtgctgcca

SEQ ID NO: 32468 - DNA, 75 bp, Homo sapiens
aagatggcgacggcgaccatagctctcactcggtgaaatacctggagtgctcagctctcacccagagaggcctga

SEQ ID NO: 32469 - DNA, 98 bp, Homo sapiens
ggcatgatatgagctgcctggacattggagggggcttccccggaatggagggctccgggcccaagtttgaggagaacaggctgtgtataataggccac

SEQ ID NO: 32470 - DNA, 98 bp, Homo sapiens
ctgtctcccgctccgcagccccgggcacggcggaggcagcggagccctgggccatcgtgtcaagctgagctcccagactctgatacaggctggggatg

SEQ ID NO: 32471 - DNA, 90 bp, Homo sapiens
catggccgacgaaaagcccaagataaggagtcaggccagggcgggatgacactcattgattctaaagcatctttaatctgccaggcggag

SEQ ID NO: 32472 - DNA, 100 bp, Homo sapiens
ctccactaactggggctacgactctgatgggcagggtccccagccccaccccagccccaaaggaggctgttcgagagggacgtcctccggagccaacccc

SEQ ID NO: 32473 - DNA, 74 bp, Homo sapiens
agaatggactgaacaggagacccttctactcctggaggaaggccaggcccctgaccccagccctgccccaggcc

SEQ ID NO: 32474 - DNA, 100 bp, Homo sapiens
gcgagtccggtctcaaaatggagtttctcaactcattggatgctaaagaaatatatttggaagtaatacataatcttccagattttgaactactttcggc

SEQ ID NO: 32475 - DNA, 90 bp, Homo sapiens
cgtgtcttgtgaactcccatcaccttcaagaaagcttccgagctttggcgctgaccacaatgctgagcaggaagcagcagctgcaggccc

SEQ ID NO: 32476 - DNA, 97 bp, Homo sapiens
cgttcccgaagcaaaagtccattcagaaaagacaagagccctgtgagtcacaaacataacaatggtcagcccatttggtttaccctgggcatcctgg

SEQ ID NO: 32477 - DNA, 100 bp, Homo sapiens
tgtcagtcccaggccacgctgtcgttggctgaaatccaaaaactagaggaagaacgagaacggcagcttcgagaagagaaccttctgataacttaagaga

SEQ ID NO: 32478 - DNA, 83 bp, Homo sapiens
tacaaatttttggatgatgatggatccatttctcctattgaggagtcaacgtggaccacacaggagaatatggaaatctggtg

SEQ ID NO: 32479 - DNA, 90 bp, Homo sapiens
gggggctcagagatccaagtgcgcgccctggcgggtccggaccaaggtttgaagacagtgaaaaacaaatagattataagtcatttttct

SEQ ID NO: 32480 - DNA, 75 bp, Homo sapiens
ccccgattcaccaacgagccctagataaaagaatcagagtgtctcaacccttgacaagaggaccaagtgccttta

SEQ ID NO: 32481 - DNA, 100 bp, Homo sapiens
aagatgttcagaagttcatggatgctgtcaacaagaagagcagttcccaggatctgcataaaggcatctatcgagctgtgcctattcgagtcaatccaag

SEQ ID NO: 32482 - DNA, 80 bp, Homo sapiens
catccaccactggaacgccaaccggctggacctgttcgagatcagccagccgaccgaggaatcttgtcgattggcctggc

SEQ ID NO: 32483 - DNA, 100 bp, Homo sapiens
atgccaccccagcccgtggtcctgatgccaacagtgtaccagcagggcgttggctatgtgcccatcacagaggtggggctggtgtccgagcacttctcgc

SEQ ID NO: 32484 - DNA, 82 bp, Homo sapiens
cagcagaccctcgcccggaagggccgcagctccgtgggcaacgactattgcccagaagaaaagatgtttggttttcacaagc

SEQ ID NO: 32485 - DNA, 75 bp, Homo sapiens
gggcacgtcaccgccgaatggcagcctccagaaagccaccgcgagtaagatgtcatcagcattgacaagacggga

SEQ ID NO: 32486 - DNA, 51 bp, Homo sapiens
gaattgccgcttccttttagttactacaaatcttcctattttcaagctgaa

SEQ ID NO: 32487 - DNA, 100 bp, Homo sapiens
attcgtgctatccctgggggttgcagctttgtataagttgtggacatcggatacccaaggagacgaagctgaagcaggagaaggaggggaaaattaaccg

SEQ ID NO: 32488 - DNA, 50 bp, Homo sapiens
ctacaagatgccccgtctgattgccaaggaaatggtgtttgcaagtgtcg

SEQ ID NO: 32489 - DNA, 90 bp, Homo sapiens
ttgtggcattcaaatcctagcactctgggagaggcttgggaacaatgggccgaggcattgtcatttcttttgcaagggccaggattcctg

SEQ ID NO: 32490 - DNA, 97 bp, Homo sapiens
tggacgccggatgagttgcttttaggcttgctggcccgcggggctgtccaggcacgcgaggcccctcaggtgtcatggagaaactccagctgggccc

SEQ ID NO: 32491 - DNA, 97 bp, Homo sapiens
gtaatttcaacagaagagtgagagatggaacccgaagaagaaaggattcgttacagccagagattgagtaaacatcagtctccaaagataactacat

SEQ ID NO: 32492 - DNA, 51 bp, Homo sapiens
tgttggacctttatacgtattgtaaaggtcacagagatgcggcggaccctg

SEQ ID NO: 32493 - DNA, 100 bp, Homo sapiens
ggacaagaatatgctgccaaaattatcaacaccaaaaagctttctgctaggggcggcaaagatctgcaacaacatgctgttagctattagtatgattgga

SEQ ID NO: 32494 - DNA, 90 bp, Homo sapiens
aacttgtggatggacttgctacctcttgggtgaactctagcaattacaaggtaacagttgacaaatgggaacctttgttgaacaacttgg

SEQ ID NO: 32495 - DNA, 74 bp, Homo sapiens
caaggccaaatccaagactttggacttcattgatgtactcctgctgagcaagattgcccgtgaggcagaggctg

SEQ ID NO: 32496 - DNA, 100 bp, Homo sapiens
gcacagccttcctgtgtggttttaccgcccagagagcgtcatggacctggaataattgtgtgcccaagaagatgctgcagctggttggtgtcactgccat

SEQ ID NO: 32497 - DNA, 82 bp, Homo sapiens
gaagcccttcgcctgcacctggccaggctgcggctggaggttttaaaatcaaagatgggaaaatcggagaaaattgcccttc

SEQ ID NO: 32498 - DNA, 54 bp, Homo sapiens
gagaaaaggaggaaaatggtcaccttgggagcctctctctgtcacccaggctgg

SEQ ID NO: 32499 - DNA, 51 bp, Homo sapiens
gggagaaaggcgggcccgggaacaggcttcaacggaccacaccaaaatgcc

SEQ ID NO: 32500 - DNA, 57 bp, Homo sapiens
aagaggtcgaattggagctgatggcctaagtgaaatggatgagaatcaaatccagat

SEQ ID NO: 32501 - DNA, 75 bp, Homo sapiens
agtaaatgtgaagtcacatcagagggagcatcaaaatattcaggatttggaactagctctggttttggatgcagc

SEQ ID NO: 32502 - DNA, 83 bp, Homo sapiens
caaacagcccgcccgaccccgtcccgaccctggccgccccgagcggagcctggagcagacggttgatgatgaagcgccggccg

SEQ ID NO: 32503 - DNA, 51 bp, Homo sapiens
gtgcactgctacaggactctactatggagaccctggaggaggagctatttg

SEQ ID NO: 32504 - DNA, 131 bp, Homo sapiens
atggtttcggttcggaggtgccataaaggagttatcatcagaggacaagtccccagagtatttctatgtgggtgcggattgatgagtacgattactccaagcccatccaggggcaacagaagaagcccttt

SEQ ID NO: 32505 - DNA, 99 bp, Homo sapiens
cccacccactcatcctgcagatctggagcagcattccagggcctgggtaaaggcagcagtaatgctaacgctagcaagtaaactgaagcgtgacgatgg

SEQ ID NO: 32506 - DNA, 75 bp, Homo sapiens
gccccctatcctatccgcaaacaatgacctcattccacctatggacttgcttgaaatgattgtcacctggatttt

SEQ ID NO: 32507 - DNA, 101 bp, Homo sapiens
attgtactggcctgctgctggcccgcaggtgggtgtataacattctcgacaagaaggctgaagcggaccggattgttttcgagaacccagatccctctgat

SEQ ID NO: 32508 - DNA, 100 bp, Homo sapiens
taatatcgttgcctaccatgacagcatcatgaagttgggtatctacagccattggttgctgttcaggtcagctttgctcctaacaacactgggaaagaag

SEQ ID NO: 32509 - DNA, 75 bp, Homo sapiens
cgatgatgccaatgtcctggtgtggcacgctctcctcctacccgaatgtatcctgtcaggtataatgtcagtgaa

SEQ ID NO: 32510 - DNA, 100 bp, Homo sapiens
ccatggccgccgccgatgccgaggtcagcccaaggccaaccccactgtcactctgttcccgccctcctctgaggagctccaagccaacaaggccacacta

SEQ ID NO: 32511 - DNA, 95 bp, Homo sapiens
ttaaggattccaagtaactcttatttggcattggttggggataagtcgctggcattttggttgatggatgccgaaatgtatacaaacatgagtgt

SEQ ID NO: 32512 - DNA, 75 bp, Homo sapiens
caggaggagctggacttccggaagagtgtgttcgaggagggcccggcgagcagccaaggaggccaaggaggcccc

SEQ ID NO: 32513 - DNA, 100 bp, Homo sapiens
aggcctttgctggacagatgaagagtgacttgtttctggatgattctaagagcaaaccgtggggaactgtgggtcagagactctccagcatccttggaag

SEQ ID NO: 32514 - DNA, 83 bp, Homo sapiens
caagttcatctcctccgtcaccagccacatctaccaggtgacttaagagattaaaattaatttggttgctgttggttctgaac

SEQ ID NO: 32515 - DNA, 100 bp, Homo sapiens
ccctgcctccgcgtcgcagcccccgccgtagccgcctccgagcccgccgccacatcctctgaggtgaagctgtacttcacaaaaacagtagaggagccgt

SEQ ID NO: 32516 - DNA, 75 bp, Homo sapiens
ttggggatggcgtgcagcgcaaccacgagacggccttccaaggactttgattcctggtttgatacaaacaactgc

SEQ ID NO: 32517 - DNA, 82 bp, Homo sapiens
ctcaatatctgtcttcggtggactccttcggcagtccacccaccgccgccgcctcccaggattctggactctacttataata

SEQ ID NO: 32518 - DNA, 82 bp, Homo sapiens
cgtccttctccactttcgccagcccgtgccgcgagcgcggcctgcaggagctggtcagtgagaaggtcggaggggccgaggg

SEQ ID NO: 32519 - DNA, 82 bp, Homo sapiens
aagaagacaaggtggaaaagttgcagtttgaagaggaggactttatatttcagcagttgaatcagttgaattcacttcatca

SEQ ID NO: 32520 - DNA, 80 bp, Homo sapiens
agccaagccatgggagacaagaagagccccaccagacaatgcagatcttcgtgaagactctgactggtaagaccatcacc

SEQ ID NO: 32521 - DNA, 74 bp, Homo sapiens
aagaggttgattacagcggcctcagggttcaggcaatgcaaataagggcccaggaaaccttcatgcaatgggat

SEQ ID NO: 32522 - DNA, 75 bp, Homo sapiens
caaacattccgcataaacgaggtggtcaaggaatgtcaggtatgatgagtgggtgaaggctgacaggataatctg

SEQ ID NO: 32523 - DNA, 102 bp, Homo sapiens
gctgccgccgctctgaggagttaaaggttccagcaacagatagaaatgctttaagttcactctggggaaagctggcctctgaaatcttaatgcagaattggg

SEQ ID NO: 32524 - DNA, 134 bp, Homo sapiens
cccagctgtgatcccccatacctggcctgccgtctcctggctgctgcttgcatatatacacacgccctggtaagccttcttcaaaatctgaacaaagcaaactacaacctgcccatcatggtgacagattcagg

SEQ ID NO: 32525 - DNA, 89 bp, Homo sapiens
agccgcgcgcctttgtgcgcgcgccgaggttgtttacattcagagctctatcaataagaggaatacatattacagtgaattcgacaacc

SEQ ID NO: 32526 - DNA, 90 bp, Homo sapiens
aattgaaaagcctttgaaattctttcaaactggagccttattggagagatcaatggcttttcaaaagcagcacaccaaactgtcaaagtg

SEQ ID NO: 32527 - DNA, 100 bp, Homo sapiens
ctctcctgaccctgaagaactgtggtgttgaaattccgtaaacttaacttcaatggggagggtgaacccgaagaactgatggtggacaactggcgcccag

SEQ ID NO: 32528 - DNA, 100 bp, Homo sapiens
acctggcattgccttttgttgaggtctacttcaggaaaggaaaagtactctgcgatgctggttttttaggtgatgccttacaactctttcttcagtgctt

SEQ ID NO: 32529 - DNA, 100 bp, Homo sapiens
cttctacatgctgggagtgcgctacctgacgctcacccacacctgcaacacaccctggacagagcgggatgccaccagcttgtccaaagggaagttccag

SEQ ID NO: 32530 - DNA, 126 bp, Homo sapiens
cagcagcgacggtagcagcagcatggccgcgatctatgggggtgtagaggggattcaagagggattggcatcaaagttcacttctttaacaaaagtgctttatgactttaataaaatattagagaa

SEQ ID NO: 32531 - DNA, 90 bp, Homo sapiens
gccgtgtactctatggtggaatttaacgggaagctgttagccagcatcaatagcacgggacgtccagatcggtgacatcgtcacagtggg

SEQ ID NO: 32532 - DNA, 98 bp, Homo sapiens
ctgatgccaacagtgtaccagcagggcgttggctatgtgcccatcacagggctgtgactccctgacgcagatccagtgcggccagctgcagagccgca

SEQ ID NO: 32533 - DNA, 96 bp, Homo sapiens
tccagcttctgctgtccttctttgtggagagcaagccaataatttctgaagatcagacagcagccctgatggcccatctctttgaaatgggattct

SEQ ID NO: 32534 - DNA, 100 bp, Homo sapiens
aatatgaagaggaggaggaggaggactatgacgaggaggaggaagagtccagtgaaggtcgccactgggacactgtgaaccaggagtgagtcggagctgc

SEQ ID NO: 32535 - DNA, 100 bp, Homo sapiens
gagctgggtggtctggagaccatggagaccctcacggagctgggcgacgagctgaccctgggagacatcgacgttgctgcagcaaacgagattgctaagg

SEQ ID NO: 32536 - DNA, 82 bp, Homo sapiens
acatgacgcaggtgcaggtgtctcttctcgccctggcggggaagatcatggaagggaagtggttgctgtgtatgttactggt

SEQ ID NO: 32537 - DNA, 77 bp, Homo sapiens
aaagtttgtaggaaaattgctgcacatggcctttgcagaaaagagagtaacaaatgtggcaattattttggatctat

SEQ ID NO: 32538 - DNA, 100 bp, Homo sapiens
ggagccctgtccagagcctccagggccctgcgccttgctccttttgtctaccttcttctgatccagacagctgcctgccttgtgcttggctgtatgattt

SEQ ID NO: 32539 - DNA, 98 bp, Homo sapiens
taatacagcaagaaagaccatcaagtttaccagtccccagtctatgtgaggatctcctgtcttctgttgaccagccactgaaaattgccagagacaag

SEQ ID NO: 32540 - DNA, 100 bp, Homo sapiens
gacaactgggccaattacttctcccgcttctttcctgtctcgtgccctggtgggcggaacccctggaccggggtatcccagttcctgcagacatctcaga

SEQ ID NO: 32541 - DNA, 90 bp, Homo sapiens
tcatctcgctcggctgcgggaaatcgggctgaagcgactgagtccgcgatggaggtagtatcttccccagcagatgttgctgaaaaagct

SEQ ID NO: 32542 - DNA, 50 bp, Homo sapiens
aagccatgtattgctacctgcgctggctgatctactggctgacctttgcc

SEQ ID NO: 32543 - DNA, 51 bp, Homo sapiens
ccgcacgagcaccagcctagagccagtgagaaagatcagtctaaagaaaag

SEQ ID NO: 32544 - DNA, 75 bp, Homo sapiens
ttggaggaggaggatgaatttgatagagaggctcttcgtcagattgggcagaggacgataagcactgcttcccgc

SEQ ID NO: 32545 - DNA, 74 bp, Homo sapiens
ccctcgaactcctagctcatttcgacagccttctgtgaagagggataccaaggaaagttctttctgctgtcttt

SEQ ID NO: 32546 - DNA, 83 bp, Homo sapiens
aggatctcttcgggagcgacgccgacagcgaagctgagcgtaaagcatgattatgatatgagggtggatgatttccttcgtcg

SEQ ID NO: 32547 - DNA, 82 bp, Homo sapiens
ccatggccgacgaaaagcccaagggaacggcaggagcagctgatgggatatcggaagagagggccgaagcccaaaccgctag

SEQ ID NO: 32548 - DNA, 74 bp, Homo sapiens
gtgatatagtttcacgatttcagaaggtcaatttttctgtggaaataaatattgtgataaaaaagaaggcttaa

SEQ ID NO: 32549 - DNA, 98 bp, Homo sapiens
tgatggcttcctgcccgattccttgttggacatcatcaccaactgtggctcaggttttgcagtggccctcatggagcacagcaactgctcgtcggagc

SEQ ID NO: 32550 - DNA, 50 bp, Homo sapiens
catcttcccgaccgcgagccgtccagggtcttgctttgtctcccaggctg

SEQ ID NO: 32551 - DNA, 100 bp, Homo sapiens
gatttgtttgagtacgaagggtgcaaagtgggacgcggcacctacggtcacgtctacaaggcgaggcggaaagatggctgatcttgcatctttaatggat

SEQ ID NO: 32552 - DNA, 83 bp, Homo sapiens
cgaagaggtgagaacaaaatcatggttttgcactgattgcaaaaataaagtcctccgagcatacaatatccttattggtgaac

SEQ ID NO: 32553 - DNA, 90 bp, Homo sapiens
cttctttgtcaattgctggggttggacttgatagctcaaatttgaaaacaacctttcaggtctggtgtcggcgcgcctgttatcggtgag

SEQ ID NO: 32554 - DNA, 50 bp, Homo sapiens
ttaccggcgtccaccaccatgcccaggactcagtggcatttgaggatgtg

SEQ ID NO: 32555 - DNA, 100 bp, Homo sapiens
agagctattcagagcctgaaaaaaatagtcaatagtgctcagactggtagcttcaaacagctcacagttaaggtatcatgaactgatcactaaatatggg

SEQ ID NO: 32556 - DNA, 83 bp, Homo sapiens
tcaaggttgtcaacccccaggagtattccagcaactgcaccgaggaatgtggacccccctgtctggtacgacaccgacgtgaa

SEQ ID NO: 32557 - DNA, 100 bp, Homo sapiens
cagaacctgctgcagcagaagagccctggcctcccacgactacatcctgaagattgtgcccacggtttatgaggacaagagtggcaagcagcggtactcc

SEQ ID NO: 32558 - DNA, 102 bp, Homo sapiens
ctaaaccagaagaggaggttgcccagaagaaaaaggctttgatgacagtagggaaagaaccatttcctaccatttacgtagattcacaaaaagaaaatgaga

SEQ ID NO: 32559 - DNA, 87 bp, Homo sapiens
tgagtctactctgtcgctcttgtgccctagcaccccgagaaccgtcagtttgagccagatggaggatttgttggtattgaggaaaac

SEQ ID NO: 32560 - DNA, 75 bp, Homo sapiens
ggtgggtctcactgacttcaagaatgaagccgcggaccctcctgtgccttcccagaccttccaccttaggttctg

SEQ ID NO: 32561 - DNA, 100 bp, Homo sapiens
atcttttgacaagatgtcacctgaaagtggtcacagccgcatctttgaaggcagtggagctactgctgtggttcaggcagccctatgcaaacccaggcaa

SEQ ID NO: 32562 - DNA, 98 bp, Homo sapiens
ccgatggcatcaaggtctttcccaacgaggaggacctcaccgacctccaggtcaccatcgagggccctgactattgcccagaagaaaagatgtttggt

SEQ ID NO: 32563 - DNA, 90 bp, Homo sapiens
ctgcgacctggggccctgggtgaagtgctccgtcgcccttgcctccaggtctctgggtgtgacactttgggagctttttgacaatgccgc

SEQ ID NO: 32564 - DNA, 100 bp, Homo sapiens
ctccgccgggacgcgttggccggggcgcgcggtgcttggctgcggtgctcacactcatgaggagccggaagacaaatttacatgtattggagaccagacc

SEQ ID NO: 32565 - DNA, 83 bp, Homo sapiens
gatgtccccatccgccgccgagaggaggcctatgagaatcagcttcagctttagctgcagctgcctctgttcagccacttgca

SEQ ID NO: 32566 - DNA, 75 bp, Homo sapiens
gaggaggaggaggaggaggcttgggcttgcgccgttgaagcttcggaaccaaaaagaagcttcccagagccgggg

SEQ ID NO: 32567 - DNA, 100 bp, Homo sapiens
tgacagcaagccctactgagcgtgctcccctctgagactggagtgagagggtcttctggcgttactacaaggagacctctggcctgatgctggacgttgg

SEQ ID NO: 32568 - DNA, 50 bp, Homo sapiens
ctgccgtctttcacacactgataggcacagaagtttacagacagttttgg

SEQ ID NO: 32569 - DNA, 80 bp, Homo sapiens
cgcggcgcaggaggcggtggagcgcagagcgggcgagcgcggtactccaaagattcaggtttactcacgtcatccagcag

SEQ ID NO: 32570 - DNA, 100 bp, Homo sapiens
gaaaccaggctgctttcaggaacattgctgtggattcccaggccgaagaacagttgagaattgttgaagaacaaagaaagattcatgaggaaaggatgaa

SEQ ID NO: 32571 - DNA, 50 bp, Homo sapiens
cgtgctgggcctggacctctggcagaatgcaagttctagccggtttttcc

SEQ ID NO: 32572 - DNA, 83 bp, Homo sapiens
ccctggtgactgccagcccaaacaatgcagatcttcgtgaagactctgactggtaagaccatcaccctcgaggttgagcccag

SEQ ID NO: 32573 - DNA, 98 bp, Homo sapiens
cgcgctctgcacctgggcgctgcgccgctcccagcccggatggagccgcaccgactgcgtgatgatcagcaccagcagtgtaatgacaatagtaaagt

SEQ ID NO: 32574 - DNA, 100 bp, Homo sapiens
aattggtagctggaaatagtcctaagaaacaagcttctagaccacctatccaaaatgcatgtgttgcagataagcacagcttcagaggatgattccgaag

SEQ ID NO: 32575 - DNA, 82 bp, Homo sapiens
aacgccttaacccaaggaagtgactcaaactgtgagaacttcagaggaatgttacggcatccggagtcatccctcagatttc

SEQ ID NO: 32576 - DNA, 95 bp, Homo sapiens
agacaagctcagaactgagaagctgtcaccacaggtcctcattcccacgacccgatgcaactcccacaaggagaacatccagggccagctcaagg

SEQ ID NO: 32577 - DNA, 50 bp, Homo sapiens
ggcaagccccgctccggccaacaaaaataacatctgctttgctgccgagc

SEQ ID NO: 32578 - DNA, 100 bp, Homo sapiens
acggccgtgcccgaggggctcagcgccttcacccaagcgctaggaattcaagggctccacagtcgtcgagctgatgaagaaggaaggcactaccctgggt

SEQ ID NO: 32579 - DNA, 75 bp, Homo sapiens
tgctggaaaatgccaacgtcagtcagctctgccgagacgcatccagagctttcgtgaccggggactgttctgaag

SEQ ID NO: 32580 - DNA, 80 bp, Homo sapiens
cttcggcagtccacccaccgccgccgcctcccagattctgattttgcaagtctgagatgggctcaagattatgcatctct

SEQ ID NO: 32581 - DNA, 90 bp, Homo sapiens
tttggaactgtcaggtacctcaaagcagttgctggagaatgtaaccctaatccataaaccagtgtcgttgcaaccccgtgggctgatcaa

SEQ ID NO: 32582 - DNA, 100 bp, Homo sapiens
tagcagcttttggaggcagtaatattgagcctagtgttcgcagctgcttccaacagagcaaaggcacaacaccacttgctccaccacctaaacctgttcg

SEQ ID NO: 32583 - DNA, 74 bp, Homo sapiens
gaaattttaaagactgttgtgaacagggatgtacctaatgtggatgagcttttagaaaagtacatggactctta

SEQ ID NO: 32584 - DNA, 100 bp, Homo sapiens
atcctcactctgagtacggtctcacagacaacgttgaggaggaggaagccaagaatctggtgagcgaagccatcgcagctggcatcttcaacgacctggg

SEQ ID NO: 32585 - DNA, 75 bp, Homo sapiens
actctgctactttttctcaacacctgccttctgaatgcacctcggtaacctctgccaaagtggctgtgaatggcg

SEQ ID NO: 32586 - DNA, 75 bp, Homo sapiens
cgaacatgtcgcggcctgtcagtgcttttttaggaccaaaggatatatttccttactcagaaaataaggaaaagt

SEQ ID NO: 32587 - DNA, 74 bp, Homo sapiens
cgcaaacaaggagagcctactgagcagcctgagtggagctccatgaacctgcctccagacaaggcccggctcct

SEQ ID NO: 32588 - DNA, 96 bp, Homo sapiens
acctccccaacggatcgctctcgcccaccgcccgaaccaatcatccagaaccgcatcctgctcgtcatcctagggatcatcgtggtcatcaccatc

SEQ ID NO: 32589 - DNA, 95 bp, Homo sapiens
ctgcagagacagaattcctgagtgaacgaacagagcagctcctcttccatctccagggtctctatggcagtgtaatagtggcaggaggaaacaca

SEQ ID NO: 32590 - DNA, 100 bp, Homo sapiens
ctgctggtgggccagtacagcaccggcaagaccaccttcatcagcatccagcacgtgtatggtgcccagcaccccccctttgatccactgttacatggca

SEQ ID NO: 32591 - DNA, 88 bp, Homo sapiens
tgaagactccagtatgcaactgactacaaggagtgatgtcttggcattgcccattttcaagcaggaagattccagccttccattggat

SEQ ID NO: 32592 - DNA, 73 bp, Homo sapiens
aagaggctcccctgggccccttccaggccccacctccaggcgctccaggcccctgcctgtcacgagaacatgg

SEQ ID NO: 32593 - DNA, 75 bp, Homo sapiens
caaaagagttgattgaaattatctctggtgctgcagctctgctggagtgtagtggcgcaatcttggatcaccaca

SEQ ID NO: 32594 - DNA, 83 bp, Homo sapiens
gccgtgcgcatgtttgctgactacctcgcccacgagagtcggagcctaacaggacgtattatctgatggaccccagcgggaac

SEQ ID NO: 32595 - DNA, 99 bp, Homo sapiens
gaccaaggaccagctcaccacggagaacatcatccttggcttgcagggtggcccccgctccgacttcgacatggcctatgagcgtggccggatctccgt

SEQ ID NO: 32596 - DNA, 110 bp, Homo sapiens
cagagttcaaggaggccttccagctgtttgaccgaacagcttcccatcgacggtcagtgcgcacgttgtaatcagctgaggccatgtcaggagacggagccacggagcag

SEQ ID NO: 32597 - DNA, 50 bp, Homo sapiens
ctgcggccccgtccggcccgggctggacagagcgggatgccaccagcttg

SEQ ID NO: 32598 - DNA, 74 bp, Homo sapiens
gaagagccaggttgctgtgttgcagtgcattgtgttgcaggattgggaagggcctgtcccagtcggctttaccc

SEQ ID NO: 32599 - DNA, 82 bp, Homo sapiens
ccttctccactttcgccagcccgtgccgcgagcgcggcctgcaggagggggtccactggacggggcctgagctacaacttca

SEQ ID NO: 32600 - DNA, 75 bp, Homo sapiens
ggttcagactcttggagccagaagctacatgacccctaaacggattatttttacccaagatacttaggtaagtct

SEQ ID NO: 32601 - DNA, 105 bp, Homo sapiens
tggcggccatggtgttgctgctgtactccttctccggtgtcatggagaaactccagctgggcccagagattctgcagcgggaaaatccaaggcttatttatgcca

SEQ ID NO: 32602 - DNA, 100 bp, Homo sapiens
gctccccctccctccaagtccagtaagaagttgggccaagctggaagggattgaccgggtgagcatgggtttatgcgtcttaggcattattgtgatggcg

SEQ ID NO: 32603 - DNA, 100 bp, Homo sapiens
aggcgcggggagccaggcctgggccccgggtccccaagacccttgtgctcgttgtcgccgcggtcctgctgttggtggctgaattatatgaagaattgaa

SEQ ID NO: 32604 - DNA, 100 bp, Homo sapiens
ggtgcagggcctgattgaggactgccagctggcgctgcaggtcacaatccaaggtccggctcctccgcgtcccagggccggacggagggatgaggcaggg

SEQ ID NO: 32605 - DNA, 93 bp, Homo sapiens
tggactgatctccatgtcctgttgtggggcttttacagcctttggttcaaacaagctgtatataaacagacaatgaaactctttgcagagctg

SEQ ID NO: 32606 - DNA, 100 bp, Homo sapiens
gttaaaagttggagaaatttcacagtacatcatccaaaagaggagtccatgatggaggcagaggtaaacttggagagacacgttggtcgtcattgcctcc

SEQ ID NO: 32607 - DNA, 74 bp, Homo sapiens
gtatttgcaagtcatcagactgcataaaatcaggacaaatatcagtggatgggttcatgcgctatctgagtgga

SEQ ID NO: 32608 - DNA, 90 bp, Homo sapiens
caggaggatcaacgggacctgggtatgacaaggcagcaaagattgctaagacagcacacaaaaatggatcaaccttaaaggaaactgcta

SEQ ID NO: 32609 - DNA, 100 bp, Homo sapiens
aaggtttactctgaatcccaatcctacaggagttcaaaacccacacatggtggtgattccactgaagcaactgccaaaccaaagagaagtttttatgctg

SEQ ID NO: 32610 - DNA, 99 bp, Homo sapiens
gatcaaaccacttctaaatgataagggaaggtttacaattgcagccaagcaccacattactattgcagagatctatgagactgaacttgtagacattga

SEQ ID NO: 32611 - DNA, 90 bp, Homo sapiens
ggagaggggagcgaccctggggaccgactctggggaccctcgccgaagagggaaagcaggcaggatgggagagtcgccgatagaaccacc

SEQ ID NO: 32612 - DNA, 50 bp, Homo sapiens
caggatgtaccacctttctggcaatgagggatttcagtcataatcggttg

SEQ ID NO: 32613 - DNA, 100 bp, Homo sapiens
ttaaatgccgagaaggccagtacgcaagctgaacagctgggaagagaagaccagcagcgactgcaccgaaaccggaagctggtgctcatggtggacttgg

SEQ ID NO: 32614 - DNA, 100 bp, Homo sapiens
gagctcgacttcaaactcgtctttggcgaggacggggcgccggcgccgccgcccccgggctcgcggcctgcaggatcttcaagatgaagttcaaagggag

SEQ ID NO: 32615 - DNA, 90 bp, Homo sapiens
ccctatcctatccgcaaacattggttagtctgctgctaattggaattgctgcgtggggcattggcttcgggctgatttccagtctccgag

SEQ ID NO: 32616 - DNA, 80 bp, Homo sapiens
gaatgacagcatctatgaggagaatgctgataatgccaagctgtgtttacagtccaaatttttgctgaagaccttcaact

SEQ ID NO: 32617 - DNA, 82 bp, Homo sapiens
cccagaccctggagcctcagttggaagcagccgatccagcctgcggagcctgtggggcaggcacattcaggaccccgcgagc

SEQ ID NO: 32618 - DNA, 75 bp, Homo sapiens
taacaataagtggcagaaaagatcagggcactccagtgtttgtccatgctggcccgtttgccaacatcgcacatg

SEQ ID NO: 32619 - DNA, 50 bp, Homo sapiens
cggcccggctcgacgccaatgggtatttcaggacagccaggagggggcgc

SEQ ID NO: 32620 - DNA, 90 bp, Homo sapiens
gtgcagcaggacactatcctggccgagggccttcacttcaggtggtgttcccactgatgaagagcaggcgactgggttggagagggagat

SEQ ID NO: 32621 - DNA, 100 bp, Homo sapiens
ctgaaaaggaagttttctggaatgggtaaaagtgcagttttaaagtgtctcctggatattcacaaaatttttcaggaaaatgacccagcgtacatactga

SEQ ID NO: 32622 - DNA, 83 bp, Homo sapiens
ctggcagcagcccccggggcaagagcaggagcccggcaccccccgccgacaaggaggaggatgaaagtcctggacagacttat

SEQ ID NO: 32623 - DNA, 50 bp, Homo sapiens
agctgctgtggaatgacagaaaaatgtatgtcccagaaccaaccaatata

SEQ ID NO: 32624 - DNA, 75 bp, Homo sapiens
aaaactcagcaagtttggatccatacgttataagcaccgctacagtgactgacctggacatcaagtttcagtacc

SEQ ID NO: 32625 - DNA, 100 bp, Homo sapiens
caattgtgtccatcgatataggtccaagtcctggcaatgaggtgaattttgattcatcaggaaccaacgtccaagaggcccagaagatactcaacaacag

SEQ ID NO: 32626 - DNA, 75 bp, Homo sapiens
tttgtgtatgaagctcaagatgtggggagtggcagagagtatgcattaaagagcggcagcggcgaggtggacctg

SEQ ID NO: 32627 - DNA, 100 bp, Homo sapiens
caccatgatctgtggctgggataagagaggccctgggaagaaggagaaagggccaacccctgaagaagcaatacagaaactgaaggagacagagaagata

SEQ ID NO: 32628 - DNA, 83 bp, Homo sapiens
ctggaggcggcccgcttcctggaatggcaagcgcagcaacaacagagagcacgtgtgatgaacggcagcagccactcaccaac

SEQ ID NO: 32629 - DNA, 100 bp, Homo sapiens
aacgtgaagatgtgtttaaagcagtacaagtccagcggagaaagacccttgaacatctgtgaagaaatgactattctgcatggaggcttcttgctggccg

SEQ ID NO: 32630 - DNA, 100 bp, Homo sapiens
ttttcggttccgggtcttggccccgtccttacctcacagtggatggctgtattcatagagcagccggcccctgtttgctagctgaatgtcgtaacctgaa

SEQ ID NO: 32631 - DNA, 98 bp, Homo sapiens
gcagcggggcacagaacagcgacagtacaaagaagactcttgtcacactaattgccaacaacaatgttattgccttgtctgtcaagatccgcagttat

SEQ ID NO: 32632 - DNA, 100 bp, Homo sapiens
gagaactcagcgaggattctgagggaaatgatcttcattggttagcatgtgccttatatgtggcttgcagaaaatctgttccaactgtaagcaaagggac

SEQ ID NO: 32633 - DNA, 100 bp, Homo sapiens
ccggggtcagacgcccactccagagaccatcatgcagacatcagagactgggtcggacacaggctcgacagtgaccttacaaacatctgtggctagtcaa

SEQ ID NO: 32634 - DNA, 96 bp, Homo sapiens
gacacagtgccagagtgtatgcactttactacaaagatggacttctctgtacagtgatcagggccaaagcggtcagtgagaaggaagtggactctg

SEQ ID NO: 32635 - DNA, 100 bp, Homo sapiens
gaaagctggccagatttgcagatggctctgctgtagtacagagaacgccagatcaagtgtcccaagtgtgataagctgttcttgagaacaaatcacttaa

SEQ ID NO: 32636 - DNA, 50 bp, Homo sapiens
ccgccgagctggacccggaccggttttggaactgggcacctccgggctgt

SEQ ID NO: 32637 - DNA, 98 bp, Homo sapiens
gacagcagacacaattcttgtgggaggcttatttttcttcagttgagaagattgtattaactacactagagcatcatctgagggttctccataaacac

SEQ ID NO: 32638 - DNA, 72 bp, Homo sapiens
ctgaggcggcgcggcagcggagggacggcagtctcgcgcggggctcaatgcgcattgggaaggattttatcc

SEQ ID NO: 32639 - DNA, 82 bp, Homo sapiens
gacgtggagcggtacatcgcctcggtgcagggctccaccccgtcgcctcgacaggcttgggcactgtttaaaggaaagttcc

SEQ ID NO: 32640 - DNA, 100 bp, Homo sapiens
aagtggagctccttttcctccacctaccttcccgagtggcataacaagctgttcagatggtacaagtaaccgggacagctttcgactggatgacgatggc

SEQ ID NO: 32641 - DNA, 100 bp, Homo sapiens
gagaccaccagcttctttgactcagatgaggatgactccaccagcagggggtgaatctctacattaagaacttggatgacactattgatgatgagaaatt

SEQ ID NO: 32642 - DNA, 50 bp, Homo sapiens
cgccagaggatggattacccagtgatccggaaagtatggcagaggaggaa

SEQ ID NO: 32643 - DNA, 100 bp, Homo sapiens
tggaagcagccgatccagcctgcggagcctgtggggcaggtaaaacttccttttcctgtagatcaaatcacagatcttccaaggaacgatttccagatga

SEQ ID NO: 32644 - DNA, 100 bp, Homo sapiens
cgtcctcggcggccccggcgccggcaaggggacccagtgcgcccgcatcgtcgagagtgatcagcagctggactgtgccttggacctaatgaggcgcctg

SEQ ID NO: 32645 - DNA, 75 bp, Homo sapiens
cgcaaccgcatcgtgctgcctttcagtttcgcctggccggcagaggtggaggagacactgaagcgactgcagagc

SEQ ID NO: 32646 - DNA, 101 bp, Homo sapiens
ccttggctgatcccggaatgtaccagctggacattacattaagaaggggtcaaagtttagctgctcgagatcgaggagggatattccctccaccaccagat

SEQ ID NO: 32647 - DNA, 82 bp, Homo sapiens
aagaatccccccgaaaggaccccccagttaataaaggtatccatggagaacactgaaaactcagtggattcaaaatccatta

SEQ ID NO: 32648 - DNA, 75 bp, Homo sapiens
tcaaccccatccactgccgcggccgtgggcccgaccgcggggacccgaaagaaaccttgactggttccccaggat

SEQ ID NO: 32649 - DNA, 83 bp, Homo sapiens
ccggcacccagacaggtggcgacggcagaggagatttttagactctgaggagcagttggagctaatccacattatggaaatgg

SEQ ID NO: 32650 - DNA, 50 bp, Homo sapiens
atcggaagaaagcagttccaagtatcctagaaggaaaacatcaccatggc

SEQ ID NO: 32651 - DNA, 75 bp, Homo sapiens
cactgggcgactctgtgcctcgctgagggacatggatttgattgacatactttggaggcaagatatagatcttgg

SEQ ID NO: 32652 - DNA, 100 bp, Homo sapiens
ctcatgggcgtccgcaagcaaggcctgtgctgcacttgttgtgagaactgctttattggatgctgctggtgtggcctctctgttaactacagcagaagtt

SEQ ID NO: 32653 - DNA, 112 bp, Homo sapiens
aatggctccgagcagggaccgcctgctgcactttgggttcaaggcgacaataaaataccatgaggagtttgagaagagccgcatgggccctagcgggggcgagggcatggag

SEQ ID NO: 32654 - DNA, 82 bp, Homo sapiens
ttccgaagatgagaagaggttgttgttggagaagcaggctggcggaaacccttgcaaacggggattcagcgtccgatccttt

SEQ ID NO: 32655 - DNA, 100 bp, Homo sapiens
tctccagatgctagggttatggatatggctcgtggacagcagaaaattcagtctcagcagaaaaatgccaaaaagcaagctggacaaaagaagaaacaag

SEQ ID NO: 32656 - DNA, 50 bp, Homo sapiens
ggagtatttcctgaactgtgtgggtaggatcagattttattaagacctct

SEQ ID NO: 32657 - DNA, 101 bp, Homo sapiens
cagaaggaactagaaaagaaaagaaaacttgaaactaatcctgatattaagccatcaaatgtggaacctatggaaaagcccaattttgacatgctttataa

SEQ ID NO: 32658 - DNA, 100 bp, Homo sapiens
gagtcttcaagtgccctgaggaccagcttcctctggactatgccaaggtctatcagccacagtctctgcaagtttccaagagcagcagaaaatgaacaca

SEQ ID NO: 32659 - DNA, 109 bp, Homo sapiens
caggcagccactaccaatcgattggagttagcctgtgaggcaagaagctaccggatgtttcacgacgacagcatgaagtctttcttccgtagactgagtttcactcccg

SEQ ID NO: 32660 - DNA, 100 bp, Homo sapiens
cctcccaagtggctgggattacagccctcccaagtcccacggcagctgggtcttcatctctccactgcacccagaatcacacgctgacccagataaagct

SEQ ID NO: 32661 - DNA, 75 bp, Homo sapiens
ttttgccatggtggattttgatgaaggctctgatgtatttcagatggtaaatggtcttaaaatggttgatgagcc

SEQ ID NO: 32662 - DNA, 100 bp, Homo sapiens
ccgactgctgggcccgtgacgtcaccccgctgtgacgcgcacgctgtaggaaaactgtacgcaataactgtttggtattttgatgcagatgagagagcac

SEQ ID NO: 32663 - DNA, 83 bp, Homo sapiens
caagcagatggcaggaagattagaacattggatattgattgccagtttttaaggtactgcttaggatgaatatgatttggaga

SEQ ID NO: 32664 - DNA, 98 bp, Homo sapiens
ttcgatgtatctaaacttggcaccaagtatgggaatgattcaccgggatttgaagcctgtcaacatttttttggattctgatgaccatgtgaaaatag

SEQ ID NO: 32665 - DNA, 100 bp, Homo sapiens
aatgcagttgctgtagtcatctacaataataaatccaaagaggagccagttaccatgactcatccagatgttgatgatggagacacagtgacagatttca

SEQ ID NO: 32666 - DNA, 100 bp, Homo sapiens
aggataatcactaaattctgccgaaaggactgaggaacggtgcctggaaaagcttggttctacagccattgggatccagacatcagagggtgtgtgccta

SEQ ID NO: 32667 - DNA, 75 bp, Homo sapiens
acatcgcggccttcttccgatccggaagttgaagaccatgtggcgtttctaataacagttccaactgccctggcg

SEQ ID NO: 32668 - DNA, 100 bp, Homo sapiens
ggagcatatattatggaacacaaattctgcttggtcagaatcgtgatggcattgtgttcagcactgatgactattttcaccatcaagatgggtacaggta

SEQ ID NO: 32669 - DNA, 101 bp, Homo sapiens
ctgctgatataaggttaacttccatcaaatctaccacactaagagttgaccagtcaattctcacagttaactctgctgtttgctgcatgctgcatgagacc

SEQ ID NO: 32670 - DNA, 100 bp, Homo sapiens
cacgcctgttgaagttttatgtaaggaattgaaagatgttggccatcgtgatcagatggctgcagctagaggaatcctgcagaagaacgttccgatcctc

SEQ ID NO: 32671 - DNA, 132 bp, Homo sapiens
gctttttggaattcagttatcaagctttagagcctggctactcacagttgaagcctgattgcagacatggcaaatatgtacgtcttactccgtgctgtgtccactggtttacctcatatgattcaggagctg

SEQ ID NO: 32672 - DNA, 97 bp, Homo sapiens
ctgtgggtcttgtgctgcccatgcttataaacaagtggatccgtctattacgggcttcaagaagcgtgcacctcgggcactcaaagagattcggaaa

SEQ ID NO: 32673 - DNA, 100 bp, Homo sapiens
ctgacgcagtcactgcagcactggtggaacttgagcaatcagccatgactgcctttgcactgtccatgctctcagcccaccacctcctccccctgccatt

SEQ ID NO: 32674 - DNA, 100 bp, Homo sapiens
ctccgattccacacttgattctcttatacgctacttttactcagagtttgaaggttgtgaccaaaagaggctccgtgaatggagtgccatagaaaaagaa

SEQ ID NO: 32675 - DNA, 100 bp, Homo sapiens
ccacaggcttagctgttaacgggaaagttccatcaccgggacagcttcaacacagggtccacagcgtggggcatttcccagtgtctatccgacagcctct

SEQ ID NO: 32676 - DNA, 100 bp, Homo sapiens
tatccgcccagacactgactggcagagtcctgccttcggacgctgactgggacgacctgtgggaccagtttgatgagcggcggtatctgaatgccaaaaa

SEQ ID NO: 32677 - DNA, 83 bp, Homo sapiens
gaactgtccagcgtcacgctcagcacttgccgaggaattaggctggacgtaaagaaagaagtgatgcactcaattctgcaata

SEQ ID NO: 32678 - DNA, 90 bp, Homo sapiens
gtgctgtttgtatgcacgacttgaagacacgcacttatcattcagtgggaattcgaatttagagtttaatttctcagagcattctctcca

SEQ ID NO: 32679 - DNA, 83 bp, Homo sapiens
cctgagcccgcccttgatcttcgctgtggcatggcggacgaggggaagtcgtacagcggtgaaaacttttggcccgtttggaa

SEQ ID NO: 32680 - DNA, 82 bp, Homo sapiens
tgcaatcttaccagggaggccaagcgaccacccaaagaaggttcatcatgcctagtggcgtataagaagaccccgccaccgg

SEQ ID NO: 32681 - DNA, 100 bp, Homo sapiens
ggggactccaattgcttggatgacagtcaccgacagaagggaaaaccagcattggaatcagctgattcaggatgctcagaagcgtggtgccattattaag

SEQ ID NO: 32682 - DNA, 98 bp, Homo sapiens
gtgcccgaggaggcagccaagctcgtagcctgccactccgtgctgccagaacagataaagcccagtgtaagccagcctcagcctgccaactctaataa

SEQ ID NO: 32683 - DNA, 100 bp, Homo sapiens
ggaagtgccccttagcgggtgggggaagctggtaggcacgggcggctccgcagtgaccggactcgggggaggacctgcaagcgcaggaccgagcccaccg

SEQ ID NO: 32684 - DNA, 51 bp, Homo sapiens
gcaccccactccgagggcgacatgcacatgctgagatgaatcgtcacctgt

SEQ ID NO: 32685 - DNA, 75 bp, Homo sapiens
gggacatggaggtggtggacgagacggaggcgctgcagcgcttcttcgaaggtcttgggcgtctttggtactggc

SEQ ID NO: 32686 - DNA, 100 bp, Homo sapiens
aaattgatgcacaaaataagctggaaaaatctgaggccctcgattgattaaatggtgcccagccacgctggatgaggcctgatcttccttactcaaccta

SEQ ID NO: 32687 - DNA, 100 bp, Homo sapiens
agacctccgaacaccatcctttcttccagctgccacacagaaggtgtttgatcagtatgtaaagaccagggcagaggaagaacgcagggaaaagaaaaat

SEQ ID NO: 32688 - DNA, 120 bp, Homo sapiens
ccagccatcctggtcatgcaccactccatgaagccccacccagccatcactgccacactcctggacttcatgtgccgcgcatggatgagttgatggaggtgtctttctcgcccctggcgg

SEQ ID NO: 32689 - DNA, 88 bp, Homo sapiens
gagctgggtctggagacgccgtggcagcctgaacggagtgtgcgacggattgggagtggaatgcagtagccctctgggcctgggatat

SEQ ID NO: 32690 - DNA, 100 bp, Homo sapiens
acagcccatgccccccacccacccgatgcccatgaactacggtttaaagtctttgcagactacgaagcctatgtcaagtgtcaagataaagtgagtcagc

SEQ ID NO: 32691 - DNA, 75 bp, Homo sapiens
cagccgatccagcctgcggagcctgtggggcagaatcatggtgtcatggaaagggatttactttatactgactct

SEQ ID NO: 32692 - DNA, 100 bp, Homo sapiens
ctaaaaacaagactggggctgctcccatcattgatgtggtgcgatcgttgtggacatcggatacccaaggagacgaagctgaagcaggagaaggagggga

SEQ ID NO: 32693 - DNA, 100 bp, Homo sapiens
gcgcggcgctggccgagagccgcggctccgtgtttctggaaagtgacagcaggcatgatgggcccacctcctggtatgagacctcctatgggtcccccaa

SEQ ID NO: 32694 - DNA, 75 bp, Homo sapiens
gaagcagggcccagcgagacagggcccagcaattaccagctctggctgggtcgccacaacttgtttgacgacgaa

SEQ ID NO: 32695 - DNA, 100 bp, Homo sapiens
cctagaccctgcccaacagaatttatatagagatgtgatgttggagaactacagaaacctcgtctccctgggaaacttttgagaagaactttgaaagaga

SEQ ID NO: 32696 - DNA, 90 bp, Homo sapiens
tgccaggagtgttcaagatgctctctctggaccgatcccacttgccggtggtggtgtgcacattgagccccggtatagacagttccccca

SEQ ID NO: 32697 - DNA, 100 bp, Homo sapiens
gcctcaggctcgcggccggcctgggcgccggcggccctgacagcccccacctcgcaagagcagccgcggcgccactgtaggacagcaaggagattccaat

SEQ ID NO: 32698 - DNA, 50 bp, Homo sapiens
agtgaatcaactccagagacaaggagctattcatgccaagtacgatgcaa

SEQ ID NO: 32699 - DNA, 75 bp, Homo sapiens
gcgggagacgagaagcctgaaaagtcgcagcgagctggagccgccggagcttttctgggagaagaggctacaagg

SEQ ID NO: 32700 - DNA, 83 bp, Homo sapiens
ctcagttggaagcagccgatccagcctgcggagcctgtggggcaggcagtggaaattggaacatttgtgttacaaatcaggag

SEQ ID NO: 32701 - DNA, 96 bp, Homo sapiens
ctgttcaccggggagtccctcgccacctgcaagagcctgcagcagtcgcttctccgcaggttgaaggtcgaggagctggaaggcgagcggagtcgg

SEQ ID NO: 32702 - DNA, 90 bp, Homo sapiens
ttacaacatggcagacattgacaaacaacgactgaaagacctttcattcagaagctgtttcgtcctgtggctgcagatggacagttgcac

SEQ ID NO: 32703 - DNA, 50 bp, Homo sapiens
cgcctcacctgtggagctctgggtacagggcacagtcagtggtgtgctgc

SEQ ID NO: 32704 - DNA, 80 bp, Homo sapiens
gcatctgccggctgctccgcaccccggggtcccaggaagggcggcccaggtgaaaggtgtagcagtcactcggcctacac

SEQ ID NO: 32705 - DNA, 83 bp, Homo sapiens
ggatcatgtctgcgagccaggattcccgcttcgagagctgtgcccaggagtgaacaaccagccctacctctgtgagagtggtc

SEQ ID NO: 32706 - DNA, 98 bp, Homo sapiens
tcctcctggggaacccgttcagcacaccagtggggcagtgcctcgaacccttaggagaaatcttgagagtggacagcaattgtgaagatcgccagaga

SEQ ID NO: 32707 - DNA, 82 bp, Homo sapiens
gaagcagcagtcagaaggggaacggatctgtgtgcccacagctcctggagccccacaggttttgggatttgagattgacgcg

SEQ ID NO: 32708 - DNA, 82 bp, Homo sapiens
aataaccaggtgcttggcaaaatcgagcgggccattggccaccagcttgggctccccacggagggcagcaagtgggacttgg

SEQ ID NO: 32709 - DNA, 75 bp, Homo sapiens
cccgcacgccccgaccttccatcgttaatttggagtggcccctggagtcagtttcctacaccatccgaggcccca

SEQ ID NO: 32710 - DNA, 100 bp, Homo sapiens
cgcgaagtgaagctgtgggacacgcggttcttctccagcgccctggcctccctcaccttggacacctcgcttggggctactacaaagttctgggaaaggg

SEQ ID NO: 32711 - DNA, 74 bp, Homo sapiens
tccccttggattcagacgccgattcgcccagaaatgcactcggtgatggaaagagagccactattctgaagaac

SEQ ID NO: 32712 - DNA, 100 bp, Homo sapiens
ccatttcatacttcacagaatggaggtttcagcagccaaagccccaagtgccgcagacttgtctgagattttatggatgtacaagcattcgagaggcttc

SEQ ID NO: 32713 - DNA, 75 bp, Homo sapiens
aatgagccagagggacacgctggtgcatctgtttgccggaggtattggtaaaggttttcaaggtgtcatgaaaag

SEQ ID NO: 32714 - DNA, 51 bp, Homo sapiens
tgaagagaaaggcccggagactgttgccaactttgcaacaatggaagatga

SEQ ID NO: 32715 - DNA, 117 bp, Homo sapiens
ctggcatcagggaggctttcagccggagaagcgagtttcagctggccaacagagcacttatggcaaggcatctcgagggggtggcaatcaccaaaacaattaccagccatactaaag

SEQ ID NO: 32716 - DNA, 82 bp, Homo sapiens
ggcttccaggcgcactaccgcggaaccctcacccagaatgaaatgatatttaagcggctgcacctgggcaccgtgtcctatg

SEQ ID NO: 32717 - DNA, 100 bp, Homo sapiens
acctgctgacacggaaccctcacctcaacaagtgcatgcaagatatgggaaatactaaagcaagactactctatgaagccaatcttccagagaactttcg

SEQ ID NO: 32718 - DNA, 75 bp, Homo sapiens
tctgacacagtctggcattgctggaggatacaaacgcatctcccctcagatggaagtcacatgtgtgcccacgcc

SEQ ID NO: 32719 - DNA, 88 bp, Homo sapiens
agggctcggtgccggactacgggcagcggctcaaggccaatctgaaaggcaccctgcagtgaacttgctgactgagaaggcaccttgg

SEQ ID NO: 32720 - DNA, 90 bp, Homo sapiens
aagcggtgccatgaatttgtcacattctcctgccctggcgctgacaagggtccagcctccgataaactggcgatggaatatgagaggagc

SEQ ID NO: 32721 - DNA, 110 bp, Homo sapiens
gaatttcctgaagaacgttggggagagtgtggcagctgcccttagccctctggtcttgaatccagataatagttttgaaatactggttgaccaatctgtggtgaatagtg

SEQ ID NO: 32722 - DNA, 100 bp, Homo sapiens
ccggcgaggtgcacattggaggcgtgatgcttaagctggtggagaaactcggttttataggatcacattgacaaaagtaccatggagttttatgagtcag

SEQ ID NO: 32723 - DNA, 75 bp, Homo sapiens
aaggattccaagtaactcttatttgaatgtttggaatggttttggaaaaaattattattcctgaaattcagaagg

SEQ ID NO: 32724 - DNA, 100 bp, Homo sapiens
ttcaagcccaacagcgtcacatataggaccaaatcaggcaacatcctgctgcacaagtcgaccattaacagggaggaaataatgctggccatacagttgt

SEQ ID NO: 32725 - DNA, 75 bp, Homo sapiens
agccccctcacctcatatctcagccatacagagtagcccatcgaagccagagcagtgaaggagtcagttctctca

SEQ ID NO: 32726 - DNA, 96 bp, Homo sapiens
acctccttctccacgagcgacgtctccaagctcctcccgtccctggccaaggctcaggacagtcattttgtttactcattcagccctgttgcaggt

SEQ ID NO: 32727 - DNA, 74 bp, Homo sapiens
ccgcagccaggagatggttcgggcctagcggagccgggactggagaaatgatggaagaattgcatagcctggac

SEQ ID NO: 32728 - DNA, 100 bp, Homo sapiens
aaaaactggagaatgacaccatttctaagcaacttacattagaacaggtgtcctggggaagtgtcgctacgtttactatgggaaaaactcagagggcaac

SEQ ID NO: 32729 - DNA, 83 bp, Homo sapiens
gctgtcctcctgccatcgcaccgacccgctccaccgcttccacaccaacagatgtgttcagagcaacattgttttgttgacac

SEQ ID NO: 32730 - DNA, 74 bp, Homo sapiens
gcttcattgtggtaaaaggtcatagcacgaatgccatagcaaatgcttcaactctggctgaagtggagaggctg

SEQ ID NO: 32731 - DNA, 74 bp, Homo sapiens
gatccaccgggtccatttgatagcctagaagaaagcagggctgctgatactttggctgtgaggcaaaaaaggag

SEQ ID NO: 32732 - DNA, 75 bp, Homo sapiens
cctgcctacagttttcacaaatctgccttcaataatctggagaatcttgtctttggcaaaggattccaagcaaag

SEQ ID NO: 32733 - DNA, 100 bp, Homo sapiens
caggtgtaagcgcagaaagcaggcgaacccgcggcgcaataacgaccatcatggagcagttcaaccctagcctccggaacttcatcgccatggggaagaa

SEQ ID NO: 32734 - DNA, 100 bp, Homo sapiens
tctcatgaacagaaacacctaggaagggagaactggcttttgacctttatgaacaaagatatgctgctgtgaagatacatcagcttaataaaagctggag

SEQ ID NO: 32735 - DNA, 100 bp, Homo sapiens
atggaggggacccaggcttggtgtctgcttacggagcaggtctggaaggcggtgtcacagggaacccagcacctaccagtaatcatggcccagatgccac

SEQ ID NO: 32736 - DNA, 100 bp, Homo sapiens
tgacctgcttgctgatcctgtggtccggatccagagaaactaccgtcagagggctcagaagctttcggaaattcacaaggatcaacctggtcaccctgtc

SEQ ID NO: 32737 - DNA, 82 bp, Homo sapiens
aagcggagagactcgccggccgagggtggccctaggggcagcgagcaagacagcaagcagggtgtcttttatgaataatcaa

SEQ ID NO: 32738 - DNA, 85 bp, Homo sapiens
tgaaaagaatcttttatggggggctacaggcaatctatacctgcgggggcccctgaagaagtccaatgcaccgcttgtcaatgtg

SEQ ID NO: 32739 - DNA, 90 bp, Homo sapiens
agttttccttccatctctgctgctctctcatttgctggccatcggattggggtggaagagatcatgcagctggtgaatgcctacttggcc

SEQ ID NO: 32740 - DNA, 101 bp, Homo sapiens
atatcatgctctggaattttggcatcaaggacaaacccaccttcatcaaagggtcagattctgaggaagatgaacccacaaagaagaaaactatccttcag

SEQ ID NO: 32741 - DNA, 101 bp, Homo sapiens
tgaaggctgcgagggactaagagcagagcgaggattaaatccaccacacagggtgaaatctatctccatgacaacattcacacaacaggaaattgaattct

SEQ ID NO: 32742 - DNA, 93 bp, Homo sapiens
atgcctcgaactaaacaaattcatcccagaaatctaagagccaccattggttcaggcaatcttcagcggtgatccagaggagatccggatgct

SEQ ID NO: 32743 - DNA, 75 bp, Homo sapiens
cggcgcgcccgccctgcagctgcccaagcagagatgttggcacacctgaaaccatggccccaaccattgtggttc

SEQ ID NO: 32744 - DNA, 155 bp, Homo sapiens
cgccaacccacggagctggaggtggcttggactccaggcctgagcggcatctaccccctgacccactgcaccctgcagccgagttacagccagccaccctacaaccagggaggttacagccagggctacacagccccaccgcctccacctccacc

SEQ ID NO: 32745 - DNA, 100 bp, Homo sapiens
tggtggtaactcacacttgtttcagatacattccaccgttgatctgggggaaaagtggacacatccagacagccttgtatgggaagatgggaagggtgag

SEQ ID NO: 32746 - DNA, 89 bp, Homo sapiens
tgccctctccttttcgtttccggaaacatgttaccggtattgtaagaacaagccgtacccaaagtctcgcttctgccgaggtgtccctg

SEQ ID NO: 32747 - DNA, 97 bp, Homo sapiens
gcctcctccgcgcctcgcggcatggcgtcggaggggccgcgggagcccgaaagcgagatcagacactcctctaatttacaaagcagtgcccagctgg

SEQ ID NO: 32748 - DNA, 100 bp, Homo sapiens
cctggcaatgggactgatggtgccattttcttttagtatatttccacagattggacagatttccacaagacggcaccctatgtcgtcactggcagcgtag

SEQ ID NO: 32749 - DNA, 96 bp, Homo sapiens
gcgacgccgccgtgtgcccaacggtcggtgtccccggctgaggcagcgcggccgcagcagccctgcgacttcagaatgcccacactggcctcgacc

SEQ ID NO: 32750 - DNA, 75 bp, Homo sapiens
gcgggagagtgtgcagccgagtcactactgcctgcctgcctgcctgctacgctatgatacttgggtccatagtaa

SEQ ID NO: 32751 - DNA, 80 bp, Homo sapiens
gccacgtccaagcaaaccgggaaaggagaggatcccggagccggtcagccctgacaaaggtcagctagccccttgaggac

SEQ ID NO: 32752 - DNA, 101 bp, Homo sapiens
ttatctacattgaacgggtgcagcgggaaaaggctaatggcacaactgtccacgtaggcattcaccccagcaaggaggaaactccaggaactcctaaaaag

SEQ ID NO: 32753 - DNA, 50 bp, Homo sapiens
gttaacacttcctagataacgggatgaagccccacccgcccttcaggatg

SEQ ID NO: 32754 - DNA, 90 bp, Homo sapiens
gccggcgcggaaggacgaggctgaggcgagaaacgagcatgtggagagggccaaatgtgaactgtgttgacagcactggctacacacccc

SEQ ID NO: 32755 - DNA, 80 bp, Homo sapiens
cttcaggttacagcttgaggatctgtctcttatccaggaatggtcctcgtccgaagtgagaatgggcagttgttaatgat

SEQ ID NO: 32756 - DNA, 100 bp, Homo sapiens
ggaagagattcctgagaatgacagaaagtgaagtcactgcttttgctgtcttggatcaagaccagaaagaaattattgataccaatggagctggagatgc

SEQ ID NO: 32757 - DNA, 100 bp, Homo sapiens
acgcagaacccgggagtaggagactcagaatcgaatctcttctccctccccttcttgttttttgaagggaaggagctaagattgaagcaggaatactttg

SEQ ID NO: 32758 - DNA, 98 bp, Homo sapiens
cgtgggctccatcacacagcccctgcccagcagctacctgatcttcagggccgcctccgagtcagatgaagggacttcctcgcccgaagagcgcgggc

SEQ ID NO: 32759 - DNA, 51 bp, Homo sapiens
gcggggtgaagaagcctcatcgctacagaccaaactgcagctggaataccc

SEQ ID NO: 32760 - DNA, 75 bp, Homo sapiens
gtgatacggaatgaacctgtctctgaaaaagttgatatatggcagaagctcctcctggggtagagacagatctta

SEQ ID NO: 32761 - DNA, 75 bp, Homo sapiens
gagcgggccgggcggggggcctcggaaggtcagtattaaggagccgggtgtgggctgagccctgcctgattgatg

SEQ ID NO: 32762 - DNA, 50 bp, Homo sapiens
ttgaaatctaatgaaccgaaactttggtaccttccactggaagaatctca

SEQ ID NO: 32763 - DNA, 100 bp, Homo sapiens
ctgcaacctggctgtacagctcctcaagtgcaacaagtcccacttccgaaaccacaagtttgccgatgagccagagaagaagatcgtccaggagctgctg

SEQ ID NO: 32764 - DNA, 82 bp, Homo sapiens
cttccactgattctacattatgagatttacaaacgaggaccacctggcagttcataaacacaagcatgagatgacattgaaa

SEQ ID NO: 32765 - DNA, 96 bp, Homo sapiens
attaaatgcggtttccaagcacacggagtcattcaggagagcaggaaagaaaaggccatccctgtggatgtcgcgctgccacagaagtccagcgaa

SEQ ID NO: 32766 - DNA, 101 bp, Homo sapiens
cagggctccatcgaggcccacaagaggggctcccgcttctggatccaggacaaaggccccatcgtggagaggtcgcgtctccttcttcacctcggggtccg

SEQ ID NO: 32767 - DNA, 100 bp, Homo sapiens
tctggaccttgtctcgctcgggagcggaaacagcggcagccagaggagatgagtatgatgtatgtgccatttgtttggatgagtatgaagatggagacaa

SEQ ID NO: 32768 - DNA, 74 bp, Homo sapiens
agaggtcagggatgctctgctggatccgggtggagagattcaaccagttagcgtgaaagttggagataaagttc

SEQ ID NO: 32769 - DNA, 88 bp, Homo sapiens
acctgctgcacccacgaatctgcccacccctcctgtaacccagcctgtttcacttcttgtttttggtgttgagccagacttgaccagg

SEQ ID NO: 32770 - DNA, 75 bp, Homo sapiens
aagagaaccgagaggcacaaatggctgccaaactggaacgtttgcgagagaaggaattcctcctgatcagcagag

SEQ ID NO: 32771 - DNA, 100 bp, Homo sapiens
ccgtggaataggtgtatcaagtaatggtgcaaagcctgaagactgtgaagatcctaatcctttgattcgagccttggcagtcagaaccatggggtgcatc

SEQ ID NO: 32772 - DNA, 100 bp, Homo sapiens
cagcctcccaaggagtctgcaagttgctggccttggtcgcacgggcactctgatagcctgctacatcatgaagcattacaggatgacagcagccgagacc

SEQ ID NO: 32773 - DNA, 50 bp, Homo sapiens
attgataacaccctgtaacagctgagtggacccccaaaagtacaagggca

SEQ ID NO: 32774 - DNA, 100 bp, Homo sapiens
tgcaagagaagcacctgcacctcagagtaaagctgctggacaacaccatggaaatatttgacattgagaaatttctgaataaattggcagaagaacgcag

SEQ ID NO: 32775 - DNA, 100 bp, Homo sapiens
tgctcgcgcctccccaactcgggtaaagctcctcggcctcggcgtgctgcgcctccgcggctgccctgcgccagctgttccatttcctccaagtcaccgg

SEQ ID NO: 32776 - DNA, 75 bp, Homo sapiens
tggaggctcaacggcagaagcttcaccacaaaagcgaaatgggcacaccacagactgtgtacagtgccctgggcc

SEQ ID NO: 32777 - DNA, 51 bp, Homo sapiens
agccgtgcccatttccccagggcatggagacgaaggggaggaccaggctgg

SEQ ID NO: 32778 - DNA, 96 bp, Homo sapiens
ctaaaaggaaaaacatctcgtatttgcagacagtgctgagggagcaaagttcattttctcgggaagatgatccctatgatcttgaagatgtttctg

SEQ ID NO: 32779 - DNA, 80 bp, Homo sapiens
tggcccggaaacaggaggactggagcggaggcggagggacaagatcaacaactggatcgtccagctttcgaaaatcattc

SEQ ID NO: 32780 - DNA, 100 bp, Homo sapiens
ggcgattccagagagcggcggaaaggataagcctcgacttagaagctaccgagttaccctaagaaaggtaattatgaggaattagaaaactcaggagata

SEQ ID NO: 32781 - DNA, 74 bp, Homo sapiens
tggaagataattactcaaaatatgcagggaagatgagtgaccgaggaggtggcgttcctttgaggaaaattgac

SEQ ID NO: 32782 - DNA, 100 bp, Homo sapiens
ctcggccccgcgcccgcccaggggtcgctgtcgcctgctgctggctcctcactgaggagaggagacgccgtgagcgggacgaccagatgtaccgagagcg

SEQ ID NO: 32783 - DNA, 100 bp, Homo sapiens
caaagctcctcaagtctctctttcccgtccgcgatgagaagaggggcaagcggccgtctcccctcgcacaccaggtatcttgcaatatattcagaactct

SEQ ID NO: 32784 - DNA, 75 bp, Homo sapiens
gaatgtctttcctaccatctaaaatacgaaggtttctggctgggagtctactcttcatcttgtgttgagacttcg

SEQ ID NO: 32785 - DNA, 99 bp, Homo sapiens
aagtggcatccctagctccagccgcaatgccattaccagttcctacagctccactcgaggcatctcacagcttgaacaggaattggagctatctcgaag

SEQ ID NO: 32786 - DNA, 97 bp, Homo sapiens
agaaaaagaaccctgcaagatgaagcgacatgaaatggtggatgaacccccaggtttttgccaatccagaagactgtgtagcatttggcaaaggaga

SEQ ID NO: 32787 - DNA, 101 bp, Homo sapiens
ccggaacagaccgccgtgagagaggaggggtgccggccgggattcgcggcccggagctcgggaccggaagagagaagggcacagttacctaagtatcaacg

SEQ ID NO: 32788 - DNA, 90 bp, Homo sapiens
ctgcgggactgctcggctcggcttctaggcggctcctacccagagattctacccagtgaaactcccacagcaacgcaggtagatggggct

SEQ ID NO: 32789 - DNA, 91 bp, Homo sapiens
atgtcatgacctacctcaccagcatccccaggttatgaagacagtatggagtttccagaccatagtagacatttgctacagtgtctgagcg

SEQ ID NO: 32790 - DNA, 74 bp, Homo sapiens
agcagcatcatgcagaaagtgtctactgatcatctacctgatggtgtggggatattcagctttgccaggtatgg

SEQ ID NO: 32791 - DNA, 100 bp, Homo sapiens
gcaccgccgaggactccagcacaccgagggactccctggaggaaaagcggaagcggcagcggtctgaacgcctggaacggattttccaacttagtgaggc

SEQ ID NO: 32792 - DNA, 75 bp, Homo sapiens
aaatcacacgcataatggatgaaaggaaccgacaggtttgttccaagatgaagattcatgcagtgattgtagcta

SEQ ID NO: 32793 - DNA, 125 bp, Homo sapiens
gctggaggcggagaggcacggaggagccgctggggctgccgccacggccgcccggaggtgtcatggagaaactccagctgggcccagagattctgcagcgggaaaatccaaggcttatttatgcc

SEQ ID NO: 32794 - DNA, 90 bp, Homo sapiens
cagttgcaaaaagaaactggagccaccatcaagctgtctaagtccaaagatttttacccaggttgaccccctgtttacagtgccagcgcc

SEQ ID NO: 32795 - DNA, 98 bp, Homo sapiens
gaaagttgagtctctcctgcgccgagccttcggggcgatgtgtagtgccttccatagggctgagtctgggaccgagacacagagattgactggaaggc

SEQ ID NO: 32796 - DNA, 51 bp, Homo sapiens
aatacttcaagaagttcggagtggccttgctggcggtgaagtcggtgccgg

SEQ ID NO: 32797 - DNA, 95 bp, Homo sapiens
tgatgaagaagatccttcaaaattaaaagaggagcagcatggcatttcagtcactggtttgcagagtccagatggagcagcatattgtatgggac

SEQ ID NO: 32798 - DNA, 100 bp, Homo sapiens
cggaggaaggaacgggcacagcagccccgggagaagggcaggatgcgttttcataggctgcagaatgtgcagattgccctggacttcctaaagcagcgac

SEQ ID NO: 32799 - DNA, 50 bp, Homo sapiens
agacaacaccgagtatgagaaaccaagatcactccatggatgaaatgaca

SEQ ID NO: 32800 - DNA, 75 bp, Homo sapiens
tacttcatatttggcttcaatgtcatattttgggtgaaaggtgtagcagtcactcggcctacacccacagcatcg

SEQ ID NO: 32801 - DNA, 75 bp, Homo sapiens
gcggacttcatggccagcacctcccacgcagtcttcccgacatcttccatgaaaattatggatccggatgagcaa

SEQ ID NO: 32802 - DNA, 90 bp, Homo sapiens
cgcgagggcggctacacctgcgagtgcttcgaggacttcactggtgctggagaatctggtaaaagcaccattgtgaagcagatgaggatc

SEQ ID NO: 32803 - DNA, 100 bp, Homo sapiens
agcgcgtggtgggggaactgctggggaaggcgattggcatcgatctctccatcccttccgaggcccgacttcgattcacaatgacatcctttcaagaagt

SEQ ID NO: 32804 - DNA, 80 bp, Homo sapiens
cagcgggctggagcctgacgagctggcggggagtgcatccgccccaacccttttccccctcgtctcctgtgagaattccc

SEQ ID NO: 32805 - DNA, 75 bp, Homo sapiens
gtttgtggatcgctgtgatcgtcacttgaatgtgaaaacctttgcatcttctgatagtctagccaaggtccaaga

SEQ ID NO: 32806 - DNA, 94 bp, Homo sapiens
cactccgtcccccgcgggtctgctctgtgtgccatggacgggtatcgagaaccttccctgcgaacttcagaggaacttccagctgatgcgagag

SEQ ID NO: 32807 - DNA, 100 bp, Homo sapiens
tgcaattcataatggagctactgtactggctattggaaggaggagattctgaagataaggagaaatatggctacacacacctttctgcaggagagctgct

SEQ ID NO: 32808 - DNA, 83 bp, Homo sapiens
ctttctccttggccaccctggtccagcgaggtgtcaagctagggatgcggtccattcccattgccactgcttgcaccatttac

SEQ ID NO: 32809 - DNA, 98 bp, Homo sapiens
gagaagtggcgatcaaaattggtttcctatcctgggagcaggagagtgtgcctatttgaatgacaaaggtgccagtagtgccaggcactacacagaga

SEQ ID NO: 32810 - DNA, 100 bp, Homo sapiens
aagggagaatgggttgctcttaatccattaaggaaatgtcagaatgccaagggcctctccaaccctagtgaggtggaggtcctgcgggagaaagtgtatg

SEQ ID NO: 32811 - DNA, 96 bp, Homo sapiens
ctcggctgggggtcgccggggtcgcgggccgggcctgcaggagccgggccgccgaggtcgggatttgatgaggcgccaagaagaacttcggaggat

SEQ ID NO: 32812 - DNA, 100 bp, Homo sapiens
ggagaactagtcctcgactcacggatattggtgctggaaaaggcaaatactatgctgtcaattttccaatgagagatggtatagatgatgagtcatatgg

SEQ ID NO: 32813 - DNA, 75 bp, Homo sapiens
cgtccctggagcggccgccttccagcgcaacagcattattgagaaaagcccttacagaagagtgtggccgtaggt

SEQ ID NO: 32814 - DNA, 51 bp, Homo sapiens
gaagaggcatgccagaggtagagcagcatttatgagaccagtacaaactac

SEQ ID NO: 32815 - DNA, 100 bp, Homo sapiens
agcacgccatgaaggcctcgggcacggtggcattggaaggccttcggcctaccatcccaccaggtatttcccctcatgtgtgtaagctcatgaagatctg

SEQ ID NO: 32816 - DNA, 90 bp, Homo sapiens
ggtgacaacatgctggagccaagtgctaactaaaactgtggtttgcaagcagaaggcgctggaactgttgcccaaggtggaagaggtggt

SEQ ID NO: 32817 - DNA, 88 bp, Homo sapiens
ctagagggcccgtccccagcccgggccgtccatcctcgcattgctgttgaatggcaggaatagagttggagcggtgccagcagcaggc

SEQ ID NO: 32818 - DNA, 100 bp, Homo sapiens
cgtggagagatcataatttggggttcaagattccaggacatcagcacagtatatcagatttttcctgatgaagtactgggttctggacagtttggaattg

SEQ ID NO: 32819 - DNA, 129 bp, Homo sapiens
agtgggggttgctgacccagaggagagttctccaaacatgatcgtttactgcaaagtaatcagtccaaaaaccagcgtgccaaagcgtttccccagggctctgtccggactctgaagcactgcataaag

SEQ ID NO: 32820 - DNA, 83 bp, Homo sapiens
ctattttcttcctgcccctcgttgatgagagcattcgaagtgacctcagcagggcatccaggattttttatcaagcagaaatg

SEQ ID NO: 32821 - DNA, 75 bp, Homo sapiens
agaaaaggtgtacttgcaagaaacctcaggacttgagtaacagcaacatgggagaggctagtggtaacaggccga

SEQ ID NO: 32822 - DNA, 97 bp, Homo sapiens
cctcggggccactgcactgggtgattcacgtgtgcccaggccctgaggtgggccggacctgggagtggcagttcctgggcttcccgatggactcgag

SEQ ID NO: 32823 - DNA, 73 bp, Homo sapiens
cggtagccatggcacaagaatatattccagttcagacatcataagagatcttttagaagaagaggaagcctgg

SEQ ID NO: 32824 - DNA, 100 bp, Homo sapiens
caccgaggccccccggcaccgcgcctgctgccgggttgcgctccgtgcacctcttgcgggagcctgtgtgaaatgcagcaaaggggtgtttggggctggc

SEQ ID NO: 32825 - DNA, 100 bp, Homo sapiens
ttccagctgcagcacgtggacgctgactcggaagtgcaggacctgaaggagaagaaggagaaggtggaggagaaggcaagccggaaagagcgaaagaaag

SEQ ID NO: 32826 - DNA, 88 bp, Homo sapiens
gaaagcagtttttaagacaaattttcagctgaactctcatctctcaacactggcaaatattcataagatctaccacacccttaataag

SEQ ID NO: 32827 - DNA, 96 bp, Homo sapiens
tttactgtgcagctcctgaaaggagagacacttgtgaacattcaagtgaagcaaaagcctttcatgattatgacgggctctacgagtgcattctct

SEQ ID NO: 32828 - DNA, 74 bp, Homo sapiens
gcccctcgtacgggctgtcggccgaggtcaagaaccggtaagactttgaccccgacgcaggcttcagtgattgc

SEQ ID NO: 32829 - DNA, 110 bp, Homo sapiens
ctcggatcgaatccctcacgcgggcgcggatcgaccggagcagagagctggcgagcaaggttcgtgctggccgtgggcagcgccgtctttgatgccatgttcaacggggg

SEQ ID NO: 32830 - DNA, 83 bp, Homo sapiens
gccgcgcgcccgcgccctccgcgcgacgccagtctctgctttctatccgtcaagatgataaagtcgtgtgcccgagaaccaaa

SEQ ID NO: 32831 - DNA, 80 bp, Homo sapiens
gtcgtcttccacttgcacgaaagctttcctaggccaaaaagagcattccatattggaagaagagatttctacacatgaaa

SEQ ID NO: 32832 - DNA, 51 bp, Homo sapiens
tggtgaagcagatcgagagcaaggggaacagggaacgtgtctgccaggaga

SEQ ID NO: 32833 - DNA, 101 bp, Homo sapiens
tgaggagagaaacaggcctccttggagaccagctactacttttcagcatccttatgtgagttctcagcacagatattctacacctcacgccttcaccttta

SEQ ID NO: 32834 - DNA, 74 bp, Homo sapiens
attgccctgtaaccgccatgcagaagaaatctggctatcatatggataagaatatgaagtatattccaacagaa

SEQ ID NO: 32835 - DNA, 90 bp, Homo sapiens
ttcctgctccttctacatctgcagataaagtggagagctgcaagctttcttcctggtggcagatgacatcatggattcatcccttacccg

SEQ ID NO: 32836 - DNA, 73 bp, Homo sapiens
tatgatgaaaccaaaaggccagactgaacacgatgagggtttgaatcttcagacaaacttctgggaggactcg

SEQ ID NO: 32837 - DNA, 100 bp, Homo sapiens
gagaagctgaagcattgcttcaaagcatggggctaactccagaatcccccattgaaatggtggagtcaatgaagaaagtagcagggatggatgtggagct

SEQ ID NO: 32838 - DNA, 50 bp, Homo sapiens
cggcgtttcacggtggcacatacatgcctcctgacaaggtgatccgggcg

SEQ ID NO: 32839 - DNA, 97 bp, Homo sapiens
cgtgggttcgaatcccatcctcgtcggctgcatagcaagccttttgttccaggaatcacaaatgatatggaggactcagagagagtaatgataatta

SEQ ID NO: 32840 - DNA, 100 bp, Homo sapiens
gtggatggtggtgtttgccattggagtctgcactggcctggaagatcccagtgtctgagtgaactaacagtcctgctttcagccaccatttgcacaagac

SEQ ID NO: 32841 - DNA, 51 bp, Homo sapiens
ggattccaagtaactcttatttggtcttgcttaaatcatccggacaaaaaa

SEQ ID NO: 32842 - DNA, 100 bp, Homo sapiens
ctgttggacgtttttacacctgcaaggtctctggaggaattcaatgatgtggccatgtgaaactttctgactttggtctttgcacaggactgaaaaaagc

SEQ ID NO: 32843 - DNA, 90 bp, Homo sapiens
gcaagcatgcagcttactgcttgaaaggtggtggaggtggatacagcagtcggagaacatctggcagagacaaatacggaccacctgttc

SEQ ID NO: 32844 - DNA, 82 bp, Homo sapiens
cagcgacccaccatggagacccgctacaacctgaagagtccgggttttagctaaagaagatactgaggcagctattcaatca

SEQ ID NO: 32845 - DNA, 100 bp, Homo sapiens
cggggacgtggctcccaactttgaggccaataccaccgtcggccgcatccgtttccacgactttctgggagactcgttatgaagacagtatggagtttcc

SEQ ID NO: 32846 - DNA, 100 bp, Homo sapiens
aatagctcacagatacacccccaaagagcaactgaagattcatacgcagctggcagatattatcatagttgctgcaggttcatcatgaatgagaaatggg

SEQ ID NO: 32847 - DNA, 87 bp, Homo sapiens
tggactggtttaaaacggtcactgaaggagaattgaagaggagctgggcagcaaggctaagtttgccggcaggaacttcagaaaccc

SEQ ID NO: 32848 - DNA, 89 bp, Homo sapiens
agatgagttgacaccttttgacatgagcatccagtcctcctgcatatgcccaagaggattgggagtggaatggacaccagcagaagcac

SEQ ID NO: 32849 - DNA, 83 bp, Homo sapiens
gctagttaggattttattactggcagcatgtatatcttttaaactgatcccaaagattgagttcctggacctgagtcacaatg

SEQ ID NO: 32850 - DNA, 75 bp, Homo sapiens
gaagtgtggaaatatatctgcgaattgggaatcagtaagctctttacacgctgtcttacaccgcttgtaccagaa

SEQ ID NO: 32851 - DNA, 100 bp, Homo sapiens
ctcgactccaaatggttgaaaacagatatacagtttcacagattccttggtgtctttctccgctgagattttgtcacggacactatgtgaaccccttgtg

SEQ ID NO: 32852 - DNA, 100 bp, Homo sapiens
cgcggcgggacctggccagcgctgctggcgggcgttaggggtgtccgcaatgttgccagtgtctgtctgcagattggctacccaactgttgcatcagtac

SEQ ID NO: 32853 - DNA, 100 bp, Homo sapiens
ccagctcaacctctcccagcagctgggactaccgggctgtcaaatttacattaactatgagaattaagcaggttgggagtcctcctcttgatcctactga

SEQ ID NO: 32854 - DNA, 74 bp, Homo sapiens
gaaacctggatctgcgatctgtttgtgctatcatggtgaacttacttcagattgtgcgggaccactgggttcat

SEQ ID NO: 32855 - DNA, 83 bp, Homo sapiens
cggaaaccggtagcgcttgcagcatggtggtgtttggactctagaccatgtgcctaggtagaagtttttcctttctccgcagc

SEQ ID NO: 32856 - DNA, 101 bp, Homo sapiens
gaccgagagcgtgaccgagagcgcgaatatcgtcatcgttagaagggccttctctcagaactgttacataattgtgatggacaactgaaaggggaggtggc

SEQ ID NO: 32857 - DNA, 83 bp, Homo sapiens
atcatgtctgcgagccaggattcccggtgggaggaggagctcgccaagcgcatgaaccttcagaccatggtggacacgctgca

SEQ ID NO: 32858 - DNA, 100 bp, Homo sapiens
tctgggccctggtcaaactcttctcaggccctaaacatgccatgcatgaacatgggcctggaattgatatattcacacctggtaaacctggagaatatga

SEQ ID NO: 32859 - DNA, 76 bp, Homo sapiens
cctgcctcctctttcctccctgaccatgctcccaaagaggcaggatggggaagcagaatagcaaactggcccctga

SEQ ID NO: 32860 - DNA, 83 bp, Homo sapiens
gcttgggtagagatgatgcgcttctcagaaatgtccaggtgtggacactgccagcggctgcagccgacttggaatgacctggg

SEQ ID NO: 32861 - DNA, 80 bp, Homo sapiens
aaagggagcattccgatcatctgaggaacagcaggctcaacgagaacctttgacaagagcacgaagtgaagaaatgggga

SEQ ID NO: 32862 - DNA, 98 bp, Homo sapiens
cggtttccggctgcaccgcggcatgaatgtgcccttcaagcgcctgtctgcaaaccagtccagctacgggggcccagccagccagcagctgagtgggg

SEQ ID NO: 32863 - DNA, 75 bp, Homo sapiens
gctgtgtctaagaaacccattccattggagaacccaaaggaaaagcgaccagatcatccagacttgaaacatatc

SEQ ID NO: 32864 - DNA, 50 bp, Homo sapiens
ggcctccccaaccatgtgcaattgtcaaaatgcagatcttcgtgaaaacc

SEQ ID NO: 32865 - DNA, 50 bp, Homo sapiens
gtggaacggctgcttttggaaggttgctgcgtggttaaaaaaaatatttg

SEQ ID NO: 32866 - DNA, 82 bp, Homo sapiens
gtcaacggcttcatcagcaccttgggattatagcatttgatgagctgaagactgattacaagaatcctatagaccagtgtaa

SEQ ID NO: 32867 - DNA, 83 bp, Homo sapiens
agaccaggaaaatggccacagggctcctgagagccaaaaaagagtgaagtaagaactctgctagagaggaaatggctgcttca

SEQ ID NO: 32868 - DNA, 121 bp, Homo sapiens
ttcggccccagaaccctggggccaaccctcagctgcgaagcctcctcctcaacccaccaccggaaggtgctcgggtcttcggggcactgggtcccatcggtccctcctcacctgggctcac

SEQ ID NO: 32869 - DNA, 75 bp, Homo sapiens
gacagttacaggacaggctaacaccaatggaggctttacttcagacaagccataaggatgagtttaccattattc

SEQ ID NO: 32870 - DNA, 100 bp, Homo sapiens
ttttgtatagctgataatggaaatgagacaattgaagctcaagcagagcttacagtgcaagctgcagcaaaaaattattcctgatcaggaccaactgatg

SEQ ID NO: 32871 - DNA, 74 bp, Homo sapiens
gacgtctggcaggaacctcggcctcagaggtggaatgcaagctttaggacttcacctgacagatccaagtcaac

SEQ ID NO: 32872 - DNA, 100 bp, Homo sapiens
gccattattgagacaaacttggaacagctctgggtagaaggtatagtgaacataggtgtgaataatgtccaggagttgattattgcagcagacatgctac

SEQ ID NO: 32873 - DNA, 100 bp, Homo sapiens
cgggagctgtcggtctggatctgagggagctctctgtgtgggctctgctgcgctgggagcctgtcacgatgatatcatcaagttgaatcgaaaggaaggg

SEQ ID NO: 32874 - DNA, 127 bp, Homo sapiens
ctgttacaatttgtaaaagcaaatgatgatgtagctcaagagattgctgaaagattcttgttggatctagccttggagggtggcttatgcttcatgctgcaattgcacgaccagagaaggtcgtggc

SEQ ID NO: 32875 - DNA, 151 bp, Homo sapiens
ggatcaagcaggttttaaatcaagatttaacattccaacacataaaaattatttatccaacagctcctcccagatgccatcccgcccactttctacagaccctacttcagaattgttcgatttgacgtctcagcaatggagaagaatgctt

SEQ ID NO: 32876 - DNA, 97 bp, Homo sapiens
caaataccagctcgacaaagatggggttgtcctctttaagaaggcctgggccgaggccactggtgcatatgttcccgggagggataagccagacctg

SEQ ID NO: 32877 - DNA, 80 bp, Homo sapiens
ctgcaccccaccttgatccagcggacttacggagcactccgctggtccaggcggcaacatgtccatgcttttagtgatgt

SEQ ID NO: 32878 - DNA, 100 bp, Homo sapiens
ggagacatgagcaagaaaagcctctgggagcagaagggaggctccaagacctcatcaacaattaagctgctttgctccccctgtggatgtaaccccttag

SEQ ID NO: 32879 - DNA, 50 bp, Homo sapiens
ccgaaagtggctctacaaacccaaggcattgtgtccagatctggcaccct

SEQ ID NO: 32880 - DNA, 73 bp, Homo sapiens
atttgtgggaagttgtattcatcaataatgaaatgctgactaaggaacaagttcgatcctttggtacagaaga

SEQ ID NO: 32881 - DNA, 90 bp, Homo sapiens
gccgctctgcgggactctgaggaaaagctcgcaccagattttcagctgaactctcatctctcaacactggcaaatattcataagatctac

SEQ ID NO: 32882 - DNA, 74 bp, Homo sapiens
ggggtggtggttccaatgagacagggcacaccaaactccatctggaggtgaagtgaaatctgcaagagtcctgc

SEQ ID NO: 32883 - DNA, 74 bp, Homo sapiens
gagcaggcgttccagacgattgcacggaatgcacttaagcagaaagttggccctaaaatgctggatcatgaagg

SEQ ID NO: 32884 - DNA, 99 bp, Homo sapiens
tttcttttgctcctctgatccagccctgccattcagagtcaggaaaatcaagacttgtccagttacccaagttctatagaaattttagagtattcatca

SEQ ID NO: 32885 - DNA, 100 bp, Homo sapiens
ctgggagctgcctgcgggaaggtgcggggagcggagccatggcctccggaagaattttaaatcgtttctccaaagacattggacacttggatgatttgct

SEQ ID NO: 32886 - DNA, 100 bp, Homo sapiens
gtcatgagacctccaaacccctttggccctgtatcaggagcacaggctaaagccaattttgaaaaagaagaaaggcgtaaagaacttaagcgacttcggg

SEQ ID NO: 32887 - DNA, 141 bp, Homo sapiens
ttcgaaataaggccatcatggagagtttgagtaaaggtggaaacataatggaacagaattttgaggaaggagaccgcttaagtgatgaagatctctacaaattccttgctgatatgagaaggccatcttctgtcttacggc

SEQ ID NO: 32888 - DNA, 97 bp, Homo sapiens
gggccctcctgtgacctgcatgtactgggggattcgcagggaggatgtcgggacaccccggaagctgggaaatggctggagcattggatttgctaaa

SEQ ID NO: 32889 - DNA, 76 bp, Homo sapiens
ggtggggcagccagggcagcgtcaagagtctgagccaggaggacatagcaaagctgctgcgctacgagtcctcggc

SEQ ID NO: 32890 - DNA, 98 bp, Homo sapiens
ggcttggctactcactcttctgttaacagggtcctggcagattcgacggaggcgccttgcacgacttgctggtggacagacctctcagccaaccaccc

SEQ ID NO: 32891 - DNA, 100 bp, Homo sapiens
gccaggaggcggaggcggagtggagttagcattgatgttgatgggacaatgacagtggactggaatgaatggagagactacttcttatttaatcctgtta

SEQ ID NO: 32892 - DNA, 82 bp, Homo sapiens
aatcatgtcaagcgaagccttgaaaaagctgccctgagacggtgtcccgccgaaagaatctggaggtgaactggatattgta

SEQ ID NO: 32893 - DNA, 107 bp, Homo sapiens
gatgccccctatgggagggccaccaatgggacaaaatcatttgctgtttcaaatagagaactgtgcgatgatgagaaagagttcatacattttccagtatgtgaggg

SEQ ID NO: 32894 - DNA, 90 bp, Homo sapiens
cgctcacgctgggagctgtagaccggagctgttcctattgggccatcttggctccaccaccctggagctcttgtccctggcaaagcgaaa

SEQ ID NO: 32895 - DNA, 109 bp, Homo sapiens
atggcggatgccctgcagtacctgcagaaggtctctggagacatcttcagcagcaattctgtggtgttcttggtcacacatttatggagtttctgaagggcagtggaga

SEQ ID NO: 32896 - DNA, 51 bp, Homo sapiens
tcatatcaaggaccagaaaggagttctgggaggtgatcagtgatgaacatg

SEQ ID NO: 32897 - DNA, 98 bp, Homo sapiens
attttattgatctaatccaaagtatcttataacttctggctggaattaagagttaatgttctcctcagaggtggaagaatatcctgataaagagaaag

SEQ ID NO: 32898 - DNA, 90 bp, Homo sapiens
gcatttcatccctcgtcgaaaggattggattggcatctttagagaagcacaagcctatgcagacgacaacagtttgctgttcatggagac

SEQ ID NO: 32899 - DNA, 101 bp, Homo sapiens
gtggaagcagcaagaggcgcttggtcaagacacactgacggtaccttctcaaaccagatttcatgaggcggcctgatcgaacatttgaccccttctctgaa

SEQ ID NO: 32900 - DNA, 100 bp, Homo sapiens
ggtcgaatgaggcacctaaaaattgtataccgcagattcaggtattgcttttcccaccagcatttcggtaaataactgtgtatgtcacttctcccctttg

SEQ ID NO: 32901 - DNA, 100 bp, Homo sapiens
actccctggccaactgtatgatctctgctgatccccctgtgatctcggaagagaaagggccctgttaccgacttgtcagttctggaagacagtgtatgca

SEQ ID NO: 32902 - DNA, 96 bp, Homo sapiens
ctgcttatggcggcgctggagagggggcgctgagctgttgggccgtgctatcaagactaatcaggaccttctcccagaaactccatggacgcacat

SEQ ID NO: 32903 - DNA, 82 bp, Homo sapiens
ccagagattcatctttcatgcagtgacatgttgataaaaaatgatgattttcttcaatcacatctgaataaatcacttgaag

SEQ ID NO: 32904 - DNA, 82 bp, Homo sapiens
ggagacattccctagagatcctgagaaagctgttgttgtggcgtgtggaaagaagaggaaccagaaaagaatgtttgtgaag

SEQ ID NO: 32905 - DNA, 85 bp, Homo sapiens
cgttcttgcctcaggccagtcgcctccaggccaagagggatccttcacccgtgtctgcctcgccgctcctgctatttgccaaccg

SEQ ID NO: 32906 - DNA, 82 bp, Homo sapiens
ctggaccagctgagcagcaccatccactgcaacacaccaagcctcctgcagttgcgattcactttataggaacagcttcagc

SEQ ID NO: 32907 - DNA, 100 bp, Homo sapiens
gcaagtaatcagtctttgacaagtgatgagaagctgtcggagcttcccaagtggccacagatgtctttaattccaaaaacctggccgttcaggcacaaaa

SEQ ID NO: 32908 - DNA, 75 bp, Homo sapiens
gagcggtacttctcagggctaatatatgtggcccacatgaagagcaaagacaatcggatcaagctgatgaacgaa

SEQ ID NO: 32909 - DNA, 90 bp, Homo sapiens
cggcgagggctcccggggcgcaggctcaacgagaacctttgacaagagcacgaagtgaagaaatggggaggatcgtaccaggactgcctt

SEQ ID NO: 32910 - DNA, 98 bp, Homo sapiens
gccgcggctcttttctaaaagtgtgctgactgggttacttttttaaacactaggaatggtaatttctactcttctggacttcaaactaagaagttaaa

SEQ ID NO: 32911 - DNA, 100 bp, Homo sapiens
agcgggagttccccgaggccgaagcgctgcggatctgggaggcctgctgggcccactaccagggcacctggcctgggtggagcccactcctcagcaccca

SEQ ID NO: 32912 - DNA, 100 bp, Homo sapiens
cggacgccagcggacacgcgggcgaggaactgtggaaggtgcatcagtgaagaaatggaccaatgtgtataatcatggaatctccttgctaaccatcacc

SEQ ID NO: 32913 - DNA, 100 bp, Homo sapiens
acggaccgcgcccgccgggcacacaagaatggtcactgtctcggcgcggaagatggccggcggcgtggacggccccatcgggatcccgttccccgaccac

SEQ ID NO: 32914 - DNA, 102 bp, Homo sapiens
cccatcagaggaaaagtccgaggcgctggaaccctgcgtccaggcgtgacggtcatcccgaaaggccggccccagattcccagccatatgaagacaccctag

SEQ ID NO: 32915 - DNA, 98 bp, Homo sapiens
cgcgagttcctgcgcggctgcggggcttccctgcggctggaggcctcatgcattgtgcgtcagcagcaatgtttatggtgaaaaatggcaacgggacc

SEQ ID NO: 32916 - DNA, 90 bp, Homo sapiens
agggtgcgggagagccccttgcagaagacgccgtacgaggcttgtctgagacgacaggaatatagaagagacccaaatgagaagaaacgc

SEQ ID NO: 32917 - DNA, 74 bp, Homo sapiens
acagtcacctttgctgctgaccctgaggacatctgctgattttgtatcagattgtaccatctcataaattgatg

SEQ ID NO: 32918 - DNA, 100 bp, Homo sapiens
cgtatgcagtcccccaggatacagggtcaaaggagagcacaaccatcgcagttggaagcccatggggcagtgtctgcactgcttggggaggaagatgaag

SEQ ID NO: 32919 - DNA, 74 bp, Homo sapiens
tggaagctttggagcagtgtattttgtgctggagaatctggtaaaagcaccattgtgaagcagatgaggatcct

SEQ ID NO: 32920 - DNA, 75 bp, Homo sapiens
cctctccttttccctctccctttccctaagtcttcccgaggctgctgtccatgacactgagtccagatcttcaca

SEQ ID NO: 32921 - DNA, 83 bp, Homo sapiens
gtcaactattcaacatggaggcggaggtcgataagctggaactgatgggggatatgagactttctactcggaatatcctgagt

SEQ ID NO: 32922 - DNA, 100 bp, Homo sapiens
gaggaagaccctcctgccaaaaggaaatgcatctttatgtcagaaacacaaagcagcccaaccaaaggatcccatgcgaggcccaagaaaactagaagta

SEQ ID NO: 32923 - DNA, 100 bp, Homo sapiens
aagaggatgatgtttttggtgaagtcctggaatcaagatgtgagaccaagaaattatttctgaagaaagaaatttatgaaatagaatcaacccagtggga

SEQ ID NO: 32924 - DNA, 100 bp, Homo sapiens
ctgcacacaggcttcccagagacccgccgtagtgcagactcaaggcgggggccggccccagcccagactggaagatgagattgacttcctggcccaggag

SEQ ID NO: 32925 - DNA, 100 bp, Homo sapiens
gctgactcaagcggaggcgcgcggaacagtcgccgaggcgattcccgcccagttatgcaaagggtgacctggacatatcttacatcacatccagaattgc

SEQ ID NO: 32926 - DNA, 101 bp, Homo sapiens
atcggagaccatggcagtgcagctggtgcccgactcagctctcggcctgctgatgcaagagtgagccatggagctacgtgtggggaacaagtaccgcctgg

SEQ ID NO: 32927 - DNA, 97 bp, Homo sapiens
ccaatccatcactgatgatgacctggaggccatcgccaatgactcagaggaaggttcctcatggatgaagaaggaccagcccacatttaccctccga

SEQ ID NO: 32928 - DNA, 100 bp, Homo sapiens
ccacaggtgcatttcacagcactctgggcgaaaattggatgtgaaaatgaagccagaccgagattttgtggaagtataatactttgtcattatgagatgt

SEQ ID NO: 32929 - DNA, 88 bp, Homo sapiens
ctgagaaaggagctcggggactcccccaaagacaagagcaaaatatgctgtgaattccatcaagaagaaagtcaacgacaagaaccca

SEQ ID NO: 32930 - DNA, 75 bp, Homo sapiens
ctgacgagcagcggctgtacaagttgcagaggagaatcctaaggagagtaaaccccaagcaggcactgcccgccc

SEQ ID NO: 32931 - DNA, 102 bp, Homo sapiens
tccctaatctgatgggtcattatgaccagagtattgccgcggtggaaatggagcaaacttggaaatcatgtcttagagatcaaggagccaagagatgagaca

SEQ ID NO: 32932 - DNA, 74 bp, Homo sapiens
cggcgagctctgagcactcgggcgtcggagggaacggtgctggagaatctggtaaaagcaccattgtgaagcag

SEQ ID NO: 32933 - DNA, 82 bp, Homo sapiens
tctccactttcgccagcccgtgccgcgagcgcggcctgcaggaggaatcttgtcgattggcctggctgctgcctactacagc

SEQ ID NO: 32934 - DNA, 75 bp, Homo sapiens
gaagccctaacgtgttatctgtcgctttgagtcaaagatgttcctcctgctgatcaagagaagctttttatccag

SEQ ID NO: 32935 - DNA, 100 bp, Homo sapiens
gcagtctgttgaggcatctggacaccacacacatcatcagtctggctatgtatgtcaaaaaggatgttcctttgtggcaaaaacatggacggaacttctg

SEQ ID NO: 32936 - DNA, 98 bp, Homo sapiens
tcaactgaggaaactccaggccatggtgattgagatatcaaacaaaaccagcagcagcagcacctgcatcttgatctgattccggagctgccatgatt

SEQ ID NO: 32937 - DNA, 100 bp, Homo sapiens
gaaaacagactccattgagaagaggttttgctttgatgtggaagcagtagacagcggagattctggagctggctggcaatgcagcgagagacaacaagaa

SEQ ID NO: 32938 - DNA, 100 bp, Homo sapiens
agtccaatgtcaacattgcccagcaagtgaaggccttacgaccggatatgggctataatacattagccaactttcgaatagaaaagaaaattggtcgcgg

SEQ ID NO: 32939 - DNA, 75 bp, Homo sapiens
aaaccagtacgcttgtattggcatttcatggctagagttctaagtgccggtggtggtgtgcacattgagccccgg

SEQ ID NO: 32940 - DNA, 76 bp, Homo sapiens
cgttgatatcggtggtaacgacggcctcagcaggcggggaagatgaaaggaaatgggcaagttcatgaaacctggg

SEQ ID NO: 32941 - DNA, 100 bp, Homo sapiens
ttctcccggttctgtgcgctaaccccggagcccggccccggggaactagggagcgtctccggctgcacagcgctcagatattaataaggcagcggaaaga

SEQ ID NO: 32942 - DNA, 99 bp, Homo sapiens
cccacttgatcaagacttttgggaaaatgaggactgatgtggtaccccccgaatccaagcccaacttcacccctctcgccatcttggcccatgttctcg

SEQ ID NO: 32943 - DNA, 96 bp, Homo sapiens
gtcgccgatcccgccggaagcgccaggacaatggggacccgggacgacgagtacgactacctattcaaagcattcgcaacgacaggcgcctcctct

SEQ ID NO: 32944 - DNA, 75 bp, Homo sapiens
cattgagaaatatgacaagtctctccaccaagccattgaggttcttcacacacccccattcggcgtagtacccag

SEQ ID NO: 32945 - DNA, 50 bp, Homo sapiens
agacttctcagcctccataatcatgagtacttcttgcaagcagagctgac

SEQ ID NO: 32946 - DNA, 100 bp, Homo sapiens
aaaaggaaaaacatcttgatctggagaaaaactggatgttggtagaaaaagcaagagtttgttatatagcaatcttccatggtggcttattctaattcgg

SEQ ID NO: 32947 - DNA, 100 bp, Homo sapiens
gggctgagcttcctggagaagaggaaggtttcattgaaaacagatcctgcaaaagttccaggtgcccacactggaaacttggagatcctgcttcccagac

SEQ ID NO: 32948 - DNA, 101 bp, Homo sapiens
tttttcagaaatgcgcagagcaaacatctttcaaaggtggattcaccaatgaacttgaagcatcctcatgacctagtcatattaatgagacaagaagcaac

SEQ ID NO: 32949 - DNA, 101 bp, Homo sapiens
ctctgagccccggggcatctatgccagtgagaggcccaagtccctaggtactccaaagattcaggtttactcacgtcatccagcagagaatggaaagtcaa

SEQ ID NO: 32950 - DNA, 101 bp, Homo sapiens
attcattgctcacaggaatggcctttttcaaaatgagagaaatgaaacgactacaaagtgccatgacagaaggtggtgtggttctacgggaacctcagaga

SEQ ID NO: 32951 - DNA, 75 bp, Homo sapiens
agcctatcagctggggctggatgagtgaagcatagtgagtgtgggcgatcctaagaagaaatatacacggtttga

SEQ ID NO: 32952 - DNA, 100 bp, Homo sapiens
ttcgccggatcctctgagaggctctgcaacgatcccgatccaattcagcagcgttttaaaaggtccttttggaataaatcatgggattgagcttcattca

SEQ ID NO: 32953 - DNA, 75 bp, Homo sapiens
cattttcaagcagtgtctacgaacaattattgaaggcacaagaagatgatgaggagtctgatgaggaagctgtga

SEQ ID NO: 32954 - DNA, 98 bp, Homo sapiens
tttttgatgttttaacatttgataacagtcaaaataataatccattggcattaatggcccagtaccagccacaagtatatggttatgatgacttgcag

SEQ ID NO: 32955 - DNA, 98 bp, Homo sapiens
ctcggatcgaatccctcacgcgggcgcggatcgaccggagcagagagctggcgagcaagaattcagaaggagctggcggacatcactttagaccctcc

SEQ ID NO: 32956 - DNA, 50 bp, Homo sapiens
aactgttactgcagggaatgcatcggtgtaatcctgagagattcacatgg

SEQ ID NO: 32957 - DNA, 98 bp, Homo sapiens
aatggtgaatactgccctgtagaagtgatttctgcaaaggatgtcccaacaggaggaatcttccagctccggcagaatttctagtaaaccagcaccag

SEQ ID NO: 32958 - DNA, 87 bp, Homo sapiens
gtaactgaacattggtctaaagtctttccaaaaggtcaaggttcacaagtaatctatgccagcaattatgacaatgttagcagacca

SEQ ID NO: 32959 - DNA, 90 bp, Homo sapiens
gaccaagtcctcgctggactgctcagggtgccagacctcatcgaattcttttagttggacccccagggactggaaagacacttcttgccc

SEQ ID NO: 32960 - DNA, 100 bp, Homo sapiens
gagagccactgacgccgggaccgggaccgccgccgccgccgccaccatgattatggtgacaagctgaacatggagctgagtgagaaatacaagctggaca

SEQ ID NO: 32961 - DNA, 100 bp, Homo sapiens
gcggggcggacggtcgcgcggcggcaggcacagaattaaacaaccaccatgtcgagcaaaaaggcaaagaccaagaccaccaagaagcgccctcagcgtg

SEQ ID NO: 32962 - DNA, 90 bp, Homo sapiens
atatgtggacaacacaaacctggtccccaggctctggtgtcttcagtgccctgggtttgcctgtgacccaatgcccactgggactgaatg

SEQ ID NO: 32963 - DNA, 50 bp, Homo sapiens
ggagtccctctccgcccagttacaagcccaaaatggagttaatcctgact

SEQ ID NO: 32964 - DNA, 76 bp, Homo sapiens
gatttcagggcaattgctatcgccaggcaatttttacccagaaaagcaagccggggcctgacccgttggacacgag

SEQ ID NO: 32965 - DNA, 50 bp, Homo sapiens
ttaaagttaaagttggtcacatagatattgatgatgttaagaagttcaaa

SEQ ID NO: 32966 - DNA, 100 bp, Homo sapiens
acagcctggatctgagctgcgaggaggggaccccactcagtatcaccagaccagaacttctgactcacagtaccactgaagttactcagccaagaacgaa

SEQ ID NO: 32967 - DNA, 100 bp, Homo sapiens
cccaaaaagacccagctggagcaggaagctgggaaaccacaaaggaatggtgctggagaatctggtaaaagcaccattgtgaagcagatgaggatcctgc

SEQ ID NO: 32968 - DNA, 100 bp, Homo sapiens
ggagcagggagaggagctgtggataacgggaggtgaatttccatgtcaacatagtcctgatcactttgggaagcagtgacatccaacctgtatcaagtct

SEQ ID NO: 32969 - DNA, 98 bp, Homo sapiens
tccactccttggaccacctcaagtggatcatccatgccatggagtatgaacttcagatccgtggcggagacaagccagccttggacttgtatcagctg

SEQ ID NO: 32970 - DNA, 90 bp, Homo sapiens
gtcagtgaccacaggatagcatatgaagttcgtgatattaagcttactgcagagtgggtctgggcatctgctacgacatgcggtttgcag

SEQ ID NO: 32971 - DNA, 50 bp, Homo sapiens
cccgcgcctcgctcagctccaacatgatgggcgcagttcttcatccaccc

SEQ ID NO: 32972 - DNA, 100 bp, Homo sapiens
aattcaactcattctatggggatccccctgaagagttaccagatttctccgaagaccctacctcctcaggaaatggtgttcacactggccctgaatcaag

SEQ ID NO: 32973 - DNA, 74 bp, Homo sapiens
tgaccctgtaacccaaaggaggaaacagctggctaagctcatcattgttactgattcagaggaaaatgactcca

SEQ ID NO: 32974 - DNA, 75 bp, Homo sapiens
atcaggtctggaatactcctaaccaagaagttgcccaggggcataaggaaatggtggcaggcacttcctcctaac

SEQ ID NO: 32975 - DNA, 100 bp, Homo sapiens
tgatcctttgcaccctgcttggagacggacttgcttccgattcgacggaggcgccttgcacgacttgctggtggacagacctctcagccaaccaccccac

SEQ ID NO: 32976 - DNA, 129 bp, Homo sapiens
ctgagcttcatggtggagaagggccccaccctgggcagtatagagacgtcggacttcacgactgtgagctgcttgtccccatcctgcggccgtcctggggacacagagccctccgtggtgcccggggat

SEQ ID NO: 32977 - DNA, 83 bp, Homo sapiens
acacgggaggcccaggagctcaacagccgcaaccaggagcgcctggaggaagccctgctccgctagcaatcgcatcatcggtg

SEQ ID NO: 32978 - DNA, 100 bp, Homo sapiens
gggtgaatgctgctaaaaacaagactggggctgctcccatcattgatgtggtgcgatcgatgctaggtgttcaaggagcatgcaaagataatcctgggga

SEQ ID NO: 32979 - DNA, 88 bp, Homo sapiens
cgagaagcgggctttccaggacaagtactttatgataggagagggctgaacccccctcatcgtgtcaagtcaatctccatgacaactt

SEQ ID NO: 32980 - DNA, 88 bp, Homo sapiens
caaggaagccacgtgcagacatctacaaccttcgatctcctgacgacttccctctgtgtgttgcagtcctgtggcattatgcatgccc

SEQ ID NO: 32981 - DNA, 51 bp, Homo sapiens
aatcgcttgaacccaggaggcggaggttgcagtgagccgagatcacgccac

SEQ ID NO: 32982 - DNA, 100 bp, Homo sapiens
ccaaactttgcaaggaattcggtccagaggattacggcgaagagaacaccttccaccatgaccacctcagcaagttcccacttaaataaaggcatcaagc

SEQ ID NO: 32983 - DNA, 100 bp, Homo sapiens
cgcgcgcacctcagccgcctcctagcggcgcggcgctcgctcctacgttcttcaccaaaggacatggatgaaaatgaaagcaaccagtctctgatgacaa

SEQ ID NO: 32984 - DNA, 100 bp, Homo sapiens
agccctttgaggagcactggaggaagcacaccctgtcctatgtggacgttggcactgggaagagaaagctctgggcttgtactcctctccagctgtcccc

SEQ ID NO: 32985 - DNA, 97 bp, Homo sapiens
ggaagggaggagactcctgaccctcagaatgactcctgggagagttggctctcaaggttctgatttagattcatcagcaactcctataaacacagtg

SEQ ID NO: 32986 - DNA, 90 bp, Homo sapiens
gcatgggggaacatggcctggagctggcttccatgatccccgccctgcgggagctgggcaggttcatgtcagggctggtctttttcatgg

SEQ ID NO: 32987 - DNA, 100 bp, Homo sapiens
gaatcctgcaaacttgtgagagacaaaattacaggtaacttgcccaggagtcgtgcttaaagacaaagaggacatctatcttagcatctgtgtgtttggc

SEQ ID NO: 32988 - DNA, 100 bp, Homo sapiens
gtagtggtcccggaattaagaaaacagagcgacgagcaagaagcagcccaaagtcgaatgattcagacttgcaaggagtgggaatagctttgcgaaaaat

SEQ ID NO: 32989 - DNA, 100 bp, Homo sapiens
gtcagctcatggagccgaggaatgttctgctgacacccaccccgagggtatccgatctcttcatgccgctgtaagctcggaggccaaggatgcggagtag

SEQ ID NO: 32990 - DNA, 50 bp, Homo sapiens
gtccagtaatgtcccggcggatatgatccctttgttgatctagcaagtgg

SEQ ID NO: 32991 - DNA, 100 bp, Homo sapiens
tgaagtcatttcacatcgaagccatgatttaaatatcggcgttaaggtatttcagtgtctgtagacaagatggaatcatctccatttaatagacggcaat

SEQ ID NO: 32992 - DNA, 75 bp, Homo sapiens
gttttatacttgcttttgcttcagcgttctgtggttgtcaacagtggagcagcgtgacttcattggagtggacag

SEQ ID NO: 32993 - DNA, 82 bp, Homo sapiens
agaggtgcggcgaaggaggcagaggcacttatgcttgtcagcaaccatgtccaagggacctgcagttggtattgatcttggc

SEQ ID NO: 32994 - DNA, 152 bp, Homo sapiens
gcccttaaactacaaagagagactttttgtacttacaaagtccatgctaacctactatgagggtcgagcagagtgactgtcatgtggcatgggtctctgcccaagctcgtaatgagactatagcaaggcggctgtgggacgtcagttgtgac

SEQ ID NO: 32995 - DNA, 75 bp, Homo sapiens
taccatgaagccagtaagtcgtcgcacgctggactggatttattcagtgtgggccccatgctgattgagtttaac

SEQ ID NO: 32996 - DNA, 100 bp, Homo sapiens
atgggatcaatatttcacctgatgataactctagaggacaaaatcccagtccttggcacaaactcaggaaatggaagccggagtctgttttttgtggggc

SEQ ID NO: 32997 - DNA, 100 bp, Homo sapiens
ttaacaactttgaactgaacttcggacaaattattacaatcaggtgcagattcactttataggaacagcttcagcttcagtgatgaaaaactgaattctc

SEQ ID NO: 32998 - DNA, 75 bp, Homo sapiens
cccccattcaagttcaagttcacaattggcttgatttggagcatatgcgaacaataaaacctgaaaaacacttac

SEQ ID NO: 32999 - DNA, 99 bp, Homo sapiens
tggtgctcatccccaaagccaagccactcactctgctctgggagctgggcctccagaagagaggatgctgtctggtgctgggctacatggccaaggaca

SEQ ID NO: 33000 - DNA, 82 bp, Homo sapiens
ccgaggcctcgcgaccgccgagcctgcagcctgccccgcggccaacatgagcttcttgttatctgactgcagccatgagcag

SEQ ID NO: 33001 - DNA, 100 bp, Homo sapiens
atggagtcttccagttcatctaactcttatttctccgttggcccaaccagtcccagcgctgtcgtgctcctctactcgtgggtaaaggaagaagccccag

SEQ ID NO: 33002 - DNA, 100 bp, Homo sapiens
ccgaggtgcagttcgtggagagcagcggcggcggctcctcggccgtgggccagttcgtgtccctggacgacaaatttacatgtattggagaccagaccag

SEQ ID NO: 33003 - DNA, 100 bp, Homo sapiens
gcgcggggaccgctgtgctctcggcaccacactgtaactcgaggcatcaccaaaggcgtgaaggaggactttcgcctggccatggagcgccaggtctccc

SEQ ID NO: 33004 - DNA, 97 bp, Homo sapiens
cagggcaccccggaagaggagtctccagccaaagtaattcttcaatccagtgttcagagctgtaaaacatctgaacctaacatttctggcagtgcag

SEQ ID NO: 33005 - DNA, 100 bp, Homo sapiens
gatgttgtaagccttagcagccttgatctgaagttgctgatagtccaactccaccgccaccacctccaccagatgacattcccatgtttgatgactctcc

SEQ ID NO: 33006 - DNA, 50 bp, Homo sapiens
caggatatgactacagtagatgaagcccaccaagaaaacacattgtggag

SEQ ID NO: 33007 - DNA, 100 bp, Homo sapiens
aaaatcatggcaactccagagcaggtgggcaagatgaaggctatcgttgagaagcttcgcttcacatacaggcatcatgaccggaagatgtgtataatag

SEQ ID NO: 33008 - DNA, 74 bp, Homo sapiens
gaaagaagttgcaaaacactgggtggggaggccacagcttatgtgaatgactttctcaggagttataaagtgat

SEQ ID NO: 33009 - DNA, 90 bp, Homo sapiens
gaagccaaactgtcggcttcaaagagaaaaggcaacatcctgtcacaggccatgctctggcaaaaacgggccacctacagatgctcctgc

SEQ ID NO: 33010 - DNA, 98 bp, Homo sapiens
cgggaagcgtcgggattaggtgaaacccccaaatacatcaagatgtttgtactggatgaagctgacgaaatgttaagccgtggattcaaggaccagat

SEQ ID NO: 33011 - DNA, 100 bp, Homo sapiens
agttggaaaaagaaatggaacagaaacatagagaggaactggagcaattgaagctgactactaaggagaataagatggttcagaattttcaagatgagag

SEQ ID NO: 33012 - DNA, 76 bp, Homo sapiens
atggacgatgatgccaatggtgatgtggatgtggaagaaagtgatgaggtcttatatccagatggccaggctcaga

SEQ ID NO: 33013 - DNA, 82 bp, Homo sapiens
ttggactgagtcctgcaggacacaggaatatattaaaggaatctgtgaacctgaactagaagaaagagaatgttaccccaag

SEQ ID NO: 33014 - DNA, 75 bp, Homo sapiens
gaccaacggaaaagagcaaatgcagcatttttgataggtgcctatgcagtctcaccaacggctttgggggtgcga

SEQ ID NO: 33015 - DNA, 72 bp, Homo sapiens
tggtcgacgacttcagtgatcgagctttcccatggtttggcatggacattgggggaactctagtaaagctct

SEQ ID NO: 33016 - DNA, 101 bp, Homo sapiens
cacctcgtgaacgaagattcgaaaagccacttgaagaaaagggtgaaggaggcgaattttcagttgataggttatgaaacttggaaatcccgagattgcca

SEQ ID NO: 33017 - DNA, 101 bp, Homo sapiens
caagatctgtggagacaaatcatcaggaatccattatggtgtcattacatgtgaaggctgcaaggaacttgcatcagcactgaagtcagccttatctggcc

SEQ ID NO: 33018 - DNA, 75 bp, Homo sapiens
caaggtgcagagaatatgatacagatgtattcaaatggatcttcaaagcttcatgattgtatccaaaaaaccttg

SEQ ID NO: 33019 - DNA, 90 bp, Homo sapiens
tgtatgtagaagaccagaagtggatggagaaaaacacggccatctttatgtgtaaatgttgtaacctcttctcaccaaatcagtcggaac

SEQ ID NO: 33020 - DNA, 100 bp, Homo sapiens
gaagaattcagaagaaacaaaagtgccaccgaagagggtgttggacctcaggaatatactttactcaaattgaaggtgcttgagccatacccatctaaat

SEQ ID NO: 33021 - DNA, 102 bp, Homo sapiens
gtcaccatatctgaaaaacttcaaaaggacattaaggatctgggagggtggtgggcatgttaagcttgaagaagatgtagatcttggctatgtggaagatgg

SEQ ID NO: 33022 - DNA, 101 bp, Homo sapiens
aaatcaacaaaattctgaagaatctggaaagtaaaaagcttatcaaagctgttaagtctgtagcatgggaagccgtgtccgccttttaagattgtgattct

SEQ ID NO: 33023 - DNA, 100 bp, Homo sapiens
tttttctcatggatgttcttcttcgagtatttgtagaagggtgatgatgaacagtctacacagatggctgcaagttgggaagatgataaagttacagaag

SEQ ID NO: 33024 - DNA, 100 bp, Homo sapiens
gaggccttcacccagatctcgagggagattggagatatgtcagtattgaattctcccagacatcagagctgtataatgcatgttgatatggattgcttct

SEQ ID NO: 33025 - DNA, 97 bp, Homo sapiens
gggcaacctcagccagttatcttctggagaagacaagtggctgcttcgaaagaaggcccagattgaggtggtgccttctgcctctgccctgatcatc

SEQ ID NO: 33026 - DNA, 75 bp, Homo sapiens
ggaggcgactgggggctgaagagcgcgccgccctctcgtcccactttccagggcccgtcacagctggagctgact

SEQ ID NO: 33027 - DNA, 100 bp, Homo sapiens
tctacgtccctactgtctttgagaactatattgcggacattgaggtggacggcaagcaggtggagctgaagaagggagccactctcaaaatcacgctgga

SEQ ID NO: 33028 - DNA, 75 bp, Homo sapiens
gttttccacctaccatgctctcggtgaatatgcaggttttgatgagacgcagccaacagctgaatctggtggaaa

SEQ ID NO: 33029 - DNA, 98 bp, Homo sapiens
ctcccccgatccaagttggaattagcatcctctcggggaaaatgacagatggcgagacctggacaggaaatgccctcttcagattgaccaaccgagca

SEQ ID NO: 33030 - DNA, 75 bp, Homo sapiens
actcgtggggctgcagcaccgatcgatgctatagaagacaaacaagggaaggttttttttccttttgcatcatgg

SEQ ID NO: 33031 - DNA, 100 bp, Homo sapiens
agcagaacgtgctgcagcagagcgcggcgcagaagtactatactggcaattgctggagaagattttgcaattgttgcttctgatactcgattgagtgaag

SEQ ID NO: 33032 - DNA, 100 bp, Homo sapiens
gcgaagcgggcgagcggtggtttggacgccggcggagacgcgggcgagcatgctacaagtgaaaactgatgagaaactgaatgtgtctgatgagaataca

SEQ ID NO: 33033 - DNA, 83 bp, Homo sapiens
cagtgcaataatggcgtgttccagtccacgggatgcacagacaattagaacattaactctcatctcaaaaactatacaaactt

SEQ ID NO: 33034 - DNA, 75 bp, Homo sapiens
ccggttccccggcccacagtgggggtgtgcaaacccgagagaactgggcccctggccccaacatggcccgtcgct

SEQ ID NO: 33035 - DNA, 87 bp, Homo sapiens
cactcctggtgaccagcattcaagcattgcagtgtcgagatggctatgaaccctgtgtaaatgaaggaatgtgtgttacctaccaca

SEQ ID NO: 33036 - DNA, 102 bp, Homo sapiens
tccctgtctgggaccttctccctgcctggacccctactattgcaacaagacagaatgttgctgcgggatgtaaaagctcttaccctccactatgaccgctat

SEQ ID NO: 33037 - DNA, 75 bp, Homo sapiens
gaatcttctgggagctgaggaaccagatatcttgaaaagctgccagaaaggaaagattcataccccgatggagta

SEQ ID NO: 33038 - DNA, 50 bp, Homo sapiens
gggggagccccgcgcgcggcgtcggtacttcatagacagcagtctcagcc

SEQ ID NO: 33039 - DNA, 100 bp, Homo sapiens
caggaggcaaccacactagtttagccttcatctcctcgtcctccaggcagcacaagccattgtggaatctccaccaggtgtacagaacggtgcctctgcg

SEQ ID NO: 33040 - DNA, 75 bp, Homo sapiens
caggtctctgtcgagcagcggacgccggtctctgttccgcaggatggatgcagtcatgctgcacagcttcactct

SEQ ID NO: 33041 - DNA, 98 bp, Homo sapiens
ttcttcgccagcaccgtgctctccaccacagccagggaaagaatagttggctggtaccacacaggccctaaactacacaagaatgacattgccatcaa

SEQ ID NO: 33042 - DNA, 100 bp, Homo sapiens
agaaccagatccgggagcacgtcatcgccatcgaagctacaccaaaattgcattgagccaaacttgccaccaagagcccaacaatcaccatgatgctgag

SEQ ID NO: 33043 - DNA, 83 bp, Homo sapiens
agggggccgaattctgctggaggcagcgccatatcctggaggtgaaggagtgcctgtgaagaaaacggggtattgccctgagg

SEQ ID NO: 33044 - DNA, 90 bp, Homo sapiens
acctctgctcagtgttcaacatctgacagtgcttgcaggatctctcctggacaaatcaatcagccgtcctgggccgccggacacccccgc

SEQ ID NO: 33045 - DNA, 82 bp, Homo sapiens
cagaagtcgcgtgtctaggtgagtcgcggtgggtcctcgcttgcagttcagcgaccacgcgaccgtggcagccatgtattac

SEQ ID NO: 33046 - DNA, 83 bp, Homo sapiens
ctttgactatgcggcctcactgcctgaggacgacgtggactacaaacctgatgttgttgttaaacgacaagaagctttagcag

SEQ ID NO: 33047 - DNA, 82 bp, Homo sapiens
gacagtgaggagctgggtggtcccagcctggagctgtgccagcctgacatgggtactccaaagattcaggtttactcacgtc

SEQ ID NO: 33048 - DNA, 100 bp, Homo sapiens
cacgaagacaccgactgtccctgcgtggtggtgtcctgccctcacaagtgcagcgtccagactctcctgaggagcgagatggagtctcgccctgtcaccc

SEQ ID NO: 33049 - DNA, 87 bp, Homo sapiens
acgtcgtgatccagaagtccagagctgaggactgcctgtttgcaggggacggcaaaacagaacagaaaggcggagataaaaagaggg

SEQ ID NO: 33050 - DNA, 83 bp, Homo sapiens
cctcctgctcacagtgtgaataacagttggccagtcagtgctgaaagatgtaagcaaagtgaagaagctgaagcaatctggag

SEQ ID NO: 33051 - DNA, 100 bp, Homo sapiens
acggtggggcagcagctgctgtaagacagtctaaactacgaaatacaccttatcaggaatcacaaccaagatctggtttgttacagtcttcagtaattac

SEQ ID NO: 33052 - DNA, 98 bp, Homo sapiens
ggggccgtcaggcggggatacagcctggaaggtatataatgtttacatggcagggaggcagctgtgttctaagcggtaccgggagtttgctatcctac

SEQ ID NO: 33053 - DNA, 97 bp, Homo sapiens
aggatacagctatgcaaatatagaacactaaagtgttacatgacagatgtatgagataggcatgaagccttcgtctcacagctgcatgcgtagtcac

SEQ ID NO: 33054 - DNA, 90 bp, Homo sapiens
tgataagctgagcagagccctgcgatactattatgacaagtgggtaattccagaattgattggccataccattgtcactgtattactgct

SEQ ID NO: 33055 - DNA, 74 bp, Homo sapiens
acaggccaagtgcaggggccagaagacaaagtcaattccatgggacactacacagaaaatgagaactgctcact

SEQ ID NO: 33056 - DNA, 82 bp, Homo sapiens
cagaccctggagcctcagttggaagcagccgatccagcctgcggagcctgtggggcaggtggtagctgagcacccagatgct

SEQ ID NO: 33057 - DNA, 83 bp, Homo sapiens
ctagaatcaaggatttcagcaacaatgcctctgttcaaactcccagtcacaggtccaaggggcaaatagcgaattcccatgga

SEQ ID NO: 33058 - DNA, 100 bp, Homo sapiens
gtgtatccgcggccgtagcagccgggctggtcctgctgcgagccggcggcccggagtggggcggcgggattcaagatgaccaacgaagaacctcttccca

SEQ ID NO: 33059 - DNA, 95 bp, Homo sapiens
tatggtggcttggagcggctttgcagggacatgcagagcatcctctatcacgggcttatccgtgaccagggaagtgccagacacagcttcagaat

SEQ ID NO: 33060 - DNA, 114 bp, Homo sapiens
gcctgaagaaaaagtacctcatcttatagaccaccagatttcttctggtgaaaacaccagatcagtgcaaattttgaggcacagaattctccagggattcaggagaaagagcac

SEQ ID NO: 33061 - DNA, 100 bp, Homo sapiens
gcttggccgtgcttgccctgtcatcccacctgagaaccatgctcaccgaccctgcctaggtgctctctgatggtgggaatccactaataagaggtgtcca

SEQ ID NO: 33062 - DNA, 101 bp, Homo sapiens
cgggagcggcgccgagaggccgtgcgggacgcgggcgccaggaccggccgaacgcagagtacgtgggctccttccctgtggatgacctggacacccaggag

SEQ ID NO: 33063 - DNA, 50 bp, Homo sapiens
tgccacagggatcctaaaatctgttgctgcttttgctcagaggacatcca

SEQ ID NO: 33064 - DNA, 82 bp, Homo sapiens
gaggaccgggaggctcccgggcttgcgtggaaactatgttccaacttcctgtcaacaatcttggcagtttaagaaaagcccg

SEQ ID NO: 33065 - DNA, 50 bp, Homo sapiens
tacatcaagctggaggacaggacgtcagataccaccaggccccgaaagag

SEQ ID NO: 33066 - DNA, 98 bp, Homo sapiens
gctcatcccggtggccgccgcgcaggagcctcccggagctggcatcagcaatgcagaagcacggcagccagggaaggcccccaacttcagtgtcaact

SEQ ID NO: 33067 - DNA, 98 bp, Homo sapiens
ggtgaagcttttgcacgagaacatggactcatcttcatggaaacgtctgctaagactgcttccaatgtagaagagctgctggctgggcgctggccttt

SEQ ID NO: 33068 - DNA, 75 bp, Homo sapiens
ccatggtatcctcagtggacgggacctgcagttccttcttcgagaaaccaagagtgtgaacatggctacgcctct

SEQ ID NO: 33069 - DNA, 100 bp, Homo sapiens
ttttaacacctcaaggttgaagcagaagaataaggagaaggataagtcgaaggggaaggcgcctgaagaggacgaagacaccatccggaagatgaagaac

SEQ ID NO: 33070 - DNA, 100 bp, Homo sapiens
tcacgggtcacaaggccacggcgctgcaggagttaagtgggcagaccaacatccacctcagcaaaaacttcttcctgacgaatcgcgccagggagcgctc

SEQ ID NO: 33071 - DNA, 90 bp, Homo sapiens
catgttgtacctggaaaacaatgcccagactcaatttagtgagaattaaacaaccaccatgtcgagcaaaaaggcaaagaccaagaccac

SEQ ID NO: 33072 - DNA, 100 bp, Homo sapiens
tgtaccagtgatgacacaaaatcccagatctacctgacgggcctgcgagggttgaagattgtgaagcaatagcctaaggggccaaaccagtgctcctgcc

SEQ ID NO: 33073 - DNA, 95 bp, Homo sapiens
gcctcaacttcttgtcctcaagtgatcctcccaccttagcctcctaagtagctgggaccacaggtaccacatcgaggtgaaccgtgttcctgctg

SEQ ID NO: 33074 - DNA, 74 bp, Homo sapiens
gaaaaggagccagaaaagccggcaaaaccacttacagctgaaaagcaattctgtggtgttcttggtcacacatt

SEQ ID NO: 33075 - DNA, 81 bp, Homo sapiens
tgattggaaggactgcctgcctccaacagagaccgtccaggctggacttgaactccttcctcggctgaagtgatcctcctg

SEQ ID NO: 33076 - DNA, 86 bp, Homo sapiens
gctgaggtggcagcggcaggagagtccggccgcgacaggacgaaatgcttcggttacccacagtctttcgccagatgagaccggtg

SEQ ID NO: 33077 - DNA, 75 bp, Homo sapiens
gccatgtcggtgggcgagctctacagccaggtcatttggatccaggattcctagcaagtgacaaaacatctggca

SEQ ID NO: 33078 - DNA, 75 bp, Homo sapiens
gcatcatcgatcagtatgagctcagagaggagaaaactacccctgagtgtggtcccacaggatatgtagagaaaa

SEQ ID NO: 33079 - DNA, 75 bp, Homo sapiens
caactgagagagatgcttaaaaatcaccagttactttaatgacctggcacctgtgtttgctctgtttgtaccatt

SEQ ID NO: 33080 - DNA, 73 bp, Homo sapiens
gaaggaggaggacaaagagcccctcatcgagctcttcgtcaaggtgtgtggggcctcgggtcagttcgagttg

SEQ ID NO: 33081 - DNA, 88 bp, Homo sapiens
actcgatccgcctgcctgcgcacctgcgtgtcagcatttgcaggtatacaggaacagtcctagtgatgcactatttaatcaaaagacg

SEQ ID NO: 33082 - DNA, 51 bp, Homo sapiens
gctcactgcagcctccacctcccagaccgggaagcagccctgtgggagatg

SEQ ID NO: 33083 - DNA, 98 bp, Homo sapiens
actagcacgcagcgccgccagtccgcccgcccgccctctccccgtggcgcggcggcggggaggcgagcatcctgaggttagcattacacttctcccag

SEQ ID NO: 33084 - DNA, 90 bp, Homo sapiens
ctccgccatgaacctgaggggcctcttccaggacttcaacccgaggggccagtgtcattcaaagatgtggctgtggatttcacccaggag

SEQ ID NO: 33085 - DNA, 100 bp, Homo sapiens
aagcaacaatagaagaaagaatgcaggcaatgctgaaaactgctgagagaagcacctcttctgcctgtgagcgatttgtcacctcattctgtaagactgg

SEQ ID NO: 33086 - DNA, 74 bp, Homo sapiens
gaaacctttccaacacagatgtccaagctgccaagctctggcatcctgctgtttatcttccatgcaaacttttt

SEQ ID NO: 33087 - DNA, 98 bp, Homo sapiens
gcacatcgtggtggtcggatttcaccacaagaagggctgccagtggcttttcatggcctgccactgaaaatcaagaaagaaccccacagtccatgttc

SEQ ID NO: 33088 - DNA, 98 bp, Homo sapiens
aaaaattcatccctgaaattactatcagtgatatacttaggccagaaatgtacacacaggagagctggctgcagtaaaaatcattaaattggagcctg

SEQ ID NO: 33089 - DNA, 100 bp, Homo sapiens
ctccgaagatgtcaaacggcccccagcgcccctggtaactgacaaggaggccaggaagaaggttctcaaacaaggctgaagtgcaatgttgtgatctcgg

SEQ ID NO: 33090 - DNA, 83 bp, Homo sapiens
tatgcctacccctacagctactactatcccatgggtcggtcagagctgacgatgaagttgatgtggatggtacagtagaagag

SEQ ID NO: 33091 - DNA, 89 bp, Homo sapiens
gtgaggcccatgacccgctagttgaagcactagttacagaagcatggagaaggctagaaaggatatggtggtaccaggagacgataaag

SEQ ID NO: 33092 - DNA, 100 bp, Homo sapiens
attacgtcttcggagacctcagtggtggctgtgagagcttgatggaatggggagaagatattaaagcagtttcaaaagatgaagcagtgatgttggtgaa

SEQ ID NO: 33093 - DNA, 82 bp, Homo sapiens
taacgttgaacagtcctgtatcaaaactgaagatggtttgaaacagcttcacaaggactaatttattattgtgcaactgcca

SEQ ID NO: 33094 - DNA, 83 bp, Homo sapiens
gaactgatagcttatggttctccattgtgatgaaagcacatggtacaggaaacccttttccaaagagaaatgaagaagaaaac

SEQ ID NO: 33095 - DNA, 99 bp, Homo sapiens
gaggcaggagccttccttacacttcgccatgagtttcctgatcgactccagcatcatgattacctcccaggtctcctctgagcctccggcctccataag

SEQ ID NO: 33096 - DNA, 108 bp, Homo sapiens
ctgaagcattgcttcaaagcatggggctaactccagaatcccccattgcggaagatccatccaaaagctatgtgaaattacgagactttgtgcttgtgaagctttgtc

SEQ ID NO: 33097 - DNA, 100 bp, Homo sapiens
ttcgtaattccagagcggggcaaactgcttggcacctcttcaataggtgacattcaatgaatgatatcatcaagttgaatcgaaaggaagggaagaagca

SEQ ID NO: 33098 - DNA, 98 bp, Homo sapiens
cgttgccatgaggaaagaattctccgaggtacactgaggaggggacggctccgtcttcacattgtgcacagatctgaggatgggattagcgaagctgt

SEQ ID NO: 33099 - DNA, 100 bp, Homo sapiens
caactctttgatgtactactataatgggaaagcggtcaaactgtgctgaaaatatccgcaaacacattctgcatactggcaaacatgaaggagtcaagat

SEQ ID NO: 33100 - DNA, 90 bp, Homo sapiens
cgaagtccccggagaactctaccctggaggagattctggggcagtatcaacggagtctccgggtagccggatcgagctgggagatgtgac

SEQ ID NO: 33101 - DNA, 98 bp, Homo sapiens
ggttaagggaaagcgccgagatgacgggctttctgctgccgcccgcaagcagagggcctcatctttgtggtggacagtaatgaccgggagcgggtcca

SEQ ID NO: 33102 - DNA, 75 bp, Homo sapiens
cagtctcgactttcctgggctcagggtggttctcttcccaaagtggaagccaaattcatcaattatgtgaagaat

SEQ ID NO: 33103 - DNA, 83 bp, Homo sapiens
tggagctgtttatagtttggaacccagactttgcggtggaaaaggagtagaacttcatggaggaacacggagtgacccaaacc

SEQ ID NO: 33104 - DNA, 100 bp, Homo sapiens
aagaaatggaacagaaacatagagaggaactggagcaattgaagctgactactaaggagaataagaatgatatggaacctagcaaagctgttccactgaa

SEQ ID NO: 33105 - DNA, 83 bp, Homo sapiens
acagcgaccccgtgcggctgcgttaagccggctctggagacaggttgatgataattagaagcatgctttccactgaacttccc

SEQ ID NO: 33106 - DNA, 100 bp, Homo sapiens
tcaaaattctacgttagagagactgaaaagacatctaatttcattgctcggcaggtgctagagtgtggagtttgtgaagatgtcttttctttgcaaggag

SEQ ID NO: 33107 - DNA, 90 bp, Homo sapiens
ccccaatgtccttccccaccgccgaccttactctgaaggattccccagctttccgttgcacaaacagtgaagtgacagtccagcccagcc

SEQ ID NO: 33108 - DNA, 100 bp, Homo sapiens
ccggagctggaatacattcccagaaagaggggcaagaaccccatgaaagctgtgggactggcctggaaaatgttggggcttttcaggaagcataataaga

SEQ ID NO: 33109 - DNA, 119 bp, Homo sapiens
ggagaaggtgaagctgcagatctgggacacagcggggcaggagcgcttccgcaccatcacctccacccaaataggaagagctctggtctgcagctcccagtgtgatcaatgcaagatgg

SEQ ID NO: 33110 - DNA, 100 bp, Homo sapiens
ggcggagcggcgcctgcattagcaggtgtgatgaatgcagactctgctaccattttggctgtttggatcctcctttgaaaaagtctcctaaacagacagg

SEQ ID NO: 33111 - DNA, 100 bp, Homo sapiens
ctcttcacctgtaagaacatgctctttatcttccagtctcttcttgtcaatttggaaattgcagactgcccggctcagggctggtgaattaccagatctc

SEQ ID NO: 33112 - DNA, 74 bp, Homo sapiens
acggcctcgtgcccttcgccttcgtgcgcttcgaggacccccgagcccaaatcttgtgacaaaactcacacatg

SEQ ID NO: 33113 - DNA, 51 bp, Homo sapiens
acagttttttaaacaaacaggaagaatgccgggtctaagttgtagatttta

SEQ ID NO: 33114 - DNA, 97 bp, Homo sapiens
cgtgccctgacgctgctctcggggagctcgggggccttcatcccggtgctgcctttcatcctggaggctcagcagctccacggagcagagcacctca

SEQ ID NO: 33115 - DNA, 100 bp, Homo sapiens
ggcaggctcaggcgggaagaaggaggcatcgtccagtaagaccgtcccggacgggaagctggtgaaagccttgtcctgccaagaagttactgatgatgag

SEQ ID NO: 33116 - DNA, 75 bp, Homo sapiens
aaaggcttgagtgacatccaccacaggggcaagattcttgccaagagaattaatgtgcgtattgagcacattaag

SEQ ID NO: 33117 - DNA, 100 bp, Homo sapiens
agcatgaaggacatgcgcaaagttctgagaacattacagcagatcaagaaatccagctcaagatgtacagttacccagcacgtgtacctcctcctcctcc

SEQ ID NO: 33118 - DNA, 119 bp, Homo sapiens
tggcctgtcgctggagcacaaaagagtctccgcggtggaggtctgcgttgctcttgcttttcctcgctggggtgtacgattgcagagggaatggcatacatcgagcggaagaactacat

SEQ ID NO: 33119 - DNA, 83 bp, Homo sapiens
ctcagagtctcaatgaacttgtactatactggcaattgctggagaagattttgcaattgttgcttctgatactcgattgagtg

SEQ ID NO: 33120 - DNA, 74 bp, Homo sapiens
agtggagagaagaagttgcttcacttcaggctgttatgaaaggtgggtcatgataactgggtacgtggagttct

SEQ ID NO: 33121 - DNA, 98 bp, Homo sapiens
tagaatatgcccagttcgctagtcaaacctgtgagttcaacatgatagagcagagtggaccaccccatgaacctcgttccagtctcatcagattttcc

SEQ ID NO: 33122 - DNA, 120 bp, Homo sapiens
gcggcgaatcacttataaatggcgccgaagcaggacccgaagcctaaattccaggagggttttaaaatcaaagatgggaaaatcggagaaaattgcccttccccatggccagcttgttca

SEQ ID NO: 33123 - DNA, 75 bp, Homo sapiens
ctggaagggatgtcgtctcagcagtgctcgggcgcagggaaatgatggcgggaacacagcaaaggagaccatgtc

SEQ ID NO: 33124 - DNA, 98 bp, Homo sapiens
aggaatgcttactgttgcgtggttcgttattaacagtttgatttgacagtttgagaggcacctcagagtttccttctttaccccgctgagacagtggg

SEQ ID NO: 33125 - DNA, 100 bp, Homo sapiens
gaggagaacgaacatcttctggacctttgtccaggaccctatgtactcggaactgggcttatcttgtacgctttatccaaagaaatatatgtgattagcg

SEQ ID NO: 33126 - DNA, 100 bp, Homo sapiens
tgccagcaccttgggaagagaaagaaaatgccgaaggcactcagacaggaattgcattttgtgaaaaaagaacaagaattttctgcaaggatcatatcta

SEQ ID NO: 33127 - DNA, 98 bp, Homo sapiens
aaaaactgggtctgtgactacaacatattgctgcaatcaggaccattgcaataaaatagaacttccaactactggaaaatgtttcaacgtgcgcaaga

SEQ ID NO: 33128 - DNA, 100 bp, Homo sapiens
ggcagctgaactgagcgtatgtgccacgccgcccaggagacccctctgctgcaccacttcatgggggccgaaggccagagaccaggatttggctacggag

SEQ ID NO: 33129 - DNA, 100 bp, Homo sapiens
caaaggggaagttgctgcgctctgctcggtgtcgtggcctcgcagatggtgacgcagaagttctccctggtgattgtgcagggccacctggtgtcagaag

SEQ ID NO: 33130 - DNA, 50 bp, Homo sapiens
tccagtcaaggccctaaaatataggcccgatgagagaaagggaaagttaa

SEQ ID NO: 33131 - DNA, 90 bp, Homo sapiens
caggacccgaagcctaaattccaggaggtcacccacaaaagctgtatataatgccagacattggaatcatccagattcagaagaactgcc

SEQ ID NO: 33132 - DNA, 100 bp, Homo sapiens
tcccatctcaatcagaattactagattttctctcaaactacgagattgttcagattccattctgtggggaaattgactgtgaggactggatcaaaaagac

SEQ ID NO: 33133 - DNA, 110 bp, Homo sapiens
gcttcagtccgaaggaggaagggaaccaacccactttctcggcgccgcggctcttttctaaaagtaaaagaggcacagttagatgaagaaggacagtttcttgtcagaat

SEQ ID NO: 33134 - DNA, 146 bp, Homo sapiens
gtttccctctgtgcggcggccggcgggaccataagggcttaactcatatatttaacccccctccaaaaatatgggattgtgctggatgcgggttcttctcacacaagtttatacatctataagtggccagcagaaaaggagaatga

SEQ ID NO: 33135 - DNA, 87 bp, Homo sapiens
tgatgtggaaagtatgaagaaagccatggtggagtatgagtctgaaaggcactttattatgcaggtggtctgtgaagccacacagtg

SEQ ID NO: 33136 - DNA, 100 bp, Homo sapiens
cggaccgagcgcctcgacctcggtctgaggttgaaatcacaaagattagacacctttttagataggtgttcttcagcaccactgacaacacggttctgac

SEQ ID NO: 33137 - DNA, 74 bp, Homo sapiens
tctggaggaccttcttcatctctccaggaattggtggagagaaggcgcaccatgatggaagatttccggaagta

SEQ ID NO: 33138 - DNA, 100 bp, Homo sapiens
ctatgacaacctctttgctatggattgttttaagaaaatggcagacaaaccagacatgggggaaatcgccagcttcgataaggccaagctgaagaaaacg

SEQ ID NO: 33139 - DNA, 100 bp, Homo sapiens
tgcttagcttggcttttgctggacctgcaattacgccataaaatctcgacctgtttcaagagttaccaatggaacttccaataaaaaaagtattcatgaa

SEQ ID NO: 33140 - DNA, 50 bp, Homo sapiens
ccgagaccaaatccttgagtttcaggattttttatcaagcagaaatgcat

SEQ ID NO: 33141 - DNA, 100 bp, Homo sapiens
gttctcttgtttatcgaggtttttgggctggtggtttcggcagacatccctttaaaagtagttggaatgttcccaagtagaggtgagaaaagggcacttt

SEQ ID NO: 33142 - DNA, 99 bp, Homo sapiens
agatatactcaactccacagcagctgatgaggtgacagctcatctggcagctgcagatgtatttatttgtgggggctataatggagaggtgatcctggg

SEQ ID NO: 33143 - DNA, 101 bp, Homo sapiens
ggagtcttcaagtgccctgaggaccagcttcctctggactatgccaaggttggcgggacgaagactggcgtggtgcggtacgtgggggagacagactttgc

SEQ ID NO: 33144 - DNA, 101 bp, Homo sapiens
cggaagggcggacacctccacatcgccttttgccacctttccctttatttccggagattgatgaactcccagagggcgctgtgaagcctccagcaaacaag

SEQ ID NO: 33145 - DNA, 75 bp, Homo sapiens
gtagctgaagcaagcacgaaaaatgctaacaacagcttcacgggtgataaaagaaaatgtggctgaagttacccg

SEQ ID NO: 33146 - DNA, 100 bp, Homo sapiens
gtggaagctgagcccatattaagagatgtcaggcacaaatcctgaagagcccgtgggcgtggactgctcatctgtaaagaaagtggagacatgaccttga

SEQ ID NO: 33147 - DNA, 83 bp, Homo sapiens
tttttttcaagaactgccgtcttctttgcctgcactaatgctagatgaggaagaggagcgaaggaaaaggcgccgggagaaga

SEQ ID NO: 33148 - DNA, 100 bp, Homo sapiens
attccaggtgactctatgctttggagaggagtttccagaccctcagaggcaaagaaagctcatcacagctcacatgtatcggcaagcagtgtaaacggag

SEQ ID NO: 33149 - DNA, 98 bp, Homo sapiens
acctctccgcgcacatcactcccgagtggaggaagcaatacatccagtatgagatatgtcttctccgactactatgaagaagcctgaaaagccattgt

SEQ ID NO: 33150 - DNA, 90 bp, Homo sapiens
gttcagataaaacaggaaactattgagtccaggctttctgaattaaaaaggatatcggccgggtagcaggaccaccaatactcaatccaa

SEQ ID NO: 33151 - DNA, 75 bp, Homo sapiens
ggaacctctgttgccatcagcaactgtgatggtctggtgctggaggtggtgagagccaactatgacacgctcacg

SEQ ID NO: 33152 - DNA, 50 bp, Homo sapiens
cctcagttacctcagggaaattcctccaactcctctgccaaccaatgatg

SEQ ID NO: 33153 - DNA, 88 bp, Homo sapiens
gagctgagatccatctgcaccacggtgctggtgctggagaatctggtaaaagcaccattgtgaagcagatgaggatcctgcatgttaa

SEQ ID NO: 33154 - DNA, 100 bp, Homo sapiens
tgattggcagccgaacacctctgaaggacattcttaaactgtttcctttcttgaagtgcccttatcagaataacaagcctttgtattcatttgaagataa

SEQ ID NO: 33155 - DNA, 82 bp, Homo sapiens
aggagctaaagcagcgtgcgttcagccctgggtgttcctcctgctcccagcagttcatgcagaagaaggacttgcagagcca

SEQ ID NO: 33156 - DNA, 75 bp, Homo sapiens
aaagaaaaggagtcagggatggcccttactcagtttgtgtgtgttggtggaagcccctcccggatgaaagccttc

SEQ ID NO: 33157 - DNA, 97 bp, Homo sapiens
attgttcgaggggagggttcacagacgtttcaggaccgctcaggaagtggcagcgaagaagactgagccccgacattccagtctcgaccccgagccc

SEQ ID NO: 33158 - DNA, 100 bp, Homo sapiens
atttacaccattgcctttgggatccggaatgtcacacacattgatcagtttaattggttggggtcagataagaagaggagtgacaatcaagccaacagta

SEQ ID NO: 33159 - DNA, 100 bp, Homo sapiens
gcctgcacaaccagcaggcattgagctccagcattgaggaggggctacgcatgcaggccatgcacaggtacatggccacctctggcctagaccaccagct

SEQ ID NO: 33160 - DNA, 95 bp, Homo sapiens
actaaacaaattcatcccagaaatctaagagggcagcccaatggatccaatggtgatgaagagacctcagttgtatggcatgggcagtaaccctc

SEQ ID NO: 33161 - DNA, 101 bp, Homo sapiens
tcatgtgaggacgtgcttcctgcttcatagataagaggcacctgcggaactcgagtcatgcaggagcttttgtgatcgtgacggaagaagccattgccaag

SEQ ID NO: 33162 - DNA, 100 bp, Homo sapiens
gacacagagactttatcaaaaacatgattacagggacatctcagccgagtcgtccggaaatccattgcccgtgttctcacagttattaaccagactcaga

SEQ ID NO: 33163 - DNA, 100 bp, Homo sapiens
taggaagctgtgattttcaaagctaattatgaaaacatttatcattggaatcagtgggttaccacggcagcagctacagccccgaaggggtggagcccgt

SEQ ID NO: 33164 - DNA, 82 bp, Homo sapiens
ttgtggtctgcttagattgttacaaggcaaaggaaaggaagagttctagaggtccctttctagagataggagaagagagaga

SEQ ID NO: 33165 - DNA, 75 bp, Homo sapiens
ccggccatgcccttgaggatcttaggtgaaatgacaatggatgctctgttggctcgattgaaacttctgaatcca

SEQ ID NO: 33166 - DNA, 97 bp, Homo sapiens
aattgggatgatgacaatgtagaggatgacttctctaatcagttacggttagaaccatcagagagccttgaggaaaaccagcggaacctccttcaga

SEQ ID NO: 33167 - DNA, 75 bp, Homo sapiens
ggtcatacaccagtactaccaaggacagcttttttcctgcaagtactatactggcaattgctggagaagattttg

SEQ ID NO: 33168 - DNA, 50 bp, Homo sapiens
gccgttcagcacccgtcgagcggatacccacccaccatcccagggtctac

SEQ ID NO: 33169 - DNA, 51 bp, Homo sapiens
ctgggcccgtgagccactcggcctcaggctggagcgcaatggcgtgatctc

SEQ ID NO: 33170 - DNA, 100 bp, Homo sapiens
ccgcaacaaaccctatcctgtccgagcaaagattacctattaccagaacacactgacagttttcctttggaatatggataaatacaccatgatacggaaa

SEQ ID NO: 33171 - DNA, 75 bp, Homo sapiens
ccttggtcaaaagcgcactaaatcgtctccaaggtttacccaaggtccagcctagcccctaggcaccatgtcgga

SEQ ID NO: 33172 - DNA, 100 bp, Homo sapiens
ccctcatgtacgagtccgagaaggttggggtcgcctcttccgagtgtttgggatgggaccttcagtgcttttcccagcactgtcttcttcagtctttagg

SEQ ID NO: 33173 - DNA, 100 bp, Homo sapiens
gggaattcagcctcagtgatgtccatgaggccccttcacagatgtagtcactacaaatcttaaattgcgaaatccatcggatagaaaagtgtgtttcaaa

SEQ ID NO: 33174 - DNA, 98 bp, Homo sapiens
aactaccaacggctctttgacttcttcaacagcaggcctaacctccatgtgcagggtaagggactgttctgaagaacctttccatttagtgatcaaga

SEQ ID NO: 33175 - DNA, 83 bp, Homo sapiens
caacgatgaccgccagacaggcgcagagctcaggccgccgcccccggaggcctccggtgtggctgtctctgatggtgtcatca

SEQ ID NO: 33176 - DNA, 100 bp, Homo sapiens
cacagggatacttttctacaacagaaagctcaatcacttaccaagaaaatgtttataggaggccttagctgggacactacaaagaaagatctgaaggact

SEQ ID NO: 33177 - DNA, 90 bp, Homo sapiens
acttcgtgcacgccatggagggcaaagaccctggccggctcctgtgggaagtttgccccctttgaaattaaagagcacatggtcctggcc

SEQ ID NO: 33178 - DNA, 75 bp, Homo sapiens
aaaaggtgtacttgcaagaaacctcaggacttgagtaacagcaacatggccaagatgctgaattatcagggacac

SEQ ID NO: 33179 - DNA, 75 bp, Homo sapiens
aaaacttccgtgttctagtgaaacagaagaaggccagctttgaggaagttgcaaaggtgcgctgcctcccacaag

SEQ ID NO: 33180 - DNA, 75 bp, Homo sapiens
gagaatagacttcatcatgtgcttcagaagaaagaggtcatcgggaccctggaggaggtccacatgccacagaat

SEQ ID NO: 33181 - DNA, 100 bp, Homo sapiens
gaagctacagactacagatcgggcactttctgtgtctagactacaacacggtgcagactgtgggcatgactctggcaaccatcttgttcctgctgggtat

SEQ ID NO: 33182 - DNA, 100 bp, Homo sapiens
tcagattcggacaccgagaacaggagccggagggagttccactctattggcgtgcaggtggaagaggacaagagaactctactacgatcgcgggaaccac

SEQ ID NO: 33183 - DNA, 82 bp, Homo sapiens
catcgtctccctgtacgccgagggctccgtcaatggcttcatcagcactttgggattcttcgctgctgctgccttaccgccg

SEQ ID NO: 33184 - DNA, 100 bp, Homo sapiens
acagcggcaccgccagacggccagaaagttccgccatgagctggggcacggagctgtgggacctgaaggagaagaaggagaaggtggaggagaaggcaag

SEQ ID NO: 33185 - DNA, 97 bp, Homo sapiens
gaaactgagaaccagctctcccgaagccgcgggtctccggccggcggcggcggcggcggcggcggcggcgcaggttcacttatgtagttcccatttg

SEQ ID NO: 33186 - DNA, 155 bp, Homo sapiens
tttcagcactctggacggacttgagaactgtccttacgtgacctaaagctggagtattttgagattggagaattaagctcttcaccaccaggagtgttccttgagaaggactatgagatttaccgggattacagtgcggacggccagcttcttca

SEQ ID NO: 33187 - DNA, 148 bp, Homo sapiens
cggtgcgcactgcgggcgcatccctgccccggcgccgtccgtgcccgcgggacctgacagccgggtcagaggtactccaaagattcaggtttactcacgtcatccagcagagaatggaaagtcaaatttcctgaattgctatgtgtct

SEQ ID NO: 33188 - DNA, 90 bp, Homo sapiens
gaatctgctgtcgcctgcagctgctcgcctgtctccgtcggaagggagcccaagctttgcagaggtcagcgttgaagttttggtagagta

SEQ ID NO: 33189 - DNA, 100 bp, Homo sapiens
ggatctgaatcatctcttgaaagggtatcactgggatacatcagattggatgccaagcgttcctctgccggacatacaagagttccccaactatgaggtg

SEQ ID NO: 33190 - DNA, 100 bp, Homo sapiens
ggcgtgtgctaataaatgtgtcttctgttggtgatatacgagaacgccatgattgctgctggacttgttgacgaccctagggccatggtgggccgcttga

SEQ ID NO: 33191 - DNA, 100 bp, Homo sapiens
gcacaagcgtggaggaaacctccctgcccggcaccagctggcggctgacggcactgtcatgaacaccttcgctcacaagtgccagctgccggaggacgtg

SEQ ID NO: 33192 - DNA, 74 bp, Homo sapiens
accaaccagcccaaacagaaccagcgtactggttttggattaggaattgttttctcacttaccttctttaaaag

SEQ ID NO: 33193 - DNA, 100 bp, Homo sapiens
gagcacagagagttcagagcaaaaactaacagggatcttgaaattaaagatcaggtggaaatggatattgttgaaaaactggtgaaaatgataccttgtg

SEQ ID NO: 33194 - DNA, 83 bp, Homo sapiens
tgcaaatccaagtggcaagaagaaactcaagatcttccagcctatctggcatttccttgtgctcataatgagaatagttctcc

SEQ ID NO: 33195 - DNA, 101 bp, Homo sapiens
atggcagctccagcctctgcctcccagaaactcagcggagccttaaacaacgcagtgagacagacatctatcatcccattttacaggggaggatactgagg

SEQ ID NO: 33196 - DNA, 75 bp, Homo sapiens
ggaaaaaggaagagagcactgcagccagtgaaaccactgaggcagagaaaatcctgaaggagcaagagcggctgg

SEQ ID NO: 33197 - DNA, 98 bp, Homo sapiens
tgctaaagaggtagcaagaaagaaaattagagtgaatgtagttgcaccagggcggtgacaaatgcttcccaagctaaagtccctatgtctacagctgg

SEQ ID NO: 33198 - DNA, 130 bp, Homo sapiens
acaaaggcgcaagtcgagaggaaactgttgtgcctcttcatattggcgatcctgttgtgtgctggagaatctggtaaaagcaccattgtgaagcagatgaggatcctgcatgttaatgggtttaatggag

SEQ ID NO: 33199 - DNA, 111 bp, Homo sapiens
atgaagggaacaggcatcatggactgtgcgcccaagccacagacccctttgcttctgtttttgggaatgaatcatttggaggtggatttgctgacttcagcacattgtcaa

SEQ ID NO: 33200 - DNA, 76 bp, Homo sapiens
ggagtgatggtcccaccgcagcgagaagttgatgacgcctgagatgttttcagaaatcctctgtgacgatctggat

SEQ ID NO: 33201 - DNA, 119 bp, Homo sapiens
ggcctactcgcccgccaccctgcgctgccgccgctctgaggagttaaaggaaagaccacagcaagattctttcattcgtctcctcctagcctgggggaccaggctcgaactgaccctgg

SEQ ID NO: 33202 - DNA, 82 bp, Homo sapiens
gagctctttcagcccaccgtcagcgggatcatccagcacatagctcattgctatggacagtgctatcaccctgtggcagttc

SEQ ID NO: 33203 - DNA, 75 bp, Homo sapiens
ggccgcgcggaaggagctggagacggtcgtagctgcggtcgcgccgagaaagggttgtggtctcctgaacagaag

SEQ ID NO: 33204 - DNA, 100 bp, Homo sapiens
gcggcgcaggaggcggtggagcgcagagcgggcgagcgcgtgtcagagatggctttggattccccgttctgtgtgctgctgtctggctcctgaacccagc

SEQ ID NO: 33205 - DNA, 90 bp, Homo sapiens
ggtgacagctccgggaccggccgaaaggcgaggaaccgggctttgttcgcgggggtcacagctctcatggctgcagctagcgtgaccccc

SEQ ID NO: 33206 - DNA, 90 bp, Homo sapiens
ggcatccttcacccatctgaagggaggaaatagtggcaggtgacagtctgcatgtgcagttttcagttcatggcctcccacgggaacgac

SEQ ID NO: 33207 - DNA, 97 bp, Homo sapiens
cgggccatcccctatctccccgggcggtgccggtggtggtgtgcacattgagccccggtatagacagttcccccagctgaccagatcccaggtgttc

SEQ ID NO: 33208 - DNA, 75 bp, Homo sapiens
cattcattttaattttgccggaatatttcaagacaccgaaagatgatgttgaatttgaagtatcatcggaccgac

SEQ ID NO: 33209 - DNA, 100 bp, Homo sapiens
tagcacaagacaatccttgggtcattaatttacatgaagtttatgagactgcatcagaaatgatcttagttctggaatattatgaaaaacctcctcctgg

SEQ ID NO: 33210 - DNA, 100 bp, Homo sapiens
agtgaaaagcagcagagccgatgggtcatgaggatgtaagtgcgtttgaaggcttccacaccctctactccaggccaataggagctctgaacccaaaaag

SEQ ID NO: 33211 - DNA, 100 bp, Homo sapiens
agctgctgcagcggattcctgagttcaacatggcagccttcaccacaacattacacgtccagaggaccagaggttaatttattctgggaagctgttgttg

SEQ ID NO: 33212 - DNA, 80 bp, Homo sapiens
gattacaaggatatttacctgctcctaccctgatctaggtgaaatgacaatggatgctctgttggctcgattgaaacttc

SEQ ID NO: 33213 - DNA, 100 bp, Homo sapiens
acaatctaccacctacagccaagtggcagatttgttattggtgggcctcaggttgactatagtcaatggggccaatggagccaagtgtatggaaacccac

SEQ ID NO: 33214 - DNA, 100 bp, Homo sapiens
ctcgcgcggcgctggagagagacaagatgtccgccagagctgcggccgccaagatccaggatgagaagactgataaaagaagaagctagctgaacagctg

SEQ ID NO: 33215 - DNA, 100 bp, Homo sapiens
gcggtgtggaatcggcagcgaggaatcctggagcacagagaagctcccagctttgaaggtcttgcggtgtaccttccactggaagaatctcaaacagcgc

SEQ ID NO: 33216 - DNA, 75 bp, Homo sapiens
ggccgctctacccaggagccttggagtatgatcaggttctctttgtaaagaatccttttctggtcaagtttcttc

SEQ ID NO: 33217 - DNA, 82 bp, Homo sapiens
cttcagacagcatatttgagtcatttccttcgtacccacagtgcttcatgagagatgaataatacggcagctagtccaatgt

SEQ ID NO: 33218 - DNA, 83 bp, Homo sapiens
tccgcattatgtgctcctagaagtccattatgataatcccacttatgaggaagggttatgagagaatttacaatgaaattccg

SEQ ID NO: 33219 - DNA, 100 bp, Homo sapiens
cttccaaatacaagctgtatagattgagaggatccagaatccagatctctggaatagctaccaggcaaagaaaaaaactatggatgccaagaatggccag

SEQ ID NO: 33220 - DNA, 82 bp, Homo sapiens
gagccgggcccacctccccaccaaggaagcccgtggaccgggagcccgtggaccgggagccggtggtgtgccaccccgacct

SEQ ID NO: 33221 - DNA, 90 bp, Homo sapiens
atgggatgcttatggaatgtgcgagaacacgggtaatgcatgtccatggtacacaaattcacaaggtttgtaaatgagaaaagacgtgag

SEQ ID NO: 33222 - DNA, 90 bp, Homo sapiens
tttctgtgttaagcaactggattataacgagctgcacggccaagagagtcacaattcaggcaacaggagcgacgggccaggaaagaacac

SEQ ID NO: 33223 - DNA, 82 bp, Homo sapiens
gttttcacatcttccctttgactgtgtcctgctgctgctgctgctactacttacaaggggatatgagactttctactcggaa

SEQ ID NO: 33224 - DNA, 75 bp, Homo sapiens
tatgctgttcgaggcaataaataaaccgaccagagggcaaagtgttggagacagttggtgtgtttgaggtgccaa

SEQ ID NO: 33225 - DNA, 50 bp, Homo sapiens
ggaagaagcaacacattgtcttctccaaatggagtctcgctctgtcaccc

SEQ ID NO: 33226 - DNA, 100 bp, Homo sapiens
ccggccgggtggtgggcgcatatcctgggtagcctctaggaagcgctagacacatggtggattacggaacaacaacgagaaagacatggccctcacggcc

SEQ ID NO: 33227 - DNA, 75 bp, Homo sapiens
caccaacgcggtgcgcgaccgggagctggacctccggggtggctttctagaagatgaccatagaggaccttccag

SEQ ID NO: 33228 - DNA, 50 bp, Homo sapiens
ggggatggaaaccagtatgtgcgtgagttcatggcccaggggaagacagg

SEQ ID NO: 33229 - DNA, 130 bp, Homo sapiens
caggctgctgtcgccgctgctgggagatgggcctactcgcccgccaccctgcgctgccgccgctctgaggagttaaagggctctggaacttcatccattctctatgaaacctcttctgaggcgggcgatg

SEQ ID NO: 33230 - DNA, 96 bp, Homo sapiens
ttccacagaagatagcaaaaccatacagggctatgatgctattgtggttgaacaatggacagtcctggaagaaccctgcctacgccatgaggacag

SEQ ID NO: 33231 - DNA, 102 bp, Homo sapiens
tctccttctgcatccttaactgagaatgaggccgacgcctccccccagggtcagctgcgggctcccaggcctaggcgcccatgacccctacgccaacagccg

SEQ ID NO: 33232 - DNA, 99 bp, Homo sapiens
gggaagccggcggaccgcgtcctgcgccggagcaggatggcttaaattccttggtccttgatttagattttcctgctttgaggaaaaacaagaacatag

SEQ ID NO: 33233 - DNA, 101 bp, Homo sapiens
gacgaacatttctgggtgacactcaacaggattcccgttttgcaggctttggaggtactcccagtagcaccaccacctgagccaagatcactgacagcaga

SEQ ID NO: 33234 - DNA, 75 bp, Homo sapiens
gattctgctggtatacagctacatccaggagagaatgctgacagtcctgcagcagaggaagaaccgatgctggaa

SEQ ID NO: 33235 - DNA, 50 bp, Homo sapiens
gattttgtcagcttgtcgtcaagattcttctaacagagaaaatgccattg

SEQ ID NO: 33236 - DNA, 50 bp, Homo sapiens
acggggaggaggaccaggagtggtggtggagctgggcaagaagtaggaag

SEQ ID NO: 33237 - DNA, 51 bp, Homo sapiens
gttcagcggagaataacatatcttcagcatgattccacctttccactgata

SEQ ID NO: 33238 - DNA, 79 bp, Homo sapiens
agggaaaaggacgccgcggtcttcccaggcgtcgcggagagcaggtagctacagcaagctgggtagcaggcagatccaa

SEQ ID NO: 33239 - DNA, 96 bp, Homo sapiens
acaacctagaggcggctcctcatgatatcggctacgtcaaacaggccatgttccactatttccaggcaaagaacagagcagttcaccatttgcatt

SEQ ID NO: 33240 - DNA, 82 bp, Homo sapiens
tgctggcatcagcacagacaccgctttgccgataggtgccgtgagcgatgtggagatgcaggaacactatgatgagtttttt

SEQ ID NO: 33241 - DNA, 50 bp, Homo sapiens
cagcgagggaaatgttggatacgtgcagatgcgtctgaagaagcatcgct

SEQ ID NO: 33242 - DNA, 82 bp, Homo sapiens
cagcaagaacgggaacaaaactctggaatgtatcctgtcaggtataatgtcagtgaatggcaagaaagttcttcatatggat

SEQ ID NO: 33243 - DNA, 75 bp, Homo sapiens
ataattaggataataaatcctataacaatgcagtgtataaaggatcagaaatgtcaatatgactcaaaatatcgt

SEQ ID NO: 33244 - DNA, 83 bp, Homo sapiens
agttgggaggacccgggacaccgcacagccgggaaatgtttggtgccctggttgtcagatgttggaaagcagtaggacggaac

SEQ ID NO: 33245 - DNA, 76 bp, Homo sapiens
atggcgaggagtctctgtccgggggcctggctaaggaaaccctattacctccagatggaggagatgtataagaaag

SEQ ID NO: 33246 - DNA, 100 bp, Homo sapiens
cccagagaggcttcaagcccaagaccaggaccccagaagagaggctgaagtggccccacgagcaggaggaagagctgcgcaaaggtggagaccccaaata

SEQ ID NO: 33247 - DNA, 51 bp, Homo sapiens
gcttggctcttgacgtggacagaaagtggagaatgaggacatgaataaaga

SEQ ID NO: 33248 - DNA, 100 bp, Homo sapiens
tcccttccacctcgacctctggttctacttcacactgcagaactgggttctggactttgggcgtcccattgccatgaattcagcttagagaactatcaac

SEQ ID NO: 33249 - DNA, 101 bp, Homo sapiens
ctagtatttgaatttgctagtaacgtcatggaggatgaacgacaggctggattctagtgacatttataacgaattgaaagaaacatatcctaattatcttc

SEQ ID NO: 33250 - DNA, 82 bp, Homo sapiens
aagaagaattgcacttacacacagcatccggtgaaagacagagatcacatttcaactagattcttaggaagtatggattcac

SEQ ID NO: 33251 - DNA, 90 bp, Homo sapiens
aagtggcgaaggagccggctccaaggcgcatattaaatttcctattgactacccctattcaccacctaccttcagattcttgaccaaaat

SEQ ID NO: 33252 - DNA, 90 bp, Homo sapiens
ctgcgggaaatcgggctgaagcgactgagtccgcgatggagtcctccctcccccttctccttcacccccaagtgtctcccacgactgccc

SEQ ID NO: 33253 - DNA, 75 bp, Homo sapiens
ctcaaactctatttgccaaaggaaacttgccttatcaccttcttgcttgcaggcaggatgacgcaaaacacggtg

SEQ ID NO: 33254 - DNA, 100 bp, Homo sapiens
cggtcatggagggagcaggagctggatccggcttccggaaggtgggaaagcagtgccactctccgcttcacagatgccccctgccaagatgtcagtgatg

SEQ ID NO: 33255 - DNA, 80 bp, Homo sapiens
aaaaaataagaaggaacccaaagaaccatctcccaaacaggatggaagctgcagtaaaggaagatgaagaagaagtttca

SEQ ID NO: 33256 - DNA, 50 bp, Homo sapiens
cacagtgtcctctggaaaatgttcaaatctgaacatcaatgatgtactag

SEQ ID NO: 33257 - DNA, 90 bp, Homo sapiens
ctcaaactcccaggctcaagcagtcctaccatgtcagccttcccagtagctgggaccacaggccacctggttcttagtcccccacctccg

SEQ ID NO: 33258 - DNA, 100 bp, Homo sapiens
tttcctgtgttccctttgccgctcctggagttcactgattacctggctggtgtttgcttgttctggagtgatcttctgactggaaaagaactatgtcatg

SEQ ID NO: 33259 - DNA, 100 bp, Homo sapiens
gtcctggagactgtagtaagaactgttccaggtcttctgcaaacagtcttcctaatagcaaaagtgaaatatttgtcagtggtgaactgttctgatccag

SEQ ID NO: 33260 - DNA, 90 bp, Homo sapiens
ctgctggagaggaggcagactgaggcagcagctatgaaacccacgtagtcgaacaccgtgatgcttctcctgcagggcgtgtgatgagga

SEQ ID NO: 33261 - DNA, 106 bp, Homo sapiens
gaacgagcgacggcggaacccgtgggcctgtggactgcagcctcggcggtcagcaggtcacaaagctccttctcaaacttgttctggaggaagccagcagccatgt

SEQ ID NO: 33262 - DNA, 106 bp, Homo sapiens
gtccctcagtcacacatgccagagattgctcaggaagcaatggagataacaacgaacttgatgcaagtgataggtttgccaaggtcagacctctcatcatccggat

SEQ ID NO: 33263 - DNA, 100 bp, Homo sapiens
tcttggatgttcttggacttgacggatgaaatctttgacatggtaaaaccaaaggatcctttgaaaatctctcttcaggatttaatcaacagtaatcaag

SEQ ID NO: 33264 - DNA, 117 bp, Homo sapiens
aggagacgcagagcacactgcaggccgagtgtgaccagtaccgcagcatcctggcggagacggctttatcctgtggataaacgcagagtgaacgagtttggggagtcctacgaggag

SEQ ID NO: 33265 - DNA, 100 bp, Homo sapiens
acaatcaagatgaatatgaccctatggaagcagaagaagctgaggatgaagaagatgagcaactggaatgagattgttgataactttgatgatatgaatt

SEQ ID NO: 33266 - DNA, 100 bp, Homo sapiens
cgccgactgtcaatggagctggaaaacatcgtggccaacacggtcttgctgaaagccagggaaggactgccaccaactcctgtccagctgctctatccag

SEQ ID NO: 33267 - DNA, 100 bp, Homo sapiens
aagcccaccgactttgaggatctggaggacggagaggacctgttcaccagcactgtctccaccctagaggtccagtggcattgcagagcacggatggttg

SEQ ID NO: 33268 - DNA, 83 bp, Homo sapiens
aaagaagatgcctcgaactaaacaaattcatcccagaaatctaagaggccttggacaagattcgctatgagagcctgacagac

SEQ ID NO: 33269 - DNA, 100 bp, Homo sapiens
ctcagcaaacaggacgggaagatttacagaagccgagacccacagctaatacttcagagagtcagagttgtgccagaagtctcttaatggcagatagaat

SEQ ID NO: 33270 - DNA, 82 bp, Homo sapiens
gccacaatcttcaatgagtaaacatattcctgtgagaagccctaccactgcaactgggacggctgcggctggaagtttgcgc

SEQ ID NO: 33271 - DNA, 90 bp, Homo sapiens
gcccggcgccgccactgccgcagccaggagatggttcgggcctagcggagccgggactggagaatagcctaacatggcagaccagagaca

SEQ ID NO: 33272 - DNA, 95 bp, Homo sapiens
agccacgtgcagacatctacaaccttcgatctcctgacgagctgcccttttcttgggcctgggggtgttgttctccttggtcagcattcccttgg

SEQ ID NO: 33273 - DNA, 80 bp, Homo sapiens
gtggaatgagagaaccgaggaacgaagaaacagacattcaacatgattgcatttgaagttcattttccagacactgaaag

SEQ ID NO: 33274 - DNA, 102 bp, Homo sapiens
aggattccaagtaactcttatttgaccttcacggcatggtgcaactcccacctgcggaaggcaggcacacagatcgagaacattgatgaggacttccgagac

SEQ ID NO: 33275 - DNA, 83 bp, Homo sapiens
ggctacttagaaaaggacggctccttatttcactccacattcacaatgacatcctttcaagaagtcccattgcagacttccaa

SEQ ID NO: 33276 - DNA, 80 bp, Homo sapiens
cgctggcaccccgaacgggttgcttcccccgctgcgagggtgaggtggctttgaccccgggttgcccggccagcacgacc

SEQ ID NO: 33277 - DNA, 100 bp, Homo sapiens
tcctcattctattcatgttgctttttgatggccatggcataaggaactctatcccaggaatacagctttgcattagtactcgcagaaggaagacagatat

SEQ ID NO: 33278 - DNA, 100 bp, Homo sapiens
atgttgagccgggcagtgtgcgggtcttgactccactaacggggacttctcatacggctttgaacttggaccttggtgcataagcaaatgtaactcagcg

SEQ ID NO: 33279 - DNA, 90 bp, Homo sapiens
caacattcttggcattacgcaggccagcaactcccagctcaatgcaatggagtctgcactatggaaacaacctgtcaatccagctcaagg

SEQ ID NO: 33280 - DNA, 100 bp, Homo sapiens
cacgctcagcgccgagggcgagatcgtgcagagtgcctggtgaagaatgtgatgggatcactagcatgtctgcggagagcggccctgggacgagattgag

SEQ ID NO: 33281 - DNA, 98 bp, Homo sapiens
cgattatgtccattgttctcttggagcagctggtcatcatggtgtcagttgtacccgaggcgttctcagcagcagcaagtacctgtggtggatttcca

SEQ ID NO: 33282 - DNA, 100 bp, Homo sapiens
cacccccagacctgacccttggggaaggatccacgtgccccccggctgcagcacggagctcaaccaccttggctaccagtttgtgcagagagtgtttgag

SEQ ID NO: 33283 - DNA, 100 bp, Homo sapiens
gcagccgatcttctgtgttctgcgtggggacggccgcctagagtggttcagccacaaggagactgcctcttcaaggtgtgccccatgaaccgctactcgg

SEQ ID NO: 33284 - DNA, 98 bp, Homo sapiens
cggagatgcctgacgcatctgtctgaggagcggtcagtgacgcgatggagcgggcaagagttgacgggcgccgacctgaaggactgcgtcagcaacaa

SEQ ID NO: 33285 - DNA, 83 bp, Homo sapiens
ttggcccttgttcccccaaatgtctgactctgactctcggactgagaaacgcaagggaaagcaggcaggatgggagagtcgcc

SEQ ID NO: 33286 - DNA, 82 bp, Homo sapiens
tggtttcttataaccctactccacgtctggttttaaaatcaaagatgggaaaatcggagaaaattgcccttccccatggcca

SEQ ID NO: 33287 - DNA, 78 bp, Homo sapiens
tcgcagtggtcgcttcttctccttgtgatcaacaaatacaagcgcagacgatttcagaaaaccaagaacctgctgaca

SEQ ID NO: 33288 - DNA, 101 bp, Homo sapiens
attcatctgtccagcatgactcatccccgggagtgttgaggcttcgtgggacacatatgcaacatgcctatgatttttacaagcctgatatgctatctgaa

SEQ ID NO: 33289 - DNA, 74 bp, Homo sapiens
ttgcctcatcttattcccctgagtattgaaaacaatcttaatcttaatcagggcacctttcacagccagcaggc

SEQ ID NO: 33290 - DNA, 75 bp, Homo sapiens
gcggaccctgccattccggaggagtttaaggaagaaatctctaaacgttttaaatcacatactgaccaacttgtg

SEQ ID NO: 33291 - DNA, 83 bp, Homo sapiens
gctgctgctgagtcagacaaggactctggcttttcaggtacagtatatcagaagtatgagccgatctttttccagtccattgg

SEQ ID NO: 33292 - DNA, 84 bp, Homo sapiens
tcagacagcatatttgagtcatttccttcgtacccacagtgcttcatgagaggttatctgggaacaaagcaggacaagtctggg

SEQ ID NO: 33293 - DNA, 92 bp, Homo sapiens
aggatcgacaactgattattcgtgatattttacaagatgtgcatgataagggcagcttttggcaaggagtctgaagttcttattgggaacct

SEQ ID NO: 33294 - DNA, 98 bp, Homo sapiens
cctgcccctgtccgggggatgactgattctcctccgccaggaggccatgtcgggtgaggacgctgaggtccgggcagtctctgaagatgtctccaatg

SEQ ID NO: 33295 - DNA, 75 bp, Homo sapiens
ctacgcgtccctttgggtttagcacgatgagctcaatcggcactggggtgactaataaaggtaccagaagaatat

SEQ ID NO: 33296 - DNA, 100 bp, Homo sapiens
gcacgcggatttggctggcgtcccgcgagcagtgaggagaatgaataccttccaagaccagagtggcagctccagtaatagagaaccccttttgaggtgt

SEQ ID NO: 33297 - DNA, 50 bp, Homo sapiens
aggactgccagaaaccaaatcatgtgttcagagcaacattgttttgttga

SEQ ID NO: 33298 - DNA, 100 bp, Homo sapiens
tgattcgtatctaagactctgggacactcctgaagtcgggaaatgccactgaggcggctcccagctgcgttggcgacatggccgacacccccagagatgc

SEQ ID NO: 33299 - DNA, 97 bp, Homo sapiens
cacagtcaccgtgaccaccatcagtgacctggacctctcgggggcccggctgctcgggctgaccccacctgagggctgtgggacagatgatgtctac

SEQ ID NO: 33300 - DNA, 100 bp, Homo sapiens
ttcctgtacagcctgcagaactaactccaacgtggagaacctacccccgcacatcatccgcctggtgtacaaggaggtgacgacactgaccgcagaccca

SEQ ID NO: 33301 - DNA, 88 bp, Homo sapiens
ttaaggattccaagtaactcttatttggagatgcgctctgtgctgcggaaggcgggctccccgcgcaaggcccgccgcgcgcgcctca

SEQ ID NO: 33302 - DNA, 90 bp, Homo sapiens
caaaaacaaccaggtttttcaacagagatcctaatttggggtacccactgtggaggcttaaggagcagctcctgaagcagcagcagcagc

SEQ ID NO: 33303 - DNA, 100 bp, Homo sapiens
ggcgagctgaggtggaggcaggctgcggcagacggcgacagtggcggcggcgccatggcagggcttgcaggccaaacaccagagcaccctagaaggttta

SEQ ID NO: 33304 - DNA, 74 bp, Homo sapiens
gatcaaaatgaagactgcctttacttaaacatctatgtgcccatggaagatgtctgagggaaaaggccatacca

SEQ ID NO: 33305 - DNA, 75 bp, Homo sapiens
gcgtgctttccacgacggtgacacgcttccctggattggctcccggagccagtcggcagcggtcaccccgtcatc

SEQ ID NO: 33306 - DNA, 87 bp, Homo sapiens
gccgtggggcttccgcctcgtgggcggcaaggacttcgagcagcctctcgccatttcccggagtgatcagcagctggactgtgcctt

SEQ ID NO: 33307 - DNA, 100 bp, Homo sapiens
cagcacctgcttccagactcagagtgtgagaaaaaaataaactcctatttgtttatggcaaggtccttatgtcgtcagaagatcgagaagctcaggagga

SEQ ID NO: 33308 - DNA, 82 bp, Homo sapiens
cagcctgcggagcctgtggggcagggccatgttctgcaacgatttaaaggaaaagtatgagaaaaggatcattattaaaggg

SEQ ID NO: 33309 - DNA, 152 bp, Homo sapiens
gtgaagtgtatccctaagaaggcgctgaagggcaaggaaagcagcatagagaatgagatagccgtcctgagaaagatggatgaaaattataacctcttgcctcacggagtcaatttccaagatgccatcttcccagacactcaagagaacag

SEQ ID NO: 33310 - DNA, 76 bp, Homo sapiens
agacttccttgcttctttggagaatgatatcaaaccaggccgttgctccagggagaactgcaaatatcttcatcca

SEQ ID NO: 33311 - DNA, 101 bp, Homo sapiens
ctaatggttggcaagttcctgcatatggaatgtatggccaggcatggaaccagcaaggatttaattgaaagcagagtgtaacaagggatatgtcaaggtaa

SEQ ID NO: 33312 - DNA, 98 bp, Homo sapiens
ggaccttcctcctgagattcagtgactcagaaattggcggcatcaccattgcttggaagtttgattctcgtatggtgctgggtgcagatgcagtgtgg

SEQ ID NO: 33313 - DNA, 149 bp, Homo sapiens
gtttccaaaaatcttaaccttcaaccatctggggaaaaggcaaaaatcccatctaccgcaactctcagttcgagagtaaaggtcccgtcaggaagcccaagtatgtggaaagccccagagtgcctggagatgcagttataatgccattc

SEQ ID NO: 33314 - DNA, 75 bp, Homo sapiens
aggcacgaggagcccaagaccatcactgacgagtttgagcagcaaggaatagtgtctggagccggtccagctgaa

SEQ ID NO: 33315 - DNA, 100 bp, Homo sapiens
ctcatggatgttcttcttcgagtatttgtagaaggaacatagataccctggagcgaatagccgggctggaacaggaggacttggtggaggcgcacggcac

SEQ ID NO: 33316 - DNA, 100 bp, Homo sapiens
ccagagagcggcggaaaggataagcctcgacttagaagctaccgagttaccctaagaaaggggtattccctcagcggatactacacccatccatttcaag

SEQ ID NO: 33317 - DNA, 74 bp, Homo sapiens
tcgggccgacgccatgaagatcaaagatgccaagaaaccctgaattgaatgatctggcacgggaccctccagca

SEQ ID NO: 33318 - DNA, 100 bp, Homo sapiens
ctccagcagccaagatggtgaagcagatcgagagcaaggacatcagcacagtatatcagatttttcctgatgaagtactgggttctggacagtttggaat

SEQ ID NO: 33319 - DNA, 83 bp, Homo sapiens
gccctgtcctgccggagccgctgtgtgcaaagttcctattgatggtccccccataaaggtcagtgcaccagatattctgaaac

SEQ ID NO: 33320 - DNA, 96 bp, Homo sapiens
cgcagcgtggattttaaccgaggcacggacaacatcaccgtgaggcagggggacacagccatcctcagtgaacagagtatctgtcaggcaagagct

SEQ ID NO: 33321 - DNA, 100 bp, Homo sapiens
tgcttaacagactcgcagggatcagagatttcaagcagggacgccaccttctaacataaaatgtttattggaggcttgagctgggatacaagcaaaaaag

SEQ ID NO: 33322 - DNA, 50 bp, Homo sapiens
tgataacaccctgtaacagctgaccagaagatcagctgccatgttacttg

SEQ ID NO: 33323 - DNA, 50 bp, Homo sapiens
gcggcggctgggcgggagccccagagtctcactctgtcccccaggctgga

SEQ ID NO: 33324 - DNA, 98 bp, Homo sapiens
tttcagctgcgccggccgcgaggccacggagagctcgccttggagagcccaggagcaggggagacatgctgtttgcagacaaggtcccaaagacagca

SEQ ID NO: 33325 - DNA, 75 bp, Homo sapiens
gagggctctgatccccccctgccggggagggcccagcgcatccgacagaggtggggctggtgtccgagcacttct

SEQ ID NO: 33326 - DNA, 82 bp, Homo sapiens
cgacaagccgctggcagccgcggatctcaccgccgctcaggcggaaggagagttttacatggaagtggcttacagaaacttg

SEQ ID NO: 33327 - DNA, 100 bp, Homo sapiens
agatgagtggacagttgaaacggttgaggccaccctggagaaatgtgccacgtgctcccagcccatcctggaccggatcctgcgggctatggggaaggcc

SEQ ID NO: 33328 - DNA, 124 bp, Homo sapiens
gaatttccgagtcagtgacggggactggatttgccctgacaaaaatactatactggcaattgctggagaagattttgcaattgttgcttctgatactcgattgagtgaagggttttcaattcat

SEQ ID NO: 33329 - DNA, 118 bp, Homo sapiens
ctgcagtctggagcgccccgatggaaatacactgtaagcacgacccgtttgcatccatgcatagtatagacacgtgtggccgtttacgctgtaggatcctcattcccactggctttga

SEQ ID NO: 33330 - DNA, 97 bp, Homo sapiens
gcggcggcggcggcggaggatgagcctgcagagcgcgcagtacctccggggttgagcattcatgatggtacctggaagtcagcaatttatggttttg

SEQ ID NO: 33331 - DNA, 100 bp, Homo sapiens
ccctgctccgcagcgacatcaccaagctggaggtggacgccatcgtcaacgccggattttttatcaagcagaaatgcatcgaacaacgagaatcaagatc

SEQ ID NO: 33332 - DNA, 74 bp, Homo sapiens
tgggcatcctcctgagactccggggtcagacgcccactccaggccttttccctcagaggagaccacagagaatg

SEQ ID NO: 33333 - DNA, 90 bp, Homo sapiens
catggtcaataaaagagagctcacagaagatggacttgaaaaaaactttgctgccaatactctggacccctgaatggttggacagtgatt

SEQ ID NO: 33334 - DNA, 89 bp, Homo sapiens
agccacacagtgtccagatacgagggggactcagaagaagatccttgacattgccaacatgctgggcttgtccaacacagtgatgcggc

SEQ ID NO: 33335 - DNA, 50 bp, Homo sapiens
gacactatgcaatcacccgaaagctctatcaaggcttgtcaagcagtgtg

SEQ ID NO: 33336 - DNA, 51 bp, Homo sapiens
cccaactggaattccacttacgggccctgggacatcttgctggggaggcag

SEQ ID NO: 33337 - DNA, 83 bp, Homo sapiens
ctggcaaaagcacaaggattctcgctgtgacagagacaacaccgagtatgagaagggacagatgatttctgctgaagattgtg

SEQ ID NO: 33338 - DNA, 74 bp, Homo sapiens
aaacaataaagaccggaagctgagtttttatccgcgccatgtcagaaccggctggggatgtccgtcagaaccca

SEQ ID NO: 33339 - DNA, 88 bp, Homo sapiens
ttgctcatttctgagtattgtctttatatcctgacactatgaatgctacttggatgcctcttaaggtgcagtcagcctcagtttccaa

SEQ ID NO: 33340 - DNA, 74 bp, Homo sapiens
aaaagctgccctgagacggtgtcccgccgaaagggccgttgctccagggagaactgcaaatatcttcatccacc

SEQ ID NO: 33341 - DNA, 80 bp, Homo sapiens
gccttaccagcaggggcgacaacagcatcagacctgcctagagctggaacgttacctccagagcgagccctgctatgttt

SEQ ID NO: 33342 - DNA, 85 bp, Homo sapiens
cagccagaagggctacgccagcggcgtcgagaggaccatcctgggtgctggccctgtgctggagatggagtctcgctctgtcgcc

SEQ ID NO: 33343 - DNA, 97 bp, Homo sapiens
cggaaccgcgattcggcgtgtcagatcgggagcggtgccgagaaaaatttccttactagatgacatttcatcgcaatgtccgatcgtttggggcaaa

SEQ ID NO: 33344 - DNA, 80 bp, Homo sapiens
cgccgggcgtggacggtgtggggcggtcccggccccgcagggactttgaacatgtcggggatcgccctcagcagactcgc

SEQ ID NO: 33345 - DNA, 75 bp, Homo sapiens
gagaaaagaagatctacaggagtttcattttggacacaagatgcatcataggcgagtattagtggaatggctaag

SEQ ID NO: 33346 - DNA, 83 bp, Homo sapiens
tttgacctcttcgatgtgcgagactttggaaagaaaatggacccaagtggggtcaaagtgctggaaacagcagaggacatcca

SEQ ID NO: 33347 - DNA, 100 bp, Homo sapiens
ctggtcctactacgcgtacgtggtggagctctgcgtgtgtttcagatcgggtggagcggcggcttcaggaactggagagagagatgcgcacagaaaggga

SEQ ID NO: 33348 - DNA, 73 bp, Homo sapiens
ggtagccctggacggcattcagtgttttggacactttgccaccatcaccttgaccttcatcgacaagaacgga

SEQ ID NO: 33349 - DNA, 75 bp, Homo sapiens
ccgtggggttcctcgcccagagcgtcttggcggaagaattttaaatcgtttctccaaagacattggacacttgga

SEQ ID NO: 33350 - DNA, 98 bp, Homo sapiens
ggtcttcatttgtgaatacatagttcccagtgacctgacagcagaggagcgtcaagaactggagaacatccgacggagaaaacaggagctgctggctg

SEQ ID NO: 33351 - DNA, 50 bp, Homo sapiens
gcccaggttcttcaaaagatgaaaatatatgcagatgatgaacattctta

SEQ ID NO: 33352 - DNA, 145 bp, Homo sapiens
gcgcttcgctgatggtgtcggtgagcgcgtttcccgcctgagcgcaactagcggcgggtcgtgggcacctccagggacagacatggctcagcggatgacaacacagctgctgctccttctagtgtgggtggctgtagtaggggag

SEQ ID NO: 33353 - DNA, 100 bp, Homo sapiens
cagggaagtctataagctttgcaacagaattacagagtatgatgtgtcagcttcctctggtgcaaccagcaagtcttccagtatgaatcccacagaaacc

SEQ ID NO: 33354 - DNA, 83 bp, Homo sapiens
cagccgatccagcctgcggagcctgtggggcaggtacttttacagcgggttgatgaactagagaagctattcaaagatcggga

SEQ ID NO: 33355 - DNA, 83 bp, Homo sapiens
tggaaaagaaggacgtggtgggaagagcaagagggagtctactcttcatcttgtgttgagacttcgtggtggtgctaagaaaa

SEQ ID NO: 33356 - DNA, 82 bp, Homo sapiens
tcgctgggagagaggtacctctccttttccctctccctttccctaaggcgccatgtcagaaccggctggggatgtccgtcag

SEQ ID NO: 33357 - DNA, 100 bp, Homo sapiens
gccggggcgccgctggcaggagcgcttggggatcctccaagggatcatggcccaagttgcaatgtccaccctccccgttgaagatgaggagtcctcggag

SEQ ID NO: 33358 - DNA, 76 bp, Homo sapiens
ctcaacaggatgatccagaggctgcgggcagagatcgagaacatcaagaagcaggaccctgatgctcccataagac

SEQ ID NO: 33359 - DNA, 82 bp, Homo sapiens
atcagtttctggaagaagaagaagagcatgatcggcatgtccaccaaggcaggattgtgcagactggtgcttaaaatggaag

SEQ ID NO: 33360 - DNA, 75 bp, Homo sapiens
cgtttgttcaggaaccaccagtgacagaagtaaccagagagcacagagaaatgctggtgaaactggccaaacaga

SEQ ID NO: 33361 - DNA, 75 bp, Homo sapiens
aagacagtccctggatcaccgacagcacagacagaatccctgctaccagtctgtgcagacttttgcagacaaatc

SEQ ID NO: 33362 - DNA, 100 bp, Homo sapiens
attctcaggagcacttggaaagattttactgtaacccagaaaatgatagaatgagaatgaagtatgggtcgtccttggtggaaggaaccatgaactggca

SEQ ID NO: 33363 - DNA, 75 bp, Homo sapiens
atgaggaagtctgggggccgagaccacacagagacaagaggagcagcagcggcaccgcccctcaccctggagggt

SEQ ID NO: 33364 - DNA, 87 bp, Homo sapiens
tgaagacagctcaccccgtgggacactggcaagcagtggagatgattattttcgaaataccagtatttcgactccagggggatgttc

SEQ ID NO: 33365 - DNA, 98 bp, Homo sapiens
ggccgaccaggtgctgcccccaggctggcaggaggagcaggccatcacctgggcaaggtgggaaactttagatagcttcatgcaacatgatgttcagg

SEQ ID NO: 33366 - DNA, 100 bp, Homo sapiens
caggactccctggaagcctagaaatgacttttgtgaatgatgtaaggattccggaacagacttatatcaccttgaaacttgaagataagctgagatttgg

SEQ ID NO: 33367 - DNA, 95 bp, Homo sapiens
ggctggagtaaaagggacattgggaagattagttggaatttttgagattcatgatgttgctatcaaaagttgagaaattgtcagaagaaatcatg

SEQ ID NO: 33368 - DNA, 90 bp, Homo sapiens
tggagagaccccgcggctgggcgttcatctaccacgctttcgtatacctgatggatccagacacattcactttcaactttaataatgacc

SEQ ID NO: 33369 - DNA, 90 bp, Homo sapiens
ccgccaagaagcccatcatcggcatttattaatacagcaaaagaaatttatgaaaaaattcaagaaggagtctttgacattaataatgag

SEQ ID NO: 33370 - DNA, 97 bp, Homo sapiens
acccagccgcttctggggcctcctggcggcaggcacaaatcctgaagagcccgtgggcgtggactgctcatctgtaaagaaagtggagacatgacct

SEQ ID NO: 33371 - DNA, 100 bp, Homo sapiens
agtcctgggcccagagccgagatgagcagaacctgctgcagcagaagaggcattgaatgccccagaggagcccgaaacctcccaggcttggtgcaggaag

SEQ ID NO: 33372 - DNA, 100 bp, Homo sapiens
tgtgaccccatatatgattttctttaaggatggtttagaaatggaaaaatgtctacttgaaggaaattttgccaaagaagtgagccatgaaatggatgga

SEQ ID NO: 33373 - DNA, 75 bp, Homo sapiens
cggagctgtggtcgctgctgtgatgtgtaggaggaagagttcaggtggatgaggaagagctcaggaagcagcggg

SEQ ID NO: 33374 - DNA, 100 bp, Homo sapiens
tccgccactgcactgcttctaccctgccaaagagcttgctaaagcccttttgtgctgcactacttaaggagttaggacctggaaatgtacagaaagaagt

SEQ ID NO: 33375 - DNA, 100 bp, Homo sapiens
caggacttgagtaacagcaacatggattgccacccaggacgatgagcggctgagatggagacgtctgcctcagccactgcctccgagaagcaagaagcca

SEQ ID NO: 33376 - DNA, 83 bp, Homo sapiens
gaggaactcaatcaaaccagtattcttttcacacagacaggtgctctagttcacagctataggggaacaggtggaatatttga

SEQ ID NO: 33377 - DNA, 90 bp, Homo sapiens
attcagtggctaaatggctccctgattcatggaccttgcctcatagtattcgatcagattcagaagatatctgtttatttacgaaggatg

SEQ ID NO: 33378 - DNA, 82 bp, Homo sapiens
taataatgacaatctcctcagggaaggggcagcacaaccctgtattcagtggatcagctggcaccacccaaatagataaatt

SEQ ID NO: 33379 - DNA, 100 bp, Homo sapiens
aggagccatggactgcagcctcgtgcggacgctcgtgcacagatacaacctaaaggcagacccagaagagctttttacaaaactagagaaaattgggaag

SEQ ID NO: 33380 - DNA, 83 bp, Homo sapiens
ggccgggcaatgcctcgcgggcgcaatgaatccgcggcaggatacttttgtggaactctatgggaacaatgcagcagccgaga

SEQ ID NO: 33381 - DNA, 98 bp, Homo sapiens
ctgaaaaagaggaaggcttatcaagccctcaaagccacccaggcaaagcaggcacttttggcaaagaaggaggttttcctttggaatatggataaata

SEQ ID NO: 33382 - DNA, 100 bp, Homo sapiens
ccagtcaataggaagtacgagtcaaagccttctagacaagctcagtggaatctgaagggcccaccccatggaggaatgctgggtgacagagatagccaat

SEQ ID NO: 33383 - DNA, 88 bp, Homo sapiens
gcaacttcgcggtggtcaagcgggccacgcacctcgtcaccaaggccaaggtgggatgtgtgtgggctgaaattccgagctgcggttg

SEQ ID NO: 33384 - DNA, 76 bp, Homo sapiens
gacactccacgccacccggggggctgcactcctctcttggctgtttggggctcagctaagtgaccacacaggagag

SEQ ID NO: 33385 - DNA, 100 bp, Homo sapiens
tggtcggaggtctcgacacagctgggcaaaccagtccagctacgggggcccagccagccagcagctgagtgggggttacggaggcggctacggtggccag

SEQ ID NO: 33386 - DNA, 97 bp, Homo sapiens
gctggatttttttcgggtagtggaaaaccagaaggacagaataacgggctcccagattcacaagccccaccaagaggatcaccccaggaacgcttgg

SEQ ID NO: 33387 - DNA, 97 bp, Homo sapiens
acgagtctcagtccgaccgggctagctttggcgaggggacggagccggatcaggagccgccgccgccatatcagtggtattcatgggtagtttgaaa

SEQ ID NO: 33388 - DNA, 88 bp, Homo sapiens
tggtagttccatgctgtctgttcagacttcagcttggtgtgaccaagaatatggcccaggtgaccaaagccctggacaaggccctgag

SEQ ID NO: 33389 - DNA, 100 bp, Homo sapiens
ccaatgcctgattgacggaatgtgcaaagtagcaattaactggtctggagggtggcatcatgcaaagaagtggataattactgtaccttcctcatggaaa

SEQ ID NO: 33390 - DNA, 75 bp, Homo sapiens
cgattctggagtacctcactgcagagtgtgtctctatgcatggagtaagaaagaaaccatcctacaatagcacca

SEQ ID NO: 33391 - DNA, 100 bp, Homo sapiens
gtgtcaccatgctattatgcatagaaagtatatttgccttccctccatgatctccaacactatccgataaagtagaagcaactgaggtaccgtgaaagag

SEQ ID NO: 33392 - DNA, 89 bp, Homo sapiens
cagcctcgcgcccgccgccgcccgtccccaggattccatatggctctcatatcattccattccatctctgccaagatttggataccgca

SEQ ID NO: 33393 - DNA, 119 bp, Homo sapiens
agggatctactagaagtcacatctggtttgatttctgatgacattatcaacatgagaaatgatctgtaccagtgtttcaacaaaagacagccagaagacaatctgatgatgacaagttc

SEQ ID NO: 33394 - DNA, 98 bp, Homo sapiens
ttaacgaataccagttcagcgtggaccaacttatggaactggccgggctgagctgtgctacagccatcgccaagaccatctgcctgtgggacatcagt

SEQ ID NO: 33395 - DNA, 80 bp, Homo sapiens
cttcttcgtactctaattgatccagagaacatgctggctacaactaatgtgttggagcgggccggagagaagtagagtgg

SEQ ID NO: 33396 - DNA, 96 bp, Homo sapiens
gccttgttgccatgggatacctgttcatgtgttttggaggcaccgtctctccctgggaccaggaattacagtttgaaaggctgacccgagagctgg

SEQ ID NO: 33397 - DNA, 100 bp, Homo sapiens
aaaactgcagccatcttcacagcaggttctactgtttctaaggcttatggtgcttcaaagacatttggaaaagctgcaggtcccagcctgtcacacactt

SEQ ID NO: 33398 - DNA, 90 bp, Homo sapiens
acttcccagccatctcactgtacaagagctgcacggatctcccagccatccagccccggctagtggcggtcagcaaaaccaaacctgcag

SEQ ID NO: 33399 - DNA, 100 bp, Homo sapiens
agaaagccatcaccactcaaaactgtaatactaaatgtgttaccataccaaggttatcctgaatacatgtctaacaattttccttgcaacgttagctgtt

SEQ ID NO: 33400 - DNA, 50 bp, Homo sapiens
cgcagccgccaacgaggagcgcaaaaagtaatgcttcttctgaattatct

SEQ ID NO: 33401 - DNA, 100 bp, Homo sapiens
tcccagcactttgggaagctgaggtgggcagcctcacaaaaggagaaagacctctgatgcaaatgaaactgaagatcatttggaatctttaatatgtaaa

SEQ ID NO: 33402 - DNA, 101 bp, Homo sapiens
ccccctcctcttcattccgcagcagcactccgacagtggtctggaactgaaagtgatgcgtatttctgagttatgcctgtatttaagaagctgagtgaaac

SEQ ID NO: 33403 - DNA, 99 bp, Homo sapiens
tgagagtggaaccaacggattcaaggagtgtttttgggcctaggcctgagtggaatcattcctaccttgcactatgtcatctcggaggggttccttaag

SEQ ID NO: 33404 - DNA, 100 bp, Homo sapiens
acctacatccttcccaagaatgtgcttaagaagttcatctgcatatctgaccttcgggcccaagtatcttggagatggccgcttccatctggagtctgtc

SEQ ID NO: 33405 - DNA, 100 bp, Homo sapiens
aaacccttgggtgcagatcatgatgtttaagaacatgacgccgtcacccttcctgcgattctacttaggtgtcatggagaaactccagctgggcccagag

SEQ ID NO: 33406 - DNA, 83 bp, Homo sapiens
gaacaatcagtgatgaagatgaatcgggtgtcttttatgaataatcaaaagcagcaaaagccaacgctatcaggccagcgttt

SEQ ID NO: 33407 - DNA, 51 bp, Homo sapiens
ctgccctgacccttacatccagcgtagccggatcgagctgggagatgtgac

SEQ ID NO: 33408 - DNA, 110 bp, Homo sapiens
ctgcggagaattggagatggggaccgccctggacatcaagattaaaagagcgaataaagtttatcacgccggggaatgaatctgaagtctgctgcagtaaaacacagaag

SEQ ID NO: 33409 - DNA, 75 bp, Homo sapiens
ccggagtgagcggagtagcgagtcggcaacccggaggtgtgactgaagaaatatcaaatgtttcctagtaagaca

SEQ ID NO: 33410 - DNA, 90 bp, Homo sapiens
cgagcggtggtttggacgccggcggagacgcgggcgaggcacgtgtggttctcaaatataggcattctgatgggaacttgtgtgttaaag

SEQ ID NO: 33411 - DNA, 87 bp, Homo sapiens
aagaagtgccttttgcctcccaccgtgattctgaggcctccccaaccatgtgcaattacatttatgcagtgtgtgattctttctaaa

SEQ ID NO: 33412 - DNA, 80 bp, Homo sapiens
cgctgcagctgcacttgctccgggcgctggcgcaagagagatggaaccatgtaaccaccacgaccaagaggccagtaacc

SEQ ID NO: 33413 - DNA, 82 bp, Homo sapiens
caggtcttcacccaggccctggagtgcatgcgcagtaagactttgaccccgacgcaggcttcagtgattgccgcggatcaga

SEQ ID NO: 33414 - DNA, 97 bp, Homo sapiens
tgacctgttcctacaccttgcatcatgccagctttgtcaacgggatctgggagtgacactggaagctgttttaggttatgtgaaagagatgtttcct

SEQ ID NO: 33415 - DNA, 99 bp, Homo sapiens
cagcaggtcggaggaaacagccagaccgagagcagcctgccggggcggaggtctcggtccagctcgacttccagctcaggctccagcaccagcactggc

SEQ ID NO: 33416 - DNA, 75 bp, Homo sapiens
cttcgggggacacttcagaaagatcggatacggactcagaggaagacgaagaattcctgaaggacgagtggcccg

SEQ ID NO: 33417 - DNA, 100 bp, Homo sapiens
gtggcaatgatgattgcagaattcacatatttgctcaacaaaatgatcagaaccaaaaacttttgctagaaaatcagcttttacgagagaaaactcatgg

SEQ ID NO: 33418 - DNA, 74 bp, Homo sapiens
tgcagctggagcagtggcgtttggaggagactcggtctcctctgagcctccggcctccataagacccaaaacag

SEQ ID NO: 33419 - DNA, 100 bp, Homo sapiens
gtcgataagctggaactgatggaaacccagcgtttgctggcagaaccagttcctggcatcaaagccgaaccagatgagagcaacgcccgttattttcatg

SEQ ID NO: 33420 - DNA, 83 bp, Homo sapiens
cctgcagtacctgcagaaggtctctggagacatcttcagcagaaaggacccaggagcgataacagtaaatcaaataagatatt

SEQ ID NO: 33421 - DNA, 75 bp, Homo sapiens
tggggatgagtatgcggaggacagctctgatgaggagaacatccagtcatggataaaaatgagctggttcagaag

SEQ ID NO: 33422 - DNA, 75 bp, Homo sapiens
gtcgaagtctgtttggacaaaaatgccaaaggatcgccccaggacattcgacatgcactcactggagagttcact

SEQ ID NO: 33423 - DNA, 83 bp, Homo sapiens
ccgaggcaccgaggcactcagaggagggccgagaactactggtggcgtggccagaacacacggacgctgtgtgtggggccctt

SEQ ID NO: 33424 - DNA, 110 bp, Homo sapiens
gaagcttttctacagtaatcctcgcttccatgggctccgggactgactgcattgcacagatgatggatatttacgtatgtttgaaacgaccatcctggatggtggacaat

SEQ ID NO: 33425 - DNA, 90 bp, Homo sapiens
atgcctgtaggtttaattgcaggtgccaggcaaaatgggcatatcaagtttttgaccaaaggagataataatgcggttgatgaccgaggc

SEQ ID NO: 33426 - DNA, 90 bp, Homo sapiens
gcagccaccggcacggggcgggcagcggctgcctgggcactatggaggtgaagagcaagatcccatgagctgcgttccaaggtggtttcc

SEQ ID NO: 33427 - DNA, 75 bp, Homo sapiens
ctggagttcacgactctgagtgctggacatggatttgattgacatactttggaggcaagatatagatcttggagt

SEQ ID NO: 33428 - DNA, 75 bp, Homo sapiens
aagtgcagaggtttttttctggtcctagcagaagatgtgactcagactgcctctgggtggggctggctggcccac

SEQ ID NO: 33429 - DNA, 90 bp, Homo sapiens
ctggtcgccgagattgtactggtcgacgacttcagtgatcgagagccagtcttggtgctctgtgttcacctggttcatctgaggagctgc

SEQ ID NO: 33430 - DNA, 82 bp, Homo sapiens
tgagtcatgtggcagtggaaaatgcgctcgggctggaccagcagcaagagtgagccatggagctacgtgtggggaacaagta

SEQ ID NO: 33431 - DNA, 142 bp, Homo sapiens
gctcaactcccagaagaagtactttggcagaagcctggaactctacagggagctggacctcaacagaccggacatggacctactccttctccggagccttcctgttctccatgggcttcctcgtcgcagtactctgctacct

SEQ ID NO: 33432 - DNA, 82 bp, Homo sapiens
ggacgttcccttcacggagaaagattttgagtgtggacactgccagcggctgcagccgacttggaatgacctgggagacaaa

SEQ ID NO: 33433 - DNA, 82 bp, Homo sapiens
aaatggctgccgaaaacaagccggaaggtcagtcattggcaccatgaactggaataaaggtggtcctggcactaagcgagga

SEQ ID NO: 33434 - DNA, 99 bp, Homo sapiens
ttgacaattatcggcgctgtgtcagcagaaggaagaggcccagcagaagggactcgctgagccaccccccgccccactccatgttggctgtgctctcag

SEQ ID NO: 33435 - DNA, 82 bp, Homo sapiens
tacaaggacacctgcactgcagcttacagcgccatcatgaccgggtcctataacaacttcttcaggatgtttgatagagaca

SEQ ID NO: 33436 - DNA, 75 bp, Homo sapiens
ggccaaggaaactcccagggcccgcccaggacccccaagccgccgcggacgcagcagaaaaatatggctcaggag

SEQ ID NO: 33437 - DNA, 101 bp, Homo sapiens
tttgaaggaggctgcctggctgagctgatcggatcacctagagactggaaatgctttctggattttagtccatggagaacagaatgaaatggccagattga

SEQ ID NO: 33438 - DNA, 115 bp, Homo sapiens
gagaatggttaacagaactttttcaacaaagcaaggtcaatatgcagaaaatgctcccagttggaagttcatgaggctaagcctgtgccagaaaatcacccacagtgggatacag

SEQ ID NO: 33439 - DNA, 98 bp, Homo sapiens
ctggtgacatcaacctgcaggatgagtttgaagatggcatcctggacacttgcctgtatgtgatggacagagcacaaatggacctctctggaagaggg

SEQ ID NO: 33440 - DNA, 96 bp, Homo sapiens
agcttttccagggcgatgccttccatcagtcggatacacacatattcatcatcatgggtgcatcgtattcctgtgcacacaatatttgacagctgc

SEQ ID NO: 33441 - DNA, 83 bp, Homo sapiens
ccgggatgggatccacggacccctgctgtccatcttgagtggcctcttcccacccagtggtggctctgccttcatcctgggcc

SEQ ID NO: 33442 - DNA, 100 bp, Homo sapiens
ccggtgccgcagctgcgatggccgtggccgtggggagaccgtctcttagaccatgctcagcctccaagcagccttgtcatcgacaaagaatctgaagttt

SEQ ID NO: 33443 - DNA, 82 bp, Homo sapiens
ttcgagggcagccggcgggaggaacgctcactgtcagcgcctggaaacttgctcacattacctaggaacagtacgatttggg

SEQ ID NO: 33444 - DNA, 98 bp, Homo sapiens
aaaaagaagacttcaagcgtttgggatccacaagaaggtgctgtggtggttctccctgcagactctcagcagcgtttggttcagcttgtatatttcct

SEQ ID NO: 33445 - DNA, 50 bp, Homo sapiens
aagagggatccttcacccgtgtctggatcgaatcatcaatttagttgttg

SEQ ID NO: 33446 - DNA, 83 bp, Homo sapiens
gaccttccgcaagttcacctaccgcggcgtggacctcgaccagctgctggacatgtcctagtgagaagccctaccactgcaac

SEQ ID NO: 33447 - DNA, 100 bp, Homo sapiens
gccgcgggggccaccacactggcccaaatatttcctgcaggctcgttatcggaaagagcaaacattgcttaagcaactgccttgcattccattggtagaa

SEQ ID NO: 33448 - DNA, 75 bp, Homo sapiens
gcggcgacttccctagggagctgctcaagtgcagagcagagcgggcggaggaccccgggcgcgggcgcggacggc

SEQ ID NO: 33449 - DNA, 82 bp, Homo sapiens
cacacagatgtggtgaaatgtacccagttagtaagagcttcttggacacttaatgattgttggcaagaaatgtgctgctgat

SEQ ID NO: 33450 - DNA, 100 bp, Homo sapiens
gagccaaaatgagttccagtgaagttggtccttttgtctccaaaataagagcagtgattaacgatattgatgctgaagaataccagcctcctatatggaa

SEQ ID NO: 33451 - DNA, 99 bp, Homo sapiens
aaacagaaccttccaaatttccttttccaactaagcctgcacagacaaggagttgcggaaccttgcctcccggctgaaggattggtttggagctctcca

SEQ ID NO: 33452 - DNA, 100 bp, Homo sapiens
ctgaccacttcctgtgtctgtgggagcactgtgagcaagatggaaagttgccttttgttcctccggaggaagaatttattatgggagtttccaagtatgg

SEQ ID NO: 33453 - DNA, 100 bp, Homo sapiens
ccatgatcgaaattagccggacccaggatgaagaggttggagatgggaccacatcagtaattattcttgattctcagagagagttcaacagcaggccagg

SEQ ID NO: 33454 - DNA, 88 bp, Homo sapiens
ctcacttcctgctgtatccccagacccaaagattgcaaacagtctatgcgcagtgaggacgaggccaagttcccaacgatgaaccgcc

SEQ ID NO: 33455 - DNA, 75 bp, Homo sapiens
gtggaaagtctgcactctttcaactggcagaggattggagaatccatgttgaccaaatgcaccagcacagaagtg

SEQ ID NO: 33456 - DNA, 82 bp, Homo sapiens
cctcggagcgcggtccctgtattggtctcctgctcctagagaggctgaggggatctggcggtggagcgctaggatcagacgc

SEQ ID NO: 33457 - DNA, 90 bp, Homo sapiens
aatgaaatctcgaaggggacctcatgtccctgtgggacacaatgcccccaagtcatccgtccttggctcaggatttggagagcttgcacc

SEQ ID NO: 33458 - DNA, 59 bp, Homo sapiens
ggaattagcctgcaacatgaagctttaccaacagggacgcttatgtcaactgggcagtg

SEQ ID NO: 33459 - DNA, 90 bp, Homo sapiens
tgagacagaagcagtgaccgtgcccacgccaagagtcattcttatagaagagcatcagaggaagataaaaaagaatcctcaatgtcaggc

SEQ ID NO: 33460 - DNA, 75 bp, Homo sapiens
gaaaagtcgcagcgagctggagccgccggaggctcatgacttgcagagtgaacttgataaaggaaaagaagatac

SEQ ID NO: 33461 - DNA, 60 bp, Homo sapiens
accctctacaatgactgcaccaacgcaagacccctctcctggtggcggctgctgccaacc

SEQ ID NO: 33462 - DNA, 100 bp, Homo sapiens
ttcaccaaataagctatatactttggttacctatgtacctgttaccactttcaaaaagatggagtttcactgtgtcagccaggatggtctcgatctcctg

SEQ ID NO: 33463 - DNA, 75 bp, Homo sapiens
cagattcgcagtggtcgcttcttctccttgtgagtgttgtggggccctagaatactacgacaaagcctttgaccg

SEQ ID NO: 33464 - DNA, 98 bp, Homo sapiens
acctcctcgaagtcatcccagtatgcagacaatctctttgaacatgaattgggggctctcaatatggctgcattactacgaaaagaagaaagagcaag

SEQ ID NO: 33465 - DNA, 103 bp, Homo sapiens
cagcttccagacatcgccctggatgtcttcgcgctctggctggtctcccctctgctggcattttgaaagcgaagcagaagccgtagaatcagcggcgagcctg

SEQ ID NO: 33466 - DNA, 90 bp, Homo sapiens
ttgaagattctacagataaatcagggcaaaattattagaaagtgaagcagtgaatgagaaccttcgaaaaaacttgacaagagccacagc

SEQ ID NO: 33467 - DNA, 82 bp, Homo sapiens
ctagtctgaccctccgccaggcaaaaggaagcttgataaagatgacatggtatacatggaagcatatgataaattgttggag

SEQ ID NO: 33468 - DNA, 76 bp, Homo sapiens
ttatctgctcccaaaacagacgtacagccatagtgctgaagttcaagttcgtcttcaattcttgacttgtgtattt

SEQ ID NO: 33469 - DNA, 51 bp, Homo sapiens
gcgccgcagggagtttgtgatgcagatggagtcttactctgtcgcccaggc

SEQ ID NO: 33470 - DNA, 100 bp, Homo sapiens
ctctgtcaaatgaagaacactttcaagaaccagcacccagtcagcttgaagagtttcaaatggaccctaccactgagaaatcaagatggcagtctactat

SEQ ID NO: 33471 - DNA, 90 bp, Homo sapiens
caattctttggagaaaaatggatgaagaacgccaatctgaattgccaacgcaaagcaaagcgagcttccccagtattctcagtgacccag

SEQ ID NO: 33472 - DNA, 100 bp, Homo sapiens
cccaattcctacttcatggatgtgaaatgcccagccaatggagatcttcgtggatgatgagacgaagttgacgctgcatgggttgcagcagtactacgtg

SEQ ID NO: 33473 - DNA, 100 bp, Homo sapiens
gccactgcctgagacgggcagtattgaagctcctgggcaacgtgctggtctgtgtgctggcccatcactttggcaaagaattcaccccaccagtgcaggc

SEQ ID NO: 33474 - DNA, 82 bp, Homo sapiens
gaaatgccctcacaccagacctacggagggagctggaaattcctgacgttcattgatctgggtcctgcagttctgagcttgg

SEQ ID NO: 33475 - DNA, 100 bp, Homo sapiens
ctcacagggattgagtgggccccaaacggctgtgtgctggcagtgtgggacacctgcttggaggtggcttcccacacttctgactcggacgttccttccg

SEQ ID NO: 33476 - DNA, 83 bp, Homo sapiens
gaaaaagctaaggatatctttattgaagctcacctttgtctaaataattacagaaacttcgtggcaaattgagatcaatgagg

SEQ ID NO: 33477 - DNA, 95 bp, Homo sapiens
aaagatctgacccctcagtccccaagattgtggcatttgaaactgtccattcaatggatggttcaggaagatttgactgaagagaaaaaaaggga

SEQ ID NO: 33478 - DNA, 75 bp, Homo sapiens
cattggaccctcctcccaactgtaggactcagcccaaaaccatgtttgcccaagttgaatctgatgatgaggaag

SEQ ID NO: 33479 - DNA, 83 bp, Homo sapiens
aagggcgccagccctccccgcctctgcgtctttgctcccggagcgcttgaaggagctgcggtctggccgggaccttcaacagt

SEQ ID NO: 33480 - DNA, 83 bp, Homo sapiens
ctccagctcagactccagctcagactcagacttcgagccatcccagaaccacagccaagaacatccagtcatggataaaaatg

SEQ ID NO: 33481 - DNA, 80 bp, Homo sapiens
gagacaggaggcagtagccaaacacccagaatgcaggctcaacagtaccagcagcagcgtcgaaaatttgcagctgcctt

SEQ ID NO: 33482 - DNA, 90 bp, Homo sapiens
ccgagatgacgggctttctgctgccgcccgcaagcagagcttgggtgatggttgcagttttccaactcgccttgtggggatggatccaga

SEQ ID NO: 33483 - DNA, 100 bp, Homo sapiens
acagtaccagaggtggggactgttgttggaggaacactttccaggctgctttgctggctctgcaagaaaatggactagacgcaactacagtgaaacaaga

SEQ ID NO: 33484 - DNA, 100 bp, Homo sapiens
cagaccctggagcctcagttggaagcagccgatccagcctgcggagcctgtggggcaggaaccatcactgttgctggaggcacctgacaaatcctagcga

SEQ ID NO: 33485 - DNA, 101 bp, Homo sapiens
atatgaaacctctggattcaccaggaagaagaaaaagagatacaaatgcaccagaaagttttaaaggcacagtgcacgaatggctttgacctggatcgcca

SEQ ID NO: 33486 - DNA, 76 bp, Homo sapiens
ggaactgcagtgctgcatcgactggacccatgtcactgaccccctcataggtagctcagtggcatttctgagcagg

SEQ ID NO: 33487 - DNA, 82 bp, Homo sapiens
ggccctggtggggattgacagccacgggaagaaataaggatctggcatgtcaacacaaacataggaagttgaggcagtcaaa

SEQ ID NO: 33488 - DNA, 75 bp, Homo sapiens
gcggcagaagccgagttcaacatcctcctggccaccgactcctacaagccctttctaaggcacaaaatgatgtga

SEQ ID NO: 33489 - DNA, 100 bp, Homo sapiens
ggagccaggggcccgagggcggggaccggcggcgctggaggagcgaggcagctgtactaggactgggaacgggttatggaggttttgatgactatggtgg

SEQ ID NO: 33490 - DNA, 75 bp, Homo sapiens
cctggctccacgccctgctgggtcctacctgtcagagccccaagctcctgacccctgaggattaccagcgatttc

SEQ ID NO: 33491 - DNA, 125 bp, Homo sapiens
acgtgtgtagcagtaaataacaagtatcgactaatggcatttggctgtgtgagggatgacctttcatcacttggaatatgatcagagaagcagaatttgcctagctcattcagaagaacatcgta

SEQ ID NO: 33492 - DNA, 50 bp, Homo sapiens
gccatggccgacgaaaagcccaaggtgaaatgacaatggatgctctgttg

SEQ ID NO: 33493 - DNA, 98 bp, Homo sapiens
ctcgtagtgtgcagtgcctgtaaccaggtcgtcaagccacaggttttccagtcgcactgcggtaccaaaggcttagaatgttctccttcaactcccac

SEQ ID NO: 33494 - DNA, 75 bp, Homo sapiens
ggtgtaccagctgcatgccctgcagcccaactccaccaagacagtgaagccgagaatggcaggaggtctccctgt

SEQ ID NO: 33495 - DNA, 51 bp, Homo sapiens
gcagtacctgaccactctctcccaggaggagatgttaaagtaacccatctt

SEQ ID NO: 33496 - DNA, 74 bp, Homo sapiens
ccggccgccatggagcagccgccggcgcctaagaggacaagaggaccctgccttggtgtgagagtgagggaaga

SEQ ID NO: 33497 - DNA, 100 bp, Homo sapiens
ccgaagaggacagagcccgcggccgcgccgagcggggtgggtcatgataactgggtacgtggagttctgttccattctggggggaagtttattttgagtt

SEQ ID NO: 33498 - DNA, 87 bp, Homo sapiens
aaagggggctggacagacagtgacgattatagcacaatatcaacctgaaggataaaagaatcagagtgtctcaacccttgacaagag

SEQ ID NO: 33499 - DNA, 87 bp, Homo sapiens
gtgtagagaggaccccgggacatctgaaagccaggaaatggttgctaggaagaggctcaatgtttgtgttttcaccagatcagtttc

SEQ ID NO: 33500 - DNA, 74 bp, Homo sapiens
tacagaaagagtcaacagcagtggcaacagggcgtcttactactgcaggcactaacaagaagcaatggtgcaat

SEQ ID NO: 33501 - DNA, 75 bp, Homo sapiens
gtgcggtctgccaggagctgcggccccgtccggcccgggctgagctgccatcagtcatgctcttaaacggggact

SEQ ID NO: 33502 - DNA, 100 bp, Homo sapiens
gctgctgctacccttgctgctgctgctgcctctgctgaatgtggagcctgctggggccacactgatccgaaaattacttggggcacacagcaaaaaatgc

SEQ ID NO: 33503 - DNA, 90 bp, Homo sapiens
ctggaggaatcctgcagccagccttgcccagagccagtaaaactcatcgttaccaaatatggacaacagtagtagactggatacaccccg

SEQ ID NO: 33504 - DNA, 82 bp, Homo sapiens
tgacaagtgcagacagcagcttcatgatattactgtaccgttagaagtttttgaatgaaatcgtggacactttgggtgaagg

SEQ ID NO: 33505 - DNA, 75 bp, Homo sapiens
atgagattctgaactccccagagaaagcctgctctcttgcaaagacagaactggaagaggaggcaacagtatttg

SEQ ID NO: 33506 - DNA, 100 bp, Homo sapiens
cctatggcagatttgaaaattcacccttgtagagtcattcctgcctttgagcggactcccttttaaggttcacggacactgcatgtgcaggcataacacc

SEQ ID NO: 33507 - DNA, 114 bp, Homo sapiens
tccccaccaccaccatctccatcacccaccaacaacaccacaataatccacagccaaggtaaacactacacgtgaagagtggtgaaagggaacattgattactgaagtgccctg

SEQ ID NO: 33508 - DNA, 51 bp, Homo sapiens
cgccgcgggacctctccgggccatggaataccctctaccatctgctttggt

SEQ ID NO: 33509 - DNA, 100 bp, Homo sapiens
tggaaattcccagaggactttggagaccagtgatggaatggggagaagatattaaagcagtttcaaaagatgaagcagtgatgttggtgaatcatcaggc

SEQ ID NO: 33510 - DNA, 85 bp, Homo sapiens
cggagcgcggtccctgtattggtctcctgctcctagagaagctccaccatgaggcgaggtggatggaggaagcgagctgaaaatg

SEQ ID NO: 33511 - DNA, 100 bp, Homo sapiens
agatatagttggcaacctcactgagttagaatcagagctgtgggatgctgccagtggctcgttgctccaggacctacagaccgatcagcctgtgttggac

SEQ ID NO: 33512 - DNA, 100 bp, Homo sapiens
cgccctgcaccgcgcctcgcaaaagactctgacctgtttttgttggacacccgtgtagtatgggcctcagaagaaggctggctggaatttgacatcacgg

SEQ ID NO: 33513 - DNA, 99 bp, Homo sapiens
attcagacctctctgcggccccaagtgttcgtggattggctaaaagatgtgtgtgaaaagaataagtggagtcacaagaattcccctatcatctggaga

SEQ ID NO: 33514 - DNA, 75 bp, Homo sapiens
caccatcaacagatgcccctgataaaggatacgttgatacaagaaaggtggctacaagataaccttactttaaga

SEQ ID NO: 33515 - DNA, 90 bp, Homo sapiens
gctcaggccagttcgtcggctgccagcaacaatcaccagttctcagagtacattcacgcccaggtggcatctggcaaagggaaactcgct

SEQ ID NO: 33516 - DNA, 75 bp, Homo sapiens
tggaacatacgggcaagtttataaggtgatggaactgtactggaacaatgggagaagctggtagcttataggaag

SEQ ID NO: 33517 - DNA, 74 bp, Homo sapiens
gcacaatcggggcaccgagctcggaactctccggagtcctttctgtattgttgtgattttgcttctggagctgt

SEQ ID NO: 33518 - DNA, 100 bp, Homo sapiens
tgaagctcacccatgatgacacaggagccaggtatttacacctggccagagaagacacgaataatctgttcaggaatgccaagaagaattggcaacgcat

SEQ ID NO: 33519 - DNA, 87 bp, Homo sapiens
gtgaagaaagtgagcgaggagtcagaaactcagccactggttgccttggtaggcaataaaacacgaaagcaagagattatcaaagtc

SEQ ID NO: 33520 - DNA, 101 bp, Homo sapiens
ccctagtcaccagctggtttcccagaggagaaggctgagacccgagaagggagtaagtcaaggaacaccttataatcctgatggacagcccatgggaggtt

SEQ ID NO: 33521 - DNA, 100 bp, Homo sapiens
gcagaatttggaaccctgcatttggagtttatgcacttgagccacttatcaggaaaccccatctttgctgaaaagacatcccaggtgaagccatggtgaa

SEQ ID NO: 33522 - DNA, 98 bp, Homo sapiens
gggaacgactgcggcgcgctgctggacgaagagctctcctccttcttcctcaactatctcgctgacacgcagaatgagatgctggaggaaggacatga

SEQ ID NO: 33523 - DNA, 50 bp, Homo sapiens
ctgcgttcacggcaggattcggttagatgcacaaagcagggtcatcagaa

SEQ ID NO: 33524 - DNA, 89 bp, Homo sapiens
ggatcttcttcactgcctctggcatggatgagatggtttcacccaaatatcactggtgtggaggcagaaaacctactgttgacaagagg

SEQ ID NO: 33525 - DNA, 74 bp, Homo sapiens
aaagtgtcaacatagacttgacatatgatatacagtcatttactgatacagagacgggatttcgccatgttgcc

SEQ ID NO: 33526 - DNA, 75 bp, Homo sapiens
ttgtgcgcttggccgcgagacactctggcagttataggaacacaaaggtgtcgtgaaaactacccctaaaagcca

SEQ ID NO: 33527 - DNA, 100 bp, Homo sapiens
gcgccggatgcggagcgcggtgctgccggtggagcttcagaatgttttcaggaaagtgaacatctcaaggaaagtcttaaatgttgcttattgcatctct

SEQ ID NO: 33528 - DNA, 100 bp, Homo sapiens
tttcatctgtagcattcaagacttcaaactgaatttctctgcaaagaatgtccaaaaattcatattcacattgatcgtatcgacaaaaaagatgtcccag

SEQ ID NO: 33529 - DNA, 100 bp, Homo sapiens
cagagccgctacacacgggccaatctggctagtaaaaaggacagaattgaatcacttgaaaagaggctcgaggttttcaaatggaacattttgatgcatc

SEQ ID NO: 33530 - DNA, 100 bp, Homo sapiens
gggcggacacctccacatcgccttttgccacctttccctttatttccggagctctgctgtgtgcgtgcaccagctgcctccaggccaactacacgtgtga

SEQ ID NO: 33531 - DNA, 100 bp, Homo sapiens
cacagacccttcacccctcacctcgatgcagccagtagcttggatccttgtgggcatgatccataatcggtttcaaggcagcgtctatcccagactaccg

SEQ ID NO: 33532 - DNA, 50 bp, Homo sapiens
gaaacctggatctttgctagaaagagagacggagtctcgctctgtcgccc

SEQ ID NO: 33533 - DNA, 100 bp, Homo sapiens
gccacgtgcagacatctacaaccttcgatctcctgacgagggatgatgctcagttcgagatggacatctgactctcctgcaaggattagaagaaaagcag

SEQ ID NO: 33534 - DNA, 51 bp, Homo sapiens
cttgagttcagctgctctgagaaggcagctgaaaaagttggatgaagatag

SEQ ID NO: 33535 - DNA, 74 bp, Homo sapiens
cgacggctgctcaaacatcagggtgaaaggtgtagcagtcactcggcctacacccacagcatcgaccttgtgaa

SEQ ID NO: 33536 - DNA, 100 bp, Homo sapiens
gctcctgctgctcgaggacgctggagcccagcaagatgttccatttaagcagacctcttccatagctgtagctggagcggtaattggagctgttcttgcc

SEQ ID NO: 33537 - DNA, 73 bp, Homo sapiens
acctggataaccttttgctaacaaaaacaggtttccaccgtgcacattatgaagaaaagaaatggaggtggga

SEQ ID NO: 33538 - DNA, 96 bp, Homo sapiens
attgctgaattagaactgcagaggttcctctacagcaaggatggccaggccatgttatgggatctcaacgaaggcaaacacctttacacgctagat

SEQ ID NO: 33539 - DNA, 75 bp, Homo sapiens
gtgggaaccggacttcagtggatcttcggatacgaagaacccagatcattgagactgaaaatatgatggaccgaa

SEQ ID NO: 33540 - DNA, 75 bp, Homo sapiens
ctctgcgtctgtagttcatttgaccaaacgggggctgatcctgcaggacctgaccttcgttcacctgggaaaccc

SEQ ID NO: 33541 - DNA, 83 bp, Homo sapiens
acccttgacattgaacctgttgaagggagatactattggtcaggaacaatgctgtccaatctgttgcagtgagtatattaagg

SEQ ID NO: 33542 - DNA, 82 bp, Homo sapiens
agcctcttctacatcggtttctacctcaaggacatggagcgcttgaaagagagctagagccggtgcaggccacgcagaacaa

SEQ ID NO: 33543 - DNA, 100 bp, Homo sapiens
cctgaagaaagtccacgagaccgtggagcgtggtgggaaggtcagcccaaggctgccccctcggtcactctgttcccgccctcctctgaggagcttcaag

SEQ ID NO: 33544 - DNA, 75 bp, Homo sapiens
gacatttacgcggatgtcggcgaagagttcaaccaggtttttagaacttcagccataaaaatgggcagaattttc

SEQ ID NO: 33545 - DNA, 82 bp, Homo sapiens
ccaggtgtctgtctgctgcaaggagaggagagccccagaaccaggactgggggatttggagctgggcagagacttaaccccc

SEQ ID NO: 33546 - DNA, 83 bp, Homo sapiens
tggccaccctggggctcctcatggcccggctccttagcacctctccaggtgtttcccattaaacactaccaggacaaaatcag

SEQ ID NO: 33547 - DNA, 89 bp, Homo sapiens
aacctcctctcccacttcttgccccagaaagccccagacggaaagagctacttgctgagaaaccatcaacacaggcccttttgtgatgc

SEQ ID NO: 33548 - DNA, 96 bp, Homo sapiens
ctgagacagaagtacaacgtgcgatccatgcccatccgaaaggatgatgaagttcagtccctcctgctttttagccggtctttggacaccaatggt

SEQ ID NO: 33549 - DNA, 82 bp, Homo sapiens
gccgcagccatgtgggacccgcgggcagctaggttgatggacggatggctacatggatgtgatggagatggtttactatcgg

SEQ ID NO: 33550 - DNA, 89 bp, Homo sapiens
ttgcctacgcgcacagcaccatcatgccgcggctaagtgaggaagccagccaggctctcatcgagttgtggacatcggatacccaagga

SEQ ID NO: 33551 - DNA, 100 bp, Homo sapiens
gcaatttgtatcatctctatgaacctcaactgttttcatctcttagggctggctgtgttataaagaaatttaagctatgaagaaggacatccctcacact

SEQ ID NO: 33552 - DNA, 80 bp, Homo sapiens
ctggggaggcgaggccggacgcacctctgtttgggggtcctcaggtcaagaagatcatgaaccaggtgttccagtcctta

SEQ ID NO: 33553 - DNA, 100 bp, Homo sapiens
agaagcatctgaagaccatggatcacaaccggaaccgcagggttatcaatactctggctgaccatcatcatcgtgggactgactttggtggaagtccttg

SEQ ID NO: 33554 - DNA, 100 bp, Homo sapiens
gtgatggtaaagacccttcctctccattctttccccactatgcttaaggattggtcttgatttgagcaatggtaaacctcgagacaacaaacaagcaggg

SEQ ID NO: 33555 - DNA, 100 bp, Homo sapiens
caaagcctcttacagcctggggagtgcgagagaaacccagccgaagcatttaaaaggtgtccaaagacaggaggtggtctgtaaaaggttggatgacaac

SEQ ID NO: 33556 - DNA, 101 bp, Homo sapiens
cccggagccggagaccctcccttgaaaccggcactgggacttctcgatctctggaggcacctgttgcaagtgacagattacaggagcttattaatcataag

SEQ ID NO: 33557 - DNA, 100 bp, Homo sapiens
aagcccggggcctgttgcctgggggcacacaggtgctggatggtacctcggggttctctcctgcccccaagctggagaatgctctcatcactcagtcaag

SEQ ID NO: 33558 - DNA, 83 bp, Homo sapiens
ttcatctcaaaaacaaaattctgaactcaggacttggcaagtacaccttgactgtccctggagacagcccctgtgctcgagtt

SEQ ID NO: 33559 - DNA, 50 bp, Homo sapiens
gcaacttcctgtatgtccttcacctggaccgccatgaagctgggcttcag

SEQ ID NO: 33560 - DNA, 88 bp, Homo sapiens
tctcttacgtctgcggaagtgcagctgcctcagttcttagcgcagaaatggtggagtcaatgaagaaagtagcagggatggatgtgga

SEQ ID NO: 33561 - DNA, 100 bp, Homo sapiens
cacaatcaacgcaaccacagaaacaagtggtacaggcagccaacatgcctgactctgagctattcgagctcatctctgagaaccgttccatgtctcggaa

SEQ ID NO: 33562 - DNA, 100 bp, Homo sapiens
cctacagctgtacataagtgtcatgcagcaggacgtcactgttggaagaagttgggggccgtcccgctcctaaggcaggaagatggtggccgcaaagaag

SEQ ID NO: 33563 - DNA, 98 bp, Homo sapiens
gatgtgggagcaaaagctgacagagcagtccaacaccccggtatggatggcagaacagaaaatatcatatgataagaagaaacaagaagaattgatgc

SEQ ID NO: 33564 - DNA, 100 bp, Homo sapiens
accaagtggaggaacggggacatcgtccagccagtcctcaacccagccctactgccaataaagggaaaataagagatgctcatcgacgaattatgctttt

SEQ ID NO: 33565 - DNA, 90 bp, Homo sapiens
gaagaattgacccttgaaggaatcaaacagttttatattaatgttgagagagagatgattgagctcagtgataatgaaaacccttggaca

SEQ ID NO: 33566 - DNA, 75 bp, Homo sapiens
ggggaccttttgtctgaacgccagagctactgaccaggccagcaggagatggaaccttccagaagtgggcagctg

SEQ ID NO: 33567 - DNA, 100 bp, Homo sapiens
agagctatggtgaaacaccactgaagcattgccaagcattccccgtcggagccctttctagagaaaccagtgccggatatgactcaggttagtggaccga

SEQ ID NO: 33568 - DNA, 75 bp, Homo sapiens
aaagtctttattgccacctactgacactcgatttaggccagaccagagtcaccgagacttggagccagaatctga

SEQ ID NO: 33569 - DNA, 75 bp, Homo sapiens
gggatcccagcctcaggcctgcacggacggtgttggttgggacagaccccgtgcggctgacacagctgtatgagc

SEQ ID NO: 33570 - DNA, 100 bp, Homo sapiens
ctgacggcaacctctacaaggccaagttcatctcctccgtcaccagccacatctaccagcgggctgacgcacgaggcacacaggaaggaggtggagcagg

SEQ ID NO: 33571 - DNA, 82 bp, Homo sapiens
ggatcagaaccggtacctggatggcatgcatgtgcagtctttgccaacaaaaaaaattaccaagaaacctattccagatgag

SEQ ID NO: 33572 - DNA, 100 bp, Homo sapiens
tggaagcccagtcctctcctgttcttatttgctttatatatcatgtgtgttcctcactcaggtacccattcctggcccagtgggtaacaagagaatggtt

SEQ ID NO: 33573 - DNA, 78 bp, Homo sapiens
ttactatgagattcttaataacccagagcttgcctgcacgctggctaaaacggcttttgatgaagccattgctgaact

SEQ ID NO: 33574 - DNA, 83 bp, Homo sapiens
caccagcaccgcagatgttgtcaaggtggcctaccaggaggccaggggtgtcgccatggcactgtctttaaacacagaggaag

SEQ ID NO: 33575 - DNA, 100 bp, Homo sapiens
gccatcaggggccttgataacacagagtttcaagttctgtgatatgagcaacaatggaccagaagattttatctctagcagcagaaaaaacagcagacaa

SEQ ID NO: 33576 - DNA, 75 bp, Homo sapiens
gtggttggaaatggcacctatggacaagtctataaggtggaccccaagttcctgaggaacatgcgctttgccaag

SEQ ID NO: 33577 - DNA, 82 bp, Homo sapiens
cttgaaccaaacatgttagctgcaaaatccttctatggtaatggcaccattgacttccccgaatttttgactatgatggcta

SEQ ID NO: 33578 - DNA, 75 bp, Homo sapiens
gcggagcccggctcccgcaccatggaggaggacgacagctacgaatctggcaatgggggcaggagctgttggagc

SEQ ID NO: 33579 - DNA, 50 bp, Homo sapiens
cccagccccagccccagccctacagaggtgttggtgggaagaagggatcg

SEQ ID NO: 33580 - DNA, 75 bp, Homo sapiens
atgtcttcattgaagatagagccgaaatgactgtgtttgtacggtaccaggtcatcagtacaccatctgatattt

SEQ ID NO: 33581 - DNA, 75 bp, Homo sapiens
ctgacaccgccgccacaccgccgccacaccgccgctgcctcagtcatgccggaggcggcgacggcggcggcgggg

SEQ ID NO: 33582 - DNA, 95 bp, Homo sapiens
gtcaggactaagagaagtcacaaaacagcagatttcccaagagcagcggaaaatgatccagtcacaggttatgggaagctggctggaagcagcgg

SEQ ID NO: 33583 - DNA, 74 bp, Homo sapiens
ctggctagagaccctccaagggaactgtggctgcaccatctgtcttcatcttcccgccatctgatgagcagttg

SEQ ID NO: 33584 - DNA, 97 bp, Homo sapiens
ctatctgtgcagccacgcaggcatccaggagtggaagagactaggagtcgagcagctgcggctcagcacagtagacatgactgggatccccaccttg

SEQ ID NO: 33585 - DNA, 75 bp, Homo sapiens
ccggaggaacattccaaaggaaaaatttcaggaataagtttgtggagtttgacatgaagccagtctgtaagaagt

SEQ ID NO: 33586 - DNA, 100 bp, Homo sapiens
ttaaatcaagatttaacattccaacacataaaaattatttatccaacagctcctcccagtgttttccaagcagtgaagcacttgccgtgttgaactgaat

SEQ ID NO: 33587 - DNA, 50 bp, Homo sapiens
cagagaggcggaagaggaggcctgatgggacttcacagagaatgcagttg

SEQ ID NO: 33588 - DNA, 83 bp, Homo sapiens
gggcccgaggccggaggaacccggactccggcgtagcgccttatgccagcctggaccatcttggaggcagtgtaggatcatgg

SEQ ID NO: 33589 - DNA, 82 bp, Homo sapiens
cgattcagccctggtattcctgcctatcctcgaacctgcactgtggacttttcgatcaaatgtttcctagatttcaaagcgg

SEQ ID NO: 33590 - DNA, 99 bp, Homo sapiens
gtctgctggagatgacagagtacttgtaatgggtgcaactaataggccacaagagcttgatgaggctgttctcaggtttgaaagattagaagtcctggc

SEQ ID NO: 33591 - DNA, 100 bp, Homo sapiens
aggaggttcctagagttgttcagaatcctccaaaaccagtcatgaccactagacccacagctgttaaagcaacagctgcagaaccttggcctgaaaatgc

SEQ ID NO: 33592 - DNA, 75 bp, Homo sapiens
acctatacaaagaagtgatgctggaaaatctcaggaatctggtctcattgggtggcgacatgtctaagaatgtga

SEQ ID NO: 33593 - DNA, 111 bp, Homo sapiens
agggcccggggcccctggccacggcgtacctggtcatctacaatgtggtgatgacagccggaccatgggggatgtgaagctggttgcctcgtcacacatttccaaaacctc

SEQ ID NO: 33594 - DNA, 90 bp, Homo sapiens
agaacagctctttgcatccggagagtggacaagaaaacccaacatgagtgaagtttcctgcaagaaacgggacgactatttggaatggcc

SEQ ID NO: 33595 - DNA, 100 bp, Homo sapiens
tgaaggcaactacacctgcctgttcgtcacgttcccgcagggcagcaggagcgtggatatctggctccgagtgcttggaacgaggcccagcaaaaagcag

SEQ ID NO: 33596 - DNA, 82 bp, Homo sapiens
cggacggggagctgaacgtggacagcctcatcacccggctgctggaggatcttcgtgaagactctgactggtaagaccatca

SEQ ID NO: 33597 - DNA, 100 bp, Homo sapiens
tgatgctggaaaatctcaggaatctggtctcattgggtgtcgtgaaaactacccctaaaagccaaaatgggaaaggaaaagactcatatcaacattgtcg

SEQ ID NO: 33598 - DNA, 100 bp, Homo sapiens
ctgcaggaactctacaacccaatccagtttgtacaatgacgacagaaacctgcttcgaattagagagaaggaaagacgcaaccaggaagcccaccaagag

SEQ ID NO: 33599 - DNA, 96 bp, Homo sapiens
aagttcgagcactaatatttaagaaagaagatgttaactttcagacctgcctagagctggaacgttacctccagagcgagccctgctatgtttcag

SEQ ID NO: 33600 - DNA, 75 bp, Homo sapiens
ccttacctcagagatcctgaactcttttgagcatgagcttcttggacacttaatgattgttggcaagaaatgtgc

SEQ ID NO: 33601 - DNA, 82 bp, Homo sapiens
cccctcggcctcgcggcgacggcggcggtggcggcttggacgactcggagagccggtcatcatcagatttgaaatatttaaa

SEQ ID NO: 33602 - DNA, 100 bp, Homo sapiens
cgacaagccgctggcagccgcggatctcaccgccgctcagggctaccggctctctgaccagttccacgacatcctcattcgaaagtttgacaggcaggga

SEQ ID NO: 33603 - DNA, 101 bp, Homo sapiens
catcccactggctgcaggcctcctgctgctcctgtttgtggattagtcagaagaagttgaaaaaatacgagaaagaatatcacaccatgagggaacagcag

SEQ ID NO: 33604 - DNA, 91 bp, Homo sapiens
cgtcttgcaacagtggccgcacgcatagatgcttatacaagagcagaagttgtttatgaatggaccagagagccagcacgctcagtggttg

SEQ ID NO: 33605 - DNA, 100 bp, Homo sapiens
ttgctgctccggggcaggtctccttccaggccaggggcccggaatcatgtacataaagcagattctgaaggaagatttccattaggtaatttgtttaatc

SEQ ID NO: 33606 - DNA, 50 bp, Homo sapiens
cgcgtggactggaagtcacactgcggcgattgaccctgttcctaacaccc

SEQ ID NO: 33607 - DNA, 100 bp, Homo sapiens
ttttactgcgaagttttgctcctggatgaatccaagttaacccttaccacccagcagcagggcatcaagtgccgcagaatggaattcggcattgttccta

SEQ ID NO: 33608 - DNA, 88 bp, Homo sapiens
cttttggagacagccgaacggcgtttgaatagtagccttgaaaggcggggattctaacattttcagagaaccttttggaaagaacaag

SEQ ID NO: 33609 - DNA, 75 bp, Homo sapiens
gcccggggagggtggttaccgctgaggagctgcagtctctgtcaaggttatatcttaagtgtggtgctgctaaca

SEQ ID NO: 33610 - DNA, 75 bp, Homo sapiens
tcgcctggcccaccactcccagagggtttctctccgcaagcgcgcgatgcagcgggcggcggcgctggtccggcg

SEQ ID NO: 33611 - DNA, 100 bp, Homo sapiens
atcaggaaacagtgtgattggttccaaggggaccaacccacaaagaaccttgtgaagtttggtcacaaacaagtctttcaagatgttagaaagttcaagc

SEQ ID NO: 33612 - DNA, 98 bp, Homo sapiens
aaagaaccctggctggggaaaagggaagtgaaaagagatctgttttcagcaactattctgtcaaccctggccaatttggaaggtgaagaaacttttga

SEQ ID NO: 33613 - DNA, 83 bp, Homo sapiens
ggccacctctgagaagggagacgacgctgctgggtccgctgagcggggcgacccgaggtccgggcccaccagctggtcttgcc

SEQ ID NO: 33614 - DNA, 98 bp, Homo sapiens
tatagagatgtgatgttggagaactacagaaacctggtctccctagtagctttccacagccccaccaccaggatcaagaaggagccccagagtccccg

SEQ ID NO: 33615 - DNA, 100 bp, Homo sapiens
gtttgaaaacaagcggaacgccgtccacgtgaaggggcccttctcggtggaggccgacccatccagctttgctgtctgcatgccgacatgctgggctcac

SEQ ID NO: 33616 - DNA, 100 bp, Homo sapiens
ccactcttggctctgactgatgatataagttactcaatgtgtcgtggaggccgaatgtttgcaccaaccaaaacctggcgccgttggcatcgtagagtga

SEQ ID NO: 33617 - DNA, 50 bp, Homo sapiens
catggctcatgtgcggaaacacatggttgatggagtcttgctctgtcacc

SEQ ID NO: 33618 - DNA, 50 bp, Homo sapiens
ctagcacagaccttctgatgttgctattgacctgaaaagtggttctggaa

SEQ ID NO: 33619 - DNA, 97 bp, Homo sapiens
cattcctcacgtctaccccgtggctgctaagacacagcttggccggtgcttccaggaaaccattgggtcacagatgagaactggactgatgaccaac

SEQ ID NO: 33620 - DNA, 101 bp, Homo sapiens
tcatcttaagaatgtcaacgattagtcatgcaataaatgttctggttttaaaaaatacatatctggttttgaaatgatgtgctcacgggtgccctctgaac

SEQ ID NO: 33621 - DNA, 74 bp, Homo sapiens
gagcgcagagcgggcgagcgcgggtgataaaagaaaatgtggctgaagttacccgaagttcagcttgcagtgta

SEQ ID NO: 33622 - DNA, 100 bp, Homo sapiens
gctgctgaccgagagagctcactcagccaggtgcagtagacattgttgcaatcatgatcggcaatctgaaaggcacaaaaattctgcaatctattcaaag

SEQ ID NO: 33623 - DNA, 75 bp, Homo sapiens
tactccttctacaggtgtgtatgaaaaagcttgtggtgaaggggggcaaaaaaaagaagcaagttctgaagttca

SEQ ID NO: 33624 - DNA, 50 bp, Homo sapiens
atgctatagaaagtctcctgcaggggatagtggtcctagaagaatgtcag

SEQ ID NO: 33625 - DNA, 100 bp, Homo sapiens
aagccaagcttccatgctcccgagcccaaagcccactacgagcctgctgaccgagcgcgagagcattagtgccagcagtagttcccaagggctgtctcag

SEQ ID NO: 33626 - DNA, 75 bp, Homo sapiens
ccccagacaagatggacaccgcggaggaaggaagtgaccaagttcactcctggatgctagctacaagccaagcct

SEQ ID NO: 33627 - DNA, 50 bp, Homo sapiens
accaaggcagttggtggaaatgagaattatgttagagttgtggaggtttg

SEQ ID NO: 33628 - DNA, 75 bp, Homo sapiens
cagcccttctctgccgtccctgggagcccgtggaccgggagcccgtggaccgggagccggtggtgtgccaccccg

SEQ ID NO: 33629 - DNA, 98 bp, Homo sapiens
tcggcgccgccaaacagcccagctcgcgcttcagcgtcccggcgccgtcgcgccactcctccgaccatgaagatggacctacagctaaaaaattaaag

SEQ ID NO: 33630 - DNA, 83 bp, Homo sapiens
tctggaagctactactacgtggtgcttggaaagtgcctatgattacacaataccacctatggagaaagctgttgtgaaaacgg

SEQ ID NO: 33631 - DNA, 98 bp, Homo sapiens
tcggagcttatactcctcccagtgacgggtctggagtgcgtgggggaccggctgttggcgggcagactgccagattcacttacagccccagctaattc

SEQ ID NO: 33632 - DNA, 100 bp, Homo sapiens
aacttaaaatggatatgaaaagtgaagaaagtgatcataggagaaaaccatttcaggtgcttttgaagatgatgatatcacgcacgttgaaggaagtgta

SEQ ID NO: 33633 - DNA, 83 bp, Homo sapiens
gaacaatttaaccagcaactttccaccaccattcaagaggagttctataggtgtgagttcttgatacgaatgaaaggccaaga

SEQ ID NO: 33634 - DNA, 100 bp, Homo sapiens
tccaaccagttcttccgggacgtcacggcggatgtgaacactctgcaaggaggtgggcagcctgtggtgactccgtccgtccagccctctcttcatccgg

SEQ ID NO: 33635 - DNA, 74 bp, Homo sapiens
ggctccctcgtgaagaacctgaaggacacactagcaattaccagctctggctgggtcgccacaacttgtttgac

SEQ ID NO: 33636 - DNA, 98 bp, Homo sapiens
cgggatcgtgaccgagaccgtgaccgagagcgtgaccgagagcgcgaatatcgtcatcgttagaaggggaatcacttgcaaggtccacacaagtccgc

SEQ ID NO: 33637 - DNA, 98 bp, Homo sapiens
ggagtttcgtgagtttttactgactcgagataatatcgtctactgcattatttttggctgcaaaagtggaagaacaggctcgaaaacttgaacatgtt

SEQ ID NO: 33638 - DNA, 80 bp, Homo sapiens
ggagcagaacgtgctgcagcagagcgcggcgcagaaggcgatcagtgggtgaccgcggctgcgagggactttgtcatccg

SEQ ID NO: 33639 - DNA, 75 bp, Homo sapiens
ccgaggtccgtgtggccaacgagctcaacgccaggcgccgctcctttacaggctgaccaactgactgaagagcag

SEQ ID NO: 33640 - DNA, 82 bp, Homo sapiens
cgccgagcggaggaggaggaggaggcgaggaggagagactcccttgccctgttggatgaataggcacctctggaagagccaa

SEQ ID NO: 33641 - DNA, 82 bp, Homo sapiens
acgtctggcaggaacctcggcctcagaggttatggaattagaatcaaagctaaatgaagcaaaagaagaatttacgtcaggt

SEQ ID NO: 33642 - DNA, 117 bp, Homo sapiens
agctgcactgtggcaaggcttttgcttccaaatacaagctgtataggggcaaccgctgtcatgagttacagtccttccaggatgtgcctctgaaaatggattgcatataaatgtacg

SEQ ID NO: 33643 - DNA, 100 bp, Homo sapiens
ttgaagtaaatagatcttgccctgagcacccttcagattaagcgtcagcttcctgttttatagtttttggtgttgagccagacttgaccagggaaggcgg

SEQ ID NO: 33644 - DNA, 83 bp, Homo sapiens
caaatatacgtgtatgttcacttacgcctctcaaggagggaccaatgagacaatgcagatcttcgtgaagactctgactggta

SEQ ID NO: 33645 - DNA, 78 bp, Homo sapiens
ctgtgaatctgcctgcacagtaccaacagacggtgccgtgagcgatgtggagatgcaggaacactatgatgagttttt

SEQ ID NO: 33646 - DNA, 75 bp, Homo sapiens
ccaggaagactccctgcctcctgagtcccacagatatctggggaagatgaagtagagtgctctgacaaggacgag

SEQ ID NO: 33647 - DNA, 83 bp, Homo sapiens
cggagcttttcaaggagagagccacagcccccttctttgtatttcaggtgagtcatcatccccctgctgctgcgcaccatgct

SEQ ID NO: 33648 - DNA, 132 bp, Homo sapiens
tttgtccgccgggtgatgaaaccacttctctacatcccatctcaatcagaattactagattttctctcaaactacgagattcaaaaacatgccacaggaaagaagtctccagcaaagagtcctaatcccagc

SEQ ID NO: 33649 - DNA, 50 bp, Homo sapiens
agcggagctcccccaagagccggaaagttttcggctttgtgagaaacctt

SEQ ID NO: 33650 - DNA, 75 bp, Homo sapiens
ggtgggctttcgcccgcggctcctgagggatcggtctcagccgcgcggatatggctcgtggacagcagaaaattc

SEQ ID NO: 33651 - DNA, 75 bp, Homo sapiens
cctaacaaggccatcttcacggtggatgccaagaccacagaggggcaagattcttgccaagagaattaatgtgcg

SEQ ID NO: 33652 - DNA, 101 bp, Homo sapiens
ctccacatcaccgacatgaagggaacaggcatcatggactgtgcgcccaagtgcatacatagagacgtgaagccagaaaatatcctcatcacgaaacattc

SEQ ID NO: 33653 - DNA, 100 bp, Homo sapiens
cggcaatcatggcgccacctgtgagatactgcatccccgagcctgtgtgtggccctgcccccagggctggctgtttctgtgcttaaagccatcttccagg

SEQ ID NO: 33654 - DNA, 75 bp, Homo sapiens
caagatagaatatgatgatttcgtagagtgtttgcttcggcagaaaacgaattttcaagaaatgattcctgcctt

SEQ ID NO: 33655 - DNA, 90 bp, Homo sapiens
actgcccagtgcccacacctggctttggcaatgtggaagagattcctgagaatgacagcttcttggacacttaatgattgttggcaagaa

SEQ ID NO: 33656 - DNA, 75 bp, Homo sapiens
ctgctacgttggggagcagtactgtgtagccaggatgctgatgaggaaactgagacccagaaaggtggaagcact

SEQ ID NO: 33657 - DNA, 100 bp, Homo sapiens
aggtggagtacctgaacgtgcgcctcagcctgcgggagcccccggccgatggagcagatggtgctttttacccagatgaaatacaaaggccacctgtcag

SEQ ID NO: 33658 - DNA, 100 bp, Homo sapiens
cctagaagaaatttggagtgtgcgtgcgcgccgagcggttaccttttcgacaaaatgattcatctagtcattgccagaagagtgggtctcctatttcctc

SEQ ID NO: 33659 - DNA, 100 bp, Homo sapiens
gtatgatgaagcaatacggcatttttcaacaatgcttcaggtgcacaggtttcatattccagaaggttggaaagttggctgcaacagctgtgggaggtgg

SEQ ID NO: 33660 - DNA, 100 bp, Homo sapiens
agggaggagaagacaagctaaaaatgattcgggaatatcggcaaatgtctcacaccattttgctggtacagcctaccaagaggccagaaggcagaactta

SEQ ID NO: 33661 - DNA, 115 bp, Homo sapiens
agttcctctccgatgagcagaacatcctggccctccgtagcatccaaggcagacaaagaggacagtcattttgtttactcattcagccctgttgcaggtcccaataaactcttca

SEQ ID NO: 33662 - DNA, 75 bp, Homo sapiens
caggaaggcgaggcttccgcccggcacagggggtttctacgataaagacagttcagggtggagttctagcaaaga

SEQ ID NO: 33663 - DNA, 75 bp, Homo sapiens
agcgatcaacacgctgaacggcttgaggctccagtcaaaaaccattaagtgccctctggtggtcagaagatgctg

SEQ ID NO: 33664 - DNA, 98 bp, Homo sapiens
gaaaaacctggaacttgaatgaaggctgatctttgttttgtgcactgtggccctgccaggcatatagtgaagcatttttcagttgaaggacagttgga

SEQ ID NO: 33665 - DNA, 75 bp, Homo sapiens
gtttgtggatcgctgtgatcgtcacttgtatgaagactttggagactcaaccgttagctccggactgctgtcctt

SEQ ID NO: 33666 - DNA, 100 bp, Homo sapiens
tcacagtgccaaatggagctggaagcagtccagtggggtgaagcaagaagcatttcatttgcacatctttcttggacttgggatatacagttccagttta

SEQ ID NO: 33667 - DNA, 75 bp, Homo sapiens
ctcagagtatgggacctgaaagatgatggtagaagatgacagattattgaggttgtcccaaaagaagttctgtgc

SEQ ID NO: 33668 - DNA, 101 bp, Homo sapiens
tgacaactggtgccggagggacaaaaagcaatgcaagagtcgctttgttacacctttcaagtgtctcgccacagacccctttgcttctgtttttgggaatg

SEQ ID NO: 33669 - DNA, 100 bp, Homo sapiens
ggccgcccttggggagctggcctctcagcacagcgccgggcaccggggctcaagtcctcctcgccctctgactaatatgaatgacaccatggttagccac

SEQ ID NO: 33670 - DNA, 88 bp, Homo sapiens
agccacgtgtgccgcgctctgggcacagccttggaaagtcaggaccgcgacggcagcagagcagcgcatcccggggaaatggtggggg

SEQ ID NO: 33671 - DNA, 75 bp, Homo sapiens
tgacagagaagatctttttgcaggaacctctgtgatggaggtcacagccacagacgcggacgatgatgtgaacac

SEQ ID NO: 33672 - DNA, 100 bp, Homo sapiens
tccgagcgacttctaggagcctggggttcggcgctatggaggagctcgatggcgagccaacagtcactggaaaccggctcctgaaatcaggtgtcccatt

SEQ ID NO: 33673 - DNA, 82 bp, Homo sapiens
gtgggtccgattagccttttctctgccttgcttgcttgagcttcagcggaattcgaaatgaacactatggctatgcatcctc

SEQ ID NO: 33674 - DNA, 83 bp, Homo sapiens
tggcgaagcacgagcagatcctggtcctcgatccgcccacagacctcaaattcaaaggtgaaatgacaatggatgctctgttg

SEQ ID NO: 33675 - DNA, 90 bp, Homo sapiens
cgtgccgcccgccgcccggatgggaccaccagagtgctggaagaggaagaacgtctgagaaataaaattcgagctgatcatgagaaggcc

SEQ ID NO: 33676 - DNA, 100 bp, Homo sapiens
aggcgaggtggccggagccgtgtggaccaggaggagcgctctggacccacaaaccgtggagaccaagaactggcacacggacgtgattgagatgaacggg

SEQ ID NO: 33677 - DNA, 50 bp, Homo sapiens
tgggcacccacggagcctccggggctggtcacccctcctaatttctcagt

SEQ ID NO: 33678 - DNA, 100 bp, Homo sapiens
aaatggtagaatatatcacccataatcggaatgtgatcacagagcctatttacccagaagtagtccatatgacaacatctggggaagatgtacgagactt

SEQ ID NO: 33679 - DNA, 87 bp, Homo sapiens
cctcttgttggaagattattcaaaagatgatgaagaacgagagcttcaaatggatcctgcagactatggaaagcaacatttcaatga

SEQ ID NO: 33680 - DNA, 51 bp, Homo sapiens
ctcaatgccatggagagacagctgcagggcacctcaacacctttgcttcga

SEQ ID NO: 33681 - DNA, 55 bp, Homo sapiens
caacaagcacaccaactataccatggagcacatccgtgtgggctgggagcagctg

SEQ ID NO: 33682 - DNA, 90 bp, Homo sapiens
atgtccttcattccctggtagacaaatccaacatcaaccgacagttggaggtatacacaagcggagttccagggtcacccccgagaggac

SEQ ID NO: 33683 - DNA, 100 bp, Homo sapiens
gattgaattgacactatttgtggaggattgatatgacagaaaggagccaaggatgactcaagtttttggccagagtgctgatgtatggacagccgtatcg

SEQ ID NO: 33684 - DNA, 100 bp, Homo sapiens
gagtctcgggccccggagacgggcgaggagcacggcagcagccaggtccgtaaaagccctgggctcagccagagcagggcagaggatgacgggatgacca

SEQ ID NO: 33685 - DNA, 88 bp, Homo sapiens
gcgtgtctacaccatcagcgacaccatagcacggttccagaagatgagagggatgcaggaaagtaatggtccaacagacagttatgca

SEQ ID NO: 33686 - DNA, 100 bp, Homo sapiens
gcccaggagcctcaaggcggcccggcgggcgactggacggccggacagccccagtggctccggaaatcacttctgtggaatatttcaacagtctgttata

SEQ ID NO: 33687 - DNA, 75 bp, Homo sapiens
tttctcgtactaaagagggagtgggctcccctaaactggggcctggaaaagggacagttcgtgtggcaatgcagg

SEQ ID NO: 33688 - DNA, 82 bp, Homo sapiens
ctgatgccaacagtgtaccagcagggcgttggctatgtgcccatcacagatctctgttgaggagctggcgcggaatctggtc

SEQ ID NO: 33689 - DNA, 85 bp, Homo sapiens
aagtagagtatttcaaccataaagacatcttaattgggcacgaaagaggtactccaaagattcaggtttactcacgtcatccagc

SEQ ID NO: 33690 - DNA, 100 bp, Homo sapiens
cggagcgacggagagagactgtgccagtcccagccgccctaccgccgtgggaacgatgccttcaattaagttgcagagttctgatggagagatatttgaa

SEQ ID NO: 33691 - DNA, 145 bp, Homo sapiens
gtcgggttacccttggtggccttgcatggtttctgcagatccactccttcacagctataccaaacttaaagcgctgtgcttcgccgtgagccgctcgctgctgctgacgtgcctggtgccggccgcgctgctgggcctgcgctac

SEQ ID NO: 33692 - DNA, 100 bp, Homo sapiens
ctccaaccggacctagcaactccttcctcgctaacatggggttatcaatagtctggctgtctatcgtcatcgtgagactgactttggtgtaggagttcga

SEQ ID NO: 33693 - DNA, 100 bp, Homo sapiens
ggaaacaccatggctgcggcggcccagctctctctgacacagactggattatggacagaacttggaaatattgagaataatttcttaaagccacttcata

SEQ ID NO: 33694 - DNA, 50 bp, Homo sapiens
agggggcggctaccccgtggggctaaaaggtcagattcctgaaattaaac

SEQ ID NO: 33695 - DNA, 90 bp, Homo sapiens
aagaagactattcagaaaaagatgattgacgctccatctgtgagaaagacacactgcagtggaaggaaacacaaagagaatgtgaaagac

SEQ ID NO: 33696 - DNA, 82 bp, Homo sapiens
gaaccagtggctttgggactgtaagaggatggacaaaggagtcactgtgccagccccaccacatcctggaagaggagggggc

SEQ ID NO: 33697 - DNA, 89 bp, Homo sapiens
atcgagaccgaggcgcaggacacggaggtggaggaggcccggaagatgatcgaccagagggcttccctggaggccgccattgcagatgc

SEQ ID NO: 33698 - DNA, 98 bp, Homo sapiens
ggcccggccacctctgagaagggagacgacgctgctgggtccgctgagcggggcgacccgagagatctggttggagttggagggtgagagaaaatgaa

SEQ ID NO: 33699 - DNA, 90 bp, Homo sapiens
gggccattgtaaagaagttccaccagagtagaggaacctaggaaataactcggaacctgtaacgtcccactggtttggacatattcctct

SEQ ID NO: 33700 - DNA, 75 bp, Homo sapiens
aaggacattccaggcagaggcaagatgtgttcagagcaacattgttttgttgacacaagcatttagaagaaagtt

SEQ ID NO: 33701 - DNA, 84 bp, Homo sapiens
gagatgatcgacgtcatcggggtgaccaagggcaaaggctacaaagggcagccccgagaaccacaggtgtacaccctgccccca

SEQ ID NO: 33702 - DNA, 100 bp, Homo sapiens
aggaaatgctggaaaatgtcagcctggtctgtccaagagtgtttggctgccccacaactgtggccaacgtggagacagtggcagtgtcccccacaatctg

SEQ ID NO: 33703 - DNA, 101 bp, Homo sapiens
agaatagcagttggagctcgccatggttcagtggccctgtacgacatccggactggaaaatgtcaggtccttatgtcgtcagaagatcgagaagctcagga

SEQ ID NO: 33704 - DNA, 100 bp, Homo sapiens
cgggcagccggaaggacaccaagatgcggatccgggcctttccgaaacacagtgctctgtgcctatacagtgtacggataaaacagataaacaagaagcg

SEQ ID NO: 33705 - DNA, 89 bp, Homo sapiens
tcctgaccccaaatttgaaaggcttcgaggcagcggttggtgttcgaggaagagacattgttgttcttggtgtggagaagaagtcagtg

SEQ ID NO: 33706 - DNA, 100 bp, Homo sapiens
tcaggctcgaagtgggctgggagtaacagttctgggagggatggtctacgctattggagctgtcattctaatgatcataaagctgactaagccacaggac

SEQ ID NO: 33707 - DNA, 82 bp, Homo sapiens
cagatggccggtcccaccggggtatcttcagccgcctccttgacagtcttcggcaggaagcacatggattaattgatgtatg

SEQ ID NO: 33708 - DNA, 82 bp, Homo sapiens
ccaggaccggccgaacgcagagtgctgagcttgcaagacctctgctgccgggcggtcgtgtcctgcacgccggtgcacctgg

SEQ ID NO: 33709 - DNA, 82 bp, Homo sapiens
aagaaaaataacatcagcattacgctcgttgagcaatgccaccattatcaatgaagagcccaaagtggtcacagatacagat

SEQ ID NO: 33710 - DNA, 100 bp, Homo sapiens
ctgcggcctgaactctagggagccgggttgatttttaaagcttcaaaatcctaagactcagcactgttgcgggcaggcagctcagagaacggctctccgc

SEQ ID NO: 33711 - DNA, 80 bp, Homo sapiens
aggactggacaccaaacacatagtgggaattgcctgtgggcctgcccaggtgtcgtgaaaactacccctaaaagccaaaa

SEQ ID NO: 33712 - DNA, 100 bp, Homo sapiens
tccgcggcccgctactctccgggaggggcgcttcccgacgccaagatgccttcaattaagttgcagagttctgatggagagatatttgaagttgatgtgg

SEQ ID NO: 33713 - DNA, 109 bp, Homo sapiens
gctgggaattgctgaattagaactgcagaggttcctctacagcaaggtggatgaagactacatccaggacaaatttaatcttactggactcaatgagcaggtccctcac

SEQ ID NO: 33714 - DNA, 74 bp, Homo sapiens
gaaactgtacattgaagcagagactgttcctttgatatggaggctgagctcacaccactggaatcagctatcaa

SEQ ID NO: 33715 - DNA, 75 bp, Homo sapiens
atcttgggctactcctacaagagacctgcaatgcttcttttgccacccgagaccgtctgcgctcccacctggcct

SEQ ID NO: 33716 - DNA, 100 bp, Homo sapiens
gttaagcgcggcagcctcaccatcgccaagctcctgaaggagcaccagggcatcttcaccttcctctgcgaggcagtgaaaaagcagtctggctcccgag

SEQ ID NO: 33717 - DNA, 90 bp, Homo sapiens
ctcctggactgaaacgatcctctcatctcagcctccaaaagtgctggcattacaggttggtgttcgaggaagagacattgttgttcttgg

SEQ ID NO: 33718 - DNA, 100 bp, Homo sapiens
accagatatcttgaaaagctgccagaaagtgcctcctttggtgaaggtgacacatcatgtgacctcttcagtgaccactctacggtgtcgggccttgaac

SEQ ID NO: 33719 - DNA, 50 bp, Homo sapiens
aacaagtgtctgcttatgtcggaccagcaacggagcgaggagctggctcg

SEQ ID NO: 33720 - DNA, 97 bp, Homo sapiens
tgatggctcagtttcccacagctatgaatgatattgatgatgttaagaagttcaaaccgggttacctggaagctactcttaattggtttagattata

SEQ ID NO: 33721 - DNA, 98 bp, Homo sapiens
ttgggtttagaaacgcatgaccgaaaatcagaagacaaacttgccaaagctacaagagacaggatagcagtgagattcacttcaaagtgaaaatgaca

SEQ ID NO: 33722 - DNA, 100 bp, Homo sapiens
ctgtgctgtcacctcgaatgagcaggtcaaggtgcatctgcagacgcagcaggaggtgaagctgcgcatgacgggcatggcgctgcgggtggtgcgtacc

SEQ ID NO: 33723 - DNA, 100 bp, Homo sapiens
gtctgagagctttacgtcatcttcgattagctaataaccaactgcaattcctacctccaggatctgggattggcacaagactctgctaccagcacaaaga

SEQ ID NO: 33724 - DNA, 74 bp, Homo sapiens
ggcctgtagcctggcaaaaacggtccttgaatgggcaagagggcacatgaagtacggcgtcctccacattcacg

SEQ ID NO: 33725 - DNA, 115 bp, Homo sapiens
gagtggagcttggtttcgggatctcggtgctgcagacggcgagacctcctgcacaggtgagaagccctaccactgcaactgggacggctgcggctggaagtttgcgcgctcagac

SEQ ID NO: 33726 - DNA, 75 bp, Homo sapiens
ggaaactcgactttggagaaaccaccgtgctggaccgcttttacaatgcagaaaactttagaaactgttcctttg

SEQ ID NO: 33727 - DNA, 128 bp, Homo sapiens
agcatttaaccagcatggctacttcatattttggaaagcagtttttaagacaaaaagcaagccagactcttccacaagccaccatgaatcaccgcgacattgcccggcatcaggcttcatcatctgtg

SEQ ID NO: 33728 - DNA, 98 bp, Homo sapiens
tcctcttcatccactggggaggaaggaggtccagaggagaccatcactcagcaaggacgaacgccaaggacagtaactgagtccagctcatcccaccc

SEQ ID NO: 33729 - DNA, 50 bp, Homo sapiens
aaattctggataatggtgaatggcttcttggacacttaatgattgttggc

SEQ ID NO: 33730 - DNA, 98 bp, Homo sapiens
ctggtggcggtcgcctgggtccgcgccgagacctcgaagtagggggaaaactgcagtggaagatgaggacagcatggatgggctggagacaacagaaa

SEQ ID NO: 33731 - DNA, 83 bp, Homo sapiens
gggctccgcgcccggccggacccgggcccgagggagtgcatccgccccaacccttttccccctcgtctcctgtgagaattccc

SEQ ID NO: 33732 - DNA, 98 bp, Homo sapiens
tgaagcggcggcggcggtggggactgcacgtagcccggcgctcggcatggctctcctggtgctcggatggaatttttaagatgagcctttctccagat

SEQ ID NO: 33733 - DNA, 99 bp, Homo sapiens
agaagcgtgtcgttctgcaccagcgccttgatcgagtacttgagacctcctgccccccgaggtctgcagtctcctgaacccagcagccatctacgccaa

SEQ ID NO: 33734 - DNA, 101 bp, Homo sapiens
ggcggccaccagtggaactgatgagccggccttggacaagattcgctatgagagcctgacagacccttcgaagttggacagtggtaaagagctgaaaattg

SEQ ID NO: 33735 - DNA, 117 bp, Homo sapiens
agaggtaacagatgatggtgaaactcatgaagcccaggacgattcagctggaaactgacaaactagctctcccgatgagccccagcccgcttagcccgagccccatccccagcccca

SEQ ID NO: 33736 - DNA, 100 bp, Homo sapiens
ttgatattttgagcaaactcttcttctctgatcagtgcccagaacaaggaaacagatactacccggcctcgacgtgataatgaggtggatggacaagact

SEQ ID NO: 33737 - DNA, 95 bp, Homo sapiens
caatccgtctggatcacggatgtaggaagtggttttggcacaaataccagtgggaatagtatttttggaagtaaaccagcacctgggactcttgg

SEQ ID NO: 33738 - DNA, 87 bp, Homo sapiens
gagcctcagcaagagaaattaaccctatacctctgacccaggtacccattcctggcccagtgggtaacaagagaatggttcattttt

SEQ ID NO: 33739 - DNA, 100 bp, Homo sapiens
cctgacctgtttgaacagcatcacacacctacctttaaccacagttgtcatggatgcactggtagaagatgatatctgtattctgaatcatgaaaaagcc

SEQ ID NO: 33740 - DNA, 82 bp, Homo sapiens
gctgctgtgcacccgcctgctgctgggcggcggctcctacaagtgcatcaagtgcagcaagatctgactgcagccatgagca

SEQ ID NO: 33741 - DNA, 100 bp, Homo sapiens
gttattttctggtcagctttggccggagccattcccctgaatggtgactctgagatagtgtgtgtaccatatcagtggcgtgtaactatgctcatcattg

SEQ ID NO: 33742 - DNA, 100 bp, Homo sapiens
tcgggagccgcaaggcgagagctgcaaaggctccagcaggagaagacagacacggtccgctgcatcaagtcctgccgccccaacgatgtcacatgcgtgt

SEQ ID NO: 33743 - DNA, 101 bp, Homo sapiens
gaaagtgctacgctatgaaggcttctttggactgtatagaggtgtatgcaacagcgttattgcaacaggctaacgaaaacagacaaaattcaactggaaaa

SEQ ID NO: 33744 - DNA, 100 bp, Homo sapiens
gccttattttttctcatggatgttcttcttcgagtatttgtagaagggcaaaatacatatctcagtgcattgatgagatcaagcaggagctgaagcagga

SEQ ID NO: 33745 - DNA, 75 bp, Homo sapiens
cccctatgatgaagagggcgtccactggagtccaacgtggagcacctgacggagaaaatgaagaccaccatccag

SEQ ID NO: 33746 - DNA, 50 bp, Homo sapiens
ggctcccacggattctacattatgggttacacatcattttggaatgactg

SEQ ID NO: 33747 - DNA, 148 bp, Homo sapiens
accccctttttcatgaggaaggaggtcatgcaggaggtggcacagctcagccagtttgatgaagaactttataagacggcgtacacagcgtgaccgcccagtgcgcgctgcgtgtgaccatcatcaccgatgagatgctcacccacag

SEQ ID NO: 33748 - DNA, 51 bp, Homo sapiens
gaggaccttctgggcccccacattaatgagttgttgacctcctgtactgga

SEQ ID NO: 33749 - DNA, 73 bp, Homo sapiens
acaggactgactccagtgatgacgcaggccttaaggagaaagtttcagctttgggacatccggaagaaagcag

SEQ ID NO: 33750 - DNA, 74 bp, Homo sapiens
gaaggactgcctgcctccaacagttttagttactatccagcagaaaacttgatagagtacaaatggccacctga

SEQ ID NO: 33751 - DNA, 83 bp, Homo sapiens
tcatgaacagaaacacctaggaagggagaactggattttttatcaagcagaaatgcatcgaacaacgagaatcaagatcactg

SEQ ID NO: 33752 - DNA, 100 bp, Homo sapiens
ttcatggtggagatgcttctggtttattttgtggctaccgctgttactgcttggagtgcctcaccgagccagggtccgcaagcaggtggtgaacatcccg

SEQ ID NO: 33753 - DNA, 74 bp, Homo sapiens
ccgtttgttcaggaaccaccagtgacagaatatgtgcagcgggggctacagcgagtggggctagatccccagct

SEQ ID NO: 33754 - DNA, 100 bp, Homo sapiens
aagtccaaagatttttacccaggtcgttcttccctctttccaatagatgatggcttgcttgatgatggtcacagtgatcaagttggagttttaaattcac

SEQ ID NO: 33755 - DNA, 95 bp, Homo sapiens
gttcgagcgctgttctcgctccggagccgctgcacatttcgggccaattcctgtccccccagcagcatggcatcgtgtgctgaaccctctgagcc

SEQ ID NO: 33756 - DNA, 88 bp, Homo sapiens
gcagagcttgacccaggcactagccggaaggtggtggtcgtacgctgtgaaggcatcaacatttctggcaatttctacagaaacaagt

SEQ ID NO: 33757 - DNA, 100 bp, Homo sapiens
acaagcaggaatggaatcctacgatgaacaaaaaccagttgcgaaatggtctgaggcagagtgtggttcaggtgataaaagaaaatgtggctgaagttac

SEQ ID NO: 33758 - DNA, 100 bp, Homo sapiens
aaagagggcctttggaaacttcttggaggttttcaggaaacttgcagcaaagccattcgggttggagtaattgtacggcaagaagaagctgaaatacctg

SEQ ID NO: 33759 - DNA, 50 bp, Homo sapiens
ccgccaccgtgcacatccgaatggatgagagtccctacactaaatccgcc

SEQ ID NO: 33760 - DNA, 98 bp, Homo sapiens
agctgcctcccacaagtagctccagcgccgtaagcgaggcctccttctcctacaaggaaatatgattccctgattcaggatcaggcccgggaactgtc

SEQ ID NO: 33761 - DNA, 100 bp, Homo sapiens
cttccacgtcttatgctggtgccagtgtatcactgttggcactactttgagttactaaaggattccatatggctctcatatcattccattccatctctgc

SEQ ID NO: 33762 - DNA, 95 bp, Homo sapiens
aagccgtggaataggtgtatcaagtaatggtgcaaagcctgaactcaaatagctataactgtaccaaagacatggaagaaaccaaaagatcggac

SEQ ID NO: 33763 - DNA, 82 bp, Homo sapiens
atcatgtctgcgagccaggattcccgatagcctgggctggaagctcttctacgtcacaggctgcctgtttgtggctgtgcag

SEQ ID NO: 33764 - DNA, 100 bp, Homo sapiens
ggaacatgtctgagtcggagctcggcaggaagtgggaccggtgtctggcggatgcggtcgtgaagataggacgggctctacgagtgcattctctgtgcct

SEQ ID NO: 33765 - DNA, 50 bp, Homo sapiens
atggacggcaccctcttcgattccaggcactatgtcgtccgaggcccaga

SEQ ID NO: 33766 - DNA, 50 bp, Homo sapiens
ctgaaggctgaagattttatagtggattctctagtgatccctgaaaagtt

SEQ ID NO: 33767 - DNA, 100 bp, Homo sapiens
aagaagaggaggaagccatgcgtaggtgtgttttatggaccatgtgctgctatgtatgcctgaagaagtacttgaaatgcaaatttggggagactttgcc

SEQ ID NO: 33768 - DNA, 100 bp, Homo sapiens
cgccgcccccgggctcgcggcctgcagaataacaagcctttgtattcatttgaagataatgcagactatgtttatgatgttatgtggtcacctacccacc

SEQ ID NO: 33769 - DNA, 75 bp, Homo sapiens
cgcagtccccgcgcgtggtcatccagatcgccatggatcggatgaagaagatcaaacggcagctgtcaatgacac

SEQ ID NO: 33770 - DNA, 75 bp, Homo sapiens
ctgaggaggagggcagcgtcccggcctttggagctgctgccaagcctggtgttgatcctattatctgggaacagg

SEQ ID NO: 33771 - DNA, 75 bp, Homo sapiens
ctatggtgaaacaccactgaagcattgccaaggggaatgagtttcagaatattccaggggagcaggtgacagagg

SEQ ID NO: 33772 - DNA, 100 bp, Homo sapiens
gctcttgcttttcctcgctggggtgtacggttttgacaagcttgcatcatgcgtgagtataagctagtcgttcttggctcaggaggcgttggaaagtctg

SEQ ID NO: 33773 - DNA, 82 bp, Homo sapiens
gatccaggaagactccctgagaaccccaagatcccacatggagattcgagtggtgaatgcatttcgtagttctttatatgaa

SEQ ID NO: 33774 - DNA, 100 bp, Homo sapiens
atcgtccgcagacgccgccaccgccatgggctcctgagtctcacagaaagttctccgctcccagacatgggtccctcggcttcctgcctcggaagcgcag

SEQ ID NO: 33775 - DNA, 75 bp, Homo sapiens
gctctactaccagacagagaagccaaggagcgggagctggaactgaagaacacctggtcagagaacaagctcagc

SEQ ID NO: 33776 - DNA, 50 bp, Homo sapiens
tcgtttgctgacagatattttggccactgcagaacaaattagacttgcac

SEQ ID NO: 33777 - DNA, 82 bp, Homo sapiens
ggagacagcgcagccatagaggaagtgaagaacatgtgatcatccaggccgagttctatctgaatcctgaccaatcaggcga

SEQ ID NO: 33778 - DNA, 82 bp, Homo sapiens
cgacgtcttgcctgtgtcccacttgttcgcggcctatagagtttattaaccacttaacctctcagaactgaacaaagacaac

SEQ ID NO: 33779 - DNA, 100 bp, Homo sapiens
cggccgaggcggtgctgcaagagaaggcactcaagtttatggtttggtgcacctcgatttggaggaagtagggcagggcccttatctggaaagaagtttg

SEQ ID NO: 33780 - DNA, 90 bp, Homo sapiens
tcttgtctgatgtggcatctagactttggtttacatacaggaaaaactttccagccattggcgcatattaaatttcctattgactacccc

SEQ ID NO: 33781 - DNA, 100 bp, Homo sapiens
tgccatttccctctctgttgaagcaaaggccggggcagacctcctagctcacagaacatttcctgcctgttgctcacactctgttgtccacagcataccc

SEQ ID NO: 33782 - DNA, 75 bp, Homo sapiens
gcgtgtcctcggagcgcggtccctgtattggtctcctgctcctagaggaggcatacacggaatacctgaggagca

SEQ ID NO: 33783 - DNA, 98 bp, Homo sapiens
cagcccagcccatgggcccaccggcctaccacgagaccctggctgatctcaggatgatggggcgcagccctgggtttgccatgcagcacatcgtgggt

SEQ ID NO: 33784 - DNA, 100 bp, Homo sapiens
gctgtctacctgtccacctgcaaggattcaaagaaggaatcagagatcattgatttcttcctgggggcctctctcaaggatgaggttttgaagattatgc

SEQ ID NO: 33785 - DNA, 100 bp, Homo sapiens
atttgttaaggattccaagtaactcttatttgcacgttcacgtccatgttcttcccaggaaggctggagactttcacaggaatgacagcatctatgagga

SEQ ID NO: 33786 - DNA, 83 bp, Homo sapiens
gtcgtggagaagaagagctgctgatgaggactgggacagggtgttcctgaaaagccccatagtgattgagtcttcaaaaccac

SEQ ID NO: 33787 - DNA, 75 bp, Homo sapiens
agtcagttgtttgatttcatcgatgatctggcagacctcagctgcctggtgtcaataactgggagatggacaaac

SEQ ID NO: 33788 - DNA, 98 bp, Homo sapiens
atgatgaagcggagaggaccaaggctgaagctactatccctttggttcctgggagatgacagtgatgaaaagcctctcaaaggaagccttcggtccct

SEQ ID NO: 33789 - DNA, 100 bp, Homo sapiens
aagactccaggaccctctggaagcctagaaatgaactacatcaagatcgttcttctcccccacctcctctcccagaaagaactctagagtccttctttct

SEQ ID NO: 33790 - DNA, 74 bp, Homo sapiens
acatgacagctgcacccatggacgttcgccagtgggttgacacagataggatgtggatccctcagttggtcgat

SEQ ID NO: 33791 - DNA, 95 bp, Homo sapiens
cgcggctgcggggctccagggccgccccgcccgcaggtgctatgctgtgggccccgctcaggctggtccagggaccctcatcatggccacaggag

SEQ ID NO: 33792 - DNA, 50 bp, Homo sapiens
ataagtgtccgtttgcattccagaaggcagtcatggatcaggtaatgcag

SEQ ID NO: 33793 - DNA, 100 bp, Homo sapiens
gtctcttcatctccgtgagaaaggtgcccccgaagtgaaagagatggcctggtggaaagcctgggtgtctgcaattgaactccaaggtgcagaatggttt

SEQ ID NO: 33794 - DNA, 75 bp, Homo sapiens
cgttgacaaggcactgctttttcatgacgcttaaagcttttcaagccaggccaagaagctgtgaagtaccagggt

SEQ ID NO: 33795 - DNA, 87 bp, Homo sapiens
tgcccacagcctagcagtcgggaccgtactgaggtgaaagaacttgtcctggacaacagtcggtcgaatgaaggcaaactcgaaggc

SEQ ID NO: 33796 - DNA, 101 bp, Homo sapiens
agagtcagcggtatattagttcagttaccactaccagagagacaagagagacacctccaacttcgacaaagagttcaccagacagcctgtggaactgaccc

SEQ ID NO: 33797 - DNA, 95 bp, Homo sapiens
agcggcgctgcctgtggagatccgcggaggccgacaggattcgttggctgccgtccccgctgctgtgcattgggatctcactggcatcgaatcta

SEQ ID NO: 33798 - DNA, 90 bp, Homo sapiens
gcgacgaagagttccctcagcctccggccttgtgtgtccgactcggcagcagtgatgccatggacaatattaccaggcagaaccaattct

SEQ ID NO: 33799 - DNA, 101 bp, Homo sapiens
cacagtcagagaaaccggggcaacctggagttgagacagacgactgggatggaccagcacacagcatgcctctgcaatgccatcattgctttgctgaaagt

SEQ ID NO: 33800 - DNA, 100 bp, Homo sapiens
agacaacagtgatgaggaaagctgtgaaagttctcaaggagggcagaccgtgttccatgaagcacaaagaaagtcccccaagtaatgccactgcagaaac

SEQ ID NO: 33801 - DNA, 96 bp, Homo sapiens
ctcctccctgctttgttccaataattttgtgctcggtctcggcgcggaagatggccggcggcgtggacggccccatcgggatcccgttccccgacc

SEQ ID NO: 33802 - DNA, 100 bp, Homo sapiens
cttgactgcatttttgggaaaagacagagtaagaagactcccgagccacaatggtgcgcatgaatgtcctggcagatgctctcaagagtatcaacaatgc

SEQ ID NO: 33803 - DNA, 82 bp, Homo sapiens
ccttcagtgtgctgctcaaaaacaggtgaattcatgacacctttgactcttctactgtctcagaccttaggtaacatacctg

SEQ ID NO: 33804 - DNA, 100 bp, Homo sapiens
cagcgcctggcctgcagcttccagcacagctaccgcctgctggtgcctggttatcaatactctggctgaccatcatcatcgtgggactgactttggtgga

SEQ ID NO: 33805 - DNA, 76 bp, Homo sapiens
gccgcctgctccaaactccaccagccccgtgtccttcattgccacgtacaggtttactcctggcttgggggcatta

SEQ ID NO: 33806 - DNA, 87 bp, Homo sapiens
agcccgcacggagcggccgggcgggacaggtgtcttcaaaaacaaacatatttaaaagattttacttctcatctccaggaagaacca

SEQ ID NO: 33807 - DNA, 50 bp, Homo sapiens
gatcatcaccaaggtcattttcccagattttgaggatgacatgattataa

SEQ ID NO: 33808 - DNA, 90 bp, Homo sapiens
atgctgttgtagaaactctagtcaaccataggaaagccttacgacagtctgcctacctcacagacctgcttcttccagctgaggctgccc

SEQ ID NO: 33809 - DNA, 100 bp, Homo sapiens
gtgtcccgggcccagacgaattgattatctgactccagaaaaagaacgcgtacaggaagatcttggcctgctgcaataccacatttgcggagaagaagag

SEQ ID NO: 33810 - DNA, 74 bp, Homo sapiens
atgcctcgaactaaacaaattcatcccagaaatctaagaggttggtcaaagaaaaagtgatgtatgaaaaagag

SEQ ID NO: 33811 - DNA, 87 bp, Homo sapiens
gcaatggccgctgagaacagcaagcagttttggaagaggagcgctaagctgccggggagctcatcatgtcactacagtgaacagtac

SEQ ID NO: 33812 - DNA, 100 bp, Homo sapiens
gagaccttggctggtcagagggctgtgaagacgcacggtgccaggaccaagtatctgataatcttgtgccgtggaaatcagaagggcaaaacgaagcagt

SEQ ID NO: 33813 - DNA, 97 bp, Homo sapiens
ccatcgagccagaagcagtatttgtcctggtgtcatggagaaactccagctgggcccagagattctgcagcgggaaaatccaaggcttatttatgcc

SEQ ID NO: 33814 - DNA, 75 bp, Homo sapiens
gttcaagaagtggccggagagttctgcatgttgattcgctaatgtaatgcttgaatatgatattgatgaagctca

SEQ ID NO: 33815 - DNA, 82 bp, Homo sapiens
gaagaagtgcttcagcgggccaggaagcgcatccaggagccttttatgtcacctcggtaccctggaggtccaaggcccccat

SEQ ID NO: 33816 - DNA, 75 bp, Homo sapiens
gctgcggcaaggacgagccggggcgctgaagtgagaaagatcagtctaaagaaaaggagaagaaagtgaaaaaaa

SEQ ID NO: 33817 - DNA, 100 bp, Homo sapiens
gtgctccattatgtcgtgtgcttccccgcaatggaatggcagggacacggccctgatggtcacccgtgtggtcaaccacaggcgcttctcagccacagtc

SEQ ID NO: 33818 - DNA, 74 bp, Homo sapiens
tctgttctccaggagtgggatttatatcaagcaggtggtgaacatcccgtccttcattgtccgcctggattccc

SEQ ID NO: 33819 - DNA, 100 bp, Homo sapiens
tgaagctccttacacatcccctgataaactaaaggtcatcttccacgatgttgctgtgctgacggataagctcttccccatcgtggaggccatgcagaag

SEQ ID NO: 33820 - DNA, 75 bp, Homo sapiens
ggctcgccttgtatctcaacaccctgagtgcggatttctgctatgatgacagaagcatcagatggtgaaggagaa

SEQ ID NO: 33821 - DNA, 75 bp, Homo sapiens
gtggtttgtctgtgatggctggaagttcctctgtaccaggctaattcacctaaataagattgatcctcatgctcc

SEQ ID NO: 33822 - DNA, 71 bp, Homo sapiens
caggctttcctacaactcatgcccagcagcagcaagcaggttgcaagaaagctcaagtagcctatggagag

SEQ ID NO: 33823 - DNA, 98 bp, Homo sapiens
gattgctttggaaggagcaaatgtaatttataaacgtgatgttggaagccaaggagcaataactgaacgtttaagaagcttcagtatgcatgatttaa

SEQ ID NO: 33824 - DNA, 100 bp, Homo sapiens
accttccttcgaattcgctccaagaaaaatgaaattatggttgcaccaggcttattaagggagatggcgaggtcctagaggaaatcgtaaccaaagaacg

SEQ ID NO: 33825 - DNA, 80 bp, Homo sapiens
ccttgtggataagcacaaagtcaagagacagcgattggacagaatttgtgaaggtggttattaacttggtgatgcttttg

SEQ ID NO: 33826 - DNA, 74 bp, Homo sapiens
ttttattgcttggaagagtttaatagataattttgctttaaatccaggcggcttacagggagaacacagttggc

SEQ ID NO: 33827 - DNA, 100 bp, Homo sapiens
cagcaagactggagtccctgatggaattatgcagtttattaagatacttacaaggagattacgatttcggttggaacgtgcacctggtgaaactgcattg

SEQ ID NO: 33828 - DNA, 76 bp, Homo sapiens
gccctctcagcaagaacgggaacaaaactctgattcatgatgttgctatcaaaagttgagaaattgtcagaagaaa

SEQ ID NO: 33829 - DNA, 75 bp, Homo sapiens
gacggcgccgctaggatgaagctcgtgaggtcaaaatgcagatcttcgtgaaaacccttaccggcaagaccatca

SEQ ID NO: 33830 - DNA, 83 bp, Homo sapiens
cgcggcgccagttctccggcgggaaggaaaaccgcgcagagagaagatgctcatgaagcagcaggaccggctggaggagcgag

SEQ ID NO: 33831 - DNA, 90 bp, Homo sapiens
caagcagttcagaagagccaaggaataaacatgcaatgaacccaaaagggtaaaacttccttttcctgtagatcaaatcacagatcttcc

SEQ ID NO: 33832 - DNA, 82 bp, Homo sapiens
caatcatattccgtgaatcatttgctgatgtacttcctgaagcagctgctctagtgaagaacaagatcactcaaggtgaagg

SEQ ID NO: 33833 - DNA, 100 bp, Homo sapiens
cgaggatccgttgagatgaacctgaaggctctccggaaattgcgctaggttacaggagtgtaaggacctcagcagccatgtcgaagccccatagtgaagc

SEQ ID NO: 33834 - DNA, 113 bp, Homo sapiens
tggccaagggtaacatccccgccgagagctacaccttcttcattgacatcctgctcgacactatcagtgacatgggctcgagggttggctaccccgctcaggtttacaaaact

SEQ ID NO: 33835 - DNA, 118 bp, Homo sapiens
ccgcaccatcggcaagggcaacttcgcggtggtcaagcgggccacgcacctcgtcaccaaggccaaggtgtagaatgagccaaggagactcaaacccagcagctattccgcatgcagc

SEQ ID NO: 33836 - DNA, 100 bp, Homo sapiens
acgctgggactcgtacgagaacctcagtgcagatggagaaggggggctttctctgtggtccgacgctgtgtcaagctctgcaccggccatgagtatgcag

SEQ ID NO: 33837 - DNA, 90 bp, Homo sapiens
tgcgagtggacgccctggaaaggacgctggagcagaagatgaccgcacctcgagcaggagtggggatgccacgtctgcccccagcgcccg

SEQ ID NO: 33838 - DNA, 100 bp, Homo sapiens
cccagaaggactcttctatgaggatgtaatccctgttcattactacttaatacctccaccaacaaagactaagaatggcagcaaagataaggaaaaagat

SEQ ID NO: 33839 - DNA, 100 bp, Homo sapiens
tgcagttggatagccccgaagatgcagagttcattgttgccaagctgacctgatctccagcttcctgctcatcaccatgctcttcatcatcagcctgagc

SEQ ID NO: 33840 - DNA, 74 bp, Homo sapiens
tctgaattctttgatatctttgagaaggagaaagtagataaggaagctctgccaaaactgttacatcaggttgt

SEQ ID NO: 33841 - DNA, 83 bp, Homo sapiens
tgacagcaacagctcggcgggctggaaggtattagaaaactactcggatgctccaatgacaccaaaacagattctgcaggtca

SEQ ID NO: 33842 - DNA, 101 bp, Homo sapiens
gtcggaaagcgacaccgaggaattctatgatgcccctgaagatgtgcacctagggggcggctaccccgtgggaggggccgtatggggtctttgctggaaga

SEQ ID NO: 33843 - DNA, 100 bp, Homo sapiens
ctcctgagtagctgggactgcaggccattttgcaacctgtgttggcagcagaagattttactatctttaaagcaatgatggtccagaaaaacattgaaat

SEQ ID NO: 33844 - DNA, 50 bp, Homo sapiens
agaagcggaagaagatggcgctcaccaggaacaagatcactcaaggtgaa

SEQ ID NO: 33845 - DNA, 74 bp, Homo sapiens
aaactcgggccaaatgacaatgatacagttagaggacagatagtagctgaagaagcatctgtagggaatccaga

SEQ ID NO: 33846 - DNA, 106 bp, Homo sapiens
ggggcttacgacctccgcatcctggacagcgcgcccaccggaagaggatcacctagcccgggtagaagaggcaatcacccgtatgcttgtgtgtgccctgaaaact

SEQ ID NO: 33847 - DNA, 82 bp, Homo sapiens
ccgcaggcagtcccgcggcagcaggatcacaggacccggtcagcccaaggagcaggggtccagcagctctgcggaggcatct

SEQ ID NO: 33848 - DNA, 80 bp, Homo sapiens
caccatgagcaaagctcaccctcccgagttgaaaaattgatgcggatgaaattaaaaggctaggaaagagatttaagaag

SEQ ID NO: 33849 - DNA, 98 bp, Homo sapiens
caaaccttcagcctgaagacccgggagggaaaaatggctatggcatttcctctgtgccatctgcttccaattctaaatccataaaagagaatagtaat

SEQ ID NO: 33850 - DNA, 100 bp, Homo sapiens
cccgactcttcctggtgaagcatctgatgcacgttccatccggcgctcagctgggcttgaggtgctcctgacctctgataaagctgcagccaatttctca

SEQ ID NO: 33851 - DNA, 100 bp, Homo sapiens
cctgctctgtgcgcgcctccatctgggccatggatgggtcaaaatgcggatcttcgtgaaaacccttaccggcaagatcatcacccttgaagtggagccc

SEQ ID NO: 33852 - DNA, 98 bp, Homo sapiens
tccgcagctctggttcctgttgcggccgattatataaatggtggtgaactttttactcatctttctcaaagagagcgtttcacagagcatgaggtgca

SEQ ID NO: 33853 - DNA, 74 bp, Homo sapiens
ctcggtgcagggctccaccccgtcgcctcgacaggatgatcggctgaatgtaacagaggaactaacgtccaacg

SEQ ID NO: 33854 - DNA, 90 bp, Homo sapiens
atttgcgggctgccattcccctgcatatctgtactggcctcattgctacgatttcagagtaccctggtaatagctgagcatgcaaatgat

SEQ ID NO: 33855 - DNA, 74 bp, Homo sapiens
cgctcgcagagcaggtgcagaagggatctccagcgatgtaatcgaaaaggcccgcaacttcaagatcgtcacgg

SEQ ID NO: 33856 - DNA, 90 bp, Homo sapiens
accaaggaggagcctgttccagaactgctggaagctgaggaggagataagcaaggacctcagagccacactgaacgccttcctgtaccac

SEQ ID NO: 33857 - DNA, 100 bp, Homo sapiens
cagcaacagcagcagcaagttagtggattaaaatctcccaagaggaatgacaaacaaccagctcttcaggtgaagatggagctggaaaaacaagcttaat

SEQ ID NO: 33858 - DNA, 90 bp, Homo sapiens
gcgcagcccggaaatgtccggcaagatcgagaaagcaggtgccaagtcctgccctgccaacttcttggcagctgccgacgacaaactcag

SEQ ID NO: 33859 - DNA, 100 bp, Homo sapiens
ttcccgactgctccatcgaggcagccatggtgaaggtactggaagatgctcacagagatgccaacctgcaccatgtagcttgtaatatagtgaaaaaacc

SEQ ID NO: 33860 - DNA, 100 bp, Homo sapiens
cccgcgcaccacagcccatccccagaagatcctggtcccctgctttaaccatcgaaaatgagtgggctcgggatgagtttgaaggcctcttcaagcagcc

SEQ ID NO: 33861 - DNA, 100 bp, Homo sapiens
agtgaagtgaaaatagcaaacaatccaggtggcagggagtgcatcaaaggtgtgaacgcaggtgatgactgaaaaagggaaactgtgccactatttgtac

SEQ ID NO: 33862 - DNA, 75 bp, Homo sapiens
cggaagatgtgtctgaggtcatctttggacatgtcttggcagcagactctccagaaagagcaacagtaatggagt

SEQ ID NO: 33863 - DNA, 102 bp, Homo sapiens
gtggctctcatgaacagcaacgtcagcagcccggtcaacctggtatattcagcatgcagctttactttttcaaagattccttcaccatacaccttatcaaaa

SEQ ID NO: 33864 - DNA, 100 bp, Homo sapiens
ccgaaccccgcgcccgcaggacgccccagccagaactcaagacatggctgcccagtgtgtcacaaaggtggcgctgaatgtttcctgtgccaatcttttg

SEQ ID NO: 33865 - DNA, 90 bp, Homo sapiens
ctggaagaaggaaaagaaggcagtcacgtttttcgatgatgtcacagtctacctgtttgaccagcatgcacttaatgaagttgatcctgg

SEQ ID NO: 33866 - DNA, 75 bp, Homo sapiens
attgatggcagcaacgtggcgatgagaatcccaaggactgcagcaaagccaaaaagctggtgtgtaatatcaaca

SEQ ID NO: 33867 - DNA, 90 bp, Homo sapiens
ctggggcagtagactgagcagcaacaccagccacaagtcctaccggcctctcaccgtcctgactttcagaaatgcactcggtgatggaaa

SEQ ID NO: 33868 - DNA, 100 bp, Homo sapiens
gaaggaaatcatgtcaagcgaagccttgaaaaagctgccctgagacggtgtcccgccgaaaggttgcaatgaatgtgtatgagttatcatcagctgccgg

SEQ ID NO: 33869 - DNA, 82 bp, Homo sapiens
gctggattaggtcctcatgctgctgtggtcattgctggtcatctttgagattggaaaggtgtatgagcattgtgacatcgat

SEQ ID NO: 33870 - DNA, 76 bp, Homo sapiens
accgagcaaattgaagagacgttaaaatacttcccattctctggatattcaacaaatacaaagtatgacccacacc

SEQ ID NO: 33871 - DNA, 83 bp, Homo sapiens
acagatgcgtggagtccgcgaagattcgagcgaaatatcccgacagggttccggacttatcaaactggtttcaaagcacagag

SEQ ID NO: 33872 - DNA, 100 bp, Homo sapiens
cccctttgaattaattatggctgaccctctttgcaagttcagtgcttaacctgaccgaactggctgcccttcggcctgaccttgggaaactgaaaaagat

SEQ ID NO: 33873 - DNA, 100 bp, Homo sapiens
gaaatacatggaccgaagtctggacatcaatgcctttaggcaatctgcacatcgtgctgccacacgaggcttcattcgttatggctggcgctggggttgg

SEQ ID NO: 33874 - DNA, 49 bp, Homo sapiens
ggaggtgaagccgctgccccgagggcttcataaacttcacttaccaaat

SEQ ID NO: 33875 - DNA, 75 bp, Homo sapiens
cggctcctcccaggtggcctcccgcgtgctggccatgaagaattatatccagatcgagagacagaagattctgaa

SEQ ID NO: 33876 - DNA, 83 bp, Homo sapiens
ctactacaaccagagcgaggacggaggaagacagcgaacccctcccaccacaggatgcccagacctctgggtcactgttgcac

SEQ ID NO: 33877 - DNA, 100 bp, Homo sapiens
agcgcgagagggggaaaagcgagcgatcgagcgagcgcgcgcgcgaaaactccgggcagttggattggatgctgctggcaagacaaccattctgtataaa

SEQ ID NO: 33878 - DNA, 101 bp, Homo sapiens
gacatggggcacccggtgtaccgcggcgagaagccccagctgcactacgcggcgggctccccagaccaggagggcttcttcaatctgctgagccacgtgca

SEQ ID NO: 33879 - DNA, 100 bp, Homo sapiens
tcaggcctgcacggacggtgttggttgggaaagatcaactgaaatcggcaaacttctgagttcctacttgcaaaagaaaagtgacgtggaggatcactcg

SEQ ID NO: 33880 - DNA, 109 bp, Homo sapiens
agttacctacgtgttagaaataaatctgatattgcaccttcacagcaacaaggtgaccaagaatatggcccaggtgaccaaagccctggacaaggccctgagcaccatg

SEQ ID NO: 33881 - DNA, 82 bp, Homo sapiens
agagcggagggagccccagacacggttggatccatgccgtctacacccctgtagactctttggtgttcggcggaaacatcct

SEQ ID NO: 33882 - DNA, 90 bp, Homo sapiens
cagattcccttccatgcagagccaccggaaaccataaggaggcaaaggaagcgtccagaatctgggagcatccggaaaacttttcggagt

SEQ ID NO: 33883 - DNA, 100 bp, Homo sapiens
tatgcaacgttatattttgtcttctgtgtggattcttcagaaagtgaacttggcattttagatctaattcaatgctctacagcatcgagctgatgtgtcc

SEQ ID NO: 33884 - DNA, 100 bp, Homo sapiens
aggaagttttctactgtaaagtcaccaacgagatcttccgccactacgacttgtactcccagagtacctcatccacgctttcttctgtgtcatgtttctt

SEQ ID NO: 33885 - DNA, 100 bp, Homo sapiens
ctgcacaggtggcctccgaacccgggaaaagaggaactaaggcggaggaactgagacgtttcgaattccagggctccccagaccccgacagcacaggggc

SEQ ID NO: 33886 - DNA, 100 bp, Homo sapiens
cgaggctccctggagcccgacgcagagcagcgccctggccgggccaagcaggaatatgacagaactgatggtttttcacacagtccctttggcttgaagc

SEQ ID NO: 33887 - DNA, 100 bp, Homo sapiens
aaatgaaggtaaagtggataatttatcaagagacagcaacagagattgcacaaatgaactgtctaattcttgcaaggctctccaatccagtgttgaatag

SEQ ID NO: 33888 - DNA, 100 bp, Homo sapiens
tctttcagacaactatactctggatcatgacagagctattcacatccaaggagatacaactcgtcaacgaatcaaattcagtgatgacagagtatgcaag

SEQ ID NO: 33889 - DNA, 75 bp, Homo sapiens
cgcagatgttgtcaaggtggcctaccaggaggccaggggtgtcgccatgagaatgggtccagcttggctttggct

SEQ ID NO: 33890 - DNA, 100 bp, Homo sapiens
cgccgcggccgctgcggacggacgctcgcctgccggctgagggactttgaacatgtcggggatcgccctcagcagactcgcccaggagaggaaagcatgg

SEQ ID NO: 33891 - DNA, 75 bp, Homo sapiens
acgaacttcaaaggggaaagcaaggccaaagacagggagaaggtggacccccaaaagtacaagggcatatttaac

SEQ ID NO: 33892 - DNA, 100 bp, Homo sapiens
cattgctcttagcaggaaggacaaaactattcaacatgtggaagtattttgttatgccaggctgtctcctaagcatgccccagatattcctgatgacagc

SEQ ID NO: 33893 - DNA, 100 bp, Homo sapiens
tgatctcagaatttcctgacaaatttggatcctgtgttcctcagccttgcaaaggaccatcgcatgaaacttatgcaacaacaacaggaagtggctggac

SEQ ID NO: 33894 - DNA, 100 bp, Homo sapiens
gatgttgtcaagaagggcgctatttgtacttctaaatactccagtccttttccatgcactggaggagagaacatcatcaagaaggtgatcgggcagaagt

SEQ ID NO: 33895 - DNA, 90 bp, Homo sapiens
ctgctgtacaccctcaacaaacaccagcgctttggacgctctgcacaaaagccaccatgcagacggtccgggccgccgacaccaatgaag

SEQ ID NO: 33896 - DNA, 100 bp, Homo sapiens
gcagaaggactgcctcactgagcaaccaagagtgattgctggcttcaaccgccttcggcaggaacagcgaggcctggcatccaaagcagctgagttggag

SEQ ID NO: 33897 - DNA, 100 bp, Homo sapiens
cgggcgcgggcgcgaaggcgatccgggcgccaccccgcggtcatcggtcaccggtcgctctcaggaacagcaggcatctgcatctgggaccgacctcctg

SEQ ID NO: 33898 - DNA, 50 bp, Homo sapiens
cttccagggtcggatcaaagaagggttggagtgcaatggcgcgatctcgg

SEQ ID NO: 33899 - DNA, 101 bp, Homo sapiens
agcctgagcgcaacacttctccgagccagcgagccagcgagccgccgacccgccgagcaaaatggtagacgcaccctctgaagatggtgactccctcctga

SEQ ID NO: 33900 - DNA, 82 bp, Homo sapiens
tgatgtctgggagcccttccttgacagcccgggccgagaagacctcctgccccccgaggtctgcagtctcctgaacccagca

SEQ ID NO: 33901 - DNA, 82 bp, Homo sapiens
acgagagcggctgctgtctgcgcttgaggacttggaggtcctgtctaggggtttatgccctggacagcatcatgcagacctg

SEQ ID NO: 33902 - DNA, 100 bp, Homo sapiens
caatatcagttgggaatatgagggaccagagcatgtgaacttttatgttgaatatggtgtagcaggcagacctctggtcctcaatcgagttcctctacga

SEQ ID NO: 33903 - DNA, 98 bp, Homo sapiens
gtaacaacagcgaggaagaagaggacgacgacgacgaggaagaggaggtttctgagaagcatgttgtggagacattttttggatttgatgaggagtct

SEQ ID NO: 33904 - DNA, 100 bp, Homo sapiens
cactgtggtctgttgtaccccactgctggggtggtggttccaatgagacagggcacaccaaactccatctgaactcccccactggaaaggattctgaaag

SEQ ID NO: 33905 - DNA, 59 bp, Homo sapiens
ccatccgtctcaagactgtgaaaccagggacaaaggaggaaggagaccgggagattacg

SEQ ID NO: 33906 - DNA, 80 bp, Homo sapiens
tcaataaccctgggctcagggtcagagcccagcctggggactatgtgctggtgaagcatctgcaagaaggacgaaaagct

SEQ ID NO: 33907 - DNA, 100 bp, Homo sapiens
cgggtcgttgtggtgcgctgtcttcccgcttgcgtcagggacctgcccgactcagtggagccgtcactctgctaagcctgtatctgctgttcggctacgg

SEQ ID NO: 33908 - DNA, 80 bp, Homo sapiens
gaaaagcgtttccgcagacagaagtggggagaagcggagccctgggcgctgcctatggcacagccaagagcggtaccggc

SEQ ID NO: 33909 - DNA, 82 bp, Homo sapiens
ggctctgcagcggcaacccccagcggcttaagccatggcgatggatagaatgacagaagatgctcttcgcttgaatctgttg

SEQ ID NO: 33910 - DNA, 79 bp, Homo sapiens
gactacaaggtcgcctacgtgcagctggttgtgaccgagattcccgacgagagagactgaggggaagagaggaaggagg

SEQ ID NO: 33911 - DNA, 75 bp, Homo sapiens
gtcttgggcagcatgcagtgctttctgggtattctctactgccgctgatggtcaaacgcaagtggaaattaaagt

SEQ ID NO: 33912 - DNA, 75 bp, Homo sapiens
ctgcaggcttgccgaagaagggaggtgcccgtggttgacacgagctgtgtccccagctgttcccgtctacaatgg

SEQ ID NO: 33913 - DNA, 100 bp, Homo sapiens
ccgaaacatgatccagtctcggttgactcaagagtgtggagaagatctcagtaaacaggaggtggataaagtactaaagccggaagtcggtgcagcccac

SEQ ID NO: 33914 - DNA, 97 bp, Homo sapiens
cagagccctcctccagaaacccctgcgtccgccacggcccagacctgaaagatgtctgaaaattccagtgacagtgattcatcttgtggttggactg

SEQ ID NO: 33915 - DNA, 100 bp, Homo sapiens
tgaccccgtacctgctggggccggacaagaacctgaccgagagggaggtctcctctgagcctccggcctccataagacccaaaacagatgacacctcttc

SEQ ID NO: 33916 - DNA, 74 bp, Homo sapiens
ggtgataagaaatctattcactgtcaagaaaagacagctttgatttctggctgcaaaaaagatatgaggaagag

SEQ ID NO: 33917 - DNA, 101 bp, Homo sapiens
ctgacttctccactggttcctgggcaccgaaaggtgtttcagtcacctccagtaacacgggcgtgccagatatctcgggttctgtgtactccaaaacccag

SEQ ID NO: 33918 - DNA, 74 bp, Homo sapiens
cgtgtttgcggttcagccctttgatgaccgcagcaggaaagcggcgttatgacaggaagcagagtggctatggt

SEQ ID NO: 33919 - DNA, 100 bp, Homo sapiens
caggccgattatgtccattgttctcttggagcagctggtcatcatgttttcggctttgtgagaaaccttaccatcaaacacgatggccagcaacgttacc

SEQ ID NO: 33920 - DNA, 88 bp, Homo sapiens
caaaaagcctgcatcagagctcccattgaccacgggttggaacagctggagacatgcagcagtgttgtactgctacttctataaacgg

SEQ ID NO: 33921 - DNA, 96 bp, Homo sapiens
ggcagtgcgaggtggaggaggcaaacaagtgtaatcgtttatacatacccacagcttctttcatcggaagaaaactactacagcacttcttacagc

SEQ ID NO: 33922 - DNA, 100 bp, Homo sapiens
ttcaaccctgtcctgggggagacctacgagtgtgagcggcctgaccgaggcttccgcttcatcagtgagcaggcttgacacagcccgtggaggaccaggg

SEQ ID NO: 33923 - DNA, 100 bp, Homo sapiens
gcatcttgcaaagaaagattcttcagtgaggaggagaatggagctcaaactttggaacaaataccgaatttccaacattccatcactaatattcctcgac

SEQ ID NO: 33924 - DNA, 100 bp, Homo sapiens
acagctgctgcagtttctttgcagagtgtgatgaatgcagactctgctaccattttggctgtttggatcctcctttgaaaaagtctcctaaacagacagg

SEQ ID NO: 33925 - DNA, 50 bp, Homo sapiens
gtcagtgtggcaaccagatcggtgccaagatgtccagctcgccgctgtcc

SEQ ID NO: 33926 - DNA, 100 bp, Homo sapiens
tgcgggagaggctgcagcggaggcggaagcaggactcggggcacttggaatatgcttttaaggctattaaccagggtggccttacatcagtagctgtcag

SEQ ID NO: 33927 - DNA, 50 bp, Homo sapiens
tgaacatcatgaattcccaagaaggagatgaggaaaatgaggcccaaaga

SEQ ID NO: 33928 - DNA, 88 bp, Homo sapiens
ggaaacggaggaactacaaccagggagtcgtgggatccagaggaacaaggagacattgtggtagccttgtacccctatgatggcatcc

SEQ ID NO: 33929 - DNA, 75 bp, Homo sapiens
gacgaaagactcctgctgaaagaagacagcactctgaaagcagctggaatcggcttatcaggagggcagacttca

SEQ ID NO: 33930 - DNA, 75 bp, Homo sapiens
cattgctgggagcctgaaaactgtgaatgaacaagtaagaagtttgcgacagagcactattgccaagcgttcaaa

SEQ ID NO: 33931 - DNA, 75 bp, Homo sapiens
cagctgaacgtcattaacggcatcctcttcattcctctcagccatccttcccctgcggagtatgtcgaggtgctc

SEQ ID NO: 33932 - DNA, 83 bp, Homo sapiens
aatcaactcatcttgacagcctctgctgatagaacagttattcacggatgataccatcggggaccttaagaagctgattgcag

SEQ ID NO: 33933 - DNA, 98 bp, Homo sapiens
ccatcgaagctctagaaatgaatgtttccatctcttcagagatgaaccagagttatgcccagccaagtcttcagtatatccaggggcaacagattttc

SEQ ID NO: 33934 - DNA, 100 bp, Homo sapiens
cccaaaacagtgcacagacggctgacggctcacactctgtccaatgtgaaagaaaacccattgaagtatcacgagaaaaatcttccaactgtgccgcttc

SEQ ID NO: 33935 - DNA, 100 bp, Homo sapiens
agagggacacgctggtgcatctgtttgccggaggatcaggcctttgtgacactaaccacaaacgatgcctacgccaaaggtgccctggtcctgggatcat

SEQ ID NO: 33936 - DNA, 83 bp, Homo sapiens
aaaaacgtgtgggtacgaccttgtgggcctttggagtgacgctgtgggaactcatgactctgggccagactccctacgtggac

SEQ ID NO: 33937 - DNA, 101 bp, Homo sapiens
aaatgggcagctgaaatattaccagaaccaaaaacttttgctagaaaatcagcttttacgagagaaaactcatggccttgtagttgagaaccaggagttaa

SEQ ID NO: 33938 - DNA, 100 bp, Homo sapiens
cagtagatccagaaacacaggctagactggaagctttactagaagctgcagggattcgataaacaagtggatgtgtcatatattgccaaacattacaaca

SEQ ID NO: 33939 - DNA, 100 bp, Homo sapiens
ctgggattagccaaaccagctcatctttatgacaaagggagtcgggccccgggccgccaccgtcacctcggccgctgccgctgtcgccatcgccttgttt

SEQ ID NO: 33940 - DNA, 82 bp, Homo sapiens
ggccgtggaagcggccaccgactactgtcagcagctgtgccaggctccagggagcagtgtcagggccagggagacgatggtc

SEQ ID NO: 33941 - DNA, 90 bp, Homo sapiens
ccgccgtctaaccgctacgagacgctgctgaagcagaggcatgtgcagggaccaggggaagagacatgcgagggcctcatcatgccccag

SEQ ID NO: 33942 - DNA, 100 bp, Homo sapiens
tcgccccttgcaacaaaggcagactgagcgccagagaggacgtttccaactcaaaagggtctcgctgttggagttggatttggggctatagaaaagacgg

SEQ ID NO: 33943 - DNA, 80 bp, Homo sapiens
cagtcctcatcctggatgaagccaccagcgctttggatgccgagagcgagtatctgtgaacacttgtcctgctccttcac

SEQ ID NO: 33944 - DNA, 49 bp, Homo sapiens
aggctggcgcgtctccatggaggcgttcccgttgcccgctctctcccgg

SEQ ID NO: 33945 - DNA, 100 bp, Homo sapiens
caccaaagtagttctagatgacaagattggccaaaatgggaaggattggattccactctcttccacgaagagtcaatgggactggctaagatcaaagtct

SEQ ID NO: 33946 - DNA, 75 bp, Homo sapiens
ctgaagagaaactgcaccttatcacccggaacctgcagaagttcaccatgtctattctcaagatccatgccaggg

SEQ ID NO: 33947 - DNA, 80 bp, Homo sapiens
cagctgaagagcgacaagccgctggcagccgcggatctcaccgccgctcaggcaaacttcagcgtgcccgtcgtcagcgc

SEQ ID NO: 33948 - DNA, 98 bp, Homo sapiens
ccgctaccgctcaggtgctgcaggcacagcccgagaaaccgcagcactacaccttgccagcaaagcacggacagagaaggaggagaagctgagccagg

SEQ ID NO: 33949 - DNA, 83 bp, Homo sapiens
aaataaaatagccatctcacctttgaaatcgccaaataagtatgactatgaatatgatgaaaatggtgacagagtcgttttag

SEQ ID NO: 33950 - DNA, 74 bp, Homo sapiens
cacttctcagacaagttccatcccacctttgagtcaggtatatgtctcgagtccacggtatgcaccctaaagag

SEQ ID NO: 33951 - DNA, 50 bp, Homo sapiens
gaaaaccagaatgaaagtagtcagggtgcttttgaagatgatgatatcac

SEQ ID NO: 33952 - DNA, 95 bp, Homo sapiens
ggcattgttgggagcgctgttttcgtgatcttcagaccccaggttctttgaggaaccgctgctgctggccgaactcaagcccgggcgcccccacc

SEQ ID NO: 33953 - DNA, 83 bp, Homo sapiens
cccatggaatatctgctgtgctgctgctgctgctgctgctggctccagggagcagtgtcagggccagggagacgatggtctcc

SEQ ID NO: 33954 - DNA, 100 bp, Homo sapiens
cgaggcactggccaagcgcaggaggatcgagatcgacaccttcatcaagggaccagcgcatcagccaggacgtggagcgattctgccggcagctcagcag

SEQ ID NO: 33955 - DNA, 100 bp, Homo sapiens
tgaagtggcaggaggaggaggaggggctccggctggtctgtggtgaggccaccccagcagacatgtttgccaaggcctttcgggtcaagtccaacacggc

SEQ ID NO: 33956 - DNA, 100 bp, Homo sapiens
ctcacctgtatcagctggcccctgtcgattgaaaatggaagccctgactgacagggaacatggaatgatagaccctgacagcggagatgaagcccagctt

SEQ ID NO: 33957 - DNA, 126 bp, Homo sapiens
tgggacatcctgagtggggagcagctgcgggtgttccgggagcaccggggctccgtcatctgtctggaggatggaggaagccttgtaggagaagtaaatgaagatggggagatgactggagagaag

SEQ ID NO: 33958 - DNA, 75 bp, Homo sapiens
gggccaagtatgtgtcccacggcgccacaggaaaggggcctttatcatctgctggactcctggattggttttgtt

SEQ ID NO: 33959 - DNA, 87 bp, Homo sapiens
tggattggacaagcaggcaaagctgagggtttcatcaccttaaatggttttgaaccaatgaaggtgtattcccttaaaaagacggac

SEQ ID NO: 33960 - DNA, 89 bp, Homo sapiens
agccctggactgtgaagagtgaggagaccatagctgcacagccaggctacagcatgctggccatagggattggaaccctgatctacggg

SEQ ID NO: 33961 - DNA, 100 bp, Homo sapiens
ggagccgctgcccgaactcccggcccgaactccaggtcatcatcagatttgaaatatttaaagtggatacaaaactatttcagcaatgcagacaattaag

SEQ ID NO: 33962 - DNA, 100 bp, Homo sapiens
ggactgacggcaacctctacaaggccaagttcatctcctccgtcaccagccacatctaccagacaatgcagatcttcgtgaagactctgactggtaagac

SEQ ID NO: 33963 - DNA, 100 bp, Homo sapiens
aagaaaggagactaccagaaggcttatgaggatggctgcaagactgtcgacctaaagcctgactggggcaagcctttctgaagggcctgagtgacaagca

SEQ ID NO: 33964 - DNA, 75 bp, Homo sapiens
ggatgacttgcttgggtaaggacatgaagacagttcctgtcataccttttaaagatctacgcagaccccaccaag

SEQ ID NO: 33965 - DNA, 98 bp, Homo sapiens
aaggagctccagcaagcccagacaaccagaccagaatcgacacaaatccagcctcagcctggactccctggaggaaaagcggaagcggcagcggtctg

SEQ ID NO: 33966 - DNA, 100 bp, Homo sapiens
tcgtgatccagaagtccagagctgaggactgcctgtttgcagccacaatggtgcgcatgaatgtcctggcagatgctctcaagagtatcaacaatgccga

SEQ ID NO: 33967 - DNA, 87 bp, Homo sapiens
aatcgtatacatagacggatctcaatggaggttgtcaatagggtgactggaaatttcaagcatgcatctcctattctgccaatcact

SEQ ID NO: 33968 - DNA, 98 bp, Homo sapiens
ccggcccccgagagccgccgacatgaagaaagacgtgcggatcctgctggtgggagaacaacaaattgcctccctgagtcggaccagctgcccgtgga

SEQ ID NO: 33969 - DNA, 108 bp, Homo sapiens
aaaccactgaactaccagattctgctaaagacgagagactcctcgcctaagtgtttatgaacctcagttgcagcaccatgtggctcaaaagaagattccttatgtgga

SEQ ID NO: 33970 - DNA, 95 bp, Homo sapiens
atgcctactgcaccatccccacctaccccagcggccagatcggcttcatgctgtgcagcaagaacccggactcagaattcatgattgaagaaatg

SEQ ID NO: 33971 - DNA, 100 bp, Homo sapiens
gtgtctccacctaagcgagcagagatgaagatatttattgatagagatccagcagcatttgcacccattttaaattttcttcggacaaaagaactagact

SEQ ID NO: 33972 - DNA, 82 bp, Homo sapiens
ctcattgcgcccagacgggccggcccagagctcccgggtcgtctttcgtgtggccgcgagttgaaaacgaggcccactgcga

SEQ ID NO: 33973 - DNA, 82 bp, Homo sapiens
aaatactactgaaagtgcaatatttgagtatcactgcgaggagaaagtaaagtttctgggcgacaattaccttgaggaaggc

SEQ ID NO: 33974 - DNA, 100 bp, Homo sapiens
ggcctttcttatactctagaatatacaaagacaaaaggagattctgatgaagaagttattcaagatgtctgaagatgatgagaaactgaaaaagaggaag

SEQ ID NO: 33975 - DNA, 100 bp, Homo sapiens
ccctcaaggccatgatcaaaacctggcgggtcctactacatgatatcgcgctcgctgggacccgagtttggaggcgctgtcggcctctgcttctacctgg

SEQ ID NO: 33976 - DNA, 98 bp, Homo sapiens
gtgctctgagggagggtccgagccagccgctgttttgccggaggagcccctcaggccattccctataaggagcccctgctggtgcaccagaactaccg

SEQ ID NO: 33977 - DNA, 100 bp, Homo sapiens
aaagtcccggagatccgtgatgtaacaaggattgagcgaatcggacacagcattgttggttttgccatgtactattttacctatgacccgtggattggca

SEQ ID NO: 33978 - DNA, 96 bp, Homo sapiens
gcctatcccggcatccttgaccagaagtttgaggtctccagtgttgccgactgcttggactctgcagaacggggaagataaccgaagggtggtttg

SEQ ID NO: 33979 - DNA, 90 bp, Homo sapiens
actacattgcaacaaatggagaaagtgctgtagtgcaattacaatctgatgttccagcagaaatccaggtgttaaaagaacccctacaac

SEQ ID NO: 33980 - DNA, 100 bp, Homo sapiens
agctagtggttatttaatggaccttataaattttttgagaagcatctttcaagtgtttactcatttgcctctgggaagttatcaattccaaaccagatga

SEQ ID NO: 33981 - DNA, 75 bp, Homo sapiens
caccaagtcacatgacaagcacaatggctgccatccggaagaaactggtgattgttggtgatggagcctgtggaa

SEQ ID NO: 33982 - DNA, 78 bp, Homo sapiens
tgcgcgccgctgcccgcgccacagttctagacctggaaggcctcctaagaggactcaaagtgtcacctccccagagaa

SEQ ID NO: 33983 - DNA, 83 bp, Homo sapiens
agcttatctacaatcatatcacacttagcagtgtctgcaaaaacgaatcttttcctacaacctgttaactgactggactgttg

SEQ ID NO: 33984 - DNA, 90 bp, Homo sapiens
ggcagaggcccaggagaatggagaccacagggaagtcaaaggtagaaggaaaagaggaggtagagcaggagaccaaggaaaaaggcagtg

SEQ ID NO: 33985 - DNA, 75 bp, Homo sapiens
aggccaagcgcctcatcaaggactaccagcagaaactgattcttccagaccagagtttgatgccagcagcttcgg

SEQ ID NO: 33986 - DNA, 99 bp, Homo sapiens
gtgtggctgcagccgagggagaccaggaagatctgcatggtgggaaggacctgatgatacagagtggtacgtaaatggggtgaattattttactgacct

SEQ ID NO: 33987 - DNA, 83 bp, Homo sapiens
attcagcaaccaggagacctgcttcctgcctgacacagctcacttcaagaagtgcacaatgtcagaacgtggaattaagtggg

SEQ ID NO: 33988 - DNA, 50 bp, Homo sapiens
gtcaatcagagcgtcctgtgcgcccccaccttctggccctttcacctcct

SEQ ID NO: 33989 - DNA, 96 bp, Homo sapiens
ctcagcaccttggcgaagccttgggtttctttcttaaaggactgatttttagaactccacatttgagataacatagatcatcagtagaaaacttct

SEQ ID NO: 33990 - DNA, 75 bp, Homo sapiens
aaggggcttacgcagaaggacctggccacgaagttccacctggtgccaagcatcaacaccatgagtggcagtcag

SEQ ID NO: 33991 - DNA, 98 bp, Homo sapiens
atgattccaccatgggccctgacttccgggcagcagaatatccatctcggactcagttccagatctttcctcaccgcggagacctgggcaatgtccgt

SEQ ID NO: 33992 - DNA, 100 bp, Homo sapiens
tgaacttcatcgctcctgacaagcatgagtcatacaggagtggcagaagagaggcggacagccctggcagctcatcgagcccgtggatggattccacccc

SEQ ID NO: 33993 - DNA, 74 bp, Homo sapiens
gcatggactgtatccgcatgcaggactcggacctgagtgaccccatgtggttgtctgggttcatgtctaagctt

SEQ ID NO: 33994 - DNA, 100 bp, Homo sapiens
ttaacccagaagtagctgaatgtgttactccattgctgaggagtggaatgtatcctgtcaggtataatgtcagtgaatggcaagaaagttcttcatatgg

SEQ ID NO: 33995 - DNA, 100 bp, Homo sapiens
ggagcccagagccggttcggcgcgtcgactgcccagagtccgcggccggggcgcgggagatggcccactgcgtgaccttggttcagctgtccatttcctg

SEQ ID NO: 33996 - DNA, 50 bp, Homo sapiens
aattttccttgatggtcaaaagattaagggtgatcagcccatgacctaaa

SEQ ID NO: 33997 - DNA, 100 bp, Homo sapiens
cgggcctggcggacgcggcgccatcgcagtcaggaaccccatgggccgcacaggactgcgtgggcgcgggagcctcagctgcttcggacccaaccacacg

SEQ ID NO: 33998 - DNA, 100 bp, Homo sapiens
cggagtcgcggtatccgcaggctctggtgtgttaccaagaggggattgatctgctcctgcaggttctgaaagttggataacagggcaagattcagaggaa

SEQ ID NO: 33999 - DNA, 96 bp, Homo sapiens
gaacgattgggctgagcagaggacgacatgttgcttttcgtggaggttgaaggggcccggccaggactcggggaagggtggcctgagagcagcgat

SEQ ID NO: 34000 - DNA, 139 bp, Homo sapiens
cctggaggtgggcaaggtgatccagcaaggtcggcagagcaaggggcttacgcagaaggacctggccacggagaacgtgcagggccccaaatgtgaccagtgcagccttgggaccttctcactggatgctgccaacccc

SEQ ID NO: 34001 - DNA, 75 bp, Homo sapiens
cacagcaccttgtccaaaagctcagcccaggcacctgggagtcccatccagagaccacggagctggtggttttgc

SEQ ID NO: 34002 - DNA, 100 bp, Homo sapiens
caattacagacgacaaagtagcactggtacaggtttgcagattccgccagcagcacagcaagctctacagatgagtggctctttggcatttggtgctgtg

SEQ ID NO: 34003 - DNA, 100 bp, Homo sapiens
cctactgcctggaggccggggagccgacgcctgttccctgacatcgtggagttctgcgaggccatggccaacgccgggaagaccgtaattgtggctgcac

SEQ ID NO: 34004 - DNA, 98 bp, Homo sapiens
cgcgcacggtttggccaaagaagcccccatactcccggtgaaaaaggtgcttgtgagtgaggattctgacagtgatggcattgtggcccacttccctg

SEQ ID NO: 34005 - DNA, 75 bp, Homo sapiens
gatctacctgacgggcctgcgagggttgaagattgtgaagcaatagcctaaggatccaccttgatgttcagtgaa

SEQ ID NO: 34006 - DNA, 100 bp, Homo sapiens
gtggaacgtgtactaccgcaactgaaagtcacgattaggactgacaataagactggggctgtggctgagatgtcacatggcagataggatcacaaatttc

SEQ ID NO: 34007 - DNA, 98 bp, Homo sapiens
cccgactccacctgagggactggctcctgggcgctgtgcttcgccgtgagccgctcgctgctgctgacgtgcctggtgccggccgcgctgctgggcct

SEQ ID NO: 34008 - DNA, 102 bp, Homo sapiens
ctggagaagctggccaagaaggcggagaaggactccaaggcggagcaggccaaagtgaagaaggagctcgaggccatgagcagatataccagcccagtgaac

SEQ ID NO: 34009 - DNA, 100 bp, Homo sapiens
cactgtcacccactacaagcacagcaagcagcagtacagcatccagaaagttcaggagccctggaaaggagaaggaataagacggcaggaggaagagaga

SEQ ID NO: 34010 - DNA, 98 bp, Homo sapiens
ggcgcctcattcgggtggagctgagccggagacaggtggctattatcatggaaaactaatttttcccagagaatttcctttcaaacctcccagtatct

SEQ ID NO: 34011 - DNA, 90 bp, Homo sapiens
tttggggggaaactaggtcgatggtcggcggcgcccggatgggcagctgagtaagactttgaccccgacgcaggcttcagtgattgccgc

SEQ ID NO: 34012 - DNA, 100 bp, Homo sapiens
gcccaggcgcgggggcgacgacaggtgaggatacaactagaagccagcagtctacaggctggaagaaggccctcaccagaacccaacccttggacttcag

SEQ ID NO: 34013 - DNA, 83 bp, Homo sapiens
ggcagacatcagctcctggttcaacgaggccattgacttcatagtggcactaaggaaaacagatcatctctccctagacaaag

SEQ ID NO: 34014 - DNA, 100 bp, Homo sapiens
cccgggatttcgatctggacctggcctggcggagccagccccagtgcctgctgagccgtttgacaacactacctacaagaacctgcagcatcatgactac

SEQ ID NO: 34015 - DNA, 75 bp, Homo sapiens
aaagaacgatcgtccagtggaggttccaattgtggacaagataaggaccattgctcaggctgtctatggagccaa

SEQ ID NO: 34016 - DNA, 87 bp, Homo sapiens
aaacaattgacagaagagctccagaatgtgaaacaaaacctggatgacagtgtgttttcgaagcggcatgcaaaactggagctggat

SEQ ID NO: 34017 - DNA, 74 bp, Homo sapiens
gcttctgttacgctaggaatatggcaaacatgaagtaaagaaggtcttagacaaattttacaagaggaaagaaa

SEQ ID NO: 34018 - DNA, 80 bp, Homo sapiens
gccggaagccctgagggcagctgttcccactggctctgctgaccttgtgccttgctgtctgtgatcctggaaacatacgt

SEQ ID NO: 34019 - DNA, 74 bp, Homo sapiens
ttgcctgtgcgcgcgtgcgcggacatggcctcaaacggactcctcctattttgaggacttctccaacatctcca

SEQ ID NO: 34020 - DNA, 100 bp, Homo sapiens
gtcaccgtggggggcaagcagtacctcctaggactctatgacacggccggacaggtggataataatgtcacgaggcatttggataaagtattaaaaagag

SEQ ID NO: 34021 - DNA, 75 bp, Homo sapiens
ttttttgtctggaggaatggggacaccaaaactcatttggcagcagaggtgagattcgtattttacatggagaag

SEQ ID NO: 34022 - DNA, 98 bp, Homo sapiens
ctgacccagcaagactatatcaacctggtccagtgtgagaccctagaaggttcgagaaagtgatcccagtgacccaaacaaagacatggtggtccagc

SEQ ID NO: 34023 - DNA, 75 bp, Homo sapiens
ctggagtcgaaggccgtgaggtatttttctaagattaagatgttctacgaggagcatttgcacttggacgatgag

SEQ ID NO: 34024 - DNA, 75 bp, Homo sapiens
tgcctgccagaatggaagcatacagatctgggaccgaaatttgactagaaccatggagtctggcagtaccgccgc

SEQ ID NO: 34025 - DNA, 100 bp, Homo sapiens
aggagcagaggaaatggagacggtcatccctgtagatgtcatgaggcgagctgggaattgaagatgttcctgctccttctacatctgcagataaagtgga

SEQ ID NO: 34026 - DNA, 90 bp, Homo sapiens
ccaagaagcacggcaccaaaaacaagcgcgacttcatcacctgattcttccaatgagaattccgtagcaactcctcctccagaggaacaa

SEQ ID NO: 34027 - DNA, 101 bp, Homo sapiens
ggctccctcctcccagggccaggcgccgctcagaacgggttttggccaaattgggcgagggcacaaaataaccacttaccccttctcaccgaggaagagcg

SEQ ID NO: 34028 - DNA, 97 bp, Homo sapiens
gtggatctggattctaaggcaacacttccttgaagaaacaagcttacagttgtcgagatgtccacagaaggaggatttggtggtactagcagcagtg

SEQ ID NO: 34029 - DNA, 74 bp, Homo sapiens
ggcggcaccgggaggccgggccgagcggcattatattgtacttctagcaagtgcaccaacagaaaaacaacgcc

SEQ ID NO: 34030 - DNA, 75 bp, Homo sapiens
catccttggcatgggctacaaggaaaacggataacttcaaactaatgtgtactaatgccatgatttacaataaac

SEQ ID NO: 34031 - DNA, 74 bp, Homo sapiens
cctgtgtgtgctgaggcggctgagcggcgggaatgtatcctgtcaggtataatgtcagtgaatggcaagaaagt

SEQ ID NO: 34032 - DNA, 100 bp, Homo sapiens
cacagtatagcttctgacagtggagacactggcattggaacttcctgttctgatagcgtggaagatgttgctatgaggacagattcatcaaaaatgactg

SEQ ID NO: 34033 - DNA, 75 bp, Homo sapiens
ccgaaggccctatcaggacatggagtatgaaagacgtttttcagaagaagtgaagtcaagatgaagaaccatttg

SEQ ID NO: 34034 - DNA, 100 bp, Homo sapiens
ttccttcaaaatgtctactgttcacgaaatcctgtgcaagctcagcttggagggtgatgtatcatgatattagctggtttgacatcaagtcatttgtgag

SEQ ID NO: 34035 - DNA, 75 bp, Homo sapiens
gcaggtgcagagcactgcgctgtcagcgatagcccagtggatggccattccagggacttacccttttgtaacctc

SEQ ID NO: 34036 - DNA, 100 bp, Homo sapiens
caagaaccttgacaagctcatccggctggtaaatgcgcaggatttacataaacttgaactgaaaattctagatagacaggcaaaggaagatgaaaagtca

SEQ ID NO: 34037 - DNA, 75 bp, Homo sapiens
aaaaaaccatgaagctggaacatcaggagaagctaaaacttacttatgaggaaaagtgtgaaattgaggaatccc

SEQ ID NO: 34038 - DNA, 100 bp, Homo sapiens
gcccgcccgggccggtcgcggaggccgcgccgggccctgtcgcgaacctccggcgcgctgccccgccggaccgtggtgatgggcagaggcttcagtgtcc

SEQ ID NO: 34039 - DNA, 100 bp, Homo sapiens
gactatcgggagaaagtggagtccgagctgagatccatctgcaccacggtgctggaagagtttaaagaacgctgtactcagtgtgctgctgtctcatggg

SEQ ID NO: 34040 - DNA, 83 bp, Homo sapiens
acaaaattgatcctgatatcattgtgatctatagcatgatgctgcgattatctgccttatttgaaagtcatatcaaaaatatc

SEQ ID NO: 34041 - DNA, 100 bp, Homo sapiens
cttgaatatagccagttccattgaggactcgctcagcagcagcctgaaaacttgctacaagtatctcaatcagaccagtcgcagtttcgcagctgttatc

SEQ ID NO: 34042 - DNA, 82 bp, Homo sapiens
tggatttgagccgccgcattttttaaccctagatctcgtttgcagaaaaaacttcagcatgtgccaggaacacaacctcacc

SEQ ID NO: 34043 - DNA, 90 bp, Homo sapiens
acgatttgagccaccaatgctggatttccatgaacagcccgccatgttcatagaggataaagcagtagacaccctggcttacctcagtga

SEQ ID NO: 34044 - DNA, 97 bp, Homo sapiens
agtcgggctctggaggaaaagaaagagatccgcacgcagctggtggagcagttcaaatgtctggagcagcaatcagagtcgcgactgcagctgcttc

SEQ ID NO: 34045 - DNA, 100 bp, Homo sapiens
catcgacaccgaaaactccaccgtagcccttgccaaagattttaggtgatgggcaagtcagaaagtcagatggatataactgatatcaacactccaaagc

SEQ ID NO: 34046 - DNA, 83 bp, Homo sapiens
ccctcgcgcagcgctccatgcccgtgtggtgctgccgctgctccctggccggtcatttcagctgtttaaggaagacagagcag

SEQ ID NO: 34047 - DNA, 95 bp, Homo sapiens
tgtcagccttcccagtagctggaactacaggtcatgcttcaccccttcctccatctgctgcacctaccactgattctacagattccataacagga

SEQ ID NO: 34048 - DNA, 51 bp, Homo sapiens
catgcccatgcgagtacctgaggaagctggatagaacttatactggcttgc

SEQ ID NO: 34049 - DNA, 97 bp, Homo sapiens
tgctatttttgcacttcagttcacatactatttatggaggcgtggagctatttcctatgacagttctgatcagactgcattatacattcgtatgcta

SEQ ID NO: 34050 - DNA, 83 bp, Homo sapiens
gctgcagcatggagagatagataaacgggtatttctttaaatccagaacaatggagccagctgaaggaacagatttctgacat

SEQ ID NO: 34051 - DNA, 83 bp, Homo sapiens
cgccttcaaagacaggagcgtcccggtgcggctgcacgtctcgcggatcatgctcaacttgagttggtggaaccaagtggctg

SEQ ID NO: 34052 - DNA, 87 bp, Homo sapiens
agagagagaaactacaggaatctgcatcaggttgctgcagcaactggtcacacagtagtgttggtagaccagacagaggacatcctg

SEQ ID NO: 34053 - DNA, 108 bp, Homo sapiens
ggaaaagcaggtgccggtgcctgtccccgggggcgccatggcgaccggagcgaacgccacgccgttgggctatgactttgcagccgtcctggagtggttcgcggagcg

SEQ ID NO: 34054 - DNA, 75 bp, Homo sapiens
ggaacccgtgggcctgtggactgcagcctcggcggtcagcagccagagactgctgctactttgaaacgtacgata

SEQ ID NO: 34055 - DNA, 100 bp, Homo sapiens
tactccttggacgatgccaaccacaccttctctgggatcgatgctctggtgtggggatattcagctttgccaggtatggcagtgatttttatagcatgca

SEQ ID NO: 34056 - DNA, 74 bp, Homo sapiens
tcgaggttctgcagaaggttgtgactttagtatacacaattaccagctctggctgggtcgccacaacttgtttg

SEQ ID NO: 34057 - DNA, 101 bp, Homo sapiens
ccagaatgaatgaagtgcttcagatttaaatacagggaggagagagcgatggcttttttcacccagaaggccagccccagcggcttccccagcctccggaa

SEQ ID NO: 34058 - DNA, 75 bp, Homo sapiens
cacagcactctgggcgaaaattggatgtgaaaatgaagccagaccgaggtgtgggtacgccacgctgcatcacgt

SEQ ID NO: 34059 - DNA, 96 bp, Homo sapiens
gaaaatacaagtctttgggaactcaaaaaggagccggtgaaacctgaagaaggcagagatatggcaaacaggattggcgcttttgggtacatggag

SEQ ID NO: 34060 - DNA, 100 bp, Homo sapiens
accgtggggctggtggttgagcgaaggcggctggagaccgagctagatgggctcagatggattaccgggccttggtgcatgagcgagatgaggcagccta

SEQ ID NO: 34061 - DNA, 101 bp, Homo sapiens
gacccggagcacccgacccctgaactgggactcttcaattaatctgacatttcacaaatccaaaattgccgtggatgaactctttacttcacttcgggata

SEQ ID NO: 34062 - DNA, 90 bp, Homo sapiens
gggaagtctataagctttgcaacagaattacagagtatgatagatgtggtactggatcttcctctgggctctcttctcttctctgtttgt

SEQ ID NO: 34063 - DNA, 100 bp, Homo sapiens
ctgctggtcagcactgcggctgacagatacattgataactccatttgtgggtttaatagaccacaacttccaggcccagccgaatcctgctgaagttaag

SEQ ID NO: 34064 - DNA, 82 bp, Homo sapiens
agaaggtctctggagacatcttcagcagtgttcatcatttgccacttaagctacttgcagtcacgtcacaccttggatctct

SEQ ID NO: 34065 - DNA, 75 bp, Homo sapiens
ccctgaccggatcccataaacactgtcgcttcctccatacagtggaacagttctgtgtggcacacaggctgtgga

SEQ ID NO: 34066 - DNA, 100 bp, Homo sapiens
gcgcgcgcgacgcaggtgcccgagccccggcgccgccgccatctctgccttcggtcgagttggacccccggatcaaggcaatactgaacactgcgcagct

SEQ ID NO: 34067 - DNA, 75 bp, Homo sapiens
ttccatgtgtgagcatcacttggttccatttgttggaaaggccatggtaggggaggagtgtgtaggtgccatcgt

SEQ ID NO: 34068 - DNA, 75 bp, Homo sapiens
ataattaaagagtaaagttgtgctcaacgctccttcgagaactcatagaacggaagaccagctccttggatccca

SEQ ID NO: 34069 - DNA, 88 bp, Homo sapiens
ggcttgtgatccatgggcgagtctacgatgtcacccgcttcctcaacgagtcaagttcatccgagaagtaacaccatatatcaagaag

SEQ ID NO: 34070 - DNA, 100 bp, Homo sapiens
tctatgagatcattcccttggaggctgtagtggggacctgctgtgtgttggacctttatacgtattgtaaaggactcagtggcctctgaggatgtggctg

SEQ ID NO: 34071 - DNA, 82 bp, Homo sapiens
cgcacttgctcaacaagggcctgccgcttggttcatctgcagaagccagcggacgcctctgttcaacttgtgggttacctgg

SEQ ID NO: 34072 - DNA, 100 bp, Homo sapiens
ctcaccgcctggaagtccaggagccatttttagggaacagcattcaagctcaacatggggctgcagtgaacctcactctggtcactccagagaaggccat

SEQ ID NO: 34073 - DNA, 98 bp, Homo sapiens
gacagttcgctacacagcaatgcatcgagtgtcaaaccagaagagaagtaaaattcaacaaaaatttatgtgtggagttccttcttaaaagaagaaaa

SEQ ID NO: 34074 - DNA, 52 bp, Homo sapiens
gatgaagtgcagaggtttttttctggcattgaagttgatatcgatgtggagc

SEQ ID NO: 34075 - DNA, 75 bp, Homo sapiens
ggacacttctctgtcgtcacagttaggcttgagaaggagaaagcagaaattgaacgcatgcgaaacctgactgag

SEQ ID NO: 34076 - DNA, 90 bp, Homo sapiens
gaagacgaagttgatggcctggagaagaaagatgttttgcctactgttgatccgctaagggagaacattgagcaattcttcaccaaattt

SEQ ID NO: 34077 - DNA, 88 bp, Homo sapiens
ctttgacaggccattcaccaggacaggcctgctgggcttcatcgggcctagccagaggccaagaagagtaagacggccgcaaagaaaa

SEQ ID NO: 34078 - DNA, 100 bp, Homo sapiens
tattgcaatcatggtgcagaaataccagtccccagtgagggtgtacaaatacccctttgaattaattatggcttggtgaagcagcgcttgcagatgtaca

SEQ ID NO: 34079 - DNA, 75 bp, Homo sapiens
cgcgcaccgcggacgagcaggcccaggtaagaatgattgatgttggctgatattggagtgctcattcacatgaag

SEQ ID NO: 34080 - DNA, 50 bp, Homo sapiens
aaagttattgccagcttcctggccagaagcggactcctagaagaggggag

SEQ ID NO: 34081 - DNA, 100 bp, Homo sapiens
ctggacgagaatgcccagaagatccagcgcgggcagattcccagcaaatatgtgttaacacagaaatctgcctcctgggccatgccgcttctaaggcctg

SEQ ID NO: 34082 - DNA, 51 bp, Homo sapiens
gtttctcggcgaatgacagcacaggttccacttccaaacatgagttccagg

SEQ ID NO: 34083 - DNA, 90 bp, Homo sapiens
ccgaagttggaagtgtctcttagcagcgcgcggagaagaacggggagccagatttggaacatgcgttgaaatgtcttcagcgtgaagatc

SEQ ID NO: 34084 - DNA, 100 bp, Homo sapiens
cacctgcctcctatgtcttccatccagacaatgctcgagaattagaactgcagcgtcagcgtgacttgcataagatcaagcagcttcagcagacagtgag

SEQ ID NO: 34085 - DNA, 87 bp, Homo sapiens
cagcggcctcggcctccccttggattcagacgccgattcgcccagacaagttggatggcttgaggactggtactaaaaggaaacgtg

SEQ ID NO: 34086 - DNA, 50 bp, Homo sapiens
ttttgttggattgaaacagctaatcgtatcagacttggtgataattctga

SEQ ID NO: 34087 - DNA, 76 bp, Homo sapiens
gccagtacctgcgtatccgcactgtccagcccaagcctgactatgggtgtgtgtacattcgaaactccactgaacc

SEQ ID NO: 34088 - DNA, 100 bp, Homo sapiens
aaggcggacaccgaccctgagaacttacctgagatttcgtcacaggatgctttggagtctgcaatgaagaatggcctgtggggtcacgctctgctacttg

SEQ ID NO: 34089 - DNA, 100 bp, Homo sapiens
cccagatgtctgacagccctgtgtgacaccaagataagtaacatctttaaatggatgagatggctaccactcagatttccaaagatgagcttgatgaact

SEQ ID NO: 34090 - DNA, 75 bp, Homo sapiens
gtttttggaaggcgagcttattcatgatcgttctaagaagggaggagagtttgatgaatttgtcaatgatgacac

SEQ ID NO: 34091 - DNA, 100 bp, Homo sapiens
aaggaaatgataaatggctctctcttgatttggagcaggactatgatttaatctccaaagaaccaaagccttttgtatttgagggaaaagtacgtggtcc

SEQ ID NO: 34092 - DNA, 100 bp, Homo sapiens
gaggctcgcgagatccgcatgaaggagctggagcggcagcagaaggagtgaaacaaagagtcctcttcgtggaaaagaaaaaaatacgctccctttaaac

SEQ ID NO: 34093 - DNA, 75 bp, Homo sapiens
ggccggctgcctgagcgcctcaccaagttcctcatcacccagataacccaacagcttgagggaatctgcttacag

SEQ ID NO: 34094 - DNA, 121 bp, Homo sapiens
cgccccagcccgggtgcccacactggccgtcccggccatctcgctgcccgacgatgtccgcaggcgaaatgcgtgtactgccggaagcggatgaagaaggtgtcaggtgcctgtatccagt

SEQ ID NO: 34095 - DNA, 100 bp, Homo sapiens
aggctgccttccggaacattaagaccattgctgagtgcctggcagatgagctcatcaatgctgccaagtgggacacagcgggccaggaacggttccggac

SEQ ID NO: 34096 - DNA, 98 bp, Homo sapiens
ttcgcctgtgatggacttccagtgtgagcactggccagagtgaccaggctgaccagcaccagccctgatccagtgccaaatgccggcatgctgaaact

SEQ ID NO: 34097 - DNA, 83 bp, Homo sapiens
cgacctgagaccagtggtcatcgatgggagcaacgtggccatgagagcagtcattatggcgaaccttggctgctggatgctgg

SEQ ID NO: 34098 - DNA, 88 bp, Homo sapiens
ggcatgcgccaccacacccgggaggaggcgtctccctattccttacttgatatctgcttgaatttcttgactactcaccttgagaagt

SEQ ID NO: 34099 - DNA, 75 bp, Homo sapiens
gcctccaaaagtgctggcattacagagagaagaagaaggaggttcctgctgtgccagaaacccttaagaaaaagc

SEQ ID NO: 34100 - DNA, 74 bp, Homo sapiens
acaaaaacagaccagaagattaccaaggtggcaaatatgttcctcgtgccatcctggtggatctagaacctggg

SEQ ID NO: 34101 - DNA, 100 bp, Homo sapiens
gtcttcgcaagtgccatgatgcatgccttagaagtgttaaattcacaggaaacaggttttgaaagagggaaggaagatatttctcaaaataaagatgaat

SEQ ID NO: 34102 - DNA, 83 bp, Homo sapiens
taaagccatcttccaggaagtgcatgtacagattgagaaagaagtcagtgaggccatgatgaagtccctaaaatactgcgatg

SEQ ID NO: 34103 - DNA, 95 bp, Homo sapiens
ggtggctggttctggggctgggattggaactgtgtttgggagcctcatcattggttatgccagatataaagatgaagcgcagctgtataaagaag

SEQ ID NO: 34104 - DNA, 75 bp, Homo sapiens
atgagcatgccaatttaactgagctcctgaaactgggcactggtctcctggaaagtgggcgccattaccttgctg

SEQ ID NO: 34105 - DNA, 100 bp, Homo sapiens
gatgtggtggaatatgccaaggaaaaactggagagcttcatcaaaaatagtgatagctttgataagaccgccgggagagcctgcccacctccccaccctg

SEQ ID NO: 34106 - DNA, 75 bp, Homo sapiens
cctcccgagcagctaggactacaggtacctcctctttatgaagctggccgccttgcagctgatgcagcagaacgc

SEQ ID NO: 34107 - DNA, 50 bp, Homo sapiens
cttcccagtagctggaactacaggtttctgcatttaatgccagttactca

SEQ ID NO: 34108 - DNA, 76 bp, Homo sapiens
aactctaccctggaggagattctggggcagtatcaacggagtctccggggtacccattcctggcccagtgggtaac

SEQ ID NO: 34109 - DNA, 49 bp, Homo sapiens
gagaagaagggatggcagagaagttaattggccttggtcctcacagctc

SEQ ID NO: 34110 - DNA, 75 bp, Homo sapiens
tttttgctgcagtggtggaacagattcacaagtttgcccagaaaaagcggatggtggttcctgctgccctcaagg

SEQ ID NO: 34111 - DNA, 75 bp, Homo sapiens
ggcgagtctacgatgtcacccgcttcctcaacgaggaatgtatcctgtcaggtataatgtcagtgaatggcaaga

SEQ ID NO: 34112 - DNA, 80 bp, Homo sapiens
aagtggaaggagcagaacgtgagggtgtaacttacaaaaagagagctggcggtcaccatggcaatgcgggagctggtgga

SEQ ID NO: 34113 - DNA, 98 bp, Homo sapiens
tgtctgcacgctgaggccgaggcggagaaggggcttcctgagcgtcccagtacactgacagagaaacaagtggaagccggtgtctgtgttaccatgga

SEQ ID NO: 34114 - DNA, 75 bp, Homo sapiens
tccggatgacccgggcttcggcccccaccagagactcggaagctcttcgtgggcggtcttgactggagcacgacc

SEQ ID NO: 34115 - DNA, 75 bp, Homo sapiens
tgtgcgaagatttccaatcatttctaaaattgggtggatcacaagaactaatctttcatgatttggaaaccggaa

SEQ ID NO: 34116 - DNA, 100 bp, Homo sapiens
gtggagtatctgcactcacaggggattggtgctgaagacatggacggcttccaggcagacacggaggaggaggaagaggaggagggcgactgtatgatcg

SEQ ID NO: 34117 - DNA, 95 bp, Homo sapiens
gagagggagacggacgttgagagaacgaggaggaaggagagaaaatggcgtccacggatggttaccataagcgaacagacaggaaatccagaatc

SEQ ID NO: 34118 - DNA, 90 bp, Homo sapiens
cctacactagtcgcgggagccacgcagaggacgccggaacaccctggaagccgagaaatgatgtgaacatggaatcatcaaggaatgcac

SEQ ID NO: 34119 - DNA, 99 bp, Homo sapiens
tttcagtcctgtcacagatctacgtgggctattcacgaaaagcagcagctctagagttcttaaaccgctttgaagaagccaagcgaacctatgaggagg

SEQ ID NO: 34120 - DNA, 133 bp, Homo sapiens
aacaagcagcctattatgcccagacaagtccccagggaatgccacagcatcctccagcacctcaggatatgggccctcacattttccaaacctgtccatctgctaactattttgactgcagagccatgtccat

SEQ ID NO: 34121 - DNA, 75 bp, Homo sapiens
ccatatctggacatctggaacatccatgtttgaaggatgacctctaggaagaaagtgttgctgaaggttatcatc

SEQ ID NO: 34122 - DNA, 75 bp, Homo sapiens
ggagaactgttcacccacaattccagcttcaaatacagcgtcatcacgtagacataaccaagaaacttcacccaa

SEQ ID NO: 34123 - DNA, 75 bp, Homo sapiens
gcagtggtcgcttcttctccttgcactatgagatgcttgctaatcgaacagctgcaaatggtcactgcattgata

SEQ ID NO: 34124 - DNA, 90 bp, Homo sapiens
caaagaagttgaaaagtgtcacacctgtaggaactgaggatactagcatcaacacaatttgaacccactgcagctagaatggcctttccc

SEQ ID NO: 34125 - DNA, 50 bp, Homo sapiens
gcagagcaaacatctttcaaaggaagttctacagactttgaccaagtttt

SEQ ID NO: 34126 - DNA, 99 bp, Homo sapiens
ggatggcgacgtctacactgagtcggaggcgaaggtactccacaatttacaccatgtttcctgtgttttctctggtcctggacaaagatgtcaaatcgg

SEQ ID NO: 34127 - DNA, 80 bp, Homo sapiens
tgttcagctgcagcatggagagatagataaacgggagagagaagctcttcagaaacagctggatgaagcaaatcgagaag

SEQ ID NO: 34128 - DNA, 100 bp, Homo sapiens
cctcagctatcgccgctgactgtgcccctgtggaaggaggtttgcatcgccagcttctatatattacggcctttttttttgctggatattatcttgtaaa

SEQ ID NO: 34129 - DNA, 74 bp, Homo sapiens
catgactcatccccgggagtgttgactgatgcagtgaataacgcagctggctttgggttcagcggagtggataa

SEQ ID NO: 34130 - DNA, 51 bp, Homo sapiens
ctcatgaaagacacgactttgaactggaagctctctgatgtaaaggatgga

SEQ ID NO: 34131 - DNA, 100 bp, Homo sapiens
gacctggctagaagcagagacaccaggacagaaaagacagtgttctgctttcatggagttcacagaagagtcgaggaggaggtgatttcctcacctttct

SEQ ID NO: 34132 - DNA, 100 bp, Homo sapiens
agtcactactgcctgcctgcctgcctgctacggactggccgtttgacgatggggcgcccccgcccggcaaggtagtggaagactggctgagcctggtgaa

SEQ ID NO: 34133 - DNA, 100 bp, Homo sapiens
cctgtgactgctgtggagatccagctggagccaggtgagaatttcaaggattatcgacttcatattgcacattaaagttacaaattaaagtggcttggtc

SEQ ID NO: 34134 - DNA, 75 bp, Homo sapiens
tttgatgttcgtgactttggaaagagaggtacagaaagcagtcaacactgcccagggattgtttcagagatggac

SEQ ID NO: 34135 - DNA, 88 bp, Homo sapiens
cacaagtgaatgcagtctttccagaatcaaaagcagacctcattttgattgtagtagcagtggagatggagttaaattcacccgcctc

SEQ ID NO: 34136 - DNA, 80 bp, Homo sapiens
gcagacagaggtgtgctgacgacctgctacaacagaagtggcagtagagaagagcatcacagaagttgctcaggagctga

SEQ ID NO: 34137 - DNA, 85 bp, Homo sapiens
atgtaccaagtcttgaagagcttgctggagctctttcgacgtgtagcagcagctttgccgggaatggaaagcacacaggacagaa

SEQ ID NO: 34138 - DNA, 102 bp, Homo sapiens
gagccgtgaggaatgctactggggccacgtcttctgggaccaggctggacgactgtggcctcacggaagcacggtgcaaggacatcagctctgcacttcgag

SEQ ID NO: 34139 - DNA, 94 bp, Homo sapiens
ggcagaagccgagttcaacatcctcctggccaccgactcctacaagatgccgacaaaaggatcaaggtggcgaagcccgtggtggagatggatg

SEQ ID NO: 34140 - DNA, 98 bp, Homo sapiens
tgactactggggccagggaaccctggtcaccgtctcctcagtgtactaatggtcacttgatgtgcgctggctgttttatccacctactagcagatgcc

SEQ ID NO: 34141 - DNA, 98 bp, Homo sapiens
gacgaacgaccaaacaaacgcaaggactggactccatgccgaaggtatctggaagtcgtgacacggttgaaatcacaaagattagacacctttttaga

SEQ ID NO: 34142 - DNA, 82 bp, Homo sapiens
aagcaacacgcaaacgagagctgaggctaatgaaaaacaggatcaaaatacttgctggatggtggactcagagaccaataaa

SEQ ID NO: 34143 - DNA, 101 bp, Homo sapiens
acaggatcacagtttgtgatggaaggagtgaagaacctggttttgaaacagcaagcccggattgcatttctacaaggcgaaagaaaaggtcaagagaacct

SEQ ID NO: 34144 - DNA, 100 bp, Homo sapiens
cggcggaaaaccgaagttggaagtgtctcttagcagcgcgcggagaagaacggggagccaggagccggtgaaacctgaagaaggcagagatatggcaaac

SEQ ID NO: 34145 - DNA, 100 bp, Homo sapiens
cagcaatggcaccgtctccccctcggccttcttggaaacttgggaaccgtgggtgctgttgccttggactgcaaagggaatgtagcctacgcaacctcca

SEQ ID NO: 34146 - DNA, 96 bp, Homo sapiens
cagccgctcctacctgcctgagaagctccagatcgtgaagccgctggaaggtaagagcaaagaggcggaaattaagagaatcaacaaggaactggc

SEQ ID NO: 34147 - DNA, 75 bp, Homo sapiens
gagacaggtgctctcggttgcacaataaaccgacgtttagccaggtggtgaaggcatttgtgatcctggcctcgc

SEQ ID NO: 34148 - DNA, 90 bp, Homo sapiens
cagaacccggccctcaccgccctcaccacccctatccagacggctgcccttcaagtaccaagagatggctgcccaaagattgtcaatctg

SEQ ID NO: 34149 - DNA, 90 bp, Homo sapiens
tgcagggaaccgacccaattacctgtacagggggaaaggcgaggcccgggccaggctgaagcggtcgcagagcttcggcgtggccagcgc

SEQ ID NO: 34150 - DNA, 98 bp, Homo sapiens
acggaggagacggttcgccgtcggtgccgagaccccatcaacgtggagggcctgctgtacatcatctggctgccagtccataatctacataccccagg

SEQ ID NO: 34151 - DNA, 90 bp, Homo sapiens
ttcgaggaggtcatgaaggacctgagcctgacgcgggccgcgcgggaggagaaggagaagcggcgcctcgaccagctggaacgtaagaag

SEQ ID NO: 34152 - DNA, 76 bp, Homo sapiens
gaaagcgtcacttggggaaaacaaggtggacccgggaagaggcatctatcctttctctggtgacaaaaataaacaa

SEQ ID NO: 34153 - DNA, 100 bp, Homo sapiens
atcccgccggaagcgccaggacaatggggacccgggacgacgagtacgactacctattcaaagggtctccagccacctgcccttcccgagaagagagagc

SEQ ID NO: 34154 - DNA, 83 bp, Homo sapiens
ccaccgtcagcactcagcgcgggccggttgtgaccgagattcccgacgagagagactgaggggaagagaggaaggaggggcgg

SEQ ID NO: 34155 - DNA, 99 bp, Homo sapiens
ttatgctttctaagaggtgtcccttcaaagatgtgagagagaaaagtgagtttattctgaagagcatccaggcatgtactggcattgaaaacattgacg

SEQ ID NO: 34156 - DNA, 101 bp, Homo sapiens
ctccgccatgtcatccacttcgcccaacctccagtgtgtggacctgagctgtaatgagctaagtgaagtcacattaccagaaaacctgcctcccaaactgc

SEQ ID NO: 34157 - DNA, 100 bp, Homo sapiens
tctcatgccacggccaaattcagtagcagggaggctgccggcgtggaccgcgggaaggcggggctggggctcggcgggaggccacccccacagccgcccc

SEQ ID NO: 34158 - DNA, 100 bp, Homo sapiens
ttctccagatgccaacattgacctcacaaccgagcaaattgaagagacgttaaaatacttcctaatcaacaagatgccacatcagtagcaactgagtctt

SEQ ID NO: 34159 - DNA, 51 bp, Homo sapiens
aatcatattatagatggagtaaagatttcaggtatgctgctgaaagtggga

SEQ ID NO: 34160 - DNA, 100 bp, Homo sapiens
gtaactaaattggagaaaagcattgatgacttagaagacccctgtaaaagagcccaacagtgaaaatgtagatatcagcagtggaggaggcgtgacaggc

SEQ ID NO: 34161 - DNA, 75 bp, Homo sapiens
caccggacgaccctctgcgcgcagagaggaggttcagatgagcccctgctgacttgagagagacagagagaccac

SEQ ID NO: 34162 - DNA, 98 bp, Homo sapiens
cggaatgcagtttttacacaacttagagaggatgcaagccatggagaaacagattgccagtttaactggccttgttcagtctgcgctttttaaagggc

SEQ ID NO: 34163 - DNA, 74 bp, Homo sapiens
tcagctgctgcgtgctcagccccagagcagcacccaccaaggctccggatgtgttccccatcatatcagggtgc

SEQ ID NO: 34164 - DNA, 82 bp, Homo sapiens
taaaatggcggacctggcgaacgaagcctcaggcccagagccagcacgagacatccgctgcgagttctgtggtgagttcttc

SEQ ID NO: 34165 - DNA, 100 bp, Homo sapiens
gctgatacagaagagatggatattgaaatggacagtggagatgaagcctaagaatatgatcaggcacttaagtattcatcgaagagtcaccccagtagcg

SEQ ID NO: 34166 - DNA, 51 bp, Homo sapiens
tccggaggcgccagctcaaccggaggaaataatgctggccatacagttgtt

SEQ ID NO: 34167 - DNA, 90 bp, Homo sapiens
ggctccggagaatgaaggaaggctggtgcacatcattggcgccttacggacatccaaggcccaacagcgccctggaatcctgctccttcg

SEQ ID NO: 34168 - DNA, 118 bp, Homo sapiens
ggctgatggagctctgaagcgggcagaggagctcaagactcaggccaatgactacttcaaaggtgtgggaaccgctgagcagaacaccctcccccagcgggaaatccgggacacgcag

SEQ ID NO: 34169 - DNA, 75 bp, Homo sapiens
aaaagagaagacgctttacccgactctttgggccgttatctcacgtcatcatcagatttgaaatatttaaagtgg

SEQ ID NO: 34170 - DNA, 82 bp, Homo sapiens
tgagacccggacagtggcagtgaaacaggaactgtggctgcaccatctgtcttcatcttcccgccatctgatgagcagttga

SEQ ID NO: 34171 - DNA, 82 bp, Homo sapiens
gtggccttccaaaccatcctgagctacatctgacagatacgtctcatggtgtaagaaataagtgcctgcagttacttggcaa

SEQ ID NO: 34172 - DNA, 50 bp, Homo sapiens
gcacgagcaccagcctagagccagtttcagaaacaactctccaagttcca

SEQ ID NO: 34173 - DNA, 75 bp, Homo sapiens
gtgaatgtggccctcaacatgcttggagaggttatcaatactctggctgaccatcatcatcgtgggactgacttt

SEQ ID NO: 34174 - DNA, 100 bp, Homo sapiens
gtatgacttgcaattcctgtgtttggaccattgagcagcagattggaaaagtgaatggtgtgcatcacattaaggttcatgcagcatcccaagaactttg

SEQ ID NO: 34175 - DNA, 99 bp, Homo sapiens
ggtcccataccactcatggatctgaatcagatggtgtcctctccctccccgcatacttcagcccctacaacggcgggtccctgggccatgacgagcgag

SEQ ID NO: 34176 - DNA, 74 bp, Homo sapiens
tgcaaaaagcgcctcaatgaccggattgagatgtggagttacgcagcaaagttacttcagacttttagaagttc

SEQ ID NO: 34177 - DNA, 98 bp, Homo sapiens
gcggccgccatgtggtgcctgcactgcaactcggagaggacccagtcccttctggagctagagcttgacagcggggaaggatcgaatcatatttgtaa

SEQ ID NO: 34178 - DNA, 50 bp, Homo sapiens
cctactatctgtctggagaagagattcaaccctatgaaaagataaaggcc

SEQ ID NO: 34179 - DNA, 75 bp, Homo sapiens
tactttttgcttcaccgacatagtcattatgccgaagagaaagcagggaggagagagcgatggcttttttcaccc

SEQ ID NO: 34180 - DNA, 100 bp, Homo sapiens
aagagtgctgctgctaacgcggtccccggcacgcaccatctgttgccatcccggccggccgaggccattgcagggtgtccgcaatgttgccagtgtctgt

SEQ ID NO: 34181 - DNA, 96 bp, Homo sapiens
atcggggatgtgtttgctgcacggttcaatgatgccctcacagtcgtggaaaggtacgggaaaaacactcttggcacgagccgttgctagccagct

SEQ ID NO: 34182 - DNA, 85 bp, Homo sapiens
caaatgagatgaaccatcttcctgcacacagccaaagtctgcaaagggtgatgatgatgcttatctgtgtattcatgaagatcag

SEQ ID NO: 34183 - DNA, 112 bp, Homo sapiens
gtggacaagtttgcagatcgggagcgcaaggtcgccctcaaggccatgatcaaaacttacagaatgtctgaaggggacagtgtgggagaatccgtccatgggaaaccttcgg

SEQ ID NO: 34184 - DNA, 98 bp, Homo sapiens
ggcgcgtaccgccccagcccgggtgcccacactggccgtcccggccatctcgctgcccgacgatgtccgcaggcgcatgtgtgaactgtgtgcggtgg

SEQ ID NO: 34185 - DNA, 87 bp, Homo sapiens
ccaccaatatgccagctgtcaaagccatcatatatcagtatatggaagagtgacttctgacagctctctccatggaaggaggcggcg

SEQ ID NO: 34186 - DNA, 73 bp, Homo sapiens
gccagaagcgggcggcgcgggggagatgtttttggctttcacccccaaccagtgaccaaagacttgaccactc

SEQ ID NO: 34187 - DNA, 117 bp, Homo sapiens
agggatcttcctgagcagagctctccgggttccccggctcgcggggcccggcgaagggcagggagtgcatccgccccaacccttttccccctcgtctcctgtgagaattccccgtcg

SEQ ID NO: 34188 - DNA, 90 bp, Homo sapiens
gtggatggcttcacgttcactgaaggcgataagattgtggacaaagccctagaagagccaaagtatagctcactgtatgctcagctatgt

SEQ ID NO: 34189 - DNA, 99 bp, Homo sapiens
ggctacacttcgatggacctgttgaaaaaaatctgggaggttgaacttattaattttttggagctggcccgggaggtacggcactatggatacctgcag

SEQ ID NO: 34190 - DNA, 100 bp, Homo sapiens
aaacctgtgaccacccctgaagaaattgcacagtgtggcaaaggagcagagaactttgacaagttcttcacacgaggacagcccgtcttaacaccacctg

SEQ ID NO: 34191 - DNA, 100 bp, Homo sapiens
ggctgcgggaccccaggatgggggacaggaggctgcggggcctcaggagcatggggaagtgattgactgtgtgcaggagctgagccactccgtgaacaag

SEQ ID NO: 34192 - DNA, 75 bp, Homo sapiens
cttctgccactgctgctccgtggagatcgtcccgcgcctgccggagcttcgagaacaactggaacatttacaagc

SEQ ID NO: 34193 - DNA, 100 bp, Homo sapiens
ttacaactgtagtagaaaaattgcagttatgccttcctgcctcccttctgtctgccccaccatgccgggacatcgttatcgaaatggaagacaccaaacc

SEQ ID NO: 34194 - DNA, 100 bp, Homo sapiens
aacatttgatttttggaaggatatagttgctgctatacaacacaattataaaatgtcagcttttaaggtggcctcatcctgcatgactcgcctgtcccgg

SEQ ID NO: 34195 - DNA, 83 bp, Homo sapiens
ctctgggatcccggccaccagcaattgtccggctgttcggctcttgaatcccagcgatgaaaccaggaactcactttcccggg

SEQ ID NO: 34196 - DNA, 117 bp, Homo sapiens
cacagagtgaacagaaaaagaggatacctctgcgatcccgggtcatctccagatgctagggttatggatctttaaatggatgagatggctaccactcagatttccaaagatgagctt

SEQ ID NO: 34197 - DNA, 96 bp, Homo sapiens
cccaatggtagatgtggacggggaagatcagtctattggaggggaccactctaggaaggagcggcttctgctctccctgctgccggcccacatcgc

SEQ ID NO: 34198 - DNA, 100 bp, Homo sapiens
acaatgatccaatccacgaactgctggacgacctcggcgaggtgcccaccatcgagtccctgataggggccctcctcgccaaagacagcctagagaggac

SEQ ID NO: 34199 - DNA, 75 bp, Homo sapiens
ttcccagcagcatgcgattcttattgaccttgaattcctagaggacctgtgcaacaacctcttgaggatcgaatc

SEQ ID NO: 34200 - DNA, 100 bp, Homo sapiens
ctgacatgtgagatctccacaaggggtacatcagactatcttgctaatcatggccggttaaatgagtctgaagccaggcgaaaattctggcaaatcctgt

SEQ ID NO: 34201 - DNA, 51 bp, Homo sapiens
gaccattcccatcagtgagcattacaggcaacaagaatgggtgaatcagca

SEQ ID NO: 34202 - DNA, 100 bp, Homo sapiens
ccgcggtgcgccttctccacgctgggccgggtgttgcgcctggcctacagcgaggctgaggaattacggaggttgagctggtccggaatccctaagccag

SEQ ID NO: 34203 - DNA, 90 bp, Homo sapiens
gaaaaacgctttttgcatacaagcaggaaaatgagatgttatccaggttgactatagtcaatggggccaatggagccaagtgtatggaaa

SEQ ID NO: 34204 - DNA, 100 bp, Homo sapiens
aattgaccgaccctcacagaagctgctgaaattcctgaataagcactacaatctggagaccacagtcccacaggccgtatctgaggaacagcagcctgca

SEQ ID NO: 34205 - DNA, 100 bp, Homo sapiens
ggtgctgctggttagtgtgctctgagggagggtccgagccagccgctgttttgccggaggagcccctcaggcccatatcgcacggatgactgccatccct

SEQ ID NO: 34206 - DNA, 98 bp, Homo sapiens
gtggggaacatgtctgagtcggagctcggcaggaagtgggaccggtgtctggcggatgcggtcgtgaagatagatttctacctggacaaggactggta

SEQ ID NO: 34207 - DNA, 75 bp, Homo sapiens
tccagatgaaaaatgtcacctttgaacatgttaaagggatcctgataacttaagtgactctctcttttccggtga

SEQ ID NO: 34208 - DNA, 50 bp, Homo sapiens
tgacagtggctgacctcgtgttcccgtggcatttccggagagttcttttg

SEQ ID NO: 34209 - DNA, 95 bp, Homo sapiens
ccattgaggtgcggcattatttatcccagtggattgaaagccaagcatggttcgagaacttgtcttggacaattgcaaatcaaatgatggaaaaa

SEQ ID NO: 34210 - DNA, 75 bp, Homo sapiens
aacaagacgacgacacagagatggcttcccccaacccagacgaagaggtccaccaaaatatactaaatctgttct

SEQ ID NO: 34211 - DNA, 90 bp, Homo sapiens
cttttcctccctgaacctgaggggaaattcagttcatgaagataagaagtttcttgacaaatacatgccccagttcatgaaacatcttca

SEQ ID NO: 34212 - DNA, 98 bp, Homo sapiens
cttgtttcacgctatatcaggatgagataactgaaagggaagcagaaccatactataaataagcgggttttgaaaacaaaaaaaagaaggagtggaag

SEQ ID NO: 34213 - DNA, 100 bp, Homo sapiens
aggactgctgtggcagtgtgggagccttctggggggtgactttgtgtgccccatgcccacccagaccaggggactttgtgcaactgcctgtgcccgtcat

SEQ ID NO: 34214 - DNA, 100 bp, Homo sapiens
aaaggcacagagatctgtaattacagctactccagcaacatcttgtccataaggctgaaccggcaagttcagcagactgtacaggatctttttggcagag

SEQ ID NO: 34215 - DNA, 97 bp, Homo sapiens
cctggagggggatgagtcctgaggtgtgaggacttctgcatcttacagtcagcacagaacacactgagacttgaatcaagtcagcaacagagcaaaa

SEQ ID NO: 34216 - DNA, 75 bp, Homo sapiens
gtttggaattgatgatcaagatttccaggaagaagatgaagtaccggacgatgagactctgaaccaaatgattgc

SEQ ID NO: 34217 - DNA, 100 bp, Homo sapiens
ggttatagagtctatcattcttatgatctaccatggtttagaacactaagttgcaaacttccttgataacatgcttttgcgaagtgcaggaaaattaaat

SEQ ID NO: 34218 - DNA, 87 bp, Homo sapiens
gattcgagcaaaagtgccaattgtgaagttcagggataaagtcaggtttccacttgagcggcacagtgacagaacctgcaatacaat

SEQ ID NO: 34219 - DNA, 90 bp, Homo sapiens
ggacccggcggggcgcaccacagagaccggcttcaatatcttcacccagcatggtgtggaatatcaaacaaatgattaagttgacacagg

SEQ ID NO: 34220 - DNA, 82 bp, Homo sapiens
gagcatctgggccgagaccattccgtatggagagccggtgaaactgatgaaagttgtaagaagcaccttggaagagtgttat

SEQ ID NO: 34221 - DNA, 76 bp, Homo sapiens
caggagggtgtcctgaacagcaagttggaatcgaagcctcttaaaatggcagatgacttggacttcgagacaggag

SEQ ID NO: 34222 - DNA, 50 bp, Homo sapiens
tgaacggagtgtgcgacggattgggagctcttgaatgtcgtctctcaact

SEQ ID NO: 34223 - DNA, 74 bp, Homo sapiens
gccgtccaccttgccagccccagttctccttgacggagcccatgaaggtggctccagccccgggcctggctggg

SEQ ID NO: 34224 - DNA, 50 bp, Homo sapiens
gagggaagacacgcggaaacaggctttggaagtgataaagcagttaaaag

SEQ ID NO: 34225 - DNA, 50 bp, Homo sapiens
cttcgagcagctgcagaggtcccggaagacagagatgtcaatgaccccat

SEQ ID NO: 34226 - DNA, 73 bp, Homo sapiens
cgtgaccgagagcgtgaccgagagcgcgaatatcgtcatcgttagaaggctctgtgtgctccgggatggagca

SEQ ID NO: 34227 - DNA, 75 bp, Homo sapiens
ggtggtcgcggcgacctccggcggcgggaggcccggcctgggcaggttgtggcagcactgcctgaaggtatgaga

SEQ ID NO: 34228 - DNA, 83 bp, Homo sapiens
ggaactgcgcagcctcttcgagcgccgcggacgcgtcatcgagtgtgacgtggtgaaaggtagttgatgtcacttggcgatat

SEQ ID NO: 34229 - DNA, 50 bp, Homo sapiens
atttgggccaaattgctttcaacatgaagccattattatatcaggaaccg

SEQ ID NO: 34230 - DNA, 100 bp, Homo sapiens
ggggcgctgcctggcccaggcgcacacggaagtggaaaccaagtgctacctcctggagcttctcttggaaatgggctcacaccagaggcagcaagagacc

SEQ ID NO: 34231 - DNA, 101 bp, Homo sapiens
gcctcggaggcgttcagctgcttcaagatgaagatttcaggtatgctgctgaaagtgggaatcctctacattggtgggcagctggtgaccagtggggctgt

SEQ ID NO: 34232 - DNA, 80 bp, Homo sapiens
aaggtcttcagcggggcgctccaggaggcactcacagctggtaggtgagtgctgtcctcggctcactttcctcaagctct

SEQ ID NO: 34233 - DNA, 83 bp, Homo sapiens
ttctcatgctgagagttctgcgcttccaggtctccttccagcatccacacaagaaaccagggtggttatgaccgctactcagg

SEQ ID NO: 34234 - DNA, 75 bp, Homo sapiens
cagcagccgggctgagaggagcgtggctgtctcctctctccgccatggtcaacaacggttccagcctcagggatg

SEQ ID NO: 34235 - DNA, 82 bp, Homo sapiens
cggccagttaaacctgtcgggtagaaacctcagtgaagaagtccaaggcttgcgagaaggtcatttccgtgggtcaaacggt

SEQ ID NO: 34236 - DNA, 98 bp, Homo sapiens
cctcgcctcccggccgagctgacgatcaccacgcttattaatcataaagataataccaaaaagtctgataaaactctgcaagcaattcagcgtgtagg

SEQ ID NO: 34237 - DNA, 100 bp, Homo sapiens
caacattctacagaatgctcaggttacacgcatggggagatactctggaggaagcatttgagcaatgtgcaatggccatgtttggttacatgacagatac

SEQ ID NO: 34238 - DNA, 127 bp, Homo sapiens
ccagaatctaaaaatgctgcgtatagtggaaccttatgtgacctgggggagccctctggcacaaatggaagaagaaagaagggagcaagtagctaaaattaagaagatggagatggagatggagcag

SEQ ID NO: 34239 - DNA, 100 bp, Homo sapiens
cagagacagcgttccagacaaccaccccaccaagttcaagctgcgactgatagattggggtctggcagaattctatcatcctgctcaggagtacaatgtt

SEQ ID NO: 34240 - DNA, 75 bp, Homo sapiens
tacgaacccctggacgggagagtctgccggcggagaatataaggtatggcccatctcctgtacgcttggagcgac

SEQ ID NO: 34241 - DNA, 80 bp, Homo sapiens
aagaccttcaagcagcgccgcaccttcgcccgcggcgccatggctcacgtcggctcccgcaagcgctcgaggagtcgcag

SEQ ID NO: 34242 - DNA, 74 bp, Homo sapiens
ccgccgctgctacctgcagcgccgtgtggcacgacacaaaaatcaggggtcactgtcattcggggacgtggctg

SEQ ID NO: 34243 - DNA, 50 bp, Homo sapiens
gagacatggaccgcggcgagcaaggtaaattcaactggaagggaactatt

SEQ ID NO: 34244 - DNA, 90 bp, Homo sapiens
ctgctttccacttagattcagacctgcatgcagcagattggaataaatatgatgaccgattgatgaaagcagcagaaaggggggatgtag

SEQ ID NO: 34245 - DNA, 82 bp, Homo sapiens
acagacgggaccttgtgcatgacgcaggatcagatcctggaaggcagttttttgctgacagtcactgcaaaacagcagctat

SEQ ID NO: 34246 - DNA, 90 bp, Homo sapiens
aggatgtcgggacaccccggaagctgggaaatgattcttcgctgctgctgccttaccgccgagaaccaccacccgccaggcgtcttgcgg

SEQ ID NO: 34247 - DNA, 98 bp, Homo sapiens
gcgctcctttaccctcatcgtggaggcctgggactgggacaacgataccaccccgaatggcgaggcggctttgcacaaggtggacattcccagggcca

SEQ ID NO: 34248 - DNA, 100 bp, Homo sapiens
tggttaatagtggcatggaagatccatttggagtgtacctcacagccttctaggatctccagagtggacaggaatctcacttggagggaccatggagcag

SEQ ID NO: 34249 - DNA, 75 bp, Homo sapiens
ccagtgaccccaggctttttatggctgtgagacacgttaaaatttcaggagttgtggaaagtaaaaatgtagccc

SEQ ID NO: 34250 - DNA, 75 bp, Homo sapiens
agtttaacgacaagcacatcaccactctgcaggcactcagaatggtccagcgtttgacataccgacgtaggcttt

SEQ ID NO: 34251 - DNA, 75 bp, Homo sapiens
cgcgggccgggaggggacggccgccggagccgcgaggccaagtgtgaacccacatccctgcccccagggccacct

SEQ ID NO: 34252 - DNA, 75 bp, Homo sapiens
cgggggagccccgggagccgcacggacctctttgtttttagacatgaattggccataatgagactagcagccttt

SEQ ID NO: 34253 - DNA, 82 bp, Homo sapiens
accatccctgacctggtcctcatgctgccgaggctgttgctgttgatctgtggttgttgatcattatgaaaatcctagaaac

SEQ ID NO: 34254 - DNA, 100 bp, Homo sapiens
ccgagcgccggctgctggggctgctgaggcggtacctgcgcggggaggaggcgcggctgcgggacctgactagtcacatcgatcagacaacaacatggca

SEQ ID NO: 34255 - DNA, 75 bp, Homo sapiens
atgggccctggcggtggacgagcaggaagctgcggctgagtcgtgtttgatgatggtgatgagcgaacattgaga

SEQ ID NO: 34256 - DNA, 100 bp, Homo sapiens
actcttcagttatgaggctacccaaccagaggacctggagtttcaggaaggggatataatcctggtgttatcaaagggtgctggagaatctggtaaaagc

SEQ ID NO: 34257 - DNA, 83 bp, Homo sapiens
gctgggcctcgtggagttcagagacgtgctttgcaagatatcaccttgtcacagcagaccccctccacttggaaggacacgca

SEQ ID NO: 34258 - DNA, 100 bp, Homo sapiens
tcccggacggagccggcggctgcggggcgaggacggcggcggaccggggcagccccgcgccctggccagataacgaaggaggcccaacttcattcaataa

SEQ ID NO: 34259 - DNA, 83 bp, Homo sapiens
attgtacaatttgggattaaaaggctattacatcagagacagtggcaacaattcagaagaatgcagatgtgctgttttcctca

SEQ ID NO: 34260 - DNA, 73 bp, Homo sapiens
actctgtgcagcgagttacatgttgagccatttcaggctacaggttcattttcctgacgacagcagtcacaaa

SEQ ID NO: 34261 - DNA, 74 bp, Homo sapiens
gccaaatcgttacactacaccctcaaaaggtaagaatgattgatgttggctgatattggagtgctcattcacat

SEQ ID NO: 34262 - DNA, 100 bp, Homo sapiens
cgacgctggctgcagggacccggtgacagcgtgagagggtgtaccagtgatggcaataagaaacaaaatgatatcagaaggactagacccagatcttctt

SEQ ID NO: 34263 - DNA, 82 bp, Homo sapiens
tctccggcgggaaggaaaaccgcgcagagagtgccctctggtggtcagaagatgctgtgctgtctcgttaggatgaatggat

SEQ ID NO: 34264 - DNA, 101 bp, Homo sapiens
cagaactgccccatcgatgtgcggcgcccgctgtataagtggaagcatcagttcacagcagtaatgcacactgtacagataagacaattgaagctgctgaa

SEQ ID NO: 34265 - DNA, 136 bp, Homo sapiens
tgggagaagaagttgtccatgttcacactgggtgaaggaagctgaaaccacagacatgactgagtcctccatgaagagccgccatggcatcagatgaaggcaaactttttgttggagggctgagttttgacaccaa

SEQ ID NO: 34266 - DNA, 100 bp, Homo sapiens
aggaaatgatgcagttgaagaaatggtctgtgtgtctgttctcaagctctggcaagcagtgtgcagcaggaacgtggactaaagaggatggacatagaac

SEQ ID NO: 34267 - DNA, 75 bp, Homo sapiens
gtgaagcagtgtgcgaagatttccaatcatttctaaagtgtacattccaagcagagtggccctcatccttcagaa

SEQ ID NO: 34268 - DNA, 100 bp, Homo sapiens
gcagaaatgcctgaacgccttggcgtctcttcgacatgccaaatggtttcagctcgagaggagaatgtggccactttccgaggctcagagtatctgtgct

SEQ ID NO: 34269 - DNA, 83 bp, Homo sapiens
gtgaagtcttcagctcctgcagctctgaagtggttctgaacccagtgacttgattgtaaaaatttacagagcggaatcatatg

SEQ ID NO: 34270 - DNA, 75 bp, Homo sapiens
attgtagtaacggacttccataaccattcagtgaaggtatcgagaaccttccctgcgaacttcagaggaacttcc

SEQ ID NO: 34271 - DNA, 112 bp, Homo sapiens
ctctgcacaccccacaaccgaggcctcaacaacaaatgcttcgatgactgcatgtgtgtggaagtgcgccagctccagtgtcccaagaaatcaccctcacgtgagtccccac

SEQ ID NO: 34272 - DNA, 82 bp, Homo sapiens
agggcctcatcctcaaccccattttccgccagaacctccgcattgcccttctgggtggatgctgtgtgctgtggacccacct

SEQ ID NO: 34273 - DNA, 100 bp, Homo sapiens
gacagtggagatggtgtcactcatgtcattcctgtggagcgttttattgtcgtcagagaaccaagtggcacactacgcaaagcctcttgggaagaacggg

SEQ ID NO: 34274 - DNA, 82 bp, Homo sapiens
ttgatacaacaactgtactgggagagctaggatggaaaacatatccattaaatgggaatgtgacagtgatgataacatgggt

SEQ ID NO: 34275 - DNA, 75 bp, Homo sapiens
ctgcatacaggagatgagggaggacggccagacacctggaagccggaaaatgcaaggaagatgtccgagcaactg

SEQ ID NO: 34276 - DNA, 96 bp, Homo sapiens
cttcaatccagttccaaggactccacgggacatatctgaagagatggattaagaatgctttggattaaggattgtggagcacatttcaatcatttt

SEQ ID NO: 34277 - DNA, 100 bp, Homo sapiens
cctggttgggaataagaaggatcttcggaatgatgagcacacaaggcgggagctagccaagatgaagcaggtagcaggtaccatgaagctggaattggct

SEQ ID NO: 34278 - DNA, 100 bp, Homo sapiens
ggaggagctcgtccgccagcccccaggagcaagaccaagaccgcaggaaggactggggccacgtggagctgctggaggacatttatgcagtgtgtgattc

SEQ ID NO: 34279 - DNA, 100 bp, Homo sapiens
tgttagggcgtggcctgaggcttggataagtggggactgggccggggtctgcagggctcagctgagcccatgagctcccagagctaacccctgaacaccc

SEQ ID NO: 34280 - DNA, 98 bp, Homo sapiens
tgtcaaaatccatagatggaaaagatggaaaggcctatgctccagaattctattatgatacctacaatccagtatggcagaacagacaccgtgtttat

SEQ ID NO: 34281 - DNA, 83 bp, Homo sapiens
gctattctcaggatatgacaggggtaacacccttccagatgatttttgagtgtcaacagcatctccaccctggagcctgtgag

SEQ ID NO: 34282 - DNA, 76 bp, Homo sapiens
tttaaatacagaacgaccaatggatataggaatggtctgccgaaaaccgaccgacccggttgattggccaccactt

SEQ ID NO: 34283 - DNA, 100 bp, Homo sapiens
atcaagcccgctcctccacaaaccgagcaagtagagagcaagaggaagtcagggggaaatgaggttatcaatactctggctgaccatcatcatcgtggga

SEQ ID NO: 34284 - DNA, 98 bp, Homo sapiens
ttgtcgcgagctgctgatacagaagagatggatattgaaatggacagtggagatgaagcctaagaatatgatcaggcatgtcagagcgggagcgacag

SEQ ID NO: 34285 - DNA, 89 bp, Homo sapiens
tcccggcccgcgcccgccccagccccgacctggcggggccaggacgctggttcatacactccaagatccctgcatgtcactgagtccac

SEQ ID NO: 34286 - DNA, 100 bp, Homo sapiens
cctgcctctgcctgttcttctggaatgtcttgggggttttgatcctgtcactgtggtggcctttttgaagatgtaactattagagctgggcattctcctc

SEQ ID NO: 34287 - DNA, 80 bp, Homo sapiens
ggagaagtttccgcaggactacttccccgaggtactccaaagattcaggtttactcacgtcatccagcagagaatggaaa

SEQ ID NO: 34288 - DNA, 75 bp, Homo sapiens
ttggaagactatgtagtattgatgaaaagagggactgccataacattcccaaagtgctgaagctgctgaaagatg

SEQ ID NO: 34289 - DNA, 100 bp, Homo sapiens
atggacggcccggccatcatcacccaggtgaccaaccccaaggaggacgagggccggttgccgggcgcgggcgagaaagagctccatgaacctgcctcca

SEQ ID NO: 34290 - DNA, 83 bp, Homo sapiens
tttgcgacgttccctcagcctctgcccaaagaaagaaggagatgagagtccggagtgttgtcatgtgaagcctgccatccagg

SEQ ID NO: 34291 - DNA, 100 bp, Homo sapiens
cggacatgacccagccactgagtgcctacttcatcaactcctcgcataacacctatctcactgctcgtgtgggcgctcgtccacaaacactccgtggctg

SEQ ID NO: 34292 - DNA, 90 bp, Homo sapiens
tccttactggatcctcaaaccagaagaaaacctgaatctctgaggtggaacggcacatgtgtgatggggacattgttatcttcaaccggc

SEQ ID NO: 34293 - DNA, 75 bp, Homo sapiens
gaagagccttcaggcgctgggcgagacttggcagtggatcaacccagtggacttccaggaagaggcatccctgca

SEQ ID NO: 34294 - DNA, 75 bp, Homo sapiens
ccggacagggccgcctgtcgccgggtactccaaagattcaggtttactcacgtcatccagcagagaatggaaagt

SEQ ID NO: 34295 - DNA, 99 bp, Homo sapiens
cttggctcgtggaagaaggagcctggattgttgaacagataaatacgaaactgccatcatcatttgtagaaaaactgtttataccatcatctaaactac

SEQ ID NO: 34296 - DNA, 90 bp, Homo sapiens
ccccgcagtgaccatctgcaccctcaatccctacaggtcccgcggcagtgctggtggccatggttcccgtagccagaaggagttgcccac

SEQ ID NO: 34297 - DNA, 111 bp, Homo sapiens
aagattgatgtctacctctatgaggtagatattaaaccagacaagtgtcctaggagagtgaacagaagtgtatgctgacttgtaaagtgaagaagccagtggtgctgcggg

SEQ ID NO: 34298 - DNA, 98 bp, Homo sapiens
cccacaaaagaatcctcaagttcctccagctttttctggttgtcttcttgcctgccctgtgtcgtaaaatgggggtcccttactgcattatcaaggga

SEQ ID NO: 34299 - DNA, 50 bp, Homo sapiens
ctagacccacagctgttaaagcaacaggcacatctactatgcttcttact

SEQ ID NO: 34300 - DNA, 83 bp, Homo sapiens
aaatcatttcactgttagtttcaaaggactatgtcaaagctggtggcattcttcaggaggatatttctgaagcttgtctaatt

SEQ ID NO: 34301 - DNA, 105 bp, Homo sapiens
gtgagggaacctggaggctctgatcacctggccaacccactggggggagaagccgcaccagtgcgccgtgtgctggcgatccttctctctacgcgactacctgct

SEQ ID NO: 34302 - DNA, 75 bp, Homo sapiens
tcctctagtattctctatgctagaaagattctttcttgtggagaagttattcatgtgaagatccttggaattttg

SEQ ID NO: 34303 - DNA, 100 bp, Homo sapiens
acaggaagagggttggaggcaaagttccgaatagggatgaggcatacgtggttgctgcagcaactggtcacacagtagtgttggtagaccagacagagga

SEQ ID NO: 34304 - DNA, 100 bp, Homo sapiens
tgaggacctactcacagataggaattgaagatgatctgcctcggatgcgattcaagtgcccgtactgcacacatgtggtgaagcggaaggcagacctaaa

SEQ ID NO: 34305 - DNA, 75 bp, Homo sapiens
gtattgacatcgtggagaaccgcttcattggaatgaagtcccgagctcggcttattccaggggtgtgtttcgtcg

SEQ ID NO: 34306 - DNA, 100 bp, Homo sapiens
acgacggggctgcagctgcaggggctgagctggctgggcaagcgcgggccgcggaggaggtctcaggtcttccgtgtgtgctaagatcgtgcagctcctg

SEQ ID NO: 34307 - DNA, 75 bp, Homo sapiens
ctacgccagcggcgtcgagaggaccatcctgggtgctggccctgtgctggagaaatccaaggacacttatttgct

SEQ ID NO: 34308 - DNA, 98 bp, Homo sapiens
agggacctgtgttatatttgaagaaaatgttgaacatgtctatttgcgcagccgtggcatttttctacagcaactaccttctccttcactggcaactc

SEQ ID NO: 34309 - DNA, 74 bp, Homo sapiens
gtttcctgacgcctcccagccgtgcttcctgttaagcctgtgaaacttgacatgaagtccgagaggagaccccc

SEQ ID NO: 34310 - DNA, 80 bp, Homo sapiens
accgagaccgcggccgggaccgaggctccaattaaggaacagctatatcctgcttccttctgtaagcagcatcgacttgt

SEQ ID NO: 34311 - DNA, 90 bp, Homo sapiens
gacatggcccggtatgaacgggagcagtatgtggaccgagcccggtactcagccttttaaaaactggagtttaattggttggggtcagat

SEQ ID NO: 34312 - DNA, 75 bp, Homo sapiens
ggaaagatgacggatgaaaagaatgaacactgtccttcaaaacgaggcaccatgccggtggaaaggatgcgcatg

SEQ ID NO: 34313 - DNA, 100 bp, Homo sapiens
cttcggcgggctcgcgagcccggccgcggcctgctggtttcagggtcaaggtggaaggtccaaggactgagaaagaccctcgaaggcatccactttagtc

SEQ ID NO: 34314 - DNA, 82 bp, Homo sapiens
cgcggcgcggggccaccatgggggcccagctcagcacggactgaatgtgggcccagttggcgtcattctgctttgacctaaa

SEQ ID NO: 34315 - DNA, 74 bp, Homo sapiens
tcttactcatcagctctatatccagccaggatgctttcattggatttggaggaaatgtgatcaggcaacaagtc

SEQ ID NO: 34316 - DNA, 100 bp, Homo sapiens
catcataagcagcgaaagctattccttcaaggatacttctactggtcataagaataaggagtttgtggcaagagctacagagacttctgaagtggagagt

SEQ ID NO: 34317 - DNA, 83 bp, Homo sapiens
gttttgcgtgtgttgaaagtacaattctattgcacatcaatgatatcatcccagtgattcgcctttgccagtctcatctcgtg

SEQ ID NO: 34318 - DNA, 74 bp, Homo sapiens
cggatgtcggcgaagagttcaaccaggtggaacacctgcagcaggagactgctgctctgaaaaagcaaatgcaa

SEQ ID NO: 34319 - DNA, 50 bp, Homo sapiens
cctcacaagtagctgggactacagagtcccctttacttggtaaatcacgg

SEQ ID NO: 34320 - DNA, 82 bp, Homo sapiens
tcctcgcttgcagttcagcgaccacgatttcagaagaaagtggtagcttcctttccaagaacagttctgagcacaggaatgg

SEQ ID NO: 34321 - DNA, 97 bp, Homo sapiens
gacgaccggttcgtcgcctccttgcccgtgaccgtcgctagaactcagttgtgcgttgcggccagtcgccactgctagcatctgctgcacccaagcc

SEQ ID NO: 34322 - DNA, 111 bp, Homo sapiens
tcctggtgattgacaaagcaaaaatggaatcccttgagtcaagggtccagagaaggaggagaagttgagacaggcggtcaagcaggtgctgaagtgtgatgtgactcagag

SEQ ID NO: 34323 - DNA, 51 bp, Homo sapiens
cgcagtggtcgcttcttctccttgggaaggtgtgatggagttcttattagc

SEQ ID NO: 34324 - DNA, 95 bp, Homo sapiens
caagagcgagccgcctgccccggtgcgcagacagagctattccagcaccagcagaggccagcatccttcagaaaaagcatccccgaggaggaaga

SEQ ID NO: 34325 - DNA, 82 bp, Homo sapiens
ctgggggccacaaatgctccttctcctggagacgcaactcaagagctagagccggtgcaggccacgcagaacaagacaggga

SEQ ID NO: 34326 - DNA, 50 bp, Homo sapiens
ggcctcccaaagagctgggattacaggttgtgtaccagccgcaggaggcg

SEQ ID NO: 34327 - DNA, 75 bp, Homo sapiens
ccccagatccatttacactttacagaatggtcctcgtccgaagtgagaatgggcagttgttaatgattcctcagc

SEQ ID NO: 34328 - DNA, 100 bp, Homo sapiens
ggcagcacatgacgtatttgagttgaagcagttttctcagctgcctgctaacatagctgtttgcagttctaagccagagagatgacacgggggaaattcc

SEQ ID NO: 34329 - DNA, 90 bp, Homo sapiens
tttgctctctcctttttaattgcgggtgatgacagcactatagtgcaggtgttggaagtgaaagtggagcggaaggagtggatgcaggcc

SEQ ID NO: 34330 - DNA, 74 bp, Homo sapiens
gtcatggtcacccaggagagtgacagcagctttctggtcaagcattgttggaaactgttactacatttttactg

SEQ ID NO: 34331 - DNA, 88 bp, Homo sapiens
aaagggtgtgttactgaagtgaaatatcaacaactagaagccatttgtgtcaaggtaacgtctggagaaacaaaaggtcaggaaaggc

SEQ ID NO: 34332 - DNA, 100 bp, Homo sapiens
ccctttctactcctccccttgcagaaggaggcccaagttgcagcccgggtttggagggagtttgagatgaagcgaatgaatcttgctctgtcacccaggc

SEQ ID NO: 34333 - DNA, 88 bp, Homo sapiens
gaggcggcccgtggccaaagcacccgccaggctccgagggcctcgggggacacccccaccactccaaagcaccccaaagacagccgag

SEQ ID NO: 34334 - DNA, 75 bp, Homo sapiens
gttgtcccagctcggcccgcgggggagccccgggagccgcacgatttcagaagttgattgcaaagatgcactgga

SEQ ID NO: 34335 - DNA, 100 bp, Homo sapiens
gttggtgatctggcatgggatgggaccttgctaagcagtactctgacagactagaatgctgtgaaaatgaagtagaaaaggtaatagaagaaatacgttg

SEQ ID NO: 34336 - DNA, 78 bp, Homo sapiens
tagggtcctttatatagaagggagagtaggaaatattaggaagctgtgattttcaaagctaattatgaaaacatttat

SEQ ID NO: 34337 - DNA, 74 bp, Homo sapiens
gttggatttatgcaaacttgggccaaaggacagttagaagacagtagggaccaacgaatgcttggacaacaacg

SEQ ID NO: 34338 - DNA, 75 bp, Homo sapiens
caagggagtgatgccggttatctctgtgaatctcagaatttacaacgggaatgattttaccaacgaaagctatgg

SEQ ID NO: 34339 - DNA, 96 bp, Homo sapiens
aacaatggcatttacagaaagagtcaacagcagtggcaacaggacagagcgggatgccaccagcttgtccaaagggaagttccaggagctcctggt

SEQ ID NO: 34340 - DNA, 100 bp, Homo sapiens
ttctccagacttcagtaaaattgcttggttccttgtcacaaggatggcaatggttatatcagtgcagcagaactacgtcacgtcatgacaaacttaggag

SEQ ID NO: 34341 - DNA, 77 bp, Homo sapiens
tctggacaaaggaacaggtatctcagttaccttatcccatatcacacaactggtcctcagccataacaagctaacaa

SEQ ID NO: 34342 - DNA, 51 bp, Homo sapiens
tgcggctgtatggagcgattttgcagatgatagtcgtgcaagcactgcagt

SEQ ID NO: 34343 - DNA, 100 bp, Homo sapiens
gtgaaatgtgtaaagatgctcttagcctatccctcggccagatcctgtgcataataatgaagaaacacatgatcaagtgctgaaaaccagattggaagaa

SEQ ID NO: 34344 - DNA, 82 bp, Homo sapiens
tgtcggcgaagagttcaaccaggatgggagtcccagcttctggagacggggttcctggggatcttcctgtgccctctgtgga

SEQ ID NO: 34345 - DNA, 102 bp, Homo sapiens
ccagcgtgccaaaagagcagtctcacatgaagaccaatttttacgtctagatttccatgcccatggaaggatgaatgctatcaagtaagacaagtgtttgcc

SEQ ID NO: 34346 - DNA, 98 bp, Homo sapiens
taaaggaaggcgtccgttggccttcgtacccgtcttgattgagctcattgctatggacagtgctatcaccctgtggcagttccttcttcagctcctgc

SEQ ID NO: 34347 - DNA, 123 bp, Homo sapiens
taacaatttcacctttgaattcagccagtggtcacagctggatgtttgcgacatcccagagagcttccagaagtccagtgtcgtgctgctgcaggagcacccctgcctggtggagctgctgtc

SEQ ID NO: 34348 - DNA, 80 bp, Homo sapiens
caaggatgctcctgggatttcggagaggccgcaggagtcatttcaaaaactaagacgcagtcttccaaacctgtcccgaa

SEQ ID NO: 34349 - DNA, 90 bp, Homo sapiens
cgcggaggctgagggacccgccgcggcgctgtcgccggagagggagggcaccgctgtcgtcgatgacacctttgaggccctgtgcatcga

SEQ ID NO: 34350 - DNA, 75 bp, Homo sapiens
tgtcaacaagaatgccttctgattctgatgattctttgaccaaaaaagctggcttagcaggagctccagcccgtg

SEQ ID NO: 34351 - DNA, 88 bp, Homo sapiens
acacacccatcgcccctggctttgccagcctcaatgagatgggatgagtaccagttctgttaccaggcggcactggagtacctcggaa

SEQ ID NO: 34352 - DNA, 105 bp, Homo sapiens
caagatcaacctcctcggcttcttgggccttgtccactgccttccctgcaaagccggcacagtcttcactaccgtagaagaccttggctccaagatactcctcac

SEQ ID NO: 34353 - DNA, 100 bp, Homo sapiens
aggaaatcaagggaaatccagtccaagttgaagggcttctatgaggaggtggccaacccactgctgacgggtgtggagatggagtaccccgagaacgcta

SEQ ID NO: 34354 - DNA, 98 bp, Homo sapiens
gcccagagctcctggaccaatgcatcttcccaccaccttaaaccactggtaaaatctgtaaaaactgggtcagttttttggacaatgtgctgctgctt

SEQ ID NO: 34355 - DNA, 82 bp, Homo sapiens
ctgcggcgtgtgcgcgcccgccagctgctccggagatacggctctccgtgtgaaatggtcccatctcagactgccctgggta

SEQ ID NO: 34356 - DNA, 100 bp, Homo sapiens
tctcagagctttacgatgtcacttgggaaggtgctggagaatctggtaaaagcaccattgtgaagcagatgaggatcctgcatgttaatgggtttaatgg

SEQ ID NO: 34357 - DNA, 50 bp, Homo sapiens
ctgaagatggctactctggagttgagagcttacaattgagactgctaacc

SEQ ID NO: 34358 - DNA, 100 bp, Homo sapiens
ccctgtgcacctctcagcaggcctttgctggacagatgaagagtgacttgtttctggatgattctaagagatctgccaggctggactgtgctgttcctct

SEQ ID NO: 34359 - DNA, 75 bp, Homo sapiens
ggttgtcatgatgaattgagctctctgttacctgcgcatcacaaccggaaagaccacagcaagattctttcattc

SEQ ID NO: 34360 - DNA, 83 bp, Homo sapiens
cgcgcgcagggcctgcagcgggagctggacggcgagcgcgagcggcgcgagaaagcagatcgggagcggtgccgagaaaaatt

SEQ ID NO: 34361 - DNA, 75 bp, Homo sapiens
tgtgaccccatatatgattttctttaaggatggtttagaaatggaaaaatgtgaacccttctctgaagcaacagc

SEQ ID NO: 34362 - DNA, 100 bp, Homo sapiens
agcagtgtttcgtgtgcgctcagtgcttccagcagttcccagaaggactcttctatgaggtgttcctccaagaaaagctggttatattgaagacctggtt

SEQ ID NO: 34363 - DNA, 100 bp, Homo sapiens
ccgcgggcccggccacggcggagccaagctccagaaggtcctgagcctcggccacatcagcaccgactacccgctggccgaaaccatcctcctgctgggc

SEQ ID NO: 34364 - DNA, 73 bp, Homo sapiens
tcgaagcagttttcaggacttaaggctctgggaatctgaaactcagcaccgaggctctgctccccactctgag

SEQ ID NO: 34365 - DNA, 75 bp, Homo sapiens
gagccccagattcaacccgtgtacgtgcctgtgcctaaataatagctcttcaagtctgcaataaaaaatggcctc

SEQ ID NO: 34366 - DNA, 75 bp, Homo sapiens
gcgctctttgaaagcgccccggaatgacctgtcgcctgccagctctgtataaaagaagcctgtattgttttgaat

SEQ ID NO: 34367 - DNA, 75 bp, Homo sapiens
acagatgaacaaggccttattgttgaagacctagtagaagaggtgatgattcacctccagcagaaagggaaccag

SEQ ID NO: 34368 - DNA, 95 bp, Homo sapiens
tggaggtttatctcatacatgctggtacatgctggggccctcatctttgtgtcccatggagccggagagcacagtggccgctatgaagagctggc

SEQ ID NO: 34369 - DNA, 101 bp, Homo sapiens
gcagacgttgtggcggagaagggcagtggctgtagctgccctttccgtttccagggttccgaccaggaaacttggatttaactggccagaagcaggtattc

SEQ ID NO: 34370 - DNA, 90 bp, Homo sapiens
gggtcaagtgcagtacctggatctcatcaaaaaggacaccagcaagctgttcaatgaggaggtgaataagtctgatgacacagcagaaca

SEQ ID NO: 34371 - DNA, 106 bp, Homo sapiens
ggtgagggtggaagctgggaaacccacaggaggcaaccacactagtttaggtgaaatgacaatggatgctctgttggctcgattgaaacttctgaatccagatgac

SEQ ID NO: 34372 - DNA, 98 bp, Homo sapiens
tcagttgtgcgttgcggccagtcgccactgctggcaggctgtccctgcaggatcccacgtacggctgaatcttcagactggggaaagagaggcaaaac

SEQ ID NO: 34373 - DNA, 83 bp, Homo sapiens
caacctgtttatgcagtttcgggaccacctggaggaggtgttgaaagggggactcggagatcatgcagcagaagcagaaaaag

SEQ ID NO: 34374 - DNA, 100 bp, Homo sapiens
cgaccaaagcgcctgaggaccggcaacatggtgcggtcggggaataaggtgaataatttggtcaaatctaccttagatacttttggtaagatcaatttct

SEQ ID NO: 34375 - DNA, 75 bp, Homo sapiens
cgtggaataggtgtatcaagtaatggtgcaaagcctgaaaaacgcttcgttaagggactcaggcagtacgggaag

SEQ ID NO: 34376 - DNA, 100 bp, Homo sapiens
gaatattggtcaagttgctgaccttgaactatttgtcgtagatgtccagacaagccagatcaccaagatccccattctgaaagaccgggagcctggaggt

SEQ ID NO: 34377 - DNA, 100 bp, Homo sapiens
ttttgattctgagcgtcaaacttgttatgcagcatataacagacattccactgcccttctcccaaaaagatgtcttttcgaaaaatggatcccagctgta

SEQ ID NO: 34378 - DNA, 100 bp, Homo sapiens
actagagcaggccatgattggaccatcccccaatcctctcatcttgtcctacctgaagtatgccattagttcccagccccaaggaggcccgcctgacgac

SEQ ID NO: 34379 - DNA, 82 bp, Homo sapiens
tgcaccatgagcgtcccggccttcatcgacatcagtgaagaagatcagctctttcgacgtgtagcagcagctttgccgggaa

SEQ ID NO: 34380 - DNA, 75 bp, Homo sapiens
aatggagtccacgatcgagcatatgttgctgtggatgggcattggttatagtcatgggaaaggaaggtgtccacg

SEQ ID NO: 34381 - DNA, 75 bp, Homo sapiens
tatctcaaaaggtgatctggacaaaggaacaggtatctcagcactggaagatcaattcttttatcatccatactt

SEQ ID NO: 34382 - DNA, 82 bp, Homo sapiens
agaaaggtggaggccgggaggacgaaggggggctttctctgtggtccgacgctgtgtcaagctctgcaccggccatgagtat

SEQ ID NO: 34383 - DNA, 97 bp, Homo sapiens
cggcggcggctgcggcccaatatagagccgctcccgaggccccggcgcggcgcgagggcgcggggcgcggcgtccacaggcgccgaggctgcccccg

SEQ ID NO: 34384 - DNA, 100 bp, Homo sapiens
cctggtggagtgttcccagtccctcctgcagctgttgttttaatgaaacttctccctcctcctatctgtttccaggaagcgtcagcccccgtagcacctc

SEQ ID NO: 34385 - DNA, 108 bp, Homo sapiens
ctcaatatctgtcttcggtggactccttcggcagtccacccaccgccgccgcctcccaggctgctccagttacagcaccacccggccgctgcacccggctgctcccag

SEQ ID NO: 34386 - DNA, 75 bp, Homo sapiens
ggcccctccggccagggccgggagccgggccggcctagccagggggggccctcagcctcttggccttgaacgggc

SEQ ID NO: 34387 - DNA, 96 bp, Homo sapiens
gctgaggcggcgcggcagcggagggacggcagtctcgcgcgcagaaaaatatggctcaggagactaaccagaccccggggcccatgctgtgtagca

SEQ ID NO: 34388 - DNA, 100 bp, Homo sapiens
ccagaaactggaggagtcccgctcgaagctagctttcagcttatgtggagaagtcgctgtgaagccacctataaatccatttactgaatttatggagaag

SEQ ID NO: 34389 - DNA, 100 bp, Homo sapiens
ccggcaggatgaaagtgagcagtccagaaagcggcttatcgaacagagccgggagttcaagaagaacactccagagtggaatgcagtagccctctgggcc

SEQ ID NO: 34390 - DNA, 90 bp, Homo sapiens
gtgggctataaagaagggcttttatcttgtgctgatggtgagaccattctaaaaggcctccagtccattttccaggagcaggggatggcg

SEQ ID NO: 34391 - DNA, 75 bp, Homo sapiens
gcagaggtggaggcgctttgaaaggttgaaaggattgttgacaaaaggaaaaataaaaaagggaagacagagtat

SEQ ID NO: 34392 - DNA, 74 bp, Homo sapiens
ggatctgtgtgcccacagctcctggagccccacagcaggttcaggagaagtggcacctggtggaggacctgtcg

SEQ ID NO: 34393 - DNA, 101 bp, Homo sapiens
ggaaatctggcacctggaaaagaactgcatgtcccaggaggatggttgttgatatctgtgcagaagaattggggaataatgtaaagcccgctgttactttg

SEQ ID NO: 34394 - DNA, 82 bp, Homo sapiens
aggatatgaagaaattgagggttcttgccatggtatttgaaatatctcaccaaaaaatatttgaagaagaataatctacgtg

SEQ ID NO: 34395 - DNA, 98 bp, Homo sapiens
atactcaccctgcttgctttgtggctatcatcaaaatcaccaaccaaaagattcacctttggatttcatcgcttagtgtcttctcagaaacaaccagc

SEQ ID NO: 34396 - DNA, 107 bp, Homo sapiens
cccagatctacctgacgggcctgcgagggttgaagattgtgaagcaatagcctaagtggaatcaactatgacaagccgctgcctcccatccaggtggcatctctccg

SEQ ID NO: 34397 - DNA, 75 bp, Homo sapiens
ttcagtgcagacgcagtggtggccctggagcagtatgccagcaagtctattatcctcccagtccacaacgctgaa

SEQ ID NO: 34398 - DNA, 109 bp, Homo sapiens
gccgcaagcaaggcaaaccccagcacttaagcaaacgggaattctcgcactcactgccacaacgacattgtcaaccttctcctggactgtggggccgacgtgaacaagt

SEQ ID NO: 34399 - DNA, 90 bp, Homo sapiens
aacatcaaattcttgaccaatctaggataagtttctttaagatgggttctgaaaatcttaatgaacaactggaagaatttttagctaata

SEQ ID NO: 34400 - DNA, 50 bp, Homo sapiens
ccaagaaaaagcacctggactgggatttttgacatcttgtgaagcagaac

SEQ ID NO: 34401 - DNA, 100 bp, Homo sapiens
aaactggatccagaactccattcaagacactaagggcgactaccagaaagcgctgctgtacctgtgtggtggagatgactgaagcccgacacggcctgag

SEQ ID NO: 34402 - DNA, 87 bp, Homo sapiens
aaataccgcattcttatcacaaaggacttaaagcccagtaatatagtagtaaaatctgattgcactttgaagattcttgacttcggt

SEQ ID NO: 34403 - DNA, 100 bp, Homo sapiens
ccctcaacaaacaccagcgctttggatcaggatcctcatgaccagccaaagagaagaagaattaggaagcataaatcaaagaaaaaatttaaaaatccca

SEQ ID NO: 34404 - DNA, 74 bp, Homo sapiens
ctggacgtgggtgaaatctgcaccgtggacccgtgccacaaggccctgccctgggagaagccctgccacacgtc

SEQ ID NO: 34405 - DNA, 75 bp, Homo sapiens
tttccattttatggtaaaccaatggaggataagatcaatgccctcattaaagcagccggtgtaaatgttgagcct

SEQ ID NO: 34406 - DNA, 101 bp, Homo sapiens
gggaactgtgggcgtcttctctccaaagaagaccatgctcgacagctgaccaaggccatgatgcgaaaggccacggccagccgcctggtcacgcagcgcga

SEQ ID NO: 34407 - DNA, 75 bp, Homo sapiens
cttcatcctataataccagaacagagcacgtttaaagtactttcaacaaaggaacctacaagcagcaattggcgc

SEQ ID NO: 34408 - DNA, 51 bp, Homo sapiens
aaagctcgagccgaaggacatatggagcgagaacccgagcagcgccatgag

SEQ ID NO: 34409 - DNA, 82 bp, Homo sapiens
cggcagtcggatagacaataccacaacaacacattttgcagaggagcacgtgaattgcctctgcttacgttcaggccctgtc

SEQ ID NO: 34410 - DNA, 75 bp, Homo sapiens
cttaccaggatttgctgctggccaagaagaagctacaggccaaatttgagcaccttaagagacttcaccaagaag

SEQ ID NO: 34411 - DNA, 100 bp, Homo sapiens
agtgacgcccttggagtgaggcgagcagcacagagacggctgaaagctgagctaggaattcccttggaagaggattccggagtttgaatccacctttgac

SEQ ID NO: 34412 - DNA, 101 bp, Homo sapiens
tccgcgatggcgagagggggcaccggaggtgacaacaataacaagactgtccttcggacaagttttagttttgacagatagacctccacctataattctac

SEQ ID NO: 34413 - DNA, 83 bp, Homo sapiens
ccaggagacagctatatttgcccatgttattcaaggcagaagtcaattcatctggaaagactatctctgagtcagacttaaac

SEQ ID NO: 34414 - DNA, 100 bp, Homo sapiens
aacagttggctgcttacataaatagatgtatgtccctgggaagctgcatgatgtggaacacgtgctcatcgatgtgggaactgggtactatgtagagaag

SEQ ID NO: 34415 - DNA, 101 bp, Homo sapiens
gaatactatcaaaaaggaaaaaaaaatgacctaaacttttgagatagatttggctctaaattggagcgttattcagtatattaatgtcttattgataatgg

SEQ ID NO: 34416 - DNA, 101 bp, Homo sapiens
ctggagtcgctttcatggtcttgctgattccactcaacggagctgtggccgtgaagatgcgcgccttccagaaacgtatgtttgtgggatactcttgtagc

SEQ ID NO: 34417 - DNA, 100 bp, Homo sapiens
accatatggttacagcacagctgcccctgcctatggcgagaaccgaagtttggaggtagacgagcaggcgagcggtttgcccgggcgcagagcatgaagg

SEQ ID NO: 34418 - DNA, 83 bp, Homo sapiens
tggaagtcaagagggaatcttatgcaagagaaagaaggtcatgcaagacaagataatctgccttccgaaaagagtgcagcctg

SEQ ID NO: 34419 - DNA, 101 bp, Homo sapiens
aatgtggatcaagcaggttttaaatcaagatttaacattccaacacataaaaattatttatccaacagctcctcccaggtgaagtattacagacacttagc

SEQ ID NO: 34420 - DNA, 83 bp, Homo sapiens
cgagaagccagtcacgccgggagctggtacacagcctcaggtggataatattaatgcagctgtgatggatttgaaaaaaaaga

SEQ ID NO: 34421 - DNA, 75 bp, Homo sapiens
cttcatcaaaaatagtgatagctttgataagttcaaaccttgtactactcagctgatcacaagctgcttgatggg

SEQ ID NO: 34422 - DNA, 100 bp, Homo sapiens
aacttactgcagatcctgatagtgaaattgctacaactagccttcgggtatccttgatgtgccctataaggctcaattacttgaaatagccaaagctaat

SEQ ID NO: 34423 - DNA, 90 bp, Homo sapiens
aggcttggtgactccagtggcccagtgatcagggccaaagcggtcagtgagaaggaagtggactctggaaacgacatttatggcaaccct

SEQ ID NO: 34424 - DNA, 74 bp, Homo sapiens
aggaggccaaggacggcgttctggatctcaaagcggttgatgataattagaagcatgctttccactgaacttcc

SEQ ID NO: 34425 - DNA, 74 bp, Homo sapiens
accgacgactaccagctcttcgaggagcttggcaagtgtacccaggaaggatgtgggaaacactttgcatcacc

SEQ ID NO: 34426 - DNA, 95 bp, Homo sapiens
atgcccaactaatatttggaattttcgtatacgtggattccagaggggtgacagcgaaatcaaggagtaaataatgctgaaaaatttgactatgt

SEQ ID NO: 34427 - DNA, 75 bp, Homo sapiens
gtgaagcaaattcgtcagatcaaagaacaaggtaaagaacaagcacctttggagatgagtatgcatccagcggca

SEQ ID NO: 34428 - DNA, 101 bp, Homo sapiens
cttcgggtcgggcgtctccgccggctactgccgcttcagttctcccggtgtggccacgagtcggctatgctaagaaggaatctgatcttaatggcgcccag

SEQ ID NO: 34429 - DNA, 101 bp, Homo sapiens
cgggctttctgctgccgcccgcaagcagaggcccggtgagacccggaagatgatcagcacgtggaccgccgtgtgggtgaagatctgtgccagctgggcag

SEQ ID NO: 34430 - DNA, 99 bp, Homo sapiens
ccggcatcactggagtggtggcgcagctgtttcctccggtttattgttggccaaaaccaggctttgattgaaccaggatgaatgcgggtgttggaagta

SEQ ID NO: 34431 - DNA, 90 bp, Homo sapiens
agatggtggaggaatacacttatttatgaacaaaatgatgcttcaacacccaggccaggtctctgcctcggaagtgagtgcttctgccat

SEQ ID NO: 34432 - DNA, 51 bp, Homo sapiens
caccgagcttcagcaagctctctccaacgagtaataagaaacgtgatggtg

SEQ ID NO: 34433 - DNA, 100 bp, Homo sapiens
cgccagtgtttccgtcagtacgcgaaggatatcggtttcattaagctctgaggatgaagtggatgtgcttttacatggaactcctgaccaaaaacgaaaa

SEQ ID NO: 34434 - DNA, 75 bp, Homo sapiens
gtggttttggcccccagcccaaccctgagaaagttcagaaccacagatccctcactggatcccacctccacaccc

SEQ ID NO: 34435 - DNA, 50 bp, Homo sapiens
ctcggagcaacgagcgcagcgccgaaaactttagaaactgttcctttgga

SEQ ID NO: 34436 - DNA, 96 bp, Homo sapiens
cacagagtacttaaaaacatcatggatcaatctcaaacaaagtttggcaatgaggagcagcagctggcgtgggccaagcgggagagcgagaaggcg

SEQ ID NO: 34437 - DNA, 100 bp, Homo sapiens
agaggagttgaatgccgtctgggctgtgctggccgccatcctgcagctgggcaacatctgcttctcctcctcagagggtgtgggccgaagatatgctcat

SEQ ID NO: 34438 - DNA, 100 bp, Homo sapiens
gtggagccaccagcctctccttggaagagtctgccgaaggtgaaggccatggacttcatcacctccacagccatcctgcccctgctgttcggctgcctgg

SEQ ID NO: 34439 - DNA, 83 bp, Homo sapiens
gagcagttggggactcaatgtgtgggcaacaagccaggcgggcaccacggcaggggctgagctaccctcatggaagggagagg

SEQ ID NO: 34440 - DNA, 95 bp, Homo sapiens
gaaacaccactgaagcattgccaagttactacatgatcatgctgtggagcatttcactgagtttcttctgggtgcctggattttgtgaccgtttg

SEQ ID NO: 34441 - DNA, 96 bp, Homo sapiens
acaaacattcagaaggctctcatgggggacaagagcgaagccaccaggggagctctctcccaaaggccttgtcgccccagacctaactcgctcccc

SEQ ID NO: 34442 - DNA, 100 bp, Homo sapiens
cagggaccaggcggaggcgtcgcgggagcctttggggcaccacagagatgcgggtgtgatgaatgcagactctgctaccattttggctgtttggatcctc

SEQ ID NO: 34443 - DNA, 74 bp, Homo sapiens
gctgggccgccagcctcggcaccgtcctttcctttctccctcgcgttagaacatgaaaggctcccggagcagcg

SEQ ID NO: 34444 - DNA, 100 bp, Homo sapiens
ggaaacctgggggctccctggacaactccgagcaggttgaagaagcctcagcggaggcgatacggcctcctcgccaacactgaggaccccacggagatgg

SEQ ID NO: 34445 - DNA, 104 bp, Homo sapiens
accagccaccgacacagcagcagcccccgctgcccgagcgggaagagactggagatgaggaggatgggagtcccatcgacaaagtggtgaagaaagggaagaag

SEQ ID NO: 34446 - DNA, 97 bp, Homo sapiens
atccggctcctccagctaccggcccaaggccatctacctggacatcgatggacgcattcagaagaaatgcactcggtgatggaaagagagccactat

SEQ ID NO: 34447 - DNA, 75 bp, Homo sapiens
acagaacctggtgaaacttcaggtcttgagtcagacagagcaccagccttggggaccctggaccactatcatgga

SEQ ID NO: 34448 - DNA, 50 bp, Homo sapiens
gtgtgaagagctagagcgaatattggaaggtgttggaagtgacagtgagg

SEQ ID NO: 34449 - DNA, 74 bp, Homo sapiens
gagaatttaggatcttgttgaatccagtccagaattttcttaggcggtataaatgcagttctgatcactggatt

SEQ ID NO: 34450 - DNA, 90 bp, Homo sapiens
gaaagttcattgggcctgcacctccagcattccagctggagatgcgtgaccttcggtctgcggcaggcggaagggcgagagacttggaca

SEQ ID NO: 34451 - DNA, 75 bp, Homo sapiens
cccagaaaagtattcttgctttgctttatttgtgaaatttggcaaagagaagtgacagctttgagaaccccgtgc

SEQ ID NO: 34452 - DNA, 82 bp, Homo sapiens
ccgggaaaagaggaactaaggcggaggaactgagacgtttcgaattccagatcggcttcagctccccaggaatatgattgaa

SEQ ID NO: 34453 - DNA, 74 bp, Homo sapiens
gagccactctccagcatagaatgcttccttctgggcttagctggcatgagcagaacactcgtgaaactgctcag

SEQ ID NO: 34454 - DNA, 82 bp, Homo sapiens
agatgtttgccatgaaagaaataaggcttcccaaggctgaagggtatgtgattggcagctgtattaaacacattccaatcgc

SEQ ID NO: 34455 - DNA, 76 bp, Homo sapiens
ggatccaagtatccagatattgcctcacccacatttcgaagtatccttttgatagagcagaaaaattcaatcgagg

SEQ ID NO: 34456 - DNA, 100 bp, Homo sapiens
aacaggaggtggtagagggcatggatatctctactcgctccaaagctgatgaatgcagtgaacacactggacagggatgtcctcaaccagctacacgtac

SEQ ID NO: 34457 - DNA, 96 bp, Homo sapiens
ttacaaaagactacaagaaaaccattggagttgattttttggagcgacaaattcactttgccgggaagtaaagctttggaggaaaatcaatatcaa

SEQ ID NO: 34458 - DNA, 101 bp, Homo sapiens
cctgagacgccaacggcagtcactgccccccattccagctcctggagctgtaggtaaaacttgcctactgatcagttacacaaccaatgcatttcctggag

SEQ ID NO: 34459 - DNA, 74 bp, Homo sapiens
gggatcaaagagcaaacagattcagtggcctgcattgagccaaggagcaataactgaacgtttaagaagcttca

SEQ ID NO: 34460 - DNA, 98 bp, Homo sapiens
tgacatggaaggggcagtacaagcttacgtctctgctcttcagtacaatccttcctggaatcaagatgtgagaccaagaaattatttctgaagaaaga

SEQ ID NO: 34461 - DNA, 100 bp, Homo sapiens
ctcaagattcagctgcaggatgctggacgcctggctatcatggtgaacttacttcagattgtgcgggaccactgggttcatgttcttgtccctatgggat

SEQ ID NO: 34462 - DNA, 74 bp, Homo sapiens
tctacccggagaagcaggagccctactcggcagatctgccgacaccccaggccatcgagccccaggccatcgtg

SEQ ID NO: 34463 - DNA, 98 bp, Homo sapiens
tgccacttcagattggaatcgttgatctgctgaaataacagacgttggacctctcgaacaaccagctgagcgagatccctgcagagcttgcggactgc

SEQ ID NO: 34464 - DNA, 75 bp, Homo sapiens
catctttacagaggaatagtctacaaaggaagacttgtaacctggagaagaggtcagcccaaggccaaccccact

SEQ ID NO: 34465 - DNA, 100 bp, Homo sapiens
gacaactgtgatgtgcctgcaacaacaggaaaggcaatgttatattaaggacattgtgacaaatgtttcccccagaatcatccggggaaccacctctggc

SEQ ID NO: 34466 - DNA, 75 bp, Homo sapiens
gcagatgttgtcaaggtggcctaccaggaggccaggggtgtcgccatggatattcatccgttctatgctgatttg

SEQ ID NO: 34467 - DNA, 100 bp, Homo sapiens
atttgcagctcattgaaggaaagagagtcgtagctgagaagcaggagaaaagaaaccaggaacggctgaaacgaagagaagagagagagagagaagaaag

SEQ ID NO: 34468 - DNA, 75 bp, Homo sapiens
ggccggaccctgcccctggcggaggttgcttctccatttctggagccacatctagtccgaatggccaaagttgat

SEQ ID NO: 34469 - DNA, 100 bp, Homo sapiens
ccgaggagctgaaggccttcagagtccttggggtgattgacaagatgcctgtgaggagccaccaacatttgaagctatggagctcattggtaaaccaaaa

SEQ ID NO: 34470 - DNA, 82 bp, Homo sapiens
ctgaagacgtctgcgtgagaatagagaccaccgagatcatggaagggaagtggttgctgtgtatgttactggtgcttggaac

SEQ ID NO: 34471 - DNA, 100 bp, Homo sapiens
ctaccaaggacagcttttttcctgcaaggaaccacgtgaatgttgagggggcgacacacaagcaggtggtggacctgattcgagcaggcgagaaggaatt

SEQ ID NO: 34472 - DNA, 82 bp, Homo sapiens
caagaaaccaacattcccaacagccaccaccaccaccagatgaattcagtttgcctgttctgtatgcaagttccgtagcttt

SEQ ID NO: 34473 - DNA, 75 bp, Homo sapiens
ccatgacaacgcccaattaatcacttgatattcactgatggactccaaagaatcattaactcctggtagagaaga

SEQ ID NO: 34474 - DNA, 100 bp, Homo sapiens
ctgggagccatcacgcccagctagccatcttctaattttcattccttcaaagggtcctgtgcttggattgtggggaacagactccccggggggtgctgca

SEQ ID NO: 34475 - DNA, 100 bp, Homo sapiens
gccacagcggcctcggcctccccttggattcagacgccgattcgcccagctttgggaaacatgaacaaaacattgatgaaatgttggaaaccagttgaaa

SEQ ID NO: 34476 - DNA, 90 bp, Homo sapiens
gcctcggactccgcggccggcccggcgcggcccagcgccctcagtgccggtggtggtgtgcacattgagccccggtatagacagttcccc

SEQ ID NO: 34477 - DNA, 100 bp, Homo sapiens
gctccaacaatgcagtcatttacgtgcacaacctgaagactgtcatagagcggaaacgcttgggcattggccagtctcaggagatgaacacactcttccg

SEQ ID NO: 34478 - DNA, 75 bp, Homo sapiens
tgctgtcaaggatcttgtgtgctccatagtttatcaaaagggtctgggggtggtggcatctcccctaaaggaagt

SEQ ID NO: 34479 - DNA, 89 bp, Homo sapiens
gcctggtcaaggtggctcagaccacaggtgctacagctcgagagggcagagccacagtccctggacggcgtggactgaggccggttcct

SEQ ID NO: 34480 - DNA, 82 bp, Homo sapiens
acggccgcctccggagcccgacgcggagattacctggggcaattgatgttatcggtcagactataactatcagccgagtaga

SEQ ID NO: 34481 - DNA, 94 bp, Homo sapiens
aaggcgcttcccctttccagagagccagaaagaaacaatgcagatcttcgtgaagactctgactggtaagaccatcaccctcgaggttgagccc

SEQ ID NO: 34482 - DNA, 74 bp, Homo sapiens
atggacaagagacgatcattctgcaagcaggcaacctgaatacagaccaagatcactccatggatgaaatgaca

SEQ ID NO: 34483 - DNA, 75 bp, Homo sapiens
gcctctcttttatctccagttctgtcatcatcaccaccacacactgtgctccactttgaggctctgatgaacatt

SEQ ID NO: 34484 - DNA, 74 bp, Homo sapiens
gccgtcttcccggcgagtccgcgacggtcgccgcccacggcgagagaagtttcacttcaagtcatggatgtcta

SEQ ID NO: 34485 - DNA, 96 bp, Homo sapiens
ttggagaaaaagttcagtgggaagcatgtcgtctttatcgctcaggctcatccacctgcagacatggggcgcagaaagtcaaaacgaaagccgcct

SEQ ID NO: 34486 - DNA, 76 bp, Homo sapiens
atgggtcgaggcggacgcgcggctgcgtcaggtcactcagctctatgtgccagcatccagacatgtgtggaggttc

SEQ ID NO: 34487 - DNA, 82 bp, Homo sapiens
aaccggatatttaagtacaatggtgggcttaattttaggattcactggcaaaatttgctggcagaaaactgaaagactgtgg

SEQ ID NO: 34488 - DNA, 100 bp, Homo sapiens
cccgccccacccgcatgctctttgtcactccccggcggcagcacgaaagtaccattttggatttaggtggcgagtagaaaaagaagtaatttcaggaaaa

SEQ ID NO: 34489 - DNA, 100 bp, Homo sapiens
atggctgcggctgcgccgaggcgccctactcaggttatgaagacagtatggagtttccagaccatagtagacatttgctacagtgtctgagcgagcagag

SEQ ID NO: 34490 - DNA, 100 bp, Homo sapiens
ctcggatctgctggacgaggtcttcttcaacagcgaggtggacgagaaagtggttctgcggggagtgtctccagccctgcctgcaggtgccatccccgct

SEQ ID NO: 34491 - DNA, 75 bp, Homo sapiens
gacagggccggttaagagaactgcgcatcaggacaagaggaccctgccttggtgtgagagtgagggaagaggaag

SEQ ID NO: 34492 - DNA, 90 bp, Homo sapiens
acctgcgctccaagatgagccaagtagcccccagcctgtcagccctaattggggaagcgtgggctcgggatgagtttgaaggcctcttca

SEQ ID NO: 34493 - DNA, 100 bp, Homo sapiens
agaaacaggggggcgagaagagaaacaggcacaacgtgtttgattgctctgctatcagataaagacctcactgtggccaacgtgggtgactcgcgcgggg

SEQ ID NO: 34494 - DNA, 99 bp, Homo sapiens
ggaccttaatcgtgtcatcaaactcctcgaagagactgataaagttcttggaacaccaaatgaggacacatggcctggagttcattctttaccacattt

SEQ ID NO: 34495 - DNA, 100 bp, Homo sapiens
gtggatcacacgcgccggctgctgctactactaccactttgggctgatggcaactgaacatccatgatagcagtcttctgtaaatcgaacttttcaagaa

SEQ ID NO: 34496 - DNA, 75 bp, Homo sapiens
gaacggaatgctggagtcagtggaagacggagctggtcggcccgaagaacactctgctccagccaaggtggtgag

SEQ ID NO: 34497 - DNA, 50 bp, Homo sapiens
ggccagcggttcaaaactcggaaaagggctgcataataaatgtgcttctc

SEQ ID NO: 34498 - DNA, 75 bp, Homo sapiens
cgccgccaccgtctgaactaggatgtcccgacatgaagtgtgcaaagatccaccttacaaagtagaagaatctgg

SEQ ID NO: 34499 - DNA, 83 bp, Homo sapiens
ggcaccgagagaccaggactgcaggacagtcgatttctgcatgaatccccagacagtgctgctcctgcgggtcatcgccgcct

SEQ ID NO: 34500 - DNA, 75 bp, Homo sapiens
ttttacattggctgttttcctcacattcctcaagcaggaaaaatatattcagggggaagagatgtaatagatttc

SEQ ID NO: 34501 - DNA, 99 bp, Homo sapiens
tactgctgccaggccggccaggacagcacccacacacggctgctggtagaggactggggcagcacctactccgtgtcagtggtggagaccgactacgac

SEQ ID NO: 34502 - DNA, 74 bp, Homo sapiens
cttatttctgtgggcagacattaacattcaggaatcagtgacattcaaagatgtgtctgtggacttcacccagg

SEQ ID NO: 34503 - DNA, 83 bp, Homo sapiens
gagaggaactggagcaattgaagctgactactaaggagaataaggatattggtgctggaaaaggcaaatactatgctgtcaat

SEQ ID NO: 34504 - DNA, 95 bp, Homo sapiens
gcaagaggcgtttctataagaattggtacctgtgtgacaaggtcgtccctgggaacagggttaccatcatgggcatctactccatcaagaagttt

SEQ ID NO: 34505 - DNA, 74 bp, Homo sapiens
accaacagcaacgagagtgacagcagtccaggcagatctcctatgcaagccgtagccctcaggactgcccccgg

SEQ ID NO: 34506 - DNA, 74 bp, Homo sapiens
ctcgatttcagagattatttcagagttgagtccacgctccatgagaatgctgaacaccatccaaagcagcaaat

SEQ ID NO: 34507 - DNA, 83 bp, Homo sapiens
gagcaagtgtggaagagatgcatcaacatttgaatagcctaacatggcagaccagagacagcgctcactgtctacctctgggg

SEQ ID NO: 34508 - DNA, 82 bp, Homo sapiens
tctcgccggcgccaggcagtgggaagtcaggttcttccgccacctcccagccaggaatactcccccagttgcaagaggcgca

SEQ ID NO: 34509 - DNA, 101 bp, Homo sapiens
tcaaagccaagtccacagaagaagcttgtcagccaaaaatcgtctgatcctacgggtagaaatcatgctttatttgaaggtagacgcatcgaatttgcaga

SEQ ID NO: 34510 - DNA, 136 bp, Homo sapiens
cggcgctcggagcccgagtccgcgggaagatggcggcgccgctcatccccctctcccagcaggtactccaaagattcaggtttactcacgtcatccagcagagaatggaaagtcaaatttcctgaattgctatgtg

SEQ ID NO: 34511 - DNA, 98 bp, Homo sapiens
acattctgagagagcctgtgtgtttaggaggatgtgagcacatcttctgtagcaaaacagtttctcatggagttaaactttctcagaagcaacgaaaa

SEQ ID NO: 34512 - DNA, 50 bp, Homo sapiens
cattcccatcagtgagcattacaggccataaagaatgctgatgggagaac

SEQ ID NO: 34513 - DNA, 73 bp, Homo sapiens
ggagaccctcgaagtgcgcaaacttgacactcaccctgaccgcttctgcagaaagccgtcattacacctgatt

SEQ ID NO: 34514 - DNA, 90 bp, Homo sapiens
ttcaactgtgcagaatctacaaattttgctactgtcagatggattgactatggaaaagttgccaaattgccttatgcaaaaagagctcgt

SEQ ID NO: 34515 - DNA, 51 bp, Homo sapiens
attcttgcgctgcatcgaagcctcagaatgcaagttctagccggtttttcc

SEQ ID NO: 34516 - DNA, 83 bp, Homo sapiens
ggttgatttagctggtagtgaaaagaaactaatctggattcactccctctggttgatacccactcaaaaaggacacttctgat

SEQ ID NO: 34517 - DNA, 74 bp, Homo sapiens
tgggctcctccgagtcaacagattcagggagacttgcagctcctctgctgaaacgtttaagcctctccacatcc

SEQ ID NO: 34518 - DNA, 78 bp, Homo sapiens
tcaccttagcctcctgagtacctgggattataggcatgcaccaccaggctttggaggagaagatacggaccacggaga

SEQ ID NO: 34519 - DNA, 111 bp, Homo sapiens
agctggtatgtgctctgggccctctgggttggcagcttgtggacatatcagcatcaggggcaccccggcggctccctggtgtcttctacaaatgcttctgggaactggagg

SEQ ID NO: 34520 - DNA, 98 bp, Homo sapiens
tattaagaaaaccttatcattaagaaactgtggtcctgtccctgctatcagtggggcactgaagaaagcaggactgagtcttaaggacatggatttgg

SEQ ID NO: 34521 - DNA, 100 bp, Homo sapiens
ccccggcgtccagctctgccccgacagagacggaggagccggggtccagtgcagaaactggcgatggaatatgagaggagccctctggaaagaaaaggac

SEQ ID NO: 34522 - DNA, 82 bp, Homo sapiens
ggaacccgaacagttccccctggtgcagggagtggccatactcctgtccaaatatgacccccagaaggaggcagagctccgc

SEQ ID NO: 34523 - DNA, 82 bp, Homo sapiens
ggccagtcgcctccaggccaagagggatccttcacccgtgtctgagacaagaggagcagcagcggcaccgcccctcaccctg

SEQ ID NO: 34524 - DNA, 98 bp, Homo sapiens
gagcctggagtctgcgaaggccgggacccggttccccggcccacagtgggggtgtgcaaacccgagagaactggatattctctaagccgctttcatca

SEQ ID NO: 34525 - DNA, 98 bp, Homo sapiens
ggtgatggagattttgatgtggatgatgccaaagttttattaggtagcctttccagtaaatatatgactcagggaaaagcctcagcgaagaggaccca

SEQ ID NO: 34526 - DNA, 100 bp, Homo sapiens
ctacctggggatattatcaaatctactactgttcatggcagggacagcaatcagacctattgctttgagagctgtgacctccattgctcgtgctctgcct

SEQ ID NO: 34527 - DNA, 75 bp, Homo sapiens
tgcatcttcccaccaccttaaaccactgtaattcgccaaaatgacgaacacaaagggaaagaggagaggcacccg

SEQ ID NO: 34528 - DNA, 100 bp, Homo sapiens
ccaagatcgacccctcgttaggaataattgcaaaaatcaatcggactctggaaacggctgatgtcttggcattgcccattttcaagcaggaagattccag

SEQ ID NO: 34529 - DNA, 75 bp, Homo sapiens
aattagaactgcagaggttcctctacagcaagatttcaggtatgctgctgaaagtgggaatcctctacattggtg

SEQ ID NO: 34530 - DNA, 96 bp, Homo sapiens
agaacaatggctgaattcatggactatacttcaagtcagtgtgggtggcaggaagagctaaagatccgagaaaaagaagatgcaatatgcaaggcc

SEQ ID NO: 34531 - DNA, 87 bp, Homo sapiens
atcgtcgagaagcctatcatcgctgacagtgaagatagtactgtgtccatccagataaaattagaaaatgaaggcagtgatgaagat

SEQ ID NO: 34532 - DNA, 100 bp, Homo sapiens
acggtttttggaacaaggattttggatgaagaagtttttgaggttaatttggagtggcccctggagtcagtttcctacaccatccgaggccccacccagc

SEQ ID NO: 34533 - DNA, 98 bp, Homo sapiens
tacaactcgcccaccacgtccagcttcaccacgcggctgcacaactgcaggaacaccgtcacgctgctggaggaggcctgatcttttggccagaagga

SEQ ID NO: 34534 - DNA, 98 bp, Homo sapiens
cccggagcccagctcctcaggccagcgcctgtatcctgaggttttctatggcagtgctgggccttccagttctcaggaatgggtccctattatccagc

SEQ ID NO: 34535 - DNA, 98 bp, Homo sapiens
cggggatagtggagctgcccactctagaggagctgaaagtagatgagtacctgcagatgaaatggcccctcctcgatgtcccctccagcgccacagtc

SEQ ID NO: 34536 - DNA, 114 bp, Homo sapiens
acctacccgcagggcctggcactggccaaggagattgcctcgaagcggaggatccctgtgtcccagccgggcatggccgacccccaccagcttttcgatgacacaagttcagcc

SEQ ID NO: 34537 - DNA, 100 bp, Homo sapiens
aatgattgttataaatgaaggctctcttgatgatgctcgacatgcagcagaaggagaaatatataccaaactgaatcaaaaaattgatgaatttgttcag

SEQ ID NO: 34538 - DNA, 75 bp, Homo sapiens
ctaagtcacttccaggagacgtggctcgctgaaggctttgtgtgcaacacgtgccctgaaaagtggatcaatttc

SEQ ID NO: 34539 - DNA, 101 bp, Homo sapiens
ctgcggccagaatcggagccccaaccgcgctgccggtttttcgttggaatatacgttgcacatttatggcgattctgagtgtgagggcagacttctgccag

SEQ ID NO: 34540 - DNA, 106 bp, Homo sapiens
agcgagactctgcggcgcatggaggaggaggaggtttcagaagcaggcaacaggaacaagatgtgaactgtttctcttctgcagaaaaagaggctcttcctcctcc

SEQ ID NO: 34541 - DNA, 93 bp, Homo sapiens
cggtgtgcaaggggagtcgtggcgtcgtctgcgaccgctgccttctcggatgccacttcaaatgaacaacaagagcttttctgtcagaagttg

SEQ ID NO: 34542 - DNA, 119 bp, Homo sapiens
aaacggtgcacgtactacgagacgtgtgctacatacgggctgaatgtggagagggtcttccaggacggtgtcatggagaaactccagctgggcccagagattctgcagcgggaaaatcc

SEQ ID NO: 34543 - DNA, 50 bp, Homo sapiens
caccctggaagccgagaaatgaccctggttcccccggcatatgccccgta

SEQ ID NO: 34544 - DNA, 90 bp, Homo sapiens
gttagcttgacctatgcagatcttattccaggtgtgactgcacagaaaagttacaaaacaaatttgactttttgcgctcacagttgaatg

SEQ ID NO: 34545 - DNA, 74 bp, Homo sapiens
ctgaggagtccccgctgcttgttctaatacccgatttacaattacattgaactacaaggatcccctcactggag

SEQ ID NO: 34546 - DNA, 131 bp, Homo sapiens
tgggactgccccctgggcctgatcccgcaccctcaccgtcacttccagcacctcacacccatcaaggtgtcctgtcagaagaacagatccgcctgaagaaactgaagcggcaagaggaggaacaggctcat

SEQ ID NO: 34547 - DNA, 74 bp, Homo sapiens
gaccacctatgtggagcaggtccaggaggagctgggggaggcctccaacattgacgacgtccttggccaccaca

SEQ ID NO: 34548 - DNA, 74 bp, Homo sapiens
gtgaaaaaattgggtgtttgcaaagatttaagatgaattttgataagaggcaacatgaagcaagaatccagcaa

SEQ ID NO: 34549 - DNA, 75 bp, Homo sapiens
tggatggtaccaactgctcaagaagaccctgtccctgccagtggtggtgatcgttcatggcagccaggacaacaa

SEQ ID NO: 34550 - DNA, 101 bp, Homo sapiens
ggacggcggaggcgcctcccagccaagtgcaaggtggttatcaccttcaaccaaggactccggggtgggcgcgtggtggagctgaagaaaatagtggatga

SEQ ID NO: 34551 - DNA, 100 bp, Homo sapiens
aagaacagaagaggaaaatggaaagaagctcatatccggagatattccaggcccactccagggcagaagcaaagggagatattaccacacagaagaggag

SEQ ID NO: 34552 - DNA, 82 bp, Homo sapiens
gcggcggccagaggaaccccgagggagacattacctcatccctcaagattgctcgctgcaaacacaacgctgagaaatggcc

SEQ ID NO: 34553 - DNA, 90 bp, Homo sapiens
ggaacactcttctggtggcactaacttagacagaatctgtctatgatcttctcccaaaggagttacagttacctccatctagagaaacat

SEQ ID NO: 34554 - DNA, 100 bp, Homo sapiens
tcgtttgtttctccaaggtttgaaaagcagctggcctgcaaggagaagtttttgcgatatgtggaagctgtgatgctttgggaaactggaatcctcaaaa

SEQ ID NO: 34555 - DNA, 101 bp, Homo sapiens
tcaagtttacccatgggggaactggttccagccaaaccgcaccaacctgtggcaggatgaagatttgataaagtggaaggcactgtttgaggaagtccctg

SEQ ID NO: 34556 - DNA, 100 bp, Homo sapiens
gccataccggacccgcaagcatgcccaccactgccacaaacgccgcaccaggtcttgtagcagcgcctcctcggggttgcagatggtgtaggaggctgga

SEQ ID NO: 34557 - DNA, 83 bp, Homo sapiens
ggcacctccgagcgcaaggacagcgcgaggtccgcgcagcccagcgcagccatagtgaagacatttccacctggacacctgac

SEQ ID NO: 34558 - DNA, 101 bp, Homo sapiens
gtgaaggggaagaggcccaccctggagtaaccctcactggagaatccagagttccacgcactctcctctcctcagtctcctttccccagcacccccacctc

SEQ ID NO: 34559 - DNA, 75 bp, Homo sapiens
aaccatttgtctttagtcttggcaaagagttgatctctctaatgtattagatcttcatgcctttgatagtctctc

SEQ ID NO: 34560 - DNA, 119 bp, Homo sapiens
cctcactatggcagcagcacggcacagcacgctcgacttcatgctcggcgccaaagtcatctgtctattttaaacattcttatgaagactggctggaaaacaacggactgagcatctcc

SEQ ID NO: 34561 - DNA, 100 bp, Homo sapiens
tgagtgtgagcagagctctgccaggcagaaggcctctctcctgatacagcaggcgctcaccatgttccctggaggtgcctctcttgaccagctaccctcc

SEQ ID NO: 34562 - DNA, 90 bp, Homo sapiens
cctgcctcttcatgcagttctccatcgtgccaaactggaactgaacaccaagtgcgtggtggagatggaagggaatcaaacggtcctgca

SEQ ID NO: 34563 - DNA, 82 bp, Homo sapiens
cgcatcctcatgtccccgtctgccaaggagctggtgctgcggctctggcaggctgccctgagcacgctcaaccccaacccca

SEQ ID NO: 34564 - DNA, 100 bp, Homo sapiens
tcaactacgctgtgcacgagggtctcggcctcgcggtgcagccctgactgccgccgcaggaagagggaagctggaggtctgtgagctgctgctggggcat

SEQ ID NO: 34565 - DNA, 51 bp, Homo sapiens
gacagactgggcgtcatgacccttgtggataatattaatgcagctgtgatg

SEQ ID NO: 34566 - DNA, 98 bp, Homo sapiens
acaaccagcctaagggtttctctactatgtccagggaaagtggagatgacattggaaatcctcaacgagaaggaggccgacgagaggccagccgggaa

SEQ ID NO: 34567 - DNA, 75 bp, Homo sapiens
ataatcagggtcttgcagccattgaaaagtgtggagaagctgctttaaatggtgttgaaagcagcaggggcctag

SEQ ID NO: 34568 - DNA, 88 bp, Homo sapiens
gaacgcacagaggaacgagctgagctggcagagtcgttcctggatgcctatgctgagcacaagttacagttctgggcagtgacagctg

SEQ ID NO: 34569 - DNA, 83 bp, Homo sapiens
cgccatgaaggcctcgggcacggaggctactcacagtcgaactacaactccccggggtccggccagaactacagtggccctcc

SEQ ID NO: 34570 - DNA, 51 bp, Homo sapiens
gtagcgcccagctcattgcctcagctaagacacagcattgttggttttgcc

SEQ ID NO: 34571 - DNA, 90 bp, Homo sapiens
ggcgtggaggaggaaccagaccgcggccagagcgttcaggtacatgatgttgattgatggcacaaatgaagtttttatgattgatagaga

SEQ ID NO: 34572 - DNA, 76 bp, Homo sapiens
gatactcaacttgattccatcaaccagtgcatttgaaacgccactttatgtttcgaaaccatctctgtttagtttt

SEQ ID NO: 34573 - DNA, 100 bp, Homo sapiens
gaccttctatgaggtcatgtttgatgatggctcctttagcagagacacatttcctgaggatatcgtgttgtgcagaagattctgaccttatttgaggctt

SEQ ID NO: 34574 - DNA, 82 bp, Homo sapiens
cacgggcagacacctgcacagagacaatgcagatcttcgtgaagactctgactggtaagaccatcaccctcgaggttgagcc

SEQ ID NO: 34575 - DNA, 96 bp, Homo sapiens
gttcctggaggaatccgagaagagcagagcggagggagccccagacacggtacattacctgtgctgaatacactcacttttatggtggcaagaagc

SEQ ID NO: 34576 - DNA, 90 bp, Homo sapiens
ctcggccgcgcaatgggcacccgcgacgacgagtacgactacctctttaaaggtatcagccagttccaaagaaccagccatgtcaatgaa

SEQ ID NO: 34577 - DNA, 100 bp, Homo sapiens
caggactgtgttcatgaagctgaggaggggagtaaattgaaaatattggggccatttagtaacttctttgcaagttccctgtattgaacactgatataca

SEQ ID NO: 34578 - DNA, 75 bp, Homo sapiens
acgaccacaccgctgatgaagacaaggactcacagtggctgcaagcccttgaaggtagtggacccagatcatccc

SEQ ID NO: 34579 - DNA, 98 bp, Homo sapiens
ccagctggtggagactgcgctcctggccctggggtattctcacagctctgcggcccaggcccaaggtatgatctcgtgaaatcttgagagaaactgaa

SEQ ID NO: 34580 - DNA, 75 bp, Homo sapiens
cagaggaaaatgcaagaagactgatggagcaggcttgcaatattaaagtgatgcagctaattgccccagtttgga

SEQ ID NO: 34581 - DNA, 100 bp, Homo sapiens
accgaacagctgctgtatgggaagaaatagtaggagaatcaaatgataaactgcgaggacagagccactggatatgcaagtttcctcatgggaatctcaa

SEQ ID NO: 34582 - DNA, 82 bp, Homo sapiens
ctggccagcctgctcatcgcctactgcagaattctgtggccacactgcgaggagatcggttctgggtcggaggctacaggaa

SEQ ID NO: 34583 - DNA, 103 bp, Homo sapiens
ggactgaggccgccctgcaccttcagcggatttggggattaggctcttttagagccactccatccccaaattcaagattagaaagatccctgactgcttctca

SEQ ID NO: 34584 - DNA, 50 bp, Homo sapiens
ttttggcctggcttgtttgcaaagtctatccagaagttaaaggagagatt

SEQ ID NO: 34585 - DNA, 98 bp, Homo sapiens
caattttggagtgggaacccaaacccgtcaatcaagtctacactgttcaaataagatgcctgaaatgtgcagatgccccgtgtcagaagagctgtcca

SEQ ID NO: 34586 - DNA, 74 bp, Homo sapiens
gtgccaccgaggctgaggatgatggtagattgccaggtcacgccgccagcgctgctcctcaggccagctcccca

SEQ ID NO: 34587 - DNA, 100 bp, Homo sapiens
ctgacatgatcctgctggacgacaactttgcctccatcgtcacaggggtggaggaggagcatgttctcgccaacaatgatgtttcctgtgaccacccctc

SEQ ID NO: 34588 - DNA, 98 bp, Homo sapiens
agaaccgagaggcacaaatggctgccaaactggaacgtttgcgagagaagtgattcgcctttgccagtctcatctcgtgtctgctttgttaagttcca

SEQ ID NO: 34589 - DNA, 83 bp, Homo sapiens
ttggaagaggcgagtccggtctcaaaatggaggttttaaaatcaaagatgggaaaatcggagaaaattgcccttccccatggc

SEQ ID NO: 34590 - DNA, 108 bp, Homo sapiens
gcgccgctccgcggagagtccgtggatctcacagtgatgcctcaaattcctgcctttcctcaagagaagagcccccaggagaaaagccagtattgcttgtgctcctaa

SEQ ID NO: 34591 - DNA, 98 bp, Homo sapiens
atatttcagagcaacctctttcaggctttaatagggatatgaagattggttacggcataactcagataatgaagtaaatggagctcctgtttatgttg

SEQ ID NO: 34592 - DNA, 50 bp, Homo sapiens
cgacatggtcatgagcttcgtcaacctcgacaatgcagatcttcgtgaag

SEQ ID NO: 34593 - DNA, 75 bp, Homo sapiens
cgccatccgggagaagctggcctgggccaagaaatctcctgcaaagaagctgagccatgcaattagtaaatcttt

SEQ ID NO: 34594 - DNA, 98 bp, Homo sapiens
atcataaagaaaatcgacttggactcagatggctttctcactgaaagtggtggaggtggatacagcagtcggagaacatctggcagagacaaatacgg

SEQ ID NO: 34595 - DNA, 75 bp, Homo sapiens
gcctcacgcagctccacagacagccccagctcggtgttcctcaggaagttcttctaaatcaggaatggattgaaa

SEQ ID NO: 34596 - DNA, 75 bp, Homo sapiens
ggtggacgtgctggtgtctgagtggatggggacctgcctgctggtactccaaagattcaggtttactcacgtcat

SEQ ID NO: 34597 - DNA, 100 bp, Homo sapiens
ctggcgaagagaagctacaaaatatgctcgatggatagcattcactggaattgaagatgagcagccgtcaacactatcaccaaaaaaaaagcaacggaat

SEQ ID NO: 34598 - DNA, 82 bp, Homo sapiens
gccatcacagacaccgcctacaggagtatgatgcaagatccacgagagcgtgtgaaagaagatgacttagatgttgttctca

SEQ ID NO: 34599 - DNA, 75 bp, Homo sapiens
caaactcattcacttttctggggttgcccttgagattgtgcgagccatgacctatgtcatcaaccagggcctggc

SEQ ID NO: 34600 - DNA, 82 bp, Homo sapiens
gagcccgagtggatcggggacggagagaacacgagcccatcagttcaaggagcagggacaagttacaggaatgttctccaag

SEQ ID NO: 34601 - DNA, 82 bp, Homo sapiens
gatcatgtctgcgagccaggattcccggaggaatcattatagattctaaaaatatattttcccttctctgtggacttggtat

SEQ ID NO: 34602 - DNA, 49 bp, Homo sapiens
aaaagatggcatctggctggttcaggtttatcttgcagattatggactt

SEQ ID NO: 34603 - DNA, 50 bp, Homo sapiens
ctccttttccctctccctttccctaagggctgaagaagatgcagagcagc

SEQ ID NO: 34604 - DNA, 83 bp, Homo sapiens
ccctcacggagctgggcgacgagctgaccctgggagacatcgacggaaggtgctcgggtcttcggggcactgggtcccatcgg

SEQ ID NO: 34605 - DNA, 73 bp, Homo sapiens
agagcatggctcagcggatggtctgggtggacctggagaactctcttgatagagcccaagcagccaagaataa

SEQ ID NO: 34606 - DNA, 74 bp, Homo sapiens
ggatcaatccagatggcagccagtcagtggtggaggctcttcgtcagattgggcagaggacgataagcactgct

SEQ ID NO: 34607 - DNA, 100 bp, Homo sapiens
gccatgaggcgaggctagggaggacctcacttccccggggtgtaataatgttaactgaggttcagccgtctgtatatctccccagatacctgaaactgac

SEQ ID NO: 34608 - DNA, 99 bp, Homo sapiens
ataaaatcaggcactgctcttgaaaaccctgtactcctcaacaagttcctcctcttgacatttgcacaaatccagtttgctgatgacatgcaggagttc

SEQ ID NO: 34609 - DNA, 96 bp, Homo sapiens
ttttaggagaggcgccgacttcgactcttggggccagctggtggaggcgatagacgagtatcagatgaagctcttcgtgggcggtcttgactggag

SEQ ID NO: 34610 - DNA, 100 bp, Homo sapiens
tgatggtataaaaatggacactggagtagaagtctctgatattggaagccaaggtactactgagcgagtgtgcttgatccagggaacggttgaagcactg

SEQ ID NO: 34611 - DNA, 100 bp, Homo sapiens
ttttggaggctcacggtcttctttgtcagcaacccttctgtggggctcaattttggaaatcttggaagtacttcaactccagcaactacatctgctcctt

SEQ ID NO: 34612 - DNA, 100 bp, Homo sapiens
ctgtccccccggcttccagggaccccgctgtcagtatgctcagccagcagatctcctgaaggttctagattttcacaacttgcctgatggaataacaaag

SEQ ID NO: 34613 - DNA, 96 bp, Homo sapiens
ccccagccacccccagctcttcagcattgtccgccaggcctgtgtccggagcctgagctgtgaggtagcaatgaagtgatgaggatactgatctct

SEQ ID NO: 34614 - DNA, 100 bp, Homo sapiens
agggtctggagggctgagcagtcaactcaaatgcaagtccaagaggaggaggaggcggaggtccaagcggaaaggcatccagtaccctgctgactctgac

SEQ ID NO: 34615 - DNA, 75 bp, Homo sapiens
ctactacctcggcgactccgttcaattttggtaacagtctggcaagtgcagatgaccttgaatgatgccatgagg

SEQ ID NO: 34616 - DNA, 101 bp, Homo sapiens
ttatggctaataacacaacaagtttagggagtccatggccagaaaacttttgggccgctcctgacatcactggccataaacggagtgagaacaagaatgaa

SEQ ID NO: 34617 - DNA, 100 bp, Homo sapiens
cggaagctcctggaggtcagaggccctttcatcatcagatgatgtgctgactaaagacgcgggtgagtgtgtgatctgcctggaggagctgctgcagggg

SEQ ID NO: 34618 - DNA, 134 bp, Homo sapiens
cgcacgaggaggacactgcgggggcacctggccaagatctacgccatgcactggggcacagactccagattatgatgacatttccaatcagatagacttcatcatctgcctggggggagacgggacgctgctgt

SEQ ID NO: 34619 - DNA, 143 bp, Homo sapiens
aggggagagcccgagcgctggagttggtgctgggaaacccggggctaatgttgacaacaggctcgagttgatcatggccttgccaggttggtgacagtatattgtgagcatggtcataaagctgccaaaatcaaccccctctt

SEQ ID NO: 34620 - DNA, 75 bp, Homo sapiens
tgacttgtttggaggtgttgatgagacagaagaaattctggcagatgtgctcaaggtggaagtcttcagacagac

SEQ ID NO: 34621 - DNA, 100 bp, Homo sapiens
attaaatgcacatattgttgtatcagatccagaagatattacagttattcattttggacctggagaaagttcttcagaagatgctgtcatgatgaataca

SEQ ID NO: 34622 - DNA, 100 bp, Homo sapiens
ttacagcaaagcctggaagcttgacgcgcacctgtgcaagcacacgggggagtaattcgccaaaatgacgaacacaaagggaaagaggagaggcacccga

SEQ ID NO: 34623 - DNA, 80 bp, Homo sapiens
gaaaaggagcaggtagatgagtggacagttgaaacggttgagaactgttgggaatcaaagagctttccaaacctgcctac

SEQ ID NO: 34624 - DNA, 74 bp, Homo sapiens
agtggagaggaggatagtgacctctcacctgaagaacgagctttcaccaacaatcaccagtggtttacacaaca

SEQ ID NO: 34625 - DNA, 82 bp, Homo sapiens
cgcaaggccgaggtctgcagcgacttcctcaaaggctactgccccctgggtgcaaaggtttggtgcacctcgatttggagga

SEQ ID NO: 34626 - DNA, 96 bp, Homo sapiens
actgatgcagaagatggaatcaaggggtgtggaattaccttcactctgggaaaaggcactgaagttggtgtcatggagaaactccagctgggccca

SEQ ID NO: 34627 - DNA, 80 bp, Homo sapiens
gcacataacggggttcgggtgtctcgtgtgtgaacatcacaggaacctcggagagctgatagatcggtttgtggctgatt

SEQ ID NO: 34628 - DNA, 82 bp, Homo sapiens
tgaactacaaccccggttgccgctttctcctctcctaaccgttaagtgcgctaaggccccttcacagatgtagtcactacaa

SEQ ID NO: 34629 - DNA, 73 bp, Homo sapiens
catgagttagtcgcagacatggacaccaaacatttcctgccgctcgaacaccttccaccatgaccacctcagc

SEQ ID NO: 34630 - DNA, 80 bp, Homo sapiens
cttacaatcatcctgcttcttgtacatcactgttcaaatctgaacatcaatgatgtactagggaactactcattgactct

SEQ ID NO: 34631 - DNA, 76 bp, Homo sapiens
ccggtttttagtccattgactatgcagcctaatggtggcagtagagaagagcatcacagaagttgctcaggagctg

SEQ ID NO: 34632 - DNA, 80 bp, Homo sapiens
ggggcaccaggcgccggcaacggctccctctcgggcgactggtaccgcaggaaccaggaaatctgaaatagagtactatg

SEQ ID NO: 34633 - DNA, 90 bp, Homo sapiens
gccatggtccatccgagagaagctatgtttagcatcttctgtcatgagaagtggcgatcaaaattgaaactgcttggaaactccctgctg

SEQ ID NO: 34634 - DNA, 102 bp, Homo sapiens
gcggcgagaggaggccgtccagcagatggcggatgccctgcagtacctgcagaaggtctctggagacatcttcagcaggcatgggcaagaaggacgacccca

SEQ ID NO: 34635 - DNA, 100 bp, Homo sapiens
ctgagaagagaagtggagcaccaggagactgcctatgtgatatcagtatcaagataaaagtttggaatgggagaaaaattctcaaagcctgaaagaaaat

SEQ ID NO: 34636 - DNA, 73 bp, Homo sapiens
tccaagagattcaagctgaagaaaacctgtttaaactcattgtcaagcaattgaaaacactgcctcagtatct

SEQ ID NO: 34637 - DNA, 75 bp, Homo sapiens
ccagtgcttgaggctccaggtgtctgtctgctgcaaggagaggagactggacctacagagacatctgggattttc

SEQ ID NO: 34638 - DNA, 98 bp, Homo sapiens
tcagcgcggacctagacctggaatcgcccaagtccctctactcgcgaggggcctttacaacaactaaacggacaggcattccagccccacgggaattt

SEQ ID NO: 34639 - DNA, 78 bp, Homo sapiens
gtacacagacgacgccaggacggcaagtgtcggcactgtgggaagatttggagcctggctgccaaccacttgagcttc

SEQ ID NO: 34640 - DNA, 100 bp, Homo sapiens
attccccgtttccttcaagagttttcatggattctaatggaatcaggcagttttgtgtccatgtgaacaactttcccttttagactatggcgacatacct

SEQ ID NO: 34641 - DNA, 100 bp, Homo sapiens
cagttactatgatgaatcccagggggagatttatagatccattgaacatctagataaaatggttattaatgctgcactggctttagcagcaaaaccacag

SEQ ID NO: 34642 - DNA, 96 bp, Homo sapiens
tggctgcggggatgtatttggaacattatctggacaatacacatatgggaagcctgtccctggacatgtgactgtgagcatttgcagaaagtatag

SEQ ID NO: 34643 - DNA, 100 bp, Homo sapiens
aggacccgaggccaggagccaggggcccagaaggagctgctgctcttcctccagaacctgcccacagcccactgggatgatgaggacatcagcctgttgc

SEQ ID NO: 34644 - DNA, 50 bp, Homo sapiens
gtccgttctctcaggctcccgttcagttcaaggagcagggacaagttaca

SEQ ID NO: 34645 - DNA, 90 bp, Homo sapiens
gcggcatgggcggcgctggccgagctgcccaaactccaaaatgatggtagagaattgaccaagaaaaataaagaaatctgttaacaggcc

SEQ ID NO: 34646 - DNA, 75 bp, Homo sapiens
ggaggcacagctgcagtctgacgagagggggggggccctcagcctcttggccttgaacgggctgttcatcttgat

SEQ ID NO: 34647 - DNA, 121 bp, Homo sapiens
tgactacacagagttactggcacaagtttatcttcttccagatttcctttcagaacactcaaaggataaaagaatcagagtgtctcaacccttgacaagaggaccaagtgcctttattcca

SEQ ID NO: 34648 - DNA, 100 bp, Homo sapiens
ctgatcctcctgcctcagcctcccaaagtgctgggataagaggtgtgaggcaccatccccggccagtttgcagtctaatagggacggggtttcaccgtgt

SEQ ID NO: 34649 - DNA, 112 bp, Homo sapiens
gacagttgcatcatcaaagaaggagacgtggggtcactggtgtatgtcatggaaggatgcacaggaacaaacgagggaatatgcctcctatggaacatgatggggatgttat

SEQ ID NO: 34650 - DNA, 100 bp, Homo sapiens
gcacgacgatgaggatgactcctacctggagcctgactccccggagcccggaaggcttgaggctacccctgtccagcagccacctgaatgtgtacagcag

SEQ ID NO: 34651 - DNA, 88 bp, Homo sapiens
atcaatgtggatcgacgtggaaatattgtctatattcacataaggcaatgaagggctattggcctgtcagctgctcccatccatcccc

SEQ ID NO: 34652 - DNA, 75 bp, Homo sapiens
ggccggaggagtcagctgtgtgtccagaacgtgccatggagacgcttaacgctgctgaaatagttcgagaaatcg

SEQ ID NO: 34653 - DNA, 75 bp, Homo sapiens
cctggaggatacctgctacctacccaacatgagtgaagtttcctgcaagaaacgggacgactatttggaatggcc

SEQ ID NO: 34654 - DNA, 74 bp, Homo sapiens
gagacatgcacagacagatctggcatctccactggacactggtcaggaaaatgtttataggaggccttagctgg

SEQ ID NO: 34655 - DNA, 75 bp, Homo sapiens
ctattccagggctcccaggcagcagaatctgcccacagagttcggagtgatcagcagctggactgtgccttggac

SEQ ID NO: 34656 - DNA, 100 bp, Homo sapiens
cacagcttcctggtggagcccatcagctgccacgcctggaacaaggaccgcacccgacgatgccccgaattcccaccctgaagaacctagaggatcttgt

SEQ ID NO: 34657 - DNA, 100 bp, Homo sapiens
catcagcgtgaagacgcagagggagacagctctttagtcaagagacggtgatgaagtttgtgccgcggtacagcctcgtcctagaactcagcgacagcgg

SEQ ID NO: 34658 - DNA, 75 bp, Homo sapiens
cgcccgcggcccgcggccgcctagagacggggtttcaccatgttagccaggatggtctcaatctcctgacctcgt

SEQ ID NO: 34659 - DNA, 75 bp, Homo sapiens
acaacgggaacctgctggtcacaggggcagctgatggcgtcatccggctgtttgccctcccaggcccaatacttc

SEQ ID NO: 34660 - DNA, 98 bp, Homo sapiens
tggtctactctgatgtcaatcttgagggctagggaggaatgatcaattggaatcgtctttttcctcctttacgtcagcgacaaaacgtaaactatcag

SEQ ID NO: 34661 - DNA, 98 bp, Homo sapiens
gtcgggggctttcgcccgggtcctcctagaaattccccccgaagaagactcccccacatctggactattgcccagaagaaaagatgtttggttttcac

SEQ ID NO: 34662 - DNA, 82 bp, Homo sapiens
gtggccgtgttgctgatcgcctgggtggttgttggcgtgtccctgcagcgaaggatcctgctcctgccagggccatccaggt

SEQ ID NO: 34663 - DNA, 100 bp, Homo sapiens
ggcaatcactagggaagcacagatgtggaaagtgaatgtgcggaaaatgccttcaaatcagtgttctaagaacggaagcatctgggctggatggaattta

SEQ ID NO: 34664 - DNA, 98 bp, Homo sapiens
tccttactccctctttaagattgcgtacccactgcagagtgctgaagacggggtagccacgaggttgttcctggtcattgagtacgtcaacggcgggg

SEQ ID NO: 34665 - DNA, 60 bp, Homo sapiens
cttaaacttatgcctcaagactggtgcaaggatggcttgaaaggatttacattttctgca

SEQ ID NO: 34666 - DNA, 49 bp, Homo sapiens
accctggtcaccgtctcctcagctgtcaataccagcaaatatgcagaaa

SEQ ID NO: 34667 - DNA, 98 bp, Homo sapiens
tgaagactgccctcatccacgatggcctagcacgtggaattcgcgaagctgccaaagccttagacaagtaactaaatgaccatggaatctggagccga

SEQ ID NO: 34668 - DNA, 98 bp, Homo sapiens
gcatggccaactccgggcccaacagcaacaggtctcaattttttgcgtttggctccctaatatctgctgtcgatccagtggccactattgccattttc

SEQ ID NO: 34669 - DNA, 98 bp, Homo sapiens
tagccaggctacacatgaagctgttcatctcctttgcaggatgttggtctttgatccattccaagattatcccctaaaactcatagacccaggtctcc

SEQ ID NO: 34670 - DNA, 100 bp, Homo sapiens
tgctgtgaggctcgtcttccaggacttcgacctggagccgtcccaggactgtgcaggggactctgtcacagactccctggaggaaaagcggaagcggcag

SEQ ID NO: 34671 - DNA, 82 bp, Homo sapiens
ggcagtccacccaccgccgccgcctcccagcacttctaccctagccgggcccagcccccgagcagtgcagcctcccgagtgc

SEQ ID NO: 34672 - DNA, 100 bp, Homo sapiens
tcagaaaccctgcaggagatctacagcagcgagtgggacggtcatgaggagctgaaggccatcgtatggacacttcgtgtatgatcatgtgttcgctgag

SEQ ID NO: 34673 - DNA, 75 bp, Homo sapiens
gtgaaaaaaatagactaatggattaacgtccctgtcgtgtgacattttctggtgtgactgaagaaatatcaaatg

SEQ ID NO: 34674 - DNA, 100 bp, Homo sapiens
ataaacatgtggtacagagtgttgagaagtttattcagaaagacccttgaacatctgtgaagaaatgactattctgcatggaggcttcttgctggccgag

SEQ ID NO: 34675 - DNA, 83 bp, Homo sapiens
tgacatccctttccgagtcaactggcccggcaccgagttctctctggggactcgggcaagggtgccgaagatagacaagaggc

SEQ ID NO: 34676 - DNA, 101 bp, Homo sapiens
tcgcgcccctgggagggaggtgggaggctctaggctccaagacgccgtcgcttgaggggttgctgtggcactgaagcaagctatgactctggaatttaaag

SEQ ID NO: 34677 - DNA, 75 bp, Homo sapiens
gcctaacagacttcctggactgtgtgatcattaggaggaagagcaagcaggccctgagggactataagaaggttc

SEQ ID NO: 34678 - DNA, 78 bp, Homo sapiens
aggtctctggagacatcttcagcagatgccctgatgcagaaggctttcaactcctcgtccttcaactccaacaccttc

SEQ ID NO: 34679 - DNA, 100 bp, Homo sapiens
tcctgactttggccatgattgcatttttcttcatcatcatttacctgggaccaatggttttgatgataatcgaagtggagagactgattttggacctcag

SEQ ID NO: 34680 - DNA, 83 bp, Homo sapiens
accctgagcaccgcctggtctctttcctgtggccagcccaggttgtgaccgagattcccgacgagagagactgaggggaagag

SEQ ID NO: 34681 - DNA, 90 bp, Homo sapiens
caaaactgtcccgggtgggaagaggaacagcctatgtgggcttccacggagtggatatcaaagtattgcagagtgccttagcagccatcc

SEQ ID NO: 34682 - DNA, 100 bp, Homo sapiens
ggacttgggaggctccgttgcctgctcccggagggagacgcgctgccgaggagaacccagcgggaaacctgtaggaagtgtcagggactctggaaagaac

SEQ ID NO: 34683 - DNA, 74 bp, Homo sapiens
gccacacagtgtccagatacgaggtctgaaccaatcagagtccttgtgactggagcagctggtcaaattgcata

SEQ ID NO: 34684 - DNA, 100 bp, Homo sapiens
taggcaacaagatgatgagggcgcggcagtatccttggggcactgtgcaggggcaattgaaggaacagactaaaaatcgtgtcctggaaggaaactacag

SEQ ID NO: 34685 - DNA, 96 bp, Homo sapiens
tcagggtcacgagatgagcgctatcggtcagattgggctaatggatactacagacaacagagaaaacttgttgaagagattggctggtcctataca

SEQ ID NO: 34686 - DNA, 100 bp, Homo sapiens
ctgccaaccatggtgaacttgggtctgtcccgggtggacgacgccgtggctgccaagcacccggttgactatagtcaatggggccaatggagccaagtgt

SEQ ID NO: 34687 - DNA, 50 bp, Homo sapiens
ccaagggcgcagattctttctgtacggtggtacagaagttggtcctgccc

SEQ ID NO: 34688 - DNA, 90 bp, Homo sapiens
gttgagtgatattgaccatgatggaatgcttgacagagatgagtttgcagttattccagcagagggaacgctatccaaaaagttggcagc

SEQ ID NO: 34689 - DNA, 82 bp, Homo sapiens
cgcccgtgccctcccgctcggccccgccagcagcactgtggaggccgtcctcgctgtttgcagacaaggtcccaaagacagc

SEQ ID NO: 34690 - DNA, 100 bp, Homo sapiens
gggatgtcggtcagtgcgagatccgctgctgctgaggagaggagcgtcaacagcagcaccatggggtttgagttttttgaaacaagtgccaaggacaaca

SEQ ID NO: 34691 - DNA, 82 bp, Homo sapiens
acccaggcgactgcctcatcttcaaggagaatggggtactaagagaaaagcacgaagctgtggatcatagttcccagcatga

SEQ ID NO: 34692 - DNA, 100 bp, Homo sapiens
atttaagaattaaaagatgatgagaaataaggacaaaagccaagaggaggacagttcgctacacagcaatgcatcgagtctcttcaaaatatcggagaat

SEQ ID NO: 34693 - DNA, 88 bp, Homo sapiens
ctctgcgggaagcgggcggccccggccgcctccgcgagggcaccatggaggtgaatgcaggaattcatgatttgttcctgtagctgaa

SEQ ID NO: 34694 - DNA, 80 bp, Homo sapiens
cctggctaagcaaaaccctgcagaacggctgcctaatttacagcaaccatgagggaactctaatgatccaggacaaagaa

SEQ ID NO: 34695 - DNA, 75 bp, Homo sapiens
gaggattggacccacagggcagatgggtcatcatcagatttgaaatatttaaagtggatacaaaactatttcagc

SEQ ID NO: 34696 - DNA, 88 bp, Homo sapiens
ctggagaagtccccttatgaccaggtatatgagggtgggagcaacgtggaccagtttgtgacccgcttcctcctgaaggagacggcca

SEQ ID NO: 34697 - DNA, 75 bp, Homo sapiens
cctgccgcctggtggaggctgtgctctcaggagaggcattgaacctggccacatcccaggtaccgtgaacatccc

SEQ ID NO: 34698 - DNA, 97 bp, Homo sapiens
ggccctgtgatccctcaagactggtccacggagtgtatgaccacaaacagccatcaagtatcctgtggagcacccagacaaattcctgaagtttggc

SEQ ID NO: 34699 - DNA, 100 bp, Homo sapiens
aagaagagcaaagggccttctgcagaaggagtacttcaagcaatatgaagtagggctccaaaacctgtgcaattcctaccagagccgtgctgactcccgg

SEQ ID NO: 34700 - DNA, 90 bp, Homo sapiens
cgaagtgcgcaaacttgacactcaccctgaccgggtggatccatgctgtgctcacttctcaggactgtatggcttttggggggaacttcc

SEQ ID NO: 34701 - DNA, 102 bp, Homo sapiens
ctccagatgtgcgcattgacaccaggctcaacaaagctgtctgggccaaaggaataaggatgaactttgataatgttgaagatgaagaaaaagtttaaaaga

SEQ ID NO: 34702 - DNA, 74 bp, Homo sapiens
gcctccggggctgccagagcagcaggcccgtggaccgggagcccgtggaccgggagccggtggtgtgccacccc

SEQ ID NO: 34703 - DNA, 75 bp, Homo sapiens
gcgccgtggatttcgctgagcggcacggctacatcaagggcatcgtcaaggtctttcagagccttgaagaccacc

SEQ ID NO: 34704 - DNA, 75 bp, Homo sapiens
cggcgcagtacaccaacgcggtgcgcgaccgggagctggacctccgggtgtatgctgatggtagcatatgtttag

SEQ ID NO: 34705 - DNA, 98 bp, Homo sapiens
agagaaggctcactcaaggatcagttggctttagcaattggagatctattgggaaactgattataaccactcgggcaccatcgatgcccacgagatga

SEQ ID NO: 34706 - DNA, 96 bp, Homo sapiens
caacgagagcctggacatcaccatcgtcaggcacctccagtactgcacccaactcgtgcaggccaaatttgagtttcatcatggtgactatgaaaa

SEQ ID NO: 34707 - DNA, 100 bp, Homo sapiens
ggagacggccactccaggctggattgagaacatcctctccgtgcagccctacagccaagaatgggagctggaagtggtcatagtaagtgctacaagaaca

SEQ ID NO: 34708 - DNA, 100 bp, Homo sapiens
ggacagcgcccagcgaaagcgaggctgatggagcgaagccaggaagaggatgcggagacgcgggccacccacacagaatatgcctatgggtcctggaggg

SEQ ID NO: 34709 - DNA, 82 bp, Homo sapiens
cagagcgtggagcgctgcgcggcgcggcggccgggccctcgagacggggacggtcgcgtggggcaggcagtggcgctgcggg

SEQ ID NO: 34710 - DNA, 75 bp, Homo sapiens
tgacatggaggatgatttcatgtgcgatgatgaggaggactacgacctggtgctgactgggttacttttttaaac

SEQ ID NO: 34711 - DNA, 51 bp, Homo sapiens
agagggagatgtcaggtgggagaaagatgaagattatggaagagattcggg

SEQ ID NO: 34712 - DNA, 98 bp, Homo sapiens
gatggcgtgcttgttggagaccccaatccgcatgagcgtcctttcgcaatggtacaacagctccatgaacgtgatctgcacctggttgacggaccgga

SEQ ID NO: 34713 - DNA, 74 bp, Homo sapiens
aaccataaagacatcttaattgggcacgaaagagaaaatgcttggacagaagagatgagtactatttccactaa

SEQ ID NO: 34714 - DNA, 87 bp, Homo sapiens
aatcttcaaagagtctcttaccttgtgtttgatgaagcagatcgaatgtttgacatgggatttgtttgcctgagaatacagatcaac

SEQ ID NO: 34715 - DNA, 90 bp, Homo sapiens
aagccgagttcaacatcctcctggccaccgactcctacaagggtgtcttttatgaataatcaaaagcagcaaaagccaacgctatcaggc

SEQ ID NO: 34716 - DNA, 100 bp, Homo sapiens
aacttgcagaaatcacattggaccctcctcccaactgtagtgatgtcttggcattgcccattttcaagcaggaagattccagccttccattggatggtga

SEQ ID NO: 34717 - DNA, 89 bp, Homo sapiens
gtgtttttccgtaagcatactcagattcagaatctgataattcagataacaacacaatctttgtgcaaggacttggggagggtgtgtct

SEQ ID NO: 34718 - DNA, 100 bp, Homo sapiens
aggacaccagcaagctgttcaatgaggagattgtgttcagtgtggacccctccgagggcagccctggttccccagcagggctgggggccttacagtccta

SEQ ID NO: 34719 - DNA, 82 bp, Homo sapiens
aaaacattcatggagggggaagttttgagagattacctgaagttgcactcaaaagcaagatatactactaactttgaaatgg

SEQ ID NO: 34720 - DNA, 100 bp, Homo sapiens
ttcaagaaagacttgatggtctggtagaaacaccaacaggatacattgaaaggtgacaaacagcatgtttggtgcttcaagaaagaagtttgtagagggg

SEQ ID NO: 34721 - DNA, 100 bp, Homo sapiens
gggagctgtagaccggagctgttcctattcggccatctttgctcctccctgcaactaactccattcttaattgacagggaaaaatgcattttttgtggga

SEQ ID NO: 34722 - DNA, 98 bp, Homo sapiens
ggcataggttatgaagctaatcctggcgttccaccagcaaccatgagtggttccatgatgggaagtgacatggcccctagcagtcttcttgatgcttt

SEQ ID NO: 34723 - DNA, 50 bp, Homo sapiens
tatgaaccagtgtatcccaagtggaacacctacataatttcattttgttt

SEQ ID NO: 34724 - DNA, 96 bp, Homo sapiens
catcagcttcagagaatggcagccatttatttgtcccgtggagcacgtgaattgcctctgcttacgttcaggccctgtcctaaacccagccgtcta

SEQ ID NO: 34725 - DNA, 100 bp, Homo sapiens
ctgaggcggcagtgtcggcagtccaaccgcgactgcccgcaccccctccgcgggggtcccccagagcagctcttgccaggtaaaaagttttgggaaacag

SEQ ID NO: 34726 - DNA, 100 bp, Homo sapiens
cctcttgacgtgggtcttaaacacctacacaagctttctgtatgagcccaatagccaagggtacaagtactaccgacagaagctggaggagttccggaaa

SEQ ID NO: 34727 - DNA, 82 bp, Homo sapiens
cttggactgagtcctgcaggacacagtggtcatctccatcagaggcaactgaaagtttcttatcaaaagaaatttggttgcc

SEQ ID NO: 34728 - DNA, 83 bp, Homo sapiens
cctcatcgtgccggcttcgcgcgcgaacccggctttcgcatttgggaccctgcaggcgtctgctgcagagaccatgtctgccg

SEQ ID NO: 34729 - DNA, 100 bp, Homo sapiens
ctggaagaggctggtggacgaccggtggctgtggcgacatgtcgacctgacgctctacacggaaacaattgaagatgttgaagaaatgctcaacaacctt

SEQ ID NO: 34730 - DNA, 74 bp, Homo sapiens
ttcatattttggaaagcagtttttaagacaagttgaaaggattgttgacaaaaggaaaaataaaaaagggaaga

SEQ ID NO: 34731 - DNA, 88 bp, Homo sapiens
atcgagagaagagcaaaggagactgcaccatccgtaatgcaggtctggtgactgtcactaccactcctctcaactgtggccctcgact

SEQ ID NO: 34732 - DNA, 82 bp, Homo sapiens
ttgttcaagataaagtgattttttgcctttgttgattaactggacaaattcaggttcgagaacttgtcttggacaattgcaa

SEQ ID NO: 34733 - DNA, 95 bp, Homo sapiens
tgaactgaatgagtttcttactcgggagctggctgaagatggctactctggagttgagcccacacatcttgctgacttcactcaagtgcaaacca

SEQ ID NO: 34734 - DNA, 75 bp, Homo sapiens
gcgtctgaagcctacaagaaaggccccaatcttcatctccttcttcattgctttgagagagatggccaaccttcc

SEQ ID NO: 34735 - DNA, 75 bp, Homo sapiens
gaagcagtgaaggagtgcagaggcatcacctgaaaggcactatgtcgtccgaggcccagagatgaccccttatga

SEQ ID NO: 34736 - DNA, 101 bp, Homo sapiens
cggcggaggacgcgcccggcgcccctgagccggccgagcggcgacggaccgcgagggcgtctctggccgagcctctttttgtggaaaacgacagcagcagc

SEQ ID NO: 34737 - DNA, 122 bp, Homo sapiens
gtgactctctggatggaccagaatacgaggaggaagaggtggccataccgttgaccgctcctccaactaaccaatcaaatgatgccgtttggaaaaatttcccagcagttgtgtggcgtaaa

SEQ ID NO: 34738 - DNA, 50 bp, Homo sapiens
aataagttcgccaaagcgacaggagctagcctgtctccccaggaccgtgc

SEQ ID NO: 34739 - DNA, 90 bp, Homo sapiens
ggaatcacccctagatctttcttgaagacttgaattagattacagcgatggggacacagaagggaatacagtgagtaacctgatcatgat

SEQ ID NO: 34740 - DNA, 100 bp, Homo sapiens
ctgccaaaaaaagtgctcaattgttttttgtggtctttgaatggaaagatcctttcatccagaaagtccaagatgtagcagtagctgatgtgcagtttgg

SEQ ID NO: 34741 - DNA, 83 bp, Homo sapiens
cagaccctggagcctcagttggaagcagccgatccagcctgcggagcctgtggggcagctggacccgcaggccctgcaggaca

SEQ ID NO: 34742 - DNA, 83 bp, Homo sapiens
tagtgagagacctgctcaagctctcttaagagattatgggcactccacagaaggatgttattatcaagtcagatgcaccggac

SEQ ID NO: 34743 - DNA, 90 bp, Homo sapiens
gtctccaccaggactgaccgctgccgcccagcacgtccaggggttctgaaggaacattaaatgactgcaagataatatctgtagatgaaa

SEQ ID NO: 34744 - DNA, 82 bp, Homo sapiens
tgggctcgaaaccgaaagtcccgtccggaccctccaagtggagaccctggatgatcggctgaatgtaacagaggaactaacg

SEQ ID NO: 34745 - DNA, 83 bp, Homo sapiens
cggaaggcgtcgtcttctcttaaaatgtagttgatgtcacttggcgatattcctgcaaacatgaagaggtgattgccagaaga

SEQ ID NO: 34746 - DNA, 51 bp, Homo sapiens
gatctgaaagtgacaagcattttagaaaggatatgaacgagactgccaaac

SEQ ID NO: 34747 - DNA, 95 bp, Homo sapiens
accttcaaggccaaactatgcaggagattccaggtatccattacttggccagccactgcagtacaatcctcctgctgttctgcacggacacattc

SEQ ID NO: 34748 - DNA, 75 bp, Homo sapiens
aaagaactggatctttatctggcttactttgtccacactccggccctgggcgctgcctatggcacagccaagagc

SEQ ID NO: 34749 - DNA, 82 bp, Homo sapiens
tactacaggactgcggacaagggctggcaggttgattcttcaccacactgaaaccattaggaaaaatccttgtggttaacag

SEQ ID NO: 34750 - DNA, 90 bp, Homo sapiens
ggctgctgctgctgctgctgccccggacccgggcggacgagcacgaacacacggggtcttgctcctcagaacaaaccagaattgcagaag

SEQ ID NO: 34751 - DNA, 100 bp, Homo sapiens
tgaagactgtgtaaataatatcaggaagagcctaggctggatgtcttgatcaataacgcagggatcttccagtgcccttacatgaagactgaagatgggt

SEQ ID NO: 34752 - DNA, 82 bp, Homo sapiens
agattgctgtaaaaaatttcaggattggtactacaaggatagcactgtgagagtgatctgggcctaccaccatgaagatgca

SEQ ID NO: 34753 - DNA, 75 bp, Homo sapiens
cctgaagaagatggatgtgggtggcttatccgtgatcgaactgtgagaatttggaaggctcgcaatttgcaagat

SEQ ID NO: 34754 - DNA, 100 bp, Homo sapiens
gaactaagccgagtaagaagacatacaaaagcctcttctgaaggaaaagacagtgtagtcctgcaaaacattttgaggacacgcataactaaggaggccg

SEQ ID NO: 34755 - DNA, 100 bp, Homo sapiens
ggatcgtgagctccggcccgggcgagcgggtgcgtctgccgcagagtcggcacctgaaggacatggaggactaccgaccagactcccggaaatcatgttg

SEQ ID NO: 34756 - DNA, 51 bp, Homo sapiens
tccttcccctccaaggcatgctgatgaacgacaatctccttgagagctgga

SEQ ID NO: 34757 - DNA, 80 bp, Homo sapiens
agttggaagcagccgatccagcctgcggagcctgtggggcagcttccatgaggcaggctgaacctgcagatatgcgccca

SEQ ID NO: 34758 - DNA, 50 bp, Homo sapiens
tgaacggagtgtgcgacggattgggaggttctgaaaatattgtgcacagg

SEQ ID NO: 34759 - DNA, 100 bp, Homo sapiens
ggacagcctggcttggctactcactcttctgttaacagggtcctggcagatgaggacggggacttggttgccttttccagtgacgaggaattgacaatgg

SEQ ID NO: 34760 - DNA, 51 bp, Homo sapiens
agccttgcagataacctaaatgcagagttggtccaggcgcaatgttcagcg

SEQ ID NO: 34761 - DNA, 82 bp, Homo sapiens
gcagaagtctgtggagaccgcaaaaaggcatattctcagtttgggtgtggtggcgtgtacctgtggccctggctactcagaa

SEQ ID NO: 34762 - DNA, 75 bp, Homo sapiens
aagctttaggagttcacagtgttctgtacagagtaatgagatgtgtgacggctgcaaaccaggtgtttttttctg

SEQ ID NO: 34763 - DNA, 83 bp, Homo sapiens
ctttgtggctgtgcttgccaggcctggctccactctatcttaaaggaaccaaccacagaaagccttcaagccctgtgtgctct

SEQ ID NO: 34764 - DNA, 75 bp, Homo sapiens
tggtgagacatttttcttccttctgtcacatcacacccaatgggagcgctgacccagctgatccagctctatcat

SEQ ID NO: 34765 - DNA, 100 bp, Homo sapiens
cccgttgggaaaaaaaagagggggacaaaatcaatgaaggtgacctaattgcagagggtgatcagcccatgacctaaacctccagacaaaataaaacgga

SEQ ID NO: 34766 - DNA, 100 bp, Homo sapiens
cacgccagccgcaccatgccgctcctaagcctgcacagccgcggcggcagcagcagtgagagatctgaagaagacacttgaatcatgggtgacgttaaaa

SEQ ID NO: 34767 - DNA, 90 bp, Homo sapiens
cacagctaagacgccgggactccctggaaacctagaaatggtgacatgaaatggcagaagctaaatcccactggggctgctccagcaggc

SEQ ID NO: 34768 - DNA, 100 bp, Homo sapiens
atacactatccaaatgaagtcattgtcaaagttcacgctgccagtgtaaatcctatagacgttaatatgagaaagaaagcttcttgctatctacctccac

SEQ ID NO: 34769 - DNA, 83 bp, Homo sapiens
ccctccttctcaatcttggaacagcacccccttctttaaggagctctttgttcaatgcctagccacctattcctacagacacg

SEQ ID NO: 34770 - DNA, 83 bp, Homo sapiens
cccaaacaggacgaaggcgtgctgaagtgggcgacagatgcgaaagaaacgagttccagtgccaagacgggaaatgcatctcc

SEQ ID NO: 34771 - DNA, 74 bp, Homo sapiens
atgaacaggcatctaatgttcttagtgacattagtaatggtaccaaaccaccactggatgcagatgtaaatttg

SEQ ID NO: 34772 - DNA, 90 bp, Homo sapiens
cgttcatgggcgagggaacagatgagaaacccggcaatgaaaatggtctcctgatcctggctgataagctccagggccccttttcctttg

SEQ ID NO: 34773 - DNA, 74 bp, Homo sapiens
ctttcaaatttgacttctgcatgtggataggtcaaaatgcagatcttcgtgaaaacccttaccggcaagaccat

SEQ ID NO: 34774 - DNA, 100 bp, Homo sapiens
ctggggctgctcccatcattgatgtggtgcgatcgaactctgaagagagcaatagaatctccatcacctttttccgtcttttccgagtgatgcgattggt

SEQ ID NO: 34775 - DNA, 80 bp, Homo sapiens
taggagctcgagaaccgtttggcaatatgtacgacgcggatgaggaggtacttggaaggctccatcgcccctgaagacaa

SEQ ID NO: 34776 - DNA, 100 bp, Homo sapiens
ctactggtgtcatttcatgatcgtaaagaagttgccaaatttgaagcagaacgatcaaaagccaagtggcaaacgagctcagagttctacagagtcacca

SEQ ID NO: 34777 - DNA, 75 bp, Homo sapiens
aagctgaaaatttacttctggatgccaatctgaatatcaaaatagcaggtgtcctgatggcaaatttcaagggcc

SEQ ID NO: 34778 - DNA, 97 bp, Homo sapiens
ggctacggatcccaggaccctcttcgcgggcgattcgcgtagcctcagttatgcaaagggtgacctggacatatcttacatcacatccagaattgca

SEQ ID NO: 34779 - DNA, 100 bp, Homo sapiens
gatcaagccaacaacagtgacggaatgcctccatacatgggaggacgaggaagaaacgaacgtgatagttctcagctacccccagtactgccggtaccgc

SEQ ID NO: 34780 - DNA, 82 bp, Homo sapiens
tccagcgctatgtcccactaaaggatcaacgtaacgtgagcatgaggttttccaatcagtgggagattttgataagatctgg

SEQ ID NO: 34781 - DNA, 83 bp, Homo sapiens
cgaaggtgcggcggcggaggggagccagggcgccccagcaggtgtgttccagagaacaagccttcagacatttgctatattga

SEQ ID NO: 34782 - DNA, 75 bp, Homo sapiens
tcgaaggggaaggcgcctgaagaggacgaagagctgcggtgcaaccctgggcagtttgcgtgtcgcagcggcacc

SEQ ID NO: 34783 - DNA, 83 bp, Homo sapiens
tttgcctgaagaaggtcagtgtgcttgcttggagatcaggacgcaaaggatctgtctggctccattgatgacctccccacggg

SEQ ID NO: 34784 - DNA, 74 bp, Homo sapiens
acccacgaatctgcccacccctcctgtaacccagcctgtttcacttcttggagaagatggtataaactggtcca

SEQ ID NO: 34785 - DNA, 83 bp, Homo sapiens
cactaccgcatcggcctgaacctcttcaacaagtggagtccacagctgtggtgagcttcttggaggaggcagggtcccgaatg

SEQ ID NO: 34786 - DNA, 97 bp, Homo sapiens
gatccccttctccaatgtcatgacctgcgaggacgatgacaaggtgaacctgagcaaggtgggcgagtattggtggaacgccatcctggagggagaa

SEQ ID NO: 34787 - DNA, 117 bp, Homo sapiens
gaatatatcacccataatcggaatgtgatcacagagcctatttacccagaagtagtccatatgagccaggccaagtctattgcagaacagaagagattcccgtttgccactgataat

SEQ ID NO: 34788 - DNA, 100 bp, Homo sapiens
tccctcttggggtcgtcgccctcgagatgattatcgtaggaggagtcctccacctcgtcgcaggggcaattccaaaagtcttcagatttccaaaaggaag

SEQ ID NO: 34789 - DNA, 80 bp, Homo sapiens
catgctccgccagatcatcggtcaggccaagaagcatccgagcaagctgcacacatacatgtaagagaagcaaaaatgtc

SEQ ID NO: 34790 - DNA, 75 bp, Homo sapiens
cgcccgcaggctccggcttccgtcccggacagagcccgtggtcgcgcagggctcggatgctactagatcagtacc

SEQ ID NO: 34791 - DNA, 100 bp, Homo sapiens
gaagaagatcgaaaattaaacctcagccgttatggaacacctgaagagctacaagaactggtagacacagctcattccatgggtatcatagtcctcttag

SEQ ID NO: 34792 - DNA, 75 bp, Homo sapiens
caggattcatgctctacatccccatagaggaggtgataacctttatgatggtattgaggacatgattggctatcg

SEQ ID NO: 34793 - DNA, 74 bp, Homo sapiens
ggaagtgcagctgcctcagttcttagcgcagatggtggagccagggcaagatttactgcttgctgctttgagtg

SEQ ID NO: 34794 - DNA, 51 bp, Homo sapiens
gggctacacagagttagtaaagattgcagagggaatggcatacatcgagcg

SEQ ID NO: 34795 - DNA, 74 bp, Homo sapiens
ctgtaagtcagcccacttttacagatgaggaaccaagacccagggaagatggtgtacattccaagcagagtggc

SEQ ID NO: 34796 - DNA, 100 bp, Homo sapiens
gattacacacagcaagttcctgcttctgggacagctctactgacgatggcattggagtcaagagagattataaacaggccttgaagtattttaatttagc

SEQ ID NO: 34797 - DNA, 98 bp, Homo sapiens
agacgctgcgaattgacgccttttataataaagacacttatcttgcccaagagctgggtcatgtccaaagtaatggagatgttccagcctagtgcggt

SEQ ID NO: 34798 - DNA, 50 bp, Homo sapiens
gccggcgccctggggccccggagagccccgagcctggagatgagggggag

SEQ ID NO: 34799 - DNA, 50 bp, Homo sapiens
gcagggatgaggcaaacaagatcgcagagcttcgggctcagaatcaggtt

SEQ ID NO: 34800 - DNA, 83 bp, Homo sapiens
gctggtggtgcaggcgctgcgccgcaacgccgagcgcaccgacatctgcctgctcaaagggtttggaaatcccttgtctccag

SEQ ID NO: 34801 - DNA, 82 bp, Homo sapiens
ctagtctgaccctccgccaggcaaaaggaaggtgtcaaattggtttgctaatgcaagacgtcggcttaagaataccgttcga

SEQ ID NO: 34802 - DNA, 83 bp, Homo sapiens
cgagtatctggtgaagtggaaaggatggcccccaaaccctgccaggagcccggaagtgggtccgcacgagacagaatagacta

SEQ ID NO: 34803 - DNA, 95 bp, Homo sapiens
gtttccgtcagtacgcgaaggatatcggtttcattaaggtattttgaccaacgtgatttagctgatgagccatcttgatgtagctgatctctcag

SEQ ID NO: 34804 - DNA, 98 bp, Homo sapiens
aggaggcggtggagcgcagagcgggcgagcgcgggcacgaccaggagttgacgcactgctgcacacaccccacccagcggctcgtggtgacctcctcc

SEQ ID NO: 34805 - DNA, 50 bp, Homo sapiens
aagattttcaatcagaaaattggaagccgaaaactggaatattaatgcta

SEQ ID NO: 34806 - DNA, 75 bp, Homo sapiens
ataaagctgttttggaactgtcaggtacctcaaagcgtaagtggtataagttgaaatccaaaccaggaaagaagg

SEQ ID NO: 34807 - DNA, 100 bp, Homo sapiens
gatgactgctacacctcagcccggggctgcactgccaccctgggcaacttcggcatggatgagttgatggaggtgtctttctcgcccctggcggccacag

SEQ ID NO: 34808 - DNA, 50 bp, Homo sapiens
cagtgatatcattaagtccagatctgggttttgactctgggaggagggct

SEQ ID NO: 34809 - DNA, 105 bp, Homo sapiens
atgtcgtcagtaatgcctggaatgatgatgtctcatatgtctcaggcttccatgcagcctgccttaccgatataattgatcctgttgctttagaaattccattat

SEQ ID NO: 34810 - DNA, 76 bp, Homo sapiens
cgccttcggcattggccgccgcgatgtcagctcagtgctgtgcgggccagatgtggaattagaagaagctattaga

SEQ ID NO: 34811 - DNA, 129 bp, Homo sapiens
cagattgacttcagtcgtccatatgaccccagaagggatctcttcagggtggaatacgtcattggtgctggagaatctggtaaaagcaccattgtgaagcagatgaggatcctgcatgttaatgggttt

SEQ ID NO: 34812 - DNA, 83 bp, Homo sapiens
cttggccaaatggacgggactattaagcgtgagtgcatctccatccacgttggccaggctggtgtccagattggcaatgcctg

SEQ ID NO: 34813 - DNA, 100 bp, Homo sapiens
tatgacattccttacatgtttgaggcccgggaatttcttcgaaaaaagcttattgggaagaagacggtctggaaaatcccgaagcagaagcccgtattca

SEQ ID NO: 34814 - DNA, 51 bp, Homo sapiens
cctgtgcgggatggaacaaaaggtgtctgatgatttgtgagcctcaagtga

SEQ ID NO: 34815 - DNA, 102 bp, Homo sapiens
ctggagcctcagttggaagcagccgatccagcctgcggagcctgtggggcaggcctgctggtgggtacccttgatgttgtgttggactccagcgcccgggtc

SEQ ID NO: 34816 - DNA, 74 bp, Homo sapiens
taatattcatgaaatggaaatacagctgaaagattttggatttaggtggcgagtagaaaaagaagtaatttcag

SEQ ID NO: 34817 - DNA, 88 bp, Homo sapiens
aggatgactcggatgtctggtggggcggagcagacacagactatgcagatgggagaactgataaatttcaaacggaagagagtggcag

SEQ ID NO: 34818 - DNA, 155 bp, Homo sapiens
aggagccagtgggctgcaggcgcaggcgcaggcgaggggctgggtggcggttgagacagcggcggtactgggaggcgtagacactggagagcagcgtcctgtgccaggagaaaggcttgggcgcgcgggacctggcccaggacgctcagatcacc

SEQ ID NO: 34819 - DNA, 89 bp, Homo sapiens
caacattcgcagcagccatgtacatcctgggggccatcgagatcttgctggacgtagacaagtttggcaacgagatcacccagctggcc

SEQ ID NO: 34820 - DNA, 91 bp, Homo sapiens
tctgtgacgggagcaatgctgacctcggtttcctggacccattccgactcaggtgatgaaacttatcaggacatatttcgtgatttttccc

SEQ ID NO: 34821 - DNA, 85 bp, Homo sapiens
agcacgagaaatacggcgtggaatacgccagacaccttttgaaagctaatttttggtgaagaaatggattcggttacataagagt

SEQ ID NO: 34822 - DNA, 100 bp, Homo sapiens
ctttaatcggttagacttctcaagtgcaattcaagatatccgaaggttcaattatgtggtcaaagtaaatgagctggatggtatcccgttgatcctggac

SEQ ID NO: 34823 - DNA, 51 bp, Homo sapiens
ggtggcggcgggtcggggcgaggccatcatgcagaagggggatacaaacat

SEQ ID NO: 34824 - DNA, 97 bp, Homo sapiens
gaaaattgaacttttgtgccaggaccagacttcacagagaatgcagttgtcttgacttcaggtctgtctgttctgttggcaagtaaatgcagtactg

SEQ ID NO: 34825 - DNA, 96 bp, Homo sapiens
gtggcctaagaatatgatgccgtctagttttgccatgaagttttttgaagggaaggagctaagattgaagcaggaatactttgtggtggctgcaac

SEQ ID NO: 34826 - DNA, 75 bp, Homo sapiens
ccccaacaccctctacgaaggcggctacttcaagggagtgcatccgccccaacccttttccccctcgtctcctgt

SEQ ID NO: 34827 - DNA, 98 bp, Homo sapiens
ctgaatcaggctttaaactgttgtgccagtgcttaggctttggaagtggtcatttcagatgtgattcatctaggctgtggcagtctgtccacatcgat

SEQ ID NO: 34828 - DNA, 100 bp, Homo sapiens
gcagccggccggggtccaggtcggaaatgtagccagtggggccgccagaactgccattggatgtccagaatcccctgtagttgataatgttgggaataag

SEQ ID NO: 34829 - DNA, 100 bp, Homo sapiens
aaggctccaccttccacagggtgatcccttccttcatgtgccagagttcaagctgaagaagatgtggaaaagtcccaatggaactatccggaacatcctg

SEQ ID NO: 34830 - DNA, 100 bp, Homo sapiens
aagaaagtggtgaaaattacatctgaaataccacagactgagaaagaaatactcgacgcttttgacaaaatgtgctcgaagctgccgaagtccctgtcgg

SEQ ID NO: 34831 - DNA, 51 bp, Homo sapiens
cgtcctcatcgggcttatgttcgagggaagtctgttagaactgctgtgctg

SEQ ID NO: 34832 - DNA, 48 bp, Homo sapiens
ccagggtaacgctgtcagtctttggagttgtggagtgtatggcagctg

SEQ ID NO: 34833 - DNA, 83 bp, Homo sapiens
cagcaacctgaggagcataggccaaaaataggactaagtcttaaactgggtggctatggaccgccccctgcaggaagaggagc

SEQ ID NO: 34834 - DNA, 90 bp, Homo sapiens
ggccgagggggcatcatgaagcgggctggcggcgctgccgctcccgggcggccgcgggcggcttcgagagctgtgcccaggagtgaacaa

SEQ ID NO: 34835 - DNA, 75 bp, Homo sapiens
agcccaagatggccgacttcgatgatcgtgtgtcggatgaggagaaggtgcaacaatcgaacacagtgtatagta

SEQ ID NO: 34836 - DNA, 98 bp, Homo sapiens
tccaggacacccctgaagccgagaaatggtgaggccagagacaggcagacagcagatgtattgcagggagctggatgacatggcccttggaacctgtg

SEQ ID NO: 34837 - DNA, 101 bp, Homo sapiens
tccgcggtggaggtctgcgttgctcttgcttttcctcgctggggtgtacggaactctaatgaatcattgattgaccagcactattttaccagttggaatga

SEQ ID NO: 34838 - DNA, 96 bp, Homo sapiens
ttcaaagcacctccacacgctgatatttaatgctgcacgggaccttctcatcaatgaacaccgggggactcattctcacagttccggtttgctgag

SEQ ID NO: 34839 - DNA, 100 bp, Homo sapiens
ccccgctctgctgtgggcgctgctggcgctctggctgtgctgcgcgacccccgcgcatggcagggaacgtggtgacaggagaaatggtagaagagcttat

SEQ ID NO: 34840 - DNA, 100 bp, Homo sapiens
cagggtcttcatccagaaacgagggtttggacagaggagccaaaggccaaatttccactttcagcagttttatttcagctgttagcccgaagaaagaagc

SEQ ID NO: 34841 - DNA, 100 bp, Homo sapiens
cgccaagtgcacactggcagcccgtgtggacagtttccacgagagcacagaagggaaggagatcaaagacgctggccttcagacctgatcagactcccag

SEQ ID NO: 34842 - DNA, 83 bp, Homo sapiens
ccacgcagcactactatgagggggtgtcaacctaagaaaaagtctacgccactgaagtatgaagttggagatctcatctgggc

SEQ ID NO: 34843 - DNA, 82 bp, Homo sapiens
gagagatggaacccgaagaagaaaggattcgttacagccagagattggtgcagaccatgaattacgtggggcagttagccgg

SEQ ID NO: 34844 - DNA, 74 bp, Homo sapiens
aggactgcggacaagggctggcaggatcgtagggcatcagaaaaacaaaaagaaatagagagagtaaaagagaa

SEQ ID NO: 34845 - DNA, 100 bp, Homo sapiens
ctggccaagaagatcatcattaaggacggaggcacgtgacatgaagtccgagaggagacccccctcacctgacgtgattgtgctctccgacaacgagcag

SEQ ID NO: 34846 - DNA, 100 bp, Homo sapiens
ctgtgtgttgcttagccgaaagaggcatcgttttctctttagggaccttctcaaatgattcatgtgagaaattgcttctgctgtacgagtttgaagttag

SEQ ID NO: 34847 - DNA, 100 bp, Homo sapiens
gagaactctaccctggaggagattctggggcagtatcaacggagtctccgggagactccagtacttcacttatttgggaaaaaattgaagagccatccat

SEQ ID NO: 34848 - DNA, 100 bp, Homo sapiens
ccggcatggtgccaagcttctctacgcatttgctgaggcaactgtacccaaagtcacagtcatcaccaggaaggccaaaattgtgcgcaatgccaaggac

SEQ ID NO: 34849 - DNA, 82 bp, Homo sapiens
ctcccccctgagcccgaggtgctgacgtcgcaaaaaaattggatagtgaactccagtttgcttttgtgtgcttcctgctggg

SEQ ID NO: 34850 - DNA, 97 bp, Homo sapiens
gattcttcacttatgtttgactcaacactaaggattgcaatgccccaccagtggttggaaggaaacctacctgtgagcgccaagtgcactgtgtgcg

SEQ ID NO: 34851 - DNA, 122 bp, Homo sapiens
tgcagccgagatgccgggggagcggggccttccacaccccctccgtgggtgtgtggtgtcgtgaaaactacccctaaaagccaaaatgggaaaggaaaagactcatatcaacattgtcgtca

SEQ ID NO: 34852 - DNA, 50 bp, Homo sapiens
tgatatttattcaccaaacaagctgctgcagaagaatattttgcctgctg

SEQ ID NO: 34853 - DNA, 98 bp, Homo sapiens
ctgtgaaaagctaactttcaacaaccccacagaggactttaggagaaagttgctgaaggcaggagggccttggataagctcagcacgcagcacctgta

SEQ ID NO: 34854 - DNA, 100 bp, Homo sapiens
cattctgaaacaaatgcaagtattacatccagcagccagaatgcaaagaatggctcaagaagtactgacacatttaaaggagcatcctgatgcttggaca

SEQ ID NO: 34855 - DNA, 74 bp, Homo sapiens
gcgccggcgacctgaggggagagggaacgcagctgaaagcgtgaactattatgatgacatttccaatcagatag

SEQ ID NO: 34856 - DNA, 96 bp, Homo sapiens
ttggcaaggagatcattgacctcgtgttggaccgaattcgcaagctggtggtgaaattgcctctacctttgatcacccagaactggtgaagcttgg

SEQ ID NO: 34857 - DNA, 98 bp, Homo sapiens
actgtgatatgaccaccgacgggggcggctggattgatacagattataaaccagtgccactgaaaacaggagaaggtgaagaatatatgctggctttg

SEQ ID NO: 34858 - DNA, 100 bp, Homo sapiens
ggcgtccccaggataagtcacagggctatgcaaggagtgaatgtttcagggtggagaagaatctgcttgtctatggacatatctgaagagatggattaag

SEQ ID NO: 34859 - DNA, 83 bp, Homo sapiens
gtcgcaggtcttgggtctttagggtgagaactctgtctcagtcgacgggaagtgcagtgactccacgctactgagcaacttgt

SEQ ID NO: 34860 - DNA, 75 bp, Homo sapiens
ggagaggcgagctcgcgatgagtggtctcggcaggctcttcgggaaggctgccaatttgtggtgtctgaagacca

SEQ ID NO: 34861 - DNA, 100 bp, Homo sapiens
gatgaagagacgagctgtggggatctggcactgtggttcctgcatgaagacagtggctggcggtgcctggacgtacaaatgtaaacagtgttctagtttg

SEQ ID NO: 34862 - DNA, 73 bp, Homo sapiens
cagcaagacgttgagttacatgttcagaaggaagcagtggctgggacaagctgtggaaaaagtacggatcacg

SEQ ID NO: 34863 - DNA, 97 bp, Homo sapiens
ttggatatgtgcatcagtggtttatgccaagatgaatttcacccattcatcgaggcacttcttccacatgtccgtgcaattgcctatacttggttca

SEQ ID NO: 34864 - DNA, 90 bp, Homo sapiens
ccgagggcagtctgtgtcaaacgcagactgtgagctgcttgtccccatcctgcggccgtcctggggacacagagccctccgtggtgcccg

SEQ ID NO: 34865 - DNA, 100 bp, Homo sapiens
gatagatgctgatgaattgcagagatgtctgacacagtctggcattgctggaggatacaaactctattgcaggaatatttccattggtggtgtgcttgtc

SEQ ID NO: 34866 - DNA, 126 bp, Homo sapiens
ctccaagaggctcctcagtgtgggcgagtaaaatgccctgcgtgtgagaagcagcagattatgagcttacagaaagcctggcctacattttactctttttggatttcttcctcatcaagagactgc

SEQ ID NO: 34867 - DNA, 123 bp, Homo sapiens
ccgagatgtctcgctccgtggccttagctgtgctcgcgctactctctctttctggcctggaggctatccagccttcggaaccaaaaagaagcttcccagagccggggccaggagccccaagcg

SEQ ID NO: 34868 - DNA, 75 bp, Homo sapiens
cttctgtgtggattcttcagaaagtgaacttggcattttagatctaattcaatcctgccattgactctaccagag

SEQ ID NO: 34869 - DNA, 100 bp, Homo sapiens
ggcaagtggtgtgtggcacaaaatgcaacacggatggatgacatccagctctgcaaggacatcatggacttgaagcaggagctgcagaacttggtcgcca

SEQ ID NO: 34870 - DNA, 74 bp, Homo sapiens
tccagcctaggttccacccttttctgggaacgtgagtatcaaccaaggtatcgagaaccttccctgcgaacttc

SEQ ID NO: 34871 - DNA, 98 bp, Homo sapiens
catccttcagaaaaagcatccccgaggaggaagacgaatcgttaaacatctgaaagggtcagccctggcttgaaaaacagtccaattgatgaaagtga

SEQ ID NO: 34872 - DNA, 90 bp, Homo sapiens
actttaatccagctactctacctctaacacagtacctgttaacaacccaggaaatgtgaagaattcacctggaactaagtagaaaactcc

SEQ ID NO: 34873 - DNA, 100 bp, Homo sapiens
gggcccgtactgcacatcgtggtggtcggatttcaccacaagaagggctgccagatgttgaaacatttgtagcagatatactgaaaggagaaaatttatc

SEQ ID NO: 34874 - DNA, 75 bp, Homo sapiens
ggcagcggtgctgacggaccgggcccaggaacgaatgatcacacactttgaaaggtccaaaatggagtaaggaat

SEQ ID NO: 34875 - DNA, 100 bp, Homo sapiens
gctgagggcggagaggcgcatcgtgttcgaggcggagaccgagggggagccccgcgcgcggcgtcggttttaaaatcaaagatgggaaaatcggagaaaa

SEQ ID NO: 34876 - DNA, 100 bp, Homo sapiens
cccgtggcaactctatctttggtcccgagcagccccgcccaacatggacccagacccccaggcgggcgtgcaggtgggcatgcgggtggtgcgcggcgtg

SEQ ID NO: 34877 - DNA, 75 bp, Homo sapiens
attgatcaggatttttggcctaccctccaaagaaaagctgccactgcagagccccgccatggaagacacgccgtt

SEQ ID NO: 34878 - DNA, 50 bp, Homo sapiens
ggcgacgctaagttgctgatcgtggcgttttacagctcccagcacagtag

SEQ ID NO: 34879 - DNA, 75 bp, Homo sapiens
gagttctctccttgccggaacaataatggattcatacccgattcacttctggaagatgtgatgaaagcattggac

SEQ ID NO: 34880 - DNA, 96 bp, Homo sapiens
caacaacggctcggactggaagatgatcatggatgacagcaaacgcaaggcgaagctgaagtcacctgggagcccccctggacctgagctgcccat

SEQ ID NO: 34881 - DNA, 87 bp, Homo sapiens
acaggatgaccaccaccctcgtgtctgccaccatcttcgacttgagcgaagttttatgcaagactgtgccctgtccacggtgcctcc

SEQ ID NO: 34882 - DNA, 83 bp, Homo sapiens
ctgggctggaggctccggggtccacgaatgaccggcttttcctggttaaaggaagaagaccagctacaaggaaatacttctga

SEQ ID NO: 34883 - DNA, 100 bp, Homo sapiens
ttcagctgttgacgccttgcagaggctttgtagagcatctgcagagacaccagcagaggagcagtctcttgcatggcaccaagaatgttaccaattcaag

SEQ ID NO: 34884 - DNA, 75 bp, Homo sapiens
gtctgcgagccaggattcccgaaatggtggagtcaatgaagaaagtagcagggatggatgtggagctgacagttg

SEQ ID NO: 34885 - DNA, 100 bp, Homo sapiens
gctttgctaaccgaggggatgttcttactgggcggccattttacaaagacatcaatgagtgcagcagcagcccctgtagccaggagtgtgccaacgtcta

SEQ ID NO: 34886 - DNA, 82 bp, Homo sapiens
ctgaattaaaaggtgtcaagaagctcagaatggtgtcagttgtacccgaggcgttctcagcagcagcaagtacctgtggtgg

SEQ ID NO: 34887 - DNA, 82 bp, Homo sapiens
tgctgcctggtgcagaggatcctggaggcctgggaagccaacgaccacacgcaaggagatgctctgctgaggggcagttgct

SEQ ID NO: 34888 - DNA, 100 bp, Homo sapiens
ggggaccctgaaagaatacgaggctttgaagacgacccccaggctgtgctgcagacaatgaggaggtacgttcacaccttctttgggtgtaaggaatgtg

SEQ ID NO: 34889 - DNA, 99 bp, Homo sapiens
cggagtcggagacctgagagatgttaaccaaattcgagaccaagagcgcgcgggtcaaaggcatccaaagcctctgggatgtgttctgactgtaaaaac

SEQ ID NO: 34890 - DNA, 51 bp, Homo sapiens
agccagtgttgtggaccctagcacagagagtaatcaagtcagaggattata

SEQ ID NO: 34891 - DNA, 100 bp, Homo sapiens
tactttttctgcttttggaaacatactgtcctgcaaggtctgcgcaggcatggcactaagtgtcccatggcacatttggccctcatggaggcctcaaaag

SEQ ID NO: 34892 - DNA, 90 bp, Homo sapiens
ctgctcctggccgcctgcatgcacagtggctttaagatcctcaactgccaaaaggcaatgggtgaccacactccccaacacccttgtgga

SEQ ID NO: 34893 - DNA, 122 bp, Homo sapiens
cagcctgggacgcgcttatcgtgcggccagtccggcgctggcgccgcgtggcagtgggtgccggtggtggtgtgcacattgagccccggtatagacagttcccccagctgaccagatcccag

SEQ ID NO: 34894 - DNA, 75 bp, Homo sapiens
agtttcctgctcctcgtcatctcttctgatggacataatgggcttggaaaggcccgtgatgctgatgagcgagag

SEQ ID NO: 34895 - DNA, 101 bp, Homo sapiens
tggtgcggcgagccgagcgaggcagctctgagccgcgcggttttaaaatcaaagatgggaaaatcggagaaaattgcccttccccatggccagcttgttca

SEQ ID NO: 34896 - DNA, 51 bp, Homo sapiens
gatggtggaggaatgaaaacgccggatgccaaagaagaccatgaaagaaca

SEQ ID NO: 34897 - DNA, 75 bp, Homo sapiens
tgtgattaatgtattccaccacctccgccagttaagaggaaaaagggctttgcaatttgctgatgtaattgtgtt

SEQ ID NO: 34898 - DNA, 87 bp, Homo sapiens
cagcaccagtccagaagcctccatccagtgctggaatgcaatggcgcaatctcagctcactgcaaactccgcctcccgagttaaagt

SEQ ID NO: 34899 - DNA, 91 bp, Homo sapiens
aagactgggcttgtccttgctggtgcatgcgtcgtcggcctctgggcagcagggaaatcctcattgacgattcaatttgttgaaggccaat

SEQ ID NO: 34900 - DNA, 133 bp, Homo sapiens
ggaatggccgcgggcggctcgacgcagcagaggcgacgcgagatggcggcagcttcagcggcggcgatctcagttccagggtcacccccgagaggacaacaggcatctggaagtgctctctcgccactctggg

SEQ ID NO: 34901 - DNA, 51 bp, Homo sapiens
aagaaactgtccgagaagcccaaactaatagatcagttaaagcccggagga

SEQ ID NO: 34902 - DNA, 90 bp, Homo sapiens
gacacatgcagaaaggcagagtgaatgtcaaaactggaccaatggggccaggctgaagtattgaactttctgctacgctaccaaccccgc

SEQ ID NO: 34903 - DNA, 100 bp, Homo sapiens
taatgacagccaccaaggagatttggagcccattttagaggcatctgttctatcttcccatcataaaaaaaaaatatttacaccagcagctccagttcat

SEQ ID NO: 34904 - DNA, 111 bp, Homo sapiens
tggagagcctgcaggacggcgcggcagagtccccgtacgcctacagtaacggtttggtgcacctcgatttggaggaagtagggcagggcccttatctggaaagaagtttgg

SEQ ID NO: 34905 - DNA, 90 bp, Homo sapiens
cgcggcatcctcagcatggccaactccgggcccaacagcaacaggtctcaattgtgtcgtgaaaactacccctaaaagccaaaatgggaa

SEQ ID NO: 34906 - DNA, 74 bp, Homo sapiens
aagtgcgattgtggaagctgctcggcacaagctccgggtggataaggcagctgctgcagcagcggcactacaag

SEQ ID NO: 34907 - DNA, 74 bp, Homo sapiens
cacttattcatctgtccagcatgactcatccccgggagtgttgagtgccaggaccattgacaccagaaatggag

SEQ ID NO: 34908 - DNA, 90 bp, Homo sapiens
ggttgccttggaaaatgccaacgccgtgtctgaagctgggagtgtccactcgccttccaccagcatggcaacgtcttcacagtaccgcca

SEQ ID NO: 34909 - DNA, 100 bp, Homo sapiens
cagcatgtcggtggcggggctgaagaagcagttctacaaggcgagccagtgctcctcacatgggtcaactgttccagtgtgcggtgggccacccgggttc

SEQ ID NO: 34910 - DNA, 82 bp, Homo sapiens
gagaagatcctgggcagcctccagcagggacctgtgacaggaatcttgtcgattggcctggctgctgcctactacagcggag

SEQ ID NO: 34911 - DNA, 100 bp, Homo sapiens
ctgagaccaagaagacccgtgtgaagctgccctccggctccaagaaggttatctcctcagccaacagagctgtggttggcaacgcggtaaaaatattgct

SEQ ID NO: 34912 - DNA, 75 bp, Homo sapiens
cgtaaagattccagagaagcctgtgaacaaatttctgtgtttgaagaacatacgcaccttcctgaaagtctgcca

SEQ ID NO: 34913 - DNA, 50 bp, Homo sapiens
cggggagtcgcgggcgcctccgcctcagaatcctacagttgagtacatga

SEQ ID NO: 34914 - DNA, 90 bp, Homo sapiens
cgcaactccgccgcccaccatggcttccgaggagctgtacgaggtgagcgagtgctgtgctttcatgggcctcttctttatgaagcaaag

SEQ ID NO: 34915 - DNA, 97 bp, Homo sapiens
gagccaatatgaacactggggacccttctaagcccaagagtgttattctcaaggctttaaaaggtcaggacaatcgcagcaagctccggaacatgac

SEQ ID NO: 34916 - DNA, 100 bp, Homo sapiens
tcgtaggaggctgtcctgtctgcagtgaacagagtatctgtcaggcaagagctgctgtgatggtttatgatgatgccaataagaagtgggtgccagctgg

SEQ ID NO: 34917 - DNA, 83 bp, Homo sapiens
ctaaagcagcgtgcgttcagccctggggagaggagaggcagcagcatggcgagtgtcctgtcccgacgccttggaaagcggtc

SEQ ID NO: 34918 - DNA, 82 bp, Homo sapiens
aagacgtagaaagaaatcttagcaggatgaccagtgtcccagtgaaggaacgagtgaaggtgtctcagaactggagactggg

SEQ ID NO: 34919 - DNA, 75 bp, Homo sapiens
cagcagcttcatgatattactgtaccgttagaagtttttgagtctctaattaacagaagatggcaaagcccagcc

SEQ ID NO: 34920 - DNA, 80 bp, Homo sapiens
ggctcacctgtgcgggatggaacaaaagctgaatgcaatatccatacatctccttctccgggaattcaagtaaggcatgt

SEQ ID NO: 34921 - DNA, 75 bp, Homo sapiens
aagaggtagcaagaaagaaaattagagtgaatgtagttgcaccagggttccttggatatcacccagagtattgaa

SEQ ID NO: 34922 - DNA, 82 bp, Homo sapiens
cgctcagcgagtttgccctccagagcgacctggaccaacccgccttccaacagctgcttccccgggcgctgcctggacaggc

SEQ ID NO: 34923 - DNA, 74 bp, Homo sapiens
tccgggaccggccgaaaggcgaggaaccggagtacgagagggcctccaaagtggaccagtttgtgacgcgcttc

SEQ ID NO: 34924 - DNA, 75 bp, Homo sapiens
ttccaaaggtccagagcattcagctgtctcaaatgcaggaatcccgttctgcttccagaagtggaagtgctcacg

SEQ ID NO: 34925 - DNA, 100 bp, Homo sapiens
gggcgagcggtggtttggacgccggcggagacgcgggcgagcgggagatacagatgacccaccaagaattactcagaaccctgtgatcaatgggaatgtg

SEQ ID NO: 34926 - DNA, 100 bp, Homo sapiens
ttgccttggaccagtttcaggagaaatacagtcgcaagccaaatgttgggtgggaacctaaattattctgcaagacaaagggaagaaataaaattttccc

SEQ ID NO: 34927 - DNA, 98 bp, Homo sapiens
gctggctcggcgtctctctcggcagtcaccggagtgcccgagggggaagcacgatttacggaagcatggcggacaccgacctgttcatggaatgtgag

SEQ ID NO: 34928 - DNA, 98 bp, Homo sapiens
gcgtttgtcatcagaatcagaggagcctgccttctggtacaagatgcctgtggaatgttcggtgaagtgcacttggagttcaccatgtcgaaggcaag

SEQ ID NO: 34929 - DNA, 74 bp, Homo sapiens
cccgcgggggagccccgggagccgcacggagtttcataatagaagagcagagtttcttactatgtgaagatctt

SEQ ID NO: 34930 - DNA, 100 bp, Homo sapiens
taaggcaaaggagtggaagtttgagagaagtttaagagaagaaatggacatgattgcctaaatcagccaaacacaggatgtgaatgaatgtgaactgctc

SEQ ID NO: 34931 - DNA, 98 bp, Homo sapiens
tacatcgagatctaaaacctgaaaacatagttcttcaggatgttggtggaaagaatctccaatgaaaactatgttcctcacgggctgaaggtggtgca

SEQ ID NO: 34932 - DNA, 82 bp, Homo sapiens
ccgggagtcgctgggtgcgtggggctgcctcgccgcgtctcgccacgcagggtttccaggcctgaggtgcccgccctggccc

SEQ ID NO: 34933 - DNA, 100 bp, Homo sapiens
gcggccgcgagcagagccgcccagccctgccagctgcgccgggacgaacatgcccaatgtccgtgatcatgatgcctctgtctacctccgcctccaaggg

SEQ ID NO: 34934 - DNA, 90 bp, Homo sapiens
agaactggcttcgggaattttaccagactggtcgaattgacaaatcttaccctacagtatgtggccacacaggaccagtgctggacatag

SEQ ID NO: 34935 - DNA, 100 bp, Homo sapiens
tggatagcctgaaggcagccattcaggcaaatcctgatcctaactgttgtcttggagtatttgggctgagcttgtacaccacagaaagagatctaagaga

SEQ ID NO: 34936 - DNA, 80 bp, Homo sapiens
agcaaacatcgatggcctactggggataacattcatgcagaacatcagagtcaatgcatgtgttgatgtggtgctctcag

SEQ ID NO: 34937 - DNA, 75 bp, Homo sapiens
ggagaagcggcgctccaccggcgtggtcaacatccctgccgcagagcatcctggtggggaagaagttttaaggga

SEQ ID NO: 34938 - DNA, 74 bp, Homo sapiens
tcttcagttaattttggatccgtctaacacagtatgaaagttttcaagacgcctacaagtggaaaatgcactcc

SEQ ID NO: 34939 - DNA, 100 bp, Homo sapiens
ctgactcatgggccctggcggtggacgagcaggaagctgcggctgagtcggaccaattctgactccgccctgcaccagagcacaatgacgcccacgcagc

SEQ ID NO: 34940 - DNA, 100 bp, Homo sapiens
tatggctgcagaggatccatctgtcttagcaaggctgtcatcacagcagagatcctacaagaatccaggatgatgatcccagattgccagcgcaggttgg

SEQ ID NO: 34941 - DNA, 100 bp, Homo sapiens
tttataaatgactgtacagaactgttccgtgagctgatgcaccagaaagctgaaaagcttattcagctgattctgaatcatcttacactaccagacctgt

SEQ ID NO: 34942 - DNA, 74 bp, Homo sapiens
aaattggtcattctcgctaacaactgcccagctttgagacgccacaggtcatcatctggatcatcccattctgg

SEQ ID NO: 34943 - DNA, 75 bp, Homo sapiens
gcaagagtaagacagctggaggaagaaaatcgcatgctgccccagaaaaagcttgtggtgaaggggggcaaaaaa

SEQ ID NO: 34944 - DNA, 75 bp, Homo sapiens
cacggcttcccccaaggaatatacagatgatgaggagtctgatgaggaagctgtgaagaaaaccaacaaatgtgt

SEQ ID NO: 34945 - DNA, 75 bp, Homo sapiens
tacataacctgaggagccgggggaagctggccttggggaccagttacagaagtggatccgcggtaatgtgagtgc

SEQ ID NO: 34946 - DNA, 90 bp, Homo sapiens
ggagttgtttcccattgcagcccaggtggataaggaacatctcttcccagcggctcagttctcaaaagtctatggtcctgtgttcaccgt

SEQ ID NO: 34947 - DNA, 90 bp, Homo sapiens
ccggagcccggcgctttccccgcaagatggacggtttcgccggcagtctcgtatcgtcagtgaagcaggagcatcaatctacagtgtcag

SEQ ID NO: 34948 - DNA, 100 bp, Homo sapiens
cgcagtctccccaggttgtagacgctgcggcccggcccggcggggcatgaacaaccgggaggtgctggagcaggtggagcgaggctacaggatgccctgc

SEQ ID NO: 34949 - DNA, 100 bp, Homo sapiens
gccccggcccacagtcaacggggaggtctgggtcttcaacaaggtgaggaagaggatggagatgaagatgaggaagctgagtcagctacgggcaagcggg

SEQ ID NO: 34950 - DNA, 75 bp, Homo sapiens
tggaccagtttgttcgttacgagagtcaagggtccagagaaggaggagaagttgagacaggcggtcaagcaggtg

SEQ ID NO: 34951 - DNA, 82 bp, Homo sapiens
agagaggacgtggctgaagacaccaaagatgggggaggggaaggtgccaagtcctgccctgccaacttcttggcagctgccg

SEQ ID NO: 34952 - DNA, 50 bp, Homo sapiens
tgccagtgtagagggaattctaagcaaatccagtttgctgatgacatgca

SEQ ID NO: 34953 - DNA, 100 bp, Homo sapiens
tatgacagattacgccccctatcctatccgcaaacagcagttccggcgaggggggagcctcagcaggattgctgtgtgaaaaccgagctgctgggagaag

SEQ ID NO: 34954 - DNA, 100 bp, Homo sapiens
tgcgacatgttgccgcagcatcactaattagaagtcattgtggttacaaccagggatgttcaaaaggctctatgtgcagaattcaagatgaaaatgaagc

SEQ ID NO: 34955 - DNA, 75 bp, Homo sapiens
ggctgggatgggtatgatgtacaggtggtattaaagataatcaaacattatcaagaagaaggacaaggaactgaa

SEQ ID NO: 34956 - DNA, 97 bp, Homo sapiens
tggttccagctgcagcacgtggacgctgactcggaagtgcaggcgcatattaaatttcctattgactacccctattcaccacctaccttcagattct

SEQ ID NO: 34957 - DNA, 75 bp, Homo sapiens
tttcctggcgtaaaacaagcaaatatatgcctagtggatggcattcccaatgacagtagtgatagtgaaatggag

SEQ ID NO: 34958 - DNA, 74 bp, Homo sapiens
ttagatgcaagtgatgatggaatcttggccaaaatcgtgaaacagcttcatgagtttgccatcacagagccatt

SEQ ID NO: 34959 - DNA, 88 bp, Homo sapiens
aagggaatcgcaaggctcttccctgaccattttctactgtccctgcgcgagttgctggatttgtgcgactcggtgaaggatgatgccc

SEQ ID NO: 34960 - DNA, 82 bp, Homo sapiens
cacgtgaatctggggaaggagtcgagagcgcagaccctgcagaatgtgccctctggtggtcagaagatgctgtgctgtctcg

SEQ ID NO: 34961 - DNA, 75 bp, Homo sapiens
aggtgcctggggcaacctccaccttgacggttccagcatctggagcataagaacagtaattattttcttcttttc

SEQ ID NO: 34962 - DNA, 83 bp, Homo sapiens
ggccaagatggagaacttgcgagctgcagtgccaggtcaacccctagctctgggatccaggtccggcacgatcaagacccagg

SEQ ID NO: 34963 - DNA, 83 bp, Homo sapiens
atttcacttccctgtcaactcttcagctcgggctgaaatctctttaatgatggagggaagcaggcagacgcgagtgtctcggc

SEQ ID NO: 34964 - DNA, 73 bp, Homo sapiens
gtgatgaaattggaattgggtttacatgaggtgtgtttccattgtagaaaacctggtcatggaattgcagatt

SEQ ID NO: 34965 - DNA, 50 bp, Homo sapiens
atcttctgcctcgtcctgacacccaccagcgagacggtcatctgttccag

SEQ ID NO: 34966 - DNA, 100 bp, Homo sapiens
atggcggatggccccaggtgtaagcgcagaaagcaggcgaacccgcggcgcaataacgatttgtagccaaaccgtgcgccatagccctcaacattcaggc

SEQ ID NO: 34967 - DNA, 73 bp, Homo sapiens
gagcagcactcttcaccctgcacagccttgttaggacccttcaaagttgtacaagaaagcagatgatgttgca

SEQ ID NO: 34968 - DNA, 100 bp, Homo sapiens
ctcgagaaccgtttggcaatatgtacgacgcggatgagggagattacctggggcaattgatgttatcggtcagactataactatcagccgagtagaaggc

SEQ ID NO: 34969 - DNA, 75 bp, Homo sapiens
ggaacttctcagcctccaaattcatgaactgcaagcacatgttgaccagataactgaaatggcagcagtaatgag

SEQ ID NO: 34970 - DNA, 100 bp, Homo sapiens
catgagctggggcaccgagctctggggtcatgtaggtacaacagcaaccaagaagatcgatgtctacctccctctgcactcgagccaggacagactgctg

SEQ ID NO: 34971 - DNA, 98 bp, Homo sapiens
gggacccagggcccgggatcgccgagcccgacctcgggcgccccgccggtcacctccgcgcggacaccaggccaggtcagagcagcccaccatgggat

SEQ ID NO: 34972 - DNA, 109 bp, Homo sapiens
gctgatcgcctgggtggttgttggcgtgtccctgcagcgaaggatcctggtgagaagccctaccactgcaactgggacggctgcggctggaagtttgcgcgctcagacg

SEQ ID NO: 34973 - DNA, 98 bp, Homo sapiens
aacactcgcctgtccccgccggcttcggcttcagcgccgcggatggtagcatcgacaaggctccctgtggaccctgccccgccctgcccacggcctct

SEQ ID NO: 34974 - DNA, 100 bp, Homo sapiens
ccgcttaccgttcttcccttctcttttgggccctcgtcgatctcatttacaacatgtttaagactgcaggcaccacctgtgtgaaccggacatgaaactg

SEQ ID NO: 34975 - DNA, 75 bp, Homo sapiens
agtcggaaagttggaacctctgacaagaccaagtactaccttcaagaactgataaatttcaaacggaagagagtg

SEQ ID NO: 34976 - DNA, 75 bp, Homo sapiens
ttgttcaggaaccaccagtgacagagtcagatgtaccaacagtaccagcaacaggccggctatggtgcacagcag

SEQ ID NO: 34977 - DNA, 100 bp, Homo sapiens
ctggagcggcgcagccggagtggggccgtgaggggccaactcaccctatgcagcacagcccaccagctacgactatgatgccccactgagtgaggctggg

SEQ ID NO: 34978 - DNA, 96 bp, Homo sapiens
cagaggcggcggcggcgccccgctccgggtgaggttgccggggccgtgcgcgctggtactccaaagattcaggtttactcacgtcatccagcagag

SEQ ID NO: 34979 - DNA, 83 bp, Homo sapiens
tggatactccccgttcaggaattgcagcattcaggaactgtggctgcaccatctgtcttcatcttcccgccatctgatgagca

SEQ ID NO: 34980 - DNA, 100 bp, Homo sapiens
ctttggggctcactcccgacggcattgtcttctcctcttctcagacagggcagaccgaggagtttggaccgagggtaattttgggagtgtggagatgtgc

SEQ ID NO: 34981 - DNA, 90 bp, Homo sapiens
ccgtgccctggggctgagccctcagggatcgcttacacctgagacgaactacagaacagcacgtaccagaggtggaagtccaagtcaaac

SEQ ID NO: 34982 - DNA, 101 bp, Homo sapiens
accctccccacactctgccgcttccttctttgggccttcaccatcttccacaaagcccaaggagacccagatccaggatgccagaaaccatgtgagccaag

SEQ ID NO: 34983 - DNA, 80 bp, Homo sapiens
agttgcttcagttggtcgaagacagaggttcaggaagaggtgaaaaacttcatcacccgagagaacctggaggcacgggt

SEQ ID NO: 34984 - DNA, 82 bp, Homo sapiens
cggacgaagatggcgaccgccatgtacttggagcactatctggacaggaacggcaggagcagctgatgggatatcggaagag

SEQ ID NO: 34985 - DNA, 80 bp, Homo sapiens
tggtttgatactgacctgtaaatcatcctttaggctaccggctctctgaccagttccacgacatcctcattcgaaagttt

SEQ ID NO: 34986 - DNA, 98 bp, Homo sapiens
cagaactaacacacggggcgagtgccaactggaccattcagtacaacgacccaatatttcaggggctgccaagctgctctcctgtttcctcttccttg

SEQ ID NO: 34987 - DNA, 100 bp, Homo sapiens
ctgagatcttccggtggcgggaactgcagtcatggatcatattacggtacccaaggctttgaaatttctgaaaaccagaagaggcaggctgcaatgactg

SEQ ID NO: 34988 - DNA, 82 bp, Homo sapiens
ggcctcctaatccggatcctagtcctgagcgtgtctgtgtgcgagtgggcaaagtgtttcatggatttcaaagctggaggcg

SEQ ID NO: 34989 - DNA, 78 bp, Homo sapiens
ggtcaggtctggagctcgaccgggccagaccaagatcactccatggatgaaatgacagctgtggtgaaaattgaaaaa

SEQ ID NO: 34990 - DNA, 101 bp, Homo sapiens
ctcttcgtctgcttcttcctcttcagtcaaggcaaaggcagctcgagcatctcatctgacgtgagttcaagtacagatcacacgcccactaaagcccagaa

SEQ ID NO: 34991 - DNA, 50 bp, Homo sapiens
gaaactcggagtgtactccgcctgcaaggaccgcagctgaatgcacagct

SEQ ID NO: 34992 - DNA, 100 bp, Homo sapiens
gaacgacaagaagctcatgagcagcctgcccaacttctgcgggatcttcaaccacctcgagcggctgctggacgaaggcaatggacctcatcatgaccgt

SEQ ID NO: 34993 - DNA, 82 bp, Homo sapiens
acattcttggaagccttaccggtcatgttggccccccttatttccattgctctgaaagtgtcccagctgcaggagaggacgg

SEQ ID NO: 34994 - DNA, 100 bp, Homo sapiens
aaaattcttaaattggagtcatatgaaatcactatgaatggcagaaggagaagacagcctgaagaagatgcagctgatggagcttgcgattctgaatggc

SEQ ID NO: 34995 - DNA, 90 bp, Homo sapiens
ggtggtggcgggtggaggttcgagcgctgttctcgctccggagccgctgcacatttcggtgactctcctattccatctgtttcttcggga

SEQ ID NO: 34996 - DNA, 74 bp, Homo sapiens
tgctctctcggaataagacagagctggcaaaaactcaggggaatgtgtttgccactgatgccatcctggccacg

SEQ ID NO: 34997 - DNA, 98 bp, Homo sapiens
ccaacctggggcccaaagggaccataaagatccaacaaatggaattttcttgagcatgtttctaatcgttttgccattggaatccatggctcatgggc

SEQ ID NO: 34998 - DNA, 80 bp, Homo sapiens
aatgcactcggatgccgccgctgtcagtcttgagagctgatgacaataacatgggcaatggctgctctcagaagctggcg

SEQ ID NO: 34999 - DNA, 100 bp, Homo sapiens
ttaacctgcatcagctaaatgatgaagggaagttatcgataacacttgttggcagcagtgtgctggcgagcaccagtatgcatgagcgggtgaaccgaac

SEQ ID NO: 35000 - DNA, 134 bp, Homo sapiens
ttgtgacctctagcacatcacctacactaccacggccacactcaccactccatggccacacagcgggtatttctgtgggacttggatgaaaccatcatcatcttccactcacttcttactggatcctatgccca

SEQ ID NO: 35001 - DNA, 100 bp, Homo sapiens
cttcagtctgcaagtatggagctcaagttcttaattattcagaatgctgcggttttccaagatctacggaatccagaggcagcattgtctccaaccttcc

SEQ ID NO: 35002 - DNA, 90 bp, Homo sapiens
attagaaatatcttctggaaagctggccagatttgcagatggctctgctgtagtacaggaagagagaagggcacagttacctaagtatca

SEQ ID NO: 35003 - DNA, 96 bp, Homo sapiens
cttgatccccggccgcggggccaggaagtcggagtttgagccccggaggcagagcggctgccatggaagccattaatttgctagaaccaatgacaa

SEQ ID NO: 35004 - DNA, 75 bp, Homo sapiens
ggtgaagcggccccagcactcccagctgcgcagggcctgccaggtggcgctcgactcaccccacacagaccgcgt

SEQ ID NO: 35005 - DNA, 90 bp, Homo sapiens
cttggaactgtggtccatggtaaagttttacaggaagctgagatgatttccaagaacaagaaccctagtatttcttgaagttaatggaaa

SEQ ID NO: 35006 - DNA, 100 bp, Homo sapiens
ccgccagatcaacctggagctctacgcctcctacgtttacctgtccatgagttgaacaatgaccatagttgacaaagcttctgaatcttcagacccatca

SEQ ID NO: 35007 - DNA, 90 bp, Homo sapiens
caattattaggctctcagatgtaactagagagagaaggaacattccagaaactttggaattggcagagggggtcgatttgggaggaaagg

SEQ ID NO: 35008 - DNA, 82 bp, Homo sapiens
gtattcattgtgatggggaaggatctaataaccagtgcctatggttcatgcttgaagttttaatgacaaagaatgaaaacaa

SEQ ID NO: 35009 - DNA, 75 bp, Homo sapiens
tacgcgccacaacgtccgactgcactcacacgacgtgcgctatgggtcagtgtgagccactgccccatgttgtgt

SEQ ID NO: 35010 - DNA, 101 bp, Homo sapiens
catgattgaacgatctgtggtggaagcagcagtccaggaatgcagtcagtctgttgatgaaactatcaacacagtcactcctggcggcaaaccaaacaaaa

SEQ ID NO: 35011 - DNA, 88 bp, Homo sapiens
aacccagacagaggggagcacagagaaagagaatgatgaagagaaaggcccggagactgaccctgatgctcccataagacagaaaatg

SEQ ID NO: 35012 - DNA, 98 bp, Homo sapiens
gtggtctaaggcgccagactcaagctcgccctcccctacctgcggaagagtcaagggaatgtcatcaacatctccagcctggtgggggcaatcggcca

SEQ ID NO: 35013 - DNA, 51 bp, Homo sapiens
cactcctgggccgtccctgaagatgctgagatgaatcgtcacctgtgtgtt

SEQ ID NO: 35014 - DNA, 96 bp, Homo sapiens
agacggacctcagggccttcgtccagttctgcatccagcgcttccagcttcctgccctgcagagagaatgaacagccttccctcgtttggtttgac

SEQ ID NO: 35015 - DNA, 97 bp, Homo sapiens
ggagcccaacggcccgtcgctgcccagggatgaagggcccccgaccccaagctctgccacgaaggtgccaccgtgcaatgtgccaccccaagccctc

SEQ ID NO: 35016 - DNA, 96 bp, Homo sapiens
aggagccagaaaagccggcaaaaccacttacagctgaaaagatgggcttaggtcacgagcaaggatttggagccccttgtttaaaatgcaaagaaa

SEQ ID NO: 35017 - DNA, 100 bp, Homo sapiens
actcctgggtgctcagcatgctctacggcttcctgctgaccttcggctgcaggccaacttcaccatccgggaagatgccaaccccagctcccgacagcga

SEQ ID NO: 35018 - DNA, 113 bp, Homo sapiens
tcctggcccttttgaagaggaaatgaagggtattgccgctgttactgatatacctttagtacaaatggtgatgatcatcaggtcaaggatagtctggagcaattgagatgtca

SEQ ID NO: 35019 - DNA, 98 bp, Homo sapiens
agccgtggaataggtgtatcaagtaatggtgcaaagcctgaagacatggtctgctatacagctcagactctcgtccgaatcctctcacatggtggctt

SEQ ID NO: 35020 - DNA, 82 bp, Homo sapiens
ctccatcccttccgaggcccgacttcgggaactctaatgatccaggacaaagaagttaccctggagtatgtatcaagcctgg

SEQ ID NO: 35021 - DNA, 50 bp, Homo sapiens
cacaactccagtgctaactcaacagggtgcaaatagctatgggcaacttg

SEQ ID NO: 35022 - DNA, 75 bp, Homo sapiens
caacgacttactggggagagaaagaaaaggaacgggagctgagagtgcattaaaggagttcgagcaggtgccggg

SEQ ID NO: 35023 - DNA, 90 bp, Homo sapiens
gattcgcagtggtcgcttcttctccttggtgcagatgaaggattttcggttttcttacaagtttaaaatggcctgcaaggaggacgtgtt

SEQ ID NO: 35024 - DNA, 100 bp, Homo sapiens
catagtagaggttgttcagagttcaccagttgagcggccttctacttccacagcagtatttggcacagtatcaacaggcagatgcctccaaacagctgtg

SEQ ID NO: 35025 - DNA, 88 bp, Homo sapiens
aatcccctgtttgagaaaaggcctaagaattttggcattgacgcaaacatgcagatctttgtgaagaccctcactggcaaaaccatca

SEQ ID NO: 35026 - DNA, 90 bp, Homo sapiens
ctggggatgaggggctctaacacctgtgagctaatctttgaagactgcaagattcctggctgatgtggtcatcaagttccctgaggaaga

SEQ ID NO: 35027 - DNA, 98 bp, Homo sapiens
atctgaagtccgagctgaagcggcggaacttagacatcaccggagtcaagaccgtgctcatctcccgactcaagcagatgtccctggtagatttggga

SEQ ID NO: 35028 - DNA, 82 bp, Homo sapiens
ggagctggacggcgagcgcgagcggcgcgagaaaaggaaaggagcagtggcttccggttgaagccaccaacgctgatccacg

SEQ ID NO: 35029 - DNA, 75 bp, Homo sapiens
cgccgaggcaccgaggcactcagaggaggtatggacgacaaaggcgacccgagcaatgaggaggcacctaaggcc

SEQ ID NO: 35030 - DNA, 100 bp, Homo sapiens
accaccgccgctgccccggctgcctcctccctgaggctgaagaaatgtcaacaattgggagttttgaaggattccaggctgtgtctctgaagcaagaggg

SEQ ID NO: 35031 - DNA, 99 bp, Homo sapiens
gccaggcctcggacgaggaggacgcgcccgccaccgacatctactttgtgagaagccctaccactgcaactgggacggctgcggctggaagtttgcgcg

SEQ ID NO: 35032 - DNA, 74 bp, Homo sapiens
caggactggctgatactacatattccagatgctcctggtacagtttgttcagaatacgtccatcccattgggac

SEQ ID NO: 35033 - DNA, 76 bp, Homo sapiens
cactggagttgcttcacttagctctacaatcaacccatgtggctaacatttccaatgatcactggccatctttggt

SEQ ID NO: 35034 - DNA, 95 bp, Homo sapiens
gactttgatgattttaacctggaggatgcagtgaaagaaacttcctcagtaaagcgaatgggtaccacagaccatgtcatcgtcctggcgtccac

SEQ ID NO: 35035 - DNA, 98 bp, Homo sapiens
caagatactgagagattgaagcatgctctggaaatgttcccagaacattgcacgatgcctcctggtagaaaatctggtgtattaactgtgaaaatttt

SEQ ID NO: 35036 - DNA, 100 bp, Homo sapiens
taagagaatcccattatatgttgatgtattaaaagacctgagaacctggtgttgcttctagaactgctggagttactgtttgacaagtttaatgctgtag

SEQ ID NO: 35037 - DNA, 100 bp, Homo sapiens
ctccacccaccggcccaccctacatttagcgcatcatgtgatccgggacccagatgatgtggtaccagttggccaaagaagagcctggtgttggtgcatg

SEQ ID NO: 35038 - DNA, 75 bp, Homo sapiens
tccgaagcccgaggcagaggaaccggctcccagagtctgaaaagtgtcgaagagacagttttcaggaacaacaag

SEQ ID NO: 35039 - DNA, 101 bp, Homo sapiens
tggggatgacagtgactgaaggaatgaattgaatcttgagacgggtcctcaccagggtgaagagtctttgcaggttggtggtcaacagggtcagagatgcc

SEQ ID NO: 35040 - DNA, 83 bp, Homo sapiens
ctgtgggcgttccaggaggtggtcgtggcgaacctggcagctgcggagagtcgcggttgctgatcgtggtgcttgagtagagc

SEQ ID NO: 35041 - DNA, 83 bp, Homo sapiens
ccagttgctacccgcccattcagtacaatgcagatcttcgtgaagactctgactggtaagaccatcaccctcgaggttgagcc

SEQ ID NO: 35042 - DNA, 100 bp, Homo sapiens
tccctttatgaaccttgtgatagatgaatgtgtggagatggcgactagtggacaacagaacaatattggaatggtggcgccccagcgggatcccagagaa

SEQ ID NO: 35043 - DNA, 100 bp, Homo sapiens
acccactctacgtggcacggaggcttgtcaggtttgccagcgaggacataggtgtcgtgaaaactacccctaaaagccaaaatgggaaaggaaaagactc

SEQ ID NO: 35044 - DNA, 75 bp, Homo sapiens
gcgctgctctgtggggctctggccgcgcctggcctggccgggaccatgaacatccagtcatggataaaaatgagc

SEQ ID NO: 35045 - DNA, 100 bp, Homo sapiens
tttatattcatctcaaaaacaaaattctgaactcaggacttggcaaatctcacattcttgaaggtggcattgaagagcactaagatcggaagatgagtga

SEQ ID NO: 35046 - DNA, 51 bp, Homo sapiens
gtaaccctcactggagaatccagagcctgccgagtgcctgcgattgcaggc

SEQ ID NO: 35047 - DNA, 83 bp, Homo sapiens
ggctgatcttcaggatcatgcttggagcaggactttgaacatgtcggggatcgccctcagcagactcgcccaggagaggaaag

SEQ ID NO: 35048 - DNA, 98 bp, Homo sapiens
gttccgggctcggtgcgactgcgcagctcctcggcgcttcctcggtggcttccccgggtcgagcaaacagctgagattggggattttgatgaagcctt

SEQ ID NO: 35049 - DNA, 85 bp, Homo sapiens
agaattttccaaatgaatttgcaaaacttactgtagggcaattgaaggaacagactaaaaatcgtgtcctggaaggaaactacag

SEQ ID NO: 35050 - DNA, 75 bp, Homo sapiens
ccgacttcgatgatcgtgtgtcggatgaggagaagagccagtcttggtgctctgtgttcacctggttcatctgag

SEQ ID NO: 35051 - DNA, 100 bp, Homo sapiens
cgtcttctgggcctgtggagtttcttggacaggggccgcggggctccaggacggcgcccttagcgacaccatggagcgagactcctccagtacctccccc

SEQ ID NO: 35052 - DNA, 97 bp, Homo sapiens
gcggtcctgtactggctgctgctgccctgcgcgctgctggctggaaggagtcaagactgagaacaacgatcatattaatttgaaggtggcggggcag

SEQ ID NO: 35053 - DNA, 110 bp, Homo sapiens
gctgcggcagttgcgcgctgggattgttgcggtgcgctggagccgaattcctcagagagagaagactgtaataatggcgaaccccctaggaagataataccagagaagaa

SEQ ID NO: 35054 - DNA, 83 bp, Homo sapiens
ggcctgcagacgctgctccggaacagccaccaggtgttccaaggtcttggtcttgatgccaagtttgggaaaggagctaagaa

SEQ ID NO: 35055 - DNA, 82 bp, Homo sapiens
gtaccgaccttctgaacaaggccaacacctatgcaggttgaaatcacaaagattagacacctttttagataggtgttcttca

SEQ ID NO: 35056 - DNA, 100 bp, Homo sapiens
agagccccattgagcgtcagaagagcctgttgagtcttctccccctattcctaaagagttcacatgagactctgaatatagtggaggagaagaagcgggc

SEQ ID NO: 35057 - DNA, 82 bp, Homo sapiens
ctctcggacaccattttctgccgctggacgcaagcatggaaataaccagcctgcaagaactggcacactgtcgagaacaaat

SEQ ID NO: 35058 - DNA, 110 bp, Homo sapiens
gcggcctcggctgaagaaagaaggtgggagcggagagcgcaggcgtgacaatgcagatcttcgtgaagactctgactggtaagaccatcaccctcgaggttgagcccagt

SEQ ID NO: 35059 - DNA, 131 bp, Homo sapiens
caagatttaaaaactacgccgagctgacgattatgaagactctggaagcccacaaagactcccataaggagtgagccccatgcacggttctatgcagctcagatagtgctaacattcgagtacctccattc

SEQ ID NO: 35060 - DNA, 99 bp, Homo sapiens
acttggtataccttgctacaatagcagattctaatcaaaatatgcagtctcttttaccagcagtagttcagcagccttcaggaggcaatgaaaaacaag

SEQ ID NO: 35061 - DNA, 83 bp, Homo sapiens
cagaccctggagcctcagttggaagcagccgatccagcctgcggagcctgtggggcaggagtctcagcagtccaattttggca

SEQ ID NO: 35062 - DNA, 75 bp, Homo sapiens
tgccgctgccgcacctccgtagctgactcgtgacccaggaggctctcacgtggagtccccagaacagcatcaact

SEQ ID NO: 35063 - DNA, 101 bp, Homo sapiens
ctcatcctggttctggaatcctcagttcaagattgacaagtatctctatgccatgcggctctccgatgaaactctcatagatatcatgactcgcttcagga

SEQ ID NO: 35064 - DNA, 100 bp, Homo sapiens
cccgggggccgccgccacccgcctcccaccatggctctgaagagaatccacaagctcagaccatgaccgacttcataccttggtaactgaacactgtttt

SEQ ID NO: 35065 - DNA, 83 bp, Homo sapiens
gccaggccgaccccgacccggactcggacaagggatgactccgctgaggtggacgtgtacaacccgacgaggaacgaatggga

SEQ ID NO: 35066 - DNA, 100 bp, Homo sapiens
gtgtgcggggacaacgccgcctgccagcactacggcgtgcgaacctgcgagggctgcaagggctttttcaaggctctatgtgaactggagatttttacga

SEQ ID NO: 35067 - DNA, 50 bp, Homo sapiens
gattgcatcagcaatgtggcgcacggaggagatgatcttccagatcccat

SEQ ID NO: 35068 - DNA, 74 bp, Homo sapiens
ctctaattcaccgcaggatttccgcaccaagcaatatcatttatgctggctgaaatggcaatgaaagttgaact

SEQ ID NO: 35069 - DNA, 50 bp, Homo sapiens
agctgcctcagttcttagcgcagattatggattggatatgtctacttctg

SEQ ID NO: 35070 - DNA, 75 bp, Homo sapiens
gaagaatttaaactggaggacctgaagaagctagaaccaagtgccagatgtgacatccagatgacccagtctcca

SEQ ID NO: 35071 - DNA, 100 bp, Homo sapiens
agaatttgaaaaatgaagatgatgtagacactggactattagatgaaggtcaccgtgtccaaagggggcgaccgggacagtgacgacgacagcgtcctcg

SEQ ID NO: 35072 - DNA, 101 bp, Homo sapiens
gctggatccttcccagaagaatctctacagggatgtgatgcaggaaaccttcaagaacctgacctctgtagttgagccccatatgggggttggcaggcagc

SEQ ID NO: 35073 - DNA, 100 bp, Homo sapiens
cttacagacgctgccagcatcgccgccgccagggcgccctgcgtccggcagaggaggcgagcatcccgctcaggtgatgaggaacccctcgcgcacccag

SEQ ID NO: 35074 - DNA, 100 bp, Homo sapiens
cccaagattccagatgttcctgtggaccccagtccagggagaagatgtcaaccggacactagaaggtggaaggaaacctcttcattatgcagcagattgt

SEQ ID NO: 35075 - DNA, 95 bp, Homo sapiens
cagtatgcaactgactacaaggagattttgcaagaacgaggctcaaggatgtgagggacacagtattgacagctgaagaaatgatttacgttttc

SEQ ID NO: 35076 - DNA, 50 bp, Homo sapiens
atcaccagtttaaagaatctgattgtctacgagaacgaagaccagctgct

SEQ ID NO: 35077 - DNA, 119 bp, Homo sapiens
ctcacgtgatggcctcccaccattccaagcggagaggccgggcgtcttctgagagtcagttttaatcgcctggacctgccaccatacaagagctatgagcaactgaaggaaaagctgtt

SEQ ID NO: 35078 - DNA, 75 bp, Homo sapiens
atggaagcggagaacgcgggcagctctttcagtctcacatggcaacgaaaacaacttgtatgtcttcacaaggat

SEQ ID NO: 35079 - DNA, 75 bp, Homo sapiens
aggtctcccccacggatgaggagaaggcagctgcattcagcctcagcggaggacacgcctgtggtgcagttggca

SEQ ID NO: 35080 - DNA, 100 bp, Homo sapiens
cagcgcagtaccaccttccagagatgaatgaatctgaagtctgctgcagtaaaacacagaaggctttaaaatgttttcttgcataaaattcaaaactttt

SEQ ID NO: 35081 - DNA, 83 bp, Homo sapiens
tgccctacttcaaggataagggtgacagcaacagctcggcgggctggaagagggtgctcgagaggaagacctcgatgctgtgg

SEQ ID NO: 35082 - DNA, 123 bp, Homo sapiens
taacttggccaggctggccccgagcggaactggagaaagctgaggtattggtaaaggttttcaaggtgtcatgaaaagatggggatttaaaggccagcctgctacgcatggtcaaacgaaaac

SEQ ID NO: 35083 - DNA, 100 bp, Homo sapiens
aatgagagggacaggagtatctgaggatggagaactcagcactcttgcccctgttctttgcttctcgttttgttggtgaagatatcacagtgatgtctgc

SEQ ID NO: 35084 - DNA, 75 bp, Homo sapiens
ccgcagggcgatggacggccgaaccccgcgcccgcaggacgccccagccaggtttccaatacttatctacaggaa

SEQ ID NO: 35085 - DNA, 75 bp, Homo sapiens
aaggctgcagtgagccctgtttttgccaccacactccagcttggactctggctcctcctcctcctcagaagatga

SEQ ID NO: 35086 - DNA, 51 bp, Homo sapiens
caaagacctgttcttaaaaaaagtggatgaggatcgcagtacggaacctga

SEQ ID NO: 35087 - DNA, 90 bp, Homo sapiens
actacttaataatgacaatctcctcagggaaggggcagcacatgatatggagaatgcagaaaacattctcacagtgatgagagatgccgg

SEQ ID NO: 35088 - DNA, 83 bp, Homo sapiens
aaaacactaaacgccaataatatggagacactaatcgaatgtcaatcagaggcagaagctcctcctggggtagagacagatct

SEQ ID NO: 35089 - DNA, 100 bp, Homo sapiens
ttacatttgctgaacgactggggaatgttaatattgatattattcaccggattgatagaactgcaagctatgaggagcctagatattatcctactgaaga

SEQ ID NO: 35090 - DNA, 75 bp, Homo sapiens
gtgtactgcaaggaacaaaatgtttgtaaattctccttttaccaagcaatcccacagagtattgatgaggaaact

SEQ ID NO: 35091 - DNA, 100 bp, Homo sapiens
ggaaaatcacatctcgtcctttcaccaggttccgcacggccgtcagggtggtcattgcaatattaagctaaaccaggtggacaggtgaaatgtcagtata

SEQ ID NO: 35092 - DNA, 100 bp, Homo sapiens
gctatcaatatattgctggaagggaattcagacacagtatgcatcttctattgatgatattttggaagatgaagaacattatgcagatcagttaaaagag

SEQ ID NO: 35093 - DNA, 100 bp, Homo sapiens
agctgcgtgattcccgtgattgcgttacaagctttgtctccttcgacttggagtctttgtccaggacggtcagttcaccgggacctggaggcccagattg

SEQ ID NO: 35094 - DNA, 75 bp, Homo sapiens
gcaacctggcagccgccgccgtggaagagctggaagtcgagtgtgctactcaactcaggagatttggagacaaac

SEQ ID NO: 35095 - DNA, 75 bp, Homo sapiens
tggagctcttctggcattgctgtttcctgtggtaaacactcggctgtgggcattcctccaagtagaccaacgcct

SEQ ID NO: 35096 - DNA, 75 bp, Homo sapiens
gttgactgctgcaaggaccaaggtccagtggcattgcagagcacggatggttgcaggagccaacttttacattgt

SEQ ID NO: 35097 - DNA, 89 bp, Homo sapiens
tttgtccagggcagcatctctggtgcatgctgatgacgaaaaacgaatagcgggttttgcagcaattgttgcatatggattatataaac

SEQ ID NO: 35098 - DNA, 135 bp, Homo sapiens
gcggcgcggctgccggctgccctgtgaatgggaagttacgcgaagtccacccagcgtttctgagattctccagtacaagaagaggtgctcggagctggagcagcagctgctggagagatccggagagctggagca

SEQ ID NO: 35099 - DNA, 80 bp, Homo sapiens
ggtttaccatggcaatggggatttatactggggttcgcctgccattgttgccggttgattttcttatgggtgttgtggca

SEQ ID NO: 35100 - DNA, 102 bp, Homo sapiens
aggcagcagtggcagtccatcgaggggaccaaactctccatcacccaggccatgcaggatatacgtactgtgggtcttgtgctgcccatgcttataaacaag

SEQ ID NO: 35101 - DNA, 75 bp, Homo sapiens
ttctccagcctgctgcgcaggataaaaggcaaactcttcacctggtgcatgtgagggaaccctggcttgttcaac

SEQ ID NO: 35102 - DNA, 100 bp, Homo sapiens
gatgaggagatggaggcgtcgggcgtgagcggaaatgaggaggagatggtggaggaggctgaaggcatgggcaagaaggacgaccccaagctgatgcagg

SEQ ID NO: 35103 - DNA, 100 bp, Homo sapiens
ctttcaggctccatcagcctcggtgacagtgtggagatccctgccctcaagatagactgggagctccatgaggtccgagacaacctgaagacgcccagct

SEQ ID NO: 35104 - DNA, 100 bp, Homo sapiens
ccagcttcacccagcaccaccggcccgtcatcgccgtgcacagcgaggagaggagacgccgtgagcgggacgaccagatgtaccgagagcggctgcgcac

SEQ ID NO: 35105 - DNA, 100 bp, Homo sapiens
ttatattcatccgttctggaaactgagaagcgagggtgacaatggtaaaaggacaaacttgcgtaaaactggctcagagcgtatcgctcatggaatgagg

SEQ ID NO: 35106 - DNA, 100 bp, Homo sapiens
cacctggcctgcccgagcaagagcctggagctgcgcaagtacacgatgaggcgagtggtacgacagagcaagtttcggcatgtatttgggcaagcggtga

SEQ ID NO: 35107 - DNA, 100 bp, Homo sapiens
gccaaaggaggcagagccagaactcacaaccaggtcacgcaatatttaaactcacgtatctaagcaatcacgactataaacacctctactttgaatcgga

SEQ ID NO: 35108 - DNA, 98 bp, Homo sapiens
tgctggccaagctgcaaagctgggagagactggaccagaccatgggcctgagcatcaggatccctgctgccttggtgatcccgggctgacagccagag

SEQ ID NO: 35109 - DNA, 88 bp, Homo sapiens
aagaaaatactttctcacttcaagcagggtcctgatgaagaagctgttgtggatcttggcaaaactagctcaactgtgaacaccaagt

SEQ ID NO: 35110 - DNA, 100 bp, Homo sapiens
gtcactgcgacgttcacagaggaacactgccggggcccaaccacaagacgactcaataggaggaagggagttggtctctcagtccatgggcaatttcgag

SEQ ID NO: 35111 - DNA, 88 bp, Homo sapiens
caagatctggactactgttgaaaaaatttccagtgaggcccagtactacggggagattggcatcgggacgcccccccagtgcttcaca

SEQ ID NO: 35112 - DNA, 73 bp, Homo sapiens
ctgtctaggagagcatttgtatgttatggtgaatgccaaatttgaagtggttggcacttaccatggttcccca

SEQ ID NO: 35113 - DNA, 74 bp, Homo sapiens
atttgcccatctgggtcaacaagcttgacatggaggtgaggtcccagcttgaagagaaagaaaacaagaagttc

SEQ ID NO: 35114 - DNA, 78 bp, Homo sapiens
gcatatttgagtcatttccttcgtacccacagtgcttcatgagaggtttccacttgagcggcacagtgacagaacctg

SEQ ID NO: 35115 - DNA, 83 bp, Homo sapiens
cccagctcttctcacagaaggaagataaactccacatatttctcttgccttgcgccatggactggcagccagacgagcagggc

SEQ ID NO: 35116 - DNA, 50 bp, Homo sapiens
cggagctggaatgactggcaacccaggggacaccgtggtgtttaaggatg

SEQ ID NO: 35117 - DNA, 142 bp, Homo sapiens
gtaaatcctgtggaaaatggccttcagtgatcttacatcgaggactgtgcatctttatgataattggatcaaagatgctgtggaatgagaccgtggagctttttcgtgctaagatgccgttacggaaacatcgctgtcgttt

SEQ ID NO: 35118 - DNA, 83 bp, Homo sapiens
cacccccggaccgaccatgggcagatcccagggagtgcatccgccccaacccttttccccctcgtctcctgtgagaattcccc

SEQ ID NO: 35119 - DNA, 75 bp, Homo sapiens
ctccggtccaggctttacagaagggaagaacttttaacttgacagcagatcctgataacttaagtgactctctct

SEQ ID NO: 35120 - DNA, 75 bp, Homo sapiens
tggcagcatgaaagttagcagtatcatgatattagctggtttgacatcaagtcatttgtgagtcatcagatcttc

SEQ ID NO: 35121 - DNA, 83 bp, Homo sapiens
ccaggggagaggttccccctcagcttccccgggcgctgcctggacaggcctgcctgcgtgctgggacatgtctggcctccaag

SEQ ID NO: 35122 - DNA, 100 bp, Homo sapiens
atcatactgccccgactgcgccctgctcctcgtcagtgccaacactgggattggagaccagtatgatgtctgtgccatttgcctggatgaatatgaggat

SEQ ID NO: 35123 - DNA, 100 bp, Homo sapiens
tggagcccggttaggaagaatggagttggcgactcgctaccagctccctcgtgaaagatgcttctgttcctctgattgatgttacaaacctccctactcc

SEQ ID NO: 35124 - DNA, 75 bp, Homo sapiens
atatcaccaacaatgagagagtggttgtaaaaatcctgaaggtatctcagcgtttgagtcagccaggagtagcaa

SEQ ID NO: 35125 - DNA, 100 bp, Homo sapiens
gagacgtgaaacatgtgaacactcaagtgaagcaaaagccttccatgattacgactcgctgattcttgagaagagtcaaaactggagctctcaaaaaatg

SEQ ID NO: 35126 - DNA, 100 bp, Homo sapiens
acccgccggactcgcggaaaaggccgctggaagccccccctgaagccggcagcaccaagaggaccaatacgggcgacaagttggatggcttgaggactgg

SEQ ID NO: 35127 - DNA, 98 bp, Homo sapiens
gccaggtgtccatccccgtgctgaggtccactggctattctgaggtgatagttgtcgttggaggatgtgagcgagttggaggatttaatcttccatac

SEQ ID NO: 35128 - DNA, 100 bp, Homo sapiens
tggtggtgagcataggatggaacccatattacaagaatacgaagaagtctatgtattgacttgaagctgaaagaaaagccttagttggccatgctggaag

SEQ ID NO: 35129 - DNA, 74 bp, Homo sapiens
ccctacatgatgagaggtttgagaagtttggcttcattaactatgaagtaggagatagcaagaagctctttttc

SEQ ID NO: 35130 - DNA, 100 bp, Homo sapiens
aggaaagtggaggtcacctactatcacaaaaatggggagccaggaagtgggacggaaagtgacacttctccagacttccacaatcaggaaaatgagccca

SEQ ID NO: 35131 - DNA, 95 bp, Homo sapiens
cttgaacgtctggactctagggaccctgctgaatagctggggctacaggcgtgtgtcactgcgcccaggatgtacagttacccagcacgtgtacc

SEQ ID NO: 35132 - DNA, 100 bp, Homo sapiens
ggatattgtagaaactgtctttaacctgaatggtggtttggcctggagtgatgatgcagatggaggccggggaagagagatctctcgagattttgccaag

SEQ ID NO: 35133 - DNA, 76 bp, Homo sapiens
atgactcaagacctggtccttggagaccattagtcaagccagaattctgcttggtcagaatcgtgatggcattgtg

SEQ ID NO: 35134 - DNA, 97 bp, Homo sapiens
tagtattttacccaaggataaaattcaggatttcttaaaggatagccaattgcagtttgaggctgttcctatatgatagtggactcttcagatcacg

SEQ ID NO: 35135 - DNA, 75 bp, Homo sapiens
accccagtcggtgctccggggaggtcacctgacgaggaggaagaagagtgacaggaccaccctagattcacagga

SEQ ID NO: 35136 - DNA, 82 bp, Homo sapiens
ggggttcgggtgtctcgtgtgtgaacatcacagtttggtgccctggttgtcagatgttggaaagcagtaggacggaacatac

SEQ ID NO: 35137 - DNA, 76 bp, Homo sapiens
tggatatcctgaaagatcaatggaatccaaaaatccttgtggagtgtcttactcctgattttcgaggtgatctcaa

SEQ ID NO: 35138 - DNA, 73 bp, Homo sapiens
tccaccttaggatagtgttgcctgaagatttacaactgaagaatgcaaggccataggaaaaggatacagagta

SEQ ID NO: 35139 - DNA, 100 bp, Homo sapiens
caagatcctgtgcactgactgcggagaaaaacctttcaagtgcgatgagtgtaactttgcctccacaactcagtcccatttgactcggcataaacgtgtc

SEQ ID NO: 35140 - DNA, 75 bp, Homo sapiens
ttcctgtacagcctgcagaactgttgtttacattcagagctctatcaataagaggaatacatattacagtgaatt

SEQ ID NO: 35141 - DNA, 83 bp, Homo sapiens
cagacctggtggaggtgttaaatgaaatctgtatttagaaactatgatcacgaccatgatgggtacatttcccaagaggactt

SEQ ID NO: 35142 - DNA, 99 bp, Homo sapiens
gacagcttgagccccatcgtggattccaagacatccctgctgagagagccaagagtgtgaacatggctacgcctcttcattcccgtccatgccgagccc

SEQ ID NO: 35143 - DNA, 73 bp, Homo sapiens
ctggattgggaaagaccatggcagaccctgtttgggaagatgatggactacctgcagggctctggggagaccc

SEQ ID NO: 35144 - DNA, 98 bp, Homo sapiens
ggtatatcaggtgccaccatcagtgcagagaagcattgggggaaccagtgggccccacgtgggtaaaaagtttggaaattttagcattcaggtgccag

SEQ ID NO: 35145 - DNA, 114 bp, Homo sapiens
cctcgacctgctgctggagacctggatctcgcgccacaaggagatggctccttcgagagcagtggatccgggccaagtacgagcgacaggagttcatctacccggagaagcagg

SEQ ID NO: 35146 - DNA, 101 bp, Homo sapiens
tgggtttcttactaaggacgagctgatcaagtatatgactgaagaagatgtgtatatctcatgattgatatggagaaactagtcatgggccaaaggtcaag

SEQ ID NO: 35147 - DNA, 75 bp, Homo sapiens
cgaaagcagtgacggaggagcttgtaccaccggtcatcctgtacagttctacagcatgaataggcctgcctctcg

SEQ ID NO: 35148 - DNA, 82 bp, Homo sapiens
ttgggcagaaaggaagtgggatccgcaagatgatggatgagtttgaggtgattaggaagaagcttgttcgtaaaacgctgga

SEQ ID NO: 35149 - DNA, 100 bp, Homo sapiens
agctcccaccgcacagttatttgcaaagtcccaggtgaactcgtggcgagagaaggaaaatgcgcgtcccgggcgcgggatcactactcttggaatcaaa

SEQ ID NO: 35150 - DNA, 82 bp, Homo sapiens
tggtggccaacattttgcggatactcttctggtgaaatgacaatggatgctctgttggctcgattgaaacttctgaatccag

SEQ ID NO: 35151 - DNA, 50 bp, Homo sapiens
gtgtccgccgctctatccagtgatgccgtagggccaggtgagctgctgtg

SEQ ID NO: 35152 - DNA, 100 bp, Homo sapiens
ggaggactagatcatcaattgaaaatgcatgatttgaacactgatcaagggtggtatttccaacattttggaggaactggttgtccagcctctgttggta

SEQ ID NO: 35153 - DNA, 75 bp, Homo sapiens
cctccacgactcataccccacagaccactatcacctcgatcagagtaatcaagtcagaggattatatgactttta

SEQ ID NO: 35154 - DNA, 89 bp, Homo sapiens
ggcaataaatgccacatgagatgatcacctcagcagaaaactgatggccaggccatgttatgggatctcaacgaaggcaaacaccttta

SEQ ID NO: 35155 - DNA, 95 bp, Homo sapiens
ttcgtgctgctgggattcgcgctgctgggcacccacggagcctccggggctggtttggtgcacctcgatttggaggaagtagggcagggccctta

SEQ ID NO: 35156 - DNA, 100 bp, Homo sapiens
ccaactaaagccccacatttgcagctcattgaaggaaagaacaccttccaccatgaccacctcagcaagttcccacttaaataaaggcatcaagcaggtg

SEQ ID NO: 35157 - DNA, 95 bp, Homo sapiens
tcaaaaatctggtgaaattgccggcaagagggagttaaggacattccaggcagaggcaaggatccgcttcagcagagaacagcctgggccatcag

SEQ ID NO: 35158 - DNA, 80 bp, Homo sapiens
agaggaggaaggagggacttcttggcttctcccagcatagccccaggatcagtgaatgcttgtgaaaagacctcatttat

SEQ ID NO: 35159 - DNA, 100 bp, Homo sapiens
agcgccggacgcgccgcgccctggcggctctagggaccccccccgcgcctgcacttagccccgcgcccgaggtttggtgcacctcgatttggaggaagta

SEQ ID NO: 35160 - DNA, 100 bp, Homo sapiens
gtttgaagatctctgggataaaggtcatcgagcagctcggtgggaagcagctggtcatgaaccacatgcatcatgaagaccagcaggtccgctataatgc

SEQ ID NO: 35161 - DNA, 100 bp, Homo sapiens
cgtgacgaggccagaaggctagaagaatcagacgtgctccaggaggccagaaggaaatacgctcccagccccattgccaataccttcctccactatcgaa

SEQ ID NO: 35162 - DNA, 100 bp, Homo sapiens
agccctgcacactttggaaactaaatcaagtctgccaatggtgcatggctatggccactcggacgcagatgttctgcaccagtcattacttgaagccaac

SEQ ID NO: 35163 - DNA, 75 bp, Homo sapiens
caaactgcgcaggagtaaggcaggaaaccgacgagaggacctcagctccaagttactccacaggatccgctgaac

SEQ ID NO: 35164 - DNA, 124 bp, Homo sapiens
gaattccaacttgtttcacgctatatcaggatgagataactgaaagggaagcagaaccatactatgcctttgtggaggcccagaataagattactgtgccatttcttgagcagtgtcccatcag

SEQ ID NO: 35165 - DNA, 100 bp, Homo sapiens
gcgctccccggggcaggtggctgcatagtcttggcggaggagccctctggcacaaatggaagaagaaagaagggagcaagtagctaaaattaagaagatg

SEQ ID NO: 35166 - DNA, 82 bp, Homo sapiens
gatgtggcgctaccgctcctgggacgtgccacagatcccatcagaggcaccccagacacacccatggcgaattgtggatgat

SEQ ID NO: 35167 - DNA, 80 bp, Homo sapiens
gttttgccagtcacctctcaactgtgtgccaaaggtgcaacattagaggaaatcaatcagcactgggactggctggaaca

SEQ ID NO: 35168 - DNA, 100 bp, Homo sapiens
cagatagcagcaattacatatttcctgagaccaaacttacagcctctttctgaagagtggagtcaacatatcaatggagcaagtcacagtcgtcgatgcc

SEQ ID NO: 35169 - DNA, 74 bp, Homo sapiens
gactactggggccagggaaccctggtcaccgtctcctcagattggtttatcttggaagctaaagggcattgctc

SEQ ID NO: 35170 - DNA, 83 bp, Homo sapiens
cctggcctccctcaccttggacacctcgcttgggtgatgtgtccaatctagatcccaacttctcatttgaaggcaccaaactg

SEQ ID NO: 35171 - DNA, 75 bp, Homo sapiens
cccggggccgacccggcccgtagtgtggaagcagcttcagacccaacatgagtgaagtttcctgcaagaaacggg

SEQ ID NO: 35172 - DNA, 100 bp, Homo sapiens
aggagatgaagttggagagcttgactgtagatggaggggccctaagcccagacccctgggctaccctgatgctgagagcctggctagccgtctcaaggaa

SEQ ID NO: 35173 - DNA, 74 bp, Homo sapiens
cagactgccagtttccagttgtggttggtcaaagaaaaagtgatgtatgaaaaagaggcaaaacaacaagaaga

SEQ ID NO: 35174 - DNA, 51 bp, Homo sapiens
cgcttcttgaatttctctctgtaaaggaggagtctcttgcatggctcagga

SEQ ID NO: 35175 - DNA, 80 bp, Homo sapiens
cggactcgtatcggtaccccaggacagaacattgatgatggcacctcagatcgcccctacagccatgctctggtggctgg

SEQ ID NO: 35176 - DNA, 102 bp, Homo sapiens
ggcagcaaccaggagattccctgggcctgcaggaagcccttccgcggaccgaaaggacataagcagctctatgaccaatagcacagctgccagtagaccccc

SEQ ID NO: 35177 - DNA, 100 bp, Homo sapiens
gaagtttgatgtgccgtgtggaggaagagattgcagtgggggctgccagtgctaccctgagaaaggtggacgtgccacacgtgtctacacttagcctcta

SEQ ID NO: 35178 - DNA, 100 bp, Homo sapiens
gcggacggacaccggatggccactcatcagaaggactgctcgctgccatatgctacggaatccaaagaatgcagggggattttggcaattgcttggagca

SEQ ID NO: 35179 - DNA, 75 bp, Homo sapiens
gagaggcgccggggccgcacagtccctgttctgggaaaatagccacctccttgttaacagctttgcagacaacac

SEQ ID NO: 35180 - DNA, 75 bp, Homo sapiens
tagagaacacgctgtgggctggcactgtggtcgcatcagatttggagaccaagtatgagaccaagaagttatctt

SEQ ID NO: 35181 - DNA, 100 bp, Homo sapiens
gaagagggggtcgaggagagccggagtcggggacccaggagtttcctgtgtccagcgctgccggagccgcctgagaactgctttctccaggggttaaaaa

SEQ ID NO: 35182 - DNA, 76 bp, Homo sapiens
cacagccatcttcttctactgtgaccgcggcacccagcggggattgtcaatgaggcagatcagattccgatttgac

SEQ ID NO: 35183 - DNA, 100 bp, Homo sapiens
gtggaggaggaggaagaggtggtggcaattttggaggtagccccggttatggaggaggaagaggaggatatggtggtggaggacctggatatggcaacca

SEQ ID NO: 35184 - DNA, 48 bp, Homo sapiens
actggaccccagtgtgaaagagggcctgttcttcttgatgaatttgtt

SEQ ID NO: 35185 - DNA, 100 bp, Homo sapiens
ccacagaaattggttccaagggtcagaatggcggcagcggagcatcgtcattcttcaggattgccctgctggccctacctcacagctgaaactttaaaaa

SEQ ID NO: 35186 - DNA, 97 bp, Homo sapiens
ataggagaaggatgtggactgcagtgctgcagtgccaggtccggaccctatttgtcagtggccttcctctggatatcaaacctcgggagctctatct

SEQ ID NO: 35187 - DNA, 90 bp, Homo sapiens
gtggaatgtatccgggaggtcaacgaggtcatccagctttttacctgcacctactcagctatctcaggaccagcttgaggctgaagaaaa

SEQ ID NO: 35188 - DNA, 100 bp, Homo sapiens
gccagtcgcctccaggccaagagggatccttcacccgtgtctgttgtattccctgaatgactataaaccacccatttcgaaagcgaaaatgacccaaatt

SEQ ID NO: 35189 - DNA, 87 bp, Homo sapiens
cgacaagccgctggcagccgcggatctcaccgccgctcaggcacttgcacctcctgcgccgccgccccccatccaaggatatgcctt

SEQ ID NO: 35190 - DNA, 100 bp, Homo sapiens
cggtggtgccttcgctcgtggatcgatacttcactcgctggtacaaaccggattaataaagaactcttcagaattcctggtgtttcatcatatatacgac

SEQ ID NO: 35191 - DNA, 102 bp, Homo sapiens
atgagaccagtggaagcagcaccatcggggagacaagcaaacacctggatttcattagcatcatgacctacgattttcatggagcctggcgtgggaccacag

SEQ ID NO: 35192 - DNA, 101 bp, Homo sapiens
tggggatgaagcatcaggctgtcattatggtgtccttacctgtgggagctgtaaggtcttctttaagagggcaatggaagcattcagagagaagaatcgac

SEQ ID NO: 35193 - DNA, 74 bp, Homo sapiens
cacacctttctgctttatctgaatcctgaggttggcttgaagcctgtgtggtatagtcccaaagttttcattga

SEQ ID NO: 35194 - DNA, 96 bp, Homo sapiens
cttaaatggcccacatcaggacagctgttccttggccatcccaaagctattctgggggcaacagagaccctggcctatggggacatgaaccatgag

SEQ ID NO: 35195 - DNA, 103 bp, Homo sapiens
gcttgttctggatccctatttattaaaggcagtcatggatcaggtaatgcagtttgttgagccaagtcggcagtttgtaaaggactccattcggctggttaaa

SEQ ID NO: 35196 - DNA, 100 bp, Homo sapiens
attgtttatcctaatcccaatgctgaagtaagattgtcttggaaatactaagttggcagggtaccaccatcttaaggacagaaaagctacaggactctag

SEQ ID NO: 35197 - DNA, 51 bp, Homo sapiens
attctctgaaggcatcaacaatctgacgattggagctggagtgagccttcc

SEQ ID NO: 35198 - DNA, 75 bp, Homo sapiens
gacaaaatgggaaccaaacttggagagctaaaaacacaccttgactttagtcagatacatcactgtctgttaaag

SEQ ID NO: 35199 - DNA, 96 bp, Homo sapiens
caaaggactcgccctctgggaggcttaccgagagtttgaaagtgcgattgtggaagctgctcggagccagggtgagcgtcttctttctagagaagc

SEQ ID NO: 35200 - DNA, 75 bp, Homo sapiens
gctgcgctctgcccggcgagtcgggctctggaggaaaagaaaggaaagagaatactgtgccaggcctagactgga

SEQ ID NO: 35201 - DNA, 83 bp, Homo sapiens
ctgacagtggagacactggcattggaacttcctgttctgatagcgtggaagcttgtactcccagagtacctcatccacgcttt

SEQ ID NO: 35202 - DNA, 100 bp, Homo sapiens
gacctggccgtcagccccacgtcgccggcctggaggggcgaagaggacgagggggccaaggcttcctccggggaaattgcaagacctaacatggctgaaa

SEQ ID NO: 35203 - DNA, 90 bp, Homo sapiens
cgcgagtgggagcaccaggatctcgggctcggaacgagactgcacgagcagcccgacggccatggaggctgaagagacgatggaatgcct

SEQ ID NO: 35204 - DNA, 75 bp, Homo sapiens
cacggatcaaggacgagtgttcgtgaaagtgaaccccaaggcggagtatggaagctccaaaaggaaagataccag

SEQ ID NO: 35205 - DNA, 75 bp, Homo sapiens
cgaccgggtgcccgctgtgtgccaggccgggtgctgggcacggtcccgcgagcctaagagtggtgacgccgctgc

SEQ ID NO: 35206 - DNA, 50 bp, Homo sapiens
tctgagggctctgacttacttgagataccctgcagtgcactgtagaacag

SEQ ID NO: 35207 - DNA, 100 bp, Homo sapiens
aagatagccatcctgggtcttggcagcagcattgggactcctccagaaggatgtaaatgaagaccctggagaagatgtggccctcctctctgttagtttt

SEQ ID NO: 35208 - DNA, 100 bp, Homo sapiens
tcgcaacgaacgaaataaaccagaacatcgttcttcaaggtttcgacacagccccaactgctggtacctgagaaactggactatccacacctggattagg

SEQ ID NO: 35209 - DNA, 50 bp, Homo sapiens
atgaatttcaagagagtaccattgggggttggactccatgaaagaattgc

SEQ ID NO: 35210 - DNA, 83 bp, Homo sapiens
gtcggacctcgcagtggcaatgagaaaacacagaatgttcttggtgagaagggccggcggattcgggaactgactgctgtagt

SEQ ID NO: 35211 - DNA, 90 bp, Homo sapiens
gttcaggccatggaagaaatgatgatggaaatgaagtataataccaagaaagccccacttgtctcttcaagaaaatgaggaggaggagat

SEQ ID NO: 35212 - DNA, 100 bp, Homo sapiens
cagccccgaagtgcttcagatgtagaggtatgcagttttgtgtggctatgtatctgagtttgagggtttacaaaacaaaatcaactatgggcacctcttc

SEQ ID NO: 35213 - DNA, 75 bp, Homo sapiens
cacacctgcaatcccagcactttgcatcctggtggggaagaagttttaagggaacaagctggaggtgacgctact

SEQ ID NO: 35214 - DNA, 75 bp, Homo sapiens
ggcataagaaatgcagcgcatggccctgattcttttgcttctgcggccagagttacaggaggttccagtggcatc

SEQ ID NO: 35215 - DNA, 78 bp, Homo sapiens
tcccaagtccctgggactacaggtggtggtaatcattagttccagggtgctctgccatgttgacgcaagctgctgtaa

SEQ ID NO: 35216 - DNA, 99 bp, Homo sapiens
gcgcgtggaggagccggtgctgcagaaccagatccgggagcacgtcatcgccatcgaaggtggaggagttactgatggccatggagaaggtaaagcagg

SEQ ID NO: 35217 - DNA, 90 bp, Homo sapiens
ctcatctctgagacccggaggaggttcgaagctgagtatgtgacaggtaagaatgattgatgttggctgatattggagtgctcattcaca

SEQ ID NO: 35218 - DNA, 83 bp, Homo sapiens
ctggccaacctgctgctggaggaggataacaagttttgtgcagattgccagtctaaagcaacagctgcgaatgcggatcaagc

SEQ ID NO: 35219 - DNA, 75 bp, Homo sapiens
gaaatgttagagaagaaagacagctttgtggaagagattttcctggaaacatgaactgccaagagaggaatggga

SEQ ID NO: 35220 - DNA, 99 bp, Homo sapiens
ttgcgcgcgggaagcagcaccaagttcacggccaacgccttggcactagggttattcagcttctcaaggctggaaaagcgaaggaagtttcctacaatg

SEQ ID NO: 35221 - DNA, 105 bp, Homo sapiens
tttcactgtgaggcacacagaattctctacatttgtgaaagtcagtttctgaggaatttcatcaggagaacatttcaggataggaataggccaagtgctgagaag

SEQ ID NO: 35222 - DNA, 50 bp, Homo sapiens
acccattcccaagtcccacgaggcggaatatattattcgagtgcaaagag

SEQ ID NO: 35223 - DNA, 90 bp, Homo sapiens
ctgcagaagaagctgtctctgctgatagactccttccagaataactcaaagtaccatgcggagaccatcaagaatgtgcgcacagccacg

SEQ ID NO: 35224 - DNA, 80 bp, Homo sapiens
cgccactgcagagcctgtccgtcagtccctaggtatccgcactgctcagggctttttgcctgaattcatcaatggagact

SEQ ID NO: 35225 - DNA, 77 bp, Homo sapiens
aggagcgtcaacagcagcaccatggattactgatctctcattacccaactatctgatggcatcttcggttggactgc

SEQ ID NO: 35226 - DNA, 75 bp, Homo sapiens
ttttgaccgccacattaccattttttcacccgagggtcggctctaccaagtaggcctgttcctgaacttcctggg

SEQ ID NO: 35227 - DNA, 95 bp, Homo sapiens
gtggaggcagccaagaaacgcattcaggagatcattgaggacctgggcgtctctggccgagcctctttttgtggaaaacgacagcagcagcagtg

SEQ ID NO: 35228 - DNA, 96 bp, Homo sapiens
ctccggagagctcaagctcatcgacttcggttcgggtgcgctgctcaaggacacggtctacaccgacttcgacgggtatatctgggaggccggagg

SEQ ID NO: 35229 - DNA, 90 bp, Homo sapiens
gaaaagctgcaggccggtgctcttgcaactgacgcagtcactgcagcactggtggaacttgagggaagacatgtaaggaatttgcataag

SEQ ID NO: 35230 - DNA, 88 bp, Homo sapiens
cggatgtcggcgaagagttcaaccagccttgaaaagatcttttgaggtcgaggaggtcgagacacccaactccaccccaccccggagg

SEQ ID NO: 35231 - DNA, 98 bp, Homo sapiens
cggcccacagtgggggtgtgcaaacccgagagaactggggtgaagttgaacaaattgctatgatgaaaccaaaaggccagactgaacacgatgagggt

SEQ ID NO: 35232 - DNA, 75 bp, Homo sapiens
gtgcaaacccgagagaactgggatgctttcattggatttggaggaaatgtgatcaggcaacaagtcaaggataac

SEQ ID NO: 35233 - DNA, 50 bp, Homo sapiens
gaagttttatgcagtcacaggcagctgtggatggcattcccaatgacagt

SEQ ID NO: 35234 - DNA, 128 bp, Homo sapiens
gacgtcttcaacacggtgggcgccgacatcatccagctgcctcaaatcgtcgtagtgggaacgcagactattgcccagaagaaaagatgtttggttttcacaagccaaagatgtaccgaagtatagag

SEQ ID NO: 35235 - DNA, 82 bp, Homo sapiens
ctgagggcgatggctgctgtggccgtggctgttcgcgagggaactgtggctgcaccatctgtcttcatcttcccgccatctg

SEQ ID NO: 35236 - DNA, 98 bp, Homo sapiens
atcaggtaggctgcgttgaggatctttgctcttccatccgcctttgatcgtcttcctcttcagccatccaggtaaactgtcttgagccccaccctcac

SEQ ID NO: 35237 - DNA, 97 bp, Homo sapiens
tgtcattaagttgagtacagtgttggttcgacaagtggcaacaggatggtgccatgacaatggtgtgaactacaagattggagagaagtgggaccgt

SEQ ID NO: 35238 - DNA, 75 bp, Homo sapiens
aaaaaacttcccaaagaactcctgttacgtctctgctggatgaaccgaatcctaacagtccagccaatagccagg

SEQ ID NO: 35239 - DNA, 100 bp, Homo sapiens
gaaagatcaggtataataatgttctgcagtgaaaagaaattgcgtggtactccaaagattcaggtttactcacgtcatccagcagagaatggaaagtcaa

SEQ ID NO: 35240 - DNA, 98 bp, Homo sapiens
gaggatgcagtggaggccatcaggggccttgataacacagagtttcaaggtaaccaaggagcagtgaacagcagctactacagtagtggaagccgtgc

SEQ ID NO: 35241 - DNA, 98 bp, Homo sapiens
ggcgcagacgcgggcgagctgcggctcggacgccagcggacacgcgggcgagcactctcgagtggaccctgaggagctcttcaccaagctcgaccgca

SEQ ID NO: 35242 - DNA, 90 bp, Homo sapiens
tgtcagttttctgtggatgaagatgagctcacagtgcctgcactttaccccagtagccctgaagtgtgggccccgtaccctctgtaccca

SEQ ID NO: 35243 - DNA, 75 bp, Homo sapiens
cacaaagggaaaactacagccaccacacacaagggtggtgacttcacacgccataatggcactggtggcaagtcc

SEQ ID NO: 35244 - DNA, 75 bp, Homo sapiens
tgacaatccagaaatgccttctaattcaggcaatttgcaaaagagtgcctggaagagctgggatgtctggttgag

SEQ ID NO: 35245 - DNA, 75 bp, Homo sapiens
cttctgtctgacaaactgaaagaggctgagaacgggaagcttgtcatcaatggaaatcccatcaccatcttccag

SEQ ID NO: 35246 - DNA, 100 bp, Homo sapiens
gccgagcgccggaaccggagcaggtagcggtgcacattcaggttcccgagcacaaacatcaagataacgttcactgccctgtccagcgagaagagagaga

SEQ ID NO: 35247 - DNA, 100 bp, Homo sapiens
gccacctcggcctcttcctgttgcaccaggttcttcgaaaactgaagcagatgttgaacaacaagaggggccgtatggggtctttgctggaagagatgca

SEQ ID NO: 35248 - DNA, 75 bp, Homo sapiens
ggctcccactgattctacattacgtaggtcccaccccctccaggacagagaccctggtggaggagaccgcagcag

SEQ ID NO: 35249 - DNA, 82 bp, Homo sapiens
gtctctggagacatcttcagcagcaggttacgggcaggacttgagtggcttcggacagggcttctcagaccccagccagcag

SEQ ID NO: 35250 - DNA, 76 bp, Homo sapiens
caagggcaagatcaccttctgcacgggcatccgcgtggcccatgaatttgctgacacaatatcttccgcctggtgc

SEQ ID NO: 35251 - DNA, 75 bp, Homo sapiens
tggcgttcgctgaggctcagagatgggtggagtttgaacgccatgaccctgtggatgggagaattactgagaggc

SEQ ID NO: 35252 - DNA, 50 bp, Homo sapiens
ggaggcacggagggtggcgaggcaggttaatgttgaagaaggaaaatgcg

SEQ ID NO: 35253 - DNA, 100 bp, Homo sapiens
gcgcgctcccgaggaagagtgagggcgcgacgcgcaccaacggtggagatgtggacgaatgccgaacccacaacggtggctgccagcaccggtgcgtgaa

SEQ ID NO: 35254 - DNA, 98 bp, Homo sapiens
gatggtgctggccacttgcttgggatcctttatcctggtcatcttctatttccaaagcatgggctgatgcctttcgaagcagtcctgatctcaccggc

SEQ ID NO: 35255 - DNA, 99 bp, Homo sapiens
gaaaaaacctaagtggcggaaaaagcttcctggatacacagacgcagcactgcagcctgtggtgttgaggctcacagcgatgccatccagccctgccac

SEQ ID NO: 35256 - DNA, 75 bp, Homo sapiens
tgaacagaccacagtggaccacttctggggaattaaggataacctagacgacataaagaggataattaaagccag

SEQ ID NO: 35257 - DNA, 78 bp, Homo sapiens
tgggtgatacccagtgcagtgaactgcagggatgcttgaagatggaaagaaatttgattcctcccgggacagaaacaa

SEQ ID NO: 35258 - DNA, 73 bp, Homo sapiens
ctaaggccgcgttggggtgagaccctcacttcatccgaggttggaaagaaccatgactgtattcaggaaggca

SEQ ID NO: 35259 - DNA, 98 bp, Homo sapiens
gcggagccggcgctgagaggggctgcggccggagcgggcggctgagacaaaggcgacggagctcagtgatgcccttggaatcagtattgctggaggaa

SEQ ID NO: 35260 - DNA, 100 bp, Homo sapiens
cttcgattcttttctggagctgctgggagggaagaatggagtctgtcagtacaggtgccgatatgacgtgcagttcctggcctcggtgctgcccccagac

SEQ ID NO: 35261 - DNA, 99 bp, Homo sapiens
gtctgcttcgggcctctggaatttagcgctcgcccagctagccgcaggtgagaagccctaccactgcaactgggacggctgcggctggaagtttgcgcg

SEQ ID NO: 35262 - DNA, 90 bp, Homo sapiens
gggaacgtcatcgttatcaccattaactaccgtctgggaatactaggagaagatggtataaactggtccatcagtgacaaagacattgag

SEQ ID NO: 35263 - DNA, 74 bp, Homo sapiens
gagagtcaccacaaggccaagggcaagtgatttgacagcacctgaactcctggggggaccgtcagtcttcctct

SEQ ID NO: 35264 - DNA, 98 bp, Homo sapiens
aaatgccctcaaacgcgccaacggaacaagcacatcatgattgacttggggactggcaacaacaacaagattaactgggccatggaggacaagcagga

SEQ ID NO: 35265 - DNA, 75 bp, Homo sapiens
gcgaagctggccgagcaggctgagcgatacgacgatgacgtccggttgtttgccttcgtgcgcttcaccaccggg

SEQ ID NO: 35266 - DNA, 75 bp, Homo sapiens
ttgacaacgcttccaagcattgctattacaactgtaagccaggagtgactgtgtcagggaaaagggaggcaaggt

SEQ ID NO: 35267 - DNA, 75 bp, Homo sapiens
gtctacaaactcgtcatccacaagaagggctttgggggcagtggaacttctgggtcaaccagttcagagacctgc

SEQ ID NO: 35268 - DNA, 50 bp, Homo sapiens
agaacaatagcttgccctcataaaggaaagaatatggcaaagctgatgca

SEQ ID NO: 35269 - DNA, 100 bp, Homo sapiens
atagtccagaatgtcacaggtccagggcagaggaccaacatgggcattttgtttatgagcaaggtgggtgaactcccttcagccagcaagagtgacccgc

SEQ ID NO: 35270 - DNA, 101 bp, Homo sapiens
gtcagcatcagctggcccaacggcatctcagtggactaccaggacttccaccagttgagtcaaaatctgctgctgtggttagcgagtgccaagaaccggag

SEQ ID NO: 35271 - DNA, 83 bp, Homo sapiens
tctcggaccgcatgctacaggacacggtgctggccgccggttgcaagcagatactggtgcctcaaccatgtccaagggacctg

SEQ ID NO: 35272 - DNA, 90 bp, Homo sapiens
caccatcgagcggaatgcagagcggaccgccaccgccgggaggctgctgtacgacatggtgataaaagaaaatgtggctgaagttacccg

SEQ ID NO: 35273 - DNA, 97 bp, Homo sapiens
cagcagcctattttgagagccttctagagaaaagagagagtgtggatgaggtcaccattgtcaacattttgaccaaccgcagcaatgcacagagaca

SEQ ID NO: 35274 - DNA, 100 bp, Homo sapiens
ggttatttcaacttcacctcggcaacaattacttacctggcccaggaggatgggcccgttgtggtgcacaagcttctcatcgtggtggagctgttgctgg

SEQ ID NO: 35275 - DNA, 83 bp, Homo sapiens
tgatgcctgcagagctgtggcttaccagggattaaagatttcatgtgtgaattgtgtgggaagacattcagcgagaggaacac

SEQ ID NO: 35276 - DNA, 90 bp, Homo sapiens
agcctgcagagcgcgcagtacctccgcttttcatgcaacacccaacacttataagcggaagaacacagaaacagctctagacaacaaacc

SEQ ID NO: 35277 - DNA, 83 bp, Homo sapiens
ggcctcgcaaggcgcttcccctttccagagagccagaaagaacttccccgggcgctgcctggacaggcctgcctgcgtgctgg

SEQ ID NO: 35278 - DNA, 96 bp, Homo sapiens
tcccccttgctgcctgggggttcagacttgattgttggcctgtcaggccatgaggcagctgcacccagaggctattgcagccatccagagcaaggc

SEQ ID NO: 35279 - DNA, 90 bp, Homo sapiens
aggcttttgctgttgtggcaacggggttcttcgaggacctggagcagcggcacaaggcccaggtgctggtcgaggacatcagtgacatcc

SEQ ID NO: 35280 - DNA, 50 bp, Homo sapiens
cgcaaagcttgcgaggtggcgttaggttcaaaccttgtactactcagctg

SEQ ID NO: 35281 - DNA, 108 bp, Homo sapiens
cttccctgtactctcatcgctctcggcctccgacacgacacgaatgcagagtttgagtccagatcccaaagcccagtacacaagtatctacggagccctcaagaaaat

SEQ ID NO: 35282 - DNA, 83 bp, Homo sapiens
ctgtgcttgccaggcctggctccacaaccttggccatggaccagccggctggcctgcaggtggactacgtcttccggggtgtg

SEQ ID NO: 35283 - DNA, 100 bp, Homo sapiens
ccgcttactccagaaacatgggtggaagctgggccagggattgggaaaatctcttcagggaatagcgggttttgcagcaattgttgcatatggattatat

SEQ ID NO: 35284 - DNA, 100 bp, Homo sapiens
cgacaggtgcccagcaagcccattgaccacagcaccatcacttcctgggttcttttgaagtaaccagtgatcttttttgcttaccctcatcaacagaatg

SEQ ID NO: 35285 - DNA, 75 bp, Homo sapiens
cctaaacaaagctctcagcttgatgaggccataggaaaaggatacagagtagagtttcatgaacctgaaacttgg

SEQ ID NO: 35286 - DNA, 82 bp, Homo sapiens
tcacaaatggttctgaagagtatggagcctacgtagattcataaggtaagaatgattgatgttggctgatattggagtgctc

SEQ ID NO: 35287 - DNA, 100 bp, Homo sapiens
caggagatcatgtcgctgaccagcccgtctgccccgcccacatctagaacggaattttctacttctggtcatgcttacactgatacagggaaagcatcag

SEQ ID NO: 35288 - DNA, 82 bp, Homo sapiens
atcctgctggtgggccagtacagcaccggcaagaccaccttcatcagcccgcggcgccatggctcacgtcggctcccgcaag

SEQ ID NO: 35289 - DNA, 98 bp, Homo sapiens
ctccttttccctctccctttccctaagacccaacatgagtgaagtttcctgcaagaaacgggacgactatttggaatggccagagtattttatggctg

SEQ ID NO: 35290 - DNA, 50 bp, Homo sapiens
ggaatttatggtcgcctttttgaatgaggccaaatgtgtgtggaaacacc

SEQ ID NO: 35291 - DNA, 75 bp, Homo sapiens
ctacagaggccagatttgattccaactgtatcacaccaggcaaaatggcaatacctgtgctttggaagtttctgg

SEQ ID NO: 35292 - DNA, 88 bp, Homo sapiens
ccgagcgcggtggtgccctcagccccgtcctcttgtcctcctcagcctcggtggatctaggatccggcttccaacatgtggcagctct

SEQ ID NO: 35293 - DNA, 100 bp, Homo sapiens
gagaggttaaagagacccgttcagagtcctacagtggcaggtgaccccctccgcttccacgcccattatatcgctcagtgctgggcccccgaggacacca

SEQ ID NO: 35294 - DNA, 100 bp, Homo sapiens
gttccgttaccaggatgatttcttgctagatgaaagtggaaataaacatgatgatggtacgcaaagtgattcagagaacgctggggctcacaggcgctgt

SEQ ID NO: 35295 - DNA, 75 bp, Homo sapiens
atattgaatgaaaaggtgaatactccaactaccacagtctataggtatttcaggagccagcagaggaagaacgag

SEQ ID NO: 35296 - DNA, 75 bp, Homo sapiens
cgcccgggaactgctgacgcttgatgagaaggacccacggcgtctgttcgaagatatctcttccaaatgcttgat

SEQ ID NO: 35297 - DNA, 58 bp, Homo sapiens
gcttatggtagccaaatgatgggaggcatgggcttgtatgagctccgacaagaaatgc

SEQ ID NO: 35298 - DNA, 96 bp, Homo sapiens
cccacagataggagggaccccgtgctggtgtgcagggccatgtgtgctatggccttcctgatgcgcttgcctgctccctggtctctctgcatgggg

SEQ ID NO: 35299 - DNA, 75 bp, Homo sapiens
ctcaggaatttatggtcgcctttttgaatgaggtcaccatcagaaaagctaagtttgctgtatagtgaggatcag

SEQ ID NO: 35300 - DNA, 98 bp, Homo sapiens
caccgtctgccaggacccaaaggagcccagggctctctgctgtgcaggctgtctctctgagaacccgaggctggctgaaggcggtgcaggtcctcatg

SEQ ID NO: 35301 - DNA, 90 bp, Homo sapiens
agcttgcccaaaccactcgtacagcatatggaccaaatggttgagactgagctaaagttaatctgttgtgacattctggatgtactggac

SEQ ID NO: 35302 - DNA, 50 bp, Homo sapiens
tgcagagcgcgcagtacctccggctctccagcagaactatctcctactac

SEQ ID NO: 35303 - DNA, 95 bp, Homo sapiens
acgtccgtcgctgctgcaaccccaagatgtcggagacacggtggaaacgcttatggtattagtcactgtaccactggctttactacagaaaggtg

SEQ ID NO: 35304 - DNA, 75 bp, Homo sapiens
ctcagcctccagaaacggtccagaactggattgaattacttagtggttttatgacttacctagtggagcctttat

SEQ ID NO: 35305 - DNA, 76 bp, Homo sapiens
ctggagcctcagttggaagcagccgatccagcctgcggagcctgtggggcaggtccggcctctttggcctaccccc

SEQ ID NO: 35306 - DNA, 74 bp, Homo sapiens
tcagcttagtgcgcgaggcttctcggcagatcgtggccggtggttctgcaggcggaattctccacgagttttga

SEQ ID NO: 35307 - DNA, 96 bp, Homo sapiens
gctgcctcggcggagcagaggaaccacacgctgatcatgttttccaagagataacttcaccaagatgtccagtgataggcaaaggtccgatgatga

SEQ ID NO: 35308 - DNA, 100 bp, Homo sapiens
gcgcaatgatgagaggatgtggtggtctactctgatgtcaatcttgagggctagctacctgacttacatcaagctatcaacggcaatcaagcgtaatgag

SEQ ID NO: 35309 - DNA, 75 bp, Homo sapiens
aagactttaactcagtcattcaacagatggctcaggtagtcagatgcctccgcagccacccgggagccagtcaga

SEQ ID NO: 35310 - DNA, 100 bp, Homo sapiens
cctgcccagcccgcgcctgagaaggtcaaggtggaggtgaagaagtttgtgaagatcggccgcccgggctacaaagggtccccagccccaccccagcccc

SEQ ID NO: 35311 - DNA, 51 bp, Homo sapiens
tattgataattctcaaggattctacgtcagggaggagagagcgatggcttt

SEQ ID NO: 35312 - DNA, 50 bp, Homo sapiens
cttacgtcagctacctatgataaggcccgccatgttcatagaggataaag

SEQ ID NO: 35313 - DNA, 75 bp, Homo sapiens
cctccacccaccggcccaccctacatttagcgcatcatgtgatccggggaaattatcgtttcatgaaactcttac

SEQ ID NO: 35314 - DNA, 98 bp, Homo sapiens
tgcggaagtgcagctgcctcagttcttagcgcagacctggtcctgtagacgggaaggagcctggacacagtgacacattctcaaaggccctgcaggac

SEQ ID NO: 35315 - DNA, 90 bp, Homo sapiens
ccaccgtgcacatccgaatggataatcagcaactgctgtgatgagatgctgcctttaatgctgctgcatgtggtcaaacctccactccca

SEQ ID NO: 35316 - DNA, 75 bp, Homo sapiens
ttttgttgaaaagaacatgattcacaactgctccttgattgcaagatctctacctcatttccgaaatggaaaatt

SEQ ID NO: 35317 - DNA, 74 bp, Homo sapiens
gctgcgagtaggaggagcaggaaataaggagctttgctggcagtagaacacgtgaaagacgatgtcagcatttc

SEQ ID NO: 35318 - DNA, 82 bp, Homo sapiens
aaatgcattgtagctctgagccagggtgtccgcaatgttgccagtgtctgtctgcagattggctacccaactgttgcatcag

SEQ ID NO: 35319 - DNA, 75 bp, Homo sapiens
ggtcttcgtggtgttcgtggcaggcaatgaatcgctccctggctaatgtgattcttggaggctatggcaccactt

SEQ ID NO: 35320 - DNA, 75 bp, Homo sapiens
ccaaagtgcccggacccaaaacaggaagggagtaggttgcatctttgttgaaatgatccaaggagttgctgcttt

SEQ ID NO: 35321 - DNA, 101 bp, Homo sapiens
acttcatctccagagcctttgccaccatgggggagaccgtaatgagcgtcaaaattatccgaaaccgcctcactgggtaatagcctgcagctggtgttttg

SEQ ID NO: 35322 - DNA, 102 bp, Homo sapiens
tgtcagacgcagccgtagacaccagctccgaaatcaccaccaaggggctttgaccacgacctttgaagagcttcattttgagatcaagccccacgatgactg

SEQ ID NO: 35323 - DNA, 75 bp, Homo sapiens
gaagctggggcggcaccggatcaccaagacggagagtcaagggtccagagaaggaggagaagttgagacaggcgg

SEQ ID NO: 35324 - DNA, 101 bp, Homo sapiens
gattcccaccttctttatctgaaacaaacaagttggcaaaagcagcttttgatgatgcaattgcagaactggatacgctgagtgaagaaagctataaggac

SEQ ID NO: 35325 - DNA, 100 bp, Homo sapiens
ccgggacctgtgacagggctggtagcagcgcagaggaaaggcggcttttagccagaagaactgatgaccaccccaattttacagcccactgaggccctgt

SEQ ID NO: 35326 - DNA, 75 bp, Homo sapiens
gtgggagagagatgtactccaaagagaagaggactcttgctatggttcagtgagaaagatcagtctaaagaaaag

SEQ ID NO: 35327 - DNA, 83 bp, Homo sapiens
ctggaacaactggtgctgatggctcccttggcgaaggagtctgtttttcaacccaggaagagcaattgggtgccacgccgagg

SEQ ID NO: 35328 - DNA, 75 bp, Homo sapiens
aacaaacgagggttcccgggattggaccgacgcagccatggatatgaacgagactgccaaacaagaagatatttt

SEQ ID NO: 35329 - DNA, 76 bp, Homo sapiens
ccactcagctgacatatgaaggactcattgatgaaatttatggcattcagaacaaacctctaaaatgcagacctcc

SEQ ID NO: 35330 - DNA, 82 bp, Homo sapiens
accctgcctcccctgcgtcccgccaccggccgcttctgtcctcgctcttttgaaacagatggtcaccatgtttagatattag

SEQ ID NO: 35331 - DNA, 110 bp, Homo sapiens
cgcggcgacgtcgggccgattttcccaggatgacagagctgaggcagagggtggcccatgagccggttgcgccacccgaggacaaggtgtctgcttttggggcagagttt

SEQ ID NO: 35332 - DNA, 144 bp, Homo sapiens
tatggcaacttatgcaagaaactgttgaattagacccgtttcctatagatgagaaaccatacaagctgtgctaaaagatggcggcaaggcagcccaggcaaatgtaagaataggcgatgtggttctcagcattgatggaataaa

SEQ ID NO: 35333 - DNA, 100 bp, Homo sapiens
atggagatgtcaacagagctatcaatgttcttctggaaggaaacccagacacgggaactgctcgcagaaagaagaaggtggttcatagaacagccacagc

SEQ ID NO: 35334 - DNA, 51 bp, Homo sapiens
tcaggcatcctcatataattaaactgagccctctggcacaaatggaagaag

SEQ ID NO: 35335 - DNA, 59 bp, Homo sapiens
ggtggccgtggaggcagaggtggcatggggttcttgattattacagacctctttctgaa

SEQ ID NO: 35336 - DNA, 88 bp, Homo sapiens
cttggatccacttacagaaactatctccatccagttcctggtgtacaggcgcagcaccgccgcctcggagcttgagcccctcctcccc

SEQ ID NO: 35337 - DNA, 74 bp, Homo sapiens
acatgtggtggtggttgcacagtcgccttttccagtttggagagacgttacagcccacctgaggatattgacca

SEQ ID NO: 35338 - DNA, 89 bp, Homo sapiens
acctctatgtctcagatgcattccataaggcatttcttgaggaagatgttgaccctcaaaaggttgcattccttctgcataaacagtgg

SEQ ID NO: 35339 - DNA, 43 bp, Homo sapiens
ctgctgcttgctgaccaaatgaatgtatgacaacatgtccaca

SEQ ID NO: 35340 - DNA, 74 bp, Homo sapiens
gattgaaatctaatgaaccgaaactttgggcaagccaaattagagctgagagttgctgtagcaaaagtggaaga

SEQ ID NO: 35341 - DNA, 75 bp, Homo sapiens
agcctcaacgagaactcggagggcaccggagtgtaatggagagagggctaaagaagaagcaattacacattttga

SEQ ID NO: 35342 - DNA, 100 bp, Homo sapiens
ccctatccagacggctgcccttcaagtaccaggtgttcatttagaagaaagcaacactaatgattcaaacagcttcctgaattttaattttgtgttgtct

SEQ ID NO: 35343 - DNA, 105 bp, Homo sapiens
gaagtgatcccaaaaccgagtcgttgaggaaaaatgctcagaaattactctcagaagccttggaattaaagggatcgcttacacctgagacgaactacagaacag

SEQ ID NO: 35344 - DNA, 97 bp, Homo sapiens
tggccaagaagagagatcctgtttctcacatttgtttcattgaagaaatagttaaggttactcactataaacaatatccacccaacacaagcaaagt

SEQ ID NO: 35345 - DNA, 90 bp, Homo sapiens
cactgctgccgctgctaaacatggcctacaagttccgcacccacagccctgatgtgaggtgaggatgagccgcagccctttcctgggaca

SEQ ID NO: 35346 - DNA, 90 bp, Homo sapiens
gcaggaggatgggctgcttgtgctgtgccgcattgccagcaatgtcctcaacaccaaggaccctgatgctcccataagacagaaaatgcc

SEQ ID NO: 35347 - DNA, 80 bp, Homo sapiens
gaaggtctcagagctttacgatgtcacttgggaaggtgccagcgagatttcagattcctgtaaacctctaaagaaaagga

SEQ ID NO: 35348 - DNA, 101 bp, Homo sapiens
cttgttcgacccaacagcatcgttcctctttccaagaaggtagaagatgacagattattgaggttgtcccaaaagaagttctgtgctggtgggtcatatgt

SEQ ID NO: 35349 - DNA, 75 bp, Homo sapiens
cagttccgtatgtaccacaagtaacagcatatggaaaagaaggtgtgaaaatgaacttcatagatcggatcttta

SEQ ID NO: 35350 - DNA, 75 bp, Homo sapiens
agcgtttgcagaatctgtcacagagggagatgtcaggtgggagaaaggaagcccctccgcttggccagaatggag

SEQ ID NO: 35351 - DNA, 100 bp, Homo sapiens
gggctctgatctgtgcgacagagaagggaaaaggccgaggcatcagcgtgtgaagaccgcaaagacgatcccgagtacagttgtgaacagcattgctgct

SEQ ID NO: 35352 - DNA, 96 bp, Homo sapiens
gcaagtttaatcagacctgctcacacttcagaatagagaaggactttgcagatattttggtgcagccaacgttggaggagaacaaaggaacttcag

SEQ ID NO: 35353 - DNA, 73 bp, Homo sapiens
ttgtaggacctcaactctctatgtttgccagtggtttattttacagggagcccacctacgatgcagaattcca

SEQ ID NO: 35354 - DNA, 82 bp, Homo sapiens
agagattcatctttcatgcagtgacatgttgataaaaaatgatggacagcccagaaacttgcaggacctgtgccgaattaaa

SEQ ID NO: 35355 - DNA, 51 bp, Homo sapiens
cacaggatgctgtagtagcaaatcaggtatgttcgcaattcgtgctgatca

SEQ ID NO: 35356 - DNA, 100 bp, Homo sapiens
atctgcaaccgcaacatcgaccagaccatgctctccatcctgctcttcttccacaggcttgctatgggtgttctccaggatcaaagtgtgactgcagtgg

SEQ ID NO: 35357 - DNA, 50 bp, Homo sapiens
attcgcagtggtcgcttcttctccttgacgtaaaattcatcctgatcaga

SEQ ID NO: 35358 - DNA, 100 bp, Homo sapiens
gcccgggcgtccgctcctcagcggatgtggcagccccgagccatggctctcgccgtccgagtcgtttattggctgcgggcctctcgggtgcttcttgtcg

SEQ ID NO: 35359 - DNA, 82 bp, Homo sapiens
agcagcgcccgtctgcttcgggcctctggaatttagcgctcgcccagctagccgcagcagggtttccaggcctgaggtgccc

SEQ ID NO: 35360 - DNA, 98 bp, Homo sapiens
tcaacatgattgcatttgaatggttcctctggagattaaatgtacttcacagaacctcagcgagcggactccagttatattccgtgctcttgtcggca

SEQ ID NO: 35361 - DNA, 83 bp, Homo sapiens
gtcagagcccggggacggcgaggccctcatgtaccacacggagcttactccacgggaacagcctctagataatctgagttgtt

SEQ ID NO: 35362 - DNA, 88 bp, Homo sapiens
ttcatcatccctgtggagattgatggggtggtccaccaggggaggagccccagccccgcgacgaggaggaagcggagctggagctgct

SEQ ID NO: 35363 - DNA, 97 bp, Homo sapiens
tcaacaatcaccattttggaagcccctgtttgccaggcgtgaaaaaatacctcactgtgacctacgcatgtgatgaggacggggacttggttgcctt

SEQ ID NO: 35364 - DNA, 100 bp, Homo sapiens
agcaccccatacggaagggtctgcatcacaaggcagccaacatgcctgactctgagctattcgagctcatctctgagaaccgttccatgtctcggaagct

SEQ ID NO: 35365 - DNA, 97 bp, Homo sapiens
tcttctctgatatcttcctgtcatggttccccttctactacatgctgaagatgctgtatatgacttgcctagctccagtgaagaccagttgctagaa

SEQ ID NO: 35366 - DNA, 100 bp, Homo sapiens
agaatctctccaaagaaattcctcaaacagaatttcacacagggtattccatggagaatgaggtgtgactgaagaaatatcaaatgtttcctagtaagac

SEQ ID NO: 35367 - DNA, 100 bp, Homo sapiens
aatacttgctggatggtggactcagagaccaataaaaataaactgcttgaacatcctttgactggttagccagcaatggctgccatccggaagaaactgg

SEQ ID NO: 35368 - DNA, 107 bp, Homo sapiens
gccagagtcacacacggtcctaagagctgggcaccaggaagcgaaggctggtgtcgtgaaaactacccctaaaagccaaaatgggaaaggaaaagactcatatcaac

SEQ ID NO: 35369 - DNA, 83 bp, Homo sapiens
ggccacttgcttgggatcctttatcctggtcatcttctatttccaaagtacatttccaattgatttaaccaagacacggctcc

SEQ ID NO: 35370 - DNA, 74 bp, Homo sapiens
tgggaattgcttcgtttgccattttcttatggagaactgtccttgttggctacttctacaagtccgaacagcca

SEQ ID NO: 35371 - DNA, 100 bp, Homo sapiens
ccttactggttgcctaattttatggatgtcttcacgtggtctttaccgtttgttggagaaaaagtgtggcaaaggagcagagaactttgacaagttcttc

SEQ ID NO: 35372 - DNA, 100 bp, Homo sapiens
cgggaaaggtctgcagtatgaatgcacagttaattggccttggtcctcacagctccaaaaagaaacaggatctcgataagctctatgagctgaagtccaa

SEQ ID NO: 35373 - DNA, 123 bp, Homo sapiens
gcaaaagccccttgccatccctgtgtgacagcaatgaggtgaacccaggggccgaagcccacccagggagttgatggtgtcagctgtgatgcatgtttaaaaggaaattttcgaggtcgcaga

SEQ ID NO: 35374 - DNA, 83 bp, Homo sapiens
tgcgtgccctacttcaaggataagggcgacagcaacagctctgccggctggaaggtgagaagccctaccactgcaactgggac

SEQ ID NO: 35375 - DNA, 100 bp, Homo sapiens
cagaaactgaacaagggtggctgggaccatggagacacccagagtatccagcacatgcttgactatctttggcagaggaaccttcgccagttcatctata

SEQ ID NO: 35376 - DNA, 98 bp, Homo sapiens
tggctttctgcgccatcctgcaccgccaccggcccgacctcatatgccggtggccgtgggtccctacggacagtcccagccaagctgcttcgaccgtg

SEQ ID NO: 35377 - DNA, 51 bp, Homo sapiens
gatggtctcaatctcctgaccttgtgatccgcccgccttggcctcccaaag

SEQ ID NO: 35378 - DNA, 100 bp, Homo sapiens
gggccctgctggaccagctcatgggcacggctcgggacgaatgaattcccagttcctgagcagttcaagaccctatggaacgggcagaagttggtcacca

SEQ ID NO: 35379 - DNA, 100 bp, Homo sapiens
gaccgagaccgtgaccgagagcgtgaccgagagcgcgaatatcgtcatcgttagaagctgttccatttcctccaagtcaccggcttacagcaaaagaagt

SEQ ID NO: 35380 - DNA, 118 bp, Homo sapiens
caatgttggagccgtctgcaaagtgtccccggcaagaagggccaattcctgtccccccagcagcatggcatcgtgtgctgaaccctctgagccctctgccccactgcccgccggggtc

SEQ ID NO: 35381 - DNA, 74 bp, Homo sapiens
gatcgtggggcccgcgaggcgggcagccggggcgtccaggagaaatatggggagttgatgagcatcagaaaaac

SEQ ID NO: 35382 - DNA, 100 bp, Homo sapiens
gaagagcgacaagccgctggcagccgcggatctcaccgccgctcagggttctccttactatgacaatgtccgccccctctcttaccctgattcggatgct

SEQ ID NO: 35383 - DNA, 100 bp, Homo sapiens
taatgggaacatacgatgatggagcaaccaattggaaagatccaaataatgacttcagaaaaaacttgaaagtaacagcagtgcctacactacttaagta

SEQ ID NO: 35384 - DNA, 100 bp, Homo sapiens
ttgcaacggagataaattcccggaaccgcgattcggcgtgtcagatatgagcttccagccccctcctctggtcaaaaaaatgacattactgcatggcaag

SEQ ID NO: 35385 - DNA, 99 bp, Homo sapiens
caaactgaaaacgcaagccaggctaaacagttggcagcagcctcgtcttacagcgtgactgcaaagaaaaagacttttgttttgcaaaagaaaagcagc

SEQ ID NO: 35386 - DNA, 100 bp, Homo sapiens
ccatgatgccccacttggtgaatggagatgcagctcagcaggatttcaagaaggttcttcagaaaaatgttgtggcttatattagcctccacagtcccat

SEQ ID NO: 35387 - DNA, 100 bp, Homo sapiens
gcacctcagcctgactctgcagatgaaaggcggccttagcaacatgctgttccagtgctccctacctgacaccacagccacccttggtgatgagcctcgg

SEQ ID NO: 35388 - DNA, 82 bp, Homo sapiens
gagccgcccagccctgccagctgcgccgggacgaacaccttccaccatgaccacctcagcaagttcccacttaaataaaggc

SEQ ID NO: 35389 - DNA, 75 bp, Homo sapiens
gaagaaacttaatcagaatagcaggtcagagggtataatagactacattttctattctaaacctcagctgaacac

SEQ ID NO: 35390 - DNA, 75 bp, Homo sapiens
gggaagctctactggggagatgccaagacagacaagatcgaggcgagggcacttgggggtcattatttgagatcg

SEQ ID NO: 35391 - DNA, 100 bp, Homo sapiens
gttcgtccgcggagatctctctcatctcgctcggctgcgggaaatcgggctgaagcgactgagtccgcgatggaggaatataaatagtttctggaaagga

SEQ ID NO: 35392 - DNA, 136 bp, Homo sapiens
caagctgaaccccaaacccaaattcttcgttctgtgcggcgacctcatccacgccatgccaggagcagtgaggagaatgaataccttccaagaccagagtggcagctccagtaatagagaaccccttttgaggtgt

SEQ ID NO: 35393 - DNA, 75 bp, Homo sapiens
gtcccatgtttttgagtatatccgttctgagacatacaaatagagaatgcagttgaaactaattttgtggataga

SEQ ID NO: 35394 - DNA, 75 bp, Homo sapiens
agacaattgtcattaccaagacaacccctcaatctgagatgggaggctgtgagtaccagagtgcccactggttcc

SEQ ID NO: 35395 - DNA, 74 bp, Homo sapiens
aaagaagtagaagaaaactggtctaagcatttctcatcagggactgctgagatgtcctctattcttgaagagcg

SEQ ID NO: 35396 - DNA, 90 bp, Homo sapiens
ggcggcgcgccgcagctgcccaggccggaccgggccgggcgcccgcagcgtttgcctcagcatggagggcggggccgcggcagccacccc

SEQ ID NO: 35397 - DNA, 100 bp, Homo sapiens
atgggaaggaggccgagccgggatctcaggtcctcgggggcggcggccacgccaaggacgggctgggatatgaagaacaacagcctgaggttccaattct

SEQ ID NO: 35398 - DNA, 100 bp, Homo sapiens
tgcgcggactgcggcgccccggaacacagatatgtagaactcttcttgaattctacagcaggagcaagcggtggtgcttatggtagccaaatgatgggag

SEQ ID NO: 35399 - DNA, 50 bp, Homo sapiens
tccctgatggcctcagaggaggagcccgaaaacctcctgtatgccacgcc

SEQ ID NO: 35400 - DNA, 75 bp, Homo sapiens
ctgatgatcacgcagctggctggcttcagtggaccaaatgagtccctggaacgccagatgcgtgaaatggaagag

SEQ ID NO: 35401 - DNA, 98 bp, Homo sapiens
gagctacagaggcacaaacgtacacacacaggaccctgatgggctgagggagctcctagaagactgttgggatgcagacccagaagcacggctgacag

SEQ ID NO: 35402 - DNA, 98 bp, Homo sapiens
tatctccatcaagctgcaggaggaggagagagaaaggagagacaattatgttcctgaggtctcaattgtccgcagcacgaccatcaccctaacaccca

SEQ ID NO: 35403 - DNA, 82 bp, Homo sapiens
gggacccaggagtttcctgtgtccagcgctgccggagccgcctgaggtgaaaggtgtagcagtcactcggcctacacccaca

SEQ ID NO: 35404 - DNA, 100 bp, Homo sapiens
tgtaaagtcaccaacgagatcttccgccactacgacggccaccatgctgccactgggctcagagcccgccctgaatgagctgctgcttcgcaaggaggag

SEQ ID NO: 35405 - DNA, 100 bp, Homo sapiens
tgttaatcaacacgagaccagtacaagcaaatctgtttttgagcctgaagattcttcaatagtagataatgagggaaatgtttcaacgtgcgcaagcgtt

SEQ ID NO: 35406 - DNA, 90 bp, Homo sapiens
gagaatttatcctcaagagtcagctggcaggttttccagcttgcagctcatctggtgtactggggcaaggccatcatcatctacccgctg

SEQ ID NO: 35407 - DNA, 136 bp, Homo sapiens
ccgccatcaaccgccagatcaacctggagctctacgcctcctacgtttacctgtccatggtgctgatgtatggacagccgtatcgtgttaccttagagcttgagctgccagagtcccctgtgaatcaagatttggg

SEQ ID NO: 35408 - DNA, 100 bp, Homo sapiens
ctgttgtacatccactggacctaaaatatgaccctgatccagttggtacgccttattacatgtctccagagagaatacatgaaaatggatacaacttcaa

SEQ ID NO: 35409 - DNA, 98 bp, Homo sapiens
ggcggtcgacatgttccaggtcccggatagcgagggcggccgcgccggctccaggtcgcaatggaagaagagatcgccgcgctggtcattgacaatgg

SEQ ID NO: 35410 - DNA, 80 bp, Homo sapiens
agatggcggcagggaccagcagttactgggaaggtaaccaatggtcaaggtgaaaataagatgaaaaatttacctgtgcc

SEQ ID NO: 35411 - DNA, 75 bp, Homo sapiens
acctgcctggctagccggcgacttgagtgacgagcctggaggagaaacccaccattgcgtttgccacaatccccg

SEQ ID NO: 35412 - DNA, 100 bp, Homo sapiens
atggagtcagaacctgtactcttattcagttccttggtgatgctattgttttgccagcgggagcacttcatcagcaatgtgtattcctccatcatatgct

SEQ ID NO: 35413 - DNA, 82 bp, Homo sapiens
cacaggctggatgaagattgggggagcactcaacatcagtgatagaaccatacctcagccccccattcttcagctttcagtg

SEQ ID NO: 35414 - DNA, 97 bp, Homo sapiens
gggatctttccggatcaatccagatggcagccagtcagtggtggagctgtctgtggaagcccgtaaagagatgactagaaaggctattaagacagtc

SEQ ID NO: 35415 - DNA, 100 bp, Homo sapiens
tttgaagacaatcgtcacttatacagcttccatgcctatggctgttctaaaattgggccaaatatatccatttcagagaggctttttctgtaaagacaac

SEQ ID NO: 35416 - DNA, 98 bp, Homo sapiens
cctggaagaaggttgccgggccgtttcaatggtggacattctctctcttacccagctgcgaagactagaagaacttgatttaggaaacaatgaaatat

SEQ ID NO: 35417 - DNA, 74 bp, Homo sapiens
gaggagtagtcgctggagtccgcgcctccctggagagttaggttctgtggatgaaatccttggacccttgacgg

SEQ ID NO: 35418 - DNA, 131 bp, Homo sapiens
tgtttcactggaggacacggctaagaaggaagtccaccagcctgccaagatgaattgccttgaaggtactccaaagattcaggtttactcacgtcatccagcagagaatggaaagtcaaatttcctgaatt

SEQ ID NO: 35419 - DNA, 100 bp, Homo sapiens
acccagagcaaattgagacgtcccggattgacttctaaggactcttggtacatgaggaagaaacccggaaggggaagaggaaagcaaaggcgtcaggaat

SEQ ID NO: 35420 - DNA, 98 bp, Homo sapiens
tcatcatcaacaaccagacagggcagcacgccgtcattgacatcaatgccttcccagcaaattgtggctactaatttgccccctgaagatcaagatgg

SEQ ID NO: 35421 - DNA, 100 bp, Homo sapiens
tgcaagtcaaagagcagagcatcctggaactgggatctctcctggcaaagactggacaagctgcagagaagctccatgaagaaattgacagggtgattgg

SEQ ID NO: 35422 - DNA, 134 bp, Homo sapiens
agaagatcggcttgaaattaccaactgctttcctttccctcagcacacagaggatgatgctgactttgatgaagctgccactggtgacatgccaacttaccagatccgagctcctactgctgctttgccacagg

SEQ ID NO: 35423 - DNA, 90 bp, Homo sapiens
gcactgattatgtttcatcaggaccatctgttcggaaccccagagcacgagtagtagtcttaagaggtctcgctctgtcgcccaggctgg

SEQ ID NO: 35424 - DNA, 74 bp, Homo sapiens
ggggagtgcgcggcggccgcagctgccacaaaccagaaatgagccgtcagactgctacagcattacctaccggt

SEQ ID NO: 35425 - DNA, 114 bp, Homo sapiens
cccaacccaaatctggaggatgaggaacccggagtctgcatttcttacacggatgataccatcggggaccttaagaagctgattgcagcccaaactggtacccgttggaacaag

SEQ ID NO: 35426 - DNA, 75 bp, Homo sapiens
tgggggaccagcagttggaccaagaggaaatctgggtgcaagaattgtttatccgtgattatggagagattttta

SEQ ID NO: 35427 - DNA, 75 bp, Homo sapiens
gatgagcagcatgtcagaccagaccgtccgggtgaaggttggcttttaggacactagtaagaaaatatagttgtg

SEQ ID NO: 35428 - DNA, 74 bp, Homo sapiens
aagttatgtggctcaaatgattgtgtgctacagttgaaactccagcagcgccggacccgggaagaactggtgag

SEQ ID NO: 35429 - DNA, 100 bp, Homo sapiens
aaacctcagacagatcgccggggaggcagcgcgggatcccagcctcaggcgtgcgcggacggtgtgcgggaccagtcctgcctctgttgtagaagacatg

SEQ ID NO: 35430 - DNA, 100 bp, Homo sapiens
aagtattgctgtgggtgctgggacttcccgtccgcggcgtggaggacctgcctagagctggaacgttacctccagagcgagccctgctatgtttcagcct

SEQ ID NO: 35431 - DNA, 75 bp, Homo sapiens
aagggagtccagctggaaggaaggtactccaaagattcaggtttactcacgtcatccagcagagaatggaaagtc

SEQ ID NO: 35432 - DNA, 104 bp, Homo sapiens
aggaatccagcaagctagaagacctgttgcggaaggttcgcgccaaggagaccaggaagcgagcactcagcagccaccaaaaccctcaacaggggcatctctga

SEQ ID NO: 35433 - DNA, 119 bp, Homo sapiens
ccgcagccgcccagaccgcgcagcgcgggaggcaggttccgcacggcccgagtgccaggcatggacggggacgctgctgctgggcacatgccttctgtactgcgcccgctccagcatgc

SEQ ID NO: 35434 - DNA, 71 bp, Homo sapiens
cctcacggtcctcctggctgtgctcatatacacctggagcttgagaagctggcttctcgaaagttgagaat

SEQ ID NO: 35435 - DNA, 80 bp, Homo sapiens
cgccgaagaagcatcgttaaagtctctcttcaccctgccgtcatgtctaagtcagagcctaaattatacagatctgtgat

SEQ ID NO: 35436 - DNA, 90 bp, Homo sapiens
ctctgagccccggcggcgcccgggcccacgcggaacgacggggcgaggtgctggagaatctggtaaaagcaccattgtgaagcagatgag

SEQ ID NO: 35437 - DNA, 50 bp, Homo sapiens
accgagatctacgagttccatgtgagtgaagatggcagagaggacgtgac

SEQ ID NO: 35438 - DNA, 100 bp, Homo sapiens
tccaggaaaccacccacgtccccttcgagtgtcatggagaaactccagctgggcccagagattctgcagcgggaaaatccaaggcttatttatgccaggc

SEQ ID NO: 35439 - DNA, 100 bp, Homo sapiens
tcagatgggatctttccggatcaatccagatggcagccagtcagtggtggagacagaagcattaaaatgcgtggctcaggctagcaagaacagatcactg

SEQ ID NO: 35440 - DNA, 101 bp, Homo sapiens
gagtgtgaccgcctgggccctggcatggccgacataccttcctacagcaacttcccactccaggtggccagacgggagttccagaccagtgttgtctcccg

SEQ ID NO: 35441 - DNA, 51 bp, Homo sapiens
gccatattgaaagaagctgagagagagactgctgatcttggacttgatatt

SEQ ID NO: 35442 - DNA, 82 bp, Homo sapiens
cctcgaggtgcgcgccggcccggactcggcgggcatcgccctctacagccgtgagaagccctaccactgcaactgggacggc

SEQ ID NO: 35443 - DNA, 75 bp, Homo sapiens
caacactttaaaagtttggtcagcagtcacaggcaaagtgtcattccacacatccacaaatctctgattgggaag

SEQ ID NO: 35444 - DNA, 100 bp, Homo sapiens
cgcgaatatcgtcatcgttagaagcagcctgaaaaggtgatggcaaagcagatggagttcctttgcaaccaagctggctatgagagactgcagcatgccg

SEQ ID NO: 35445 - DNA, 100 bp, Homo sapiens
actgctggctgcttccagtgttcgccgagagatagcaaagccattgtggatgggaacctgaagctcatcttgggtctggtgtggacgctgatcctccact

SEQ ID NO: 35446 - DNA, 134 bp, Homo sapiens
cccagacccagacagaggaggagatgaccagatatgtccaggagctccaaaagcatcagacaacagtgagctgggacggagacaagctccagtgtgtgcagaagggtgagaaggaggggcgtggctggacccag

SEQ ID NO: 35447 - DNA, 82 bp, Homo sapiens
tccagcacctacgtcccgctgccgtcgccgccgccaccatgcccaagagaaaggtctcctctgagcctccggcctccataag

SEQ ID NO: 35448 - DNA, 73 bp, Homo sapiens
gcaacaggagatgtgtgcacactgatgatgtgcctccaggacaaaggactgaaggccttacgaccggatatgg

SEQ ID NO: 35449 - DNA, 98 bp, Homo sapiens
aaggtaccacaaccccgattgctttcgtgaaggttgtaagccaatgttgtgaggcttcaagttcagacatcactgagaaatcagatggacgtaaggca

SEQ ID NO: 35450 - DNA, 99 bp, Homo sapiens
gcggggaacgggctgctcatgacaccctgctacacggccaatttcgtggccccggaggtgggaaatacaccaagagtgatttcaaggagtatgaaaaag

SEQ ID NO: 35451 - DNA, 90 bp, Homo sapiens
gtcgctgggtgcgtggggctgcctcgccgcgtctcgccacggagcggcattgcccccgaatgtccagattatccctgtttttgtgaccaa

SEQ ID NO: 35452 - DNA, 100 bp, Homo sapiens
ctcaagcggaggcgcgcggaacagtcgccgaggcgattcccgcccagatcttcagtgtctattggatttttccaagagaaagtttgtaaaattccttaca

SEQ ID NO: 35453 - DNA, 100 bp, Homo sapiens
ctgggttgtatccatgctgctttcatttttgtgatgactatgtacacacagctttatcatcggatcctgataacttaagtgactctctcttttccggtga

SEQ ID NO: 35454 - DNA, 136 bp, Homo sapiens
acgccgggcctgccgaaaacccgactttccctcatggctggtcgtctccagactccacactcctagcaaaagacttgcactatctgccagatgctgcttcctaaccagtgcagttatgcatcacaccagagaatcc

SEQ ID NO: 35455 - DNA, 75 bp, Homo sapiens
acagccacactctgcaccgctaggccgtccccgaccttgcctgaacaagtggacagaggactgcagaaaatcaac

SEQ ID NO: 35456 - DNA, 75 bp, Homo sapiens
ttggcaagaagcagatgcgcattttgatggcatccgcacttccactaatagccaagtagacaagctgaccctgtc

SEQ ID NO: 35457 - DNA, 100 bp, Homo sapiens
gagattctggcagccaccatgaaggccccggagaagaagaaagtggacaagctgaacgctgtgagaagccctaccactgcaactgggacggctgcggctg

SEQ ID NO: 35458 - DNA, 100 bp, Homo sapiens
caaatgcctcctgaggatttctgtgcctggaaaatatctgttaacagactgcttttacacctacgcctggaggaggcagaggccaggagggagaggtccc

SEQ ID NO: 35459 - DNA, 75 bp, Homo sapiens
cggaagcctgcgtaactttctcccttgatccgggagtctttccactgggtgtaccttccggtttcccagcacggc

SEQ ID NO: 35460 - DNA, 90 bp, Homo sapiens
tttcttggaatttgtggaggattttattcaggttcctaggaatctcgttgggagacccacctgcagctgtgcactgggtttcactgggcc

SEQ ID NO: 35461 - DNA, 83 bp, Homo sapiens
ccccaacggggaggccaacgtgaagaacaaatggagctgctcctggtgaacaagctcaagtggaacctggccgcaatgacccc

SEQ ID NO: 35462 - DNA, 85 bp, Homo sapiens
aggcaggcgctgagaaggacgcgcagtccatctctctcaggtaccagcaactaaggtttcagagctgaaccctaatgcagaagtg

SEQ ID NO: 35463 - DNA, 87 bp, Homo sapiens
gtaaaaccaatcaccaaagactacattatgaacccaccactgggcaaagaaagtatccctttcaggcacagctgtttggtctagaaa

SEQ ID NO: 35464 - DNA, 134 bp, Homo sapiens
ccgagcctcccgccgtcgccatgggccagaacgacctgatgggcacggccgaggacttcgccgaccagctggcaaaactcaaggctcagaaactgcagggcccccaaaaaagaaaaggaagaaaacacaaaaga

SEQ ID NO: 35465 - DNA, 98 bp, Homo sapiens
gacgaatcgttaaacatcttaggtcagtctgcgctcctcagaccaccggcaggtgaacagcctgatgcagaccgaggagtgcccacctatgctagacg

SEQ ID NO: 35466 - DNA, 100 bp, Homo sapiens
agacccccccctcggctcggcgccttctgcgtctcccggctggtggggaagcctctgcgccgccggcaccatgagagttctaaagttcctgttgcttcag

SEQ ID NO: 35467 - DNA, 100 bp, Homo sapiens
gcccccggcccaagggcgacttctccagccgggcccgcgaagtgaacccagcccttgctgacatctacacagagcacgcccatcaggtggtggtggccaa

SEQ ID NO: 35468 - DNA, 60 bp, Homo sapiens
aggattctacagatatatgcaagcataaacttggaggaggcagtggagagagcatcctgg

SEQ ID NO: 35469 - DNA, 90 bp, Homo sapiens
agaatgcactgcacaatattaaaactttacctgggttacagcagatgaatggaacagcaaccatacgatagaaatagagataaatcagac

SEQ ID NO: 35470 - DNA, 117 bp, Homo sapiens
aacatttaaagatgaagaactctttccacttcaagtagtcatgaaaaaactggatcttattagtgaacttagagaacgaattggcagagggggtcgatttgggaggaaaggtgtggc

SEQ ID NO: 35471 - DNA, 82 bp, Homo sapiens
gtaatcaagcagcagccagagaatgggaggcaccagaagtcatcagaatgcaagataaaaatccatacagctttcagtcaga

SEQ ID NO: 35472 - DNA, 100 bp, Homo sapiens
gggaggacgaggtggacgtgggcgtggtgggcgcccaaaccgtggcagcaggaccgacaaggctttatcctgtggataaacgcagagtgaacgagtttgg

SEQ ID NO: 35473 - DNA, 74 bp, Homo sapiens
gttatttaggaggattcgatggcaattttttgtggaacagaattggagcagcagaggtgagaactcagaagaga

SEQ ID NO: 35474 - DNA, 99 bp, Homo sapiens
ttggaaaagattatatcccagttgccattaatacactgttaaatgtgaaattaagtgagacagaaaatggcaagcatgtctctatattggatctacctg

SEQ ID NO: 35475 - DNA, 82 bp, Homo sapiens
ttggagttactggtatgccttgggcttccgttacaagatgaggtctgtgtatgctcacttccccatcaacgttgttatccag

SEQ ID NO: 35476 - DNA, 96 bp, Homo sapiens
ctatttacccagaagtagtccatatgatccctcatccacctacatcaggcaactggagagcaaagtgaggctgctggagggtgacaagctcctcgc

SEQ ID NO: 35477 - DNA, 100 bp, Homo sapiens
ctaacatcacctgcttcatccttgtttaatgactttggtgccctcaacatctctcagagacgaaaggacagcaacccctttgatgccactgcagggtatc

SEQ ID NO: 35478 - DNA, 51 bp, Homo sapiens
cggctgcggtggctgcgggactgacgagcataagggccatgtgttctgaaa

SEQ ID NO: 35479 - DNA, 51 bp, Homo sapiens
gcctgtgatggcatctttcatctaacacatgagggttactaccagggtgga

SEQ ID NO: 35480 - DNA, 80 bp, Homo sapiens
gtcccgccccggccggctggcggtcacctggcacaccagcgcccgcaggatgcccaggctggaggctctcaggtcatttt

SEQ ID NO: 35481 - DNA, 76 bp, Homo sapiens
gcgcagtctttaaccatggcgtccctcttcaagaagaaaaccgtggatgatttggtgcttccagatgtgagttatc

SEQ ID NO: 35482 - DNA, 100 bp, Homo sapiens
agaacgtgccatggagacgcttaacgatcttgtagaaaatttcagctgtagcccttggactagaagctgaaataacagaagctgtgtacgatgcattagg

SEQ ID NO: 35483 - DNA, 95 bp, Homo sapiens
ccagaagcgggcggcgcgggggagatgagttctccggggtgctgcaccagtgtcacattttggcctctgagatggtccatttcattcatcagatg

SEQ ID NO: 35484 - DNA, 100 bp, Homo sapiens
gtttcccgggccggcagaggcgccgcagcgtcggagcaatgcaaggctaagccggcaatggtacaacagctccatgaacgtgatctgcacctggttgacg

SEQ ID NO: 35485 - DNA, 75 bp, Homo sapiens
gcggtggtgccctcagccccgtcctcttgtcctcctcagcctcggcaagcacgaggagcggcaggacgagcatgg

SEQ ID NO: 35486 - DNA, 80 bp, Homo sapiens
agtggaccaactatctgagcggtacaatgactcttcttgcttttcacctaagttgaataagcaccctgtgcactttaatc

SEQ ID NO: 35487 - DNA, 74 bp, Homo sapiens
gccgagttcaacatcctcctggccaccgactcctacaagggcgtctctggccgagcctctttttgtggaaaacg

SEQ ID NO: 35488 - DNA, 98 bp, Homo sapiens
gctcgtcccgctcgtcatggcctacccgggatacggaggaggggctgtggaaaatctctgttctcacaaagtctccccaatgctctacaagcaactgc

SEQ ID NO: 35489 - DNA, 51 bp, Homo sapiens
ccttctgttcttcgtagccggggagatgctccctcagcaccgagccctccc

SEQ ID NO: 35490 - DNA, 82 bp, Homo sapiens
ccaggactccctttgttggagttttgcccacgcgttgtaattaagcctcgcacaatatggccccttcacagatgtagtcact

SEQ ID NO: 35491 - DNA, 98 bp, Homo sapiens
ctttcaacaaccccacagaggactttaggagaaagttgctgaaggcaggaggggtgtgtataggacaaattctacgaataatacaactacttggaacc

SEQ ID NO: 35492 - DNA, 82 bp, Homo sapiens
cccgcaccacctcctgctgccttcccgtcgccgctcccgaagcttttccaggcaatagccctctggaacaagacaattcatg

SEQ ID NO: 35493 - DNA, 75 bp, Homo sapiens
gtcagcagctagcccttttcctcaaggatggacaaccggaaattttctacacattttggaattcagttactcagg

SEQ ID NO: 35494 - DNA, 80 bp, Homo sapiens
ctgcctgttcatgcagagagatgtgtacatatcccacgtgaggaaggagcacgggaaggaatctatggatttcctgaaat

SEQ ID NO: 35495 - DNA, 51 bp, Homo sapiens
gattccttcagataccagggactgttgcagagttttcaaggcaaagatgtg

SEQ ID NO: 35496 - DNA, 60 bp, Homo sapiens
acgcctggcgctcttcgacttcctgttgcaggtttggaataccttgtagcaggacatgag

SEQ ID NO: 35497 - DNA, 50 bp, Homo sapiens
aaggtgcccctggtggtccggcttgaagggtcaccgggagcaagaagtcc

SEQ ID NO: 35498 - DNA, 101 bp, Homo sapiens
ggaaaagtagaaattgatcagcaacaactaactcagcagcaacttaatggaaactagatagcaacttcatccttgccaatgcccaggtggctaagggtttc

SEQ ID NO: 35499 - DNA, 100 bp, Homo sapiens
agacttcaagctgtctggccacccccaaagacaaaagacacagaagaaaaagtgggactgaagtacactgaagcaggtccttccaaccctcctgctacca

SEQ ID NO: 35500 - DNA, 108 bp, Homo sapiens
atttcctgaagatgtttacagtgcagtcttatcgaaggatgtgcatgaaggacagcctcttctcaatgccaaaccaaacaggaagcttacttttctctacctagccaa

SEQ ID NO: 35501 - DNA, 100 bp, Homo sapiens
ccgagaccgtgaccgagagcgtgaccgagagcgcgaatatcgtcatcgttagaagagttcttggagtctctgcggagtccctgggccagatctcacagtg

SEQ ID NO: 35502 - DNA, 75 bp, Homo sapiens
gtttgaacttcaatggaaaacatgaaaaggtgaacagtcagcccagaattaaacaaccaccatgtcgagcaaaaa

SEQ ID NO: 35503 - DNA, 100 bp, Homo sapiens
agatggccgacttcgatgatcgtgtgtcggatgaggagaagtacggctgtaagaattgtggcagggccttctgttcaggctgcctaagcttcagtgcagc

SEQ ID NO: 35504 - DNA, 111 bp, Homo sapiens
gttgggagcgctgttttcgtgatcttcagaccccaggttctttggctcggggaccagttctacaaggaagccattgagcactgccggagttacaactcacggctgtgtgca

SEQ ID NO: 35505 - DNA, 75 bp, Homo sapiens
agcactactcagacatcttcaccaccacagagcccatcaagcccgagcaggacccttgaacatctgtgaagaaat

SEQ ID NO: 35506 - DNA, 100 bp, Homo sapiens
atcaactgagagagatgcttaaaaatcaccagttactttaatgagtcccagtagggatggcacaatcagcgaggacaccatccgagcctctctcatctct

SEQ ID NO: 35507 - DNA, 51 bp, Homo sapiens
caagccttgttgggcactatcagagaaaccctaaagcaggcagcagctcag

SEQ ID NO: 35508 - DNA, 100 bp, Homo sapiens
cacttacctgatgcagaatcagatgaagatgaagattttaaagagcagactagacttctcaagaaggtccagcttaaaaaatgtgtccgacctttttgtg

SEQ ID NO: 35509 - DNA, 90 bp, Homo sapiens
gttttatctattctttacattggatgcaaaatgtattactcaagaagaggcattcggtatcgaaccatatgtggatgaggcttccaagaa

SEQ ID NO: 35510 - DNA, 83 bp, Homo sapiens
ccagatttttgctgagaagtagttactgtgcacatgtgtagatttgcaggtggaagttaaacgagctgagcctcgggacagca

SEQ ID NO: 35511 - DNA, 83 bp, Homo sapiens
cctgtcaagagtgttgttccagctttggataaagatggtgatagagcagttcaccatgcagcttttggagatgaaggcgctgt

SEQ ID NO: 35512 - DNA, 84 bp, Homo sapiens
caacgggagtgtcctggacccagctgagcgggcggtcattcgcatcgcaggtgagaagccctaccactgcaactgggacggctg

SEQ ID NO: 35513 - DNA, 75 bp, Homo sapiens
gggctgcccgaccaggagctcttcagcctcaacgagggcgtccggacaactacacctttgcccaacctgggattc

SEQ ID NO: 35514 - DNA, 100 bp, Homo sapiens
cgcgcctgtcctggatcgacaccctctacagcaggtatctcccagagccccagctggtgtggccaggccccaggagtaggatggggctccccctacgagg

SEQ ID NO: 35515 - DNA, 95 bp, Homo sapiens
gccaggcagtgggaagtcaggttcttccgccacctcccagccagacaatgcagatcttcgtgaagactctgactggtaagaccatcaccctcgag

SEQ ID NO: 35516 - DNA, 74 bp, Homo sapiens
cgcctgcctggaacacaatgaggtttggtaacaaagaggaatacatggcattcatgaatgattttttagaacat

SEQ ID NO: 35517 - DNA, 98 bp, Homo sapiens
ctccggaagactctggctgacctccagctggagtatctggacctgtacctgatgcactggccttatgcctttgaggcaattgaaggaacagactaaaa

SEQ ID NO: 35518 - DNA, 74 bp, Homo sapiens
ccggcagcggccgcggtgggttcttcaggtgccagaaccctgtggagcatcatgaactgggaagagtagctgag

SEQ ID NO: 35519 - DNA, 80 bp, Homo sapiens
gcgcctgcgaccccagtcggtgctccggggaggtcacctgacgaggagggacctgatttcccatcgccttctgtccccct

SEQ ID NO: 35520 - DNA, 50 bp, Homo sapiens
ggaagagcgctcccaggagaaacaagtgctttgaagaagagtctcacagc

SEQ ID NO: 35521 - DNA, 98 bp, Homo sapiens
gtgacttcagagacactgccaagcagccttagccctagtgtagagtgcatctgggggaggtgttgtagccattgacaacaaaatagaacaagcaatgg

SEQ ID NO: 35522 - DNA, 88 bp, Homo sapiens
caactatggaacaacaacttgcagctcatctctattgatgcataagcttaaatcgtctcagaaggacaaggtccgccagtttatggcg

SEQ ID NO: 35523 - DNA, 98 bp, Homo sapiens
taatgagaagaattataatatgacatgcacactctttacaaaggttgatgccggcccaggatggatcagacctgtgaactacccagaagaaattgtct

SEQ ID NO: 35524 - DNA, 89 bp, Homo sapiens
cccaaactttgcaaggaattcggtccagaggattacggcgaagaggtcttgggcgtctttggtactggcttttttaggggtctgcctgg

SEQ ID NO: 35525 - DNA, 73 bp, Homo sapiens
aacaatcagtgctccacacatggcagctggtgatgctatttctgacatgctggtgattgaagcaatcttggct

SEQ ID NO: 35526 - DNA, 102 bp, Homo sapiens
aagaccacacactgggaaacatcattaaatcttcttcaccaaaggacatggatgaaaatgaaagcaaccagtctctgatgacaagcagccaatatcctaaag

SEQ ID NO: 35527 - DNA, 100 bp, Homo sapiens
cgcacccgctctaagtcagccaaaaaggcggggtttcaccatgttgcccagactggtcttgaactcctgagcttaagcaatccacctgcctcggcctccc

SEQ ID NO: 35528 - DNA, 100 bp, Homo sapiens
ggaaccggaaacgggatggggagctggaccaggtagttagaaacaaacctgtggcaaggcaggctcctggcaaacggaagtgcaattgtcggcaagagat

SEQ ID NO: 35529 - DNA, 100 bp, Homo sapiens
tgttcacaggcttgcacaatctgatttgaacctcacacatgggaagtaggcaaacagggaaactgaggaccagagagggattaaggctgctgtcccaagc

SEQ ID NO: 35530 - DNA, 75 bp, Homo sapiens
aaggatggggattcaaggatggaatttttcataactccatatggcttggtggtggacataatgcgagttaacgtg

SEQ ID NO: 35531 - DNA, 89 bp, Homo sapiens
cccaatgacatgcaagttggacagacgggaaaaatagtagcaccagtggctgcagtccgagaagggatgtcctggattgttcctgtgcc

SEQ ID NO: 35532 - DNA, 96 bp, Homo sapiens
cctggaggtgggcaaggtgatccagcaaggtcggcagagcaaggggcttacgcagaaggacctggccacgggaagacaaaggcgctttggctaagc

SEQ ID NO: 35533 - DNA, 82 bp, Homo sapiens
aaagtgatgtccctctgaaaactgaggaatttgaagtgaccaaaacagcaggtaaattcgaaccaccattatttcacccgaa

SEQ ID NO: 35534 - DNA, 98 bp, Homo sapiens
ggcgcgcaaagccacgaaaagcaaactttttgagtttctggtccatggggtggatggggacccagacacgccaaagcctgtgagcttcacagtgaagg

SEQ ID NO: 35535 - DNA, 75 bp, Homo sapiens
cctgtgaccacccctgaagaaattgcacagattgagcttctagagcctcagagatggaattcgccgttttgccgc

SEQ ID NO: 35536 - DNA, 90 bp, Homo sapiens
catgctgccagacaaccagagcttgactacagtggtagtggaggccgaagcggcgggaacagctacggctcaggcggggcatcctacaac

SEQ ID NO: 35537 - DNA, 98 bp, Homo sapiens
gtggaatgtcggagtcctcagacctgcagaatcagaatccgattcccaggtaaggagagctgctttgagagaattgtgtcaaggtttggaaagaaagt

SEQ ID NO: 35538 - DNA, 75 bp, Homo sapiens
ttgggattgtggatggcattttcacaagggcatcgagcgcctcaaacgaaagaaccagcccagggagcacatggg

SEQ ID NO: 35539 - DNA, 82 bp, Homo sapiens
gggaggacagctcatgagacaagcagaggaacaatcctgcaccatgactcaacagccacttcgaggagtgaccagcctgcgt

SEQ ID NO: 35540 - DNA, 100 bp, Homo sapiens
gcgtgggagcctgaaagctccttcctgtccttgtggacgaatgtggaacctcgctctgtggctgtgttcccttggcactccttagtccccttcctggcac

SEQ ID NO: 35541 - DNA, 100 bp, Homo sapiens
tgcacttcgcattttggcattgacatttaattttagggtcctttatatagaagggagagtagaatgctgacaaggtactggagctgatgaacaaactgct

SEQ ID NO: 35542 - DNA, 98 bp, Homo sapiens
ctcatacgttgataaaacagtttcaccatacattagcatccaccccgaaaggattcataatcaatgcagagagaaaaggaacagttccgtaagctctt

SEQ ID NO: 35543 - DNA, 130 bp, Homo sapiens
caggccccctggcagtggccgctgtgctatatcacaagatgaacaatgagaagcaggcagaagattgcatcacacgggcctgctttcttccccgggcgatgtgcagagatctttgccaggggtcaaagcg

SEQ ID NO: 35544 - DNA, 75 bp, Homo sapiens
cccattctggatggcacccgaggtcatcaaacagtcggcctatgactcgaagagggtgtaaatccatctgttgga

SEQ ID NO: 35545 - DNA, 82 bp, Homo sapiens
catattccagtaatggtggatgaagttgttcattgtttgtcaccacaaaaaggacagacgaacccgccccctggagttctcc

SEQ ID NO: 35546 - DNA, 100 bp, Homo sapiens
aaccagggcctggaccgcctgcgcagggtcagccaccagggctacagcactgaggctgataagtatgctgtgcgcttcatccctcgggagaatggcgttt

SEQ ID NO: 35547 - DNA, 98 bp, Homo sapiens
ctccgctgcgcattcctacaaccccagcaccaacgagtggctccaggtggcctccatgaaccagaagaggagattacctggggcaattgatgttatcg

SEQ ID NO: 35548 - DNA, 101 bp, Homo sapiens
caaacagattcagtggcctgcattggcccctagcagtcttcttgatgctttggaacaacatttagcttccttggaaggaaagaaaatcaaagattctacag

SEQ ID NO: 35549 - DNA, 74 bp, Homo sapiens
gtggcgagcaaaaaatgcttgagccagtcatccgtccttggctcaggatttggagagcttgcaccaccaaaaat

SEQ ID NO: 35550 - DNA, 98 bp, Homo sapiens
gtcagaactgcttcaagccccgcgagtcgcatctgctcaacgacgaggacctgacgcaggagaaggccatcagcatttgggagtcaaagaatttcttt

SEQ ID NO: 35551 - DNA, 85 bp, Homo sapiens
cagcgtttccgaggtgaaggcgccgcgccaggccgggcgggcggtggggaagaaaacatgacagaaacagatgccttctataaaa

SEQ ID NO: 35552 - DNA, 83 bp, Homo sapiens
cttgctcgcccgcagccccgagaccgcaggagatggtaacctgcacctcaatgtgacggcggaggccttcagcccctcgctcc

SEQ ID NO: 35553 - DNA, 75 bp, Homo sapiens
ctgacaagtatctgtgaaaaggttattgtgcctaacatggaatttagagggattaatgaaaatcaagttccatcc

SEQ ID NO: 35554 - DNA, 76 bp, Homo sapiens
tccttctgagaagtgaagccatttggactttctggggccaattcctgtccccccagcagcatggcatcgtgtgctg

SEQ ID NO: 35555 - DNA, 75 bp, Homo sapiens
ggccatctccgggggctccattcagtggtggacttgctttgtgaagagacagttcatgaacaagagtctttcagg

SEQ ID NO: 35556 - DNA, 90 bp, Homo sapiens
gcttcatcctcggcggcggtggccgctagctccaaggaaggtcttgggcgtctttggtactggcttttttaggggtctgcctggggatta

SEQ ID NO: 35557 - DNA, 89 bp, Homo sapiens
aggcattgaagatgactattttttggagaggcctgatgcccgaatttcaggacctgcaaatgcaactggttgatcctgaagacatacca

SEQ ID NO: 35558 - DNA, 75 bp, Homo sapiens
attttaattttgccggaatatttcaagacaccgaaaggcaagtgtcaattgaggagggagagaggaaagccaaag

SEQ ID NO: 35559 - DNA, 83 bp, Homo sapiens
gtggaagcaggactgcgccgcgtcttcctcaagtgtggacgaatgtggaacctcgctctgtggctgtgttcccttggcactcc

SEQ ID NO: 35560 - DNA, 98 bp, Homo sapiens
tttgcgacagcaagggggttgtccacgaggaacaaattgtacatttgcccattctcaggaagagcttgaaaaggaccacttaatagtgagtcttccaa

SEQ ID NO: 35561 - DNA, 101 bp, Homo sapiens
ctgagaatggggatatcattgcccaggagcaatgcagtcttacacgtggtctctaacatacacagtgacgacggctgctgggtccccagctgagaactccc

SEQ ID NO: 35562 - DNA, 90 bp, Homo sapiens
tgtactgggggattcgcagggaggatgtcgggacaccccggaagctgggaaatgaccaagatcactccatggatgaaatgacagctgtgg

SEQ ID NO: 35563 - DNA, 98 bp, Homo sapiens
ttgcccttcctggagcagaggagccattatttatgcaggtcctggagcggctgttccagaggggtttcagcgtggctgcgtcctgtgggggcggtgtg

SEQ ID NO: 35564 - DNA, 116 bp, Homo sapiens
cggcaaaatggcggaccgcttctcccgcttcaacgaagaccgagactttcagcatgtttcgccaagggatgcatgacttgaaagtctggcctaatgtagaagcagatggatcagaa

SEQ ID NO: 35565 - DNA, 98 bp, Homo sapiens
agtgatcataggagaaaaccatttcagaagaggactgtcagaaggacgtagaaggcacggttttactgtgaggagcaaagattctttacctacgcatt

SEQ ID NO: 35566 - DNA, 82 bp, Homo sapiens
cgggggattgtgggagtctccgcgtcccgctcgctgggagagagctcattgctatggacagtgctatcaccctgtggcagtt

SEQ ID NO: 35567 - DNA, 80 bp, Homo sapiens
attaacagcagaccgagtcaaaagcttcactatatgttctcctttcagccaagacctttcaccagtgcaggggatagaag

SEQ ID NO: 35568 - DNA, 96 bp, Homo sapiens
gatgatgatagctatggtgtagatggaatggatctaacttcccagggggcaggcacttactggtgtgtagaccacactccaaaactgaaactgtgg

SEQ ID NO: 35569 - DNA, 71 bp, Homo sapiens
gggaccatctgctgggtggactgtggggcatttgacactcttgcaaaagcattgaatcctggagagagcac

SEQ ID NO: 35570 - DNA, 100 bp, Homo sapiens
cgctgccatggctcagaccgtgcagaatgttacattgtcgctcactctgcccatcacgtgccacatttgcttggggaagagcctgcattgattctaatga

SEQ ID NO: 35571 - DNA, 82 bp, Homo sapiens
gcagtttggcatctgtggccgagttgctgttgccgggtgatagttggagcggagactgtttctgctttgggacaaccataca

SEQ ID NO: 35572 - DNA, 49 bp, Homo sapiens
ggattccaagtaactcttatttgctccagcccctcagaagggacgccta

SEQ ID NO: 35573 - DNA, 97 bp, Homo sapiens
taagaatggtgcctgtcctgctgtctctgctgctgcttctgggtcctgctgtcccccaggagaaccaagatgatactagctcagtcatgtactgaaa

SEQ ID NO: 35574 - DNA, 100 bp, Homo sapiens
ggcacctgcgggcccgagggtctggctgtcgcagcgccgggccgccccgactccgagcggctgctgagatgagtgcagcatttgacattgtgcagcaaag

SEQ ID NO: 35575 - DNA, 76 bp, Homo sapiens
cccacaggctctctccgctcgattttgtcaccgttatgtgggaagcgaatccacagcctcgtcttacagcgtgact

SEQ ID NO: 35576 - DNA, 75 bp, Homo sapiens
cccgaagctgctggataattttatcccagggtggctgaatcacggaatgggaggtggggaagacagggctccagc

SEQ ID NO: 35577 - DNA, 100 bp, Homo sapiens
tgtcttcttaccatccacagctactgctgagcagactttctgacctggggtcatcatcagatttgaaatatttaaagtggatacaaaactatttcagcaa

SEQ ID NO: 35578 - DNA, 75 bp, Homo sapiens
ggagtggaaaggctctcagtgaaaaaggtcctgggaactccaacaagggagcaaatcagagaaatgaacccaaac

SEQ ID NO: 35579 - DNA, 90 bp, Homo sapiens
ccttgctggtgcatgcgtcgtcggcctctgggcagcaggcttacctatttctactccatgtaccaccataaacaaagtttgtgcttcagg

SEQ ID NO: 35580 - DNA, 82 bp, Homo sapiens
cccgggggcgccatggcgaccggagcgaacgccacgccgttggatccagacatttaatgtggatgcaccatgccagaccgtg

SEQ ID NO: 35581 - DNA, 116 bp, Homo sapiens
tgcaaggagggcggcgggactgcactcgagtgtccagacctgctcgatgttgttgacctcctgtactggagagacattaagaagactggagtggtgtttggtgccagcctattcct

SEQ ID NO: 35582 - DNA, 101 bp, Homo sapiens
tggctggaggaactgggtgctcctgcccgctggcccctcgcgcgtgaggatctatctcaggtccaactggcccaccttcaacactccctctaagcacccag

SEQ ID NO: 35583 - DNA, 105 bp, Homo sapiens
caatggctttggtccccagcgcagtgaagtggtgagcctttttgtcactgcccaagaagatgaaaggattgttcttgttgacaacaaatgtaagtgtgcccggat

SEQ ID NO: 35584 - DNA, 98 bp, Homo sapiens
gcgctcgctccggcgccggcctcgcctcctcgcagcagcgccatggttaaacccatccagagtaatggctgcggccttacccaggaccctgggggagt

SEQ ID NO: 35585 - DNA, 101 bp, Homo sapiens
tgaaagtagataggactccgaaaggcacccaggatctcaaagatttcatgagacaagctggggaagtaacgtttgcggatgcacaccgacctaaattaaat

SEQ ID NO: 35586 - DNA, 75 bp, Homo sapiens
cgcagtggtcgcttcttctccttgttgaaggagaagagccaggcgtgcggagggaacttggggtccattgaagag

SEQ ID NO: 35587 - DNA, 80 bp, Homo sapiens
aggcggtgacagagtggagccatggctagagcccgcgggaggactcagactccagcacttccagcagcgcctgccctcta

SEQ ID NO: 35588 - DNA, 100 bp, Homo sapiens
agaagagaagcagtgaaggagtgcagaggcatcacctgaaaggggcatatgatattttcctgaatgcaaaagagcaaaacattgtgtttaatgctgaaac

SEQ ID NO: 35589 - DNA, 100 bp, Homo sapiens
tgatcactaggtgccaacattatgcgaagaactttacgtggacatcccatttaattctcagaagccgatcacaaggattggatagctttagtcaaagcag

SEQ ID NO: 35590 - DNA, 98 bp, Homo sapiens
ctcagcctcttcagcgacctgcccgaggttattgttgtgggtaatccagccaataccaactgcctgactgcttccaagtcagctccatccatccccaa

SEQ ID NO: 35591 - DNA, 82 bp, Homo sapiens
tgtcgccttcgcctcctaatccctagccactatgagtgaagacatttccacctggacacctgaccatgtgcctgccctgagc

SEQ ID NO: 35592 - DNA, 100 bp, Homo sapiens
gtgattgctgcggtgtttgaccgagacataaactgcagaagagcagcctctgtccggcctctttggcctacccccgttggctccgctgccccaggtcgat

SEQ ID NO: 35593 - DNA, 100 bp, Homo sapiens
ctgggctcaagcagtcctcctgcctcagtctcccaaagtgctggaattacaggggtatcatcagagagtcttatatattgatatagatattcatcatggt

SEQ ID NO: 35594 - DNA, 100 bp, Homo sapiens
gaagaagcgagatggtgacgaccggcggccgaggctcgttcttagcttcgacgaggagaagaggcgcccgagctacactggaaatcctcatccctgactt

SEQ ID NO: 35595 - DNA, 88 bp, Homo sapiens
ttctgtcggatggacttggggctagctgcggcggggctggaatcctggttttgacttcagtggagcagaaatctcaggaaactacact

SEQ ID NO: 35596 - DNA, 90 bp, Homo sapiens
ggacacggggaccatgcaagctgtaattggtcagggcagctggtggaatttttgaagaaaatggaatctcgaggccccctttcgtgcgac

SEQ ID NO: 35597 - DNA, 100 bp, Homo sapiens
ccatctttcgcagcctagggcaacgtccaagtctccgaacagagccacacgactcccgctggctcaatggccacgatggtctcccagccctcagctcgcc

SEQ ID NO: 35598 - DNA, 104 bp, Homo sapiens
gtgactatcattgatgccccaggacacagagactttatcaaaaacatgattacagggacatctcaggctgagtttgagaaagctgcagaggaggttaggcacct

SEQ ID NO: 35599 - DNA, 100 bp, Homo sapiens
ctttcccagaagaatgagaatgagtagagatggtttcagcatgttggccagtctggtctcagactcctgacctcaagtgatccacccacctcggcctccc

SEQ ID NO: 35600 - DNA, 75 bp, Homo sapiens
ccagggatgcagtggaaactaatgagaagaggtcgctttgctgttcgtgatatgagacagacagttgcggtgggt

SEQ ID NO: 35601 - DNA, 75 bp, Homo sapiens
atgatccagtatctgaatataagagacaggtgtattccagagcaaatgaaaaagagccttgctgttggtggttag

SEQ ID NO: 35602 - DNA, 100 bp, Homo sapiens
gttggttttatgcatctttatccaatcaagtgcccttggacaaagcctgaaaccaggcacagtatgaaaacccaccacatatctatgcccttgcagataa

SEQ ID NO: 35603 - DNA, 73 bp, Homo sapiens
acagacacaaaattccaaaagctgcaatataaggatctctgtacagtgcaaattgagcatgacccagaattag

SEQ ID NO: 35604 - DNA, 100 bp, Homo sapiens
caagccctccaggaactcaccatcctgaggttagcattacacttctcccagtggagcccatgacttctgatcaggacgctaaggttgtggctgaaccgca

SEQ ID NO: 35605 - DNA, 98 bp, Homo sapiens
ggcgccaagagcaagtacctcatcttcaccactggctgcctcacctactccccacaccagatcggaactgacccaggagtgtgatgaaaagaaatccc

SEQ ID NO: 35606 - DNA, 100 bp, Homo sapiens
ccagaataaagccaagctcatctctgagacccggaggaggttcgaagctgagtatgtgacagggatagctgggagtatggccaccctgctccacgatgcg

SEQ ID NO: 35607 - DNA, 100 bp, Homo sapiens
gttggcctaggcgaagatccggactctgggtgttttgctaccgtgaccgtttagaaggccccctgctgaggccggctggccggaggaccaccccgcagac

SEQ ID NO: 35608 - DNA, 100 bp, Homo sapiens
tgaagtacatgaactcagggccggttgtggccatggcatgagtacagtaccagaagttatcgttgcacggcactgtggacttcgagtctttggcttctca

SEQ ID NO: 35609 - DNA, 75 bp, Homo sapiens
aagctgaagaccgaagcaagagctggttcaggggtggacgatgctgagtcagaatgtggcctggacaacttcggg

SEQ ID NO: 35610 - DNA, 89 bp, Homo sapiens
ctaaatgttattaggaatgacaatgacagttgggactacactaaaccatatttgggaagacgagccctacctgaacccatccttccatc

SEQ ID NO: 35611 - DNA, 121 bp, Homo sapiens
gagctgtaccatgagcagtgtttcgtgtgcgctcagtgcttccagcagttcccagaaggactcttctatgaggagacagtgtttcacaaaatgattttccttctgaagctcccatctcctt

SEQ ID NO: 35612 - DNA, 100 bp, Homo sapiens
aggaagccgactgctgcctggtctgcaaagaagtcctttcaagtctctaggactggactcttcctaagcaagtccgtgcacagccagagaacaacacatc

SEQ ID NO: 35613 - DNA, 100 bp, Homo sapiens
tgttatcagagtggatactgaagaaaagttgtcagtccttactgttcaggacgttggtcaggtgatgcctggagctcgggtgaagagaaccgatctggac

SEQ ID NO: 35614 - DNA, 100 bp, Homo sapiens
ctcttcactagaatatggagactgttcaatcaccaggtttttgaaatcatgaatcctgtttatagtcctggatcttctggggttccctatgcaaatgcca

SEQ ID NO: 35615 - DNA, 97 bp, Homo sapiens
gacagagtcctccgtgtcctcccccgcatgacccccttgacactctgacctggtcacagccagagacacttggaaatcctccatctccccggcatgg

SEQ ID NO: 35616 - DNA, 100 bp, Homo sapiens
gatcgacttcctcacccgcgcctgcgacctcgccggcccgctggggctggaggcacgggcccatcaacgtgaaccattacgccagcaagaagagcgcagc

SEQ ID NO: 35617 - DNA, 100 bp, Homo sapiens
gagataaagatgccatttatggttgttgacctcctgtactggagagacattaagaagactggagtggtgtttggtgccagcctattcctgctgctttcat

SEQ ID NO: 35618 - DNA, 118 bp, Homo sapiens
ttggaggtttctgctgtggcaggtcttttgtaattgaccatcaggtgggagacctacctgatgcagatattaaacctccagaaaatgtactgtttgtgtgtaaattgaacccagtgac

SEQ ID NO: 35619 - DNA, 83 bp, Homo sapiens
ggcttcctggcctgggcgctccggtggcggcggagaacaagattgtggaccagtgtgagaggctgcagttacagagtgctgcc

SEQ ID NO: 35620 - DNA, 90 bp, Homo sapiens
tacccaggcactcagtaatcctggggacgttattaaaccaatgtttgtcatcaatgagatgcggccggaaagaacacccggaaatgaaag

SEQ ID NO: 35621 - DNA, 74 bp, Homo sapiens
atgttcaagtttaccaaaagagaggcaccgctggaacactaatgaggtggatcatccatgccatggagtatgaa

SEQ ID NO: 35622 - DNA, 83 bp, Homo sapiens
tggaaagtcaaattacgtgtggcatatggactcctgacgaccaacaggaagccagttgagggaagttctccatgaatgtacgt

SEQ ID NO: 35623 - DNA, 90 bp, Homo sapiens
gaccgaaatcgccattgctgcccagcagctaggcatcaagtacatcgggatgaggaatgagcaagcggactggttgccataaaggaagcc

SEQ ID NO: 35624 - DNA, 82 bp, Homo sapiens
ggtggagtgtaggtcatatcgccgcggcataagatgcacatttttctgctctggagccgggaatgaaatattcttgagttct

SEQ ID NO: 35625 - DNA, 51 bp, Homo sapiens
gaggcggacgcgcggctgcgtcagggaagatcagttttcctgccatccagg

SEQ ID NO: 35626 - DNA, 82 bp, Homo sapiens
ttggactgagtcctgcaggacacagttttctggatatgccgcagaaggatccgtgccagaagcaagcctgtgagatacagaa

SEQ ID NO: 35627 - DNA, 82 bp, Homo sapiens
gcgtcccctgcaccatgagctggggcaccgagctctggcccgcggcgccatggctcacgtcggctcccgcaagcgctcgagg

SEQ ID NO: 35628 - DNA, 90 bp, Homo sapiens
ggctatgaacgattaaaagaagaactcgcaaaagctcagagggtacccaggctgaagtgcagtgtcacaatcatagctcaccacggtctt

SEQ ID NO: 35629 - DNA, 75 bp, Homo sapiens
gtggcccggaagaaatacgttcaaatgagagaagaaggttatgtgaaattacctccagagaaatttgcacctaag

SEQ ID NO: 35630 - DNA, 82 bp, Homo sapiens
gaggaggactctggagctgacagcgcgcacttcacccgcagttgatgtcctaaacgatgctatatttgatgaagatcatgat

SEQ ID NO: 35631 - DNA, 98 bp, Homo sapiens
ctcggcggccccggcgccggcaaggggacccagtgcgcccgcatcgtcgaggaaagaccacagcaagattctttcattcgtctcctcctagcctgggg

SEQ ID NO: 35632 - DNA, 100 bp, Homo sapiens
ctggtgatcggctccttaccagctcacctctcaccgcgcatgtttggagacctgcaaatccaagagacacatctttggaagataagagagcttcttcaag

SEQ ID NO: 35633 - DNA, 75 bp, Homo sapiens
gcgctgcttccacccaacttcctgttagattatcgggatttcagctgccctcctctatagtgagtacaggatcta

SEQ ID NO: 35634 - DNA, 105 bp, Homo sapiens
agaccacttactctaaacttcacaaatggttctgaagagtatggagcctacgtagattcataaggtgttatttggaagatggagcttcaaagggtgcctggctga

SEQ ID NO: 35635 - DNA, 129 bp, Homo sapiens
cctgggtggcatggcgctcctgctcctccaggcgctgcccagccccttgtcagccagggctgaacccccgcaggtccacagttttatgtgtgagcaagatggaggctgacctgtctggctttaacatcg

SEQ ID NO: 35636 - DNA, 109 bp, Homo sapiens
agtcactgcctgcgcagctccggccgcctggctccccatactagtcgccggttatcaatactctggctgaccatcatcatcgtgggactgactttggtggaagtccttg

SEQ ID NO: 35637 - DNA, 101 bp, Homo sapiens
gtgggcaaggtgatccagcaaggtcggcagagcaaggggcttacgcagaaggacctggccacggccaccagcttgggctccccacggagggcagcaagtgg

SEQ ID NO: 35638 - DNA, 90 bp, Homo sapiens
ctccaagctatggctatcagttcccaggtgctggagaatctggtaaaagcaccattgtgaagcagatgaggatcctgcatgttaatgggt

SEQ ID NO: 35639 - DNA, 100 bp, Homo sapiens
tttccgggtggttcgcgctccttctgaattggcagcgaggtcgcggcaggttcgaggcgggcgctaatattgacacctgctcagaagaccagaggacccc

SEQ ID NO: 35640 - DNA, 83 bp, Homo sapiens
gcttcctgttgacgacagctctcctcagctttcatgaagcagaggaggatgggtctgaacgactttattcagaagattgccaa

SEQ ID NO: 35641 - DNA, 82 bp, Homo sapiens
gctgtgctcgcgctactctctctttctggcctggaggctatccagcgatgctccagaccttgtatgattacttctggtggga

SEQ ID NO: 35642 - DNA, 100 bp, Homo sapiens
gggaaagaaagatatagagacaacgactatgtccaattttcatgctcaggatgataatgaagataattcaaatgatgggacccagccatccaaaaggagg

SEQ ID NO: 35643 - DNA, 83 bp, Homo sapiens
cattattgcgcgtggaacggctgcttttggaagctttccccagacatggccaacaagggtccttcctatggcatgagccgcga

SEQ ID NO: 35644 - DNA, 85 bp, Homo sapiens
agcccgtgccgcgagcgcggcctgcaggagggagtggggaaggccagggccagattctgcagcgcttcccagagaaggactggga

SEQ ID NO: 35645 - DNA, 83 bp, Homo sapiens
ggaagaaaatacaaatcacacgcataatggatgaaaggaaccgacagttatctggaagtattttggatgtgtatagcggtgaa

SEQ ID NO: 35646 - DNA, 49 bp, Homo sapiens
ggatctctttacaagacgcacccacactgtcttgtcgacggtctcactg

SEQ ID NO: 35647 - DNA, 78 bp, Homo sapiens
gtctcgctcagaggagatgcaccggctcacggaaaatgtctataagtttctgtgtttgaagaacatacgcaccttcct

SEQ ID NO: 35648 - DNA, 99 bp, Homo sapiens
tcaggggcttgccttgatccaggtgcttttaaagaactcttcccagactggaaagagaagggggatatcacgcagcagcacctctgtgaccccctgacg

SEQ ID NO: 35649 - DNA, 100 bp, Homo sapiens
gggcagtcgcgcctgtgaacggtgctgaaggtcgccatcctggctgagaagtacgcggtggactacacctggtatgtggataccatcttgaacttgatcc

SEQ ID NO: 35650 - DNA, 98 bp, Homo sapiens
acgccgagagccagagagatgtcggatttcgacagtaacccgtttgccgacccggatctcaacaatcccttcaaggcaatgaatcgctccctggctaa

SEQ ID NO: 35651 - DNA, 74 bp, Homo sapiens
tgtagaagaaatggtgaacattgttgttggaggtagtgaaaagagaatactgaagaataggatctcaagatgag

SEQ ID NO: 35652 - DNA, 100 bp, Homo sapiens
cgtcgctatgagcgggaccaccctgggcacagcaggcatcggaggcgacgttgtggacgtttaccagcgggagttcctggcgctgcgcgatcggttgcac

SEQ ID NO: 35653 - DNA, 75 bp, Homo sapiens
caacattcccaacagccaccaccaccaccagatgggtcggcactcttcaccctcccgagccctgcccgtctcggc

SEQ ID NO: 35654 - DNA, 78 bp, Homo sapiens
tgcagatcggtgacacagttcacatcctggagatgtacgaggagccgccaattggacaaatgcaccccccgcatggca

SEQ ID NO: 35655 - DNA, 104 bp, Homo sapiens
aataagctatatactttggttacctatgtacctgttaccactttcaaaatttatcatctggacttcaagctgcaggcagttctgtttttccaggccttttgtcc

SEQ ID NO: 35656 - DNA, 96 bp, Homo sapiens
aacgacctggcggtggggctgcggcgcctgggactgcaccgcaccgagggcgagctccagcttcccatcgacggtcagtgcgcacgttgtaatcag

SEQ ID NO: 35657 - DNA, 75 bp, Homo sapiens
agcaccttttggcccaatgaatatcagagtaaacatcagtctccaaagataactacatcccttcttcccatcaac

SEQ ID NO: 35658 - DNA, 50 bp, Homo sapiens
gatcaaaaagagagtggttgtgggaacagctgccaccaacaatatatcag

SEQ ID NO: 35659 - DNA, 73 bp, Homo sapiens
caagactacctcctcctttaccccagaacctcctttacacagtatcagaacagtcttctgaagaggagtctga

SEQ ID NO: 35660 - DNA, 88 bp, Homo sapiens
gaagttaagggagacaaagttgaaaacaaagtgctggttatgaagacagtatggagtttccagaccatagtagacatttgctacagtg

SEQ ID NO: 35661 - DNA, 100 bp, Homo sapiens
tggaggcaagcaaggtcttggacaagtcaaaggcggcagatatggctcgtggacagcagaaaattcagtctcagcagaaaaatgccaaaaagcaagctgg

SEQ ID NO: 35662 - DNA, 82 bp, Homo sapiens
ccggcgtcccgggggcgcagggaaggagggcgtccgagtcaacaaccgcttcgagctgacccgggaaaaggagaagatgaag

SEQ ID NO: 35663 - DNA, 100 bp, Homo sapiens
ggacgcgtagcaggtggaaggagggagggagccgcaggcgcagacccacccgccatgaagccccccgcaggactcagtggtctttgaggatgtggctgtg

SEQ ID NO: 35664 - DNA, 75 bp, Homo sapiens
ggtcacttccagaaatttggactcttacttaccagcagaattcagctaccccggatgaagatttgataaagtgga

SEQ ID NO: 35665 - DNA, 99 bp, Homo sapiens
ggtcgggctcagcctcggtgtcccccagttcggcaaagagtaaacatcagtctccaaagataactacatcccttcttcccatcaacaatggctccaaag

SEQ ID NO: 35666 - DNA, 90 bp, Homo sapiens
cgatgcgaacgtggccaagttcttaaacaggtcctgaacgaggctgtgggggccctgatgtaccacaccatcactctcaccagggaggac

SEQ ID NO: 35667 - DNA, 75 bp, Homo sapiens
tgaactgaaacggattgccagagaattggcagaagtctattatcctcccagtccacaacgctgaaccgtggctgg

SEQ ID NO: 35668 - DNA, 90 bp, Homo sapiens
aaattttttcccaaagaagttattagaacttgatagttttctgaagggcaactccaacaacattgccaccgtggacatctccgcaggctt

SEQ ID NO: 35669 - DNA, 90 bp, Homo sapiens
aaagcaatgaataaatttggtgaagcacttaagaaatgtcatgagattgagagaggatggtaggatgctctttgactacctggcggacaa

SEQ ID NO: 35670 - DNA, 90 bp, Homo sapiens
gaataatatagctggtattgaagagtgcgaaaatccaaagcagctgatgagaagagacgctccttggctaaacaagcacgagaagactac

SEQ ID NO: 35671 - DNA, 90 bp, Homo sapiens
gttaaggattccaagtaactcttatttgaaatacactttcgggaaatggcctctaaatcctggctgaattttttaaccttcctctgtgga

SEQ ID NO: 35672 - DNA, 100 bp, Homo sapiens
cacacagacatgatggctctcattgacatcactgtgcggcacatcgcagacctgtcaccaggagacaaggcaatttcttgcaaccaccaccgaggccccg

SEQ ID NO: 35673 - DNA, 82 bp, Homo sapiens
ccttgagtcagtgcgccgctctccagcccgcttgaacggaacaagatcactcaaggtgaaggataatctactaataccagca

SEQ ID NO: 35674 - DNA, 100 bp, Homo sapiens
ctctgtatgatgatgtgaaagtgcagtttttctcttcgatgctctctgtgtgggtatgtgtgtagccatcctccttctttgaagtctcatatgtggaaac

SEQ ID NO: 35675 - DNA, 88 bp, Homo sapiens
agaaatgcttctttgtgaaattttttggaacagaagatcagaacatgacatcgatacaagtgaaacagcattccagaacaatttctga

SEQ ID NO: 35676 - DNA, 98 bp, Homo sapiens
ggaaaggtttttatctgaacgagtaaatggaaggtggagccgccaccaaaatgcagattttcgtgaaaacccttacggggaagaccatcaccctcgag

SEQ ID NO: 35677 - DNA, 100 bp, Homo sapiens
cgagtctcggagaagatgtggtggcttccgtttgttggtggaggaggtggcaggcctcggcggtcgatgaaacaggtgtagaagttaaggacattgaatt

SEQ ID NO: 35678 - DNA, 123 bp, Homo sapiens
cgccgcgatcgtggggcccgcgaggcgggcagccggggcgtccagattcatgatgttgctatcaaaagttgagaaattgtcagaagaaatcatggagataatgcaaaatttaagtagtataca

SEQ ID NO: 35679 - DNA, 100 bp, Homo sapiens
gcaccatgccgctcctaagcctgcacagccgcggcggcagcagcagtgagagcacagacgcagtcttcagcaaggaagtgctgggaacgccctggagtga

SEQ ID NO: 35680 - DNA, 117 bp, Homo sapiens
cgggcggccgcggcgcggcgggaccatggagctcagagcgcagccccggcgccggcggcgggaccgcggaccggaaggatgataaagactatgctttaaaacaaatagaaggaactg

SEQ ID NO: 35681 - DNA, 87 bp, Homo sapiens
cgtcgctgtggcccgcgccggcggcatcgagactatcgctaatgagtatagcgaccgctgcacgcccagaagatggctgtgccaccc

SEQ ID NO: 35682 - DNA, 50 bp, Homo sapiens
aagcaggcgaacccgcggcgcaataacgattctcaagtccaaagatttaa

SEQ ID NO: 35683 - DNA, 75 bp, Homo sapiens
gccctgtggcatgaggaagctgggggcatcttctccccaggtcttgccgccttggtagcttgctcctggtatggc

SEQ ID NO: 35684 - DNA, 51 bp, Homo sapiens
gtcatatgctaggccactatacagatgtactgcatttggaaatgggaaaac

SEQ ID NO: 35685 - DNA, 90 bp, Homo sapiens
gtgaaacctcctagtagaaaaagttcttgggacaaacttcatttggtaacagctgtggactggcactttgaggaggctgtggatggtgag

SEQ ID NO: 35686 - DNA, 82 bp, Homo sapiens
gagccactgtctgaagaagctggtggtgtgaaacgtaaatattttcaccacgatcgattagactgggatgaacacagttctg

SEQ ID NO: 35687 - DNA, 74 bp, Homo sapiens
ttgtggatcgctgtgatcgtcacttggttgtggctgctcctggttacgttgtgcctgaccgaggaactggcagc

SEQ ID NO: 35688 - DNA, 74 bp, Homo sapiens
aacagtagcaaaggagatcagtgaagccatgaagcttggaactgcagttggctttttgctaccaccagttttag

SEQ ID NO: 35689 - DNA, 74 bp, Homo sapiens
gggaccataagggcttaactcatatatttaacccccctccaaaaagggtgctttctctgtggtccgcaggtgtg

SEQ ID NO: 35690 - DNA, 101 bp, Homo sapiens
cagaaaacattgtaatggccatcgctggaaacaagtgcgacctctcagatattaggttcgatacaagaggctgttttcctagcgtggcttgctgcctttgg

SEQ ID NO: 35691 - DNA, 100 bp, Homo sapiens
cgcgtgaccagcacggaggagtacccccacctgaagccagcccgctaccgccgtggcttcatccacaatggcatcatgcacagcgactcggactccgacc

SEQ ID NO: 35692 - DNA, 83 bp, Homo sapiens
cgcagctggtgggtgtacacactgctgtttaccttggcgaggcctttcaccaagtccatgagcactacaaacaccactggttt

SEQ ID NO: 35693 - DNA, 51 bp, Homo sapiens
gctcatcaccctgaactcggaaggcctggagctgctgaagactgctattgg

SEQ ID NO: 35694 - DNA, 74 bp, Homo sapiens
gtcattcacaaccccctgaaagcgtcatgttggcagcttcctattggtctcttctggccccagcagttgagatg

SEQ ID NO: 35695 - DNA, 83 bp, Homo sapiens
atgagccccggagccacatgatggacgtccagcgctggcgggaggagctctcccacatgaagcgacttcccccagtgcttccc

SEQ ID NO: 35696 - DNA, 98 bp, Homo sapiens
tttatgttctatgctccctaatgaagatgctattaaggagcaaacggggattcagcgtccgatcctttggaacagggactcacgtgaagcttccagga

SEQ ID NO: 35697 - DNA, 111 bp, Homo sapiens
tatctgtcttcggtggactccttcggcagtccacccaccgccgccgcctcccagatgacttcaaacctgcttctattgacacttcttctgaaggataccttgaggttggtg

SEQ ID NO: 35698 - DNA, 100 bp, Homo sapiens
caacaccgggacacccgcgaggccggaaaatggctcatccacctgcagacatggggcgcagaaagtcaaaacgaaagccgcctcccaagaagaagatgac

SEQ ID NO: 35699 - DNA, 82 bp, Homo sapiens
tgtggtccagaagcagatatcggtgagtgatcaacaaatacaagcgcagacgatttcagaaaaccaagaacctgctgacagg

SEQ ID NO: 35700 - DNA, 78 bp, Homo sapiens
gcggttcgggtccaagatgatgccggcacgtgtggttctcaaatataggcattctgatgggaacttgtgtgttaaagt

SEQ ID NO: 35701 - DNA, 75 bp, Homo sapiens
aggagcaagagcaagatcaccgtgacatccgaggtgcctttctccaaaagagaagtacaacagttccatcctgct

SEQ ID NO: 35702 - DNA, 74 bp, Homo sapiens
tgccccgagtctgttccccgccgcccagaggttgacggatatattcagacgttacgacacggatcaggacggct

SEQ ID NO: 35703 - DNA, 75 bp, Homo sapiens
ccaggtgttggacgcagacggcgtcacttgcttgggtggacccaagtggagagattgtggaactggcgaaaggtg

SEQ ID NO: 35704 - DNA, 82 bp, Homo sapiens
cgttggctgggaccgtgcgcgtgcgcctgggggcaccgctgccgttccgaggaaactactttgcttcgcactttttcatggg

SEQ ID NO: 35705 - DNA, 95 bp, Homo sapiens
gaggaggtcatgaaggacctgagcctgacgcgggccgcgcggagctgtaggtaaaacttgcctactgatcagttacacaaccaatgcatttcctg

SEQ ID NO: 35706 - DNA, 100 bp, Homo sapiens
cgctcagcgccgagggcgagatcgtgcagggttaccttcccgccaatgtagaccggagaccagccactctccagagaaaacaaaaagaatattttgcatt

SEQ ID NO: 35707 - DNA, 100 bp, Homo sapiens
gcttcttgcaatgggatcggggaactttggcgaaataaaaggtgctggagaatctggtaaaagcaccattgtgaagcagatgaggatcctgcatgttaat

SEQ ID NO: 35708 - DNA, 82 bp, Homo sapiens
gtggtcgtccctgccctccccggccccggggtgcaccccgcaagagcagtcattatggcgaaccttggctgctggatgctgg

SEQ ID NO: 35709 - DNA, 80 bp, Homo sapiens
ctggagcctcagttggaagcagccgatccagcctgcggagcctgtggggcagccagagagatgacacgggggaaattcct

SEQ ID NO: 35710 - DNA, 101 bp, Homo sapiens
aaatgaggcaagttatcctttggaaatgtgctcacactgagacatgggggacaaaggacagaaaggcagtgtgggtcgtcatggaaaaattggtcccattg

SEQ ID NO: 35711 - DNA, 75 bp, Homo sapiens
ggcttatcgaacagagccgggagttcaagaagaacactccagaggtttggtgcacctcgatttggaggaagtagg

SEQ ID NO: 35712 - DNA, 90 bp, Homo sapiens
gaaagaaagccttcctccagctgcagagccttctcctgatgttccatttaagcagacctcttccatagctgtagctggagcggtaattgg

SEQ ID NO: 35713 - DNA, 83 bp, Homo sapiens
ggccctctgtctgcctgtgtccctgaccatggctccctgcagtaccctttaacggacatgctgcccatgccaggagatccaac

SEQ ID NO: 35714 - DNA, 100 bp, Homo sapiens
cctggggtggcaaggctgcaaacaaggaggcaacccaggaggcttttatgaagcgggccatggcccttcataacacaaggcttttatctgcttattccgc

SEQ ID NO: 35715 - DNA, 75 bp, Homo sapiens
cgaagactgcgcgtgctcaggagcgcggagcggcccgctgagcgcagagggcttcgtgggacacatatgcaacat

SEQ ID NO: 35716 - DNA, 100 bp, Homo sapiens
agaagtacaagcagacaaggagcaaagtgaggctggctcacagttggaccaacgcttacaaatagcaactacaatgcagaaacatatgcatcctatttca

SEQ ID NO: 35717 - DNA, 82 bp, Homo sapiens
gtggaggagctgtgcagccgcgaggaggcgcgggaggtgttcgagaacgaccccgagacggcatgtcgggccccaggcctgt

SEQ ID NO: 35718 - DNA, 74 bp, Homo sapiens
gacgaatctttacctacactgactctgatagatacaccaatttggaggaggtaatagcctgcagctggtgtttt

SEQ ID NO: 35719 - DNA, 101 bp, Homo sapiens
tttgatggccatggcataaggaactctatcccaggaatacagctttgcattaggtactccaaagattcaggtttactcacgtcatccagcagagaatggaa

SEQ ID NO: 35720 - DNA, 83 bp, Homo sapiens
tctggggcaaagggaccacggtcaccgtctcctcagacttcccaagtaagaagcggaagaggagccgctggaaccaagacaca

SEQ ID NO: 35721 - DNA, 51 bp, Homo sapiens
ggtttttctcaaaggaaagctggttatcaatactctggctgaccatcatca

SEQ ID NO: 35722 - DNA, 75 bp, Homo sapiens
ccggagtccggataagccgggcgggagcccctcggccagctttggagtttaacccttctgccaatccagaggcaa

SEQ ID NO: 35723 - DNA, 82 bp, Homo sapiens
gtgcctatgtgaaactgctttctaaaacaccagaactcaacctggtggagccccctgagctgcccgctgatctgcagcactg

SEQ ID NO: 35724 - DNA, 75 bp, Homo sapiens
atctccagcaccctcatcgccctggccgacaagcacgcaactgactttggggtgtcaggcgagctgacagcgtct

SEQ ID NO: 35725 - DNA, 100 bp, Homo sapiens
atcgtttcttcccggaaacatctgcagagactagcttttcagacatatctgaagagatggattaagaatgctttggattaaggattgtggagcacatttc

SEQ ID NO: 35726 - DNA, 50 bp, Homo sapiens
ggtggagtcggagctgggacggaaaatgtttataggaggccttagctggg

SEQ ID NO: 35727 - DNA, 111 bp, Homo sapiens
cagctgcctctcatgtacttgtctgttgggggcttgtgttgatcaggagtgaattcacagtctaccatgaattggaagccagagactgctgctactttgaaacgtacgata

SEQ ID NO: 35728 - DNA, 89 bp, Homo sapiens
ggcaggaggaggaggaggggctccggctggtctgtggtgaggaacaggcctttgagagcagccagaagtacaaagaggggaagtacatc

SEQ ID NO: 35729 - DNA, 99 bp, Homo sapiens
ggcgacccctgctgctgctactgctgttgctgctgctcgattactacagcccggccatgctgggcctgaagaccgaccaggaggtcctcggggagctgg

SEQ ID NO: 35730 - DNA, 100 bp, Homo sapiens
aaagacgtaatcaaagacggcaacgcgcttatcagcgctatgagaaggaccttctcaaatgattcatgtgagaaattgcttctgctgtacgagtttgaag

SEQ ID NO: 35731 - DNA, 100 bp, Homo sapiens
gcctgtaatgtttggcgagtctggttgggtatctacagccattggttgctgttcaggtcagctttgctcctaacaacactgggaaagaagtaacagttga

SEQ ID NO: 35732 - DNA, 100 bp, Homo sapiens
attcttctggagcatggacaagcgaatttcagtcagtgctgctgatactttggctgtgaggcaaaaaaggagaatttatgatatcaccaatgtcttagag

SEQ ID NO: 35733 - DNA, 90 bp, Homo sapiens
cacgagagctggcagcagggcttcgacctggcagccacgcaggacgccgactttcacgaggcaagaccacaccattgtggacacagtgct

SEQ ID NO: 35734 - DNA, 100 bp, Homo sapiens
ctatctattggaattcctcgaactccaaggtttggaaatcccttgtctccaggttgctgggattgacttcttgctcaattgaaacactcattcaatggag

SEQ ID NO: 35735 - DNA, 100 bp, Homo sapiens
ttgcgcctggcctacagcgaggctggactcgggcagccgcaagtagctcctccagcgccagcagccagcccagcagcaagcagcaggccccagccgcaga

SEQ ID NO: 35736 - DNA, 82 bp, Homo sapiens
gtgagagccggacgggcactgggcgactctgtgcctcgctgagggacactgggtccccttggagcctccccaggcttaatga

SEQ ID NO: 35737 - DNA, 80 bp, Homo sapiens
gaaagacaatcctgccttctccatgctgaatgactcggatgatgatgtgatttatggtggccctgttccagtattggtta

SEQ ID NO: 35738 - DNA, 100 bp, Homo sapiens
aaggaatttctacctgaaggccaggacattggtgcattcgtcgctgaacagaagatcccctgggagcaattcacttgagaggctgtgtggtgacttcagt

SEQ ID NO: 35739 - DNA, 100 bp, Homo sapiens
ttgatttccggagtcagtcattttactgtcaagacatttcttcggcattctgcaacaggaagtctgcggtcttgcagttcttcagactgctttaataaag

SEQ ID NO: 35740 - DNA, 88 bp, Homo sapiens
ggggacggtaaccgggacccggtgtctgctcctgtcgccttcgcctcctaatccctagccactatgactgtccaggacggccggcagt

SEQ ID NO: 35741 - DNA, 100 bp, Homo sapiens
gctgggctccggggacactttgcgttcgggctgggagcgtgctttccacgacggtgacacgcttccctggattgggacagagcgggatgccaccagcttg

SEQ ID NO: 35742 - DNA, 83 bp, Homo sapiens
ctgctggggcgctacctgtgtgccggtgccgtggacttctacaacaacctggagaactatggggggacccagtacagcctcgt

SEQ ID NO: 35743 - DNA, 90 bp, Homo sapiens
cctggacttggcttccctcaagtctatccgagagtttgcagcaaagatcattgaagataaacattgacgatcttgaggatgaccctgtgg

SEQ ID NO: 35744 - DNA, 98 bp, Homo sapiens
ggttaatagtggcatggaagatccatttggactatgagagtaaattgcaggccttgcagaagcaggttgaaacccgatctctggctgcagaaacaact

SEQ ID NO: 35745 - DNA, 111 bp, Homo sapiens
gcagacctcctcagctgaggaagatgttcccacctgcggtgtcctctccctccccgcatacttcagcccctacaacggcgggtccctgggccatgacgagcgagccgatgc

SEQ ID NO: 35746 - DNA, 82 bp, Homo sapiens
gcctgcagcgggagctggacggcgagcgcgagcggcgcgagaaacccatggcgaattgtggatgattgcggtggagccttca

SEQ ID NO: 35747 - DNA, 90 bp, Homo sapiens
ttcgcagtggtcgcttcttctccttgaagaagcctgagaagatgatgcacagatagagaggcaccaggacttgagaggcaccaggacttg

SEQ ID NO: 35748 - DNA, 90 bp, Homo sapiens
gagcaggacgcggaggccggggacgcggaggccgaggacgcggaggacgcggctctgccagagttctccatcagcagcttctgcaccgtg

SEQ ID NO: 35749 - DNA, 96 bp, Homo sapiens
ctactccggacgcaaagctgtcatcgtgaagaatgcaagttctagccggtttttcctacaaggaatccagttgaatacaattcttcctgacgccag

SEQ ID NO: 35750 - DNA, 75 bp, Homo sapiens
catcctgtcacaggccatgctctggcaaaaacggcaagttaaagtcttcagagccctgtatacgtttgaacccag

SEQ ID NO: 35751 - DNA, 100 bp, Homo sapiens
cgcgttgtggtgatcagcagctcggaagactcagatgccgaaaactcggatacagttgatatattagttggatggcatatagatcatactcagaaacctt

SEQ ID NO: 35752 - DNA, 106 bp, Homo sapiens
cttggtggcgtctgatgctgaactggatgctaaacttgagggtggagagattcaaccagttagcgtgaaagttggagataaagttcttctcccagaatatggaggc

SEQ ID NO: 35753 - DNA, 75 bp, Homo sapiens
atggaagaccaggacagtcctcaagaggtccttaagatgctcatagatttggctttgatgacagtagggaaagaa

SEQ ID NO: 35754 - DNA, 90 bp, Homo sapiens
ccctgggcagacctcttcagaaatagcaggtgctggagaatctggtaaaagcaccattgtgaagcagatgaggatcctgcatgttaatgg

SEQ ID NO: 35755 - DNA, 100 bp, Homo sapiens
aagagcttctctccagagtagaaagcctccatcaagaaatcggcgagagagagctgagctaaggccagacttctttgactctgcagctatcatagaagat

SEQ ID NO: 35756 - DNA, 100 bp, Homo sapiens
tccgtgaatgtatagattacgtagagaagtatggcatgaagtgtgaaggcatctacagagtatcagaaaatggtgtgaatggaacattaacttcaaatgt

SEQ ID NO: 35757 - DNA, 100 bp, Homo sapiens
tttactgtaacccagaaaatgatagaatgagaatgaagtatgggactgtaactcttgaccaggcaacagataatgcaaaaataattggaaaggcgatgct

SEQ ID NO: 35758 - DNA, 100 bp, Homo sapiens
gttgctgacccagaggagagttctccaaacatgatcgtttactgcaaatgagtgatagttgcttcaggaatcttgcagaagaccgcagtgggataaatct

SEQ ID NO: 35759 - DNA, 100 bp, Homo sapiens
tacagttagaacttcaaaaaattgaatgggagaaagagctgtacgatttgagcttctatatacctttgagaaagacttgcaagttttcagttgctctgtc

SEQ ID NO: 35760 - DNA, 81 bp, Homo sapiens
tggtgtgtaccagtgctgtgggtgagctgcccagctgtgagagaaaccccgttcaccaaggccatggaagtggaggctgca

SEQ ID NO: 35761 - DNA, 52 bp, Homo sapiens
gaactgaggccagtggtggaaacagagcacgaacttccaggagccggtgcag

SEQ ID NO: 35762 - DNA, 100 bp, Homo sapiens
ctaaaaggtataaagctgcttttacagaatgttgccaagctgctgataaagctgcctgcctgttgccaaaggatgagaacaagttgagcagtgccaacgg

SEQ ID NO: 35763 - DNA, 75 bp, Homo sapiens
caaaatctacaagatgatgcagggaggagcagcagtgttgtactgctacttctataaacggacagccgtaagact

SEQ ID NO: 35764 - DNA, 90 bp, Homo sapiens
ccggggagcagtatgccggaagctggttttcaggccacaaatgctttcacagaaccagcctttcaaacagtttccagagatggattatcc

SEQ ID NO: 35765 - DNA, 100 bp, Homo sapiens
ggcagcaaggtgtcggtgttccacgtgaagctcaccgacagtgccctgagggccttcgagagctaccgcgccagacagatcctgcccggcctgtacatcg

SEQ ID NO: 35766 - DNA, 51 bp, Homo sapiens
ggcaacggggcactgacctgggtggtaaaagtgcagttttaaagtgtctcc

SEQ ID NO: 35767 - DNA, 83 bp, Homo sapiens
gtcagcatcccagccgtgctcacggctgaccccgcactacatctacccaccagccatcgtgcagcccagcgtggtgatcccag

SEQ ID NO: 35768 - DNA, 82 bp, Homo sapiens
gagccctcgcgacgcgcccggcccggagcccccagcgcagcggccgcgatcatggaagggaagtggttgctgtgtatgttac

SEQ ID NO: 35769 - DNA, 80 bp, Homo sapiens
cgacttgcgcgccttgtcactggagtgcaagaagaaattcccacctgtcaaagaggtaccgaggagaaggcattgtatat

SEQ ID NO: 35770 - DNA, 100 bp, Homo sapiens
atggccggaatgcagtaccctcagcagcagcttctcggacaaactatttagtggaaaaggcttacattttcagccatcagttttagattttggaatacag

SEQ ID NO: 35771 - DNA, 100 bp, Homo sapiens
ctttcctgaatgccctcggtgccgctggcaacttctctgtggactctcagttccatcacctgaagtggacctcttgggaccgtctgaaggtaccagctgg

SEQ ID NO: 35772 - DNA, 95 bp, Homo sapiens
gaagaaagaagacgccacagacagcagcgcagtaccaccttccagagatcaggtagcatctaaaggaactggtttaaatcctaatgccaaagtat

SEQ ID NO: 35773 - DNA, 75 bp, Homo sapiens
catggtcccagaaacgtcactatcaagaaggtgaagatgcttttgatgccctccctccatctctcccacctcccc

SEQ ID NO: 35774 - DNA, 92 bp, Homo sapiens
cggcgcccgctggccgggctggctgcggccgccctgggccgggccccaccggacggtgcgcgcggagccatggttatcatgtcggagttcag

SEQ ID NO: 35775 - DNA, 100 bp, Homo sapiens
ttctagccgaggagaacctgcccttcgccaaggagatcgtctctctcatcgaggcccaaaccgccaaggtttgcccatttggcagcagtgaagctgttag

SEQ ID NO: 35776 - DNA, 90 bp, Homo sapiens
ctttttttgcagagtcagcgctttgggaccaagagtgaagacatttccacctggacacctgaccatgtgcctgccctgagcagcgaggcc

SEQ ID NO: 35777 - DNA, 100 bp, Homo sapiens
gaaggagggctctcctgtctgccaccatcctgggttgacaattctacacaaggaggatccaaactactggatacaggtgcatcgcttggaacatggagat

SEQ ID NO: 35778 - DNA, 100 bp, Homo sapiens
ccgtctccgcaggtcagctccgccgaaggcgccgccaaggaagagaaccagacgtcctgggtcctctccagcatggcagccctctactggagggtgaaag

SEQ ID NO: 35779 - DNA, 100 bp, Homo sapiens
atttgatagaggaaatgtatgatgaaggctctacaagaagcatggcagcatctgcttctggggaagcctcaaggagcttttattcatggtggaaggcaaa

SEQ ID NO: 35780 - DNA, 78 bp, Homo sapiens
gcgcgtttggctgcaatgagctcggcctcggggctccgcagggggcacccggcagtgctgggctttgacaaacttcct

SEQ ID NO: 35781 - DNA, 98 bp, Homo sapiens
cagcttctacttcatactgtaaagcatggagaaaaggatttttacctcctataactccaccagaaaagttttttctttcccagctgatgctggcaccc

SEQ ID NO: 35782 - DNA, 138 bp, Homo sapiens
ggagatcgaggacgccgagaagtactccttcatggccaccgtcaccaaggcgcccaagaagcttggttctacagccattgggatccagacatcagagggtgtgtgcctagctgtggagaagagaattacttccccact

SEQ ID NO: 35783 - DNA, 50 bp, Homo sapiens
acccaccaccccctctctgaccatgagtccaccctgcacctggtgctccg

SEQ ID NO: 35784 - DNA, 100 bp, Homo sapiens
ggcggcaccggatcaccaagacggagccggggatctgacaacagactggctcaccggcggcagacagttctccgtgagaaggggagaaggttagctaatc

SEQ ID NO: 35785 - DNA, 75 bp, Homo sapiens
cgagtcttcggagcgaccccggcagaaacctgtgaaggtcgaaacagctgcgtttcctgttttaatgttagcgtt

SEQ ID NO: 35786 - DNA, 75 bp, Homo sapiens
ctgcaggcggcccactggcagttcgagggagaagtggtgccacatgacccaggaggagcgcgacgacagcctccg

SEQ ID NO: 35787 - DNA, 90 bp, Homo sapiens
gctaactgaagagggcacctttaaggtggtggatgaagaggccatggagaagtaagactttgaccccgacgcaggcttcagtgattgccg

SEQ ID NO: 35788 - DNA, 75 bp, Homo sapiens
ccgctgctgtcttcgtgggaggcgccgtgagttcgccgctggtggctccgggccgccagatcccacccttggacc

SEQ ID NO: 35789 - DNA, 100 bp, Homo sapiens
gctggctttgttcccaatgacatgcaagttggacagacgggaaaaatagtagcaccagtccacgccatccctctgcgctcctcctgggtcatgacctgtg

SEQ ID NO: 35790 - DNA, 80 bp, Homo sapiens
tgaatgtggaaaggagattgacagtcacaattttgtaataagcaatcccacagagtattgatgaggaaactgaagtttgg

SEQ ID NO: 35791 - DNA, 98 bp, Homo sapiens
gtatgatacagcatcctacaagaatgagcaaacctattctgatggcaggagattgaggacagtttaccacctaggatgacttcagtgactagatcaga

SEQ ID NO: 35792 - DNA, 82 bp, Homo sapiens
aagatccccaaccccagcaagagccacctgttccaggtccttctatatgatccactctttgactggaccatgaatcctttga

SEQ ID NO: 35793 - DNA, 98 bp, Homo sapiens
ggacaaagctgttgtctcagggagcacagaacatcagaggctccttgaaatgctagatacagagaaggaactgttaaaagaaaaaataaaggaagctt

SEQ ID NO: 35794 - DNA, 75 bp, Homo sapiens
gaagatgaaggattaattacacaaggtggaagcgataactgttcccaggaaaaaaaggaggaaatcctggaaaat

SEQ ID NO: 35795 - DNA, 75 bp, Homo sapiens
ttttgacacttttgttcaagtacacatttcatcaggcattctgtgaaactttagaagagacaaactaccgcttac

SEQ ID NO: 35796 - DNA, 148 bp, Homo sapiens
gggttgtgcccaacgctgccaatggctgggcaggccagcccccgcccacgtggcagcaaggatatggcccgcaaggttctgactcagaagatcttttggaagaattgctgtgctgtttgatgcagttgatcactgatattccactctt

SEQ ID NO: 35797 - DNA, 75 bp, Homo sapiens
aatgccttgtctctacctgcagacattagctaggcatgttatttgaaagcaattgagacgcaaccgaactttgca

SEQ ID NO: 35798 - DNA, 98 bp, Homo sapiens
gaagaggcacgtccgcacacacacagggcttttttccagacttcaagctcccattccaacagtaagagcttcttccacatcacagcccttggatcaag

SEQ ID NO: 35799 - DNA, 74 bp, Homo sapiens
tcattaaatgatatcaagagtacaatagacgcttctaatatcaggtggagccgccaccaaaatgcagattttcg

SEQ ID NO: 35800 - DNA, 80 bp, Homo sapiens
cagctgctgcagctgctgcacagaaattaatgcgaacagacagacttgagaacgctttggataaacaagaagaattgaca

SEQ ID NO: 35801 - DNA, 100 bp, Homo sapiens
catccggaacctgctcatctggatcaagaagaatttgctaaaagagcggccagagttgttcatccagggagacagcgtacctgcgtcatgcgggcctggg

SEQ ID NO: 35802 - DNA, 100 bp, Homo sapiens
acactggatcagaaacaggccatggagggacaggatccggaggcgccagctcaaccacttactaatggaacacatacaggaaattcgaactttgagaaag

SEQ ID NO: 35803 - DNA, 100 bp, Homo sapiens
agcaagtgtgcttgcagtagatgaaaatggaaaacatttaaagttgatgatatgttatcaaaagtagagaaaatgaaaggagagcaagaatctcataggt

SEQ ID NO: 35804 - DNA, 76 bp, Homo sapiens
tctgatagttgttccttgtgcagaaggtgtgatgaatgcagactctgctaccattttggctgtttggatcctcctt

SEQ ID NO: 35805 - DNA, 74 bp, Homo sapiens
tcgtatgtccgctatccagaacctccactctttcgcattttgaaagcgaagcagaagccgtagaatcagcggcg

SEQ ID NO: 35806 - DNA, 101 bp, Homo sapiens
cagcggcagcgatcaagcaggcagcgggctttgccagcaaaaccgaaacagttgtcactcagcccagtccatcagtttctcagcccagtacttctcagagt

SEQ ID NO: 35807 - DNA, 100 bp, Homo sapiens
ccctcaatggattggtttacataggtcaacatgtaaaagtcacatctgaggctctgggtcatgctggcagacatcttcagcaaatcatcttagatcaatg

SEQ ID NO: 35808 - DNA, 100 bp, Homo sapiens
aggaagacgaatcgttaaacatctgaaagggtcaggtatccaagcccaccaatgggatctgtctcagcacccaacctgcctacagcagaagataacctgg

SEQ ID NO: 35809 - DNA, 100 bp, Homo sapiens
cacgttacatcaacacggagcatggaggcagtcagctgagatctgtatctgtggacctgaatgttgatccctcgcttcagattgacatacctgatgcgct

SEQ ID NO: 35810 - DNA, 100 bp, Homo sapiens
gcccaggatgacagctggagaatggagtcaggtgcagtagacattgttgcaatcatgatcggcaatctgaaaggcacaaaaattctgcaatctattcaaa

SEQ ID NO: 35811 - DNA, 100 bp, Homo sapiens
ctcaaaagtgcccagtataagaaaccacccatcacaggttcccagtctaagtgggtgactttccaagatagaggcagatcatttctccgtcaagtataga

SEQ ID NO: 35812 - DNA, 83 bp, Homo sapiens
cgtggcagtccatcaaggggacccacctcaccatcacccaggattttctcaactgaagggcctgaacttgtcccataataaac

SEQ ID NO: 35813 - DNA, 83 bp, Homo sapiens
aatatctgtcttcggtggactccttcggcagtccacccaccgccgccgcctcccagcttccgtccagtgcctctggaacagac

SEQ ID NO: 35814 - DNA, 50 bp, Homo sapiens
actctcgtgaacatagctttaataggtggtcgtaacccacaaaatccttc

SEQ ID NO: 35815 - DNA, 75 bp, Homo sapiens
ccgccgcgggtccgtgcgcccagcgtcccagggcccaggccgagcaggaaaatctctgaaggaaatggaaacacc

SEQ ID NO: 35816 - DNA, 75 bp, Homo sapiens
cagttggagaagatctatgggtcagacagaatttgaaactggaacgccaagctgaagaagaacgaatacggaagc

SEQ ID NO: 35817 - DNA, 96 bp, Homo sapiens
tgcacgtgatactcacacagtggcttctgctcaccaacagatgaagacagatgcaccaacgagacaagttggatggcttgaggactggtactaaaa

SEQ ID NO: 35818 - DNA, 75 bp, Homo sapiens
ccgtggtgaagcatgaagtcacagggctactgttttccaatcctcaggtttaccgacaagactgtgaaactttcg

SEQ ID NO: 35819 - DNA, 50 bp, Homo sapiens
tggttcaacaactacaggaaaggtccttggtatagtagtgggagttctcc

SEQ ID NO: 35820 - DNA, 46 bp, Homo sapiens
cccatcaggaccattttatcaaaattgggacttgactgagattgat

SEQ ID NO: 35821 - DNA, 74 bp, Homo sapiens
gctactcctactcatctattttgaataaatcagaaactggaagaggatcacctagcccgggtagaagaggcaat

SEQ ID NO: 35822 - DNA, 100 bp, Homo sapiens
gcacacctggtggtcctgaagacaggagaaaatgctgagaagcttctgcagttcaagcgttggttctggtcaatagtagagaagatgagcatgacagaac

SEQ ID NO: 35823 - DNA, 129 bp, Homo sapiens
tatttgatttctctagtggacagataacccaagtcaaatctaagcatttaaaagacaggttcaattcccatgaaagtgcagcacatgcaattgtttctgttaatggtactaccattgaaggtcatgttg

SEQ ID NO: 35824 - DNA, 85 bp, Homo sapiens
gcggcgcggcagcggagggacggcagtctcgcgcgggggatatgagactttctactcggaatatcctgagtgttgcgtggatgta

SEQ ID NO: 35825 - DNA, 75 bp, Homo sapiens
gaaccatgggcactgcagggtgagaggccacgtcagagctgcccagaaacctgaatagagtcaccttgtaataac

SEQ ID NO: 35826 - DNA, 75 bp, Homo sapiens
ttagattcttatcacaaccaagtagaactggctcttcaaattgaaccagatgacgtgtactactgtggaataaag

SEQ ID NO: 35827 - DNA, 109 bp, Homo sapiens
gaagttctggttgctggatttggtcgcaaaggtcatgctgttggtgatattcctggagtccgctttaaggttgatgacaacaagaaactaggagaatgggtaggccttt

SEQ ID NO: 35828 - DNA, 100 bp, Homo sapiens
gaacatccagtttgatgtttactacaagagcctgcctgaggaggagcagcagcgggtcttgggggaagagaagatgctgaacatcaacaagaagcaggcc

SEQ ID NO: 35829 - DNA, 75 bp, Homo sapiens
tttctgcttttggtaacatcctttcatgtaaggtggatggtctgaagcatttgctggagacaggggcctcggtca

SEQ ID NO: 35830 - DNA, 146 bp, Homo sapiens
gggaccacaggccatcacagtcccctgttccgaggtcaggaggatgcaagtcctgacagattcagcaacactttcaggcttcagagagcccctgacgcctgcaggaacatggcagaggagacaccgtctgtcttcacaaagtacgt

SEQ ID NO: 35831 - DNA, 83 bp, Homo sapiens
cttcttcactgctaagactacctttttcagaaatgcgcagagcaaacatctttcaaagaaaacgccaggtcttcaagggtgtc

SEQ ID NO: 35832 - DNA, 90 bp, Homo sapiens
ggaactttcccagtccccgaggcggatccggtgttgcatccttggagcgagctgagagctcgaggggccctcctcgccaaagacagccta

SEQ ID NO: 35833 - DNA, 100 bp, Homo sapiens
ccagcttcaggagtactggcggaggggctggacgttccacgccaaaggcgctctgctggaaaagaaggtggacgtggacaagcgtgggctgggagtgacc

SEQ ID NO: 35834 - DNA, 98 bp, Homo sapiens
gcatattggagcaagttgtaaactgtagggatgctttggctcaagaatatctcatggagtgtattattcagggtgccttgtactgtctccttggaaat

SEQ ID NO: 35835 - DNA, 100 bp, Homo sapiens
tggagcccgagtctgactccggggacgaggaagaggaggagtgtcatgggccggcagacatgcctggagtgcagcttcgagatcccagacttccctaatc

SEQ ID NO: 35836 - DNA, 90 bp, Homo sapiens
gttcgtgattgggatcaaccagacggaaaacccggcttgtaagaacaacatctgcctggacctgtcccccagtcatgggcttgatgggcg

SEQ ID NO: 35837 - DNA, 100 bp, Homo sapiens
agcctttaatcggttagacttctcaagtgcaattcaagatatccgaaggttcaattatgtggtcaaaaactcctctttcctaaaatggagtcgagtaaaa

SEQ ID NO: 35838 - DNA, 100 bp, Homo sapiens
ttgctgtcatgatatgaaagattccagtataagaccatcatcatgtggaaactgaccagggatgagaccaactatggaattccacagcgtgctctgcggg

SEQ ID NO: 35839 - DNA, 85 bp, Homo sapiens
tctggcgggcgctggccatgctgcagggcaaggatctcacattatcagtctttgaccgacacagaatgcctggcatttgataaat

SEQ ID NO: 35840 - DNA, 75 bp, Homo sapiens
gtggaagtcatttctttacccaagaatgacctgctgcagagacttgatggtgctggagaatctggtaaaagcacc

SEQ ID NO: 35841 - DNA, 100 bp, Homo sapiens
gagcagcaggcctccgggcccggcgccgccgcccgcaggcaagaggcgcagatgttccagagattcctggagatcttactcttaagacgtgtggcagtac

SEQ ID NO: 35842 - DNA, 100 bp, Homo sapiens
ccaggagctacaacttgtccacgacaccggctacttctcagctttaccatccctggaggagacctggcagcagattgtcccgctattacaattcctctag

SEQ ID NO: 35843 - DNA, 100 bp, Homo sapiens
cggaccatttataaccgcgacttcaagatcagctgcactgggtgttcaacagccatcactccttggagcatctcctaccatttatacacagcaaactgca

SEQ ID NO: 35844 - DNA, 100 bp, Homo sapiens
ttcatattttggaaagcagtttttaagacaagatgaactggacctcacagacaaacacagagaagccatgtttgcacttccagctgagaaaaaatggcaa

SEQ ID NO: 35845 - DNA, 106 bp, Homo sapiens
caggacttccctcccgactgctgggtctccatcaaccacatggtgaaacgggctgtaaaggcagaaaaccacgtcgtgaaactaaaacaggaaatcagtttgctcc

SEQ ID NO: 35846 - DNA, 75 bp, Homo sapiens
tccgcaggcgcacggacaagggtctgctaaaaggtcagagtaatgcagaatgcgtgccttcatctcagatttgtt

SEQ ID NO: 35847 - DNA, 82 bp, Homo sapiens
cttaatgggaggccccgggaggccgaggttcgggttgaaggggcccggccaggactcggggaagggtggcctgagagcagcg

SEQ ID NO: 35848 - DNA, 82 bp, Homo sapiens
gaggtgaatttccatgtcaacatagtcctggactggaaggatcaccagcacatatgcggccagtcagcagctgtcaccgtcc

SEQ ID NO: 35849 - DNA, 100 bp, Homo sapiens
attgagtttcccatggaattatttctgggaagtcgagacaacatgagtgtgattttgatctgttttccaaatgcacccaaagtatcgccagaagcagtga

SEQ ID NO: 35850 - DNA, 100 bp, Homo sapiens
gggcagaggcgacctccccgcgttccatgcgcacagggacaggggatctggccatgcactgattgagcagtggaatcccgtaggcctggttggaatcatc

SEQ ID NO: 35851 - DNA, 90 bp, Homo sapiens
gcggatgaagcagctggtggggctctactgcgacaaggagcaaggagcccctgcaggacaacgtgatcgccacctacgaggagcacgagg

SEQ ID NO: 35852 - DNA, 100 bp, Homo sapiens
tgggcatcacaaatacatttgccactattccaggaatggttgggcccgtcattgctaaaagtctgacccctgatgctggagtacaatggtgcaatctcag

SEQ ID NO: 35853 - DNA, 96 bp, Homo sapiens
aaacaacttcgaatctgggtcacttaaacaagccatctatccaggatgagagggccttaccaaaaggagatttcttccctcctgagcgtccacaac

SEQ ID NO: 35854 - DNA, 98 bp, Homo sapiens
gccctcccctcaggaacgtgtcccggggccgacccggcccgtagtgtggaagcagcttcagattcccagaagttgtgcatgagttcctgtgaggagag

SEQ ID NO: 35855 - DNA, 129 bp, Homo sapiens
aaagatgatgatatccttctcaaccttgtgggatgtgaaaactctgttactgaagggacacagcaggtcaggagagattcaacagcattacctcagcttattacagaagtgccaaggggatcatattag

SEQ ID NO: 35856 - DNA, 90 bp, Homo sapiens
tggcgcggagcccgggacgcgcgtacgccctgctgcttctcctgctccatcaagtatgatggtgaaggatgaatatgtgcatgactttga

SEQ ID NO: 35857 - DNA, 100 bp, Homo sapiens
gtgtcgtttttccttgagctgaacgtcttgcaacagtggccgcacgcataggccagaggcattgatgtgcagcaggtttctttagtcatcaactatgacc

SEQ ID NO: 35858 - DNA, 51 bp, Homo sapiens
ctaagccgattttccggaaaaaggatcttttgccagaaatgagggcatact

SEQ ID NO: 35859 - DNA, 73 bp, Homo sapiens
gctgtcctacggaaggagagctgcatgatctgattgcagaggaacctctttcaggagctataaaagaaaggga

SEQ ID NO: 35860 - DNA, 100 bp, Homo sapiens
cggaagatggcggccggcgaaaggagctggtgcctgtgcaagttgttgaggcctggcagctgcgattcagccacctcgtggggtatggtgctagatatta

SEQ ID NO: 35861 - DNA, 83 bp, Homo sapiens
gccttacaactacaaccagctggaaggcagattcaagcagctgcaagtgagggttgtcgaagagaaaatacaatgaagaatgt

SEQ ID NO: 35862 - DNA, 100 bp, Homo sapiens
aactgctgatccacatgagagtccactctggggagaagcccaacaagtgtacggtacagcaggtacagactgtgcagcaggtacaacatgtctatcccgc

SEQ ID NO: 35863 - DNA, 100 bp, Homo sapiens
aagaagattaaattgcttactggtaaacgcgttcaactggcggaagacctcagcacattgcaagcaacccgtgccttgatggtggttggcatcctcctgg

SEQ ID NO: 35864 - DNA, 100 bp, Homo sapiens
taaaatcagagtgtggctgcaaagtgaaaagcttgaacacggtctggaaaatcccgaagcagaagcccgtattcatctaggcattcaagatctcgtagca

SEQ ID NO: 35865 - DNA, 100 bp, Homo sapiens
cagagatccaagtgcgcgccctggcgggtccggaccaaggatagaatttttgcggcatttgaagagctttttccagattatgtttaaaattgaaaccaag

SEQ ID NO: 35866 - DNA, 75 bp, Homo sapiens
gtcaacgaaacctggcacggctcttgcttccgtccaagtggtaagaagttcagaagcaagcctcagttggcaagg

SEQ ID NO: 35867 - DNA, 100 bp, Homo sapiens
cacgtttaatttttctaaagagtcttgttatttcttctttgagaaaaacctgaaagatgtctcagagtcttttagtcctgctatacagctgcaccttgta

SEQ ID NO: 35868 - DNA, 99 bp, Homo sapiens
tcagaaggaacttgcagaaatcacattggaccctcctcccaactgtaggtatcagtttttggaagaagcttttcaaaatcagaagggtgcaattgagaa

SEQ ID NO: 35869 - DNA, 83 bp, Homo sapiens
cggagggaagcgccttccccacaggcccagaggcagagctacacaaccatggaatccaaattaattcctgttctgtgcgactg

SEQ ID NO: 35870 - DNA, 100 bp, Homo sapiens
tgaagaccccgaaggaaaaggaggaattcgccgtgcccgagaatagctccgtccagcagtgggtaattccagaattgattggccataccattgtcactgt

SEQ ID NO: 35871 - DNA, 75 bp, Homo sapiens
cggcaaatattacacttctctcctttctgcgctcctcagaccaccggcaggtgaacagcctgatgcagaccgagg

SEQ ID NO: 35872 - DNA, 98 bp, Homo sapiens
gagaccaaagctgagctcctccagtctgtggaagacctggagcggaacaacggctccctggaccggccctactacatgtccaagagccttctaaagat

SEQ ID NO: 35873 - DNA, 50 bp, Homo sapiens
ccaggaacagcagaggctgggccttggatgaccattctgccccccttgga

SEQ ID NO: 35874 - DNA, 74 bp, Homo sapiens
gaggctagccacgcaggcggggccctggttggatcacaaggacgagtcataagttttgaggtacgaaaagacca

SEQ ID NO: 35875 - DNA, 76 bp, Homo sapiens
ggagaggaggccaggacacctggaagccgggaaatgatcgtgctctcctctctcaagcacggcctcttcagtgggc

SEQ ID NO: 35876 - DNA, 100 bp, Homo sapiens
tccgagggaaacaagaaaacatcaaagaggtctagcaaagcacatgattaagtaccggtacatcccgttcacacatgggaagagaaggtacagaggcaag

SEQ ID NO: 35877 - DNA, 74 bp, Homo sapiens
cgttattggagccaggcctacaccccagccccttctgctccagcagctgcctcagcaactagcccgagccccgc

SEQ ID NO: 35878 - DNA, 126 bp, Homo sapiens
ccgggcagagaccatgtttgacaagacgcggctgccgtacgtggccctcgatgtgctctgcgtgttgctggtttaaaaggatgcttaatcgggagctcacccatctctctgaaatgagtcggtctg

SEQ ID NO: 35879 - DNA, 112 bp, Homo sapiens
acttagctgcaggttcttccaatgctgtcaagctcagtaggttttttgataagtacatttctggatttgggaatgagtgttcttcagaggatcctcgctgcccaggttccct

SEQ ID NO: 35880 - DNA, 100 bp, Homo sapiens
gggctctgcgcgctcctgccccggctcgcaggccaaccccttcaaggagcgaatctgcagggtcttctccacatccccagccaaagacagccttagcttt

SEQ ID NO: 35881 - DNA, 88 bp, Homo sapiens
aaccaattgttttacagtctgttccgcatgatcgttataataaggcaccagaatttcctgagtttgccactaaagtccaggaagctat

SEQ ID NO: 35882 - DNA, 100 bp, Homo sapiens
aggagctacaacttgtccacgacaccggctacttctcagctttaccatccctggaggagacctggcagcaggtttccaatacttatctacaggaatcgcc

SEQ ID NO: 35883 - DNA, 90 bp, Homo sapiens
ccgggccgtgaacgaaagcagtgacggaggagcttgtaccaccggaacagtacgtatttggcattcaagcacctaccggcttgagagcac

SEQ ID NO: 35884 - DNA, 87 bp, Homo sapiens
cttccttgcttctttggagaatgatatcaaaccacgatctataactacaatgcttctcaagatgtggagctctccttgcagatcggt

SEQ ID NO: 35885 - DNA, 75 bp, Homo sapiens
agggatgggactggaaatcaaatgttacagactttccatttcaacacggttgaagaggttcattcaagattccag

SEQ ID NO: 35886 - DNA, 73 bp, Homo sapiens
cggacgccagcggacacgcgggcgaggtgtgatgaatgcagactctgctaccattttggctgtttggatcctc

SEQ ID NO: 35887 - DNA, 90 bp, Homo sapiens
tgtgaactgcacgataaaggaactcaggcgcctcttcttagttgatgatttagttgattctctgaaggagagattcacccaggatacaca

SEQ ID NO: 35888 - DNA, 75 bp, Homo sapiens
ggccgccgcgccgcccggcagcctcggcaggactgaatgtgggcccagttggcgtcattctgctttgacctaaac

SEQ ID NO: 35889 - DNA, 89 bp, Homo sapiens
tggccaagagctacaatgagcagcgcatcagacagaacgtgcaggtgaagacattcagtgaagcttgcctgatggtaaggaaaccagcc

SEQ ID NO: 35890 - DNA, 100 bp, Homo sapiens
tactcgcgcttttcgccgtcgccgctctccatcaaacaattcctggacttcgaccctgactgcacctgccccatttgctgatgaaaccaactgccagtgt

SEQ ID NO: 35891 - DNA, 75 bp, Homo sapiens
cagcccgatcccgccatggagcagccgaggaaggcggtggtagtgacggagttcttggagtctctgcggagtccc

SEQ ID NO: 35892 - DNA, 82 bp, Homo sapiens
gcctgttggaggaactggcccggaaacaggaggacctttagatagtgacgggggcagagagctggactgccagctgtgcggt

SEQ ID NO: 35893 - DNA, 75 bp, Homo sapiens
ggaaaggttcgccctggtgctggtagctacagcaagctgggtagcaggcagatccaaaggatatcatgaagtttc

SEQ ID NO: 35894 - DNA, 90 bp, Homo sapiens
ctccacaaagtgacagtgaatgatggagggggagttctcagagtcattacatatctcggaagatggtacgaaattgagaagatcccaaca

SEQ ID NO: 35895 - DNA, 50 bp, Homo sapiens
ggctgcgagggactaagagcagatctcagaccagtatccttcaggggttc

SEQ ID NO: 35896 - DNA, 97 bp, Homo sapiens
gtgagcggactgcccaggacttcggaactagacgaggaaaaatgctggcaggtggtgcaagcaaggacatctatgcatagaattctgacagcagctg

SEQ ID NO: 35897 - DNA, 89 bp, Homo sapiens
cttccctcggtctgggcttctctgaggcggcgagagatggtcaggtctggagctcgaccgggccaggaactaagcgtcttgtagaagga

SEQ ID NO: 35898 - DNA, 128 bp, Homo sapiens
agtcccccaggatacagggtcaaaggagagcacaaccatcgcagttggaagcccatggggcaggtctgagaaagaaccccagtttaagtttatctacttcaaccacatgaatctcgccgagaagagca

SEQ ID NO: 35899 - DNA, 98 bp, Homo sapiens
gcctcaggccagtcgcctccaggccaagagggatccttcacccgtgtctgctccaccgggggacggctacgtgcaggcggacgcccggggccccccgg

SEQ ID NO: 35900 - DNA, 75 bp, Homo sapiens
gctgctcagtgtggtggatcatttcaaccgattctcattcagattgtggatgcctcgtcagtcatcacttgggat

SEQ ID NO: 35901 - DNA, 75 bp, Homo sapiens
agcaactggtctattatatcatttaaaccacatggctatctaaagagtttctaggcttgtgtacatctatacatc

SEQ ID NO: 35902 - DNA, 83 bp, Homo sapiens
caaggagccagtgctggtcgtgtccttcgtcgtcgggggcctcgggctcccactgcagcagctcgggggaccccgctgagtac

SEQ ID NO: 35903 - DNA, 51 bp, Homo sapiens
ccaaagtgctggaattacagggaaccagtgctgtggcgcatatggccctga

SEQ ID NO: 35904 - DNA, 100 bp, Homo sapiens
ttgtatcaacactgttactttcgtacattgatcttttattaaagagccgtcatatgccgtgtttcctccataggaagtctttctcactgtctaagccaag

SEQ ID NO: 35905 - DNA, 75 bp, Homo sapiens
ccgggaccagcggagcgcctcccgggacaggcgacgacgcaggtattgtcttctaagaactctgaagcaatgtca

SEQ ID NO: 35906 - DNA, 100 bp, Homo sapiens
cgatggagcagcgaaaacgtggttgtagagttccgtgactcccaggtaattttaaccaatcagatgacaacaaagattgatagaaatcaggccttgcttg

SEQ ID NO: 35907 - DNA, 49 bp, Homo sapiens
ctgccacaatgggacatgtgcaaatgcaagtgctgctggaccaggcggg

SEQ ID NO: 35908 - DNA, 100 bp, Homo sapiens
taaaaacaatagctcaaggaaacctttccaacacagatgtccaagctgccaaaatagctgaaacctttggacttcaagaaaattatatcaaaattgtcat

SEQ ID NO: 35909 - DNA, 75 bp, Homo sapiens
agacttgctagttaggattttattactggcagcatgtatatcttttccactatcgaaaacgatcggcatcccggg

SEQ ID NO: 35910 - DNA, 83 bp, Homo sapiens
ccagcatgaagaccccggcggacacaggtttcagaagcaggcaacaggaacaagatgtgaactgtttctcttctgcagaaaaa

SEQ ID NO: 35911 - DNA, 118 bp, Homo sapiens
gaaaaacacaaactaaatgtacctgagacgatgactgaggttcttgatgtttctgatgaagaggggaaaatggagctgatagtatcctggatcttggattagtagactcctcagaaaa

SEQ ID NO: 35912 - DNA, 82 bp, Homo sapiens
ggagaggtaaacagaacaccaggacatcccagagtctgggaaatgttctccaaggagaagtacatcctggactcatcgccag

SEQ ID NO: 35913 - DNA, 98 bp, Homo sapiens
tggaccccaactcagccttcctgcataccctggaccagcagaaacctagagtggtgcaggtatttggactgtattctggagaagaatttcacgagact

SEQ ID NO: 35914 - DNA, 97 bp, Homo sapiens
caacaagtagccgccttgcaaatccagatggcttaatggtacaaataactccagagaccatgaatggcttgcggctagctttacgagaacagaaaga

SEQ ID NO: 35915 - DNA, 100 bp, Homo sapiens
aagagggtggaaaaagcagggaggttatgaggcttaataaagaaggaaaaacgtggtcttcgagaaatgcgagttcttgaaaatttgaagaacatgatcc

SEQ ID NO: 35916 - DNA, 100 bp, Homo sapiens
ttgtacagaaattgaaaggcttcaaagctagcagggcggcgactggcggcgcgatggacctgaccgggctcctgctggacgaagaaggcaccttctccct

SEQ ID NO: 35917 - DNA, 75 bp, Homo sapiens
tacagcaagatggttcatcttttgccctagagcaattgaagctgctctgttaaaagcgaaaatgaaacaattgcc

SEQ ID NO: 35918 - DNA, 103 bp, Homo sapiens
caaggtgcaagagtccacaaagggacctgatgaagcgaagatcaaggattatatgcgtcaggcaggagaagtgacttatgcagatgctcacaagggacgcaaa

SEQ ID NO: 35919 - DNA, 80 bp, Homo sapiens
cccgggtgccgaggagcgggaagagttgctgggagcgatcgtcttctgatcaaaggaggtaaaattgttaatgatgacca

SEQ ID NO: 35920 - DNA, 82 bp, Homo sapiens
gtttatcgtacccaagttgtggaaaaatctttaagggtctgggggtggtggcatctcccctaaaggaagtggtccctctgtg

SEQ ID NO: 35921 - DNA, 100 bp, Homo sapiens
caccttgtctgtctttgataataaagatgacattgccagttttgtcaaagggaaggtaaaggcaggtgacagcagggacatgtctcgggagatgcaggat

SEQ ID NO: 35922 - DNA, 101 bp, Homo sapiens
gcagagcaaccttgtgttcaacattcagccagccccaggcatggtctacgattagtacgaaaaagagagacaagagagacacctccaacttcgacaaagag

SEQ ID NO: 35923 - DNA, 96 bp, Homo sapiens
gtggtgaatcccctgtttgagaaaaggcctaagaattttggcattggcaaatcctgatcctaactgttgtcttggagtatttgggctgagcttgta

SEQ ID NO: 35924 - DNA, 75 bp, Homo sapiens
gatgaccctcgagggagacatcaggctgggtgtggaaacaggaagagaactagaactggaagtaaagcattgaag

SEQ ID NO: 35925 - DNA, 80 bp, Homo sapiens
ggatgggcggagaaagattctgccagaagaagaggtattaatctctggagaagacacatccacagttagcactttcttca

SEQ ID NO: 35926 - DNA, 98 bp, Homo sapiens
ccagacctgcagggttcgtggataataaactcaagcagcgagtcatccaggtaagaatgattgatgttggctgatattggagtgctcattcacatgaa

SEQ ID NO: 35927 - DNA, 50 bp, Homo sapiens
gttccatgatgggaagtgacatggctgaagccgacgtagcttctctgaac

SEQ ID NO: 35928 - DNA, 97 bp, Homo sapiens
tcaaggattcagagcagatgtgatctgcgctaggtggcatctcctctcacggatgcctcgaaaatgtgccagaggaacttcaagaaccattttacac

SEQ ID NO: 35929 - DNA, 74 bp, Homo sapiens
gaagaactgaatatcctcatcaggatttcaaatatgcgtgcattagagaatgattttttcaattctcccccaag

SEQ ID NO: 35930 - DNA, 100 bp, Homo sapiens
cccggagccgccggccgctagcgtcagcgccagccaggtgtacagagccagtgggccggatggagccactggcagaggccagagaatccacctgcagtta

SEQ ID NO: 35931 - DNA, 129 bp, Homo sapiens
gctggcaccgaggcctgaccatggacgaggaatacgatgtgatcgtgctggggaccggtctcaccgtctcagccttagatccaaggacagtccaaggaagtcctaagaccatggagttggtgatctggg

SEQ ID NO: 35932 - DNA, 100 bp, Homo sapiens
aaccaacagtcacacatgtacattacaggcattctgaaggcaaatcctgtttagacccaggcaaaggttcctggtgacccaggctctcatgagcagattg

SEQ ID NO: 35933 - DNA, 75 bp, Homo sapiens
gctccttcctactgtccgagggccaccaggccgccgggggcctgctgcgcccggaggcggccttagcaacatgct

SEQ ID NO: 35934 - DNA, 101 bp, Homo sapiens
gtgaattttccccccaaactgcaataagccgccttccaagctggcctgctgctgtgggtctgcaggctgctctctctgctgtgattgctgccccaggattc

SEQ ID NO: 35935 - DNA, 100 bp, Homo sapiens
ggcctgcccgagcaagagcctggagctgcgcaagtagtgtcctgccatacttcgtagctacaaaactggctaaaatccggaagccaactttggataagcc

SEQ ID NO: 35936 - DNA, 85 bp, Homo sapiens
atcttgaaggtgcagtgacttgcatatagtaggtgcttgagcccacccacctttgggttcctgttggacatcgatggagtgcttg

SEQ ID NO: 35937 - DNA, 82 bp, Homo sapiens
ctggatattgagccggatagacctattggatatggagcctttggtgttgtctgcaccgaacaagatttgtgatgaaatggag

SEQ ID NO: 35938 - DNA, 100 bp, Homo sapiens
caccactggaggctggagccactggaaagaggcggtgattgtgacaaaacttatggatcagaatttgtctacagtgatcatgccaaagaacttattgtag

SEQ ID NO: 35939 - DNA, 73 bp, Homo sapiens
gccttttggggaccagagagtcaaatcattcctgtgatgccaggttgctccttgagggcaggacagttcttat

SEQ ID NO: 35940 - DNA, 100 bp, Homo sapiens
cctacatcaaggactgtgtctcccccagcgactcctgggcaacgtgctggtctgtgtgctggcccatcactttggcaaagaattcaccccaccagtgcag

SEQ ID NO: 35941 - DNA, 82 bp, Homo sapiens
agtaatgcaatggtctcaatctctggaaaaacttcttgccaaccaaaatggtcttgctgcattcagggcttttttaaagtcg

SEQ ID NO: 35942 - DNA, 98 bp, Homo sapiens
gatggatcagaatatacctgtgatgtagaggtggaaatgagttctcaacagtttcctcggttaggagccccttctaccgggctgagccaggccccttc

SEQ ID NO: 35943 - DNA, 99 bp, Homo sapiens
actcccgtttccgagccataaaaggtctaggaccgcttcccccgagccagcagagtgtgaacatggctacgcctcttcattcccgtccatgccgagccc

SEQ ID NO: 35944 - DNA, 99 bp, Homo sapiens
cctcccgccccggccgctgctccttctgccgctagtgctgctgctgagcggccgccccacgcgcgccgacagtaagattgcttccaagtatgatcatca

SEQ ID NO: 35945 - DNA, 96 bp, Homo sapiens
aactggctgcagcagagcgagtacttcgttccaacatggacatcctgaagccaatcctgggtcctgtagcatccacagtatcagcgttttctgtcc

SEQ ID NO: 35946 - DNA, 75 bp, Homo sapiens
cgagaatgaggaggacaacagctacaaccggggataaccacctgcctcaaagataatctgctcaaaagacttcca

SEQ ID NO: 35947 - DNA, 100 bp, Homo sapiens
gggccgcgggccgaaggagtcgccagggctgcgtaggcttgtggcgcgcccgcggagaggccggggtaccccctgtaccggctgggtggcccacaacttc

SEQ ID NO: 35948 - DNA, 90 bp, Homo sapiens
aaactgaagtgcaaggcactgcaggaggagaaccgcgacctgcgcaaagccagcgtgaccatcctgagatctgtatctgtggacctgaat

SEQ ID NO: 35949 - DNA, 111 bp, Homo sapiens
cttttcccaaaagacaggctcttcacctgaaggtgtatgcaacagcgttattgcaacaggctaacgaaaacagacaaaattcaactggaaaagcatgttttggcaccttcc

SEQ ID NO: 35950 - DNA, 75 bp, Homo sapiens
cggttggggctgctgtttctcttcgccgacggtcttgggcgtctttggtactggcttttttaggggtctgcctgg

SEQ ID NO: 35951 - DNA, 75 bp, Homo sapiens
actatgggcgaatagctctgaccacccggcgaaggttgattcttcaccacactgaaaccattaggaaaaatcctt

SEQ ID NO: 35952 - DNA, 75 bp, Homo sapiens
tggagccctgcattcgcggcgtgtgcagttaccggtattgtaagaacaagccgtacccaaagtctcgcttctgcc

SEQ ID NO: 35953 - DNA, 75 bp, Homo sapiens
taagaaggagtatgtacacctggtatgccagatgagaatgacagaggagcccaaggtgggcatcaagaccatcaa

SEQ ID NO: 35954 - DNA, 83 bp, Homo sapiens
gctaaagagccgagcacgcgggtctgtcatcatgtcgcgttacgggcggtacggaggagctccggtgtcggcgggtggcgcgg

SEQ ID NO: 35955 - DNA, 50 bp, Homo sapiens
cttcaagctgtgaaacaaggcttaaagcgtctgaccaaacacaccaagtt

SEQ ID NO: 35956 - DNA, 82 bp, Homo sapiens
gcccgcccaaggtctctcgcgggcgggagaacggaaaactcccaacttcctgaacaccttccaccatgaccacctcagcaag

SEQ ID NO: 35957 - DNA, 98 bp, Homo sapiens
ggttctgaagactgccctcatccacgatggcctagcacgtggaattcgcgaagctgccaaagccttagacaattcaactttgtggggaaacttttggg

SEQ ID NO: 35958 - DNA, 73 bp, Homo sapiens
tgtggagacacggccagatctgccctccaaagaggtgcagtatattcaggctgagaaaaacaacaagggccca

SEQ ID NO: 35959 - DNA, 100 bp, Homo sapiens
caagggaccttctccggcccctccagctgccccctgtgtggcaaacctttcttgagctcagctgatccaccttgagatcaagccggccatccggaaccag

SEQ ID NO: 35960 - DNA, 75 bp, Homo sapiens
acagcatcaactacctgcactttggggagcctaagtcctggctggggaataactacatcactgccgcgggagccc

SEQ ID NO: 35961 - DNA, 74 bp, Homo sapiens
ctgcacaggctgcagccaccgcagctgccatgagtgcagtgggccatgagtatgttgccgaggtggagaagcac

SEQ ID NO: 35962 - DNA, 98 bp, Homo sapiens
gaatgaatatttgagctcattcaaagtggcccagtatgtggtacgggaagaagaaatggggaggcaaccagaaggatgaatgatattctgaatcacaa

SEQ ID NO: 35963 - DNA, 50 bp, Homo sapiens
gcttcggcccccaccagagactcggtatacaaaactaggatatgctggaa

SEQ ID NO: 35964 - DNA, 75 bp, Homo sapiens
taccatccagtctttgaaggacaccaagaccacgtgcttttttaggaccaaaggatatatttccttactcagaaa

SEQ ID NO: 35965 - DNA, 90 bp, Homo sapiens
ttcaagccccaccgacacgaattggccttattaatgatatggttgactatagtcaatggggccaatggagccaagtgtatggaaacccac

SEQ ID NO: 35966 - DNA, 98 bp, Homo sapiens
gtcagaactgcttcaagccccgcgagtcgcatctgctcaacgacgaggacctgacgcagggcagctggtggaatttttgaagaaaatggaatctcgag

SEQ ID NO: 35967 - DNA, 90 bp, Homo sapiens
tgctgacagagaggatccacctccgaaacccctcggcggcgttcttctgtgtggcccgcctgcagggatagactccacaaataataaaaa

SEQ ID NO: 35968 - DNA, 100 bp, Homo sapiens
ccactatggaattctaatttgaaccatgtttggattgaagccgcctctgtattacttaccagaattggctgtgaaaggactgaggcagccatctgggggt

SEQ ID NO: 35969 - DNA, 100 bp, Homo sapiens
tcccactgattctacattacggtctcggtgattcagaatacacctacttttgcaatggggggaagataattgataaacgacttcaagagcttggagcccg

SEQ ID NO: 35970 - DNA, 88 bp, Homo sapiens
aatcagtctttgacaagtgatgagaagctgtcggagcttcccaagattactttctatgaagacaaaaattttcaaggccgtcgctatg

SEQ ID NO: 35971 - DNA, 74 bp, Homo sapiens
gtacatgagtggctatcatactggctattatatgctgaatgcaatatccatacatctccttctccgggaattca

SEQ ID NO: 35972 - DNA, 50 bp, Homo sapiens
tctgcattgccattgttctgagtatgaatgacccatattaaatcgccctt

SEQ ID NO: 35973 - DNA, 100 bp, Homo sapiens
agactgtgagaagatggctgcgttgcactgcgcgctctactgcggtcaaggtgcgcagttcctggaagcccagtgtctttggtgcaacactaacaaggct

SEQ ID NO: 35974 - DNA, 51 bp, Homo sapiens
cagaatggagcaattggaagaaagatgcctgaggaaacccagacccaagac

SEQ ID NO: 35975 - DNA, 100 bp, Homo sapiens
cttgctagcaagattggatgggataccagagggtccaaaaggtgaagcggttggatccattactcaacccttacctagcagttatttgatcatccgagct

SEQ ID NO: 35976 - DNA, 74 bp, Homo sapiens
gcaaatgtctttcgtggaagacataaggaaacccagcgtttgctggcagaaccagttcctggcatcaaagccga

SEQ ID NO: 35977 - DNA, 100 bp, Homo sapiens
tacctgttaccactttcaaaatgtcatcttgcattacaacatataagaagacaccacctccagtcccacccagaactaccacgaaacctttcatttctat

SEQ ID NO: 35978 - DNA, 98 bp, Homo sapiens
aagcagcgacgccagcggcggagaaccgacgaaaggactggacctacagagacatctgggattttctgcgtcagctgtttgtcccatactgtatcctg

SEQ ID NO: 35979 - DNA, 90 bp, Homo sapiens
gctcagtgagcgcgaagctaggcatttcttccggcagatcgtctctgccgtgcactattgccatcagagagatggctgcccaaagattgt

SEQ ID NO: 35980 - DNA, 74 bp, Homo sapiens
tttgactcctgtagcaattaaaaagcactgtgaagcccttaaaggtgcttttgaagatgatgatatcacgcacg

SEQ ID NO: 35981 - DNA, 100 bp, Homo sapiens
cctctcaaccacaataacaggcggagggtcggcgtagaaccagaggcaggagaagtgtcccctccagtcggtgcgggtgtcaacagcaacagctggacct

SEQ ID NO: 35982 - DNA, 98 bp, Homo sapiens
gcgctgatcggattggccgtcatgggccagaacttaattctgaacatgaatgaccacggctttgtggcagaatttctcagattatctttgggatttaa

SEQ ID NO: 35983 - DNA, 51 bp, Homo sapiens
tggatccatttctcctattgaggagtcaacatccagctccaggtcccacag

SEQ ID NO: 35984 - DNA, 105 bp, Homo sapiens
agttgttaaatttttgctggaagcctgcaaagtaaaccctttccccaaggacagcatcctgaggttagcattacacttctcccagtggagcccatgacttctgat

SEQ ID NO: 35985 - DNA, 95 bp, Homo sapiens
gaagaccaaagaggatgagaaggacgacaagcccatccgagattcttgccagctctcattactgcagttctgaccaatcatcttgcctgggttcc

SEQ ID NO: 35986 - DNA, 82 bp, Homo sapiens
aaaaatccttgtatattttttgaacctaaaatactttacagggcagcaggtttgtactacagaaagtgccagttaatttcca

SEQ ID NO: 35987 - DNA, 90 bp, Homo sapiens
gtgtgtatcagcagagaccaccgaagactgcatcgccaagatcatgattccaaattacagaaatgcagtcattgtagctaagtctcctga

SEQ ID NO: 35988 - DNA, 80 bp, Homo sapiens
tccatggcttaagaagtacgggaccaaccccagcaatggagagctctggacttattggacaaaatgttgacattcaaccc

SEQ ID NO: 35989 - DNA, 98 bp, Homo sapiens
gtctactgcaacttcaagtagtggaaggagtacagggaagtctataagctttgcaacagaattacagagtatgattaaataacagatgcgggtgaaag

SEQ ID NO: 35990 - DNA, 82 bp, Homo sapiens
tcctctgagtcgtgaagaagggaggcagcgagggggttggggttggggcctgaggcaaggaatacaaacagaagcttgcacg

SEQ ID NO: 35991 - DNA, 74 bp, Homo sapiens
ggactttgtgaggcaacatcggataccactgggcaacagcattattgagaaaagcccttacagaagagtgtggc

SEQ ID NO: 35992 - DNA, 88 bp, Homo sapiens
ggctgggaccgtgcgcgtgcgcctgggggcaccgctgccgttccgaggttgcgaggggcggtgttgaagaatgtgtgggcgaacatcc

SEQ ID NO: 35993 - DNA, 101 bp, Homo sapiens
ggaggctatgagcgagtgcaccggctgccacaaggtcaactactgctccaccttctgccaacgcaaggagctcttgtccctggcaaagcgaaagcgcagtg

SEQ ID NO: 35994 - DNA, 83 bp, Homo sapiens
attagagacgtatctgccgtgccaggggtctaggctccagaaacaggggatgaatttcatcctttcatcgaagcacttctgcc

SEQ ID NO: 35995 - DNA, 90 bp, Homo sapiens
cttcaacaggaatatcacaggagtgatgctgtgttcttcactgcatgatttcaaaagatggtgtcctactcttctgtcctcacagccatc

SEQ ID NO: 35996 - DNA, 96 bp, Homo sapiens
cgcgcagggcctgcagcgggagctggacggcgagcgcgagcggcgcgagaaaggtgctttcttctgcgacctggtactcatctacctcatcaaaaa

SEQ ID NO: 35997 - DNA, 100 bp, Homo sapiens
cacgacctgacggacaccacccgggcgggtccatggaggtgaaccacccagcacccctcagcctcttggaacttgcagcccacagcctgctgagcaatga

SEQ ID NO: 35998 - DNA, 82 bp, Homo sapiens
cttagctgtgctcgcgctactctctctttctggcctggaggctatccagcataattctttgagcaactactggggcattata

SEQ ID NO: 35999 - DNA, 83 bp, Homo sapiens
ccaagctcgtggcctgcctctgcgtgcggtgctttcttctgcgacctggtactcatctacctcatcaaaaagagagagtttta

SEQ ID NO: 36000 - DNA, 115 bp, Homo sapiens
ccgcgcgcagggcctgcagcgggagctggacggcgagcgcgagcggcgcgagaaaaggctgggaggcggcagaatgcagccagaggagggcacaggctggctgctggagctgctg

SEQ ID NO: 36001 - DNA, 101 bp, Homo sapiens
gctgctgagtttcttcatctacaacccgcgcttctggccgcgggaaggagagagcgaaaagctgttgctatatgatacagtccagagtgaactagaggaga

SEQ ID NO: 36002 - DNA, 75 bp, Homo sapiens
tcaagggacgtaccaggaggatggtgcccaggccattatgctgctggattggacctcaatgacacctactctggg

SEQ ID NO: 36003 - DNA, 75 bp, Homo sapiens
gatcaaagaagagcagcccatggttggatggcaagcatgtggtgtttggcaaagtgaaagaaggcatgaatattg

SEQ ID NO: 36004 - DNA, 98 bp, Homo sapiens
gcagcacctcctccacgcccacctccctcatgagacaaggggccttcctggtgaacacagcccggggtggcctggtggatgagaaggcgctggcccag

SEQ ID NO: 36005 - DNA, 75 bp, Homo sapiens
accctgaagtgcttgatatcacagaggaaactctgcattctcgcttcctggaggagcacgtgaattgcctctgct

SEQ ID NO: 36006 - DNA, 100 bp, Homo sapiens
aaggaactgggatttcaacctgaaagtggaggctgcgaaaataggaaagatgaatgggagggctgattttcgagagccgaatgcagaggttccaagacca

SEQ ID NO: 36007 - DNA, 75 bp, Homo sapiens
cagagttcaaggaggccttccagctgtttgaccgaacagcgccgtgccgtccctgcagtgacaccgaggtgctcc

SEQ ID NO: 36008 - DNA, 51 bp, Homo sapiens
cgcggctgcggggcttccctgcggctggagtgtaaggcaaacattggtggg

SEQ ID NO: 36009 - DNA, 76 bp, Homo sapiens
gacagaatcaccagcactggctgaaggatattggtgctggaaaaggcaaatactatgctgtcaattttccaatgag

SEQ ID NO: 36010 - DNA, 97 bp, Homo sapiens
ttcaggtcatctgaaccttctgagaaaacatggtcaacgtcttgaaaggagtgcttatagaatggtggtccgggactacaatcttcagctgtttttg

SEQ ID NO: 36011 - DNA, 50 bp, Homo sapiens
cggcaggctcaggtgcagccgctggtgtggatgaggtcaccattgtcaac

SEQ ID NO: 36012 - DNA, 75 bp, Homo sapiens
gatggaaaatagtctaccagccaaagtgcccagcagaggggatgatttgcctactggctgggaagaagcatatac

SEQ ID NO: 36013 - DNA, 100 bp, Homo sapiens
tctctggtgcatgctgatgacgaaaaacggggaaatttgcagtggtgagaaaatgtataaagaaagattctgggaaagaatttgctgcaaagttcatgag

SEQ ID NO: 36014 - DNA, 100 bp, Homo sapiens
ctgctgcagaggatggcgtgcgaggtcgccgcggggctggccgccatgcacaagctgcacttcctgcacagaacgatgccaacgggactgcaaagccgcc

SEQ ID NO: 36015 - DNA, 75 bp, Homo sapiens
ggttcttctaaatgaagcagcaacttcgaaaggcgatgttggaaaaagacggacgagtaaccagctcataaatca

SEQ ID NO: 36016 - DNA, 82 bp, Homo sapiens
tccatctgaagagggctccaggcatccggtcctggtccctgctggttgaagctggcagggcggagatgctggaccacgccgt

SEQ ID NO: 36017 - DNA, 90 bp, Homo sapiens
ccgtctgctgggctccaagtcacctgagaggcgaggtgaggagggcgctacgacccctcgctgactttctctgagaacgtggacctcaca

SEQ ID NO: 36018 - DNA, 108 bp, Homo sapiens
gagagagacagcgacggcagccggcacagctccgaccgcgaggacgacttctccgcagaaatggtggagtcaatgaagaaagtagcagggatggatgtggagctgaca

SEQ ID NO: 36019 - DNA, 75 bp, Homo sapiens
ggccctcaaacaaaaaatcactgcattacatcagcagttgggtatccctggtcagtaagaattatgagattgaac

SEQ ID NO: 36020 - DNA, 100 bp, Homo sapiens
taccctttttcaaaaggaactcatgatgtatacaagtgtcacctctaactcttcgtgtcaggagtttttctacctctccggagttctttggctctcagga

SEQ ID NO: 36021 - DNA, 100 bp, Homo sapiens
caaacatggtgaagctcttactggatcgaggcggtcagatcgatgccaaaactaggcccgaaaacctcctgtatgccacgccctttgaggactcgaagat

SEQ ID NO: 36022 - DNA, 90 bp, Homo sapiens
ggagaagcgcttcaaggacccgggactagtggaccagctggtgaaggcagacagcgagtggcgacgattacaagaagttacttactgaag

SEQ ID NO: 36023 - DNA, 100 bp, Homo sapiens
ggtaccgtgctgcccagaatgcccttcgggagttgttggtgaaaaagagaaaatcagtggcactgttaatatccgcacaagagacaataaggtccacggg

SEQ ID NO: 36024 - DNA, 74 bp, Homo sapiens
tgacatcttccaaactgtggacctctgggaaggtgctgatacctgtgttcgcgctgggccgcgcccaggagctc

SEQ ID NO: 36025 - DNA, 124 bp, Homo sapiens
aaagatggggtgccaagacggtgcagggctccgggcaccaggagcatatcaagtttctaagcatgaattgaggaacagaagaagcagagcagatgatcggagcagcatttgtttctccccaaat

SEQ ID NO: 36026 - DNA, 75 bp, Homo sapiens
ggagactcagaatcgaatctcttctccctccccttcttgccctgaagttcagtccatcttgaagatctcccaacc

SEQ ID NO: 36027 - DNA, 82 bp, Homo sapiens
ggagttgctgcaggcagagggagccacaggaaggtgctcgggtcttcggggcactgggtcccatcggtccctcctcacctgg

SEQ ID NO: 36028 - DNA, 83 bp, Homo sapiens
cttaattaaccctcaaactgcccagtgagggaccagcgcatcagccaggacgtggagcgattctgccggcagctcagcagcat

SEQ ID NO: 36029 - DNA, 100 bp, Homo sapiens
ggtggatgaagttgttcattgtttgtcaccacaaaaaggacaggtaaaataccatgaagattttgaaaaaacaaaggggagaggctttactcccgtcgtg

SEQ ID NO: 36030 - DNA, 119 bp, Homo sapiens
aagctgaaccaggcccttttggatcttcatgccctgggttctgcccgcacggacccccatgaccctcgagatgcccctcctccaactcgtgctgaaacccgagaggagcgcatggagag

SEQ ID NO: 36031 - DNA, 90 bp, Homo sapiens
gtgtggaaggtcttctaaatgctctcaggtacgagtgcttccatatccatttacccaccattggcaatttgaaaggaccatccagacccc

SEQ ID NO: 36032 - DNA, 88 bp, Homo sapiens
ctgggcgacctgcaggcagcaccggaggcccaggtctccgtgcagcccaacttccagcaggacaagggccggatcgtggcacccagag

SEQ ID NO: 36033 - DNA, 75 bp, Homo sapiens
cccggagcctcacagcctgggcatcctccatgcctcctacagcgtcaggagtgggcattgcttgatgggcaggaa

SEQ ID NO: 36034 - DNA, 83 bp, Homo sapiens
catgagacctccaaacccctttggccctgtatcaggagcacaggctcggtctggggttcttgcagctggcaccagccctcccg

SEQ ID NO: 36035 - DNA, 100 bp, Homo sapiens
ctcggatcgcctggagaggcactcggacctgaattaaacaaccaccatgtcgagcaaaaaggcaaagaccaagaccaccaagaagcgccctcagcgtgca

SEQ ID NO: 36036 - DNA, 100 bp, Homo sapiens
agatcatcgagcatttcaaacggcagcttcggtcacctctctgtccaacctggcatgcatgcacatggtccgctgggctgtttggaaccccttgctggaa

SEQ ID NO: 36037 - DNA, 96 bp, Homo sapiens
gtccaccccgagccgattcaagaaggacaaagagatcatagccgagtatgaaagtcaagtcaaagtaacctgaagctttcaccgtagacgtgctgt

SEQ ID NO: 36038 - DNA, 100 bp, Homo sapiens
caacaattttctgtacaccaatggaaagtgcgtcatcctaaggaacatcgacagttgcatgctgagaatttgaaaaatgaagatgatgtagacactggac

SEQ ID NO: 36039 - DNA, 75 bp, Homo sapiens
ctcatctacatcgccttcatcctgggcagatggactctcgctctgtcgcccagcctggagtgcagtggcttgatc

SEQ ID NO: 36040 - DNA, 90 bp, Homo sapiens
agcatgtcaccaacccggccttcaccaaactccctgacttggaaaacagtgtgggtgaacttagtgaaggacaaagaccccagctaacag

SEQ ID NO: 36041 - DNA, 75 bp, Homo sapiens
ctcgaggctgctaagagactaaacgcaaacatgcagatctttgtgaagaccctcactggcaaaaccatcaccctt

SEQ ID NO: 36042 - DNA, 100 bp, Homo sapiens
agaagatctgtatttgcaactatggatttgtagggaacgggaggactcagtgtgttgggcaagttaaagtcttcagagccctgtatacgtttgaacccag

SEQ ID NO: 36043 - DNA, 100 bp, Homo sapiens
catttacagaaagagtcaacagcagtggcaacaggaactgcaagcacatgttgaccagataactgaaatggcagcagtaatgaggaaagccattgaaatt

SEQ ID NO: 36044 - DNA, 83 bp, Homo sapiens
ggtggcgcccctcctcatcatggatgaatttcatcctttcatcgaagcacttctgccccacgtccgagcctttgcctacacat

SEQ ID NO: 36045 - DNA, 82 bp, Homo sapiens
accgaactcgatctgggggagccagggatgaacgatatcgatcaggtgacttaagagattaaaattaatttggttgctgttg

SEQ ID NO: 36046 - DNA, 90 bp, Homo sapiens
ccacgaactgctggacgacctcggcgaggtgcccaccatcgagtccctgataggtatgatctcgtgaaatcttgagagaaactgaatgac

SEQ ID NO: 36047 - DNA, 97 bp, Homo sapiens
tggcactgatgaagaacccttacagaccaagaggatgctggtggaaaagatgggccgagaagctgtggagctagggcatggggaggtgaacatcaca

SEQ ID NO: 36048 - DNA, 75 bp, Homo sapiens
ccggaaaatgtagcttcccggttaagcgggtattcccctacatctcagccatggtgaacaacggctccctcagct

SEQ ID NO: 36049 - DNA, 97 bp, Homo sapiens
ggctggtcagtgtggcaaccagatcggtgccaaggttaatttggagtggcccctggagtcagtttcctacaccatccgaggccccacccagcacgag

SEQ ID NO: 36050 - DNA, 83 bp, Homo sapiens
cccgcccgaccccgtcccgaccctggccgccccgagcggagcctggagtcttgctatgttgctcaggctggtcttgaacccct

SEQ ID NO: 36051 - DNA, 100 bp, Homo sapiens
cctatgttacgtggatgtttgtaacgtcagaaacccttcccttgtcaaaaatgcgatgccttcttttctaccaaatctaactgtgaacgccaccagttgc

SEQ ID NO: 36052 - DNA, 96 bp, Homo sapiens
tagaattgtagtggatgaaaaatcaggtcaggtgacactggaagataccagaattacctctggactacaaatttacaagattctcttcaagcaatt

SEQ ID NO: 36053 - DNA, 100 bp, Homo sapiens
aggggcagtacaagcttacgtctctgctcttcagtacaatcctatggtggagccagggcaagatttactgcttgctgctttgagtgagagtggaattagt

SEQ ID NO: 36054 - DNA, 82 bp, Homo sapiens
gcggggagccccgcctgaggtgccctaaacacactatgaccggccggatcacctcaacagtcacgtcagacaagtgcactca

SEQ ID NO: 36055 - DNA, 82 bp, Homo sapiens
acagcacagttcctgggaaggtggagccaccagcctctccttgaacatccagtcatggataaaaatgagctggttcagaagg

SEQ ID NO: 36056 - DNA, 100 bp, Homo sapiens
gtgaagttgaacaaattgctatgatgaaaccaaaaggccagactgaacacgatgagggttgggggccgtcccgctcctaaggcaggaagatggtggccgc

SEQ ID NO: 36057 - DNA, 75 bp, Homo sapiens
cagcggccccctggagggggcagtcccgggagaacctgcggcggccggagcggtacccagcgtgccaatgcccgg

SEQ ID NO: 36058 - DNA, 100 bp, Homo sapiens
cggaaaggggcccggcgtctgcctcgagactgaagaccgggtctgtctggctgtgtcacccaggctggcctccaactcctgagctcaagccatcctcctg

SEQ ID NO: 36059 - DNA, 100 bp, Homo sapiens
gccaggcttcctggagattctacacgccaggtggtggtgcgctcagccctggaggctgcccgaatttgtgccaataagtacatggtaaaaagttgtggca

SEQ ID NO: 36060 - DNA, 50 bp, Homo sapiens
tatgtctacagtgatgctgcaaatggaagagtcctacagaatgcactttt

SEQ ID NO: 36061 - DNA, 75 bp, Homo sapiens
aaagcaagaaaattactaaagaggagtttgccaatgaatttctggggcataaggaaatggtggcaggcacttcct

SEQ ID NO: 36062 - DNA, 100 bp, Homo sapiens
ctacatcaccaagtacaaggatgaggagtcggcagctggcgccagggcggccggaggatgccgaggggccggagccgggagggcccgaggccgaggcgca

SEQ ID NO: 36063 - DNA, 90 bp, Homo sapiens
gacccatggcattcctcagggaatactttgagaggttggagaaggaggaggaagccaagaatctggtgagcgaagccatcgcagctggca

SEQ ID NO: 36064 - DNA, 75 bp, Homo sapiens
ttccactttggcctctcagagtgctgggattactggcgttggtttcttcaaacggaacctgaaggagaagatgga

SEQ ID NO: 36065 - DNA, 83 bp, Homo sapiens
caaggggcttacgcagaaggacctggccacgggggatatgagactttctactcggaatatcctgagtgttgcgtggatgtaaa

SEQ ID NO: 36066 - DNA, 83 bp, Homo sapiens
tcggaaaccggtagcgcttgcagcatgcgccgtgccgtccctgcagtgacaccgaggtgctcctagccgtctgcaccagcgac

SEQ ID NO: 36067 - DNA, 104 bp, Homo sapiens
ctgcggacgcgactcgagggtgacgctcgctccgctcgtcccgctcgtcatggcctacccgggatacggaggaggggactcacaccacccggcaagaactgctc

SEQ ID NO: 36068 - DNA, 98 bp, Homo sapiens
agtcgaccccaacagcaggaatagctcccgttggagtccacattaagagagaagtctcaacagcttgagagtcttcaggaaataaagatcagtttgga

SEQ ID NO: 36069 - DNA, 90 bp, Homo sapiens
ggactccctggaagcctagaaatgggctggttgatatgtgaagagccaacctgtcgcaatcgaactcgtcaccttccccttcaattctcc

SEQ ID NO: 36070 - DNA, 74 bp, Homo sapiens
gtgaaagttttaatcacatcacaaggctatgaacaaatatgcaagctgctttgactctcccgcgaagacctttc

SEQ ID NO: 36071 - DNA, 83 bp, Homo sapiens
cctgggccgggccccaccggacgctcaccatggatgatgatatcgccgcgctcgtcgtcgacaacggctccggcatgtgcaag

SEQ ID NO: 36072 - DNA, 90 bp, Homo sapiens
gaggaaagctgtgaaagttctcaaggtatgctgccccacaaaaccaagcgaggccaggccgctctggaccgtctcaaggtgtttgacggc

SEQ ID NO: 36073 - DNA, 83 bp, Homo sapiens
ggagaagcgagaaaagatgaaacggaccctgtgtaacttggacccatttctcttgcgtgaatattgaacatcgaggagcggaa

SEQ ID NO: 36074 - DNA, 76 bp, Homo sapiens
gaaggagcggtgtcctcttaagaaaatggcatacactagcgtggctaaggcccctctgcacctgcatgagaaccct

SEQ ID NO: 36075 - DNA, 82 bp, Homo sapiens
gctgggtcagtccgccgctcaccccgcggccgcaccttcccgccttctcaggtccagccctgctgggagttttctgccacac

SEQ ID NO: 36076 - DNA, 74 bp, Homo sapiens
agaagcatacaattccctcatgaaaagctatgggcggcgactggcggcgcgatggacctgaccgggctcctgct

SEQ ID NO: 36077 - DNA, 100 bp, Homo sapiens
gctcatgaagaaatcagggatttcctcaggtccagaggtgtccttctaaagctggtagaggtttcacgagtcatcagggacccagaacccttctcttttg

SEQ ID NO: 36078 - DNA, 100 bp, Homo sapiens
cctggactgttgcgggccccgggacctgggctgggaacccgcggtggagcgggacacgaacgtggttgacatcatggacatatgtgagtccatcctggag

SEQ ID NO: 36079 - DNA, 75 bp, Homo sapiens
aggatcctgcagaatgagcccctgccagagaggctggagaagaaagctgtggtgattcgtcacttgtataatgaa

SEQ ID NO: 36080 - DNA, 75 bp, Homo sapiens
agtcatgtgaatagagaagaagttatcagagaattggcagtatttgattttcatcaagcagctgatggtatccag

SEQ ID NO: 36081 - DNA, 74 bp, Homo sapiens
gattatccgcatgcaccagagctttgacaacctctactccatggagccctatgagtttgtctctctggaatggc

SEQ ID NO: 36082 - DNA, 100 bp, Homo sapiens
gttgagacagaagatggatatattctgtgccttaaccgaattcctcatgggaggaagaaccattctgacaaagttcttctgtaagctggatatatcccct

SEQ ID NO: 36083 - DNA, 88 bp, Homo sapiens
cctacaaattcaagagtgaccagggatgcgtcagcttttctttcgcaaaaagctgcttcactcatcccagatgcttcgggcggtctcc

SEQ ID NO: 36084 - DNA, 88 bp, Homo sapiens
tttccagaagatgattccaacgccaccaattccaacctgcatgtccagctgtcccatgagtttgagtcactggtgcgccaggatcccc

SEQ ID NO: 36085 - DNA, 50 bp, Homo sapiens
ggcgccgctaggatgaagctcgtgagcttccttcaaaatgtctactgttc

SEQ ID NO: 36086 - DNA, 75 bp, Homo sapiens
cagaaggcacagattagaggaaggaagaggcagactcagtgggatcctcctacttgggaaagcccaggagatgat

SEQ ID NO: 36087 - DNA, 83 bp, Homo sapiens
ggtgctcagtacaaactgctagttaccaagctgaagcacttccagctccgaaacctgtttccctccaatcttgtggttgcagc

SEQ ID NO: 36088 - DNA, 82 bp, Homo sapiens
ggggggaaactaggtcgatggtcggcggcgcccggatgggcagctgagattggtttttcagcagcagatgctgtaacaggac

SEQ ID NO: 36089 - DNA, 75 bp, Homo sapiens
ggccatgaccgtggagcagaacgtgctgcagcagagcgcggcgcagaagttttcggctttgtgagaaaccttacc

SEQ ID NO: 36090 - DNA, 75 bp, Homo sapiens
ctttgacaacgactgtggagacatgagcgatgagagaaactgccgcatccgtgtcattctggaccttactcccaa

SEQ ID NO: 36091 - DNA, 98 bp, Homo sapiens
gtccgcttcccgacgctgagggcagccccgtccagggttgtggcagcactgcctgaaggtatgagaccagattctaatctttatggttttccatggga

SEQ ID NO: 36092 - DNA, 96 bp, Homo sapiens
tgtttggggcaacttcgttaatatgagctcataccccagacaacagctttctggggtttgtggttgagcagcacctgaactccagtgatatccacc

SEQ ID NO: 36093 - DNA, 98 bp, Homo sapiens
gacagattgtaggaccgagcgcgggcaggcgggaggcaacggagctaccagccggtttggcaaacatcgaaaagatgacaagattgagaaaacgggta

SEQ ID NO: 36094 - DNA, 155 bp, Homo sapiens
gaaggcgacagcctggattataaggatgtcatccccatggctgatgcagcaggcatcatccgctatgcaattggggtcggcttcttcaagcggaaccggccacccctggaagaagatgatgaagagggggagtgatggtgcagcctacactattc

SEQ ID NO: 36095 - DNA, 50 bp, Homo sapiens
gccaaacacaccaactttgtggagcgtgaagcacatctcctgtcccctgc

SEQ ID NO: 36096 - DNA, 100 bp, Homo sapiens
cttttgtggcggatctagcttctcctcgccttcaggatgaaagctcagggggaaaccgagggagacggtggctcagggagtaaaggaaggccagttgagc

SEQ ID NO: 36097 - DNA, 100 bp, Homo sapiens
gcccgaaggacttcggcgcgggactcaagtacaactcccggcacgagggaaggatcgaatcatatttgtaaccaaagaagatcatgaaactccaagcagt

SEQ ID NO: 36098 - DNA, 83 bp, Homo sapiens
gtgatgagatattctgctgagtggaagatcctgataacttaagtgactctctcttttccggtgatgaagaaaatgctgggact

SEQ ID NO: 36099 - DNA, 83 bp, Homo sapiens
ggagcaaaaggccacggcacctgaagccccgagccctcccagcgcaggtgagaagccctaccactgcaactgggacggctgcg

SEQ ID NO: 36100 - DNA, 75 bp, Homo sapiens
ctgaagatgctcgatgagagttttcagtggaggaaagaaatttctgtcaatgatattgatgatgttaagaagttc

SEQ ID NO: 36101 - DNA, 51 bp, Homo sapiens
caagtttgcctccttcatagacaaggttgcagcctgtgaacttttacatag

SEQ ID NO: 36102 - DNA, 100 bp, Homo sapiens
ggtgaagcagtgagtcgaaatgcgtctctggaagtggcatctccatcacctgtcctgacgattaagaaagatcggacctccagaaatagcatctctttgt

SEQ ID NO: 36103 - DNA, 75 bp, Homo sapiens
gcccgctggccgggctggctgcggccgccctgggccgggccccaccggacgcctcccgcgacgatgcccctcaac

SEQ ID NO: 36104 - DNA, 50 bp, Homo sapiens
ctgggtcgcttggaagaagccaagggatcctgaaggccttcgagtatttt

SEQ ID NO: 36105 - DNA, 117 bp, Homo sapiens
aagaggcgaaaggaagcaagcagttcagaagagccaaggaataaacatgcaatgaacccaaaagggatgcctggtgtgcaggagtatatacaacagcctattctcaatggtctgcgg

SEQ ID NO: 36106 - DNA, 90 bp, Homo sapiens
ttgtagcacagatttatgtaatgtcaactttactgagaattttccacctcctgacacaacaccactcaatggagtttcactcttgctgcc

SEQ ID NO: 36107 - DNA, 75 bp, Homo sapiens
gcagccgacggcaaaggtgtcgtggtggtcattaagcggagatccgtggccttcaagtcacaggacgcagcgatt

SEQ ID NO: 36108 - DNA, 75 bp, Homo sapiens
gctggataattttatcccagggtggctgaatcacggaatgccaactgggtcctgaagtagctgaaatgcgaaaaa

SEQ ID NO: 36109 - DNA, 100 bp, Homo sapiens
agcacagccccatccaggttcccatggttgccggctcccctctcaggacaacccagatgtgcaacaaagtgcgatggcctgggcagtttttaaagggaag

SEQ ID NO: 36110 - DNA, 110 bp, Homo sapiens
ttcaaagagaaaaggcaacatcctgtcacaggccatgctctggcaaaaacaatccacattcatctcaatggaaggatcctgccttaagtcaacttatttgtttttgccgg

SEQ ID NO: 36111 - DNA, 74 bp, Homo sapiens
cggagtacagcaagcagatgcagagatctatcatggtgaacttacttcagattgtgcgggaccactgggttcat

SEQ ID NO: 36112 - DNA, 80 bp, Homo sapiens
ggagccccgcctgaggtgccctaaacacactatgaccgacaatgcagatcttcgtgaagactctgactggtaagaccatc

SEQ ID NO: 36113 - DNA, 75 bp, Homo sapiens
gttggaagcagccgatccagcctgcggagcctgtggggcaggactggcattgcggactgacctccagggagaggc

SEQ ID NO: 36114 - DNA, 100 bp, Homo sapiens
accagggtatttagcctagttggcaagcgagcaatttccacctctgtgtgtgtacgagctcatggcaagaagctaccggatgtttcacgacgacagcatg

SEQ ID NO: 36115 - DNA, 100 bp, Homo sapiens
cacgactcctgaagacacacctgcccctggctctgctcccccagactctgttggatcagaaggtcaagaatacatccagcctgtgtgcctcccagctgcc

SEQ ID NO: 36116 - DNA, 83 bp, Homo sapiens
agctgggtcagtccgccgctcaccccgcggccgcaccttcccgccttctcaggaaaatgtttataggaggccttagctgggac

SEQ ID NO: 36117 - DNA, 129 bp, Homo sapiens
ctacaacacaacagacccactgatacgctgggactcgtacgagaacctcagtgcagatggagaagatattaataaggcagcggaaagaagaaatatgaatacggctccatcaagacccagccccacacg

SEQ ID NO: 36118 - DNA, 98 bp, Homo sapiens
cagcacccgccgctgtcgccgaccgcccgcacatccgtcgggcctccccatggccacccatggaccagtcggcattcacttcctcccttctgcggccc

SEQ ID NO: 36119 - DNA, 49 bp, Homo sapiens
cttctaccgaccagagacccagcaccgatgcagaggccaggatgtgggc

SEQ ID NO: 36120 - DNA, 75 bp, Homo sapiens
ctcctcccctctggatttctcagagtaatctatgccagcaattatgacaatgttagcagaccatgcagctcgtca

SEQ ID NO: 36121 - DNA, 100 bp, Homo sapiens
ctctccctcctttaaacagcttctccgggtctcagcatggtccctgactatggctccccagagcctgccttcatctaggatggctcctctgggcatgctg

SEQ ID NO: 36122 - DNA, 127 bp, Homo sapiens
agggagtccccggggacacctcggcacgcagcggagatgcctctttttgccaccaatcccttcgatcaggatgttgttaccttatcccatatcacacaactggtcctcagccataacaagctaacaa

SEQ ID NO: 36123 - DNA, 90 bp, Homo sapiens
ctgctccacactgccaaccggccagaggacgagtgtgtggagacctttggcgacttggcctttggcgacatcttcctccacctgctcacg

SEQ ID NO: 36124 - DNA, 100 bp, Homo sapiens
cgacctcgacgtcttgcctgtgtcccacttgttcgcggcctatagtgcactggtgattgctgcggtgtttgaccgagacataaactgcagaagagcagcc

SEQ ID NO: 36125 - DNA, 95 bp, Homo sapiens
cgaagtttgtcggcccttgccttggcagagctgagcaatggttgttttgaacaacctggaaccaaatacaacttatgaaatcagggttgcagctg

SEQ ID NO: 36126 - DNA, 90 bp, Homo sapiens
ttgcaggaagtggatgagttccacctcattttagagtatcaagcagcatgcttttcacttccactgcatctctcgctggctcaaaacacg

SEQ ID NO: 36127 - DNA, 50 bp, Homo sapiens
actttgacattcctacccattccaagaagtcatttgacgcccacccgcgg

SEQ ID NO: 36128 - DNA, 130 bp, Homo sapiens
cgccgccgggcgcttctagtcggacaaaatgcagccgagaactccgctcgttctgtgcgttctcctgtcccaggtggtgattgcgggcttggccatgctttgtgcaagtatctggatgagctgggcttca

SEQ ID NO: 36129 - DNA, 82 bp, Homo sapiens
ccagagtcggcgtaactatcgcctgacagggtatctgaagtaaaagggggaaattatggaagtggaaattacaatgattttg

SEQ ID NO: 36130 - DNA, 101 bp, Homo sapiens
ctagaagtagttacttggaaagtccaagaggcccaaggctgaacctcctcagaagagcaactggagatagaagcatgaatcttttatccatacgttccgcc

SEQ ID NO: 36131 - DNA, 100 bp, Homo sapiens
aggccctggtggaacagatggtgaatgattgccatcacgaaagccaaagtggatttctccagtgtggtgtgcctgcccccttccgtcattgctgtgaatg

SEQ ID NO: 36132 - DNA, 100 bp, Homo sapiens
ttcctcaggtaccacagcagaccacagttctctgatgtagcccagcagttccagtatgctgtgcgggtgattggcagcaacttcgccccaactgttgaaa

SEQ ID NO: 36133 - DNA, 98 bp, Homo sapiens
cgaaagaagctacccagtgtcctggagggcaactagcatggatctgccaatgcccatgcgcttccggcacttaaaaaagacttctaaggaggcagttg

SEQ ID NO: 36134 - DNA, 75 bp, Homo sapiens
gaattggagaacttgttggagtgctggtgaatcatttcaagaggtcgcgtctccttcttcacctcggggtccgag

SEQ ID NO: 36135 - DNA, 90 bp, Homo sapiens
gaagaattatgcacgggacagtgtcagcagtgtgtcagatatatctcaataccgtgttgaaagaaagcatgggattatggcaaccacaga

SEQ ID NO: 36136 - DNA, 100 bp, Homo sapiens
ggggggccgccccccctgtcccgggagacgccccccagccacagcccacctgctgagggggacccccgcacccaccagggttgggagggaagtggctgag

SEQ ID NO: 36137 - DNA, 101 bp, Homo sapiens
caatgttggagccgtctgcaaagtgtccccggcaagaaggtgtgcaactgaggaacatggctcaagaaactaatcacagccaagtgcctatgctttgttcc

SEQ ID NO: 36138 - DNA, 99 bp, Homo sapiens
ttctgccccagaaccggtcgaaaaccgtgtatgagggattcatctcggctcaggtccatggaaataaaaggcacatgaacaagtgcattctctctctta

SEQ ID NO: 36139 - DNA, 83 bp, Homo sapiens
ggaactggcaagaaagctaagcattgatattcctgatgaaaacaaaggcgatatgcattatgatgctgagattatccttaaaa

SEQ ID NO: 36140 - DNA, 100 bp, Homo sapiens
tgtttccttttggcctactcccaagaagatattggtggtaaataaagatgtcctggacgtttacattgagcatcggctaatgatggagcagcggagtcgg

SEQ ID NO: 36141 - DNA, 75 bp, Homo sapiens
gaaaaattacagcacatctcagtgaatttgcaagtgttctggatagtaaagcaatagaccttatgaatgcactaa

SEQ ID NO: 36142 - DNA, 83 bp, Homo sapiens
cgtcaagtacactgaaattcatcctgagatgaggatacatgatcccttaattcaggctcaggctgaagaactgacccacttac

SEQ ID NO: 36143 - DNA, 82 bp, Homo sapiens
acagaagagtctctacagagatgtgatgcaggaaaccatcagaaacctggactgtatagatcctgataacttaagtgactct

SEQ ID NO: 36144 - DNA, 98 bp, Homo sapiens
tttgtagtcatgtacagaacatgatcaagggtgttacactggacatcagcacagtatatcagatttttcctgatgaagtactgggttctggacagttt

SEQ ID NO: 36145 - DNA, 100 bp, Homo sapiens
ggccgcggccctgggagctggaggaaccgcggacactgatgacattgaaagtcctaaacgcagtatccgagacagtggctacatcgactgctgggattcc

SEQ ID NO: 36146 - DNA, 100 bp, Homo sapiens
aacaccaccactctcattagtgagaatggtcatgctgccgacaccctgacggccacgaacttccgagtgggtaagagcaaagaggcggaaattaagagaa

SEQ ID NO: 36147 - DNA, 75 bp, Homo sapiens
gggcacgtgtttgcggttcagccctttgatgaccgcagcagaaaagatcaacatccgcgtgctggaccccttcac

SEQ ID NO: 36148 - DNA, 75 bp, Homo sapiens
ttctacactgtttgtcgagatttgaaagagctcagacatctgaacagagaatgtcagtatccaataggatgccag

SEQ ID NO: 36149 - DNA, 51 bp, Homo sapiens
cagcgaggctaagaacagagtgatcatggggttgacagcagcattttccag

SEQ ID NO: 36150 - DNA, 83 bp, Homo sapiens
tgcagaaggaggtcctgccgtccatgcggaagatcgtcgccacctggatgctggagatgaaggatttgggggcagagcacttg

SEQ ID NO: 36151 - DNA, 87 bp, Homo sapiens
gcgagcgcgtggggccaagaaaggaacatcaggagagcattctgggtaataccatgcaaagtgtgattgcattactcagcaatctag

SEQ ID NO: 36152 - DNA, 87 bp, Homo sapiens
aattttgccgatttcatgactaaccagtagtgcctggaagagctgggatgtctggttgagtcctatggcatgaatgtttgccaacca

SEQ ID NO: 36153 - DNA, 97 bp, Homo sapiens
acgacaagcccattggggccacccacagtccagaggtgtccttctaaagctggtagaggtttcacgagtcatcagggacccagaacccttctctttt

SEQ ID NO: 36154 - DNA, 84 bp, Homo sapiens
aggaacgaggcaaggagctaaagcagcgtgcgttcagccctgggactgtgtcagggaaaagggaggcaaggtcctggtccactg

SEQ ID NO: 36155 - DNA, 100 bp, Homo sapiens
cctccaggtcaccatcgagggccctggatcaggtctcctgggcatggctaacattgacctggaaaagagcaggactggtgatgaaattattcttccgaga

SEQ ID NO: 36156 - DNA, 82 bp, Homo sapiens
attgatctcttggagcagctggggatcatgctgaagaaaaggtgactggtctcatgagccctgaagaatgaactcagaggag

SEQ ID NO: 36157 - DNA, 50 bp, Homo sapiens
tgtatagcctttactttcctgagatgtggaagatgtgaaatttgtcatca

SEQ ID NO: 36158 - DNA, 82 bp, Homo sapiens
ctggactcggaggccagcgtgaggctcacagccgaacaggcacgcttcttcctgctgctgaatgccatggtggcaaaactgg

SEQ ID NO: 36159 - DNA, 83 bp, Homo sapiens
gcgagcgcgagcggcgcgagaaagtaaggggcctggataccaagaagtgactgctcatctaatccataaagctatgttaacag

SEQ ID NO: 36160 - DNA, 100 bp, Homo sapiens
ggaatttttcccattggatgagtcgggcaatgtggttcccagtgacaccaacattctggacacgtgggcggtggttgtgtcaaaccgattggtgacatct

SEQ ID NO: 36161 - DNA, 75 bp, Homo sapiens
cacttacaactgccgctgtcccccacaatggacagttctaaggacatatggaattggctatggataattcatatg

SEQ ID NO: 36162 - DNA, 98 bp, Homo sapiens
agtgggacctagattagaccatgaacgagccaagcttatatagaattggtgataggatcacaacttctgaggtcccagcaagagtcctaacatctagc

SEQ ID NO: 36163 - DNA, 100 bp, Homo sapiens
ccggcttccagggaccccgctgtcagtatgatcttaccaatatatttgagtccttcctgcctcagttattggcctatcctaaccccatagatcctctcaa

SEQ ID NO: 36164 - DNA, 104 bp, Homo sapiens
gctccgtggccttagctgtgctcgcgctactctctctttctggcctggaggctatccagcgacctcagcagccatgtcgaagccccatagtgaagccgggactg

SEQ ID NO: 36165 - DNA, 100 bp, Homo sapiens
gtataatcctacctatgagaccatgtttgctcctgagaatcttgaatccaggttaaaagtaattttgcctgatgacattggagctgcactgatggatggg

SEQ ID NO: 36166 - DNA, 100 bp, Homo sapiens
ttcatggaagactcactagtaatatggtctgcaaacactgtgaacaccagttcctctgtgacgagggtgcaggtatctctggggactacatcgatcgcgt

SEQ ID NO: 36167 - DNA, 90 bp, Homo sapiens
gcgaatatcgtcatcgttagaagggctccaacaaaagaatcctctgaagaggagtatgactctggagttgaagaagaaggatggccccgc

SEQ ID NO: 36168 - DNA, 76 bp, Homo sapiens
ccctggacacagcaatatctctgggctttcacaggtcctccagcagcctgacctgagtgggttagtgatccagaga

SEQ ID NO: 36169 - DNA, 75 bp, Homo sapiens
cgcgtttccacttcagagatctgggccttcatcctagaataatcactgaaggatttgaagctgcaaaggaaaagg

SEQ ID NO: 36170 - DNA, 75 bp, Homo sapiens
tgacgggtctggagtgcgtgggggaccggctgttggcgggtgcatctgcagacgcagcaggaggtgaagctgcgc

SEQ ID NO: 36171 - DNA, 96 bp, Homo sapiens
aggccggcctgtctgccgcgatggatgacagtaagctgaagaaatcaggggagaaacccctgcttggtggaagcctgatggaatatgcaatcttgt

SEQ ID NO: 36172 - DNA, 99 bp, Homo sapiens
tggtgctcttgctccagaaagactcactgctcacagctgcccagctgaaagccaagacacatctttgccatcgtggcatcagcctatgacctggctcag

SEQ ID NO: 36173 - DNA, 100 bp, Homo sapiens
atcccggctggagcagagccaggtaaatataaatgtaggtgcataatatagactttttctgaatggtttataagttgcaggtatgatgcctctttatttc

SEQ ID NO: 36174 - DNA, 75 bp, Homo sapiens
aggaaaaactggagagcttcatcaaaaatagtgatagctttgataatccccacagagaccacctatcacacgctg

SEQ ID NO: 36175 - DNA, 89 bp, Homo sapiens
ggagaggcgagctcgcgatgagtggtctcggcaggctcttcgggaaggcaactccgaagtcaagcccgcactctgattacctttgctgg

SEQ ID NO: 36176 - DNA, 90 bp, Homo sapiens
ttatgggcagacagcggcatacagaatgcctatgaccggcgtcgagaatttcaactggaagtggtcatagtaagtgctacaagaacaccc

SEQ ID NO: 36177 - DNA, 100 bp, Homo sapiens
gcgtccgagtcaacaaccgcttcgagctggtggtctttgggaagaagcttcctgcctttgccaccatccccatccaccagctgcagcatgagaagaaata

SEQ ID NO: 36178 - DNA, 83 bp, Homo sapiens
cctttatctgatgatgatgaaagttacacagacctgcctagagctggaacgttacctccagagcgagccctgctatgtttcag

SEQ ID NO: 36179 - DNA, 98 bp, Homo sapiens
cttgctcgggcaaaagttgtgcattggcccgatcaagcctgacttctagccaaggaacaagcacatcatgattgacttggggactggcaacaacaaca

SEQ ID NO: 36180 - DNA, 50 bp, Homo sapiens
tacttgagacacgacgaccaacagagtgataatgaactctcaagtggaac

SEQ ID NO: 36181 - DNA, 96 bp, Homo sapiens
ggtgcaagagcttctgaaggaccgcgatcctaaagagattgaatgaggccagtaatagtagccatgagtctcgtattggtctagctgaggggttgg

SEQ ID NO: 36182 - DNA, 100 bp, Homo sapiens
gtaactggaacttgcttctggaaaccctactgcatcatgatggacttttactgagaatcttgctgaagagctcaagttttagattcaggaagactgaaag

SEQ ID NO: 36183 - DNA, 114 bp, Homo sapiens
tgctgctcgtcgctgccccggggtccacgcaggcccaggccgccccgttccccgagctgtgcagtactatactggcaattgctggagaagattttgcaattgttgcttctgata

SEQ ID NO: 36184 - DNA, 100 bp, Homo sapiens
cgactgcatctttgacaagtttgagtgttgctggaacggttcggataggtggctgaagccatactattttatagaattaatggaaagcagaaaagacatc

SEQ ID NO: 36185 - DNA, 72 bp, Homo sapiens
tttaggaatggtagcttcctggggatggtatgctggatatacaggtttttcgttggaatatacgttgcacat

SEQ ID NO: 36186 - DNA, 83 bp, Homo sapiens
atggcgatgccaatgccgctggtgcttattatcaggtggtgaactggctagaagggcctggatcagaacaactaagagcccag

SEQ ID NO: 36187 - DNA, 100 bp, Homo sapiens
gcccgcgggccagcgcaccggtcccccagcggcagccgagcccgcccgcgcgccggtcagactatgatgactggagaccgtctctggccagtttgcttca

SEQ ID NO: 36188 - DNA, 75 bp, Homo sapiens
agctgtggagttggtccagtatgcttactttaagaaggtggcaagaagaagccactgaaacagcccaagaagcag

SEQ ID NO: 36189 - DNA, 75 bp, Homo sapiens
gctgggagccgcgcacaccaccatcacgtaggtgcacgtctcatcgcacatgctggcagcctcaccaacctggcc

SEQ ID NO: 36190 - DNA, 100 bp, Homo sapiens
cgcgggccgaccgggcgcaccgaccatggcctccaaatgccccaagtgcgacaagaccgtgtacttcgacgctatgtccagcaaaggctccgtggttctg

SEQ ID NO: 36191 - DNA, 75 bp, Homo sapiens
aatgataaactgcgaggacagagccactggaatggagatgaggcgcctggtgtttggatgatcccaacttcagat

SEQ ID NO: 36192 - DNA, 100 bp, Homo sapiens
gctgccgccaaggtgttcggtccttccgaggaagctaaggccgcgttggggtgagaccctcacttcatccggtagctacagcaagctgggtagcaggcag

SEQ ID NO: 36193 - DNA, 101 bp, Homo sapiens
agcagtggcagcatggagaaacgcaagtccatgtacacgcgagattataagaagcttgggttcattgaaagaccacagcaagattctttcattcgtctcct

SEQ ID NO: 36194 - DNA, 100 bp, Homo sapiens
tctccgcctgcttccctccgtgtcctgaaaagtgcgaccgttctcccaaggaatttccacgttcactgagacttttttgacggagagggacaaacaatcc

SEQ ID NO: 36195 - DNA, 97 bp, Homo sapiens
gagccccggaggcagagcggctgccatggccaggtcagagcagcccaccatgggatggggagggggtggaggctgcaccccgcgcccacccatccac

SEQ ID NO: 36196 - DNA, 50 bp, Homo sapiens
cgcctggcctacagcgaggctgtgcatcagagacctttgccccagccagc

SEQ ID NO: 36197 - DNA, 98 bp, Homo sapiens
agccggttcagagcaaaccgcagaagggaaggtgctgagctactggtgcttcagtcccggccacagcatgcacgagctggtccgccagggcgtccgct

SEQ ID NO: 36198 - DNA, 100 bp, Homo sapiens
atcatcgttttgaagagttctgcgttttgccagtcacctctcaactgtgtgccaaaggtatacggatccgggtctcagacaagggcgttccagtacgtca

SEQ ID NO: 36199 - DNA, 74 bp, Homo sapiens
ctggagtgaagaacgccgccatccagccaccattccaagggagcagtatgcagaggggaagatgagaggggctg

SEQ ID NO: 36200 - DNA, 98 bp, Homo sapiens
ggcttccgacgtgcagcctggcagtgcagtgtgatccgggccaaggtggtggggaagaagctggtaaaggaggggcccttcggcacgctggtctacac

SEQ ID NO: 36201 - DNA, 73 bp, Homo sapiens
ggccgtctgcctgttgtgctatgtcagcatcaccaaggccatcactgtgcatgtccccatgccctcagcagga

SEQ ID NO: 36202 - DNA, 100 bp, Homo sapiens
aaggacctgggtggctttgatgaggacgcggagccgcggcggagccggaggaagctgatggtcatcttttccaagaaagaccacagcaagattctttcat

SEQ ID NO: 36203 - DNA, 76 bp, Homo sapiens
ctacttcttgcccctggctaacaccctgaagagcaaaggtgtgtgatcctgtaaaattaaatcttccaagatgatc

SEQ ID NO: 36204 - DNA, 95 bp, Homo sapiens
gcatccccgcggacgccacagcgctggcttgggcaccgatgataacaccctcatcagagtgatggtttctcgagcagaaattgacatgttggata

SEQ ID NO: 36205 - DNA, 100 bp, Homo sapiens
gtgctcgcccagcctgcacgtcgacgacagacatatgtagagtgtgtcggtcagaaggaacacctgagaaaccgctttatcatccttgtgtatgtactgg

SEQ ID NO: 36206 - DNA, 75 bp, Homo sapiens
agagcggagggagccccagacacgagttcggaatccagcattaagaagaaatttctcaagaggaaaggaaagacc

SEQ ID NO: 36207 - DNA, 74 bp, Homo sapiens
agcggccgggagtcgcgcttcttccccactcccgagacagtttccaaggcaggaaaggtaaagagacaaagaaa

SEQ ID NO: 36208 - DNA, 99 bp, Homo sapiens
tatgggagggctggccaacttctgctacagacgactcaagggtcattttcaacattgttaacttcagtaaaaccaagagtctctatagagatgggatgg

SEQ ID NO: 36209 - DNA, 75 bp, Homo sapiens
cttcaagcttaggaccacccaccatgcctatccaggctaccaagcagtttctcgaagagattaacaagtggacag

SEQ ID NO: 36210 - DNA, 95 bp, Homo sapiens
atacagagctggctgtcttccatgatgaaacagatatttggtttccaggcaggactgacgtctttggattgcagtggatcttactgcttacctgt

SEQ ID NO: 36211 - DNA, 83 bp, Homo sapiens
ctttctggcctggaggctatccagcaacacaccacagccatcagcactggaatgcaaagaccagaacaaacagaaggaagcca

SEQ ID NO: 36212 - DNA, 49 bp, Homo sapiens
atccttgactgttactacagaaaaaactatgctccaggaagcccaggtg

SEQ ID NO: 36213 - DNA, 100 bp, Homo sapiens
tggctggagacatgagcaagaaaagcctctgggagcagaagggaggctccaagacctcatcaacaattaagttcaaacgatatgtcaataaacttcgaag

SEQ ID NO: 36214 - DNA, 102 bp, Homo sapiens
cgtggaggaccattatgagatgggggaggagctgggcaggctttcatgagaaggacaagaagccatattgccgaaaggatttcttagccatgttctcaccca

SEQ ID NO: 36215 - DNA, 51 bp, Homo sapiens
aaaagggactgctaagaagataccaccagggattacaacatggattttttg

SEQ ID NO: 36216 - DNA, 131 bp, Homo sapiens
tattagatatgctggcagcccttaaaaaaggaataattggaggagtcaaagttcatgtggatcgtctacagattacctctctagtgacccttcagctgttaaccctggttggccatgacgatcagcttgat

SEQ ID NO: 36217 - DNA, 83 bp, Homo sapiens
ccggtaccgctgcagccaccgcggcccccgcggagtgttctgccagttctggataatccactgtccaagaaggttcgaggcct

SEQ ID NO: 36218 - DNA, 50 bp, Homo sapiens
ccaaaagattgggttggtatattcaagtaggtacaagtagtcaagtttct

SEQ ID NO: 36219 - DNA, 100 bp, Homo sapiens
ttcaaaattaaaagaggagcagcatggcatttcagtcactggtttgcagagtccaggttatggaggttttgatgactatggtggctataataattacggc

SEQ ID NO: 36220 - DNA, 100 bp, Homo sapiens
atcacctgtctggagcaaggaaaaaaacctctgaccgtgaagagacatgagatgattgccaaacccccagggatggaggccatcatgtcggagttcttca

SEQ ID NO: 36221 - DNA, 100 bp, Homo sapiens
cctgagtagggtgtgacctccgcagccgcagaggaggagcgcagcccggcctcggtactgtgagaatagagatgtttcgaaatatgcagaatgcagaaat

SEQ ID NO: 36222 - DNA, 75 bp, Homo sapiens
atgttagtgctcaagagcctcattatctaccacccgagatgccccaagaactccatccggcacaacctgtcactg

SEQ ID NO: 36223 - DNA, 110 bp, Homo sapiens
agtgtttgacatagacctggaccagccagaggacgcgggctctgaggatgagctggaggaggggctccagaacctgggtatcaacccagcaaacattggcttcagtaccc

SEQ ID NO: 36224 - DNA, 74 bp, Homo sapiens
gttgactgtcgctatgggctcactgttgtccaggcagctcatgccaccctggagaaatgtgccacgtgctccca

SEQ ID NO: 36225 - DNA, 100 bp, Homo sapiens
acagcacctatcacttgttccctccaagacaactgaatgaacccttaggagaaatcttgagagtggacagcaattgtgaagatcgccagagagttctgtg

SEQ ID NO: 36226 - DNA, 50 bp, Homo sapiens
ttgtggctggctggatctctgcaaactaaacttcaagcctctggagcagg

SEQ ID NO: 36227 - DNA, 74 bp, Homo sapiens
ccgctggcagccgcggatctcaccgccgctcaggaccctctttcccagctgcccgctcctcagcacccgaagat

SEQ ID NO: 36228 - DNA, 75 bp, Homo sapiens
aaagcggggaaatgtgtgtccaacaaaatccagtctcatagcagaggagaatataatgtttacagcaccttccag

SEQ ID NO: 36229 - DNA, 100 bp, Homo sapiens
ccctaggagtgctgagcccgcggaaccgcagccatgtgcaccaattccagctggacatcactgtgaaaatgggacgggataaagtccgagaaatgtttat

SEQ ID NO: 36230 - DNA, 96 bp, Homo sapiens
attggcttcgggctgagctagcagtgagcaccttttggcccaatgaatatcaggttcaaaccttgtactactcagctgatcacaagctgcttgatg

SEQ ID NO: 36231 - DNA, 90 bp, Homo sapiens
gctgcctcgagttgtcctgactcctctgaaggtaaacggggcccacgtggaatctgcatcagataacaatgaagatggtgccaaaactgc

SEQ ID NO: 36232 - DNA, 87 bp, Homo sapiens
ggagaagagcaagggttccctcaagaggaagtgagcggtgctgtcctcaggtgattatcctgaaccatccaggccaaataagcgccg

SEQ ID NO: 36233 - DNA, 75 bp, Homo sapiens
cgcgagagagatgaaagacgtcgaggggacgattggaatgacaggaacgtcaaggtcgtgggaaataaaaggcag

SEQ ID NO: 36234 - DNA, 100 bp, Homo sapiens
ctcgctcactgcacgccagaacctgaggagagaatggcatgccagggccccaaaggagatccaggattttccccaggtcaacctgttcctggagaaaagg

SEQ ID NO: 36235 - DNA, 84 bp, Homo sapiens
gtgaaggtccggggcttgccctggtcttgctcggccgatgaagtgcagaggtttttttctgacaatgcagatcttcgtgaagac

SEQ ID NO: 36236 - DNA, 75 bp, Homo sapiens
gcaatctacagtcctggcctgaggaaggacctacaagaacagtgaggagcttcggtctcgtattgtgtctggaat

SEQ ID NO: 36237 - DNA, 74 bp, Homo sapiens
cttaaacgacttgttctctatcgaacaaaagtagagttggaactgataatgggagagaagcaattgaaagtggg

SEQ ID NO: 36238 - DNA, 50 bp, Homo sapiens
cacgtctctgtcatctcaccaacacttgtggccccagcagatggcttctc

SEQ ID NO: 36239 - DNA, 96 bp, Homo sapiens
ctccctcctgctgtcaggctacatcagcaaagggcctcttagcaaatatccggctgtgatcaatgatatttcattctggttgccctctgagaatta

SEQ ID NO: 36240 - DNA, 82 bp, Homo sapiens
gacgggcatgccaagaagatgagaccgggggaggcgacgctaagttgctgatcgtggcggaatagctattcagtcagacaga

SEQ ID NO: 36241 - DNA, 100 bp, Homo sapiens
ctgaccactctggtgccttccataacaagttcggagtgttcagtggacacacgcttggcagtgtaatttccacagatcctctgaagaggttcttcagtca

SEQ ID NO: 36242 - DNA, 74 bp, Homo sapiens
tggctgatcaaagaagagcagcccatggtcaaaatgcagatcttcgtgaaaacccttaccggcaagaccatcac

SEQ ID NO: 36243 - DNA, 98 bp, Homo sapiens
ccgcgcgggcgacacgctgcagggcatcgcgctcaagtacggtgtcacggaaagaagcacttgtaaggaaatatagcatccattgtgaaagtggaaaa

SEQ ID NO: 36244 - DNA, 75 bp, Homo sapiens
ctcggggtccggaaccagacgatgagacagagttgcgaccgcgcggcagccattatttggaaagcaggtctataa

SEQ ID NO: 36245 - DNA, 75 bp, Homo sapiens
cggagtcagtcattttactgtcaagacatttcttcggcattctgcaacagcctgtggacatctctacagcaatga

SEQ ID NO: 36246 - DNA, 96 bp, Homo sapiens
tccaactctcagccttcatcttcctactgtcactgtctccttcacaaatttggagcaagaggtggtggtggccttcccccgaagaaatttggtaat

SEQ ID NO: 36247 - DNA, 75 bp, Homo sapiens
ggagaattggatagcagagtaatgtttgacctctggaaacactcctggtaacgtttttatccatggatgacttgc

SEQ ID NO: 36248 - DNA, 98 bp, Homo sapiens
gcccgcaggcctgggaatttccgtcccccaccaagtccggatgctcactccaaagtctcagcagcttgccttgcgccatggactggcagccagacgag

SEQ ID NO: 36249 - DNA, 83 bp, Homo sapiens
cctgggctgccggcacttcgcggcagcagggagagcaacaagccccggccctcagagctcagccggatgagcgcagcccagag

SEQ ID NO: 36250 - DNA, 100 bp, Homo sapiens
caagtttgtgccccatagctgcacagctctaagcgaaagacatgaggcctcagcctgaaatgaggttgttttgaggtcatctgatttctgactagaaggt

SEQ ID NO: 36251 - DNA, 100 bp, Homo sapiens
cggagaggagcatgaatggagcaaaatggcggatcatgtgcagaatttaagggacgctgtgaagcaatcatggatgcaatgaagagagggctctgctgtg

SEQ ID NO: 36252 - DNA, 99 bp, Homo sapiens
aaaaaggagagcctctgagctcaacggaggattgtgcctgagaagaacccacagagaatcttttagctgaaaaagtagagcagctgatggaatggagtt

SEQ ID NO: 36253 - DNA, 75 bp, Homo sapiens
cacaaccatcgcagttggaagcccatggggcaggctatatggaaagcacaggtgtttctgcttctggagaggccc

SEQ ID NO: 36254 - DNA, 83 bp, Homo sapiens
cctgtggtctctgcacctcctttctaacacaccacagccatcagcactggaatgcaaagaccagaacaaacagaaggaagcca

SEQ ID NO: 36255 - DNA, 50 bp, Homo sapiens
gctccttctcctggagacgcaactcaagtgatgtcctttcctctggacaa

SEQ ID NO: 36256 - DNA, 100 bp, Homo sapiens
cagagagcgcacgggaattcgggggtctggggccgagaacgtgaccgcagccgggctcgccgggagttctagcgcttcagcatggaagggatctcaaatg

SEQ ID NO: 36257 - DNA, 100 bp, Homo sapiens
tttccatgggattttaatagatgaaaaagatccaaataaagaaaaacaagcatttgtcaaaacagttaaagccaccctttcacacctccaaagctgagtg

SEQ ID NO: 36258 - DNA, 82 bp, Homo sapiens
aagaaaagctgcacttgaggcccagaatgcactgcacaatattaaaactttacctgggtttttcagaagaagtgaagtcaag

SEQ ID NO: 36259 - DNA, 100 bp, Homo sapiens
agatatgaccatgtatttgtggcttaaactcttggcatttggctttgcctttctggacacagaagtatttgtgacagaaggccttacgaccggatatggg

SEQ ID NO: 36260 - DNA, 83 bp, Homo sapiens
cagcgatattcccaggacagcttcagcaaacactacaagtccacggtgggagggtgatcagcccatgacctaaacctccagac

SEQ ID NO: 36261 - DNA, 101 bp, Homo sapiens
gccgccgggagtaacgagccggacggcgtcctcagctatcagccactgaggcggctcccagctgcgttggcgacatggccgacacccccagagatgccggg

SEQ ID NO: 36262 - DNA, 100 bp, Homo sapiens
gccatctcctgggccgcctggcggccatcgtggctaaacaggtactgctggaggtatgaaggttattgaaaaccgggccttaaaagatgaagaaaagatg

SEQ ID NO: 36263 - DNA, 100 bp, Homo sapiens
attcacggagaatgcaaatatatagagcacctggaagcagtaacatgcaatatatcctcatctggtaaagacagacagaactctgaagtggaaagagcac

SEQ ID NO: 36264 - DNA, 82 bp, Homo sapiens
cgggagtggtctctgaggcggcggcggcggcggggatcgtctccggcaggtgtgaaggaagccggtgagaagcctcggggag

SEQ ID NO: 36265 - DNA, 101 bp, Homo sapiens
ggaatggacgattccgtcaagagataacaacaaatgttatgcaaaaataatctgtaatactaaagacaattgaccaaagacttgaccactcaaagtccagc

SEQ ID NO: 36266 - DNA, 98 bp, Homo sapiens
gaagcgtcgggattaggtgaaattggttgaatctggcgatgtggaacccatggatatggagggctgactatatacaccatgttttttcctggcacatc

SEQ ID NO: 36267 - DNA, 100 bp, Homo sapiens
gggaaggaacacgctgcattactgcgtggtttgagcacaaaatgaacataattagggaaaataaggatctggcatgtttctacacaacaaaacattcatg

SEQ ID NO: 36268 - DNA, 51 bp, Homo sapiens
gctactaaccagagccggctctttctcggaatcagagatcattgatttctt

SEQ ID NO: 36269 - DNA, 96 bp, Homo sapiens
aaacgcttctgtgagacttgataatagcggtcacctttgtcccggtgtccaaggtgagcgggcaggcagaggtggacgacatcctcgcggcagtcc

SEQ ID NO: 36270 - DNA, 100 bp, Homo sapiens
tccacattgagagcaaaatctacaagatgatgcagggaggagttcctgacagcctcctcatgaaggtgctgagccagcgcctggaccagcaggactgcat

SEQ ID NO: 36271 - DNA, 75 bp, Homo sapiens
aggtgaaggacaagctcctacaaggcaggcagtattgggtgcaggccctggagcagagtgaccggcaggacgtgg

SEQ ID NO: 36272 - DNA, 113 bp, Homo sapiens
ggcgcggcactgcgggtcccgattgctgcagccgcttgtcagtgtgatgaagattggcacccagcccgagcgggaagaagttccgcagcaagccgcagctggcgcgctacctg

SEQ ID NO: 36273 - DNA, 83 bp, Homo sapiens
tactcctcccagtgacgggtctggagtgcgtgggggaccggctgttggcgggctgaaggtgatgtggccgccctcaaccgacg

SEQ ID NO: 36274 - DNA, 82 bp, Homo sapiens
ctcccgggctccgggaaaactacactggccagggaaattcaactactgaggaggttacggcacaaaaatgtcatccagctgg

SEQ ID NO: 36275 - DNA, 75 bp, Homo sapiens
gtcctgtaaaatcacagattatgcctctgcaatcccagataatggaagaaggtcctgtctaaagctcaaagtctt

SEQ ID NO: 36276 - DNA, 100 bp, Homo sapiens
gtggctgcctttgttgctgctgcacattaggttgcagtatgtggccagttatttgcctcagtaaaagagaactgcaagcacatgttgaccagataactga

SEQ ID NO: 36277 - DNA, 100 bp, Homo sapiens
agtctccgtctggagtaaggtgctgcggagcgacgcggcctgggaggataaggccagtacagatgacggctttgtatataatttggatgcacgttcagat

SEQ ID NO: 36278 - DNA, 99 bp, Homo sapiens
ctgagccagagctccagcagccttgttagggcgtggcctgaggcttggataagtgggatgccatggacaatattaccaggcagaaccaattctacgata

SEQ ID NO: 36279 - DNA, 82 bp, Homo sapiens
tgagctgcggcgagcggagcttcgcggggatcctgctggactgcacgaaaaacccgtgttcctggccttccgaatcatgccc

SEQ ID NO: 36280 - DNA, 90 bp, Homo sapiens
cagaagaactgttgaaactagcaacatctataagtgaaaccttggaagagaagatcatatctgaagatattagtgagctacaaaagaatc

SEQ ID NO: 36281 - DNA, 100 bp, Homo sapiens
gtcgagggcaaggactctgcgtgcattctccactgccgtctactcggccactccggtcccgacacctagcctgcgatggagtgcaatggcatgatctcag

SEQ ID NO: 36282 - DNA, 83 bp, Homo sapiens
cctacttagatgacaatgtcaagaaagaaaactcctccttgtacctagaataccaagctgctattttacacttgaagagggag

SEQ ID NO: 36283 - DNA, 100 bp, Homo sapiens
acagcatcccacattaagtcaacgaataatcatgggccagactgggaagaaatctgagaagggaccagtttgttggcggaagcgtgtaaaatcagagtac

SEQ ID NO: 36284 - DNA, 50 bp, Homo sapiens
gcgggagctcgagggcaagaccggctaaaacttggaatataacgtggagc

SEQ ID NO: 36285 - DNA, 83 bp, Homo sapiens
gtcgggaagaatcgtttggtctcctgccgtgcccggtacggaaaaaggaccagatcaatattgaaacaaagaataaaactgtt

SEQ ID NO: 36286 - DNA, 75 bp, Homo sapiens
caaagttatggatgtcactgaggaaatgattgaagccatccgcgaagcggtggtctacctggcacacacacacga

SEQ ID NO: 36287 - DNA, 83 bp, Homo sapiens
ccccaacccccgcctggctgcaggcaatactagcccctctggagcacggagctccttccccaaagacatgaagctattggaga

SEQ ID NO: 36288 - DNA, 101 bp, Homo sapiens
tttgtccaaagtggtgccgttttctcactatgctgggacattgctgctacttctggcaggtgtggcctgcctccgaggtaatagcctgcagctggtgtttt

SEQ ID NO: 36289 - DNA, 90 bp, Homo sapiens
ttggtttcgggatctcggtgctgcagacggcgagacctcctgcacaggttcgaagtcaacaataccattcttcacccagagatcgttgag

SEQ ID NO: 36290 - DNA, 83 bp, Homo sapiens
attcgtcttggtaaacttggtggtgatcagcccatgacctaaacctccagacaaaataaaacggaaaatttgctagaatcaag

SEQ ID NO: 36291 - DNA, 74 bp, Homo sapiens
gggcgatgggcccgtggacatgcgcacctcacacagatccaaggattaatgtcgtgcttgctggtggccacgtt

SEQ ID NO: 36292 - DNA, 76 bp, Homo sapiens
ccacaataaaagagacctctacttagctcagcaattcttacctttggatgcccgtcaccaagttgggccgcttggt

SEQ ID NO: 36293 - DNA, 76 bp, Homo sapiens
ctgtacctcccttcagagccaacatcacttagaagtcctcctgcatatgcccaagaggattgggagtggaatggac

SEQ ID NO: 36294 - DNA, 96 bp, Homo sapiens
tcaaacattcaagaaaacacacagactccaactgtacaagaggagagtgaagaggaagaggtatgggaggacatggctatggtggagctggtgatg

SEQ ID NO: 36295 - DNA, 100 bp, Homo sapiens
ggaagaccctcctgccaaaaggaaatgcatctttatgtcagaaacacaaagcagcccaaccaaagggttgtgtgtcgcagccctgtcggtgaataacttc

SEQ ID NO: 36296 - DNA, 100 bp, Homo sapiens
ggaagcgcagcaacagcaagctcccgggcagggacattcataccaccaccgggaagatcaagagagctgttctgcagttcactcctgctagctggaccta

SEQ ID NO: 36297 - DNA, 121 bp, Homo sapiens
gacagcagattttggtttaatatctgattgggacaacattcagacccatttccagtcatgaggtgatgaattagaagacaatggaaagaatttctacgaatctgatgatgatcagaaggaa

SEQ ID NO: 36298 - DNA, 82 bp, Homo sapiens
ctaaagcagcgtgcgttcagccctggggaatattaagtgaacttgacgttgatgtaaatgaagggtctctaatggagctaca

SEQ ID NO: 36299 - DNA, 75 bp, Homo sapiens
tcactttcctggaggcctcccgctttgcccaggagaatgagagagtctacagggagattgaacaggtgattggcc

SEQ ID NO: 36300 - DNA, 50 bp, Homo sapiens
gaacaatctcacccaattactctgctcagatctgcttggctttgaggaag

SEQ ID NO: 36301 - DNA, 82 bp, Homo sapiens
caagtcaggtccggcacatgtttccgcggagcggacccagcaatgacggggagtacgtgctcatgatccgcgacgtgaccac

SEQ ID NO: 36302 - DNA, 75 bp, Homo sapiens
tgaggcagtccgatggggctactttattccagaacaatcacatggcctggtttgctttcgaccctggctcggcgc

SEQ ID NO: 36303 - DNA, 98 bp, Homo sapiens
gtcggtcgccgccatgacagcgagcgaggcggaggttcccgtgtcagtggctatgatgacacctcaagttatcactccccagcaaatgcagcagatcc

SEQ ID NO: 36304 - DNA, 74 bp, Homo sapiens
gctctacccagaattcaattaaagtggctcagcctgattacatcaaccccagagccgtgcagctgggctccctt

SEQ ID NO: 36305 - DNA, 100 bp, Homo sapiens
ctgaagcagaagccctggcatctagattttgtgtggatgagggctcggctacagcaagaagtagaggagcagctcaaaaagaaatgtttcactctgctct

SEQ ID NO: 36306 - DNA, 100 bp, Homo sapiens
cccgcgccgcctccccgcgccgctcgcgcagccatgtccgaggagaagcccaaggtgagaagccctaccactgcaactgggacggctgcggctggaagtt

SEQ ID NO: 36307 - DNA, 100 bp, Homo sapiens
agccacgcagccgcggcttccggagccctcggggcggcggactggctcgcggtgcaggtcatcagctcaatgagctccctttctgagtactgcctgcctt

SEQ ID NO: 36308 - DNA, 83 bp, Homo sapiens
ctccagggttctttggggcccgagttttcggctttgtgagaaaccttaccatcaaacacgatggccagcaacgttaccaacaa

SEQ ID NO: 36309 - DNA, 100 bp, Homo sapiens
aggccgtcggccgccgtcagcgagggcgccgagcaacttcggttttgtagtgcatccctgagcatgagcacagaatgaagcggcgtttggatgaccagga

SEQ ID NO: 36310 - DNA, 100 bp, Homo sapiens
cgatgtgatgctggagaactttgcacatgtaacatccctggcatctacgagaagctgatccagttctgtgccattgacgagcttggcaccaactacccaa

SEQ ID NO: 36311 - DNA, 73 bp, Homo sapiens
cccaaggccaaccgcgagaagatgacccaggtgcagctcactctgcttactgccatagtgaagctgtttctca

SEQ ID NO: 36312 - DNA, 100 bp, Homo sapiens
cggccccgctccctcccagcagagctacctatctatggagaaaatcattcaagtggccaagacctctgctgcacaggtgcagcggaactgctgcctgacg

SEQ ID NO: 36313 - DNA, 75 bp, Homo sapiens
caccatgccgctcctaagcctgcacagccgcggcggcagcagcagtgagaggcagcgtctatcccagactaccgg

SEQ ID NO: 36314 - DNA, 87 bp, Homo sapiens
ggcgggtacggcggccccgcgcagcccccggccgcagcgcaggcagcccagcagttccagggtctccctccactgctgtagtaaccc

SEQ ID NO: 36315 - DNA, 85 bp, Homo sapiens
gccgcgtgtcctcggagcgcggtccctgtattggtctcctgctcctagagcttcctgcctgacacagctcacttcaagaagtgca

SEQ ID NO: 36316 - DNA, 75 bp, Homo sapiens
gcggccgccgccgctgccgcttccaccacagctcctgaaattcttagttatgatcctataagcatggcaacagat

SEQ ID NO: 36317 - DNA, 82 bp, Homo sapiens
cggagcctgccagagccaaggccaagctctccaagttcagcatccccaagcagggggagttgatattcactgatggactcca

SEQ ID NO: 36318 - DNA, 100 bp, Homo sapiens
gccttcggagcaggaagctaaagctgtttctgaatgagacccaaacgcagggttggatttggtctagggagtcccagaaagaagtagaaaaagagagaga

SEQ ID NO: 36319 - DNA, 100 bp, Homo sapiens
tacgtgggaagggacctcgaatgtgggaccccagcccctctccagctcgaaatcgtggccaaggtggaatacgtcaggaagaagccaaaattaaaagaag

SEQ ID NO: 36320 - DNA, 100 bp, Homo sapiens
gttccaccccacctgggccccagaccgtgctgatcttcgatgagctctcggattccttatgcagagtggccgacttggatgaagatgagctggattccca

SEQ ID NO: 36321 - DNA, 75 bp, Homo sapiens
actatggcatctatgttatcaaccaggaagaagatgaagtaccggacgatgagactctgaaccaaatgattgctc

SEQ ID NO: 36322 - DNA, 75 bp, Homo sapiens
tgccagacccctcagctttgcagaaacattctggtgagaatggtgagcgaagctgggacaggtttctgcttcaac

SEQ ID NO: 36323 - DNA, 90 bp, Homo sapiens
gggaggaagtctccacccctgggaggcagaagccaggaccctgctgcaggaagactatgggttcttccgcgccatcagcctgtggccccc

SEQ ID NO: 36324 - DNA, 100 bp, Homo sapiens
tgactttagttcatgtgacagactggatagagaagaaactggagcaagagtttcagacagaacctccactcaatacaccagaaaacagagagtatcttgc

SEQ ID NO: 36325 - DNA, 50 bp, Homo sapiens
tggccgagcaggaggcgccatcatggaaccacagaggacacattaataac

SEQ ID NO: 36326 - DNA, 100 bp, Homo sapiens
ctcgtcggcgaatgcaattaggaactgttctgccggaatttgaaaagtgcctttatagctgaggtggtaccagtttaagaagtgagaacttcttcactga

SEQ ID NO: 36327 - DNA, 50 bp, Homo sapiens
ccggacctcagacaaatgtttggtcagtttggcaaaatcctagatgtaga

SEQ ID NO: 36328 - DNA, 95 bp, Homo sapiens
tatcttccgactgatccagctggtggtcctggtctacgtcatcgggtaagaatgattgatgttggctgatattggagtgctcattcacatgaagt

SEQ ID NO: 36329 - DNA, 83 bp, Homo sapiens
cgacaagccgctggcagccgcggatctcaccgccgctcagggggactgggccatgggtcctcggcccatctgtccatcctcct

SEQ ID NO: 36330 - DNA, 101 bp, Homo sapiens
ccgaaggggcgtctgcggctctccgccgtccccagccctgcctctccctgggctctggtactccaaagattcaggtttactcacgtcatccagcagagaat

SEQ ID NO: 36331 - DNA, 100 bp, Homo sapiens
gttcagtgaagcactcaacccagcacagatatttgcaattcatcagttaggacctggatataagatacggatataatgcaggagaagctacccaccatgc

SEQ ID NO: 36332 - DNA, 100 bp, Homo sapiens
tctgacatcgcctgcagccgagcgggcccgttccgccggagctgaggaccaggtggaagtttagctgatgctataagtgaaaactacagaatcatgagtt

SEQ ID NO: 36333 - DNA, 90 bp, Homo sapiens
caggatctcgggctcggaacgagactgcacggttgaggctgaggaggagaaagagatgggattggtcttgctgtcttggatggaggtggt

SEQ ID NO: 36334 - DNA, 100 bp, Homo sapiens
gagcccagaaccactgcctacaaaccaccctctcctgaccctgaagaactgtggcagctgaaacagataggctctcctatgtgggaaacaattttgggac

SEQ ID NO: 36335 - DNA, 100 bp, Homo sapiens
cttgtcactaaagcagagaagccacttcttctgggcccacgaggcagctgtcccatgctctgctgagcacggtgacacgatgaggcgagtggtacgacag

SEQ ID NO: 36336 - DNA, 88 bp, Homo sapiens
atggcaccgatgccgagaggagacacattctgatagttggtggtggtgttgctgggcttgcttctgcaggcgcagcaaagtcgatggg

SEQ ID NO: 36337 - DNA, 100 bp, Homo sapiens
cgcagtggtcgcttcttctccttggaaagcagctggcccttctcaagaccaattcggctgtccggacctgcggttttgactttgggggcaacatcatcat

SEQ ID NO: 36338 - DNA, 89 bp, Homo sapiens
ctcggtacctcggaccagctctgtaaaagccccgcctctgccttcggatagacgccgaagtcgcgggcgctcatggcgggcctggaggt

SEQ ID NO: 36339 - DNA, 100 bp, Homo sapiens
ttcaccaccgtaaacactcgcgtcccatcgtcaccgtgtgggagcgggagctgcggaaaggttaattggactcctgagattaacaaagaacacttgctac

SEQ ID NO: 36340 - DNA, 114 bp, Homo sapiens
cttcaagccccgcgagtcgcatctgctcaacgacgaggacctgacgcagacaatgcagatcttcgtgaagactctgactggtaagaccatcaccctcgaggttgagcccagtga

SEQ ID NO: 36341 - DNA, 100 bp, Homo sapiens
gcctctcagtaccaacaaccccacgaggtgactctgacatcattagaagcatgccagaacagactggtgaaaagtaaaccttttcacctacaaaatttca

SEQ ID NO: 36342 - DNA, 83 bp, Homo sapiens
aagcagatcgtgaggaggaagctggatgggtttgtggagttcttccatgtagaggacctagaaggtggcatcaggaatgtgct

SEQ ID NO: 36343 - DNA, 50 bp, Homo sapiens
ttcaagtgtcaaatctaagattctgcacaaattggcccaccagaggtggc

SEQ ID NO: 36344 - DNA, 74 bp, Homo sapiens
cgtacttgaagccctacgccgtggacttccagcgcagtatgcaggaagcaggcggtcaatgcctctgggagcaa

SEQ ID NO: 36345 - DNA, 101 bp, Homo sapiens
cacagtggacgaggtgttggcggaaggcgcagacggggaagcggagccaacatgccagtggcccggagctgggtttgtcgcaaaacttatgtgaccccgcg

SEQ ID NO: 36346 - DNA, 83 bp, Homo sapiens
catcgagcgcccctccgagctggggttggacgctgccagtttgcacagcagcagttccagggtctccctccactgctgtagta

SEQ ID NO: 36347 - DNA, 51 bp, Homo sapiens
aagtgctccaacccagcagtcgtgctgttttggagtcagcggaagatcacc

SEQ ID NO: 36348 - DNA, 100 bp, Homo sapiens
agaaacagaacaagaatcgcatctcttgggtcggagaagccgtcaagagtggctgagctcccttcgggcccatgttgtgcgcactggcattggacgagcc

SEQ ID NO: 36349 - DNA, 78 bp, Homo sapiens
tcaactgcccagcgtgaccagtggccacctctgcagtgtcttccacaacctggttgccctcaaattggctgtagccac

SEQ ID NO: 36350 - DNA, 100 bp, Homo sapiens
aaattgcctgccgctgtcaagccgcataacagaccaatttttattccacgaggaggagtacctggaaattaggttagacggtagagagatccacgccaca

SEQ ID NO: 36351 - DNA, 89 bp, Homo sapiens
cggcgctggagagggggcgctgagctgttgggcttagaccatgctcagcctccaagcagccttgtcatcgacaaagaatctgaagttta

SEQ ID NO: 36352 - DNA, 90 bp, Homo sapiens
tatcactgcctctgtggacaagacacctccaggagcccagctcacagccaccggtaccttcttccaggcaatggtggcttgctatccggg

SEQ ID NO: 36353 - DNA, 100 bp, Homo sapiens
ccacttcctgtctcctggggttgacgacctagctggagttgagggaacatgagccatttgcagagcttattgttagacaccctcttgggaaccaagcatg

SEQ ID NO: 36354 - DNA, 100 bp, Homo sapiens
ggctgtcgctcgtctacttcctcagcagcaccttcaagcagttttcggctttgtgagaaaccttaccatcaaacacgatggccagcaacgttaccaacaa

SEQ ID NO: 36355 - DNA, 98 bp, Homo sapiens
ttgcaatgctctggcattactgcaatgtgtagcatcacatccagaaaccagcaacaggataagacctcgtctaacctacatgaagctgcttcggactg

SEQ ID NO: 36356 - DNA, 87 bp, Homo sapiens
agagagaccttggagtaattcgtcgacaggcaagatgatgatgaatgaagtcctggcagcttcctgtgtcccaggccttgtagaaat

SEQ ID NO: 36357 - DNA, 83 bp, Homo sapiens
caaggggttcgtgcgctgtggagacgcggagggtcgaggcggcgcggcctgagtgaatggtagtgtctagaaagggtatgtcc

SEQ ID NO: 36358 - DNA, 100 bp, Homo sapiens
aagactggctacgcgttcgtggactgcccggacgagagctgggccctcaaggccatcgaggcgctttcaggataaagtggccagtgtgtacgaagccccg

SEQ ID NO: 36359 - DNA, 100 bp, Homo sapiens
atgccctcacaggcgtggacctgtctaaggtatgatgccgccaccacctatgggcatgatgccgccgccgccgccgcctcccagtgggcagcccccaccc

SEQ ID NO: 36360 - DNA, 87 bp, Homo sapiens
ggcgtcatggaggagatccggcggcagggcaagctgtgcgacgtgaccctcaaggagcctgtgtgaaatgcagcaaaggggtgtttg

SEQ ID NO: 36361 - DNA, 82 bp, Homo sapiens
caaggagctaaagcagcgtgcgttcagccctgggaaatgcttcggttacccacagtctttcgccagatgagaccggtgtcca

SEQ ID NO: 36362 - DNA, 88 bp, Homo sapiens
cacggctgtgtttgatgtccggctgagtgggaagaccaagacagtgcctggataccttcgaataggggcccttatattctcaagaccg

SEQ ID NO: 36363 - DNA, 100 bp, Homo sapiens
ctgtggacatcagcgccatccccgagcagcggtggaagctgggactttgaacatgtcggggatcgccctcagcagactcgcccaggagaggaaagcatgg

SEQ ID NO: 36364 - DNA, 100 bp, Homo sapiens
ccggaagatccacagccaggaggaagccttgcgggtggttttacgcacgacgagctgctgaaggtgtggaaaggactgttttattgcatgtggatgcagg

SEQ ID NO: 36365 - DNA, 75 bp, Homo sapiens
tgaaggctgacctgcagaagctaaaggacgagctggccagcactaagcaaaaccaagatgaagagacgagctgtg

SEQ ID NO: 36366 - DNA, 100 bp, Homo sapiens
gggcgcagccggagccggtgccgcagctgcgatggccgtggccgtggggagaccgtctgaagtctgcggtcttgcagttcttcagactgctttaataaag

SEQ ID NO: 36367 - DNA, 100 bp, Homo sapiens
tgtgtcagatttctatgttcctgtctctgaaatgcctgaacacaagatccagtcatctgggggcccactgcagctcatggatttacagtcgcactttggc

SEQ ID NO: 36368 - DNA, 75 bp, Homo sapiens
ggagacatcgtagtgggacgaatcacagaggttggatggcaagcatgtggtgtttggcaaagtgaaagaaggcat

SEQ ID NO: 36369 - DNA, 100 bp, Homo sapiens
ttcaaattggacttaagtctgaatttcggcagaatttaggatgcttggttaccaagtaaaggattccaaagtggagcagcaagacaactttctaaaacgc

SEQ ID NO: 36370 - DNA, 101 bp, Homo sapiens
cctcaagtgtccagaatttccaattacagacgacaaagtagcactggttttggatctatgctccgagcacttggtgctcagattgagaagacaaccaatcg

SEQ ID NO: 36371 - DNA, 83 bp, Homo sapiens
attttgtgatcgcagcgatgaaaggtcagcccaaggccaaccccactgtcactctgttcccgccctcctctgaggagctccaa

SEQ ID NO: 36372 - DNA, 73 bp, Homo sapiens
gaggcctggctgagctgtcatcccccagccaggtgactttatacacactttgggagatgcacatatttacctg

SEQ ID NO: 36373 - DNA, 97 bp, Homo sapiens
tgatgagtctgtttgggatcccgctgtggtacttctcgcagtccccgcgcgtggtcatccaggaatactcccccagttgcaagaggcgcaggaccgt

SEQ ID NO: 36374 - DNA, 82 bp, Homo sapiens
ctcccgagtagctgggactgcagattagtgatgatgaaccaggttatgaccttgatttattttgcatacctaatcattatgc

SEQ ID NO: 36375 - DNA, 82 bp, Homo sapiens
aaacctgaagttagaaaggctcaacgagaacaagctatcagggagaatgaagttgaagaggtaaaagaggagggtccaaaag

SEQ ID NO: 36376 - DNA, 75 bp, Homo sapiens
aggagtacagggaagtctataagctttgcaacagaattacagagtatgatctacctcctgccccatctccttcca

SEQ ID NO: 36377 - DNA, 83 bp, Homo sapiens
cttggcctcccagagactcgcggacgctcacgataaccaaggacgaccgcgaaccaagctacgagttccagggagctctgtcc

SEQ ID NO: 36378 - DNA, 100 bp, Homo sapiens
gttcaatgcagacaagacggatgtgatgctgggaggtggggaagacagggctccagctaccacaggacgggctctgggtatagccgttccagtcagggac

SEQ ID NO: 36379 - DNA, 100 bp, Homo sapiens
ggaagaaaaagggccagtgtctcccaggaggcaagatccaaatggagatggagactgtttcagaatcaggaacacatgaaggcttgttcagtcatcaaac

SEQ ID NO: 36380 - DNA, 98 bp, Homo sapiens
gggagttgtgtctgccactcggctgccggaggccgaaggctttatactttagaaggaaaacttgttgagagtggagcagagttggagaatgggcagtt

SEQ ID NO: 36381 - DNA, 100 bp, Homo sapiens
cgagagtttgcgctacgctgagtacttgcagccctcggccaaacggccagacgccgacgtcgaccagcagagactgagcagcccgacggccatggaggct

SEQ ID NO: 36382 - DNA, 50 bp, Homo sapiens
ggctttgatgaatacatgaaggagctaggaacgggctggagttaaaatgg

SEQ ID NO: 36383 - DNA, 82 bp, Homo sapiens
cacagacccgcgccgccgacgacccagcagccgccatggctctgctccgaggactcacagaaaacactggacttccccggaa

SEQ ID NO: 36384 - DNA, 83 bp, Homo sapiens
cggaaagaagaaatcccagtacaagagaaaacccctaaaaaaaggtgagaggactcaaatggatgctaaaaagccaaggaaat

SEQ ID NO: 36385 - DNA, 74 bp, Homo sapiens
aagccctactgagcgtgctcccctctgagactggagtgagagggtcttctggagccaaaaacctgtatatcatc

SEQ ID NO: 36386 - DNA, 90 bp, Homo sapiens
ctgctgcatcatgatgtcaacaaccgtggctcacaagatgaaagagcacatcatggaagggaagtggttgctgtgtatgttactggtgct

SEQ ID NO: 36387 - DNA, 89 bp, Homo sapiens
cagaaggaagaggaacacaggtgtcatcacctgactgagaggtcattttcttctgaggaagtcattcttaaggactgttctgtccccaa

SEQ ID NO: 36388 - DNA, 74 bp, Homo sapiens
gcctgcccagacggctcacctgtgcgggatggaacaaaaggccaaatagttgcatcacatgtatctaatccgag

SEQ ID NO: 36389 - DNA, 82 bp, Homo sapiens
cctgggctacaagacgctggccgcgggctccatcagcatggctgagatgtgcactcccagcaacacccctgccacgccgccc

SEQ ID NO: 36390 - DNA, 75 bp, Homo sapiens
tgtgaatttaacaaatttacattgtatcctgatccgacgtatcctgaagggaaagtccattcagcagagagctcc

SEQ ID NO: 36391 - DNA, 75 bp, Homo sapiens
aaacccctcctgtggaagtgacaatgattctgtacagcctgtgaggaggaggtgactgccaacagccagcccaat

SEQ ID NO: 36392 - DNA, 101 bp, Homo sapiens
ctttccctaaggcagccatcaaaaggaataacctccatctcctgggtcccagcgattctcctgcctcagcctcttcctatttcacaagtagggaaactgaa

SEQ ID NO: 36393 - DNA, 83 bp, Homo sapiens
agagaacgttgtccacgaggacttccaggtcacggaggaggtgaaagagcgctatagttatgtctgcccagatttagtaaaag

SEQ ID NO: 36394 - DNA, 74 bp, Homo sapiens
ggtcatcaagcaacaaaaagaaatcattgaacacggcatcgagctatctgatcgaccgagccttcagcagattc

SEQ ID NO: 36395 - DNA, 50 bp, Homo sapiens
gagacttcacagtttctgctctgaacactcgtgaaactgctcaggccatc

SEQ ID NO: 36396 - DNA, 90 bp, Homo sapiens
gaccctgtccctgaggaggaggacctgggcaagaggaacagacacagggaaatttgtgcacagagataacacaggggatatgccatatga

SEQ ID NO: 36397 - DNA, 100 bp, Homo sapiens
gagaatgtgtcagccgatgcaccgagtccagcccaggaaaatggagaggccagcgatctgtacatgagacccaggaattatttccaaagcaagattcata

SEQ ID NO: 36398 - DNA, 74 bp, Homo sapiens
acaaaccaccctctcctgaccctgaagaactgtggcctggagctgctgaagactgctattgggaaagctggcta

SEQ ID NO: 36399 - DNA, 100 bp, Homo sapiens
catccccgaccgccctcttctgtcttggggtaggttcaaggtggtggtcagtgtcctgtctgcggttacgacgtgcctggcatttgtcaagcctgccatc

SEQ ID NO: 36400 - DNA, 50 bp, Homo sapiens
tgtactgtatgacctagacaaggacagtcattttgtttactcattcagcc

SEQ ID NO: 36401 - DNA, 82 bp, Homo sapiens
agcctcctctgcctggcattcgggtggttgataataggataccatggccaagcggaatacagtgataggaacaccattttgg

SEQ ID NO: 36402 - DNA, 82 bp, Homo sapiens
gtcggcgcctcattcgggtggagctgagccggagacaggaattggtggagagaaggcgcaccatgatggaagatttccggaa

SEQ ID NO: 36403 - DNA, 100 bp, Homo sapiens
ctgccactcggatgtccataattcaggaggaagaaggcacctacgatcaaactctggagttccgtaggggaggtgatggccagccaagacgatccactcg

SEQ ID NO: 36404 - DNA, 100 bp, Homo sapiens
gtccggcacccagtaccatattctctggaggttttagacacggacttgcaacaaagcattgccagagaacctagtgctccttcaattcctacacctgcgt

SEQ ID NO: 36405 - DNA, 49 bp, Homo sapiens
ggcctcgccatgtcctgctgcccgccggcacagtcttcactaccgtaga

SEQ ID NO: 36406 - DNA, 75 bp, Homo sapiens
tcccgggcccgccggccctgagctcccggcggcgcagaacccagcgggtgccgcttctccacccgaggcttccac

SEQ ID NO: 36407 - DNA, 100 bp, Homo sapiens
ggaaagggataggagaaggatgtggactgcagtgctgcagtgccaggtgtatgtggaatttgatgatcttgaatgggataaacgagagtgggttaaagtt

SEQ ID NO: 36408 - DNA, 90 bp, Homo sapiens
aaaacttgctgctgatgaagatgatgacgatgatgatgaagaggatgatgatgaagagacccctaccatggaggagaccatcaaagatcc

SEQ ID NO: 36409 - DNA, 75 bp, Homo sapiens
agatgcagatgagaaggttcagttggcaaaccagatatatgacttggatattcagtcggagctggtcattttcgg

SEQ ID NO: 36410 - DNA, 94 bp, Homo sapiens
attgtgggagtctccgcgtcccgctcgctgggagagaggtactccaaagattcaggtttactcacgtcatccagcagagaatggaaagtcaaat

SEQ ID NO: 36411 - DNA, 90 bp, Homo sapiens
gggggggcggcggccgaacgatgtgcgagaactgcgcagacctggtggaggtgttaaatgaaaacttgtgtatgcggatacctgcttcag

SEQ ID NO: 36412 - DNA, 75 bp, Homo sapiens
atctggctggagccctgcattcgcggcgtgtgcaggaaatccaaatctcctcccaaagtgcccattgtgattcag

SEQ ID NO: 36413 - DNA, 100 bp, Homo sapiens
gtccgtggtcgtttgtttctccaaggtttgaaaagcagctggcctgcaaggaaccctgtggaatctttcatcccatgactcaatcaaaatggagattgtg

SEQ ID NO: 36414 - DNA, 75 bp, Homo sapiens
ccatgtcagccttcccagtagctggaactacaggggaccctcacaatgatcccaatgctcagggggatgccttca

SEQ ID NO: 36415 - DNA, 83 bp, Homo sapiens
aggctgggctgcggtggagcctcggcagagggaacgatgcttcaggactgccccaaggcccgcagggaggtggagctgcactg

SEQ ID NO: 36416 - DNA, 96 bp, Homo sapiens
aaactgataaagcaggaaccagagggcaaatcacgctgccaagacaactgtgtaattcgctcgaaaaagaaacgagacggagttttgccatgttgc

SEQ ID NO: 36417 - DNA, 75 bp, Homo sapiens
cctttcggcttctgagacggcggcagcagcggcattcagaacctcaagaaggcatgaagccagcccctgcagtgc

SEQ ID NO: 36418 - DNA, 100 bp, Homo sapiens
gtgacggaggagcttgtaccaccgctcctgagaaccatgtctatgcccaaaggtagagttctggataaaaacctggatgaggaagggtttgaaagtggag

SEQ ID NO: 36419 - DNA, 101 bp, Homo sapiens
gctttattgaagaagtgacagatgattccagaatatgagtgatgccatggcaattttgcacaaactacagacaggcctggatgtaaatgtaagattcactg

SEQ ID NO: 36420 - DNA, 75 bp, Homo sapiens
cgggtggcggctcgggacggaggacgcgctagtgagctcgaggccatgagcagatataccagcccagtgaaccca

SEQ ID NO: 36421 - DNA, 75 bp, Homo sapiens
cggacatggtgtttcttaggacttcagaaaaagcagtgagatggaagattttcgaggtatagcagaagaatcatt

SEQ ID NO: 36422 - DNA, 75 bp, Homo sapiens
agatggcctggtggaaagcctggcaggatacagacgtccctcaccagtgccagcttggggtctgcagatgagaac

SEQ ID NO: 36423 - DNA, 100 bp, Homo sapiens
gtcccacctggcggccatcgtcatcctgctgctgaagatctggaagacgcgctcctgcgccggtatgtacaagctgtgaggacaacgcagaagccaatgg

SEQ ID NO: 36424 - DNA, 109 bp, Homo sapiens
aaactccaggctcagagaggttaaggaactcgtcctacgtaacacagccagttagacaatgcagatcttcgtgaagactctgactggtaagaccatcaccctcgaggtt

SEQ ID NO: 36425 - DNA, 50 bp, Homo sapiens
caccaaaaacaacatctttccagaaagagcttcttctgcacggtacctga

SEQ ID NO: 36426 - DNA, 98 bp, Homo sapiens
gagttatcaggttccagaccctgccttctcttctgaaagtaagactttgaccccgacgcaggcttcagtgattgccgcggatcagaagcctgagcact

SEQ ID NO: 36427 - DNA, 100 bp, Homo sapiens
tcctgtacagcatcgccgagaagatacactgcctctaggactgggacagatagccactgagtacctgcttcaaatcaccctgcacgttttctctttggaa

SEQ ID NO: 36428 - DNA, 82 bp, Homo sapiens
cgggtctcgggggccgctctgggatcccggccaccagcaattgtccgaagctccaccatgaggcgaggtggatggaggaagc

SEQ ID NO: 36429 - DNA, 82 bp, Homo sapiens
tcaagatggcggcgcagccaccccgcgggatacgcctcagcgcggtttctggtcttcactctagcactaattgaaaaaaaaa

SEQ ID NO: 36430 - DNA, 91 bp, Homo sapiens
agttctctgctcagcacagccaaggaacagaattagaagaaaaggaaccctggcctgagatggcagatgatcagggctgtattgaagagca

SEQ ID NO: 36431 - DNA, 75 bp, Homo sapiens
tgctcaagatctcagagaaggaggaggtgaccacgcgcgagcagaaaggacccaggagcgataacagtaaatcaa

SEQ ID NO: 36432 - DNA, 75 bp, Homo sapiens
attatgggaatgaattacagctctcagatgtcccaaggacctattgctatgcagtcgttccccatcaggaagtcc

SEQ ID NO: 36433 - DNA, 82 bp, Homo sapiens
gctgaccacgagcttttcctccaggcctttgagagctttcttcgagagtcacccagctccttcagctgagcgtaccatccag

SEQ ID NO: 36434 - DNA, 100 bp, Homo sapiens
catgaggaactttcagaagggccaggtgacccgagacggcttcaagcaatgttcacagcatctttaccgggagcagattccatctcaagaaaccacttcc

SEQ ID NO: 36435 - DNA, 75 bp, Homo sapiens
atcagcccccagcggcccaggcccaggggggccctcagcctcttggccttgaacgggctgttcatcttgattcac

SEQ ID NO: 36436 - DNA, 100 bp, Homo sapiens
gggaggtgcccctgcgttgtaccatccgcctgtgggacacctaccagttcaggcttcagagagcccctgacgcctgcaggaacatggcagaggagacacc

SEQ ID NO: 36437 - DNA, 75 bp, Homo sapiens
atttatatagagatgtgatgttggagaactacagaaacctcgtctccctggggggtgcactatagccatctggag

SEQ ID NO: 36438 - DNA, 75 bp, Homo sapiens
cccctaccgactggtgtggcaatccaagtgtggacaacagtgagtatatgcggaatggagacttcttacccacca

SEQ ID NO: 36439 - DNA, 98 bp, Homo sapiens
cttctgagtcagcctgaaaggaacaggccgaactgctgtatgggctctctttatcttcaagccaggatgaagggagactgggcaagactcttacgccc

SEQ ID NO: 36440 - DNA, 82 bp, Homo sapiens
ccatgccgctcctaagcctgcacagccgcggcggcagcagcagtgagaggcttgccgctgttccgtaacccagtgattccag

SEQ ID NO: 36441 - DNA, 82 bp, Homo sapiens
gaactgagacttttgaaggaagaaatcaattatgatgataaactacagggaccttaaaccggaaaacattttgttaaatgaa

SEQ ID NO: 36442 - DNA, 89 bp, Homo sapiens
tcaagctcctggtcagagtgtatgttgtaaagatcatcactgttgaagaggcaaagcgcaggaagagcacatgcagctactatgaagac

SEQ ID NO: 36443 - DNA, 100 bp, Homo sapiens
tccgggagagaatacacagagccatttccacgggctcccttgctcagcagtatgcgcaccctaacgctaccctgcacccacatactccacaccctcagcc

SEQ ID NO: 36444 - DNA, 75 bp, Homo sapiens
cgatttaaagctgagctgcgaggaaaatggcggcgggagtgaacacctacctcttcatgatgcaagcccaaggca

SEQ ID NO: 36445 - DNA, 82 bp, Homo sapiens
ggggccccgggatctcggctgtccttcctcccgatgatttgtcattaattcggaagaacagaatggctctctttcaacaatt

SEQ ID NO: 36446 - DNA, 100 bp, Homo sapiens
gcatctacaaatgaggcagcctggggcagttttgatgtggacaatggcacatctgcgggacggagtcccttggatcccatgaccagcccaggatccgggc

SEQ ID NO: 36447 - DNA, 100 bp, Homo sapiens
gctggataacatggagtcgggcaagatggcgcctcccaagaacgctccgagagatgccttggggatgtggagacgctggtagcggggccaggaaggctcc

SEQ ID NO: 36448 - DNA, 95 bp, Homo sapiens
actcttcagggatgagtcatgtggcagtggaaaatgcgctcgggctggaccagcagctcaccatggatgatgatatcgccgcgctcgtcgtcgac

SEQ ID NO: 36449 - DNA, 74 bp, Homo sapiens
cgagagcagcctgccggggcggagacaatgcagatcttcgtgaagactctgactggtaagaccatcaccctcga

SEQ ID NO: 36450 - DNA, 75 bp, Homo sapiens
aggaagactgggatcactttgaaaattttcagagaatccacatgtttaccagagacaccatctccctcctcctgg

SEQ ID NO: 36451 - DNA, 83 bp, Homo sapiens
accggttccaggtgcccaccgcgcactcggagatgcagccgctgcatgatgccttcttctgtagagtgggcgctttgcagaat

SEQ ID NO: 36452 - DNA, 75 bp, Homo sapiens
acaccaaaacatgggcctgcagtaatgtcagcgagaatgatgaggaccttgagattgaattggttgaggaagagc

SEQ ID NO: 36453 - DNA, 100 bp, Homo sapiens
aaggatggggtggtcctctgcaggctgctggagcgcctgctccccgggaccatcgagaaagttcatgtgaaaatggcggatgaggctgtctgtgttggcc

SEQ ID NO: 36454 - DNA, 100 bp, Homo sapiens
atagtaaatgcatcagagatggatattcaaaatgttcctctatcagaaaagattgcagaggtatcgaaggatgatcgcagtgatgtggagagcagctcag

SEQ ID NO: 36455 - DNA, 100 bp, Homo sapiens
aatgcagttgcggagaccttctgaccaggaagttagtgaatctatggattttagatatctgccagatgaaaaaggagacggtggctcagggagtaaagga

SEQ ID NO: 36456 - DNA, 83 bp, Homo sapiens
gaccagtccaccaaggccatcgacatccagaacgcttatttgaatgagctgcctgagaactggacagacacgcgggagacgct

SEQ ID NO: 36457 - DNA, 75 bp, Homo sapiens
ctgaaggctgcagccgcgaatgccgtagtattctgacaagtccctgtacacccagctgtgcttttaccggtacat

SEQ ID NO: 36458 - DNA, 83 bp, Homo sapiens
cgcgctgagcacgttcttccaagaaaccaacattcccaacagccaccaccaccaccagatggagggtgaggacaaaatcttct

SEQ ID NO: 36459 - DNA, 75 bp, Homo sapiens
tgccatgacaaccaggcaatgctggatagataccgaattcttatcacaaagtcttccgtgtgtgctaagatcgtg

SEQ ID NO: 36460 - DNA, 75 bp, Homo sapiens
cgcctgcttcccgtctgcgcgagtccacgcagctccccagcaaaccagtccagctacgggggcccagccagccag

SEQ ID NO: 36461 - DNA, 82 bp, Homo sapiens
aatggcacaaagttctctcgatcagggcatacatctttcttcgacaaagggagtccaaaactacttacctggaagaccttcc

SEQ ID NO: 36462 - DNA, 98 bp, Homo sapiens
ccggagctggacgccgccgccgccaccgccacctgcgcggcagtcatcaaggtattgttgcagcatctggcagtgagactgaggatgaggacagcatg

SEQ ID NO: 36463 - DNA, 74 bp, Homo sapiens
gcagatgcttcaaaagctgttgaaattgttacttcaacttctgctgcttttcctccgcaaccatgtctgacaaa

SEQ ID NO: 36464 - DNA, 83 bp, Homo sapiens
ttcagcctcaaaaccgtcctgctgcttgctgaccaaatgtgcctccggagccagcgtggtggccatagacaacaagatcgaac

SEQ ID NO: 36465 - DNA, 98 bp, Homo sapiens
acacaggctaccggctcacagaggatgggcacacgtgccaagcatttaaatcaaacggtattgagatggattgggttatgaaacataatggtccaaat

SEQ ID NO: 36466 - DNA, 100 bp, Homo sapiens
gctattccagcagcactgtgtgtcttggcttcggagcattcagcaggtgttacagtgaaggtggtgtttttaaggctcatcttactttcccaaaagatta

SEQ ID NO: 36467 - DNA, 99 bp, Homo sapiens
cacgagtcgaatcaacaccccgtttcggggcggcgactggcggcgcgatggacctgaccgggctcctgctggacgaagaaggcaccttctccctcgccg

SEQ ID NO: 36468 - DNA, 100 bp, Homo sapiens
gaagattttgtggtttatacttacaacaaggaagggactttaatcactgaccatcccaatatacagacagcaccagttgcccttgaagcagaaaacagag

SEQ ID NO: 36469 - DNA, 96 bp, Homo sapiens
cagcggctctttgtatgatgacgctgaagccgacgtagcttctctgaacagacgcatccagctggttgaggaagagttggatcgtgcccaggagcg

SEQ ID NO: 36470 - DNA, 100 bp, Homo sapiens
cgcttttgctcctcctgaagtgtctttggtccaacgttgttccagacgaagttatacggaagcgtctcctcattgatggagatggtgctggagatgatcg

SEQ ID NO: 36471 - DNA, 87 bp, Homo sapiens
gcacagtccgccgagcacaagctccagcatcccgtcaggggttgcaggtgtgtgggagctgctcgactgatccaaaacatggatgcc

SEQ ID NO: 36472 - DNA, 75 bp, Homo sapiens
gttgcaaggtctcctgccagtcagtctcctcctctctgttgcagtttttcagttatgggacaaaaatattatatc

SEQ ID NO: 36473 - DNA, 82 bp, Homo sapiens
gcgggtgggcaacgggaccctgtgccccaactctacttccctctgctccttcccagaaatcaatggtgcctgctctgcctgt

SEQ ID NO: 36474 - DNA, 80 bp, Homo sapiens
ggcttgtaatcataacttgaaaggggtttctctggatctcagcaactgtgaggcagaggtggaggagacactgaagcgac

SEQ ID NO: 36475 - DNA, 80 bp, Homo sapiens
tggaagcagccgatccagcctgcggagcctgtggggcagtcttgtgaaaatgccattgtgtgctggaaacctggcaagat

SEQ ID NO: 36476 - DNA, 90 bp, Homo sapiens
gggctaacttcagcggtggcaccgggatcggttgccttgagcctggtcagttcaccgggacctggaggcccagattgcgatcgtgacgga

SEQ ID NO: 36477 - DNA, 98 bp, Homo sapiens
gggccccaatgagtggcacacagtctactatcaccgacagaaaagactgtatcttcaccattgacccatcaaccgcccgagacctcgatgatgccctc

SEQ ID NO: 36478 - DNA, 97 bp, Homo sapiens
cgcagtggtcgcttcttctccttggaagattgttgatcgaatcgacaatgatggggatggctttgtcactactgaggagctgaaaacctggatcaaa

SEQ ID NO: 36479 - DNA, 80 bp, Homo sapiens
tgcctgtggatgaaaccctgattcctacaggcaacaagcagtggtggtttggtggtggatgtgacctcactccaacatac

SEQ ID NO: 36480 - DNA, 76 bp, Homo sapiens
tctgggattaatgctaaatttgtgaatgctgtgtatgataccttacttaatactaggcggggtttcaccatgttgc

SEQ ID NO: 36481 - DNA, 74 bp, Homo sapiens
caccattcttcgccaggccaggaatgccatccgggatggtgtcattgaggccagcatcaaccacgagaagggct

SEQ ID NO: 36482 - DNA, 80 bp, Homo sapiens
gccgctcctaagcctgcacagccgcggcggcagcagcagtgagaggtgttcttcaacggtgccaacgtccggcaggtgga

SEQ ID NO: 36483 - DNA, 97 bp, Homo sapiens
ccaaggctgaagctactatccctttggttcctgggagagtacaggtttgcagattccgccagcagcacagcaagctctacagatgagtggctctttg

SEQ ID NO: 36484 - DNA, 100 bp, Homo sapiens
gttcccccaccccagaagaggatggcaaaggtggctaaggacctcaacccaggagttaaaaagtgaagtaagaactctgctagagaggaaatggctgctt

SEQ ID NO: 36485 - DNA, 86 bp, Homo sapiens
ggcgctgctggcgctctggctgtgctgcgcgacccccgcgcatggtcaaaatgcagatcttcgtgaaaacccttaccggcaagacc

SEQ ID NO: 36486 - DNA, 90 bp, Homo sapiens
taggatgtatggtgtaggtgtggacatgtgggctgttggctgtatattagcagagttacttctaagggccgggcatggtggctcacgcct

SEQ ID NO: 36487 - DNA, 82 bp, Homo sapiens
ctttccaagcaggcctgcgaaggaaacttacccaaagggaagtctgaactgtggctgcaccatctgtcttcatcttcccgcc

SEQ ID NO: 36488 - DNA, 100 bp, Homo sapiens
gcagcagcagcccaccagggagctcctgcaggttttgctgatttgggaaaataaagactatggatcaactaggagtattgttcgtattattgggaaaatg

SEQ ID NO: 36489 - DNA, 100 bp, Homo sapiens
accacctcaagctttcaaccacattgccaagttatgcagccttaaacgacttgttctctatcgaacaaaagtagaggtctcattcgtttgcaagagctca

SEQ ID NO: 36490 - DNA, 87 bp, Homo sapiens
acccgcagcctcaaggatcacaaagagcactgcagtttcctcctgaaggctggctccggctctccctcaataatggcagcatcaccc

SEQ ID NO: 36491 - DNA, 101 bp, Homo sapiens
accatggacagcgtgcggtctgggccttttgggcagcttttccggcctgacaacttcatctttgggacagtggccttagagctattgagaatttgatgcaa

SEQ ID NO: 36492 - DNA, 75 bp, Homo sapiens
acgctcgtcaccaggacccaaggaaccagtcctgaggaccagacagtgctgttggtgactgtccctgacttcagt

SEQ ID NO: 36493 - DNA, 106 bp, Homo sapiens
ctaaccatgaagacttgaacttaatacagcaagaaagaccatcaagtttaccagaagaagaaatgccagaggtagaaattgacattgatgatcttcttgatgcaga

SEQ ID NO: 36494 - DNA, 100 bp, Homo sapiens
cacagaaaaggtgctcaaaggatatttgtttaatgaatgtggtatgctgacatttaaacaggacaaaacttggtgaatacagcagtccagttaatcttgg

SEQ ID NO: 36495 - DNA, 100 bp, Homo sapiens
gtggctgtagggagcatagctgctacactgaagatgaagcaaggcccaatgacccaggcggagtggcaaggaatttactatgccaaaaagaaaaacggag

SEQ ID NO: 36496 - DNA, 120 bp, Homo sapiens
aagaactttgttcaagagaaatgatagttcacagtgtagatgacttcagttcagctttaaagaaatatggctacacacacctttctgcaggagagctgcttcgtgatgaaaggaagaacc

SEQ ID NO: 36497 - DNA, 100 bp, Homo sapiens
ccatcattgatgtggtgcgatcgatcattcccagtgaccccttctgggtgccaactactgaggaggaatacttgcactttggggagaaggctgactctga

SEQ ID NO: 36498 - DNA, 75 bp, Homo sapiens
acagattaaaacgagaaattgagaaaaggagaggagcacagattcaggcagcaaatgttttactgtgcctggcta

SEQ ID NO: 36499 - DNA, 97 bp, Homo sapiens
gaaatatggacagacttcttagacttggaggaggtatgcctggactgggccagttctggacatggcaagacatgtgccactctatcgggcactgctg

SEQ ID NO: 36500 - DNA, 98 bp, Homo sapiens
gggacccggcgaagacgcgaccgcggcgcgagtcaccatgggctccacgtgttccccacgtttgtggcgtacgagctcacggtgctggtgttcctcac

SEQ ID NO: 36501 - DNA, 100 bp, Homo sapiens
gcagtatgtgccacaactgcaaaacaacaccatcctccgccttctgcagcaggatagtaatgatgacactgaagatgtttcactgtttgatgcggaagag

SEQ ID NO: 36502 - DNA, 82 bp, Homo sapiens
gattagcttcgcagtctggaaagctttaggagttcacagtcaccaatgttgttatgaattattcagagatcgagtctaaggt

SEQ ID NO: 36503 - DNA, 100 bp, Homo sapiens
ctctgacctgaatcctgaattttccttgatggtcaaaagattaagcaaatcagccggcaccaggagcagttcatccagatgctgaacgagccccctgggg

SEQ ID NO: 36504 - DNA, 82 bp, Homo sapiens
tgaggactttccttacctgtttttccagctcacccactgccagcagagacctcctgccccccgaggtctgcagtctcctgaa

SEQ ID NO: 36505 - DNA, 100 bp, Homo sapiens
caccaaggagaccacccagaagaatttcaacaatctctatggcaccaaaggcatgtcctcggcaccaagggaattgactgggcacatgaggccaaatggt

SEQ ID NO: 36506 - DNA, 101 bp, Homo sapiens
tgagcattggatttgatcacatggagccatcgcctgtgacactgggtcgaaggagttctggccgacagggaggagttcatgaattgtctgcttttgaacaa

SEQ ID NO: 36507 - DNA, 75 bp, Homo sapiens
aaaggaacccaacagagatctcttctgttctccactgctaggtaaagtaccttttattcatgtgggaaatcaagt

SEQ ID NO: 36508 - DNA, 83 bp, Homo sapiens
atggaattctcctgcctgcgggtctttaaagactgagggtgactatgaccagagcaggaccaaagtgctgcacatgagcctga

SEQ ID NO: 36509 - DNA, 100 bp, Homo sapiens
ggatgaaagtgagcagtccagaaagcggcttatcgaacagagccgggagttcaagaagaacactccagaggaacggaaaacagttcttccttcaaagcat

SEQ ID NO: 36510 - DNA, 75 bp, Homo sapiens
gttactccattcgatttgaagactgcagtagtgcaaaaaccattcttaagagtaagtccatgagtgatgtcagcg

SEQ ID NO: 36511 - DNA, 82 bp, Homo sapiens
tcaagatatgacaagtcgcctacaggttttgatgatgatggttcagaatttcatgaacatatatttctggagaaacacctgg

SEQ ID NO: 36512 - DNA, 99 bp, Homo sapiens
attggagctgggctatcagtagtaagttggtcatgttcggagtttgacctgaatgagattcgcctgatagtttaccaggactgtgacaggagaggcaga

SEQ ID NO: 36513 - DNA, 83 bp, Homo sapiens
tggaagcctacgccctggggctggacaccgttgatgataattagaagcatgctttccactgaacttcccgacaacatttgtta

SEQ ID NO: 36514 - DNA, 100 bp, Homo sapiens
gtccgatggttctcgaaggcccgcggcgccccgtgctgcaggtgacaaacagcatgtttggtgcttcaagaaagaagtttgtagagggggtcgacagtga

SEQ ID NO: 36515 - DNA, 100 bp, Homo sapiens
tgacaagaacagtgggccacaggggccccgaagaactcccacaatgccacaggaggaggcagcagcgctttgccttcacctgtaatgatagcagctcccg

SEQ ID NO: 36516 - DNA, 90 bp, Homo sapiens
gattaaggtggtattgaggatttctgaagcctatgaaagtttcactgttacatgccttgaagtgatgaggaggtttctgttactatatgc

SEQ ID NO: 36517 - DNA, 100 bp, Homo sapiens
caaaagtttaactggaactgcaagatatatgtctatcaacacgcatcttggcaaagaaatggagcatctactgttgtcacggctatattcggaggcattc

SEQ ID NO: 36518 - DNA, 75 bp, Homo sapiens
ccggggcgaggcagggccagcagcaggcgggagatcctgaggaggatgaaggggctggccctggaggccgagagt

SEQ ID NO: 36519 - DNA, 80 bp, Homo sapiens
gagccagcccgccagcatgccccagtccaaaggtggagccatcgaagcccccacccacaggctgacagaggcaccgttca

SEQ ID NO: 36520 - DNA, 82 bp, Homo sapiens
cctcgatctcctcgtctcccgctccgccctcccttttccctgccttatgccagcctggaccatcttggaggcagtgtaggat

SEQ ID NO: 36521 - DNA, 100 bp, Homo sapiens
ccggcccggaccgtgtcgccgacgccaaaggggacagcgagtcggaggaggacgaggacttggaagggtgtttgtgaaccgaagtttagcaatggaaaag

SEQ ID NO: 36522 - DNA, 50 bp, Homo sapiens
acgtgctcttggctgcctttgaaaagacaaacaggtcttcttgatccagg

SEQ ID NO: 36523 - DNA, 75 bp, Homo sapiens
tgtgaagaagaatttcgatctccgccctggggtcattgtcaggtttgtacgaagactactttatttttacaagcc

SEQ ID NO: 36524 - DNA, 87 bp, Homo sapiens
ctacaagatggcggcggtcggggccgaggcgcgaggagaaactaatctggattcactccctctggttgatacccactcaaaaaggac

SEQ ID NO: 36525 - DNA, 76 bp, Homo sapiens
aaagcgtctgaaccggaatgctcgacggaaggcagcgccgcggatcgaatggataaaagaatcagagtgtctcaac

SEQ ID NO: 36526 - DNA, 100 bp, Homo sapiens
aacccctagaccggtttttagtccattgactatgcagcctaatgttaagtaatttgaagcaagttacatttgtagatatctcagcaaacaagttttccag

SEQ ID NO: 36527 - DNA, 51 bp, Homo sapiens
ggatgatgactggattgtggatgatggaatgaatctgaagtctgctgcagt

SEQ ID NO: 36528 - DNA, 98 bp, Homo sapiens
ctccggccgcgcgccccgcccttgcgctcagcgccctctcaccgcccggaaccctaaggactctgcaatatgaataattccctagagaacaccatctc

SEQ ID NO: 36529 - DNA, 100 bp, Homo sapiens
tcatgattggacatgtcctagacatcacttagagattgctcgctgtaagcagctcatctgtgaccccagctacgtaaaagatcgggtagaaaaagtgggc

SEQ ID NO: 36530 - DNA, 99 bp, Homo sapiens
ccggcaccgcgcctgctgccgggttgcgctccgtgcacctcttgcgggacctcccactctcgggcaaaggccgaggcagccctcacagcagctcagaaa

SEQ ID NO: 36531 - DNA, 50 bp, Homo sapiens
cgcagctatcggtgctttgcagctcctcaagagttactgatctatgaaat

SEQ ID NO: 36532 - DNA, 82 bp, Homo sapiens
ttagctgtgctcgcgctactctctctttctggcctggaggctatccagcaggacgggaggggcaagctgcggccaaccaagg

SEQ ID NO: 36533 - DNA, 100 bp, Homo sapiens
gtgaccgagagcgtgaccgagagcgcgaatatcgtcatcgttagaagaggcaaactatgcaagaggcaccagacttcctctttctggtgaaggaccaact

SEQ ID NO: 36534 - DNA, 88 bp, Homo sapiens
tttcaaagtattagacaagaaatggaagcttatacacccaagttaactcagttggactaaatgctcttccttcagaggattatccggg

SEQ ID NO: 36535 - DNA, 100 bp, Homo sapiens
attctagaaggggaagtttttgattctgtgaagccaggactttctgcttttgtagatcaacctaagcagaggaagaatggcctgatggatcatgaggatt

SEQ ID NO: 36536 - DNA, 74 bp, Homo sapiens
tacaaagtccatgctaacctactatgagggtcgagcagagcactgctgatggttcttcagaactcaggaatcgt

SEQ ID NO: 36537 - DNA, 95 bp, Homo sapiens
atcctcccgactctgcttaaaaccacgtggttcgatggctgccgcggctacgctgaggctctccgctcaggcgtgcaatggaattgagttttgcc

SEQ ID NO: 36538 - DNA, 50 bp, Homo sapiens
gtgaaagaaggttgggttcagaagagggaggcacagagctttggcctgct

SEQ ID NO: 36539 - DNA, 100 bp, Homo sapiens
gcaaagttgtgttggatcattttgaaaaacagtattccaaagaactcggagatgcctggaatacagtaagggatacttcaggccagggaagattttgtac

SEQ ID NO: 36540 - DNA, 75 bp, Homo sapiens
aggagcatcccggctggagcagagccaggtctcttaaccttcattaactgtgcctatgtcaaatggggaaccctg

SEQ ID NO: 36541 - DNA, 98 bp, Homo sapiens
gacttccttcagggtttaggagaagcactgttgttttccacacaggctgctttgaatgctgcatcaagtgtctgggaggagtcccctacgcctccctg

SEQ ID NO: 36542 - DNA, 98 bp, Homo sapiens
cccagtgggtgctcacagctgcccattgcctaaagaaaggcatttcatccttcatgaagccattcaggattttgaattgcatatgagtgcttggctct

SEQ ID NO: 36543 - DNA, 100 bp, Homo sapiens
ggagcacatcgcaactttcaatgctttagaaaacatagctctgctggcagaaacagctctgagattcctggaattagtacagttaaaaaatcttaatatg

SEQ ID NO: 36544 - DNA, 82 bp, Homo sapiens
cccagtgcttggaattccttccgtggctattggacacttgacattcagggacgtggccatagaattctctcaggaggagtgg

SEQ ID NO: 36545 - DNA, 90 bp, Homo sapiens
cagctacatcagacacagatggcaagagaagcaacagtttcagcgccatctgacccgcccaccaccccagtaccaagacccgacacaagg

SEQ ID NO: 36546 - DNA, 100 bp, Homo sapiens
gaagaataccaaggaggatcttttagcgactgcatttgcctccagacttgtcagacacagtgagccgctcaagcaaaatggatctggcagaatccgccaa

SEQ ID NO: 36547 - DNA, 100 bp, Homo sapiens
agcctgtctactcaccccctggcagccccccacctggggacccccgaatctttcagtgctcttaaagttccgtacagataaaggaagagatcccagttct

SEQ ID NO: 36548 - DNA, 89 bp, Homo sapiens
acatttggcatagatacctcagctgcggtgcaaccctgggcagtttgcgtgtcgcagcggcaccatccagtgcatccccctcccctggc

SEQ ID NO: 36549 - DNA, 121 bp, Homo sapiens
gaatcaaatccaaagagtgtctgacatttcttttgtgcaagatgagcctcaagtgcttctgcattacagtttaactatagatcaacacatcatcttgcatctcatgggttctatgaatttt

SEQ ID NO: 36550 - DNA, 126 bp, Homo sapiens
gcgcagtccgctgggcagaggcttgggccgccgagctggacccggaccggttttggggaatgggtactgttcaaaaaggaatgccccacaagtgttaccatggcaaaactggaagagtctacaatg

SEQ ID NO: 36551 - DNA, 83 bp, Homo sapiens
cgagaagatgagctcagaggtggtggattcgaatccctacaggacgctgtgcagagctgcaagtccgtatcactgaggctgtg

SEQ ID NO: 36552 - DNA, 100 bp, Homo sapiens
gaagtctcacatcagaggtgtcaaggactttgcaccccgtgtaattgtgatgtatatgattgctcttcttgctttcctattctacatttccaaagtccca

SEQ ID NO: 36553 - DNA, 87 bp, Homo sapiens
tgataaaattatcagatctaccctcctgctatatgtcggatattgaatttgagttatattgatcagtggaataaagttattgaacag

SEQ ID NO: 36554 - DNA, 75 bp, Homo sapiens
tgcgaggaaaatggcggcgggagatctgttacctaaagcaataaaaaatggccagaggatcagtgtccgatgagg

SEQ ID NO: 36555 - DNA, 100 bp, Homo sapiens
tttggtttgtccagagacagtgagcagatgggcagctctcaaaaaaggcacaaacaattgaaggatggataccatggcatatgttaaaagcgtgttgaaa

SEQ ID NO: 36556 - DNA, 74 bp, Homo sapiens
ccaacaccagttctatctggacagaaagcagagtaaggcataccaatcccattgtggaaaatggacagactcat

SEQ ID NO: 36557 - DNA, 50 bp, Homo sapiens
aggatcgcccaatccacatgcttttccagcctggagtactcgggtacttt

SEQ ID NO: 36558 - DNA, 80 bp, Homo sapiens
ttcagctgcagcatggagagatagataaacgggatgagaacaagttgagcagtgccaacggccatgaagaacgtagcaaa

SEQ ID NO: 36559 - DNA, 82 bp, Homo sapiens
cttggtgtcatccagccttagcaaaccagaggaggaagatgaagattttgaagaagaaagtgatgatgatgatactgcagct

SEQ ID NO: 36560 - DNA, 89 bp, Homo sapiens
ctgcattttgggaaactcgactttggagaaaccaccgtgctggaccgcttttacaatgcagatatatgcacactttctgagaaggagag

SEQ ID NO: 36561 - DNA, 75 bp, Homo sapiens
gctggcggacatcactttagaccctccacctaattgcagctgccgctcagctttgatggaacaacgcttattttg

SEQ ID NO: 36562 - DNA, 74 bp, Homo sapiens
gttcgtggtagcaccttcaaagaaatccccgtgactgtctatagagactgtgcctgaggaaagcggggggcgtg

SEQ ID NO: 36563 - DNA, 101 bp, Homo sapiens
gaactcattgttaagcacaagttcacgaaagcctacaaaagtgtggagaggttccttcaggaggatcagctttcactttcagaagaacagaatgaagtaat

SEQ ID NO: 36564 - DNA, 50 bp, Homo sapiens
atgcagccaattatacagtgtgtcagtccttctaaaaaagaagcttgaag

SEQ ID NO: 36565 - DNA, 78 bp, Homo sapiens
caaactgcaataagccgccttccaaggtgaatcttggaagcaaccagtaccttttctctgtcatagtggatcctaaag

SEQ ID NO: 36566 - DNA, 100 bp, Homo sapiens
gcaaagggagcagcacagatggcagaacagacttagctaatgcttcaattagtggagacacaggggttatccacgtagtagagaaagaggaggacctaca

SEQ ID NO: 36567 - DNA, 103 bp, Homo sapiens
tcctgatggcatgcctgtaaagaacttgcagttgaaggagtataacacaggtacaccagaggatcgcttcctggcagaatttgggagctgtttattgcagcac

SEQ ID NO: 36568 - DNA, 83 bp, Homo sapiens
agccgatccagcctgcggagcctgtggggcagctggtgctcaagaccgaatcggctgggcttttggcctaggattagaaaggc

SEQ ID NO: 36569 - DNA, 76 bp, Homo sapiens
cgctgcccctgggccgcaagaagggagccaagctggcgttcaatgtcatcaatggcggttctcatgctggcaacaa

SEQ ID NO: 36570 - DNA, 83 bp, Homo sapiens
tctgcgcttccccatggggctggcctgcggcgcctgggcgctctgaggtatcagaagagcaaggtcaagaaaacccagcagac

SEQ ID NO: 36571 - DNA, 87 bp, Homo sapiens
gccctgcattcgcggcgtgtgcagcatttcagcaggaacttgatgcaaggcatgacaaatatgagagacttgtgaaacttagtcggg

SEQ ID NO: 36572 - DNA, 83 bp, Homo sapiens
cagttgatgggcacctcccgggacggttcattgtgggatcagaccgtgctatcttcatgcttcgcgatgggagctacgcctgg

SEQ ID NO: 36573 - DNA, 99 bp, Homo sapiens
caattaggattgcccaggagtccaacgatcacgtgtgtctccagcactgtttggtgtaattgaaaagtgatcctctcttcagagatgtcaaaaacaaac

SEQ ID NO: 36574 - DNA, 100 bp, Homo sapiens
ccgcaccgctcccgggatcatggtgttctacttcaccagcagcagcgcttccccttctcagaatcctgctcttcctccagagagattcccaggagaagag

SEQ ID NO: 36575 - DNA, 100 bp, Homo sapiens
ggccatgaccaaggctcgcaattttgagagagttttgggaaaggagaggagttcattacttcggaagtggtacaatttaatgatacaaaataaggatgac

SEQ ID NO: 36576 - DNA, 51 bp, Homo sapiens
gcctaattaccttcaaacctggccctcgggaccaaggatcacgtcatgact

SEQ ID NO: 36577 - DNA, 101 bp, Homo sapiens
ctcacacccggtctggacacagaaagagaaacagggccaagaggaccttgcctgcccagtccttggggagctcagatcctacgagactggtacccacagga

SEQ ID NO: 36578 - DNA, 90 bp, Homo sapiens
tttctccattctgttggttttatgcatctttatccaatcaagtgcccttggacaaagcctgaaaccagacacgctttcaccagcttcgag

SEQ ID NO: 36579 - DNA, 82 bp, Homo sapiens
ccttgagcttggacaagtttcttagcttttctgtacctgtttccctgtctactgaaactgttgaggagcccatggaggaaga

SEQ ID NO: 36580 - DNA, 80 bp, Homo sapiens
ccgcccttcgccttcgttgagttcgaggacccgcggtattagaaaactactcggatgctccaatgacaccaaaacagatt

SEQ ID NO: 36581 - DNA, 75 bp, Homo sapiens
gagccaatggtctgatcaatcgcctcatagaggaaaataagatggatctgttagcagccaacagggaagagtgtc

SEQ ID NO: 36582 - DNA, 100 bp, Homo sapiens
aagggtgaaggaggcgaattttcagttgatagtacataccgagcatcaaatattaaggcacccggagaacagacagtaccagccttgaaccttcagaatg

SEQ ID NO: 36583 - DNA, 75 bp, Homo sapiens
cctatggaatgaggaggacgaaatggacatgacttggaggctgcattgaggcgtgagcaaaagaagttggaaaag

SEQ ID NO: 36584 - DNA, 51 bp, Homo sapiens
cccgagggtcggctctaccaagtaggccatacaggaactaatgaaaatcca

SEQ ID NO: 36585 - DNA, 98 bp, Homo sapiens
ccagcgcagaagggacgtgagcccagccgaggtaccgctgaagaggaatcaattttgccattggaaaagaagtttgttcgagtttcaggagaagcaac

SEQ ID NO: 36586 - DNA, 100 bp, Homo sapiens
atgcaaaggacttagaaggacaaacgtttgaggtcatcatggtcacaggagaccatccaatcacagctaaagctattgccaaaggtgtgggcatcatctc

SEQ ID NO: 36587 - DNA, 83 bp, Homo sapiens
gcatcatcttctttaagtttgatcctcgccctgtttccaaaaacgcgtacaggtagaagaagaaaggtgccactccggcatga

SEQ ID NO: 36588 - DNA, 83 bp, Homo sapiens
gtttggaagagaagattgctgcgctctttgatcttgaatattatgtccatcagggggatatgagactttctactcggaatatc

SEQ ID NO: 36589 - DNA, 100 bp, Homo sapiens
cctcaagcacctgcgcatcgtcatcggagatcatgaatcagacagataaaaatcaacaagaaatcccatcataccttaatgatgaaccaccagaaggtaa

SEQ ID NO: 36590 - DNA, 74 bp, Homo sapiens
gcgagtgaggaaaggaggtactgtagaatgtccctcttccagtggaaagcccaaccatgcagacatcttgctca

SEQ ID NO: 36591 - DNA, 100 bp, Homo sapiens
cccagatggaaacaagtcacctgctcccaaaccttcttactcgcagaaggaagacagatatgaggaagagatcaaggtcctttccgacaagctgaaggag

SEQ ID NO: 36592 - DNA, 76 bp, Homo sapiens
gcctgcccagacggctcacctgtgcgggatggaacaaaaggaaaaagaagatgtccctgtggaaatgtccaatggt

SEQ ID NO: 36593 - DNA, 110 bp, Homo sapiens
tcgtgaccaacatgctgtgatgtgtgccgagggaggaattggacttccaatagtagtcagacattatcatcctgtcatactatggagccatgtacatcagatgaattttt

SEQ ID NO: 36594 - DNA, 89 bp, Homo sapiens
agaccgtgaccgagagcgtgaccgagagcgcgaatatcgtcatcgttagaaggatcttacacatttgttccatggcttctcagctttaa

SEQ ID NO: 36595 - DNA, 90 bp, Homo sapiens
ctcggtcctggccgcgattttctgcaggccccacgagtgggaggtgctgagccgctcagatcatgcaacagatgagtgaccaccgctacg

SEQ ID NO: 36596 - DNA, 97 bp, Homo sapiens
gaggcgctggagacgctgatggagcaggcagtggctgctgtgcagaaaatggaccaggccgagtaccaggccaagagatggggtttcgccatgttgc

SEQ ID NO: 36597 - DNA, 82 bp, Homo sapiens
aacagccatcccgggcactatgtgaatttgggctctaacactccaagaaaggctgtgtttgcgggaagcatgcagttgctgg

SEQ ID NO: 36598 - DNA, 87 bp, Homo sapiens
tgctctgaaagacatccttgggcccccgatgtatgaaatggagagatatgcagcccctactcagtgccctgccaaatgtgggcatgt

SEQ ID NO: 36599 - DNA, 50 bp, Homo sapiens
aggaaatgtgccagtgatattttccaggactcagaattcatgattgaaga

SEQ ID NO: 36600 - DNA, 75 bp, Homo sapiens
cttgcccgctcgggtatgaagatcgggcggattggtttctaagcatgaattgaggaacagaagaagcagagcaga

SEQ ID NO: 36601 - DNA, 50 bp, Homo sapiens
gccgaggagcgggaagagttgctggggtgctggggagtcagggaagagca

SEQ ID NO: 36602 - DNA, 99 bp, Homo sapiens
caacctggagctctacgcctcctacgtttacctgtccatggaaaattacgggcagaaggaggctgagaaagtggcccgggtgaaggcgctatatgagga

SEQ ID NO: 36603 - DNA, 110 bp, Homo sapiens
ggcggcgtggggaccacccggcaggaccaggcaccagagctgcgtccctgctcgctttctctcgtggatcttctcgctcctgcaccacaaggccacataaggagggtgag

SEQ ID NO: 36604 - DNA, 90 bp, Homo sapiens
gatccagaagtccagagctgaggactgcctgtttgcaggacttgcaattgtgaccaaatatattacaaagggctggaaagaagttcatga

SEQ ID NO: 36605 - DNA, 50 bp, Homo sapiens
caaggttgtaacgatgagtacaaactgggagaaataaagtgtagtccttc

SEQ ID NO: 36606 - DNA, 74 bp, Homo sapiens
aaaactgctggaggatcaagaagggcttcgtgcccaacatgcaggtggagctggccctgctacagcgctcctac

SEQ ID NO: 36607 - DNA, 100 bp, Homo sapiens
gaagatactgggaaatccatagctaagatgccaggaccccctgaaagcctagacatgcacacagcaagaaggaggccatcagcaaactgggaagaggacc

SEQ ID NO: 36608 - DNA, 96 bp, Homo sapiens
cggcctcttgcgctacgccctggatgagatgggatgatcatggtgattttactgctgcttgtggctatcgtggttgttgcagtctggccgaccaac

SEQ ID NO: 36609 - DNA, 75 bp, Homo sapiens
gccaggaagtcggagtttgagccccggaggcagagcggctgccatggtactccaaagattcaggtttactcacgt

SEQ ID NO: 36610 - DNA, 100 bp, Homo sapiens
gacggcgtcctgctgggggagcagctgatcaccatgtcctgcacggacaagatcgccagggtctaattctgttgcccagtctggagtgcagtagtgcgat

SEQ ID NO: 36611 - DNA, 75 bp, Homo sapiens
ggaaaaacagaatcagctgttccctgcgaaagcttgaaggtttatctatactgttcacctgtgactaaggagttg

SEQ ID NO: 36612 - DNA, 50 bp, Homo sapiens
ggacatggagtatgaaagacggggtgacagtccaaagattgacttggccg

SEQ ID NO: 36613 - DNA, 75 bp, Homo sapiens
ctcttattgatggaagaagactcaagtatagattaaatggtgttgtcctacatcaatggggtcacaacaagcaaa

SEQ ID NO: 36614 - DNA, 82 bp, Homo sapiens
ggcgaacgcggtctgcaagctgacgtatcaaattgtggctactaatttgccccctgaagatcaagatggctctggggatgac

SEQ ID NO: 36615 - DNA, 100 bp, Homo sapiens
ttttcttggatgaattgcttgctttggagcatcaagatggtgctcatgtggaccagtggtgacgccttcaagacggcctacttcctgctgaagggtgccc

SEQ ID NO: 36616 - DNA, 100 bp, Homo sapiens
tggctgaagacacaaggaaataagcaaatgctttgcacgtgcctgggcaacggagtcagctgccaagagacagactttgagaatcactacaagaaaaact

SEQ ID NO: 36617 - DNA, 143 bp, Homo sapiens
aaaagtggtgcatttatttggtgactcaacaatcaggcaatggtttgaataccttactacatttgttccaggttaacaggaagatctcgagggccctggctgaacttcaccttttggctttcttggcctgatgctgaactctc

SEQ ID NO: 36618 - DNA, 75 bp, Homo sapiens
ctggctgtgctggccttagtgccccaggatcagggaggactggttgactgcattcagccagtgccaaaagaggag

SEQ ID NO: 36619 - DNA, 100 bp, Homo sapiens
cccgggaggagaagcatcagaagcagctggagcgtgctatgctggaaaatgagaagaagaagcgtgaaatggcagagaaggagaaagagaagattgaacg

SEQ ID NO: 36620 - DNA, 73 bp, Homo sapiens
tcagccttcccagtagctggaactacagcatgaacgtgcagggtgattatgagccaactgatgccaccgggtt

SEQ ID NO: 36621 - DNA, 90 bp, Homo sapiens
tgaagcaagtgcagatagatggccttttctttaaggaaaaacagtagtgctctgcatagtttactgaaacgagtggtcagcacatttagt

SEQ ID NO: 36622 - DNA, 75 bp, Homo sapiens
aactgataaaacccaccagtctagggtgcaaatagctatgggcaacttggcctcggccataaggaagatgtgctg

SEQ ID NO: 36623 - DNA, 75 bp, Homo sapiens
tgagctggaggagtaccgcagggaggtggagaggaagcagaagggctctgaagcgtccgtctccaagagagtatg

SEQ ID NO: 36624 - DNA, 98 bp, Homo sapiens
ccgaggacacctcggtggagaagctcaaggagcgctgcctcaagcacgtgctggagaatctggtaaaagcaccattgtgaagcagatgaggatcctgc

SEQ ID NO: 36625 - DNA, 98 bp, Homo sapiens
ctgcctgcctgctgctgcttggagagccccagacagtcgcttgaagagtactatactggcaattgctggagaagattttgcaattgttgcttctgata

SEQ ID NO: 36626 - DNA, 80 bp, Homo sapiens
tctgttcttcttttgcatcctacgtaaccagaccaagctgtgggactgactggagctctcccgtgtcagctcgtagcaca

SEQ ID NO: 36627 - DNA, 75 bp, Homo sapiens
ctcggcctatcgctaccctccgaagtccggtattagaaaactactcggatgctccaatgacaccaaaacagattc

SEQ ID NO: 36628 - DNA, 133 bp, Homo sapiens
caggaaagcagtgtcaagattgtatgccaggttattatggagatccaaccaatggtggacagtgcacagatttgatccaggctaccaacgagaccaatgttaatattcctcagatggccgacactctctttga

SEQ ID NO: 36629 - DNA, 83 bp, Homo sapiens
ttttgcaattgtgaattgtgctgctgtaaacaagtgtgtgaattacatgaacgacagccttcgcaccgacgtcttcgtgcggt

SEQ ID NO: 36630 - DNA, 87 bp, Homo sapiens
gggacccgcgccgctgccctccggctccgcgggcggcccacggcgagtctgaaaacttagagaatacagtaatcataccagatatca

SEQ ID NO: 36631 - DNA, 80 bp, Homo sapiens
cgaggagccgccgcgcgcccgcgccctccgcgcgacgccagttcaaatctgaacatcaatgatgtactagggaactactc

SEQ ID NO: 36632 - DNA, 100 bp, Homo sapiens
aaatactggaagaacctcacctttgtctccccgatctacggggctgacatcagcggctctttgtatgatgacgacaccgtggtggccacgctgcgtgtct

SEQ ID NO: 36633 - DNA, 50 bp, Homo sapiens
cgggggagcggcgcggcggcgcgggagtcttcctgtgttgcccaggctgg

SEQ ID NO: 36634 - DNA, 46 bp, Homo sapiens
tgggggaccggctgttggcggatattatgcctggtgatcctgatct

SEQ ID NO: 36635 - DNA, 82 bp, Homo sapiens
ctcgggctgagggagctcgggccaatcagagggacggccccagaatggcatgggccccccacaaaagcagcctcggggactc

SEQ ID NO: 36636 - DNA, 100 bp, Homo sapiens
tttcactgttacctgaaagagcaatattacaggtgaccaagaatatggcccaggtgaccaaagccctggacaaggccctgagcaccatggacctgcagaa

SEQ ID NO: 36637 - DNA, 75 bp, Homo sapiens
cgcagccccccaacatcctgctcctgctcatggacgacgtggattttcctacagctattggtatggtggtagaaa

SEQ ID NO: 36638 - DNA, 82 bp, Homo sapiens
ccgccgtctacccgtggccgctgccggtctacggagtaccctgacttctaccggaagctctacggcctcttggacccctctg

SEQ ID NO: 36639 - DNA, 100 bp, Homo sapiens
agtatgtaggagacttgtggaactgctgatgactgcatcaaaacatgtaaacaaggacctcggtaatatggaagaaaacaaaaagttagaagaaaacaat

SEQ ID NO: 36640 - DNA, 75 bp, Homo sapiens
cagattcgcagtggtcgcttcttctccttgttgccagtagtcatcagagtaccaaaactgatctatttctcagta

SEQ ID NO: 36641 - DNA, 100 bp, Homo sapiens
aaaactctctctgcaagtccttaactttgttcactcattccagaatgaaagtgcccttgtgaaagaaaaagagctgtcaatcgaacttgcaaacatcagg

SEQ ID NO: 36642 - DNA, 74 bp, Homo sapiens
cagccccggtctctcggacaccattttctgccgctggacgcaaggagttccgattctgaagaggcatttgagac

SEQ ID NO: 36643 - DNA, 82 bp, Homo sapiens
ggccggactcaaccgcgtaaaaggcttaaaagacaaccttcttgcttctgggacatccagcctgacagccaccaaacagttg

SEQ ID NO: 36644 - DNA, 50 bp, Homo sapiens
cctcccaagtggctgggattacagatgaggatgacgatgaaccagaagag

SEQ ID NO: 36645 - DNA, 82 bp, Homo sapiens
tcaagactctcttcgtggcgagagtggggcagtcccggagagttcaagtcgaagtgaagtcagtgcaggaatctgggacttt

SEQ ID NO: 36646 - DNA, 100 bp, Homo sapiens
ccaaggcagaagaaatcttggagaagggtctaaagatcttctggtgaccccacttctcgctgctcatgccgctgggactggggcggcggaaaaaggcgcc

SEQ ID NO: 36647 - DNA, 100 bp, Homo sapiens
ggaccgcatccctcgtgaccacccctacatccagtacagagtgttgaagcctggaaatcccctccccttccccctcccccctttacagtatccccctccc

SEQ ID NO: 36648 - DNA, 49 bp, Homo sapiens
tgatgcctgctagccaaaagggtaagaatgattgatgttggctgatatt

SEQ ID NO: 36649 - DNA, 76 bp, Homo sapiens
attgtttgtcaccacaaaaaggacaggcctatatgaacccaatagcaatggcgagatcaaggggtccaatccagtc

SEQ ID NO: 36650 - DNA, 48 bp, Homo sapiens
gcgaggcgggcagccggggcgtccagattgccagcgtcctgacgtcac

SEQ ID NO: 36651 - DNA, 95 bp, Homo sapiens
agaaggtggtctgtgagaacccgaagaccagccagaccatggagctcgcccccaacttccaggaggatgtggatccctcagttggtcgattcagg

SEQ ID NO: 36652 - DNA, 75 bp, Homo sapiens
cctggccgccccgagcggagcctggagtcaggatggctaaaggtgaccccaagaaaccaaagggcaagatgtccg

SEQ ID NO: 36653 - DNA, 75 bp, Homo sapiens
atcaccaagctggaggtggacgccatcgtcaacgccgggagtgcatccgccccaacccttttccccctcgtctcc

SEQ ID NO: 36654 - DNA, 75 bp, Homo sapiens
actggagatgacacgtgcgtggggtgttggggcgtctctggccgagcctctttttgtggaaaacgacagcagcag

SEQ ID NO: 36655 - DNA, 98 bp, Homo sapiens
tggctgctggggccgctgtgcctgctgctgagcagcgccgcggacagcccacctgaggatattgaccataaggactcatatctcattacaagaagcat

SEQ ID NO: 36656 - DNA, 95 bp, Homo sapiens
ttttaatttcagtgactgaattaaaaggtgtcaagaagctcagaatgtgtaaacaggaacatcgataagtagtgtaaaaacttgcacaatgaaat

SEQ ID NO: 36657 - DNA, 100 bp, Homo sapiens
tgggtgacaatgccttggtttcaacactatcggaatgatatgaagatcaatgatgcagactgatggttttgatgaagctgggcatttataactagattca

SEQ ID NO: 36658 - DNA, 98 bp, Homo sapiens
gaggttcagattaagaaatctgccccaaagtcttagaactggtgtagagttcggtgctcgaatgataactattgatgggaaacagataaaacttcaga

SEQ ID NO: 36659 - DNA, 100 bp, Homo sapiens
tgagacctaccagcgtgtcttcttaccatccacagctactgctgagcagactttctgacctggggtccactcatgcctgctgagcgtgcgggccggcaaa

SEQ ID NO: 36660 - DNA, 90 bp, Homo sapiens
gtggacagttcttcaggcttgggtgactacctagaactgcatatattctggagaccagaaggccaaaatcaaaagtatgggcaggcttga

SEQ ID NO: 36661 - DNA, 75 bp, Homo sapiens
acctcatcccctggatgggggaccacaagatcctcatcgacaggtactttacaaccttggaacagtgactccacc

SEQ ID NO: 36662 - DNA, 100 bp, Homo sapiens
agaaaagcgagcctcttctgataactcaggatttacttgaaatgaaaggagattccaacctacttcaggtctgtgcagacttttgcagacaaatcaaaac

SEQ ID NO: 36663 - DNA, 98 bp, Homo sapiens
agggagaccacttgcttaagtcctccaggagggcgatggaggagccggcattccaaccaggctcacggatgccaaggcggggagacaaccccttcccc

SEQ ID NO: 36664 - DNA, 73 bp, Homo sapiens
tttggtaagaagaaagtgatttgaaagaagctcattcacacagaagacccatttaatgatgaacatcaggaga

SEQ ID NO: 36665 - DNA, 96 bp, Homo sapiens
ttctatgtttccacatcggtcagaaaaagatgcccgatgagagaaagggaaagttaaggatgctggagcagaacaatggatttctctttctctttc

SEQ ID NO: 36666 - DNA, 100 bp, Homo sapiens
caagcacatggaggctcagcgggccgaggagggaaggtgaagaaggagctggaccctgacgacagccatttgaacttggatgagacgacgaagctcctgc

SEQ ID NO: 36667 - DNA, 101 bp, Homo sapiens
tatctgtctagattgtttacgaaataatgggcaatcaggggacaatgtagtaaaggtactaggttttgacaagcttgcatcatgcgtgagtataagctagt

SEQ ID NO: 36668 - DNA, 100 bp, Homo sapiens
ggatttccaactccaggaccctttccttctctacagaaatgccagatattcatgttacatgtaaagctgtcctcatttgtgactatggacctatggagtt

SEQ ID NO: 36669 - DNA, 101 bp, Homo sapiens
cgccgcccgctttcaggcccgtgctggcagtgatggtgaaagcataggaaactgccccttttcccagaggctcttcatgattctttggctcaaaggagttg

SEQ ID NO: 36670 - DNA, 88 bp, Homo sapiens
agagtacttgtgtggatcttaacgattctggtcatactcggttcacttgtacaatggtcagttccgttcaaggaaacacatatcccag

SEQ ID NO: 36671 - DNA, 101 bp, Homo sapiens
attggaggtgtcagtgttaaaggaacctctacaacgaaggtgaagccacggaagataagttgatattcactgatggactccaaagaatcattaactcctgg

SEQ ID NO: 36672 - DNA, 89 bp, Homo sapiens
agagtcagcagagcaaccagagttctactacgatgagtttggtttccgtgtgtacaaggaagaggtgctgatactcaaagaaggtttaa

SEQ ID NO: 36673 - DNA, 101 bp, Homo sapiens
cggagaccccgaaaacggaagcgcagggagaaggaagaggtgtttgaaaagacccgaccgcatgtctgtcatggacctcgccaatacttgctccagctttc

SEQ ID NO: 36674 - DNA, 131 bp, Homo sapiens
cgcgaggagccatgaggcgccagcctgcgaaggtggcggcgctgctgctcgggctgctcttggagcatattgaaggtgatgacctgcatatccagaggaatgtgcaaaagctgaaggacacagtgaaaaag

SEQ ID NO: 36675 - DNA, 100 bp, Homo sapiens
attgagaaggctgaggaactcagcaaccagctagctactcgagaggtagcaatgaagtgatgaggatactgatctctagaagcctgcttcaggagtagaa

SEQ ID NO: 36676 - DNA, 82 bp, Homo sapiens
ccaggaacagaggacagtgagtcgctctcgtccctccagtttgtgaaagagacagacaatgaagtaagaatgcgactattgc

SEQ ID NO: 36677 - DNA, 100 bp, Homo sapiens
gagaggtttgctgagctggttggccctgtgatccctcaagactggtccacggagtgtatgaccacaaacagccatcaagaggcagtcaaatgcttctcag

SEQ ID NO: 36678 - DNA, 100 bp, Homo sapiens
ttgctgctctacttgaggaacatgacatttttgttccagaggatgatgatgatgatgactaacagattttattctggtagtgcaaccctctcaaaggttg

SEQ ID NO: 36679 - DNA, 100 bp, Homo sapiens
gctctgaagcatgttaaggaaactcagcctccagaaacggtccagaactggattgaattacttagtgctacagaagtcaagattccaaaaccaagaggca

SEQ ID NO: 36680 - DNA, 88 bp, Homo sapiens
gtcggcgccggggttcggtggcctctagtgagatctggagagctggaagtcgagtgtgctactcaactcaggagatttggagacaaac

SEQ ID NO: 36681 - DNA, 144 bp, Homo sapiens
cgagccgcgcccgggtctgtgagtagagccgcccgggcaccgagcgctggtcgccgctctccttccgctactctccagagagaccggatcttcaaacattttaccaggaagcgccaaagggctatgcgaaggcgagtccaccag

SEQ ID NO: 36682 - DNA, 100 bp, Homo sapiens
gagcccacgctaactttgaaggtgatacttacctcacctctaattagggacgaattggagaagaaggatggagattagtcagaagaagttgaaaaaatac

SEQ ID NO: 36683 - DNA, 98 bp, Homo sapiens
cggcacggaaggtggggcggcctgggaggaagcgcaagcaccccccgatcctcgttgcctgctaaccaacggcaagctgccactgtgggcaaagcggc

SEQ ID NO: 36684 - DNA, 80 bp, Homo sapiens
aacaacagtgacggaatgcctccatacatgtgagcagtaggtcatccagtcccagtgtcagaatgattactacctcagga

SEQ ID NO: 36685 - DNA, 75 bp, Homo sapiens
ccactccgtcccccgcgggtctgctctgtgtgccatggacgggtgcacgacgccagctcccttctggggggccgg

SEQ ID NO: 36686 - DNA, 74 bp, Homo sapiens
tcagcctcctgagtagccgggactacaggaagatgatccctatgatcttgaagatgtttctgcacagaaatgag

SEQ ID NO: 36687 - DNA, 100 bp, Homo sapiens
tcatcccaggttgccttggaaaatgccaacgccgtgtctgaaggaccgagatctcactcagcagacagcagcagcccgggagcctgagctcaggaggaac

SEQ ID NO: 36688 - DNA, 90 bp, Homo sapiens
actacgcggccgcggagacctacctgcggcgtcggcagctgctgctccgaggagaataaaggcagccccgttgatgactgaaaatgacaa

SEQ ID NO: 36689 - DNA, 75 bp, Homo sapiens
tgggtcctacctgtcagagccccaaggtgacttaagagattaaaattaatttggttgctgttggttctgaacaaa

SEQ ID NO: 36690 - DNA, 98 bp, Homo sapiens
aatgtttcatcattactaacaggatattcctcatgacattgctgtctggctgaagaaatgtcaacaattgggagttttgaaggattccaggctgtgtc

SEQ ID NO: 36691 - DNA, 75 bp, Homo sapiens
aaggggcctccagggtctgcagacaaggcagggaaatgcttccagactgcacacttttacttagaggacagtaca

SEQ ID NO: 36692 - DNA, 74 bp, Homo sapiens
ttgagggtctccagggttctttggggcccgagggggctagagagctgaaggagagccagtttccccaaaattgg

SEQ ID NO: 36693 - DNA, 98 bp, Homo sapiens
aaggatgaatcccagtccctgttacggctgaagtgagtagtgaatatagtatggacaaggcaatggttgaatttgctacattggatcggcaactaaac

SEQ ID NO: 36694 - DNA, 82 bp, Homo sapiens
cgggtccagacccacgcggcgccagttctccggcgggaaggaaaaccgcgcagagaggtgtggacactgccagcggctgcag

SEQ ID NO: 36695 - DNA, 75 bp, Homo sapiens
ctgcccttcgccaaggagatcgtctctctcatcgaggcccaaaccgccaagatgaggtggaaagtgagaaatggt

SEQ ID NO: 36696 - DNA, 83 bp, Homo sapiens
cgaggagaagcgagaaaagatgaaacggaccctgtgaaatgacaatggatgctctgttggctcgattgaaacttctgaatcca

SEQ ID NO: 36697 - DNA, 96 bp, Homo sapiens
gggcaataagcgagtacagggggttgcagtacacaggatgctgaaaacgccattcaacagatgggtggccagtggcttggtggaagacaaatcaga

SEQ ID NO: 36698 - DNA, 76 bp, Homo sapiens
gccatctcctgggccgcctggcggccatcgtggctaaacaggctgactgtgctgtcctgattgttgctgctggtgt

SEQ ID NO: 36699 - DNA, 100 bp, Homo sapiens
cctcaactggccaaattcagtcccgatttgtggggtgtgtctgtttgtacagtagatggacagaggtttgaagatgccgcatttggattggatgaattcc

SEQ ID NO: 36700 - DNA, 90 bp, Homo sapiens
tgagagttgcctgctcaccacggacacagtgattcgaagctacttaggggcatacattactaaacatgcgtcgggatgtccaggaaattt

SEQ ID NO: 36701 - DNA, 83 bp, Homo sapiens
gtggttagtttctgcgacttgtgttgggactggtcgtcacgctgtggtacagagcacccgaagtcttgctccagtccagctac

SEQ ID NO: 36702 - DNA, 101 bp, Homo sapiens
ggacaccatggtgtttaagccaagtgatgtcatgcttgttcacttccgaaatgttgacttcaactatgctactaaaggatttccagaaactctgacccttc

SEQ ID NO: 36703 - DNA, 82 bp, Homo sapiens
ggtcttcttcctcctggaggtcttcaacaacatcatccagtaccagtttgatgggggtgaatctctacattaagaacttgga

SEQ ID NO: 36704 - DNA, 100 bp, Homo sapiens
aaacgcctttcagcaactctgccggagaaactctctgtttgttattttacaaattcaggtctgaattaggtgacttagatacctggcaggaaaataccaa

SEQ ID NO: 36705 - DNA, 83 bp, Homo sapiens
atgagtcatggattcgggggttcggaccttggagcaggcgcagcaaagtggggcaccaaggccctgtgctaagcactcataat

SEQ ID NO: 36706 - DNA, 82 bp, Homo sapiens
cccactgtactggaaaggaaaaccactgcgtctccttatctggacacgtgcaggctgatcgatgctatagaagacaaacaag

SEQ ID NO: 36707 - DNA, 100 bp, Homo sapiens
aagagaacaatgggaaccagtctttcaaaattgcatacatagagacgtgaagccagaaaatatcctcatcacgaaacattccgtgattaagctttgtgac

SEQ ID NO: 36708 - DNA, 121 bp, Homo sapiens
gaaaactaggaatctatgatgctgatggtgatggagattttgatgtggatgatgccaaagttttattagcggacaaggcaaaatctcagcaagttcggacctctagtacaataaggcgaac

SEQ ID NO: 36709 - DNA, 83 bp, Homo sapiens
cggagcgtgtggatttgagccgccgcattttttaaccctagatctcgacctgcctagagctggaacgttacctccagagcgag

SEQ ID NO: 36710 - DNA, 90 bp, Homo sapiens
ccccttggaaacaccagcatttgctataaaggaacaaggattccgggccgttgctccagggagaactgcaaatatcttcatccaccccca

SEQ ID NO: 36711 - DNA, 75 bp, Homo sapiens
cttctatgtacctgcagaacccaaattggcgtttgtcatcagaatcagagggaaggtgtcttgctgcaggtaact

SEQ ID NO: 36712 - DNA, 50 bp, Homo sapiens
cacatcgttcggttcccacaacagcctggactcgctcagcagcagcctga

SEQ ID NO: 36713 - DNA, 83 bp, Homo sapiens
cccaccagttcgcccgtccccctgccccgttcacaattgtactaatggtcacttgatgtgcgctggctgttttatccacctac

SEQ ID NO: 36714 - DNA, 90 bp, Homo sapiens
cgaggttcgggctggttgttccgttgcgagctgcagctgcgatctctgtggtaggcccaggctgattcaccccaagagtggccgttccta

SEQ ID NO: 36715 - DNA, 50 bp, Homo sapiens
agaccttgacacttatatcctccctggaccttctcttccaccttctaaac

SEQ ID NO: 36716 - DNA, 100 bp, Homo sapiens
aaaacaacttcgagggcagaaattgcctgaggttctgtccattgaggaggaagtggaagaaacagagtcttgggcgaaacctctcatccacctttggcag

SEQ ID NO: 36717 - DNA, 96 bp, Homo sapiens
ccaccaaagatcggaactccaacaagaccctgccctctaccacctggactcctgagagcagcctccatgaggccctggaccagtgcatgaccgccc

SEQ ID NO: 36718 - DNA, 87 bp, Homo sapiens
tgtgaagaggttcagctgtcctaatcctcactgccgaaagggaggtatggaaacattggaacttcaaaaggacatcaaagaagaatc

SEQ ID NO: 36719 - DNA, 75 bp, Homo sapiens
aaggtcaaagaaaaagttcaaaaactgaaggactctgaagctgagtcttcccaagggattgttgaagaaacttct

SEQ ID NO: 36720 - DNA, 49 bp, Homo sapiens
gtggtctctgcacctcctttctacagccctggtgtggtgtggtttaaag

SEQ ID NO: 36721 - DNA, 74 bp, Homo sapiens
tcgcctttgccgatccgccgcccgtccacacccgccgccagctcccctgggacctgtggccgccgcccacagac

SEQ ID NO: 36722 - DNA, 82 bp, Homo sapiens
ggtgaacgggtccacgttcgtgctacagaagaagggcatcgtgcgtgccaagcggcgaggtgagcgagtgctgtgctttcat

SEQ ID NO: 36723 - DNA, 88 bp, Homo sapiens
agatggcctggtggaaagcctgggccaggaatagttgctgaacaccccaggcctgctgaggtccctccttgagtctcatgttcaagca

SEQ ID NO: 36724 - DNA, 75 bp, Homo sapiens
tccaaagagccccctatcaagcttccaaaggtagatcgacacttgagaaagctggatcaggaactggctaagttt

SEQ ID NO: 36725 - DNA, 75 bp, Homo sapiens
gtctgtttgcaaagcacctgaactgattccagctaagaaagagtcttgtccaaacactggaagagacaaagacca

SEQ ID NO: 36726 - DNA, 90 bp, Homo sapiens
catctgcattcagctggtataattcatagatttcagatgaactcccataatgaatgatgaatttgtgatgagggataacctggaagtggt

SEQ ID NO: 36727 - DNA, 98 bp, Homo sapiens
acagccccgaggtgtgcgaagccaccaagccccttcacagatgtagtcactacaaatcttaaattgcgaaatccatcggatagaaaagtgtgtttcaa

SEQ ID NO: 36728 - DNA, 98 bp, Homo sapiens
gaagtgatgcagaggatggaagttcaaaggaggaggatgatgcagcatccaacattgctcgctgtaagcagctcatctgtgaccccagctacgtaaaa

SEQ ID NO: 36729 - DNA, 75 bp, Homo sapiens
ctcccaaagttctgggattacaggttgtgaaatcaagattatcttggctttgcaaaacaaactggaaatttcttg

SEQ ID NO: 36730 - DNA, 100 bp, Homo sapiens
ctcacttcttacagattgcaaccctgaaccaatttagaacttgaattgattcatcgaggaggcaatttgtgttcaggtggtgcaagcacagctggcaaaa

SEQ ID NO: 36731 - DNA, 96 bp, Homo sapiens
actatgtggacagaggctatttcagtatagaggaactgcaagcacatgttgaccagataactgaaatggcagcagtaatgaggaaagccattgaaa

SEQ ID NO: 36732 - DNA, 75 bp, Homo sapiens
ggcatccagggctcgtacttctgctcgcagactcttccagctggagttggaggctgacgccctagtgaatttcca

SEQ ID NO: 36733 - DNA, 100 bp, Homo sapiens
aaaaagatgaacttctgagttacataaagaagacctaaaactgatggctactaaaaagcagagcatttctgaatgagtccctggaacgccagatgcgtga

SEQ ID NO: 36734 - DNA, 82 bp, Homo sapiens
tggggccagggaaccctggtcaccgtctcctcagagacgtctcccacaacctgctccgggcgctggacgttgggctcctggc

SEQ ID NO: 36735 - DNA, 75 bp, Homo sapiens
gcggccggggcggcggaggcggaggcggccggcccgggaggaattttgttgtcagagaataaaaggaggttgtcc

SEQ ID NO: 36736 - DNA, 98 bp, Homo sapiens
ggtctccaactagtattatgagaggagtcaatcagaggggccttggacaagttgttactgactatgttcatggggatgccttgcagaaagctgccaag

SEQ ID NO: 36737 - DNA, 88 bp, Homo sapiens
ctgactacgaagtgctatccgtgcgagaacagctattccacgagaggatccgcgagtgtatttatgatgagctgccgcactacccagg

SEQ ID NO: 36738 - DNA, 110 bp, Homo sapiens
aagaatttaatgtttctggtgttgcgagatggtacaggttatcttcagtgtgtcttggcggatgagttgggagctgagcacataacgacttacacgttcaatactcacaa

SEQ ID NO: 36739 - DNA, 100 bp, Homo sapiens
tggtgtgcattaacctgccgccgcccctcaccagacagatcgctgtcaaaaccctaggattttcttactggagtgcaatgtgagagaagtacgagttgct

SEQ ID NO: 36740 - DNA, 83 bp, Homo sapiens
gatccagcctgcggagcctgtggggcaggccgctacctgtctgaggaacccgagccctacctggcagtctacctgcactcgga

SEQ ID NO: 36741 - DNA, 74 bp, Homo sapiens
cagtcactggtttgcagagtccagccagggtgccgttccttttcactattgtgccattctctgttctacggtcc

SEQ ID NO: 36742 - DNA, 75 bp, Homo sapiens
ggcggccatggtgttgctgctgtactccttctccggtgactgtggccttcccccagatgtacctaatgcccagcc

SEQ ID NO: 36743 - DNA, 90 bp, Homo sapiens
cacggcattccagtgtgtcctcaagtggctggacggaccggtaattaggttggtgatgacaaaactgtgaagcagtggaaaatggatggg

SEQ ID NO: 36744 - DNA, 75 bp, Homo sapiens
gctactaccaatcagccttcgactgggatgatgaaacagccaaggtagatgacattaatgctgataagaatatct

SEQ ID NO: 36745 - DNA, 75 bp, Homo sapiens
cgctagccctgcagacagaggtgtgctgacgacctgctacaacagaaaatttcgctaaggagtttgtgatcagtg

SEQ ID NO: 36746 - DNA, 83 bp, Homo sapiens
atcctgctgggcttcgtccagatcgggaagggtgccagaaccctgtggagcatcatgaactgggaagagtagctgagccccag

SEQ ID NO: 36747 - DNA, 80 bp, Homo sapiens
aacttgtacagagatgtgatgttggagaactatagcaatctggttttcttggacagagtttcactcctgttacccaggct

SEQ ID NO: 36748 - DNA, 90 bp, Homo sapiens
gccgtggttgcggcgcgggaagtttggatcctggttccgtccgctaggagtctgcgtgcgaggtcatgaatgaaaaacttcagcactgca

SEQ ID NO: 36749 - DNA, 98 bp, Homo sapiens
agccggccagccggggggcactgcccgcccgggctctgcagatataatttctacagtagaatttaatcattctggagaattactagcaacaggagata

SEQ ID NO: 36750 - DNA, 100 bp, Homo sapiens
cctcgctgcgctcatggcgtcgcccggggctgtgggacagatgatgtctaccatgttctacccactggtcacctttgtcctcctcctcatctgcattgcc

SEQ ID NO: 36751 - DNA, 100 bp, Homo sapiens
agttaactcggcttcgacaccctcgacttcttactgtccagcatcctttagaagaatccaggttatcttatgatgaggcttttgctatggctaatgatcc

SEQ ID NO: 36752 - DNA, 80 bp, Homo sapiens
accctaaaggatcaaccctctgcatacagtaaagctgaactcacgggaatcaaatggcgtaggtacaattttggagggca

SEQ ID NO: 36753 - DNA, 75 bp, Homo sapiens
ccaagaaaggcactgtctaccttaccccttaccggctattccaatagaaactgctaagcaaaatcctaatgttgc

SEQ ID NO: 36754 - DNA, 100 bp, Homo sapiens
cctgccttcctctctccctctcctcccttctctggaaaagcgaggtgacctcaaagcagaagctctgaattcacctctcatctgacgactgacagctgct

SEQ ID NO: 36755 - DNA, 50 bp, Homo sapiens
aattggaattgggtttacatgagggatagctgggagtatggccaccctgc

SEQ ID NO: 36756 - DNA, 75 bp, Homo sapiens
ccagtgacgttttccacaggcatcaaaatgtggtatgtgtgcaacagagagaaattatgcgaatcactccaggct

SEQ ID NO: 36757 - DNA, 100 bp, Homo sapiens
gcgaatccggcccccgcagcgggacccggggactttgaacatgtcggggatcgccctcagcagactcgcccaggagaggaaagcatggaggaaagaccac

SEQ ID NO: 36758 - DNA, 128 bp, Homo sapiens
tggagtctgcgaaggccgggacccggttccccggcccacagtgggggtgtgcaaacccgagagaactggcaaagctcatcgtggagacggacacctttggaagcagagttcgagtccgaggagccgag

SEQ ID NO: 36759 - DNA, 82 bp, Homo sapiens
ttcgatttggaggacagagactgcaataatagttatgcacgagtgcgagctgtggtgatgacccgagatgactcaagtggtg

SEQ ID NO: 36760 - DNA, 75 bp, Homo sapiens
gacttcggcggcgccacgagagcgggcagcggaggagaccatggtgaatccgggcagcagctcgcagccgccccc

SEQ ID NO: 36761 - DNA, 98 bp, Homo sapiens
cgtcctcaatgtggacgccctgagctcccattaggagccgctggctgcggcagcaggggactagcgtgagagatgagcagcaccagcagtaagagggc

SEQ ID NO: 36762 - DNA, 48 bp, Homo sapiens
aggcctgctcctccgtttgcaagggttatatcctgtgttgtgacctca

SEQ ID NO: 36763 - DNA, 50 bp, Homo sapiens
ccctggaccagcagaaacctagagtgaagctttgcatcgtccctatggtt

SEQ ID NO: 36764 - DNA, 99 bp, Homo sapiens
atctgtcttcggtggactccttcggcagtccacccaccgccgccgcctcccagggtcccctggaagtgacgctgactcagccagtgaggagcgggcctg

SEQ ID NO: 36765 - DNA, 83 bp, Homo sapiens
cggcagaagcttcaccacaaaagcgaaatgggcacaccacagcaaaagtactttgactcaggagactacaacatggccaaagc

SEQ ID NO: 36766 - DNA, 100 bp, Homo sapiens
ccggaattaagaaaacagagcgacgagcaagaagcagcccaaagtcgaatgattcagacttgcaagatacagaattcgttgttgggaaggactggggaaa

SEQ ID NO: 36767 - DNA, 142 bp, Homo sapiens
catcactgttgctggaggcacctgacaaatcctagcgaatttttggagcatctccacccaggaacctcgccatccagaattggaatcgaagcctcttaaaatggcagatgacttggacttcgagacaggagatgcaggggcc

SEQ ID NO: 36768 - DNA, 100 bp, Homo sapiens
tttgcatccaaccgaggcaactgtgtcatcaggagcctcctctggcatcattgacctcttgccatcccctagcgctgccaccaactggactgcaggactg

SEQ ID NO: 36769 - DNA, 83 bp, Homo sapiens
ggaaatcgtgcacatccaggctggtcagtgtggcaaccagatcggtgccaagaggaggaggtggaggaggaggaggatggaga

SEQ ID NO: 36770 - DNA, 100 bp, Homo sapiens
gaagaaggagatgaggaaaatgatccagactatgacccaaaggtgctgctgatgtagagaaggtggaggaaaagtcagcaatagatctgacccctattgt

SEQ ID NO: 36771 - DNA, 82 bp, Homo sapiens
tttaagaaagaagatgttaactttcagtggtgatcatgtgtgcgagcagtgacaccatccggagcatcatgctggtggcgca

SEQ ID NO: 36772 - DNA, 50 bp, Homo sapiens
ctcgcgtccggagtccccgtggccagcaacccaaggagatctgtgcgctg

SEQ ID NO: 36773 - DNA, 95 bp, Homo sapiens
cgggcgcgggatccagccaggtgggagccccgcagatgaggtctctgaagggcaaacctggtggacctgcagaagaagctggaggagctggaact

SEQ ID NO: 36774 - DNA, 100 bp, Homo sapiens
caagcttaggaccacccaccatgcctatccagctttctctcctttgaaaacactaagaataatgtcactgcatcagtttttactagagccaatcacctgt

SEQ ID NO: 36775 - DNA, 51 bp, Homo sapiens
caacaagtttgcctccttcatcgacaagggtctccctctgttgtccaaggc

SEQ ID NO: 36776 - DNA, 75 bp, Homo sapiens
tggagagacatgtttgacattgcagttaaatggagaaggctcaggatatcaaaaaactccccaggaatgggcccc

SEQ ID NO: 36777 - DNA, 82 bp, Homo sapiens
cgcctcttggtttgcgtcctgcactgaaaggaaatgacggattttgacacattcagctaacgtattttagcaggtggagtga

SEQ ID NO: 36778 - DNA, 75 bp, Homo sapiens
gctgtcttccatgatgaaacaggtaacagtgatgatgtcaaatgcttttgctgtgatggtggactcaggtgttgg

SEQ ID NO: 36779 - DNA, 98 bp, Homo sapiens
ttccatcaaaaagtgattaagcagagaatggagaagaaggttgattccaggtcatactccctgtcacaaactccagctgaactaacttggaggaggat

SEQ ID NO: 36780 - DNA, 83 bp, Homo sapiens
aggagagcccacaggtgctaaagagagcagtaccctgatggagtcccttgcaggaagctcttcgtgggcggtcttgactggag

SEQ ID NO: 36781 - DNA, 129 bp, Homo sapiens
cgatcctgtgttagaccttccactgccaccaccacctcctgaacctctctctcagagacgagttgtactgctgtcacaggaaatggacgctggattacaagcatggcagctcaggcagcagaagttgca

SEQ ID NO: 36782 - DNA, 78 bp, Homo sapiens
agatgatacctttgatccagaacttgcagcaacaataggtgttgactttaaggtgaaaacaatttcagtggatggaaa

SEQ ID NO: 36783 - DNA, 100 bp, Homo sapiens
ccgagagcagaatttgcccaggggaaacctcctcagtatgtccgtggttcagaccctgtattaaagcttttggacgacaatgggaacattgctgaagaac

SEQ ID NO: 36784 - DNA, 75 bp, Homo sapiens
gcaatgcagcagaacgcagggggcctctgtaaggcacatggaggtggtggcagtggtggtggtggccgaggagga

SEQ ID NO: 36785 - DNA, 82 bp, Homo sapiens
tccaggtggccatcaaagtgattccccggaatcgtgtgctgggctggtcccccttgactcaaagtcctctggctcacagcct

SEQ ID NO: 36786 - DNA, 75 bp, Homo sapiens
gtatactcttcacaggggagaaactgaagccaaaattagaaaacgtcattgctttggaacagaagtacacaattt

SEQ ID NO: 36787 - DNA, 90 bp, Homo sapiens
ctatcataccacactcttcagcgaccacgcaggcactttcccggtccccaggtggatttagttttggagaaggaggtggctggcctctgg

SEQ ID NO: 36788 - DNA, 75 bp, Homo sapiens
ttttggcaggtttgggagctgagcgaccagaaacagttgctgatcccacaccctttcatattcaagctgaagtga

SEQ ID NO: 36789 - DNA, 82 bp, Homo sapiens
ttggactgagtcctgcaggacacagttaagatcccagatgcagcttttattcaggcagcccgcagaaaacgtgaattggcca

SEQ ID NO: 36790 - DNA, 100 bp, Homo sapiens
tgtacggaagtggccacagggggctgttcctcagctcccaccctcagcccctgccactagtgagatgaccacggtactggtgtggcatactcggacagag

SEQ ID NO: 36791 - DNA, 95 bp, Homo sapiens
acatccttactggttgcctaattttatggatgtcttcacgtggtctttaccgtttgttggagaaaaagacaaaacctgctacaaccccctcttca

SEQ ID NO: 36792 - DNA, 75 bp, Homo sapiens
gtccatgcctcttaagaactcttttcgaggaactatccggcactggtgaggtggattgatgatgaatcttctggc

SEQ ID NO: 36793 - DNA, 74 bp, Homo sapiens
tttgagtatcagcaggtggcctttcagccctccatacttactggctttgaattgtattccatggtgccatctat

SEQ ID NO: 36794 - DNA, 100 bp, Homo sapiens
ctttatgatccccacctgggttctggtggacctctcggctttcctggtcagcagcgacttgttccttcctgtgtacagcccttctgaggaggagaagagg

SEQ ID NO: 36795 - DNA, 75 bp, Homo sapiens
gaaagccaagaagggaatgctgaagggcttgggagacatgttcaggtaagaatgattgatgttggctgatattgg

SEQ ID NO: 36796 - DNA, 74 bp, Homo sapiens
tgcagctgcctcagttcttagcgcagcctctccgcaggggagaagcccggcttcctggccccccgggacctccc

SEQ ID NO: 36797 - DNA, 100 bp, Homo sapiens
gcgctgcgggagctgggcttcccgtacatgacgccggtgcaggagaaccgcctggcccagcacaccctccaggccctgcagagtgagctggacagcctgc

SEQ ID NO: 36798 - DNA, 75 bp, Homo sapiens
gctacagttagagtctgaagttgttaccaatggtgaaactacatgttcagaaaaattctggggagacattgccaa

SEQ ID NO: 36799 - DNA, 50 bp, Homo sapiens
tgtcaatcgcttgccccagcacaggtgaaatgacaatggatgctctgttg

SEQ ID NO: 36800 - DNA, 90 bp, Homo sapiens
gctgcccgcctgccgccgcccgcctccgcctgccttctgccgccggccggcgcgtcgtccccacagaaatgtctttcctccaggacccaa

SEQ ID NO: 36801 - DNA, 74 bp, Homo sapiens
gtctactctgatgtcaatcttgagggctagatacctcttccaaatgcatgatgaagatgttctcatcaacagga

SEQ ID NO: 36802 - DNA, 83 bp, Homo sapiens
gggatgcctggaatagaagagaatgacctagcaaaagttgatgatcttccccctgactacgcgtttgttcacatggagaagga

SEQ ID NO: 36803 - DNA, 90 bp, Homo sapiens
gacctgcgtcctttttcgtttttcggatgatgccttcaatactacctttatttccaccataggtatatgaatgacctaaaggtacaaata

SEQ ID NO: 36804 - DNA, 86 bp, Homo sapiens
agccgagccgagctgggggcgcagagcgcgggaggcggcggcggcgcggagcccagtcctgacacagctctccctgaggagcagcc

SEQ ID NO: 36805 - DNA, 75 bp, Homo sapiens
gggggccgtcctgaggagcctcctggcctgcagcttctgtgtgctcctgagagataagtatgctgtgcgcttcat

SEQ ID NO: 36806 - DNA, 76 bp, Homo sapiens
gaacttctgcccagctctccttggctaaggcagctggataagcacagccaggccacagcccagcagctggtgcagc

SEQ ID NO: 36807 - DNA, 98 bp, Homo sapiens
ctgctgctacgaatgggagagtgtcttcatcttacccagtggaacctaagaaattaaattctccagctgactggaaataccggcatgcaggattgatg

SEQ ID NO: 36808 - DNA, 97 bp, Homo sapiens
tgcaacttcaagtagtggaaggagtacagggaagtctataagctttgcaacagaattacagagtatgatgacgcacaagaccagccactgctaccgc

SEQ ID NO: 36809 - DNA, 100 bp, Homo sapiens
gactgctaaagtgagagtgaccaggcttgttctggatccctatttattaaaggacagtcattttgtttactcattcagccctgttgcaggtcccaataaa

SEQ ID NO: 36810 - DNA, 75 bp, Homo sapiens
tgaaagaacactttgcacagttcggccatgtcagaaggtgcattttaccttttatcaatgtccgagttaccacca

SEQ ID NO: 36811 - DNA, 90 bp, Homo sapiens
tggatatctgtgataaagttggtcagtctcgcactggtgtttctacacctgtgggttatgacaaagacaactgccaaagaatcttcaaga

SEQ ID NO: 36812 - DNA, 100 bp, Homo sapiens
gcttactcccggtgccaggttcttggagctgtgagtacatcgcggtgcacgtggtcccggaccagctcatggccttcggcggctccagcgagccgtgcgc

SEQ ID NO: 36813 - DNA, 75 bp, Homo sapiens
cctcccgagtggctgggattacaggtgaccagcacccatgcagaaactacctagaagttgccaagctatcagtca

SEQ ID NO: 36814 - DNA, 75 bp, Homo sapiens
cggagactttggggcctaactagatgtctttggtggacttgggaaagaggttgctagaagcagcaagaaaaggcc

SEQ ID NO: 36815 - DNA, 82 bp, Homo sapiens
atggatagaaattttaaagactgttgtgaacagggatgtacctaataggcaaggtcttgctatgttgctcagactgatcttg

SEQ ID NO: 36816 - DNA, 83 bp, Homo sapiens
cgacaagccgctggcagccgcggatctcaccgccgctcagggattatatctgtccaagatgcgagtctggttttatcgaggag

SEQ ID NO: 36817 - DNA, 82 bp, Homo sapiens
cgctatgtggacattgccatcccatgcaacaacaaggccacgcccagatttcttctaccgctgcttccctgatgggctagcc

SEQ ID NO: 36818 - DNA, 100 bp, Homo sapiens
ctgaggagttctttctcaagtggccagcagccggcttcgagctcccagcctttgatccgattcatgatgttgctatcaaaagttgagaaattgtcagaag

SEQ ID NO: 36819 - DNA, 51 bp, Homo sapiens
gttgaatccttgcagcactaaaatttggcagtatttggcagtcgtattcag

SEQ ID NO: 36820 - DNA, 100 bp, Homo sapiens
gttttctgaagatgaggctctttgtgttgtagacttgctaaaggagaagtctggtgtaatacaagatgctttaaagaagacggagtctcgctctgtcgcc

SEQ ID NO: 36821 - DNA, 90 bp, Homo sapiens
ctcacacttcagaatagagaagacacgctctttactcagggaatatagcacatctatagctacgagaggtgtgatgcattccaacaaagc

SEQ ID NO: 36822 - DNA, 80 bp, Homo sapiens
gattccacccaaacttgctggtcactgggagggcaccgaagccaaagcactgtccatgccggagaagtggaagttgagcg

SEQ ID NO: 36823 - DNA, 100 bp, Homo sapiens
tggagacccacgacacggacaaggagcacaagtgcccacactgcgacaagaagttcaaccaggcaagtagcctgcagtatgaaatgctgctgctgacgga

SEQ ID NO: 36824 - DNA, 100 bp, Homo sapiens
attctgaaaatgtgcatatttcaggagtgtcaactggtactgcatcagtaattctctggccactctctttggaatccagctcacagaggctcatgtacca

SEQ ID NO: 36825 - DNA, 100 bp, Homo sapiens
gtcagggccccgtccgcgtgacgctcctgcctgcgcgcggccaagccatgctcggccccaggcaggaatttgtggatgcttatgtgaattatgtcttcca

SEQ ID NO: 36826 - DNA, 100 bp, Homo sapiens
cagacaagttccatcccacctttgagtcagatcatggaagggaagtggttgctgtgtatgttactggtgcttggaactgctattgttgaggctcatgatg

SEQ ID NO: 36827 - DNA, 80 bp, Homo sapiens
attttagggtcctttatatagaagggagagtagttacatcttccggcccagctgtactcgcctggggcagtgggccatcg

SEQ ID NO: 36828 - DNA, 97 bp, Homo sapiens
caaagagaagaaaggcctggagagtcgtgcggacagcattgggagcggccgagccatcccaattaaacagtgtcctctcgcatggcagagcaagtgg

SEQ ID NO: 36829 - DNA, 100 bp, Homo sapiens
cccacttgtgctgcaggagtgtgtcagtgatgatggtcggatccgcacaagacggcaaagctctgggagtgccaccaacgtcgcctctacacctgataac

SEQ ID NO: 36830 - DNA, 100 bp, Homo sapiens
ctggctaccgaagtggagatgcagtccccatgtgagagcagcagaggcggtcttcaacatcctgccagccccacacagctacagctttcttgctcccttc

SEQ ID NO: 36831 - DNA, 74 bp, Homo sapiens
gcgattcggtgaagcgattcctgcaggcgttggttcccctctttgacctgacggttacctggcacgctggccac

SEQ ID NO: 36832 - DNA, 74 bp, Homo sapiens
acccctacgggaacccacgaccattatatgctggaatggttccttgatcagggagcttccaaggcatttgatac

SEQ ID NO: 36833 - DNA, 100 bp, Homo sapiens
atcatggacaccagccgtgtgcagcctatcaagctggccagggtattggcaagcttgccagtgtacctgctggtggggctgtagccgtctctgctgcccc

SEQ ID NO: 36834 - DNA, 75 bp, Homo sapiens
cagaaatgcctttgcttgctttgatgaagaagcaactggcatgtcgggccccaggcctgtggtgctgagcgggcc

SEQ ID NO: 36835 - DNA, 51 bp, Homo sapiens
gccaagttcatatcctgctggtttaacaggaaccgcggggaaaggcgaatg

SEQ ID NO: 36836 - DNA, 82 bp, Homo sapiens
cttctccactttcgccagcccgtgccgcgagcgcggcctgcaggaggatgaaacaggcgcctatttaatcgacagagacccc

SEQ ID NO: 36837 - DNA, 100 bp, Homo sapiens
gccaggtgcgcagcgagcgctccgagcggcgcgcaccaggcggatgccccagccggggcccagcgaacgccaggtgtgggccatgtttgaggattgcccc

SEQ ID NO: 36838 - DNA, 100 bp, Homo sapiens
acctccaattcaattccgaatgatgactggacgaatgaggggccaggcttttatcacctttcccagttctccagcatttggctcaaggccccaagggcac

SEQ ID NO: 36839 - DNA, 83 bp, Homo sapiens
ctctagagcactgtgtgtctccccggacgcgagcccgctcccctgagcggacctacgtgggcgccatgcccgggaagatcatc

SEQ ID NO: 36840 - DNA, 87 bp, Homo sapiens
cttttcggaaggcggctaagtcccggcagcgggaacacagagagcgaagccagggagaagcatgacactggccaacactgcgtccag

SEQ ID NO: 36841 - DNA, 90 bp, Homo sapiens
tcatgaaggaagcaatggttcaggcatggaagcagaagtggcggaagaaaggggagtgttttgggggtggtggtgccacagtcacaacca

SEQ ID NO: 36842 - DNA, 100 bp, Homo sapiens
gagctgtttctcatctttatactcttccaggtttggtgcacctcgatttggaggaagtagggcagggcccttatctggaaagaagtttggaaaccctggg

SEQ ID NO: 36843 - DNA, 90 bp, Homo sapiens
gttgcagttgtgtagtagttaagagacgcccaagcagatggcctgcgatgaagtttagaagaggctctggacatcctgcctatgctgaag

SEQ ID NO: 36844 - DNA, 133 bp, Homo sapiens
ccgattccttcatggatccggcgtctgcactttacagaggtccaatcacgcggacccatgtccacaggatgaaatgtccgagtcaggccagtcctcggcggccgccacacccagcaccacaggcaccaagtcc

SEQ ID NO: 36845 - DNA, 98 bp, Homo sapiens
gcggcccaaggtgtcccttggcggcgcgagcaggaagaattaaacaaccaccatgtcgagcaaaaaggcaaagaccaagaccaccaagaagcgccctc

SEQ ID NO: 36846 - DNA, 100 bp, Homo sapiens
gcagaatacatcgattgcatcagcaatgtggcgcacgaggcagagaagaagcgtgaggctaagcagcgagctaaggaagctcaggagcgggaactgcgga

SEQ ID NO: 36847 - DNA, 75 bp, Homo sapiens
agaatgagaacatcaccgtggtgaagggcatccgggttgcttatggaaccacagagaacagtcccgtgacattcg

SEQ ID NO: 36848 - DNA, 50 bp, Homo sapiens
tcggatttcaccacaagaagggctgccagttatgaaaaacctcctcctgg

SEQ ID NO: 36849 - DNA, 99 bp, Homo sapiens
caaaagagcagtctcacatgaagaccaatttttacgtctagatttccatgcccatggaaggacagtcattttgtttactcattcagccctgttgcaggt

SEQ ID NO: 36850 - DNA, 100 bp, Homo sapiens
aaccctcactgctggctcagaagatcgaggctcgctttgatgctggagaactaatcacccagagagagctggtctccaggcaggtgagcgacgaccttac

SEQ ID NO: 36851 - DNA, 90 bp, Homo sapiens
ctgtgagcggcgtatgcaaatcgagggtctcggggatgcggatccaagaccctgggaagcacagactggccactcagctctcctagccca

SEQ ID NO: 36852 - DNA, 100 bp, Homo sapiens
tgaccgctgagcccaacactctggaagtgcaggatgacaatgcttctgtgcttgacgtctatttaagtcaactactggattttctgtctggcaaacagta

SEQ ID NO: 36853 - DNA, 51 bp, Homo sapiens
gtggttccatgatgggaagtgacatggactacttccagcaacccagtctcc

SEQ ID NO: 36854 - DNA, 82 bp, Homo sapiens
gctggccctgctggctgatgagaaaatggacccaagtggggtcaaagtgctggaaacagcagaggacatccaggagaggcgg

SEQ ID NO: 36855 - DNA, 82 bp, Homo sapiens
gaacagaagaaaatgatccaggcccagggggatatgagactttctactcggaatatcctgagtgttgcgtggatgtaaaacc

SEQ ID NO: 36856 - DNA, 80 bp, Homo sapiens
ggctatcatatcatgttgcctttcattactacgttcagatctgtgcaggagactccatcctctgccaatggcccttcccg

SEQ ID NO: 36857 - DNA, 80 bp, Homo sapiens
gcggggttagccactgctggctgcttccagtgttcgccgagaggaatactcccccagttgcaagaggcgcaggaccgtgg

SEQ ID NO: 36858 - DNA, 100 bp, Homo sapiens
aatctctgttgcttcatcccaggaaagtctctagtgatccctgaaaagttccagcatattttgcgagtactcaacaccaacatcgatgggcggcggaaaa

SEQ ID NO: 36859 - DNA, 96 bp, Homo sapiens
gggtctcctgcagccctaccagcacctgatctgcgggaagaacgccagcggctcacatgattcattcagctactgggtggatgaaaagtccccagt

SEQ ID NO: 36860 - DNA, 73 bp, Homo sapiens
ggatctcacagctgcagtctaatagtaacacagaggatatgacagcgcgtgatctgctacagcagagatacac

SEQ ID NO: 36861 - DNA, 75 bp, Homo sapiens
caacagacatttatagtatgtccacctgcgtttcaaagtcatcatggtcacaggagaccatccaatcacagctaa

SEQ ID NO: 36862 - DNA, 82 bp, Homo sapiens
tgcagatccgcaggcgcaaggcttcaggcgacccgtactgggcctactctgtttaaggaagaaatctctaaacgttttaaat

SEQ ID NO: 36863 - DNA, 103 bp, Homo sapiens
tattgctgcaatcaggaccattgcaataaaatagaacttccaactactggttggatggcaagcatgtggtgtttggcaaagtgaaagaaggcatgaatattgt

SEQ ID NO: 36864 - DNA, 90 bp, Homo sapiens
agcacagccccgaggtgtgcgaagccaccaagggtcttgctcctcagaacaaaccagaattgcagaaggtgatggaaaaaagaaaacgag

SEQ ID NO: 36865 - DNA, 100 bp, Homo sapiens
atcaggacatggagtatgaaagacgggctgacgcgccactatgtagcgggtttcgggcgggccacgcgtgcgggacaggaacccaaccccagccgacctt

SEQ ID NO: 36866 - DNA, 75 bp, Homo sapiens
gactcacccagtgatatagctgagatcagacttgacaaagtggttcctttaaagatggagtctcactctgttgcc

SEQ ID NO: 36867 - DNA, 90 bp, Homo sapiens
atcaagtttgccaagaaacagatgatgctaatacagaaagctaaatcaaggtgtacagggttatgatcatagctactacttcattgcaac

SEQ ID NO: 36868 - DNA, 100 bp, Homo sapiens
gttaaggattccaagtaactcttatttggctttgatgcggcctggaagaattgatagaatcatctatgtgcctttaccggatgcagcaacaagaagggaa

SEQ ID NO: 36869 - DNA, 90 bp, Homo sapiens
cttgctacaatagcagattctaatcaaaatatgcagtctcttttaccagcacaatggaagagttaatagttgaacttcgtctctttcttg

SEQ ID NO: 36870 - DNA, 74 bp, Homo sapiens
gccgggaccggctgcagagacaggcgttcgaggagatcatcctgcagtatgaagtacaacttgccttcctggtg

SEQ ID NO: 36871 - DNA, 88 bp, Homo sapiens
attctggaagcgcagcaacagcaagctcccgggcagtgaggaaattaaagttcagccaagtcagttcagagaatctgtagaagcaatt

SEQ ID NO: 36872 - DNA, 85 bp, Homo sapiens
gccggctccatggcgaccgggctcggggagccggtctatggactttccgaagacgaggaacaagcacatcatgattgacttgggg

SEQ ID NO: 36873 - DNA, 82 bp, Homo sapiens
gtgccctgcacctgcctcttcccccattctcagatttgcctcaaagggcactgcaaaaattgaacagaggaatcccaaggaa

SEQ ID NO: 36874 - DNA, 100 bp, Homo sapiens
cgtggagagagatttccagtggacggacaacaccgggctggatgctttcattggatttggaggaaatgtgatcaggcaacaagtcaaggataacgccaaa

SEQ ID NO: 36875 - DNA, 100 bp, Homo sapiens
tgaaattcggggattagaatcagctgttatatatggcagtctcccacctgatgtgttcagagcaacattgttttgttgacacaagcatttagaagaaagt

SEQ ID NO: 36876 - DNA, 82 bp, Homo sapiens
cagcgatgctgaggatcgaggaacgttgtctgcatttgacattgtgcagcaaagaaatggttatggagaagcccagtccgct

SEQ ID NO: 36877 - DNA, 50 bp, Homo sapiens
ggatatctctactcgctccaaaggagaatgtactactcatcacctcccac

SEQ ID NO: 36878 - DNA, 100 bp, Homo sapiens
gcctgttcagtactgtgggtgatatttgcctttagtgcactcttctccttcacagtaaagtggctggtttctaagcatgaattgaggaacagaagaagca

SEQ ID NO: 36879 - DNA, 75 bp, Homo sapiens
atcaacttttattttaagcttccacgtgtgagtgagaacatcacaggcgcattctacattctaaaggggagctca

SEQ ID NO: 36880 - DNA, 100 bp, Homo sapiens
gaattctgcatgccccagatgctggctggggaaatctggtgtatgttgtcaactatccaaaagatttggagcaagaggtggtggtggccttcccccgaag

SEQ ID NO: 36881 - DNA, 80 bp, Homo sapiens
cgggcccacctccccaccaaggaagcaaattgtggctactaatttgccccctgaagatcaagatggctctggggatgact

SEQ ID NO: 36882 - DNA, 100 bp, Homo sapiens
aatgaggaacagggcaatagtatgatgatgctgcattcctggcccgagagaaagcgaaagcagatgctgaatattatgctgcacacaaatatgccacctc

SEQ ID NO: 36883 - DNA, 100 bp, Homo sapiens
gaatatctggttttgtctctgctgggcctgtgtgcctggaaaggaattgttttggcctaggatcatccaggtgtaccttccggtttcccagcacggccat

SEQ ID NO: 36884 - DNA, 127 bp, Homo sapiens
gagtgggcgcggaggcgaccgccatggcgttcctcaaactccgtgaccagatccaggaggctgcaagccagggcctgaaattcgttggtgttatacctcagtaccattcctctgtgaactcggcagg

SEQ ID NO: 36885 - DNA, 76 bp, Homo sapiens
ctggcctgccctccatgtcggggagctatcgtcgtcttcaaagcatgaataatctttcatttagtgagctatgttg

SEQ ID NO: 36886 - DNA, 82 bp, Homo sapiens
gctggtgccgagcagcggcgccaggagcccgtgcgcggcccgggcagccgcgctttcccaacagggtcttgctctgttgccc

SEQ ID NO: 36887 - DNA, 83 bp, Homo sapiens
ggcgctagcgttcgccttcagccaccatggggaatgggatgaacaagaactttcacgatggccgtaaagcacagcagcacatc

SEQ ID NO: 36888 - DNA, 50 bp, Homo sapiens
aaccccgcctcttacagtcacgaggagctgtaaaattgacaagcttggca

SEQ ID NO: 36889 - DNA, 95 bp, Homo sapiens
gacacctgagtttacgtctcttccatctgctgctcacctcagctgcctgggtccccgacgagagccagctgcggttggatttctcacgatgtcca

SEQ ID NO: 36890 - DNA, 75 bp, Homo sapiens
gagaaagcacaaagcatggagaccctccctccaggtttcaagtgccccatttgctccaagtctgtggcttctgac

SEQ ID NO: 36891 - DNA, 100 bp, Homo sapiens
ggctccctgttcttccgatttgtcagcactctgatcgattcacacccagacattgccagaagttatagaccttactcatgataacaaagatgatcttcag

SEQ ID NO: 36892 - DNA, 87 bp, Homo sapiens
cgggggccctggccctgacccagacctgggcgggtcaaaatgcagatcttcgtgaaaacccttaccggcaagaccatcacccttgag

SEQ ID NO: 36893 - DNA, 100 bp, Homo sapiens
ttatttccaagatggtgacttctacgaaaaagccctggtggagctgaaggttgcagggtaaaccccagacattggctgtcaaacgcaaggctgactctga

SEQ ID NO: 36894 - DNA, 101 bp, Homo sapiens
tttgtgtcctgagatcaaatggcacttcattggccacctacagaaacaaaatgtcaacaaattgatggtggaatgcagtagccctctgggcctgggatatt

SEQ ID NO: 36895 - DNA, 98 bp, Homo sapiens
ctcgaacccagaagctgcagcaggaacttgaggctgccaatcagaagctgagcgttcccagtggattctcggtgactgccccagaaaagaggggctgg

SEQ ID NO: 36896 - DNA, 100 bp, Homo sapiens
cggatgcggagcgcggtgctgccggtggagcttcagggcactgtttgaagaagcaaacatggtagcatcaagcattccttgaaatatggctccaagggaa

SEQ ID NO: 36897 - DNA, 103 bp, Homo sapiens
acacctggagcaacaacctggcggtgctcgagtgcctgcaggatgtgagggaggctgatcttacagaagcagtggaaactgcatcttcagaaggtctacatgt

SEQ ID NO: 36898 - DNA, 75 bp, Homo sapiens
tgtcagtccaatacagacctcagcttccccattatttcgaggaaggaaaggagctagtcaacaaagggaaagttt

SEQ ID NO: 36899 - DNA, 75 bp, Homo sapiens
aagtgacacagtacaagaagggcaaggattctctgtacgcccaggtgagggtcgctgtctgcccattgatagagg

SEQ ID NO: 36900 - DNA, 89 bp, Homo sapiens
cgaggcacaaggcacaacaggctgctctgggattctcttcagccaatcttcattgctcaaaataacctgaatctgctcagagacctggc

SEQ ID NO: 36901 - DNA, 51 bp, Homo sapiens
tcatatcctgctggtttaacaggatgtgctgggtggcgtcctgatcaccgc

SEQ ID NO: 36902 - DNA, 100 bp, Homo sapiens
acttgttttccagtgtgatcttacccttaaagctgccttttcagatattaatggcaaagttcagaccattgttttgacatctggtacattatcaccaatg

SEQ ID NO: 36903 - DNA, 82 bp, Homo sapiens
tgaacatctgaatcccctcggggaactgaggcttggccttcgtgcctctgcagatctggtccaaagtcctggccatctcagg

SEQ ID NO: 36904 - DNA, 74 bp, Homo sapiens
aaaagagctgaaattcagggaaagggcctactctaggtgcggtacttcactatagtttataaaagatggtccct

SEQ ID NO: 36905 - DNA, 90 bp, Homo sapiens
cttaatgaggaaatatcaagaacatgaagatgttcctatttgtattcattgcagaaacagggaaacagccttgcagctgaggactggtgt

SEQ ID NO: 36906 - DNA, 95 bp, Homo sapiens
tgtcgtcttgtgccttttcttgttcctactgtaaaggagatgggttagatgttattggttcgagtgagtaaaaactaccgatcagtcatcagagc

SEQ ID NO: 36907 - DNA, 90 bp, Homo sapiens
cgagcccggtccccgccggcaccatgcacccccccaggcagcagcagcagttttcatctctggatgacaagccccagttcccaggggcct

SEQ ID NO: 36908 - DNA, 89 bp, Homo sapiens
cggagctttcgcagctggagaaggtgattgtctgacaagcagaggcatgagctgggtccaggccaccctactggcccgaggcctctgta

SEQ ID NO: 36909 - DNA, 50 bp, Homo sapiens
gccgtggctgaggtgaagagctttcaagtctctatttatgaggtggacaa

SEQ ID NO: 36910 - DNA, 83 bp, Homo sapiens
gccaaaccaggttgcatttcctgaaggggaagagcaagatgcagtcagtggagttgtcccttcagggtttctcagaacagcgg

SEQ ID NO: 36911 - DNA, 75 bp, Homo sapiens
cctggcgctggcgctggccaaggctggtgtggtaactgcagccacaagtctgatcaccactttagcacagaagaa

SEQ ID NO: 36912 - DNA, 99 bp, Homo sapiens
cagcagcccagacgcggcacagagagggcctgggagcttgctgcagcttcagtagccacgatggaggtgatgaacctgatggagcagcctatcaaggtg

SEQ ID NO: 36913 - DNA, 75 bp, Homo sapiens
tgcagggcggtaaggatttcaacatgcctctgacaatctctagtattctggacaatcaggaagtccaagccacaa

SEQ ID NO: 36914 - DNA, 75 bp, Homo sapiens
ggctggtctcccctctgctgggccgctacctgtctgaggaacccgagccctacctggcagtctacctgcactcgg

SEQ ID NO: 36915 - DNA, 98 bp, Homo sapiens
aaggaaaacaagaggccccagagggaaaagaagcccaaagttttaaaggcagaactcacagtttggagatgaaaaaacatttagtgattcatcattgc

SEQ ID NO: 36916 - DNA, 51 bp, Homo sapiens
ctggtggctccgcggattataacagccaagaagtatgatgcgtttttggcc

SEQ ID NO: 36917 - DNA, 76 bp, Homo sapiens
gaagaactggaacacgtagaaagtgcaagcaaaggcagtatttggcagtcgtattcagagataaacccctggagct

SEQ ID NO: 36918 - DNA, 83 bp, Homo sapiens
tggtggccaagtatgcgcccagcggattctacattgcctccggaggcatgaatgctttacagttgcagaacctggcgacgctg

SEQ ID NO: 36919 - DNA, 96 bp, Homo sapiens
cgtccctcaaaccttgcttctaggagataaaaaggtatctcgggggagctttgtgccttgatggatcaagttcatcatatgcagcactcaaaatgg

SEQ ID NO: 36920 - DNA, 96 bp, Homo sapiens
acgtctggaagccaagtatgccccgctccacctggtccctctgatcgagcggctggggacccctcagcaacagaagaaccttgaaggctatgtggg

SEQ ID NO: 36921 - DNA, 125 bp, Homo sapiens
tttggatcctcatttggccaagcacttagcgcattttggaattgatatgcttcatatgcatggggttggattcagatgccgaggacacagtacttcctcagaaagaagacagaatttgcaaaaga

SEQ ID NO: 36922 - DNA, 95 bp, Homo sapiens
caactgccaagcatgtagaaagccggaacaaaagctgatgaagcattgaaagccaaagaaagaaatgaggaagaagcaaagagaagaaaggagga

SEQ ID NO: 36923 - DNA, 98 bp, Homo sapiens
gtgaggaggacggtctgcatactcgctgcccgccggctccctcccccgcgtccctgcgaccgccgcggcgaagatgatccataatgagatggcatcaa

SEQ ID NO: 36924 - DNA, 80 bp, Homo sapiens
ggaattctaatttgaaccatgtttggattgaagccgcctctgtattacttaccaggaaacatactggggagaaacccttt

SEQ ID NO: 36925 - DNA, 100 bp, Homo sapiens
caggctggacccacgtctgtctggtgataccaggggcagagggaccactctgacaggcaagcacgaggagcggcaggacgagcatggctacatctcccgg

SEQ ID NO: 36926 - DNA, 50 bp, Homo sapiens
gtggtgaattcaacacttccacagcttcatggagtttggccacaagatgt

SEQ ID NO: 36927 - DNA, 100 bp, Homo sapiens
ttggttcttccacctctgccactaattcgacatcagtttcatcgaggaaaggccctggccaacgtcaacattgggagcctcatctgcaatgtaggggccg

SEQ ID NO: 36928 - DNA, 100 bp, Homo sapiens
ggaacagcctatgtgggcttccacggaggaagctgtgctgaatggtttggtggccactgaggtgttgatgtggttttatgtcggagagattataggcaag

SEQ ID NO: 36929 - DNA, 100 bp, Homo sapiens
ggacaatgcaaaataaagcaaggctggaactggcagattatgaagcacttccttcaaaatgtctactgttcacgaaatcctgtgcaagctcagcttggag

SEQ ID NO: 36930 - DNA, 50 bp, Homo sapiens
cctgcggcctcctcgcaaaacaagatagaaaatgctgctgaagaacctag

SEQ ID NO: 36931 - DNA, 74 bp, Homo sapiens
gagaaaaggcctaagaattttggcattgtcctgaggctttctaccaatgcaggccagtggaaggaagcagctag

SEQ ID NO: 36932 - DNA, 50 bp, Homo sapiens
cgcggatgtcggcgaagagttcaaccaggccaggtcagagcagcccacca

SEQ ID NO: 36933 - DNA, 51 bp, Homo sapiens
atgctgtatatgtgagagagaatattcaggaagccattaatttgctagaac

SEQ ID NO: 36934 - DNA, 75 bp, Homo sapiens
gtgtctaggtgagtcgcggtgggtcctcgcttgcagttcagcgaccacggttctggaggacacgtgccggcggca

SEQ ID NO: 36935 - DNA, 75 bp, Homo sapiens
aagtgcttcctcaacggggtgaagatcccccacgtggtgcggctcaaggtctcctctgagcctccggcctccata

SEQ ID NO: 36936 - DNA, 80 bp, Homo sapiens
ttgcccatacattgttcagttttatggtgcactcttcagagaggctcggggcccccagttcccgccccagacctcttgat

SEQ ID NO: 36937 - DNA, 100 bp, Homo sapiens
cgatggccgtggccgtggggagaccgtctggttgaagctttgagagaagcagcaactgctgttgagcaagagaaagaaatccttctggaaatgatccaca

SEQ ID NO: 36938 - DNA, 51 bp, Homo sapiens
gccggaccctgaggcagcgagcggcccctccacagggcccctctcctgcct

SEQ ID NO: 36939 - DNA, 75 bp, Homo sapiens
cttgaatcctaatgagcagccaactcataaatttggttagcaggaagaagatgagccttaagtctgaacgccgag

SEQ ID NO: 36940 - DNA, 75 bp, Homo sapiens
tgaccatgcagcaaaagaaggagggtcctctcagtgattaagcaggtattaatctctggagaagacacatccaca

SEQ ID NO: 36941 - DNA, 100 bp, Homo sapiens
ttgaagaaagatgacaccacctttgatgaggcctatatgaacccaatagcaatggcgagatcaaggggtccaatccagtcttcagggccaacaatacagg

SEQ ID NO: 36942 - DNA, 100 bp, Homo sapiens
tgggtttgtcgcaaatgtggatttggggtctgccttgactgttaccggctcaggaaaagccggccacgcagtgatacatatgaaccagatggttacaacc

SEQ ID NO: 36943 - DNA, 80 bp, Homo sapiens
cccggcccacagtgggggtgtgcaaacccgagagaactggaattcaattcgtcataatctgtccctacacagcaagttca

SEQ ID NO: 36944 - DNA, 80 bp, Homo sapiens
aagccagggcctaccggaggcacttcctggggaagtctctggctgatgaacttgctcttgtggatgttttggaagataag

SEQ ID NO: 36945 - DNA, 95 bp, Homo sapiens
ttttaatttcagtgactgaattaaaaggtgtcaagaagctcagaatggacccagatgatgtggtaccagttggccaaagaagagcctggtgttgg

SEQ ID NO: 36946 - DNA, 73 bp, Homo sapiens
gcctcatccagcaggcggtgacccgctaccggaaggccatcgccaagcctgtgggccaaagctgaccaactcc

SEQ ID NO: 36947 - DNA, 100 bp, Homo sapiens
gctcatctcctactgtcccacggccaccgaagaggaaagtccatcagcttgataatggaggagaacaatgactccacggagaacccccaacaaggccaag

SEQ ID NO: 36948 - DNA, 101 bp, Homo sapiens
cttaagtatttccacaagcgtttcccggagcacagggcagcggagatccgatgcttgcacataccacccaggtgttccggtctttcacgatgcattaaagg

SEQ ID NO: 36949 - DNA, 100 bp, Homo sapiens
gaacttttggggaccactgcccagaccaaagtgtgactgtcagtaccatcccactgatatcacgggcccgctcaacctctcagatccctcggtcagcacc

SEQ ID NO: 36950 - DNA, 50 bp, Homo sapiens
aagaggtctacattgagctgtttggaaggaaaatcacctcggcagtgttt

SEQ ID NO: 36951 - DNA, 71 bp, Homo sapiens
aagatcatcgagcatttcaaacgagagcagggctgagggagggctccgaggagaaagtcaaaccaccacgt

SEQ ID NO: 36952 - DNA, 100 bp, Homo sapiens
cacgagtggtgcagctgcgttggagatgatgtctcaggccatgattagaacaagaggaaagtatggggaaggagccaagcaggagacgttcacctttgcc

SEQ ID NO: 36953 - DNA, 90 bp, Homo sapiens
ggaatgctgagaaaacagacagatttgtcatgaagaaactcaatgatcgtgtcatgagagctgagtatgagtttatcagctctggtctct

SEQ ID NO: 36954 - DNA, 131 bp, Homo sapiens
cagaagttcatggatgctgtcaacaagaagagcagttcccaggatctgcataaagaatcctcactatggatgggctcattgaggacattaagcatcggcggtattatgagaagccatgccgccggcgacag

SEQ ID NO: 36955 - DNA, 100 bp, Homo sapiens
tcctcctcaagcgccttgacctcactacatctgctttccactggagtgaccgggcagagatttgttcccgacaaggagttttctggttcagaccgtagac

SEQ ID NO: 36956 - DNA, 100 bp, Homo sapiens
gagctgaaacacggcatgaccctcacctctatgtaccagaattccaacatccagatccaccactatcctaatgggaaagcctctctggggaggaactgtg

SEQ ID NO: 36957 - DNA, 90 bp, Homo sapiens
aggaaattgaagataaaatgaaagggttcagcttcaaagaagacactttgctgttgatagctgagacaggggcaagtgtccgagtggtga

SEQ ID NO: 36958 - DNA, 50 bp, Homo sapiens
aggaccgcgacggcagcagagcaatctgcaggcaggccctgaagtttctg

SEQ ID NO: 36959 - DNA, 75 bp, Homo sapiens
agacagaagtggggagaagcggaggtgctggagaatctggtaaaagcaccattgtgaagcagatgaggatcctgc

SEQ ID NO: 36960 - DNA, 99 bp, Homo sapiens
gatcaggagaaagaagacagccatcatttgaaaggccggagcctcaacagaaagctcctttagttcctcctcctccaccgccaccaccaccaccaccgc

SEQ ID NO: 36961 - DNA, 99 bp, Homo sapiens
gatggctcctgtctatttcttctctctcagagactgcagacttaattcagtgcacaaatgagatgaatgtgaacatcccacagttggcagacagtttat

SEQ ID NO: 36962 - DNA, 100 bp, Homo sapiens
attggtttgatgctcctacctggaacaggacctgcagagaaacgcctcctgattttgtcttacaatggaacttaaaaagtcgcctgacggtggatggggc

SEQ ID NO: 36963 - DNA, 95 bp, Homo sapiens
tcgccggccgagggtggccctaggggcagcgagcaagacagcaagcaggattatatctgtccaagatgcgagtctggttttatcgaggagcttcc

SEQ ID NO: 36964 - DNA, 83 bp, Homo sapiens
ctcagctcctggggctgctaatgctctgggtctctgggaatgaccctgcataaaaaggcagctgaagatagactggcaagcac

SEQ ID NO: 36965 - DNA, 75 bp, Homo sapiens
tgagtgatattgaccatgatggaatgcttgacagagatgagtttgcagttgtggtgtaaattggtccaatgtaac

SEQ ID NO: 36966 - DNA, 50 bp, Homo sapiens
aagaagtgaaattaacttacctggactcagattgatggacaacttttctt

SEQ ID NO: 36967 - DNA, 83 bp, Homo sapiens
gtgtccccaagctccccgtcctcgggatctggcgacatggccagaaaggctctcaagcttgcttcgtggaccagcatggctct

SEQ ID NO: 36968 - DNA, 82 bp, Homo sapiens
ctgatattgaagaggaagaactgaccagagctgatcccgagcagcgtcatgtacccctaatcttgtggaagaagaatgaagt

SEQ ID NO: 36969 - DNA, 75 bp, Homo sapiens
cttcccagtagctggaactacaggtgacccaggcctctctccggtctcacattggagttgtgccccaagacactg

SEQ ID NO: 36970 - DNA, 100 bp, Homo sapiens
cggaggcatcggaggcggctgcgagagtggcagaggagctggcggagagcggcctgcgggcgatcgggccgagaccctatcactccacagggaactggtt

SEQ ID NO: 36971 - DNA, 125 bp, Homo sapiens
gtctagctccgaccggctgaggcggcgcggcagcggagggacggcagtctcgcgcggtgctggagaatctggtaaaagcaccattgtgaagcagatgaggatcctgcatgttaatgggtttaatg

SEQ ID NO: 36972 - DNA, 96 bp, Homo sapiens
ggcggacggcccggatgagtacgataccgaagcgggctgtgtgccccttctccacccagagcctcttagcaaatatccggctgtgatcaatgatat

SEQ ID NO: 36973 - DNA, 100 bp, Homo sapiens
gaagcccccaggtgccaggatctgcccggatccttgcagcttcctctgcctccttggagcccatgtggtcgggcagtaccatgcggcggatggcgcttcg

SEQ ID NO: 36974 - DNA, 116 bp, Homo sapiens
ccgcggcttaaatgatgtattttgtgatcgcagcgatgaaagggatcgcttacacctgagacgaactacagaacagcacgtaccagaggtggaagtccaagtcaaacgcagaagga

SEQ ID NO: 36975 - DNA, 98 bp, Homo sapiens
cgcccgcgggagccgagcgcagccgagggcgagccgcggaacggggccggcgtggagagtaagactttgaccccgacgcaggcttcagtgattgccgc

SEQ ID NO: 36976 - DNA, 89 bp, Homo sapiens
acagataactgaggacaatggacctgcctgggcatagacttccttaagagagatggaaaacttgatgactagctccaccctaccgcccc

SEQ ID NO: 36977 - DNA, 51 bp, Homo sapiens
gccatccctcgaggaagtttcatcaggcgatgacccaggatgcagccaggg

SEQ ID NO: 36978 - DNA, 90 bp, Homo sapiens
gttccttggagtgcagctgtggagcaactggtgaaacagcacctggaaatggaccatcccaaagaagcatgccatagggacattgtgaat

SEQ ID NO: 36979 - DNA, 100 bp, Homo sapiens
ctggaaggtgcgtgtggggctgggtctcggagtgggagacgtggagtgcaggttgaagctgatctgggctatccaggtggaaaggcgaaagtcatccata

SEQ ID NO: 36980 - DNA, 100 bp, Homo sapiens
ggacgtcggcttctccccgcgggagcccccagcatgggtgctggagaatctggtaaaagcaccattgtgaagcagatgaggatcctgcatgttaatgggt

SEQ ID NO: 36981 - DNA, 76 bp, Homo sapiens
cggcgacatactacctctggccccgagatcagaatgccgaatacttcagagagtcagagttgtgccagaagtctct

SEQ ID NO: 36982 - DNA, 73 bp, Homo sapiens
gagaactgcgcagacctggtggaggtgttaaatgaaagctgtgtaaaaagtccagctatagacgaccgccgtc

SEQ ID NO: 36983 - DNA, 96 bp, Homo sapiens
tttcctcccccatctacatcgatctgcggggcatcgtgtctcgaccgcgtcttctgagtcaggtggacccaagagccatatcagtgctagcaaaat

SEQ ID NO: 36984 - DNA, 100 bp, Homo sapiens
ctgggtctcgagggcatcacgctgagtgaaaaagccgctccgcagaggtcacacactggatgtttctagccttcaaaagtatgttcgggaacagattcta

SEQ ID NO: 36985 - DNA, 97 bp, Homo sapiens
aggggcccgtgcatcatctataatgaggataatggtatcatcaaggccttcagaaacatccctgacggggaaatcctttacatttatgcaaagagcg

SEQ ID NO: 36986 - DNA, 75 bp, Homo sapiens
gccgtatcctgactctgatgctgcaggtgcagaggtaaatgcttctcctctttggaatctggcccatgtgaaaat

SEQ ID NO: 36987 - DNA, 89 bp, Homo sapiens
atttgatgtactgctttaaacttaaagacctctttggacccgaaattgtaagggaaagaatatggcaaagctgatgcaagatgggttta

SEQ ID NO: 36988 - DNA, 83 bp, Homo sapiens
gaggacttcgagctgattcagcgcatcggcagcggcacctacggcgacgtctacaaggctgaactcacgggaatcaaatggcg

SEQ ID NO: 36989 - DNA, 74 bp, Homo sapiens
ttggagccgtctgcaaagtgtccccggcaagaaggttatacattggctcttcaaagacgttcacctcatcagag

SEQ ID NO: 36990 - DNA, 98 bp, Homo sapiens
gaacgagtccgagaactggctgaagccgatgaacagcgccgggatccaggaagcctgcaaccggccccacaaattctagcagtgccaagaagaaggat

SEQ ID NO: 36991 - DNA, 75 bp, Homo sapiens
agacaagtgtatggcagtctggagtgaagatggacacaaacggggattcagcgtccgatcctttggaacagggac

SEQ ID NO: 36992 - DNA, 90 bp, Homo sapiens
ggccttggggagctgcgctcggcgggcggacgcggattaagatgttctacgaggagcatttgcacttggacgatgagatccgctacatcc

SEQ ID NO: 36993 - DNA, 100 bp, Homo sapiens
gcaagagaaggcactcaagtttatggtcatcatcagatttgaaatatttaaagtggatacaaaactatttcagcaatgcagacaattaagtgtgttgttg

SEQ ID NO: 36994 - DNA, 90 bp, Homo sapiens
ctcgggcagggacctggagcactgcctgcagggaagtgtcaaggttatcaatactctggctgaccatcatcatcgtgggactgactttgg

SEQ ID NO: 36995 - DNA, 108 bp, Homo sapiens
cgcgtgcccgcgaggagccgccgcgcgcccgcgccctccgcgcgacgccagagaggtggagaagagcgagtacttgagaaagaagaggaagaagatgatgatgaagat

SEQ ID NO: 36996 - DNA, 83 bp, Homo sapiens
gtacaccatgcacaaggtcttccagtttctgaacctagggggatatgagactttctactcggaatatcctgagtgttgcgtgg

SEQ ID NO: 36997 - DNA, 75 bp, Homo sapiens
tgtctcgtgtgtgaacatcacagatttggagcaagaggtggtggtggccttcccccgaagaaatttggtaatcct

SEQ ID NO: 36998 - DNA, 90 bp, Homo sapiens
ggctgttggcgttgatatcagtggcaggtttatgacctcaggaaagtgtttcctgaggttataggcgggtgtttgaggagtacatgcggg

SEQ ID NO: 36999 - DNA, 100 bp, Homo sapiens
cgacgaacatttctgggtgacactcaacaggattcccgaagttcagttctgcaagcaagtatgctgctctctctgttgatggtgaagatgaaaatgaggg

SEQ ID NO: 37000 - DNA, 98 bp, Homo sapiens
gacgccttccttcggaagcgagccaccgtgatggcccgctccctctccccacccccggagctggaagaaagggatgtggccgcatactcggcctcctt

SEQ ID NO: 37001 - DNA, 100 bp, Homo sapiens
tccagtgtccataaacaggagaagacagcacagatgaagccacctaagcctacaaaatcagttttaattcacaggtgttgcaagctgacatgttaagaat

SEQ ID NO: 37002 - DNA, 110 bp, Homo sapiens
gaagacttcaccattttcataaagaaccacatccgtttccccaaattcaacttctccaagtgagaagccctaccactgcaactgggacggctgcggctggaagtttgcgc

SEQ ID NO: 37003 - DNA, 75 bp, Homo sapiens
cacgggatcccagcctcaggcctgcacggacggtgttggttgggtccaagtggtaagaagttcagaagcaagcct

SEQ ID NO: 37004 - DNA, 101 bp, Homo sapiens
cgcagaggtggacaagctggtgcagctgattgagtgccccatcttcacatacaggtggggttctgtctctaatagactgcacattgattgaggagccagat

SEQ ID NO: 37005 - DNA, 98 bp, Homo sapiens
ctgatgagcaatcactttggattgaagatactacaaaatcagtttatcaaatgataagagcacttttgaagaaacgtgtccatactgtttccagctgt

SEQ ID NO: 37006 - DNA, 82 bp, Homo sapiens
ggccggttctgcaccatcttcaggtcctactccaggggcgctcagatgaggacggggacttggttgccttttccagtgacga

SEQ ID NO: 37007 - DNA, 75 bp, Homo sapiens
cgcaatactattgcttccattgctgctggtgtactatcccatgaagctgaggtcttgaagcagctggctgagaaa

SEQ ID NO: 37008 - DNA, 51 bp, Homo sapiens
tttggcttgcaattcatcactttgaaaagcctaaaacaaccaatgttctag

SEQ ID NO: 37009 - DNA, 131 bp, Homo sapiens
ctcgagaatcatggcaccacagacgtgaaatggcatctgtcatctttagcgccaccttatgtcaagactccttaccaagtccacacgactgacgatgacacggaatgcagtctgggccctgtcaaatctct

SEQ ID NO: 37010 - DNA, 75 bp, Homo sapiens
cgggcactgggcgactctgtgcctcgctgaggcaattctgtggtgttcttggtcacacatttatggagtttctga

SEQ ID NO: 37011 - DNA, 95 bp, Homo sapiens
cgctcaagtaccagcagcaccaggagtccctctccgcccagttacaagatagttttgaggcagctgtgccatcaaatagccacattgtttcggaa

SEQ ID NO: 37012 - DNA, 100 bp, Homo sapiens
cgcggagcgcgcgtgtggtccttgcgccgctgacttctccactggttcctgggcaccgaaagagagaagaagaaggaggttcctgctgtgccagaaaccc

SEQ ID NO: 37013 - DNA, 95 bp, Homo sapiens
tggaatgatgatgtctcatatgtctcaggcttccatgcagcctgccttaccgtttccagagtgtggattctttggcatgtatgacaaaattcttc

SEQ ID NO: 37014 - DNA, 82 bp, Homo sapiens
ctggaaattgcgctggaccgtcgccttgctcctcgccgcggcggggactgcagccacgccgcaatgaagagcttcttacagt

SEQ ID NO: 37015 - DNA, 100 bp, Homo sapiens
ctgcagcctatggccactttgtcctggtacctgggctagcttggttcctttccaagtgtcaaataggacacccatcttaccggccaatgtccaaaattac

SEQ ID NO: 37016 - DNA, 90 bp, Homo sapiens
caacaagaaacaggagaacgggaagcctcctgccgagataaagccaccacgtctgattcttgtagacactgtttgggctctgtcatactt

SEQ ID NO: 37017 - DNA, 98 bp, Homo sapiens
ggttccctactcccctgctatccccaacaagaggaaagacacacctaccaagaagccagtcaagcggccaggctttactgcagatggtgcgtgacgag

SEQ ID NO: 37018 - DNA, 75 bp, Homo sapiens
tttagctcatcaaatccgcaacaagcagtgccgcctctactccttaggtctttataacctggcttcactggaact

SEQ ID NO: 37019 - DNA, 82 bp, Homo sapiens
gtctgaaacaattgaggattctagtaatcaagcagcagccagagaatgggaggttgctgctaaaaccttgcctttttataag

SEQ ID NO: 37020 - DNA, 82 bp, Homo sapiens
ctgagaagcctgacataccaggactgcctgagacaagccacaagctgtagtttatgccaacgtgacttcattcatacagatg

SEQ ID NO: 37021 - DNA, 76 bp, Homo sapiens
aaccgagcaaattgaagagacgttaaaatacttccgagtcagtggatcggtggggaaaatgctgcttaccctgggc

SEQ ID NO: 37022 - DNA, 82 bp, Homo sapiens
gggaggagaccggcacccagacaggtggcgacggcagaggaaattcagaaggagctggcggacatcactttagaccctccac

SEQ ID NO: 37023 - DNA, 83 bp, Homo sapiens
tcgcacttctacacacccctgaagacagagagggatttgtcttggctgttactatgacacgggaagcaattgatgaatttcgg

SEQ ID NO: 37024 - DNA, 100 bp, Homo sapiens
gcagctcccacctcgaggctctgtctgcctcagattagcctgaggcctgctcagtcgttcctaatgaataaaaatcaagtgccaaagcttcagccccaga

SEQ ID NO: 37025 - DNA, 83 bp, Homo sapiens
cagccgatccagcctgcggagcctgtggggcaggctcagctatgtgaaccatgcagaggacctggcctccaagctcctacaat

SEQ ID NO: 37026 - DNA, 75 bp, Homo sapiens
ttagccctgctccaggaatgggacctcgagtcactgtgtgataaacaagcaactttgattcctgatgaggtgttt

SEQ ID NO: 37027 - DNA, 82 bp, Homo sapiens
gatgcggccaactccaatgggcctttccagcccgtggtccttctccatattcgagcaaaatgatgcttcaacacccaggcca

SEQ ID NO: 37028 - DNA, 127 bp, Homo sapiens
ggggcggaagaaaatacaaatcacacgcataatggatgaaaggaaccgacaggaatgaatctgaagtctgctgcagtaaaacacagaaggctttaaaatgttttcttgcataaaattcaaaactttt

SEQ ID NO: 37029 - DNA, 75 bp, Homo sapiens
aggaaaaagcccgagtctgatgctaagaagaacataaacaggatgctgaggtttgagaaatttctgtggttcatt

SEQ ID NO: 37030 - DNA, 97 bp, Homo sapiens
taagcagcaccccaaagcaattacacccagaagattacctttgactcttgtcccagaactggcatcaaatactcacaacatagctcaggatctgtca

SEQ ID NO: 37031 - DNA, 51 bp, Homo sapiens
agcgaagttcaggaagagtgacgtggaaggaacagcatatttaagttcttt

SEQ ID NO: 37032 - DNA, 98 bp, Homo sapiens
gaaaaattatgcaggtggtggatgaaaaattggacacagcattgttggttttgccatgtactattttacctatgacccgtggattggcaagttattgt

SEQ ID NO: 37033 - DNA, 100 bp, Homo sapiens
ttccttgccggccggcacttcggctgcagagttttgcccacgcttcgagacttagggagcagaaatcgagctatagcagattatcttcgttcaaatggct

SEQ ID NO: 37034 - DNA, 50 bp, Homo sapiens
cagaaatgagatccgcttcctgcccaacgaatacggcaggagaatgatat

SEQ ID NO: 37035 - DNA, 74 bp, Homo sapiens
tggaccttccggagcttctcagaagacagagggttttcttttgagacatctttccaggaacagcgtgaggagga

SEQ ID NO: 37036 - DNA, 100 bp, Homo sapiens
gatatttttcaggcctctggtgccaaatacattgtcttaacttccaaacatcatgaagagttaatgttctcctcagaggtggaagaatatcctgataaag

SEQ ID NO: 37037 - DNA, 75 bp, Homo sapiens
cggagactgcatcaggctctcgatcaacttccagccagacccagccaggcacaggctgggtccagttctgacctg

SEQ ID NO: 37038 - DNA, 75 bp, Homo sapiens
agatgctgccagggtccctgaagagggaagacacgcggaaacagatggaattggctgctctagaaaaaattaaat

SEQ ID NO: 37039 - DNA, 100 bp, Homo sapiens
cgcaggctgcggcggccgcgggagaggcgtactcggcggcggcggagcgggcggcagagcagggcggcggcgactcggcaatgtgaagtattcatccggc

SEQ ID NO: 37040 - DNA, 100 bp, Homo sapiens
aagcgccgggccctgctgcgggggggagagccactgacgccgggaccgggaccgccgccgccgccgccaccatgaaactggcgatggaatatgagaggag

SEQ ID NO: 37041 - DNA, 95 bp, Homo sapiens
agcagttaaccagagccatccttcgggagaggatatgtagcgaggaggaacgcgctaaggcaaagcacctgggaggagagagcgatggctttttt

SEQ ID NO: 37042 - DNA, 75 bp, Homo sapiens
ctctcgcccaccgcccgaacccgggaatgcatatcagtccacgtgggccaagcgggagttcagattggcaatgcc

SEQ ID NO: 37043 - DNA, 97 bp, Homo sapiens
ggagcctgtccactatgtcctggtgccttttcatgacccaggggagatggccattccattctttacgggccgcctcactgactggattctacaagat

SEQ ID NO: 37044 - DNA, 75 bp, Homo sapiens
agacatccttgggcccccgatgtatgaaatggaggaatatattaaaggaatctgtgaacctgaactagaagaaag

SEQ ID NO: 37045 - DNA, 100 bp, Homo sapiens
agagaggctgttcgcagagctgcggaagatgttaattggccttggtcctcacagctccaaaaagaaacaggatctcgataagctctatgagctgaagtcc

SEQ ID NO: 37046 - DNA, 87 bp, Homo sapiens
cacctgtgacgatgagccagagacctacgtggcagctgtgaaaaaagccatttccgaaggaactaattctgaagcatcaaatgcttc

SEQ ID NO: 37047 - DNA, 74 bp, Homo sapiens
agggtgttctagggacttctgaagaaggatgacaaggagtatgtgggctttgcaaccctccccaaccaagtcca

SEQ ID NO: 37048 - DNA, 100 bp, Homo sapiens
acttgtgaatccaggaagagagactgactgggcaacatgttattcagagttaaacatgaagtttctggagagacagtggtatttcaagggggagctcttg

SEQ ID NO: 37049 - DNA, 100 bp, Homo sapiens
gcaggaagccctcacctttgccaggaactggggggccgactatatcctgatcctaagtgtgaacgtgaagtccccagccctgctgctgagccagttgctg

SEQ ID NO: 37050 - DNA, 100 bp, Homo sapiens
cataaatcctgttcggagtgtttaacagccacagaccctcactgcggttggtgccattcgctacaaaggtttcaccggaagacttttgtgaaaagatgtg

SEQ ID NO: 37051 - DNA, 100 bp, Homo sapiens
attcagcgcatggagaaaggagaacattccatcgtgtacctcaagcccagctgttcctcctcccactgacctgcgattcaccaacattggtccagacacc

SEQ ID NO: 37052 - DNA, 75 bp, Homo sapiens
caccccgcggtcatcggtcaccggtcgctctcaggaacagcagaacccagcgggtgccgcttctccacccgaggc

SEQ ID NO: 37053 - DNA, 75 bp, Homo sapiens
cgcgacaccatcttcgacaacatcctcaaggactccagaagacctttccagattcgtggttgagctgcagcagag

SEQ ID NO: 37054 - DNA, 99 bp, Homo sapiens
atttattgtaaaaagagaacatgcattaacatcaggcacgataaaagccatgttgagtggcccagtcagattctgaggaagatgaacccacaaagaaga

SEQ ID NO: 37055 - DNA, 51 bp, Homo sapiens
ctgcaggttgaatccggggtgcctttagatcgtcagtatttaaacagatca

SEQ ID NO: 37056 - DNA, 118 bp, Homo sapiens
ccgggacccggttccccggcccacagtgggggtgtgcaaacccgagagaactggggatttggacatttggtgccatcttcagaagatccaggagtcctgggaatcgtgtatgactcag

SEQ ID NO: 37057 - DNA, 101 bp, Homo sapiens
actgttcagccaagctcccacggagaagaaagaagctaaccccaagctgaacatggtgaagttcctgcagcctcctgacaaggtgatccgggcgggccccg

SEQ ID NO: 37058 - DNA, 100 bp, Homo sapiens
cccagcaatcacagaagccgacaaggcgttcaagcgaaaacatgaccgctgagcccatgagagatgtgaagatgtttggcttggtatgccatcacctatt

SEQ ID NO: 37059 - DNA, 83 bp, Homo sapiens
atagtggcaggtgacagtctgcatgtgcagttttcaggttgctccgactgtgtgttccaggagtggtggctctgaggtgtgac

SEQ ID NO: 37060 - DNA, 75 bp, Homo sapiens
cccaagtccagaaaccaggtgtcggcttgggaaaccaaaaattacacagagtttaatggcatctgtgaacagcac

SEQ ID NO: 37061 - DNA, 100 bp, Homo sapiens
gtggtcgcgtctcggaaaccggtagcgcttgcagcatggcagatcgggagcggtgccgagaaaaatttccttactagatgacatttcatcgcaatgtccg

SEQ ID NO: 37062 - DNA, 111 bp, Homo sapiens
gccgagatgtccggctgcagcagcaagtcccatcggaggacctccctgccctgtataccgagggaacagcacttttccagccattaactccaggctctcgagaatttgaag

SEQ ID NO: 37063 - DNA, 75 bp, Homo sapiens
ccgatggcgggagctccaggaaagggtctagacagtttcaaagtgaaacagaagttcttcgctggcagccaggag

SEQ ID NO: 37064 - DNA, 82 bp, Homo sapiens
ctaatggtggaaacccacaacggccctgggaggagcggggacactgaggacctctctccaaattggcctctcaactcacagg

SEQ ID NO: 37065 - DNA, 73 bp, Homo sapiens
aggtatccgcactgctcagggctgtccagcagaaggagatcacacagagcccatccacgtccaccatcaccct

SEQ ID NO: 37066 - DNA, 100 bp, Homo sapiens
gcgtgcggccggagaagcggcggtctgagcccgaactggagcctgagcccgagccggaggtgctgggtaggccaggtttcagcatcgcagacaagaagcg

SEQ ID NO: 37067 - DNA, 101 bp, Homo sapiens
aggttaagctggctgtcctgaaatattataaggcggaaaagatagcatctcaaatgataaccgaaggacgtatgaatggatttattgaccagattgatgga

SEQ ID NO: 37068 - DNA, 127 bp, Homo sapiens
ctggactccaaccacaacatggccccacccagtgactggtccccatcctgggtcatgtggctggaattaccacggagattacctggggcaattgatgttatcggtcagactataactatcagccgag

SEQ ID NO: 37069 - DNA, 90 bp, Homo sapiens
tagtactgaaggctcatcatgatattgtacgatttctggtacagttagatgactacagttcttcagtgccctactccacagccaaaacac

SEQ ID NO: 37070 - DNA, 83 bp, Homo sapiens
cggccacagggatgtcttttactataggctatgcccactggaagggccaagtgctgaattcagatgagctccaggagttgtac

SEQ ID NO: 37071 - DNA, 83 bp, Homo sapiens
gagcgcggggcgacgctggctgcagggacccggtgacagcgtgagaggtggctattatcatggaaaactaatttttcccagag

SEQ ID NO: 37072 - DNA, 97 bp, Homo sapiens
caagcagccaaccatgctcaacttcggtgcctctctccagcagactgcggatattagaaatggctactccccagtcaattttcatctttgcaatctg

SEQ ID NO: 37073 - DNA, 74 bp, Homo sapiens
ggaacctccagcagcaggagcagcacttgctggcgctcagacaggctgttcggctcttgaatcccagcgatgaa

SEQ ID NO: 37074 - DNA, 75 bp, Homo sapiens
cgaatctataagaaaggtgatattgtagacatcaagaaggaagaggcccagcagaagggactcgctgagccaccc

SEQ ID NO: 37075 - DNA, 75 bp, Homo sapiens
gggcatcgagaccatcgccaatgagttcagcgaccggtgcaccccaagacccttttgaggacttctttgggaatc

SEQ ID NO: 37076 - DNA, 88 bp, Homo sapiens
ccgagcgccgtccgccaggaagactccctgcctcctgagtcccagatgggtcatcagttaaggaagttgaaacctaccaccggacacg

SEQ ID NO: 37077 - DNA, 82 bp, Homo sapiens
agatttacctgtgagatgtttcatcccaacagtggaggagtctggcgagcatgtgatcctgggcactggggagctctacctg

SEQ ID NO: 37078 - DNA, 100 bp, Homo sapiens
cccggaagctcccggcgtctgcaccccggcagcgcgaggaaatgcccaaaggtacaatgactcttcttgcttttcacctaagttgaataagcaccctgtg

SEQ ID NO: 37079 - DNA, 75 bp, Homo sapiens
gtggcatcccaaggctttgggttttcctctccaaacaaaacagacagcacccaagaaaacctcatttggctcgct

SEQ ID NO: 37080 - DNA, 76 bp, Homo sapiens
cagaccatgactaccttcacctggaacatcaaccacgcccggctgatggcggtggaagaagatatccccatagcga

SEQ ID NO: 37081 - DNA, 101 bp, Homo sapiens
gcgccgaactgctccggttcccggatgtgaagttcatttccaatccgccctccatggtggcagcggggagcgtggtggccgcagtgcaaggcctgaacctg

SEQ ID NO: 37082 - DNA, 75 bp, Homo sapiens
aggcacctcaagcgtgccaaagctacaggacttatcaaactggtttcaaagcacagagctcaagtaatttacacc

SEQ ID NO: 37083 - DNA, 82 bp, Homo sapiens
ggggactgcagtggtgtgctttggacctgtgtacccacccaaggctaaaggcagagccagttggtctcttcccatggcgatg

SEQ ID NO: 37084 - DNA, 100 bp, Homo sapiens
actacacgaggagagttggttttcggctcatcagattcaagagatgtttccccaggttccataccatctggtactgcaggacctccagctgacacgctca

SEQ ID NO: 37085 - DNA, 73 bp, Homo sapiens
gccttttataataaagacacttatcttgcccaagagctggtggcctgattccaccaagagaaggcccaggagg

SEQ ID NO: 37086 - DNA, 100 bp, Homo sapiens
tgaaatctggagtgaagaacgccgccatccagccaccattccaagatgcttgctctgtcaaggcacagcctattgtctcctttgctcagtgtgacatcat

SEQ ID NO: 37087 - DNA, 101 bp, Homo sapiens
cttggatgaagccatacaggctgtgaaggtccagtcattccaaatgaagagatgcctggtagagctgaagtttcctgcaccaggcaagcctggaaattatc

SEQ ID NO: 37088 - DNA, 90 bp, Homo sapiens
cagctggtggaatgcgtccccaacttttcggaggggaagaaccaggaggtcaggcagcagttgagtgaaatgaagagccacgtagaggat

SEQ ID NO: 37089 - DNA, 100 bp, Homo sapiens
cctgtgtgtgacaagaaggctccctatgaatctcttatcattgatggatctcttccgttccctgctggcagttcatcagctggatcagccacatggtggc

SEQ ID NO: 37090 - DNA, 100 bp, Homo sapiens
ccaatctccattaatgtgaagacagtcaaaaaagaacctgaggatagacaacaggcttccaaaagcccttacaatggggtgctgacaaccagggtgcagg

SEQ ID NO: 37091 - DNA, 98 bp, Homo sapiens
atcaaggcatgtttccccaagcaatgaagaatctgagactgagaagcctgtgtctcccaaatcaggaacactgaagagccctcccaaaggatttgata

SEQ ID NO: 37092 - DNA, 100 bp, Homo sapiens
caaagctccaccctccagcacattacccacctgcatcatctggggttccaatgcagtggagcacatgatccagaagaaccaatgtctcttcaccaacacc

SEQ ID NO: 37093 - DNA, 105 bp, Homo sapiens
ttaccgtatgcagtcccccaggatacagggtcaaaggagagcacaaccatcgcagttggaagcccatggggcagccacataaagaagatccctaatagtcatttc

SEQ ID NO: 37094 - DNA, 83 bp, Homo sapiens
ctccccaagaagactgagagtcaccacaaggccaagggctttccttaaagtttcccatgtctcaatggactcctgaatataac

SEQ ID NO: 37095 - DNA, 100 bp, Homo sapiens
cacctctgcgggcccggcggcgtggaccacctcccggtgaagatcctgcagccaggtgagtataggtgcttggagaggataaggaaatcaccctgatcca

SEQ ID NO: 37096 - DNA, 101 bp, Homo sapiens
ctcggtcacaaggaaaatggattcagtttgcatctctccctcctttaaacagcttctccgggtctcagcatggagccaagggagaacccaagacagagaat

SEQ ID NO: 37097 - DNA, 83 bp, Homo sapiens
cggaaccgcgattcggcgtgtcagggggctgaagaaccgaaactaaaatgggaacacatcacaaccctcattgcaagcctcag

SEQ ID NO: 37098 - DNA, 83 bp, Homo sapiens
gtcatcacctcctgggatcagatgtgcattgaggcaagtttgtccagtggaagaccatctacatctcccacaggaagtgtcac

SEQ ID NO: 37099 - DNA, 75 bp, Homo sapiens
ctttgcaacagaattacagagtatgatgttagcatggcctcattgaaagaactagatcaaagactctttgaaaat

SEQ ID NO: 37100 - DNA, 73 bp, Homo sapiens
agcagtgaggaagagctgccgagacggacataagcagctctatgaccaatagcacagctgccagtagaccccc

SEQ ID NO: 37101 - DNA, 100 bp, Homo sapiens
ccaggaagcgcgagaccaggacggcgcgggaactctacgccaacgtggtgctgggaaccacaccttcatcaagcggtccgaggtggaagaagtggatttt

SEQ ID NO: 37102 - DNA, 75 bp, Homo sapiens
gagcaagatcggcagccctaaaggagagtcccgtattctcagagtaaaagttgtttctggaattgatctcgccaa

SEQ ID NO: 37103 - DNA, 88 bp, Homo sapiens
ctttatatagaagggagagtagacaatgactgatgtggtgggtaacccagaggaggagcgccgagctgagttctacttccagccctgg

SEQ ID NO: 37104 - DNA, 98 bp, Homo sapiens
gatgagctaagacgctgtttcagagcgtttgggtcctctgaggccccttgaccagggaaacactactatgaagtatcctgtcatgaccaagggttatg

SEQ ID NO: 37105 - DNA, 100 bp, Homo sapiens
ccactggacgctcatcagagggaagatctttttcctcaattggttgacctgacagttcaagaaaaggagaaatatcttaatgtgtctcgctggttttgtc

SEQ ID NO: 37106 - DNA, 50 bp, Homo sapiens
tgattatggtgctgaaggacaaattccagttggtagctggcagtgttgtg

SEQ ID NO: 37107 - DNA, 75 bp, Homo sapiens
cctgcggtggattgactacggcaaagtggccactcagatgaatgatttcggaatcaagaatatggaccaggtagc

SEQ ID NO: 37108 - DNA, 101 bp, Homo sapiens
gatgaccccgcgtcaccactgtgaggcctacagctctgccggggaggaggaggaggaggaagaggaggagaagaatgacagcccatatcaaggcggtgtat

SEQ ID NO: 37109 - DNA, 100 bp, Homo sapiens
aatgactttactgaagaggaggaagcccagcaaattgtggctactaatttgccccctgaagatcaagatggctctggggatgactctgacaacttctccg

SEQ ID NO: 37110 - DNA, 101 bp, Homo sapiens
ctgcagggacccggtgacagcgtgagaggctgaagccgacgtagcttctctgaacagacgcatccagctggttgaggaagagttggatcgtgcccaggagc

SEQ ID NO: 37111 - DNA, 98 bp, Homo sapiens
ataaagtaagcaagaaagatgagattgaactggctatgcagcagctggaagatctggaagttactgtagctgatcacattcaaaaggtcatgaaactg

SEQ ID NO: 37112 - DNA, 75 bp, Homo sapiens
ggcggcgacagcagagcgcccactgcctccagcaggatgtacagttacccagcacgtgtacctcctcctcctcct

SEQ ID NO: 37113 - DNA, 90 bp, Homo sapiens
ctggacgcttgcatggcgcttgagataaagcatatgatggctttcattgaacaagaagccaatgagaaagcagaagaaatagatgcaaag

SEQ ID NO: 37114 - DNA, 82 bp, Homo sapiens
tcgagcccagcgtcaacttcctcaagtcgcccaaaggatcccatgacagattctgttgtcacgtctccttacagagtttgag

SEQ ID NO: 37115 - DNA, 82 bp, Homo sapiens
agaggtcccaatcccccactctttccgccctaatggaggtctccagtttcggagtccaaaactacttacctggaagaccttc

SEQ ID NO: 37116 - DNA, 101 bp, Homo sapiens
ccagaggccgaactcgggttctgacaagatggccgggctgccccgcaggatcatcaaggttttcctcctccaccaggcgctccacctccatctcttatacc

SEQ ID NO: 37117 - DNA, 75 bp, Homo sapiens
agatggacaagcccatgctgaagcaggccggctctggcgtccacggttgaaaggattgttgacaaaaggaaaaat

SEQ ID NO: 37118 - DNA, 101 bp, Homo sapiens
tcgaagcagcagctctcgctccagaagcttcactttgtaacagatcaactcctagcaatcatgatcggatacagcgtctgaggcaagaatttcagcaagca

SEQ ID NO: 37119 - DNA, 100 bp, Homo sapiens
tgtgaacttggagaaatcctgtgtttcagtggaatgggcagaaggaggtgccacaaagggcaaagagaagcaatatccaaggcagtgtcatctgcaacaa

SEQ ID NO: 37120 - DNA, 100 bp, Homo sapiens
ccactccgtcccccgcgggtctgctctgtgtgccatggacggcaagagtgagccatggagctacgtgtggggaacaagtaccgcctgggacggaagatcg

SEQ ID NO: 37121 - DNA, 100 bp, Homo sapiens
tcgtcttcagctgttcatagcgctgccttggagttttcataagaaattgtccctggaggtgttggatgatcacagcttccttggagcattgcagttgctg

SEQ ID NO: 37122 - DNA, 82 bp, Homo sapiens
ctctttccgccctaatggaggtctccagtttcggtttctgaaacagatcgtgagcttcatcaagagaattcaactggaaaac

SEQ ID NO: 37123 - DNA, 75 bp, Homo sapiens
caggaagcagagtggctatggtgggcaaactaagccgattttccggaaaaagggtttttaatgaccacaacaagc

SEQ ID NO: 37124 - DNA, 75 bp, Homo sapiens
gcaccagattggggatgtcaaggtttggaacaaactctcccttcacttgttgccctgtagcactacagaaaccct

SEQ ID NO: 37125 - DNA, 75 bp, Homo sapiens
ggaaatcctaatgacagtctccaaattcgcctccatctgtaccatggtcgaacaagtaaaattacttgaccgatt

SEQ ID NO: 37126 - DNA, 74 bp, Homo sapiens
gggggcttccccggaatggagggctccgggcccaagtttgaggaggagttttgagagcaaaatgacaacaccca

SEQ ID NO: 37127 - DNA, 101 bp, Homo sapiens
ttggctatctgtccatcacagccaactacacagaccagtgggagagatggtggaagaacccagagcaacattccatgatctacttcttccaccactacgag

SEQ ID NO: 37128 - DNA, 74 bp, Homo sapiens
agacagcccaaatatcctcggaagagcgctcccaggagaaacaagtacaatcacatctagcagtcctactgccc

SEQ ID NO: 37129 - DNA, 75 bp, Homo sapiens
tttgaagacaaagagtggacatttgtcatagaaaatgatttggaatgccctgacagataattatgggaatgtgat

SEQ ID NO: 37130 - DNA, 96 bp, Homo sapiens
gaaatggctgccgaaaacaagccggaaggctccaaccaggaatggagacgccattggatgttttgtccagggcagcatctctggtgcatgctgatg

SEQ ID NO: 37131 - DNA, 95 bp, Homo sapiens
agcgacctacccactacaatacctcttgggactgggctcgatttgaggcagaggaacgaggacgcctgaaggaagagctggaagaggctcgggac

SEQ ID NO: 37132 - DNA, 100 bp, Homo sapiens
gaagaccaagtacctgcagatcctgacctctctgatgagatggatcggctgaaggtgatgtggccgccctcaaccgacgcatccagctcgttgaggagga

SEQ ID NO: 37133 - DNA, 74 bp, Homo sapiens
agagattgctcaggaagcaatggaggattatgtatatcacgtagtgagtgcgatctgtgaatggacagtggcct

SEQ ID NO: 37134 - DNA, 98 bp, Homo sapiens
tctcctgccttgagcaaataaaagagccctggaatgtgaagagacatgagacagtagtcaaatactcagggtgctaatattttattgacagaccatgg

SEQ ID NO: 37135 - DNA, 74 bp, Homo sapiens
gtgacctggggaacctgctcaaagccctgggtcgcttggaagaagccaagcggaagatggacagcatatgttcc

SEQ ID NO: 37136 - DNA, 75 bp, Homo sapiens
tagaagataaacttcaacattctaaattttacgctgcagaaattgccatcggtctgttcttcttacagagtaagg

SEQ ID NO: 37137 - DNA, 75 bp, Homo sapiens
cggggcctgaaccgtatccagactcagcaaacggggattcagcgtccgatcctttggaacagggactcacgtgaa

SEQ ID NO: 37138 - DNA, 98 bp, Homo sapiens
ctgaagaaacagctaatctgcctccttctccacccccatcacctgcctcagaacagactgtcacagtggaggaaggctgcggcatgtttaccttcctg

SEQ ID NO: 37139 - DNA, 75 bp, Homo sapiens
tgggcaaattttgcaaaatatgggaaagaccacagcaagattctttcattcgtctcctcctagcctgggggacca

SEQ ID NO: 37140 - DNA, 104 bp, Homo sapiens
ctcattttggatatctgtgataaagttggtcagtctcgcactgggtggttggttctagctattgccatggtacgtttttatatggaaaaaggaacacacagagg

SEQ ID NO: 37141 - DNA, 50 bp, Homo sapiens
ccgaacttcgtggactcttcaccgtagggtggtgaaggcagatattgtaa

SEQ ID NO: 37142 - DNA, 97 bp, Homo sapiens
cagtggcgcctaaagtctgagagagggaagtcgcctctgtgctcgtgagtgcatggggtataagttttcggctttgtgagaaaccttaccatcaaac

SEQ ID NO: 37143 - DNA, 100 bp, Homo sapiens
gtgtggtgtgcgcggtggccactgcgctgcggaacatggccttggacgtcagaaataaggagctcatcgatattaataaggcagcggaaagaagaaatat

SEQ ID NO: 37144 - DNA, 75 bp, Homo sapiens
ccagggactctgttctgattagccgttggacataccagatggtcgaagagctccacttcctgctcattaccggag

SEQ ID NO: 37145 - DNA, 100 bp, Homo sapiens
ctgtaaattatgtgaaacctccaaatgtggacatatgtagagtgtgtcggtcagaaggaacacctgagaaaccgctttatcatccttgtgtatgtactgg

SEQ ID NO: 37146 - DNA, 100 bp, Homo sapiens
cccgaggccatcgaggcgcaatacgagtaccggacgacgcgcgtcagccgcgagggtggcgttctcaaggatagtggctacccagagacgctggtcaacc

SEQ ID NO: 37147 - DNA, 90 bp, Homo sapiens
gagcgagctgagtggttgtgtggtcgcgtctcggaaaccggtagcgcttgcagcatgggtccccacagtcccagtgaagaacctaaatgg

SEQ ID NO: 37148 - DNA, 75 bp, Homo sapiens
ggaggagtcagctgtgtgtccagaacgtgccatggagacgcttaacgatgagttttgatcatcctgagaaaaatg

SEQ ID NO: 37149 - DNA, 100 bp, Homo sapiens
gaaaggaacaggccgaactgctgtatgggctctaagtccaaggcttgcgagaaggtcatttccgtgggtcaaacggtcatcacgaagcatcggaacaccc

SEQ ID NO: 37150 - DNA, 100 bp, Homo sapiens
gagctgggcgacgagctgaccctgggagacatcgacgagtgcttgtgatttcacgtatttttgctgaactcgtaaaagagacacttggatggtggattaa

SEQ ID NO: 37151 - DNA, 100 bp, Homo sapiens
caacaacagcttctgtgccgtgggcgtggcctacgggagccgcatcgcaggggctgcatcttcttcccagtttcaaggcttaccttcccgcagtgcaatc

SEQ ID NO: 37152 - DNA, 82 bp, Homo sapiens
accctgcccttgccagaatttcctgcgctgttccacctcattcaacttcagacgcatcttctctccagactgccgatcccag

SEQ ID NO: 37153 - DNA, 75 bp, Homo sapiens
gtcagaacaatcttgaatcatgaagctactaaccagagccggctctttctcggttgttcggaatcctataattga

SEQ ID NO: 37154 - DNA, 51 bp, Homo sapiens
tcctagcacggcgcccatcttacagaaataggaaggttgttgattactcac

SEQ ID NO: 37155 - DNA, 50 bp, Homo sapiens
gttgtaatggccgaacccttggtacctaccagggccagtgggccggaggc

SEQ ID NO: 37156 - DNA, 87 bp, Homo sapiens
gaggcggcgggacagagcgcctgcgaccccagtcggtgctccggggaggtcacctgacgaggagtattctaccttgtaaatactgtt

SEQ ID NO: 37157 - DNA, 100 bp, Homo sapiens
gaaatcgacacacaaagaatagagttgagcctgtgggacacttcgggtttttagaacttcagccataaaaatgggcagaattttccttgatcatatcggt

SEQ ID NO: 37158 - DNA, 96 bp, Homo sapiens
ggcggtgccggcgccggagacgatgccgttgtgtcatggagaaactccagctgggcccagagattctgcagcgggaaaatccaaggcttatttatg

SEQ ID NO: 37159 - DNA, 82 bp, Homo sapiens
tatcctcggaagagcgctcccaggagaaacaagacaaatcccaatctgctgaaatatgggaaaaattgaattttggaaacaa

SEQ ID NO: 37160 - DNA, 83 bp, Homo sapiens
ccgcaattccagcctatcacctaagagaccttatcaaaaggtttacaggtacatacattacacccctatttctacaaagcttg

SEQ ID NO: 37161 - DNA, 90 bp, Homo sapiens
tgaaaaggagaaaatgaatgccaaatgggacacggccgaagaacagttgagaattgttgaagaacaaagaaagattcatgaggaaaggat

SEQ ID NO: 37162 - DNA, 90 bp, Homo sapiens
gcggcggcggcgcccgcgggcagaacctaaaggcagacccagaagagctttttacaaaactagagaaaattgggaagggctcctttggag

SEQ ID NO: 37163 - DNA, 82 bp, Homo sapiens
gggaagcaggctgcagcttcacaggaaggaaaatcacctcggcagtgtttgaaggaaggatactgcaactctttgaagtacg

SEQ ID NO: 37164 - DNA, 51 bp, Homo sapiens
ggggacgacttttacatcatcacggaggtggatgctcatggaaatattctg

SEQ ID NO: 37165 - DNA, 100 bp, Homo sapiens
tttactctggggtcccggctgccctgtggcctcgctcctcggaggatatcttaatgcaattcagacaatgtgtccacacattcttcgctatttgactaca

SEQ ID NO: 37166 - DNA, 96 bp, Homo sapiens
gacagcttcgacttagccctgctccaggaatgggacctcgagtcactgtgcgggtattcccctacatctcagccatggtgaacaacggctccctca

SEQ ID NO: 37167 - DNA, 75 bp, Homo sapiens
tggatttaaaagacagtcctcgtcagcactgactttcagctatggaatcggcggctgagccagaggccaactgca

SEQ ID NO: 37168 - DNA, 100 bp, Homo sapiens
ctctcatctcgctcggctgcgggaaatcgggctgaagcgactgagtccgcgatggaggcaacagcattattgagaaaagcccttacagaagagtgtggcc

SEQ ID NO: 37169 - DNA, 89 bp, Homo sapiens
gagccatcacgcccagctagccatcttctaattttcattccttcaaaggtcattcctgtcccaatcagctgctctactactgatgacat

SEQ ID NO: 37170 - DNA, 82 bp, Homo sapiens
gttctggaatcctcagttcaagctacgagttccagggagctctgtcctggtgaccgtgcccgggttatgacgactaatccca

SEQ ID NO: 37171 - DNA, 80 bp, Homo sapiens
ctgtggtggacgttcggccaagggaccaaggtggaaatcaaacccttcaaatgtttatctggtgtgactgtattatgccc

SEQ ID NO: 37172 - DNA, 75 bp, Homo sapiens
gcacgagagacccgagttcatcgcctacccccatctccgcatcaggaccaaggagttccatctggaatatgacaa

SEQ ID NO: 37173 - DNA, 90 bp, Homo sapiens
agtggatggtgcgttgcgtgccctacttcaaggataagggcgacagcaacagctctgccggctggaaggatcttagaaatgaagttgaaa

SEQ ID NO: 37174 - DNA, 100 bp, Homo sapiens
gggaagcccaccgactttgaggatctggaggacggagaggacctgttcaccagcactgtctccaccctagaggtatctggacaggaagacttctcccatc

SEQ ID NO: 37175 - DNA, 75 bp, Homo sapiens
ggatgattactacgacaccggcgaggaacttggcaggttcgagaacttgtcttggacaattgcaaatcaaatgat

SEQ ID NO: 37176 - DNA, 75 bp, Homo sapiens
ccagccccgagcgggacagcgcggcggggagcgacgacacaaacatttcactgaagatattcaaacaaggcaata

SEQ ID NO: 37177 - DNA, 132 bp, Homo sapiens
ctaaagtctgagagagggaagtcgcctctgtgctcgtgagtgcatggggtataaggccgccatggcatcagatgaaggcaaactttttgttggagggctgagttttgacaccaatgagcagtcgctggagca

SEQ ID NO: 37178 - DNA, 50 bp, Homo sapiens
ggcgatgttggaaaaagacggagtgaagttgagtcctccctctttcttcc

SEQ ID NO: 37179 - DNA, 75 bp, Homo sapiens
atcatcggctgagggtggaagcggcccccgcagacgctcggcaggtgagaagccctaccactgcaactgggacgg

SEQ ID NO: 37180 - DNA, 90 bp, Homo sapiens
ggcgggtggcatggcggagaaggatgacaccggagtttgacgaagaggtggtttttgaggctgaccggttccctgatgtgttacctgctt

SEQ ID NO: 37181 - DNA, 74 bp, Homo sapiens
cagtacctcgtgtatactacgctatcgatgcctccattgcacacagattccacatcatgagagaaaaacaccca

SEQ ID NO: 37182 - DNA, 99 bp, Homo sapiens
ggcaaggcggcggacggctgcgtcgcccgaggcgaggaggagcgctggcgtgatgttacagcctttcgattatgatcccaatgagaaaagtaaacacaa

SEQ ID NO: 37183 - DNA, 100 bp, Homo sapiens
agcggctgaggaggggccccagcagcccccgaaggccctatcaggacatggagtatgaaagacggttaccccacagcctatccagcagctgcccctgcct

SEQ ID NO: 37184 - DNA, 75 bp, Homo sapiens
ccacgacccacgagatcatggggcccaagaaaaagcacctggactagagtgctagaagggagactgctgtcccca

SEQ ID NO: 37185 - DNA, 75 bp, Homo sapiens
gcaagcccagacaatgccggtggaggaatttgtggctggctggatctctgttgttgacctcctgtactggagaga

SEQ ID NO: 37186 - DNA, 100 bp, Homo sapiens
cctgaattttccttgatggtcaaaagattaaggtctgctgagaacagacccagtccctgaggaaggagaagatgttgctgccacgatcagtgccacagag

SEQ ID NO: 37187 - DNA, 100 bp, Homo sapiens
ctcagggaaggggcagcacagcctatcatggtcaccatcaagcactggaagtgttggtacagtctttgttagatcttgatgtcagaaatagtagtggaag

SEQ ID NO: 37188 - DNA, 100 bp, Homo sapiens
gcaagcgtttcagcgcctacaattacagccaaaatgaagtttaatccctttgtgacttccgaccgaagcaagaatcgcaaaaggcatttcaatgcacctt

SEQ ID NO: 37189 - DNA, 51 bp, Homo sapiens
tctctgtcagaggaagatcccttgatggcttggaaagatgtgagacatgag

SEQ ID NO: 37190 - DNA, 102 bp, Homo sapiens
gggctgcagtatcaactcgagggaggttcatgacaactgaggaaaaagccaaagtgggaccaggatatgtgcagcgggggctacagcgagtggggctagatc

SEQ ID NO: 37191 - DNA, 50 bp, Homo sapiens
cgtcatcaccttattctggtcccggatcatccccaagccaagcgagccag

SEQ ID NO: 37192 - DNA, 76 bp, Homo sapiens
aagagcaagcattaaaacttatacagattttgaaagggcaaagtttacttcagagatacgtaggtaacctttccag

SEQ ID NO: 37193 - DNA, 109 bp, Homo sapiens
tgataactcgcatgtttaaacaaactgctattgccaaggttttgacctgtagcagagaaccaattctggagaacagcctcacttctttgattgaatacttacataatgc

SEQ ID NO: 37194 - DNA, 82 bp, Homo sapiens
gagctgtcagagcccggggacggcgaggccctcatgtaccacacggcatttgtctggccttcccttttactgctggctggga

SEQ ID NO: 37195 - DNA, 85 bp, Homo sapiens
aaaacaaaattgccagaaaatctttcctctaaagtcaaactgggtgtaccagtgatggcaataagaaacaaaatgatatcagaag

SEQ ID NO: 37196 - DNA, 83 bp, Homo sapiens
gtaatgcaatggtctcaatctctggaaaaacttcttgccaaccaaactggtgcaactattatctcagccactggagcctctgc

SEQ ID NO: 37197 - DNA, 75 bp, Homo sapiens
ccaccaggaaaatgtcctcagtgcaagagcaacacgtttccacagacaggatcttgctacattgcccaggctggc

SEQ ID NO: 37198 - DNA, 100 bp, Homo sapiens
caagctctggtatgctccaaatcgcaccatcaccgttgatgacaagatgtccctccggctccactaccggatgagttgaactggcaatgatcatggaccg

SEQ ID NO: 37199 - DNA, 100 bp, Homo sapiens
gcaaggaatccaaatgcatcattcagatgcaaggcaactcgaccagcccagtccacaggctcatgtctggggccccgggggagtgagggcagcaaagaag

SEQ ID NO: 37200 - DNA, 100 bp, Homo sapiens
gtacctgtgcttatattcgatccttggcacccagcctcctggacagaaataaaactggtactaaggctcgtacgtctgcatcgattatcttacgtggggc

SEQ ID NO: 37201 - DNA, 100 bp, Homo sapiens
gagaagtttcccagaaaaaatgcccagcgcggcgcggggctgcggagtcgtccggagccgctgcgcgctgcagaaccttggcctgaaaatgctacattat

SEQ ID NO: 37202 - DNA, 75 bp, Homo sapiens
gtcagcatcccagccgtgctcacgtagagacggggtttcaccatgttagccaggatggtctcaatctcctgacct

SEQ ID NO: 37203 - DNA, 50 bp, Homo sapiens
gcttcctccagacctctcggcgcggcatcctggtggggaagaagttttaa

SEQ ID NO: 37204 - DNA, 100 bp, Homo sapiens
tctcccgcctcctcaggcccgggggtgctggagctgccgagggataaacgcccaggcccggaggctgcagcggagtcgcgcgaagggaaccccgaccccg

SEQ ID NO: 37205 - DNA, 114 bp, Homo sapiens
gattgttggtctgctggtgggactcaatgttctcgatgccaatctctgcttgaaaggagaagacttggattctcagatgagggttactaccagggtggaaaatttcagtttgaa

SEQ ID NO: 37206 - DNA, 101 bp, Homo sapiens
atcaaaagatgcctcttgtggtatcaaggataaacccagagtcacctcagcagtgttgtactgctacttctataaacggacagccgtaagactaggcgatc

SEQ ID NO: 37207 - DNA, 75 bp, Homo sapiens
gcaagtacgaaaatttcctgccgattatataaaatactgggagtttgcaggactggctttaattttgggataatc

SEQ ID NO: 37208 - DNA, 75 bp, Homo sapiens
cataacaaccagcccaaccacatctgcaacaaccagcagcatcagagacatatctgaagagatggattaagaatg

SEQ ID NO: 37209 - DNA, 139 bp, Homo sapiens
attctgcttcgttatttcgggcactccacagattctgttgcgaaggcagccatctttagttcgtctttcctagagagggtcgggaccctgagttaggcctgaagtctgtgcagaagctactggatgctgtggacactta

SEQ ID NO: 37210 - DNA, 75 bp, Homo sapiens
ggaccaaggatcacgtcatgactccgacgagagctgtttaacatcaccaacggagcccgaaagaatgcctttaag

SEQ ID NO: 37211 - DNA, 98 bp, Homo sapiens
gaaacagtgcattggaggaacgggaacaagagaagtttaatctgaaagaagaactggaacgttgtaaagtgcaggtactccaaagattcaggtttact

SEQ ID NO: 37212 - DNA, 90 bp, Homo sapiens
cttggggagaagaaacatggtgaaaacaggctgaggttgcaagaaagctcaagtagcctatggagaggatgcaaggcttccagctgatgc

SEQ ID NO: 37213 - DNA, 75 bp, Homo sapiens
ctttattgattgcttcctgatcaaaatggagaagcctgcgtatcagaatctgagacagcgtgttgacaactttgt

SEQ ID NO: 37214 - DNA, 51 bp, Homo sapiens
atggagaagagcctggagttctggcggatcctgcctgtgacccacacggag

SEQ ID NO: 37215 - DNA, 74 bp, Homo sapiens
aaaaagacgacatcaagtaccgtacctctatggggaaatttgcagtggtgagaaaatgtataaagaaagattct

SEQ ID NO: 37216 - DNA, 96 bp, Homo sapiens
ggattccagactcgtgggggaaaggctggtcttgtggatgagcagcagaaagttcggaccatcagtgctttggccattgctgccttggctgaagca

SEQ ID NO: 37217 - DNA, 101 bp, Homo sapiens
atctcctttaccttgtggaaatgatttcctcaggactccagattatctacaacactgatgaggtgtgggccatgtttgaggattgccccagcattcagttc

SEQ ID NO: 37218 - DNA, 96 bp, Homo sapiens
cgcgcgcggccgagactctggcctgcagtcgccgccgccgccgccaggtttgggccccatggtatccctgtgacagtatttcccaaaagggaatat

SEQ ID NO: 37219 - DNA, 74 bp, Homo sapiens
tttgtggaacagacagctccttctttattggtgctggagaatctggtaaaagcaccattgtgaagcagatgagg

SEQ ID NO: 37220 - DNA, 100 bp, Homo sapiens
ccggtgcgaggagaccgcgggtttccaccccggcgggagctgtcaggttggctccgcgaggaacagcacagcatgctgggctctggatttaaagctgagc

SEQ ID NO: 37221 - DNA, 75 bp, Homo sapiens
tagcatggatttctgtgagctcacttttgaagaaaacaggtctgaaacaaggtcttacccccagctgcttctgaa

SEQ ID NO: 37222 - DNA, 51 bp, Homo sapiens
caggggctctgggagtggctgccaggttacctaaccaaactcctgcaaaac

SEQ ID NO: 37223 - DNA, 83 bp, Homo sapiens
ctcaaggacaacctcggcctgagacaccggaggaccgggtcaccgacgatgagggcgcacctgctgtcctggagcttccgatc

SEQ ID NO: 37224 - DNA, 90 bp, Homo sapiens
caggaaggaggaggaataatatttatggagcatatattatggaacacattttaacggtgactccctgatgatcattccttggcatgaaca

SEQ ID NO: 37225 - DNA, 100 bp, Homo sapiens
gagaatgtgcctgaaatccaagccctggtgcagacactgcagggacccttccacacggcagctatcatgaacatagttctgtctcagccatgtgggaaaa

SEQ ID NO: 37226 - DNA, 83 bp, Homo sapiens
gggagtacaatgaagtggagcccatcatcctctccggcaccgttcctgccttgggcgctcatgggcttctcgctgctgctggg

SEQ ID NO: 37227 - DNA, 75 bp, Homo sapiens
ctcaggcgtgcgcggacggtgtgcggggctggttgatatgtgaagagccaacctgtcgcaatcgaactcgtcacc

SEQ ID NO: 37228 - DNA, 83 bp, Homo sapiens
cttcgcgtcccctgcaccatgagctggggcaccgagctctggacctgcctagagctggaacgttacctccagagcgagccctg

SEQ ID NO: 37229 - DNA, 96 bp, Homo sapiens
ttccttgacctttaggtgcttttatattcatctcaaaaacaaaattctgaactcaggacttggcaaagatcaatggcttttcaaaagcagcacacc

SEQ ID NO: 37230 - DNA, 95 bp, Homo sapiens
aaccccaggacaaatctgctggcagaggatataagttttacagctcccagcacagtaggaaagagaaatttgagtcctagtcaagaggaagctgg

SEQ ID NO: 37231 - DNA, 50 bp, Homo sapiens
ggaagcagggattccagtgccaagggaaaatttcatggaaatccaatgca

SEQ ID NO: 37232 - DNA, 50 bp, Homo sapiens
tggacccagaggattttatggcacatttgactaagaaaaatggctttgtc

SEQ ID NO: 37233 - DNA, 100 bp, Homo sapiens
caaagatttgcatcagccatctcttagtccagcaagtcctcatagccagggaaacctcgacctgtctcccagttggttgcacagcaggttactcagcagt

SEQ ID NO: 37234 - DNA, 83 bp, Homo sapiens
ggaggaaaggccagactcacagaagcctttctgagaaaagtctacagcattctttctctgcaggttctcttaactacagtgac

SEQ ID NO: 37235 - DNA, 75 bp, Homo sapiens
atgccacagcatcctccagcacctcaggtgctgtcagggacactgctcgcagatgcagttacgtggcttttcacc

SEQ ID NO: 37236 - DNA, 75 bp, Homo sapiens
tcagaaagaaaaaagaagaagtccccgagttcaccaaaattcagacattctacatccgatactcccagatctgtg

SEQ ID NO: 37237 - DNA, 51 bp, Homo sapiens
caggaggctggctggaataaaggccaagaagacgctggagggaggctgtta

SEQ ID NO: 37238 - DNA, 82 bp, Homo sapiens
ctgcctaatttacagcaaccatgaggtcagggaagtcaaagatgcatccctgagttcttcctagcaggcaagcagccgtgca

SEQ ID NO: 37239 - DNA, 113 bp, Homo sapiens
gtttgatgtgccgtgtggaggaagagattgcagtgggggctgccagtgctaccctgagaaaggtggacgtttttagaaagagcgttttcgctacgtaaagcacattcgataaa

SEQ ID NO: 37240 - DNA, 100 bp, Homo sapiens
ccgccaccatgcccaagagaaagagagaactcgatgccaccgcaacggtattggcgaaccggcaggatgaaagtgagcagtccagaaagcggcttatcga

SEQ ID NO: 37241 - DNA, 75 bp, Homo sapiens
cgcccctgaagcccctcagcgactcagaccctgacagtgacaaaggattcagtggcctttgaggatgtggctgtg

SEQ ID NO: 37242 - DNA, 83 bp, Homo sapiens
cctgtgcacctggatcaggcagccttcaggactttggggtcttgggcgtctttggtactggcttttttaggggtctgcctggg

SEQ ID NO: 37243 - DNA, 83 bp, Homo sapiens
tcttaacccagaagtagctgaatgtgttactccattgctgaggagtgttagggcctagtcaaaattttgaagctgagtcaatt

SEQ ID NO: 37244 - DNA, 101 bp, Homo sapiens
acaaagatgcacatgtagatttcctgaaaagtgatcttcttcagcagtatcgttctgctgtgtgcaaactagacagtgtgaataaggatcttaacagtcaa

SEQ ID NO: 37245 - DNA, 80 bp, Homo sapiens
cccagacaggtggcgaaggcagaggaatgagcagcaccagcagtaagagggctccgaccacggcaacccagaggctgaag

SEQ ID NO: 37246 - DNA, 89 bp, Homo sapiens
caccaagaaggaacagttggaaaatgccttgggggccatctccctggagttcgaatctactttgtcatccaaggaggaagccgagatgg

SEQ ID NO: 37247 - DNA, 90 bp, Homo sapiens
ctcaaattgtgacatatgatcttctgtcagtcatttgccatcatggaactgcaagtagaatgggtaccacagaccatgtcatcgtcctgg

SEQ ID NO: 37248 - DNA, 75 bp, Homo sapiens
ggagaagaggaggatgcggctcgtggtggatggcatggggcgctttggcaggcgtggtgaccaagatgaagatgc

SEQ ID NO: 37249 - DNA, 101 bp, Homo sapiens
gttgattggtgtacggagtgaacataaactttctactgatcacattcctatactctacagaacagcggatcctagaaccagatgacttcctggatgacctc

SEQ ID NO: 37250 - DNA, 75 bp, Homo sapiens
gcgcatgcaacagaagtatgaggccagccgggaggacatctacaagcgggtattgttgcagcatctggcagtgag

SEQ ID NO: 37251 - DNA, 83 bp, Homo sapiens
tttggtgtccgcattgactacgtgctttacaaggttttaaaatcaaagatgggaaaatcggagaaaattgcccttccccatgg

SEQ ID NO: 37252 - DNA, 83 bp, Homo sapiens
ctgtgttgtgactgctttggacgtgggagtcacctgaaagccaggaaatggtcaaaatgcagatcttcgtgaaaacccttacc

SEQ ID NO: 37253 - DNA, 76 bp, Homo sapiens
ggatggtggcgttgctgctgctgctctcagatactagagtaaaaggatggtttcttctggacaattatatacccac

SEQ ID NO: 37254 - DNA, 96 bp, Homo sapiens
cctgtcgtctgtgttgtgactgctttggacgtgggagtcacctgaaagccaggaaatggacacattggcgtgagacctgggagtacgttgtgccaa

SEQ ID NO: 37255 - DNA, 100 bp, Homo sapiens
ggccagggcagagggcacctgagcggctggagagcctgttggagaaacacaaagaggcagtcgacaagtactttaagcttcctcatgcttccagtaaacc

SEQ ID NO: 37256 - DNA, 82 bp, Homo sapiens
agttttcgcgggtttcagaagtttccttaggcgttctaagggctttactcaggttttgcactgattgcaaaaataaagtcct

SEQ ID NO: 37257 - DNA, 96 bp, Homo sapiens
tgatggtgctgtaaccacctcacagattccagcttcggaacaagagaccctggtaactataactacccaatattgcagccatggagtccatgctta

SEQ ID NO: 37258 - DNA, 100 bp, Homo sapiens
ctcgccagcagccgtccggagccagccaacgagcgggggatatgagactttctactcggaatatcctgagtgttgcgtggatgtaaaacccatttcacaa

SEQ ID NO: 37259 - DNA, 110 bp, Homo sapiens
tagtggcaggtgacagtctgcatgtgcagttttcagaacttcagtgaagatttcatacattggcctcatgacccagagctccttggagacacatcactatgtggattgtg

SEQ ID NO: 37260 - DNA, 51 bp, Homo sapiens
aagaagaagatcagcactgtggtattaacaagtaaaggtgacgcgtgggcc

SEQ ID NO: 37261 - DNA, 82 bp, Homo sapiens
ctggacgcagcaagcggggcgctgtgtccccaagctccccgtcctcggtcctccgggcctcatatgaacaggagaaagaagc

SEQ ID NO: 37262 - DNA, 88 bp, Homo sapiens
ctactcttccagttgcggcttattgcatcacagtaattgctgtacgaagaaatcatgaccaccccaggaaaagagaactttcgcctga

SEQ ID NO: 37263 - DNA, 75 bp, Homo sapiens
cggcgcctctgcccgccgttctgctcgctcgctccccgctctggagtgctggagaatctggtaaaagcaccattg

SEQ ID NO: 37264 - DNA, 101 bp, Homo sapiens
ccctgtgacctgtggagacacggccagatctgccctccacgcagataaagtgagcccggaaagggaaggagggggcggggacaccattgccctgaaagaat

SEQ ID NO: 37265 - DNA, 98 bp, Homo sapiens
tcagataccagcaactcccccatcgtatgaatctatagcctgggctggaagctcttctacgtcacaggctgcctgtttgtggctgtgcagaacttgga

SEQ ID NO: 37266 - DNA, 98 bp, Homo sapiens
ggatagtgagccaacaccacatctaaagacacggcagcgtagaaaggcatgagtacagtaccagaagttatcgttgcacggcactgtggacttcgagt

SEQ ID NO: 37267 - DNA, 98 bp, Homo sapiens
gtgctagttcttatggcctcgaagcatgctttcttggcattatgttatcaatactctggctgaccatcatcatcgtgggactgactttggtggaagtc

SEQ ID NO: 37268 - DNA, 98 bp, Homo sapiens
ccccgctgacggccagggtgaagcatgtgaggagccgccccggagccaagcaggagggaagagctctggggcataatcaagcaaggatacaaatgcaa

SEQ ID NO: 37269 - DNA, 87 bp, Homo sapiens
gctacttctcagctttaccatccctggaggagacctggcagcagaattcagaaggagctggcggacatcactttagaccctccacct

SEQ ID NO: 37270 - DNA, 96 bp, Homo sapiens
atctcagccttgtcaaagatgccagatgtgggagacacgccaaagctcccaaggtgtccaaggcagctgcagatttgatggcctactgtgaagcac

SEQ ID NO: 37271 - DNA, 100 bp, Homo sapiens
ctaataccatactgcaccatttgctgacggcccagagggtgggtgccaattccaccagcagctgcaactgaaaagcaaggttcagaaatgtcagatatcc

SEQ ID NO: 37272 - DNA, 74 bp, Homo sapiens
ccgggatctcaggtcctcgggggcggcggccacgccaaggacggggtcttactgaagtaacacaaagcttaaaa

SEQ ID NO: 37273 - DNA, 82 bp, Homo sapiens
gccaatctagcctctcctgtctctcatcagccaccctgacagcaggagactttgattaaagtgagaagcagccaagattccg

SEQ ID NO: 37274 - DNA, 80 bp, Homo sapiens
actggggccagggaaccctggtcaccgtctcctcagcctcccgcgacgatgcccctcaacgttagcttcaccaacaggaa

SEQ ID NO: 37275 - DNA, 100 bp, Homo sapiens
ggaggaggacaaagagcccctcatcgagctcttcgtcaaggttatcaatactctggctgaccatcatcatcgtgggactgactttggtggaagtccttgg

SEQ ID NO: 37276 - DNA, 96 bp, Homo sapiens
gcacttcgacgagaatagtttggtttcgtacacaggtggattttctgattgaaaatgatgcagagaaggactatctctatgatgtgctgcgaatgt

SEQ ID NO: 37277 - DNA, 95 bp, Homo sapiens
ggggtgtcctggtgcacccccagtgggtgctcacagctgcccattgcctaaagaaggggaagttgcagggccatgacgtggacttcctcatcacc

SEQ ID NO: 37278 - DNA, 100 bp, Homo sapiens
ccaggatcctgcaccgggtggtggctgggtatttccctggccggcccttagtccagaacttcctgcactccgtgaatgaatggctcaagaggcagaagag

SEQ ID NO: 37279 - DNA, 95 bp, Homo sapiens
ccgaggaaacagtgaccctgagcgaagccaagccgggcggcaggtaaccaattctgaagggacatgggtgcaactggatcagaacagcatggtag

SEQ ID NO: 37280 - DNA, 87 bp, Homo sapiens
ctccccggctcggctctcgctgcggcagacgggctcccccgggatgatctacaggaatgggatatggagatagaacaagcacatttt

SEQ ID NO: 37281 - DNA, 96 bp, Homo sapiens
tctaaagtctttccaaaaggtcaaggttcacaaggaggaattactcatgatactttccaaaaggagctcatgtgctttgaccctgatactgacaaa

SEQ ID NO: 37282 - DNA, 75 bp, Homo sapiens
ccgagacggcgatccgggcgctcgagacttaccagagccacaagtctgcagatctccaggggagcccaccagcct

SEQ ID NO: 37283 - DNA, 100 bp, Homo sapiens
cgccgtgcacatccagcatcctccaggagaagcagccccctctgaaatcaaagagatcttgcatctggctggactcaatgagctggaggtgattcccttg

SEQ ID NO: 37284 - DNA, 90 bp, Homo sapiens
caagcctgccaccttcaccgtcaacaccaaggatgcaggagaggaaaatcactgtgctgatcgggaagcccttcagtgccctgcctgtac

SEQ ID NO: 37285 - DNA, 100 bp, Homo sapiens
gggtcctcctagaaattccccccgaagaagactcccccacatctgggtgcctaatggataagaacttcgttaggattgggaaatggtttgtccgacccta

SEQ ID NO: 37286 - DNA, 100 bp, Homo sapiens
atgatgggtgcccttgtggccagtaggcaatcacctgaaggatctgacttccagaagatcagaggttggatttatgcaaacctgggccaaaggacagtta

SEQ ID NO: 37287 - DNA, 98 bp, Homo sapiens
ttctgcacgcctcgctgtccgagtatgtgctgctcttcggcaccgccttgggctcccgcggccactcgggtggctgacggcctggtcaaggtgcaggt

SEQ ID NO: 37288 - DNA, 101 bp, Homo sapiens
aaacccttccagctcgatctgctcttcgtctgcttcttcctcttcagtcaagatatggaatgtgcagatgtcccactattaactccaagcagcaaagaaat

SEQ ID NO: 37289 - DNA, 73 bp, Homo sapiens
ctggccacccagagggcccttgtgtccaagggtgtccgcaatgttgccagtgtctgtctgcagattggctacc

SEQ ID NO: 37290 - DNA, 100 bp, Homo sapiens
acgcggtgcatcaccatggcgacaggccgccccacattatccatgttccagcagagcagattcagcttgtgctgtgagtgtggtgttccgataagtccaa

SEQ ID NO: 37291 - DNA, 100 bp, Homo sapiens
ggaagtgtggtttggattccatcagtctgttcggcctgccatgtggaaaatgatgcttaatatcgatgctatctcacgtgagagggcagtggaactcctt

SEQ ID NO: 37292 - DNA, 75 bp, Homo sapiens
ctctgctcatggctctcaaagaaccagcggacctgagtcttcaatgaaaggtttcctatcctgggagcaggagag

SEQ ID NO: 37293 - DNA, 74 bp, Homo sapiens
cgacatgtcgacctgacgctctacacggaccttaaagaagccaacttcgacatcaatcagctatatgactgcaa

SEQ ID NO: 37294 - DNA, 90 bp, Homo sapiens
ctttgggtttagcacgatgagctcaatcggcactgggacacgatgaggcgagtggtacgacagagcaagtttcggcatgtatttgggcaa

SEQ ID NO: 37295 - DNA, 82 bp, Homo sapiens
tatcacagctgctgcaatcgcttgggagagctcctgggccacccctcctttcaggtcaagatgtgaagttcatttccaatcc

SEQ ID NO: 37296 - DNA, 82 bp, Homo sapiens
tcaactttgggcctggtcccgccaagctgccgcactcagtcaaaatgcagatcttcgtgaaaacccttaccggcaagaccat

SEQ ID NO: 37297 - DNA, 75 bp, Homo sapiens
agcgacgagagatccgtgcaggcacagccttttacattgatcaggtcacatttctgggttttaatgaagagacag

SEQ ID NO: 37298 - DNA, 82 bp, Homo sapiens
caaggagtacgaccgcttgctggaggagcacgcaaagctgcaggtatgtgaggagcagcgctgtgaggaggaagtcttcccc

SEQ ID NO: 37299 - DNA, 75 bp, Homo sapiens
gcggctggggttccctcctccgtttctgtatccccacgagaaactatgttccaacttcctgtcaacaatcttggc

SEQ ID NO: 37300 - DNA, 97 bp, Homo sapiens
gaagacttatgttgaaaaggtggctaatgtggaatatgtgatcaagtgtgacatgtcagctctgcagaagattctgtatcgccatatgcaagccaag

SEQ ID NO: 37301 - DNA, 75 bp, Homo sapiens
ttggaccctggaaaacctggccctcttcaatttctgacaaaagggaaaccggctcctgaaatcaggtgtcccatt

SEQ ID NO: 37302 - DNA, 112 bp, Homo sapiens
aggcgtatacaggaacaatattgatgatgtagtaagacacgaatgcagagtttgagtccagatcccaaagcccagtacacaagtatctacggagccctcaagaaaatcatgc

SEQ ID NO: 37303 - DNA, 117 bp, Homo sapiens
cggggaccggcggcgctggaggagcgaggcagctgtactaggactgggaacggattttcagctgaactctcatctctcaacactggcaaatattcataagatctaccacacccttaa

SEQ ID NO: 37304 - DNA, 100 bp, Homo sapiens
gctggagctgccgcggcgcagccagcctcaggcccagagccagcacgagacatccgctgcgagttctgtggtgagttcttcgagaaccgcaagggcctct

SEQ ID NO: 37305 - DNA, 100 bp, Homo sapiens
accccagtcggtgctccggggaggtcacctgacgaggaggtcagtactgcatgcccgaggagggggtcccgctgacccccaaagccaacctgctgaccac

SEQ ID NO: 37306 - DNA, 75 bp, Homo sapiens
agcgccgtcccgtccgacagccaggcccgggagaactgatgtagcccagcagttccagtatgctgtgcgggtgat

SEQ ID NO: 37307 - DNA, 75 bp, Homo sapiens
atctcgcctcagctgctcttggccacccagcgcttcctgtcccgaggtgtcagctgacaggggctctggccacag

SEQ ID NO: 37308 - DNA, 97 bp, Homo sapiens
ggacaagagacgatcattctgcaagcaggcaacctgaatacaggatcttttgccagaaatgagggcatactggcctgacgtaattcactcgtttccc

SEQ ID NO: 37309 - DNA, 100 bp, Homo sapiens
ttcgggccgggcctcgctgcggcggcgactgagccaggctgggccgcgtccctgagtcccagagtcggcgcggcgcgacaaatttacatgtattggagac

SEQ ID NO: 37310 - DNA, 75 bp, Homo sapiens
gcctccacccaccggcccaccctacatttagcgcatcatgtgatccggtaaattcctcatctatgcctgtctgct

SEQ ID NO: 37311 - DNA, 100 bp, Homo sapiens
ctgcgctccgtggccggggagcaagcgccagggcattatgatatcaacgaatcccttgtgaagcagtcgccaaatacattaatgtcttgttttaaatcaa

SEQ ID NO: 37312 - DNA, 51 bp, Homo sapiens
cagatttgaaaatgcagatttaaatgcccatcctgagcccttctatcctag

SEQ ID NO: 37313 - DNA, 97 bp, Homo sapiens
gaggagttcctgaacggcagggcagtgaattggctattcatcatggctggagacttcctgaatataccctttcccaggagggaggacctgctcataa

SEQ ID NO: 37314 - DNA, 75 bp, Homo sapiens
ttcgcagtggtcgcttcttctccttggaaggtgctcgggtcttcggggcactgggtcccatcggtccctcctcac

SEQ ID NO: 37315 - DNA, 83 bp, Homo sapiens
ctgacggagatggtgcagaagatggaggaggaggaggacttcatccaacccagcagccgagaagaggcccagcagctgtggga

SEQ ID NO: 37316 - DNA, 50 bp, Homo sapiens
cctttgaagagaagattgtcagcagttcgacatttgtcttcaccgacagc

SEQ ID NO: 37317 - DNA, 75 bp, Homo sapiens
ttctcctcagtggagaaggtcatccataccactctggagtcatcttccctcatctccagtgccacagcagcagct

SEQ ID NO: 37318 - DNA, 133 bp, Homo sapiens
cccgaatctccttggctgacatcgcccagaagctgcagttggatagccccgaagatgcagagttcattgttgccaaggttggatggcaagcatgtggtgtttggcaaagtgaaagaaggcatgaatattgtgg

SEQ ID NO: 37319 - DNA, 115 bp, Homo sapiens
ctcggcgcgactcgcttctttcggttctacctgggagaatccaccgccatccgccaccatgcgagcagctgatgcagctgtacagtgcgcgccagcggcggcggctgaaccgggg

SEQ ID NO: 37320 - DNA, 75 bp, Homo sapiens
tgaatttgttactttttcttgtccgggtgcggataagggacccgacactgattggggactggatatgcacatttt

SEQ ID NO: 37321 - DNA, 100 bp, Homo sapiens
cagcctgcgggagcccccggccggttctaagctggtctatgtccatcaccttcttggagaaggagcctttgcccaggtgtacgaagctacccagggagat

SEQ ID NO: 37322 - DNA, 106 bp, Homo sapiens
ccgctccctgtacaaactggtgggctcgccgccttggaaagaggctttccggcaggttatcaatactctggctgaccatcatcatcgtgggactgactttggtgga

SEQ ID NO: 37323 - DNA, 100 bp, Homo sapiens
ttgtctccttcgacttggagtctttgtccaggacgccttgttagatgacttggataaagaactaaacaactacattatgcgatgtagagaatggtatggc

SEQ ID NO: 37324 - DNA, 83 bp, Homo sapiens
caaaggatgagaaggcaggtacgacccagggcggaaaaagatcaggagcatggggaagtgattgactgtgtgcaggagctgag

SEQ ID NO: 37325 - DNA, 102 bp, Homo sapiens
ctgcagcgggagctggacggcgagcgcgagcggcgcgagaaagtcatcgacatcctgagggggaaggccacccggcctgcttccacctcccagccagacccc

SEQ ID NO: 37326 - DNA, 90 bp, Homo sapiens
accttcaagcacctggcctcagtagagaatgtcaccaatggcacagtgggcggcacagcagagccggggcacgaggaggtgagctggatg

SEQ ID NO: 37327 - DNA, 100 bp, Homo sapiens
ccgtcatcaactacgaccaggacagggacgagcactgggtgaaggacctgggcagcctcaatgggaccgctcgggcctgctgtgtgtggacaagatcgag

SEQ ID NO: 37328 - DNA, 96 bp, Homo sapiens
aacaggcctctctcggtcgtggtcacaggcaaaggcactgtactccagaaagccaaggtaaatggccaagacctaaagaacctgctgcaccaggat

SEQ ID NO: 37329 - DNA, 83 bp, Homo sapiens
gctgtgggcgctgctggcgctctggctgtgctgcgcgacccccgcgcatgcaaccatgtccaagggacctgcagttggtattg

SEQ ID NO: 37330 - DNA, 98 bp, Homo sapiens
agaaacccagccgaagcatttaaaagagaagagcaagttagtaccttgtaccaaaacatcaaccttgtggagccaagattaattcagccatatgaaca

SEQ ID NO: 37331 - DNA, 75 bp, Homo sapiens
caaccctgtaaaaccagccttagactatttttcaaacaaacattctagtatgccagtagaaaaaaatatcacttt

SEQ ID NO: 37332 - DNA, 50 bp, Homo sapiens
cctcctcgcagcagcgccatggcttgcagccaatttactggagcagggat

SEQ ID NO: 37333 - DNA, 100 bp, Homo sapiens
atgactttcaacgggactattatgatagagagaagaagaaggaggttcctgctgtgccagaaacccttaagaaaaagcgaaggaatttcgcagagctgaa

SEQ ID NO: 37334 - DNA, 100 bp, Homo sapiens
ccggcgtgccccaccatgtcagacgcagccgtagacaccagctccgaaatcaccaccaaggggtttgattcaggagatgagcggcgatgcttctgtgtgc

SEQ ID NO: 37335 - DNA, 51 bp, Homo sapiens
gtgaggagttgctaaatgctcagataacagacgagtacctttggaaaggtc

SEQ ID NO: 37336 - DNA, 75 bp, Homo sapiens
ttctgctaaaatggtctttctacagatgcaccctggcccctgggccatctgctgtgaatgccagaccagattcgg

SEQ ID NO: 37337 - DNA, 100 bp, Homo sapiens
agtccgtgatgcaagctctcgagagtctcacggagacgcaggtgtgtatagaccatcgatgccagcgtgtggatctcctgggggcacaggaatgtcgaag

SEQ ID NO: 37338 - DNA, 90 bp, Homo sapiens
tcgggacccacaacctttaagcagcagaggagcacgaggatcgtgggagctaagaaagagagcaggagattcggatgggtcagatggcta

SEQ ID NO: 37339 - DNA, 100 bp, Homo sapiens
ttaagagagcaattggatattattcagcgactagtaagcctatgtcatttcatccaccacattacttaggtctctcaggcagctgcagagcttcaacagt

SEQ ID NO: 37340 - DNA, 98 bp, Homo sapiens
tgaccgaggcccccctgaaccccaaggccaacagagagaagatgactcaggcccaaaacatgctgaagaaggtggaaggcttggaggatctgagcaat

SEQ ID NO: 37341 - DNA, 83 bp, Homo sapiens
gcttggttaacttgggagaaagtttcatctgtggatggagtattggccttcctggatgctctgcagaaccaggctgaggccag

SEQ ID NO: 37342 - DNA, 78 bp, Homo sapiens
tgctggctgccgcgcggccgagttggccttggcagaattgtatgaagatgaagtgaagtgcaaatcttccaagtctaa

SEQ ID NO: 37343 - DNA, 75 bp, Homo sapiens
gccagagccagtttattttcactgtgcagctgttacaccaagataattgacgaccttgccaacctagtggagaac

SEQ ID NO: 37344 - DNA, 126 bp, Homo sapiens
gtgttcgtccgcggagatctctctcatctcgctcggctgcgggaaatcgggctgaagcgactgagtccgcgatggagttactccacaggatccgctgaacataggatgttgccacaaaatctacct

SEQ ID NO: 37345 - DNA, 100 bp, Homo sapiens
agcggattttcctgtctattttgaggaattacgaaaggtgctagttaagatcattgagcgcttgaagctggtgcccctgaatcaggaaagtgtggaagag

SEQ ID NO: 37346 - DNA, 82 bp, Homo sapiens
attctgtacagcctgtgaggaggagatgctattccaagttcagatcaaattcgagtagcaccatctttaaaaagccaaagag

SEQ ID NO: 37347 - DNA, 100 bp, Homo sapiens
gtgaattgaatcacagcagttcagaaagaggaaactggattcagagatgacctgatcagagccatcaagaaactaaaggcacttggcactggcttcggca

SEQ ID NO: 37348 - DNA, 82 bp, Homo sapiens
aaaagaaggggaagaagatcaaaacccaccatgccccagctcctaatttccgaatggaaccagtgacagccctgggtatcct

SEQ ID NO: 37349 - DNA, 98 bp, Homo sapiens
caccccacatggcccacgtacctcagggtttgtgcaagtttgcaaacatgttcaccctgtctcagacctcgagagcatggttcatcgatagagcccgt

SEQ ID NO: 37350 - DNA, 99 bp, Homo sapiens
gccggagctctgatcgccgggaacccttgccgctgctgtcctgcgaccccaagcagttactccacaggatccgctgaacataggatgttgccacaaaat

SEQ ID NO: 37351 - DNA, 82 bp, Homo sapiens
cggagctggtttcaaagttgcaatgggagcttttgataaaaccagacctgtaattcgggaactggagcctctcctctgtcac

SEQ ID NO: 37352 - DNA, 50 bp, Homo sapiens
agactcatagcttacaggccctccaaggttactataacaacagtaccaag

SEQ ID NO: 37353 - DNA, 75 bp, Homo sapiens
tctttcacctcctctgaatgtccacatctgtgctgttctggctgctgtcactgaggtgattcgctcccagggagg

SEQ ID NO: 37354 - DNA, 100 bp, Homo sapiens
cgtcccgctcgctgggagagaggtacctctccttttccctctccctttccctaagctattgacctgaaaagtggttctggaaaagtgtaccaaggccctg

SEQ ID NO: 37355 - DNA, 51 bp, Homo sapiens
tttaaagctattcaaccagatcctactttggggataaaggattatttggtc

SEQ ID NO: 37356 - DNA, 100 bp, Homo sapiens
aagctacaggagaagctggatgagctgaggagagtgagcgtcccctatccaagtagcctgctgtcgcccagccgcgatttccatgaggacaacttacaag

SEQ ID NO: 37357 - DNA, 100 bp, Homo sapiens
ctgggccttcacccgcgggccgtcagcacctcgttcggttgcagggtgaacctggcgatttgcttgcaggcaccgcctagaatccttcgatctcgcttca

SEQ ID NO: 37358 - DNA, 74 bp, Homo sapiens
atatgtctcaggcttccatgcagcctgccttaccgcagaagatggctgtgccacccacgtatgccgatcttggc

SEQ ID NO: 37359 - DNA, 100 bp, Homo sapiens
agggccaggcaggcagtgtatctgaaagtgcgcggagtgaaggaaggaaacgtaaatattttcaccacgatcgattagactgggatgaacacagttctgc

SEQ ID NO: 37360 - DNA, 80 bp, Homo sapiens
tgtgtcaaacatccatatcataagtggaattttggagatattcaaagctgctcctgctaaggccaagccggctgaagctc

SEQ ID NO: 37361 - DNA, 75 bp, Homo sapiens
ctctccagtcccgcgtcggtcgccgcagtcacggagcgcacgccgggtgagagcaaaactttcagcaccacttgc

SEQ ID NO: 37362 - DNA, 98 bp, Homo sapiens
gaagcctcctcgccgccgtttctgagaaggaatgtttctccagtgggttctttgtgctgccatatggttggttgccttggttgtcaatctgatattac

SEQ ID NO: 37363 - DNA, 97 bp, Homo sapiens
gtggatcctgtccttcatgcagtctctcattggcttctttgagactgaaatggcaggctccagacccagttcctggacctgccctggaaaagaagta

SEQ ID NO: 37364 - DNA, 98 bp, Homo sapiens
gcacttggtcacacaagaccatccattagtgaagatgactggaagaattttgctgagctggcactccacagaaggatgttattatcaagtcagatgca

SEQ ID NO: 37365 - DNA, 100 bp, Homo sapiens
gagcggccggagtcagcgatggtgcccggcgaggagaaccaactggtcccgaaagaggcagaagaagcgcaacggaaattgaaaagacaaaatagagaag

SEQ ID NO: 37366 - DNA, 98 bp, Homo sapiens
ggcgtgtatccgcggccgtagcagccgggctggtcctgctgcgagccggcggcccggagtggggcggcgggatatgggccctcacattttccaaacct

SEQ ID NO: 37367 - DNA, 75 bp, Homo sapiens
aggaacgcaggtctgctgccagcttattcagctgattctgaatcatcttacactaccagacctgtgtagattagc

SEQ ID NO: 37368 - DNA, 75 bp, Homo sapiens
ctaggggacctattcagatcctcaatagacagcccatggagggtagatctcggagaataaaggcagccccgttga

SEQ ID NO: 37369 - DNA, 96 bp, Homo sapiens
cgaggacgaggacgaggacgtcaaggcatgaacaaccgggaggtgctggagcaggtggagcgaggctacaggatgccctgcccgcaggactgcccc

SEQ ID NO: 37370 - DNA, 75 bp, Homo sapiens
caccgtggagctccgccgccccgaaactttcaccgcgagcggaaaggaagctgttgaagttattgaagtacctgt

SEQ ID NO: 37371 - DNA, 74 bp, Homo sapiens
cagattattatggtgttattaaggaacctatgggctgttgccaaaatggttcaacagtgctgtacttatgttga

SEQ ID NO: 37372 - DNA, 74 bp, Homo sapiens
gaagaagaggatgaggatgaagatctttctaaatataagttagatgaggatgagctcatggcggaattagaaga

SEQ ID NO: 37373 - DNA, 98 bp, Homo sapiens
cacttggaactcctttataagtgtcagctgtgagccatattgaaggtggtatcatcggtcctgcagcttggaaatatcgtcttcaagaaggaaagaaa

SEQ ID NO: 37374 - DNA, 100 bp, Homo sapiens
ctcagctcggccggggccgcagtctggccacccgcttccatgcggttcgggtccaagatgatgccggcaaacctgtcttcattaaagtccctgaggacca

SEQ ID NO: 37375 - DNA, 75 bp, Homo sapiens
cttctcttctggggcagaacctctggtgtctacctggagcctggcctgctggagcatgccatctccccatctgcg

SEQ ID NO: 37376 - DNA, 74 bp, Homo sapiens
atatggcaaagaaacctattctgagatcgccacatcacagaatcgtatctatctcacagctgacaaccttgtgc

SEQ ID NO: 37377 - DNA, 100 bp, Homo sapiens
aggtctctggagacatcttcagcaggtgagcacctgcggatctgtccccagggctacacctgctgcaccagcgagatggaggagaacctggccaaccgca

SEQ ID NO: 37378 - DNA, 126 bp, Homo sapiens
cccagctctgcagccacatactatccgtttgttcaggaaccaccagtgacagatgagacggtttaagcggaagcatcttactgccattgactgccagcatttggctcggagtcacttggctgtgac

SEQ ID NO: 37379 - DNA, 98 bp, Homo sapiens
tatcggcgccgcggcaagagccagatgagcagcaccagcagtaagagggctccgaccacggcaacccagaggctgaagcaggactaccttcgcattaa

SEQ ID NO: 37380 - DNA, 100 bp, Homo sapiens
ggagacccgctacaacctgaagagtccgggtatcacgacggtgctgaccatgaccaccatcatcacgggcgtgaatgcctccatgccgcgcgtctcctac

SEQ ID NO: 37381 - DNA, 83 bp, Homo sapiens
atggcgaatgtggctgataagtctagattcaccaatgtcaaacagtttattgcaccagcactgctcagcacgcaggcatgtga

SEQ ID NO: 37382 - DNA, 100 bp, Homo sapiens
agagtgaagatggcattgaaggtgatgcaaaccagtccagctacgggggcccagccagccagcagctgagtgggggttacggaggcggctacggtggcca

SEQ ID NO: 37383 - DNA, 98 bp, Homo sapiens
tttccttgatttgtccctcccagttttagatgatcagtgatagaagatggctggcattccttccttcctgagcaagaatttgaactctattcttcagc

SEQ ID NO: 37384 - DNA, 97 bp, Homo sapiens
cagagcgtgtctgaggtggtgcgcggctccgtgctcctgagatcctgaaggagctagacgagtgctacgagcgcttcagtcgcgagacagacggggc

SEQ ID NO: 37385 - DNA, 99 bp, Homo sapiens
tcaaggcatccttcccacccgttcgtttttagctcggctgccgaacttcattgcacagttgagcttgccttgcgccatggactggcagccagacgagca

SEQ ID NO: 37386 - DNA, 98 bp, Homo sapiens
aagaagaagagcccagctagcaccttcgccctctccagccaggtacctgtggagccgccaccaaaatgcagattttcgtgaaaacccttacggggaag

SEQ ID NO: 37387 - DNA, 100 bp, Homo sapiens
ttgaaaaaactgttggagacacacattcataatcagggtcttgcagccattgaaaagtgtggagaagctgctttaaataataatcatgggccagactggg

SEQ ID NO: 37388 - DNA, 100 bp, Homo sapiens
gtgtatcaagtaatggtgcaaagcctgaagatgatgatgctgaagctatccttgctgcagacttcgaaattggtcactttttacgtgagcgtataatccc

SEQ ID NO: 37389 - DNA, 74 bp, Homo sapiens
tcccaagtagctgggaatacaggttatttcttatgagggtcatggatatcccctatctaaacttggaaggacca

SEQ ID NO: 37390 - DNA, 50 bp, Homo sapiens
cagcctcaagccgctgctcttcgctgcccacaaagaatccagctttgaca

SEQ ID NO: 37391 - DNA, 82 bp, Homo sapiens
ccctgcgcgggctcgagagctcgccccgaacgggggtcttcctcctccgccgttgacagacaatgcagatcttcgtgaagac

SEQ ID NO: 37392 - DNA, 86 bp, Homo sapiens
actggattctcaatggaagcaagaggccagtgctgctgaggaagcagatgtgcacgtagctgtggtggtgagaccaggcaacgcag

SEQ ID NO: 37393 - DNA, 100 bp, Homo sapiens
tcctcagcgaggtctccacccgctcgcgctccaagctccctgcggggaagaacgtgctactgctgggtgtttggatttatagcaagttttatgttcctac

SEQ ID NO: 37394 - DNA, 75 bp, Homo sapiens
tggatatttgcttggaaaaacgtgtgggtacgaccttggaccctcactacgtccagcaggcgctgaccaacgtct

SEQ ID NO: 37395 - DNA, 90 bp, Homo sapiens
gaatttcagcgtaaactgcagcatgatgttctgaagcttgagtactatactggcaattgctggagaagattttgcaattgttgcttctga

SEQ ID NO: 37396 - DNA, 100 bp, Homo sapiens
ccctgagtcactgcctgcgcagctccggccgcctggctccccatactagtcgccggactatgacttgagccagctgcagcagcctgacactgtggagcct

SEQ ID NO: 37397 - DNA, 87 bp, Homo sapiens
cagccccagcacccccaaccacagttttattagctctctgggagtgagctacatgatgttgtgcactgaaaattacccaaatgttct

SEQ ID NO: 37398 - DNA, 82 bp, Homo sapiens
cctgcagcgggagctggacggcgagcgcgagcggcgcgagaaaaggagatgctctgctgaggggcagttgctatggttacag

SEQ ID NO: 37399 - DNA, 100 bp, Homo sapiens
ggggaatcaagagacccggtttctaatccctgctctgtcactaacaagctgcgtgatcttcgttgttataccacatttgcataagttagccttggtgaac

SEQ ID NO: 37400 - DNA, 83 bp, Homo sapiens
aagacatcttgagaaaatgtgccacctctcaggtgctggagaatctggtaaaagcaccattgtgaagcagatgaggatcctgc

SEQ ID NO: 37401 - DNA, 100 bp, Homo sapiens
cgggagtgtcctggacccagctgagcgggcggtcattcgcatcgcaggatgctttcattggatttggaggaaatgtgatcaggcaacaagtcaaggataa

SEQ ID NO: 37402 - DNA, 75 bp, Homo sapiens
agcgtggtggggcagcagaagctccagagcccagacttgcagttaccggtattgtaagaacaagccgtacccaaa

SEQ ID NO: 37403 - DNA, 100 bp, Homo sapiens
gtgtggatttgtgtggagcacacattgaatgggccaaggaaaaatcgagcagaaagaatgtctttcaggttaatgttcgtgaagaaattgaagagttttt

SEQ ID NO: 37404 - DNA, 50 bp, Homo sapiens
gaagaaatcaccttttgatataaaggttttgtggtctttgcaacccttgt

SEQ ID NO: 37405 - DNA, 82 bp, Homo sapiens
cggctgctgctgctgctgacgctgctgctgcccggcctcgggatgaaggatttgggggcagagcacttggcaggtcatgaag

SEQ ID NO: 37406 - DNA, 96 bp, Homo sapiens
aagacatggaactctcagatgtggaagatgatgggtcaaaaatcattgatgatgaggagtctgatgaggaagctgtgaagaaaaccaacaaatgtg

SEQ ID NO: 37407 - DNA, 100 bp, Homo sapiens
gaaggtggtgaggcttcccgtcatattccagagtaattccctcctggtcccagacagtctaagaggcacagataaacgcagaaatggacctgaattttcc

SEQ ID NO: 37408 - DNA, 100 bp, Homo sapiens
ccgcgagagatggaagcggcggcgacgccggcggctgccggggcggcgaggcgcgaggagctagatctacacagactgggccaatcattacctagccaaa

SEQ ID NO: 37409 - DNA, 97 bp, Homo sapiens
agaaaaattacagcacatctcagtgaatttgcaagtgaggactactgagcccagccaggctgtatgccattgctgccaaagaaaaagatattcaaga

SEQ ID NO: 37410 - DNA, 112 bp, Homo sapiens
tcacggtgtgccaccctacagtactgccctgacccttacatccagcgaggtttccccatgccctcttttggacttgatgggggtcatttgggacaataaggcctgataactc

SEQ ID NO: 37411 - DNA, 50 bp, Homo sapiens
ctcgaggatgccagtttttagggccaggttgaaccatgattccggtgaca

SEQ ID NO: 37412 - DNA, 100 bp, Homo sapiens
gacaaagcagtacctgaaacagaagatgtgcaggtgctgggcctaaaggagataacatttatgaatggagatcaactatacttggtccaccgggttctgt

SEQ ID NO: 37413 - DNA, 83 bp, Homo sapiens
cgccgctgccgctgccgctgccgcacctccgtagctgactcgacctgcctagagctggaacgttacctccagagcgagccctg

SEQ ID NO: 37414 - DNA, 75 bp, Homo sapiens
gaagtgtgtgtggctggaagatttaatgcctctacaggttaaaaagatcaagtggcatgagcagccttttgggga

SEQ ID NO: 37415 - DNA, 74 bp, Homo sapiens
gggaaggtggccagtggcatctgtgacaacttgcttatcatgtttgagaccttcaacaccccagccatgtacgt

SEQ ID NO: 37416 - DNA, 82 bp, Homo sapiens
tccagcttcaccacgcggctgcacaactgcaggaacaccgtcacgctgctggaggagctccagaacctgggtatcaacccag

SEQ ID NO: 37417 - DNA, 100 bp, Homo sapiens
cgacgcctcattgtgcctccccacctgggctatgggagcatcggcctggaatttatagagcggcagcacgcaaagaacaggtattactactaccaccggc

SEQ ID NO: 37418 - DNA, 82 bp, Homo sapiens
caaatgttgtggtcaagtgcctcacccctttctacaaggagggcaagtttgcttccaagggctttttgtagaaagcacccgc

SEQ ID NO: 37419 - DNA, 83 bp, Homo sapiens
tattttcagaggccggaaaatgccctcaaacgcgccaacgacctgcctagagctggaacgttacctccagagcgagccctgct

SEQ ID NO: 37420 - DNA, 100 bp, Homo sapiens
gctttgaagcctttcagagacagatctttgatgaagatcagaatgatccccttctgccaggaaaaccagtagattcccagacatcgcgaagtgaatctga

SEQ ID NO: 37421 - DNA, 76 bp, Homo sapiens
tggtggatgggccatacgctggagtcatgacagcttatggttactataacaacagtaccaaggtggctgtgaaaac

SEQ ID NO: 37422 - DNA, 96 bp, Homo sapiens
gatggcttcagacagcatatttgagtcatttccttcgtacccacagtgcttcatgagaggtagctaaaattggtgctttctgctgtggccttagtt

SEQ ID NO: 37423 - DNA, 89 bp, Homo sapiens
ctcatgggcacggctcgggacggaccacggaggggtgatcgtgaacatcactgccaccctggggaaccgggggcaggcgctccaggtgc

SEQ ID NO: 37424 - DNA, 89 bp, Homo sapiens
aaaaaagacgaaagaagaagaagagcaaagggccttctgcaggctggagcattggatttgctaaaggagcttaagaatattcctatgac

SEQ ID NO: 37425 - DNA, 121 bp, Homo sapiens
atcgtgaccgagaccgtgaccgagagcgtgaccgagagcgcgaatatcgtcatcgttagaaggtgacaaacagcatgtttggtgcttcaagaaagaagtttgtagagggggtcgacagtga

SEQ ID NO: 37426 - DNA, 75 bp, Homo sapiens
gcacccaggtggttcagctcgcatagtgaggactaccccaatggcacctggctgggcgacgagaacaaccccgag

SEQ ID NO: 37427 - DNA, 74 bp, Homo sapiens
cgagttacgagaattcccggccgctgcaagggatgcctgaggaaacccagacccaagaccaaccgatggaggag

SEQ ID NO: 37428 - DNA, 100 bp, Homo sapiens
tagaggcagcagaagccagggcagctgaaagacagagaccttcagatgagactgatcgtggggttgaccaacaagatggaaagaaccacgcaggatcccc

SEQ ID NO: 37429 - DNA, 82 bp, Homo sapiens
ccgaggctgaggatgatggtagattgccagggcgaccattgacgaggtggagacggacgtggtggagattgaggccaaactg

SEQ ID NO: 37430 - DNA, 75 bp, Homo sapiens
gaaaaagctccaggattctgacagggatgttgcgaagatcctgataacttaagtgactctctcttttccggtgat

SEQ ID NO: 37431 - DNA, 100 bp, Homo sapiens
ggaagagtcttcggcatcgggcgacagcaggtcacagtggacgaggtgttggcggaagtgaaattaaatggtggcagacatgtccaaggaatattgcggg

SEQ ID NO: 37432 - DNA, 100 bp, Homo sapiens
catccgggaagtgcttggggatggagtgcctccaaaggttgctgaggactcacaccacccggcaagaactgctcactacggctccctgccccagaagtca

SEQ ID NO: 37433 - DNA, 100 bp, Homo sapiens
gccccgggcccaggcccggccccagccgccgctgcggagcccgccgggaccccccggagcgcggccacggcgcagggagtatgcggttaatgaagttgtg

SEQ ID NO: 37434 - DNA, 100 bp, Homo sapiens
ggcggcagcacctgggagcgacgggcggcccaggcgcgcagctgggcgcctccttcctgcaggccagaattcagaaggagctggcggacatcactttaga

SEQ ID NO: 37435 - DNA, 130 bp, Homo sapiens
acccagactacttgcagcatgtgtcatcctctgacttgttcctgatctccatggtctcccaacatttgattcgtcctctgatgggcatgagtctggcattacagtgccaagtgagggagctagcaacgtt

SEQ ID NO: 37436 - DNA, 83 bp, Homo sapiens
gctggggcctgctcccggagagatacggctatgtcgatcgaaatcgaatcttcggattttgatggcgacgactttgatgatgt

SEQ ID NO: 37437 - DNA, 114 bp, Homo sapiens
tgagagaggaagcaaccaaagaagacgctgaggatatagtggaaattatgaaatatagtatgaaaacccatggacaatcccgaatatgttgtcaatgacgagaattggcttggc

SEQ ID NO: 37438 - DNA, 100 bp, Homo sapiens
gccgtggaataggtgtatcaagtaatggtgcaaagcctgaagctccagcaggaggaaatggtgcagaaaatgttgctgctgatcagcctgctaacccacc

SEQ ID NO: 37439 - DNA, 74 bp, Homo sapiens
gataagtcgaaggggaaggcgcctgaagaggacgaagatggtgtggacggaaagcaagctcgcagaaccaattc

SEQ ID NO: 37440 - DNA, 90 bp, Homo sapiens
taaagagactgtcttttctgcagtgtatattcttggcaccgttgttgaaaatgaattcattgtaggtcaaaatgcagatcttcgtgaaaa

SEQ ID NO: 37441 - DNA, 83 bp, Homo sapiens
ataaaaggtctaggaccgcttcccccgagccagcagtgccaggccgggcacctggtgtgtaaccaatgccgccagaagttgag

SEQ ID NO: 37442 - DNA, 101 bp, Homo sapiens
cgaagccccctgcaggaactctacaacccaatccaggttacctagggtatgaattaatacagacttggaaactctgaaagaacttagaatcagcattttga

SEQ ID NO: 37443 - DNA, 102 bp, Homo sapiens
tgggcctccaggggacaggcaagtccatggtcatgtcattgttgtcagccaacactccagaggaggaccagagggtcctgctttgttgcccaggctggagta

SEQ ID NO: 37444 - DNA, 82 bp, Homo sapiens
catcgaggcccaaaccgccaaggaaggaagcagccaccctcgccatggcctccccgcccgcctgcccctcggaggaggacga

SEQ ID NO: 37445 - DNA, 98 bp, Homo sapiens
ccgccctccctccgccacgatgccggggatcgacaagctgcccatcgaggagacgctggaggacagcccgcaggtcctcgatgggcttcctggaatat

SEQ ID NO: 37446 - DNA, 76 bp, Homo sapiens
cttggagtccggacatctgaaacttgcctcgtcacgtgttcaatatgctaaagaagtatgtccgcgcagaacagaa

SEQ ID NO: 37447 - DNA, 82 bp, Homo sapiens
acaggactacatggatgccatggctgagaaggggctttgaccacgacctttgaagagcttcattttgagatcaagccccacg

SEQ ID NO: 37448 - DNA, 76 bp, Homo sapiens
agacaccaaataaaatagccatctcacctttgaaatcgccaaataaggtactagcaaaggccagacgtcttactca

SEQ ID NO: 37449 - DNA, 100 bp, Homo sapiens
ggaagatccttcaggtgctggaaaggaatgaggagttacagagggccgagaaggacaggatcagattgtcatggattttaagcacccagatggcattgca

SEQ ID NO: 37450 - DNA, 90 bp, Homo sapiens
catcttcaacgtgggctccaacaccaacgagaccatcaccatgccccacgcggatgaggacggggacttggttgccttttccagtgacga

SEQ ID NO: 37451 - DNA, 98 bp, Homo sapiens
ggtctgccttacaagggacaccatagcctctcaccctaaggagtctcgctctgtggcccacgcctgagttcagtggtgtgatttccgctccctccaac

SEQ ID NO: 37452 - DNA, 96 bp, Homo sapiens
aaaaaagatggcggcgggctcggatctgctggacgaggtcttcttcaacagcgaggtggacgagaaagtgatcttcagtgtctattggatttttcc

SEQ ID NO: 37453 - DNA, 97 bp, Homo sapiens
acgccatagtgaagcttggaatccctcagaacactattttggtgcagactttgctgagggtgacccaggtgagaagccttataagtgctcatgggag

SEQ ID NO: 37454 - DNA, 83 bp, Homo sapiens
aagaagaccttgaaatgcatccgctggtcgctgccggaaatggccaggattttttatcaagcagaaatgcatcgaacaacgag

SEQ ID NO: 37455 - DNA, 83 bp, Homo sapiens
tgcgcagtgcaggcagataccgtttgacaccaccagtaaacgcaaagcactgaagttgaattttgcaaatccacctttcaaat

SEQ ID NO: 37456 - DNA, 90 bp, Homo sapiens
catcgaggagtcagagtggaggctgcagactgtggagccgggagccggcagagtacagttgtgaatttggctccgcgaagtattatgcac

SEQ ID NO: 37457 - DNA, 126 bp, Homo sapiens
aagaggtggccccggatgctgcggcgcccgctggccgggctggctgcggccgccctgggccgggccccaccggacggggacggcaaaacagaacagaaaggcggagataaaaagaggggtgttaaa

SEQ ID NO: 37458 - DNA, 100 bp, Homo sapiens
gttgaatgatgtatttgatcctgattctacccaagtacatatgatttcagctgcaatggcagaattacttactgtcatctacctttccagagtaaatggc

SEQ ID NO: 37459 - DNA, 100 bp, Homo sapiens
tttggtacagagtgttggtgtgctaatagctgcatacatcatacgattcaaggtaggataattgcggactgaaccctcgggctgcggtcatatatgagaa

SEQ ID NO: 37460 - DNA, 98 bp, Homo sapiens
actattctcagcaatcagactgtcgacattccagaaaatgaataagttttacatcgaaaccaagcttaacagagacttaaaagatgaccttataaagc

SEQ ID NO: 37461 - DNA, 90 bp, Homo sapiens
atttacttgatgtccaggggaacatcactcagaagtttgatgtattgacgaaggatcagagattggtgtattcgggcagactgcttcccg

SEQ ID NO: 37462 - DNA, 114 bp, Homo sapiens
ggaccatgttcaccagcaccggctccagtgggctctacattgctacaagtggttggtgtggtctctgtggctgtggccgtgattccttggatcgcaatacccttggttcccctt

SEQ ID NO: 37463 - DNA, 51 bp, Homo sapiens
caactctggatgggattgcaaaatgaccctcaaactgacacaagacctaca

SEQ ID NO: 37464 - DNA, 74 bp, Homo sapiens
tgaagtggcaggaggaggaggaggggctccggctggtctgtggtgaggacactcatgaggaccatgatacttcc

SEQ ID NO: 37465 - DNA, 100 bp, Homo sapiens
agttcttacaacatggcagacattgacaaggtctggaacagaatctgacagtgatgaatcagtaccagagcttgaagaacaggattccacccaggcaacc

SEQ ID NO: 37466 - DNA, 90 bp, Homo sapiens
ctgagccaggagcagcagcctttctgcagaagcttcatgaggcagatctggagttgcagaggaagcgggagtacattgaggagctggagc

SEQ ID NO: 37467 - DNA, 50 bp, Homo sapiens
taaaaatggatttttgcagtacgatgatggagaggagaaaacctatggtg

SEQ ID NO: 37468 - DNA, 83 bp, Homo sapiens
ggactccttcggcagtccacccaccgccgccgcctcccaggatagctggctatttggaatttaaaggatatttgactttttct

SEQ ID NO: 37469 - DNA, 101 bp, Homo sapiens
tgaagattttaggcggtatcaaatggaaagtttttccaaatattcatctgtacagtcaaataaagtgcccgtggtgcagccatcccatgcggtccatcctc

SEQ ID NO: 37470 - DNA, 132 bp, Homo sapiens
tggctgtcagaggtgggcggctttgaccgagaggctgctggagctcgtgtttggacgcatctttaatctcatgaagtacgacagctacagccgcttcttaaagtctgacttgtttttaaaacacaagcgaac

SEQ ID NO: 37471 - DNA, 96 bp, Homo sapiens
cggcatctagtctttccgcttcttgaatttctctctgtaaaggagggatatgggattagaactgtttagaacccatattattagtgataaaatggt

SEQ ID NO: 37472 - DNA, 90 bp, Homo sapiens
atttaaccaacctcagctttacaaaccctgaatttataactgagacagcctttcctgcctcagggaagaagagagagacagactacagtg

SEQ ID NO: 37473 - DNA, 95 bp, Homo sapiens
gggagcggccagctaggagcgctctgtggtgcctggggctgaacgcggctttctggtcagtaacagatccaagagatggaaagagagtagcgctc

SEQ ID NO: 37474 - DNA, 100 bp, Homo sapiens
ccgagagggagtcctcgcggacgtcagccaaggttacagtatagccaggatatacccagtcacttggccgatgagcatgcgctgatagcctcctatgtgg

SEQ ID NO: 37475 - DNA, 51 bp, Homo sapiens
ttgtgaaaaatagtgcaacctacaatgtctctagtgatccctgaaaagttc

SEQ ID NO: 37476 - DNA, 74 bp, Homo sapiens
caatgatcaggttgacccttcactttaccgatttgttacaactcaagcaagggccagcagaaattctcttttga

SEQ ID NO: 37477 - DNA, 80 bp, Homo sapiens
catcgagtcactttgcctggacaggaggaaccctgtacaggtttgcagattccgccagcagcacagcaagctctacagat

SEQ ID NO: 37478 - DNA, 75 bp, Homo sapiens
gtcgggtgatgcccgtgtggcgctgattggatttccctctgtgggtgaaagaaaagatgttgtcccggttaagag

SEQ ID NO: 37479 - DNA, 100 bp, Homo sapiens
gctaaggaaaggtgccacagcagagacgcgaaggagaggccctagaaccacatggagaagggctgtcacttcctgcacatcttggcctgtgctcgcctga

SEQ ID NO: 37480 - DNA, 75 bp, Homo sapiens
ccagcacttaagcaaacgggaattctcgcgtactactcagtcctctatccactggagaggaaaatatctgatgcc

SEQ ID NO: 37481 - DNA, 74 bp, Homo sapiens
catctcctcggcccctggctcctgctcctgggccagctgcgggccgtccagcggctgtgccacttctacagcgc

SEQ ID NO: 37482 - DNA, 101 bp, Homo sapiens
aggcctcctacacctacctctctctggtggacgcggatctgtcaacatgggtaaaggagaccccaacaagccgcggggcaaaatgtcctcgtacgccttct

SEQ ID NO: 37483 - DNA, 100 bp, Homo sapiens
tcgcctactgcgtgcaggatgccaccgtggtggacgtggagaagcggaggaacccctccaagcactacgatgaccagtgtcccagtgaaggaacgagtga

SEQ ID NO: 37484 - DNA, 100 bp, Homo sapiens
attggtggtagcattcgaatgcctgctttcttcaatggtatatttggacacaagccttctccagatctgaaaaccatgagtgaacgcctcaagaataggt

SEQ ID NO: 37485 - DNA, 90 bp, Homo sapiens
gtgcagttcccaaggaggcttcaagacaaagggccccttacacaccagacagctaatgcacaagctgagtgtggaagccccacccaaaat

SEQ ID NO: 37486 - DNA, 106 bp, Homo sapiens
ctactcctgggctcaagcagtcctcctgcctcagtctcccaaagtgctggaattacagggattatggattggatatgtctacttctggatgcaaattttactgttg

SEQ ID NO: 37487 - DNA, 75 bp, Homo sapiens
cttcagttctcccggtgtggccacgagtcggccagatgaattatactttgaggaaggtgatattatctacattac

SEQ ID NO: 37488 - DNA, 90 bp, Homo sapiens
cagacatctacaaccttcgatctcctgacgatcaccaggagactaaagtccatcaaaaacatccagaaaattaccaagtctatgaaaatg

SEQ ID NO: 37489 - DNA, 50 bp, Homo sapiens
acccagcatcagcccctcccacagccaggagatggccacatgaacacaga

SEQ ID NO: 37490 - DNA, 75 bp, Homo sapiens
ggggtaatgacggtgctcgaggcagtgatggtcaaccaaatgatattacagctgtaaccaaagaaggaaaaattc

SEQ ID NO: 37491 - DNA, 87 bp, Homo sapiens
accagtcatttgtggatgtcatggaatttcggatcaccggcgtaatcaacccagcgttggacaaatactttccgtcagactctggag

SEQ ID NO: 37492 - DNA, 75 bp, Homo sapiens
tccggagtcagtcattttactgtcaagacatttcttcggcattctgcaacagactgagagtaatcatgacacggc

SEQ ID NO: 37493 - DNA, 75 bp, Homo sapiens
tttgccaggcgtgaaaaaatacctcactgtgacctacgcatgtgacagatttgaccagttttgggccatcaatcg

SEQ ID NO: 37494 - DNA, 98 bp, Homo sapiens
agaactcattctcaccaataatagtctcgtggaactgcctgtggacatctctacagcaatgagtgaacgggcacttgctcagaaaagactcagtgaga

SEQ ID NO: 37495 - DNA, 100 bp, Homo sapiens
ttctcgatgaattcaaaaaggattcgtccgtgttcatcctggggatgttgcttcagagtgtgaagtcaaatgcatgccaacattccagttttttaagaag

SEQ ID NO: 37496 - DNA, 88 bp, Homo sapiens
tggcagctgctctgaaccaggacctggacccggacccaaagtgccatgtctttaatgtgaagagctggcggtcaccatggcaatgcgg

SEQ ID NO: 37497 - DNA, 100 bp, Homo sapiens
aatttcaagaacagtaaagttggaacacagcagagggtgtgtaataaaatacaggaccggagtaggccctatgatacttttaacttgcactcgttggaga

SEQ ID NO: 37498 - DNA, 73 bp, Homo sapiens
caatggaaaagttagaacttgttagaaaatggagtctaaacacctataaggtggtgaaaactattggcttgag

SEQ ID NO: 37499 - DNA, 82 bp, Homo sapiens
tggcggccggcttggagaggccgagggtttgatgaaggtggaggcagcgcggctctcagatctctgttgaggagctggcgcg

SEQ ID NO: 37500 - DNA, 75 bp, Homo sapiens
cactttgcccctgggaagagcttccagcagtcccatgtgcacgccgacatcggcctggctgcctggggacgcaag

SEQ ID NO: 37501 - DNA, 100 bp, Homo sapiens
gaggcggaggtcgataagctggaactgatgttacagatgtagagctaaaacgactgaaggatgctttcaagaggacctgtggactctcatattacatggg

SEQ ID NO: 37502 - DNA, 50 bp, Homo sapiens
agatgctggagaagtccccttatgaccagatctacgcagaccccaccaag

SEQ ID NO: 37503 - DNA, 75 bp, Homo sapiens
gcagagagggatgcttctgagcggaaggaggagatgatcttccagatcccatggaagcatgctgccaagcatggc

SEQ ID NO: 37504 - DNA, 50 bp, Homo sapiens
tggattgggaaagaccatggcaggcaatggctgtgccctatcttctgaga

SEQ ID NO: 37505 - DNA, 100 bp, Homo sapiens
actcctgggctcaagcgatcatccggcctcggcctcctaaagtgctgggactgcaggtcacgacatttagtgaggtatatgggacaggttgctcatcaac

SEQ ID NO: 37506 - DNA, 96 bp, Homo sapiens
tggaaattgcggcccctctttctcaacccagagcaaattgagacgtccggatcgggctggtggtcatcctggcttccacggtggtggccatgtcgg

SEQ ID NO: 37507 - DNA, 82 bp, Homo sapiens
ccgagagtcaccacaaggccaagggcaagtgatttgacagcccgagcgggaagaagttccgcagcaagccgcagctggcgcg

SEQ ID NO: 37508 - DNA, 90 bp, Homo sapiens
gctggttctgtatgagactagagctacagatctgagaacaattggcaagaaattcctccccagtgacatcaatagtggaaaggtagaaaa

SEQ ID NO: 37509 - DNA, 96 bp, Homo sapiens
gaccaactgccccgccaccgtcatcaacgggcagtttgtcgaacgatgttggactcatagtcactgccagaaagatatctcttccaaatgcttgat

SEQ ID NO: 37510 - DNA, 105 bp, Homo sapiens
ccgcccttgatcttcgctgtggcatggcggacgaggggaagtcgtacagcggtgctgcggatggcaatcctgctgtcttactgctctatcctgtgtaactacaag

SEQ ID NO: 37511 - DNA, 98 bp, Homo sapiens
aagagatggatattgaaatggacagtggagatgaagcctaagaatatgatcagctctttgaggagttgcaggagctgctgacccatgacaccaaggac

SEQ ID NO: 37512 - DNA, 75 bp, Homo sapiens
gtcgtggccggagcggcccgcgcctgggctgccggcacttcgcggcagagagctggcggtcaccatggcaatgcg

SEQ ID NO: 37513 - DNA, 101 bp, Homo sapiens
gggccatgcacagacacagctcatgtctcattaatcacaccaacaaaaagatcctgtggtacaggactgaagtgtgtatgtcttttgtgtgattcttcaaa

SEQ ID NO: 37514 - DNA, 75 bp, Homo sapiens
caaagagcagatgccaaatctgtctctagtgatccctgaaaagttccagcatattttgcgagtactcaacaccaa

SEQ ID NO: 37515 - DNA, 90 bp, Homo sapiens
caaggaaaaactggagagcttcatcaaaaatagtgatagctttgataagtaagaagacaagaggtttcttctcctagaaaagaaacttca

SEQ ID NO: 37516 - DNA, 96 bp, Homo sapiens
tggaaatcctaatgacagtctccaaattcgcctccatctgtaccatgatttttcgtgaagctcgaagaacagtacctagtattgtttacatgcctc

SEQ ID NO: 37517 - DNA, 83 bp, Homo sapiens
cgccgaggcaccgaggcactcagaggaggcccccccaggatgcaatggcgcagcccccccggctgagccgctctggtgcctcc

SEQ ID NO: 37518 - DNA, 75 bp, Homo sapiens
cagagtcatctacttctgtctgcaggagatggctcaagagaaagcatttgatgaatacagaaatatcagccaaaa

SEQ ID NO: 37519 - DNA, 76 bp, Homo sapiens
gccccggaggcagagcggctgccatgatagggatgaggaagaaatgaccaaacgagatgacaaaagagatatcaac

SEQ ID NO: 37520 - DNA, 74 bp, Homo sapiens
ccagggccaggcgatttatgggaaagaggcagacattttcctgggtgagaagccctaccactgcaactgggacg

SEQ ID NO: 37521 - DNA, 95 bp, Homo sapiens
cagcgcgaggtccgcgcagcccagcgcagccatgaatactcccccagttgcaagaggcgcaggaccgtggaagacttcaacaaattctgcacctt

SEQ ID NO: 37522 - DNA, 75 bp, Homo sapiens
gcagatgcccaccggaatggagaaggaagaggagtcggtagcagcaattgcagagacagatgaatctgcagaatc

SEQ ID NO: 37523 - DNA, 100 bp, Homo sapiens
ctgaatttggcaggaaataatcttaaggataacatcaggcttcgatctagcccgtcattttctagtcttcattatcaggatgctggaaactatgtctgcg

SEQ ID NO: 37524 - DNA, 76 bp, Homo sapiens
cttcccgtcagcctggcatttgacaaatgtacagcttgttcttccaaactgtctgaaaacgtggtgaaccgcatga

SEQ ID NO: 37525 - DNA, 98 bp, Homo sapiens
cttgaccctgtattttgggagtcgaacggaccagtcagaagtccagaaagaagagatagaaaagcatcagctaatgctcgaaagaggaaacattcgcc

SEQ ID NO: 37526 - DNA, 100 bp, Homo sapiens
ccccaccactgcagccatgatctccttaacggacacgcagatgtactaatggtcacttgatgtgcgctggctgttttatccacctactagcagatgcccg

SEQ ID NO: 37527 - DNA, 74 bp, Homo sapiens
gaggcccgccgctcgcatgagcacctcatacggctgcttctggagaaggaagagagaagggcacagttacctaa

SEQ ID NO: 37528 - DNA, 82 bp, Homo sapiens
cctggagcctcagttggaagcagccgatccagcctgcggagcctgtggggcagggtgtttgtgaaccgaagtttagcaatgg

SEQ ID NO: 37529 - DNA, 100 bp, Homo sapiens
actggcaaatagtacttcaagagcacagtcttatgtaagttatgcaatgccaaccaaaaccatagaagtgttgcagttgcaggaccaaggcagcaaaatg

SEQ ID NO: 37530 - DNA, 71 bp, Homo sapiens
ggattcaggcgcttccgagcctcacctttattctctcagcacactgcagcactgccagtgaaagatgtaga

SEQ ID NO: 37531 - DNA, 49 bp, Homo sapiens
gcggagctcccccaagagccggaaaggcctgaccttcataagaagaccc

SEQ ID NO: 37532 - DNA, 101 bp, Homo sapiens
ctggctgaattttgcaaggcatctgcagaactagccctgggtgagaacagcgaagtcttgaagagtggccggctggtgggtgctggtcagctacggagtcc

SEQ ID NO: 37533 - DNA, 100 bp, Homo sapiens
cataggaaaaaaactcgggcagaacggtctggataatgggatgaacatggtttcatctccagggagttccacaggaaataccggatcccagctgatgtag

SEQ ID NO: 37534 - DNA, 90 bp, Homo sapiens
agaaaatctacaatttcttcgagacactcatataaaggttttcctttggaatatggataaatacaccatgatacggaaactagaaggaca

SEQ ID NO: 37535 - DNA, 75 bp, Homo sapiens
ggccgtgctgcttatggcggcgctggagagggggcgctgagctgttggggaatactcccccagttgcaagaggcg

SEQ ID NO: 37536 - DNA, 75 bp, Homo sapiens
ggaggctccaagacctcatcaacaattaagcactgttgcaagaattcaattccgtcttcctgatggttcttcctt

SEQ ID NO: 37537 - DNA, 75 bp, Homo sapiens
aaaaaagtctgctactactacgacgactctggcctggttgtcccaagtatttcctatgagctgcataaaaagctg

SEQ ID NO: 37538 - DNA, 100 bp, Homo sapiens
gaaggatatcgacgtcgtgatccagaagtccagagctgaggactgcctgtttgcagtggagaagagtttttcccaacatccaatagtcttcttcatggaa

SEQ ID NO: 37539 - DNA, 82 bp, Homo sapiens
gggacctgggctgggaacccgcggtggagcgggacacgaacgtgttctgggaagtcatcagtgatgagcatggcatcgaccc

SEQ ID NO: 37540 - DNA, 94 bp, Homo sapiens
aaagttggaagttaagggagacaaagttgaaaacaaagtgctggtccttgaatgggcaagagggcacatgaagtacggcgtcctccacattcac

SEQ ID NO: 37541 - DNA, 75 bp, Homo sapiens
ataacattcttggcacaaatactattatggataagatgatgcaaccaggttttcctgtgactgtgacagtagaga

SEQ ID NO: 37542 - DNA, 83 bp, Homo sapiens
gcaataccaggatagctgttgtttcagagaaaggaccgggtgacttttagaagaatcatagtgaaaaataatgcaaagaagag

SEQ ID NO: 37543 - DNA, 80 bp, Homo sapiens
acaacgtgtttgaggcacctacaatagtcaaggtgttcaatgccatcccgcccactttctacagaccctacttcagaatt

SEQ ID NO: 37544 - DNA, 49 bp, Homo sapiens
gccgtctccttaacaccgaacaccgtggaatgaatcttacttgttgaat

SEQ ID NO: 37545 - DNA, 90 bp, Homo sapiens
agaccccggagcacagcaggaagcgctcccggccctcgctcctccgccccgtgtctgcacccgccaagagctgtcgtcgagaaatatctg

SEQ ID NO: 37546 - DNA, 100 bp, Homo sapiens
ataagcatgggaccctgcgcccgggggtcaccaatgaacagacgcccagcggcagcaggatgagtgcggaggcaagcgcccggcctctgcgggtgggctc

SEQ ID NO: 37547 - DNA, 90 bp, Homo sapiens
caaattatctgagactggataagatgaccttcagtgtgctgctcaaaaacaggttggtcaaagaaaaagtgatgtatgaaaaagaggcaa

SEQ ID NO: 37548 - DNA, 100 bp, Homo sapiens
ctctgctggaagctcttgattatgatagttcagatgacagtgattttaaagttggagatgcctcaggtctctgacattgacagagcctggacgttggagg

SEQ ID NO: 37549 - DNA, 76 bp, Homo sapiens
acagcatccaggcctcattggacagcattcgagaagctgacgggtcgcctcatgctggccgtgggaggagcagtgc

SEQ ID NO: 37550 - DNA, 50 bp, Homo sapiens
cctggcacttgtgcccggtcagttaataaaggtatccatggagaacactg

SEQ ID NO: 37551 - DNA, 100 bp, Homo sapiens
agttggaacaaggagaaccactatggacactagaagatgaaatccacagtccagcccacccaggggacgtcgtcgtgcaggcgcccacccaggtgcccgg

SEQ ID NO: 37552 - DNA, 115 bp, Homo sapiens
gtcatttcacatcgaagccatgatttaaatatcggcgttaaggtactatcgtggtgcagtgggggccctcctggtgtttgacctaaccaagcaccagacctatgctgtggtggag

SEQ ID NO: 37553 - DNA, 50 bp, Homo sapiens
attgaatgcaaactggaggtgaaaggttgaatgcctttgagaacttgatg

SEQ ID NO: 37554 - DNA, 103 bp, Homo sapiens
aactggaaaataaagattacagagaaaaaaccaacaccttcctgtgcagtcctgttggaatttgataatcgagttcacattggaccaaaaatggaaattcggg

SEQ ID NO: 37555 - DNA, 100 bp, Homo sapiens
gaaggactcattgatgaaatttatggcattcagaacaacctaactaccataatgaatgctgcatattaagagaaaccacaagaaggttatatgtttggtt

SEQ ID NO: 37556 - DNA, 99 bp, Homo sapiens
gctcccagaaccttcagtgaaagtaaaagaaccttcagtacaagaggctacttctactagaattcataatgcacttaaaggaattccagatgacagaga

SEQ ID NO: 37557 - DNA, 97 bp, Homo sapiens
gaagatcccccggaccaggggcgagggctacccgctctttgccgtgacaacaccgttcccccagccgggctggccagaacacaaagcgtgaatccgg

SEQ ID NO: 37558 - DNA, 100 bp, Homo sapiens
cctcacatctggaaccgtttacatactggtggtggcctctgccatccccgacgaccagggctggggcgtccgccctcagcagccacaggtgggtttgcgg

SEQ ID NO: 37559 - DNA, 128 bp, Homo sapiens
tggcacttcattggccacctacagaaacaaaatgtcaacaaattgatgggcccgatgagagaaagggaaagttaaggatgctggagcagaacaatggatttctctttctctttcatgcaagggatcat

SEQ ID NO: 37560 - DNA, 50 bp, Homo sapiens
ctctgttccaaatgctttgctgaacactctgctccagccaaggtggtgag

SEQ ID NO: 37561 - DNA, 115 bp, Homo sapiens
ggaggatggaggcggtggtgttcgtcttctctctcctcgattgttgcgcgctcatcttcctctcggtctacttctttggcaacaatcccttctcttccctggccgggaactccga

SEQ ID NO: 37562 - DNA, 100 bp, Homo sapiens
tgaagtccagaaatctggaaacatgatacaatctgcaaatgatgatcacagtcgtgttaaactgcaaaatgctgagaatgattatattaatgccagttta

SEQ ID NO: 37563 - DNA, 75 bp, Homo sapiens
gacgatgaggtgacagtcacggaatggcatcaccagctgccggatgcggactgagagtgagccatcttgtggctc

SEQ ID NO: 37564 - DNA, 74 bp, Homo sapiens
tcttgaatgtaaaagaacttggagggtatcactgggatacatcagattggatgccaagcgttcctctgccggac

SEQ ID NO: 37565 - DNA, 82 bp, Homo sapiens
gaagacgtccaatctgagcgtgctgcggacggcgctgcggtacatccaggtcccaggtgtgacaccttcagcaggtctcagg

SEQ ID NO: 37566 - DNA, 75 bp, Homo sapiens
gtgggacgaccgtcggttctgtccgggaggaatgacggggtcaaggttgtgcaccatctccaggtgcttatgatg

SEQ ID NO: 37567 - DNA, 100 bp, Homo sapiens
acacgctctatgccccctattccacacattttcagctgcagggaagaagagcccagacctaggggagtatgatccacttacccaggctgacagtgatgag

SEQ ID NO: 37568 - DNA, 50 bp, Homo sapiens
gggaacgcagctgaaagcgtgaactgtgaagaggatcacctagcccgggt

SEQ ID NO: 37569 - DNA, 80 bp, Homo sapiens
cagtggttctgctggattgataaacccagctgctacaggatggaagagtgtagaaagtgtcccaaagttggtgtctgaat

SEQ ID NO: 37570 - DNA, 90 bp, Homo sapiens
gtgaagagacatgagatgattgccaaacccccagccattgatcagccgcaactacaagggcgatgtggccatgagcaagattgagcactt

SEQ ID NO: 37571 - DNA, 87 bp, Homo sapiens
ttcgcgagcggctgctgagcgtgcagcaggatttcacctccgggttcggctttccagtttggcagcagcactacaaatttcaacttc

SEQ ID NO: 37572 - DNA, 75 bp, Homo sapiens
ggtttttctgccacttttgcaagggcgaggtcagccccaaactaccggaatttagataatgggctgtgtgcaatg

SEQ ID NO: 37573 - DNA, 83 bp, Homo sapiens
ggcgtgagccaccacgcctggcctcactcaaacagtaaacgaggtttcccaaaccactccttatgatccagtgaatattcaag

SEQ ID NO: 37574 - DNA, 100 bp, Homo sapiens
tccagcctgcggagcctgtggggcaggtcacacagcggcagtgataaagagcacagggatgtggagagatctcaagaacaagaatctgaagcacaaagat

SEQ ID NO: 37575 - DNA, 75 bp, Homo sapiens
ccctcagtgacccggtgcagctagaagtccatatcgctacttgtcaataccatgctttcctgtaatatttgtggt

SEQ ID NO: 37576 - DNA, 75 bp, Homo sapiens
cgcaccatggaggaggacgacagctacggaattgcattttgtgaaaaaagaacaagaattttctgcaaggatcat

SEQ ID NO: 37577 - DNA, 51 bp, Homo sapiens
ttgaagctgcatataaaactgctgctgtcacccttgacccaaactttctgg

SEQ ID NO: 37578 - DNA, 80 bp, Homo sapiens
cgcagtgtgcaccggctggctcgttaagtcgccccccgagaggaagctacagcgctacccacacacagcaccttgacttg

SEQ ID NO: 37579 - DNA, 99 bp, Homo sapiens
caggaacactgaagagccctcccaaaggatttgatacgactgccataaacaaaagctattacaatgtgaagactgtgcagtctttgtaactgatgaaga

SEQ ID NO: 37580 - DNA, 100 bp, Homo sapiens
gaagctgcgggagaagcggcgctccaccggcgtggtcaacatccctgccgcagagaaagaagattggcccatgcacaagctggaatgttctcccatggtt

SEQ ID NO: 37581 - DNA, 75 bp, Homo sapiens
gcctcactgagcaaccaagaacatctccagttacagcccgaacactggaaactctgattcgactggccacagccc

SEQ ID NO: 37582 - DNA, 82 bp, Homo sapiens
aagacgtccaatctgagcgtgctgcggacggcgctgcggtacatccaggtctcggcgcggaagatggccggcggcgtggacg

SEQ ID NO: 37583 - DNA, 80 bp, Homo sapiens
gccgctgcccgccaggccccgggggcggcggccaagatgtccgtgccttgctgctcacggccgtgaactgctacagcgtg

SEQ ID NO: 37584 - DNA, 75 bp, Homo sapiens
gctgctgagcaagcccccgttccgctacctgcacgacatcatcacggagggatgggcgtgttttgggcgtgctag

SEQ ID NO: 37585 - DNA, 75 bp, Homo sapiens
gagctgggcggcgagtccaactttggtgacgcggcgcacggcgcggatggtggccgagtggcagtgtgtgggctt

SEQ ID NO: 37586 - DNA, 50 bp, Homo sapiens
aacagaagatgtcttagcttctaatgggagcaaagatggtcgacctttgc

SEQ ID NO: 37587 - DNA, 100 bp, Homo sapiens
tgtcaatacctgtaaagaagagaatggctctactggtgcaagatgttccagcctatcattttacttattctcattcttgtattattttcatcactttctt

SEQ ID NO: 37588 - DNA, 82 bp, Homo sapiens
gacagccgcgcgctgagggtctcggggcgggcgccgcgggacctctccgggccatgggtgctgacctcgctatcaaataccc

SEQ ID NO: 37589 - DNA, 82 bp, Homo sapiens
gtggctcccaagaagtccgagacacgcgatcctgataacttaagtgactctctcttttccggtgatgaagaaaatgctggga

SEQ ID NO: 37590 - DNA, 89 bp, Homo sapiens
ggcggcgcgagtgggcgcgggcccggtgggccaggtatacccgaaatcttgtggatcaaggaaatggaaaatttaatctgatgattctc

SEQ ID NO: 37591 - DNA, 75 bp, Homo sapiens
atttgatcctgattctacccaagtacatatgatttcagctgcaatggcagcctttctgagaaaagtctacagcat

SEQ ID NO: 37592 - DNA, 74 bp, Homo sapiens
tctaattcaacaaatcataacttgatcctgcaaggccttgtcgatgtccgcatccctcataacaacttctaccg

SEQ ID NO: 37593 - DNA, 100 bp, Homo sapiens
ctggtgaccctgcagcgctcgcccacgcccagcgccgcctcctcctcggccagcaacagcgagtacggcaagaagaagctgaaatacctgccctacaatc

SEQ ID NO: 37594 - DNA, 75 bp, Homo sapiens
tttatggaaaagatgcctcctgattttttacaatttgtcacaagacagaagttgtcaaaaacactctaaatccag

SEQ ID NO: 37595 - DNA, 75 bp, Homo sapiens
ggtggccaggttcaacgaccttcgcttcgtgggccgcagtgggcgagaccggccagaatttagcttcacttgaga

SEQ ID NO: 37596 - DNA, 75 bp, Homo sapiens
ccaagcactctcaggaacctggcaacaggtcccagctagtccacagggaccagcagtgccatggaaggatttaac

SEQ ID NO: 37597 - DNA, 105 bp, Homo sapiens
tggctgctcgataaatcagacagaacagttaatcctcaatttaagcctgatctaacccctagaaacagagtgcctggaagagctgggatgtctggttgagtccta

SEQ ID NO: 37598 - DNA, 97 bp, Homo sapiens
tggagattgttcaccacggagcatgaagacagagcgggtgactggaggtggctccccagggaactctaatgatccaggacaaagaagttaccctgga

SEQ ID NO: 37599 - DNA, 100 bp, Homo sapiens
ggcttcataccagctgaagagcgacaagccgctggcagccgcggatctcaccgccgctcaggggtaacaagatgctcaactatagtgctcccagtgcagg

SEQ ID NO: 37600 - DNA, 90 bp, Homo sapiens
ggaatttctacgtttcctcagagagcatcaggaaagatgatgtgatgccagccacttactgtgaaattgatttagataaagaaaagagag

SEQ ID NO: 37601 - DNA, 100 bp, Homo sapiens
agcatccagtggaaaacacgccagcttcaaagcaagcccagcttcaaaaaatgtttatctgctggagttccacccttccctcagcctggcagcacttatc

SEQ ID NO: 37602 - DNA, 75 bp, Homo sapiens
cagagaaggttagctgttctctgatggtgctggagaatctggtaaaagcaccattgtgaagcagatgaggatcct

SEQ ID NO: 37603 - DNA, 100 bp, Homo sapiens
actactgtggcggctccggcatgttcgctcccaggaccccgggcagcggcgggtgctggaccgggctgcccggcagcgtcgcatcaaccggcagctggag

SEQ ID NO: 37604 - DNA, 99 bp, Homo sapiens
attttcttcctgcccctcgttgatgagagcattcgaagtgacctcagcagggcatccagccagccccctgccctgagccagctggtgaacctgtacctt

SEQ ID NO: 37605 - DNA, 75 bp, Homo sapiens
gcatcgccaacccggactggatcaacaccggggagtctgcggatcccgtaccagctttggatctcggacagcaac

SEQ ID NO: 37606 - DNA, 75 bp, Homo sapiens
gcgaagcggagagcaccggggggaggagatgggtactccaaagattcaggtttactcacgtcatccagcagagaa

SEQ ID NO: 37607 - DNA, 100 bp, Homo sapiens
ttaaactcctgctctgtttactgtggattggatattctcaaggaaccacacatgtattaagatttggattggcagcagtagcactgattaatgctgcaat

SEQ ID NO: 37608 - DNA, 75 bp, Homo sapiens
gcaaacttgacactcaccctgaccgacaaagaaacagccttggtataatagcacgttagcatcaagacgaaaacg

SEQ ID NO: 37609 - DNA, 75 bp, Homo sapiens
atcttaccttgcccaccaacttcagagatttgtccaagcagagagagatcatcattgcctgaatttagctttgtg

SEQ ID NO: 37610 - DNA, 83 bp, Homo sapiens
aaattggatgtgaaaatgaagccagaccgagaacccagcttagactagaaagtctagaagacacacacataatgaagggggaa

SEQ ID NO: 37611 - DNA, 100 bp, Homo sapiens
gcagaaagcatttaaccagcatggctacttcatattttggaaagcagtttttaagacaagtcctctcagggtgcgccatcattgtccgaggtcagcctcg

SEQ ID NO: 37612 - DNA, 100 bp, Homo sapiens
tttgttaaggattccaagtaactcttatttgctcaccatgccttctcctatgcctgagtacctgaatgtgcactacattggggagtctgcctccagactg

SEQ ID NO: 37613 - DNA, 74 bp, Homo sapiens
agtatcaacggagtctccggggatgaccgttcattaataaatttgcatctcatgcacaccagttacttcctctt

SEQ ID NO: 37614 - DNA, 100 bp, Homo sapiens
aacatgacgtctccagccaaattcaaaaaggataaggagatcatagcagagtacgatactcaggtcaaagaatcaaaggcatgggaggttgatacctgcc

SEQ ID NO: 37615 - DNA, 75 bp, Homo sapiens
ccgacagcacctgttctatggacagtatgaaggcaaagtcagggcaagtgtccagagaatggctgggatgaaagt

SEQ ID NO: 37616 - DNA, 50 bp, Homo sapiens
aagatcatcattaaggacggaggcacgctccccgcagccaccgccaccca

SEQ ID NO: 37617 - DNA, 83 bp, Homo sapiens
ttagcaagcaatgtggcaaaacgaaaaagctcaatgcctcagaaattcattgaagaagaagaggacagtgctccagtgaaagt

SEQ ID NO: 37618 - DNA, 74 bp, Homo sapiens
ttactattgcctttctgcgcttgatcaccacccttgtcaagggttacccaccactgacgaagatcctggcaagt

SEQ ID NO: 37619 - DNA, 100 bp, Homo sapiens
cagtcatgtgaaaactcatcaccttaaggtgttaagtgtaaggatcttcatgatgaaatttctgtaaatgatccgtgggcgtgagcgcttcgagatgttc

SEQ ID NO: 37620 - DNA, 75 bp, Homo sapiens
cagtcagaggcggaggagaaggagaggctggtcgcaatggaagaagagatcgccgcgctggtcattgacaatggc

SEQ ID NO: 37621 - DNA, 96 bp, Homo sapiens
cgccgccaccgtctgaactaggatgtcccgacatgaagtgtaaacaggaacatcgataagtagtgtaaaaacttgcacaatgaaatccgaagccaa

SEQ ID NO: 37622 - DNA, 101 bp, Homo sapiens
caccctcgctccctctgctcttcctcccttcgctcgcaccatgctggtaggtgagtgctgtcctcggctcactttcctcaagctctccggctgccacggtg

SEQ ID NO: 37623 - DNA, 96 bp, Homo sapiens
cgctgccgccaccaccgttgcttcgcgggctgggaggcccggggtccccgggcgaacagaggctgcgggtactccaaagattcaggtttactcacg

SEQ ID NO: 37624 - DNA, 100 bp, Homo sapiens
agatggtgcagaagaaaccagccgaacttcagggtttccaccgttcgttcaagttatgcaatgccaaccaaaaccatagaagtgttgcagttgcaggacc

SEQ ID NO: 37625 - DNA, 121 bp, Homo sapiens
gcaccctggacctggacaagggctgcacggtggaggagctgctccgcgggtgcatcgaagccttcggttatcaatactctggctgaccatcatcatcgtgggactgactttggtggaagtc

SEQ ID NO: 37626 - DNA, 74 bp, Homo sapiens
ctttctcaacctcatcttctgggtgaactactgagttcttcattatgtctgatggagattatgattacctcatc

SEQ ID NO: 37627 - DNA, 75 bp, Homo sapiens
tggatccttgtgggcatgatccataatcggtttcaagcatttcaccaaccagagggaagaatttgagggcaccag

SEQ ID NO: 37628 - DNA, 75 bp, Homo sapiens
ccagcggctgctcttccgaatcggccatgaagatggacctacagctaaaaaattaaagactgagcaagggggagc

SEQ ID NO: 37629 - DNA, 100 bp, Homo sapiens
cagccatgcaaaggcaggggaggaagccacctcgaggtgactctgttttgagaagtgcaaccagatctctcctggaattcaacacaacagtgagctgtga

SEQ ID NO: 37630 - DNA, 83 bp, Homo sapiens
gggtactacacaaccgtctccagccttggtctgagtggactgtcctgcaggtgagaagccctaccactgcaactgggacggct

SEQ ID NO: 37631 - DNA, 95 bp, Homo sapiens
ccctggacggcattcagtgttttgttatggctgcagcttcgattgccaatattgtaaaaagttctcttggtccagttggcttggataaaatgttg

SEQ ID NO: 37632 - DNA, 90 bp, Homo sapiens
cagtgtcctaccaagattcccgctctccatgatcggtgtctgatgatttgtgagcctcaagtgactactctgtggaatcatctgtccttg

SEQ ID NO: 37633 - DNA, 100 bp, Homo sapiens
tggaagacatggccactccagtcggtgttgagcacggcgagcagtctcaggcctttagtgatgatgaaggaagaggcccagcagaagggactcgctgagc

SEQ ID NO: 37634 - DNA, 100 bp, Homo sapiens
catgacactaagaagtaaaattacgaactcactgagctggaagtcattcaacgggaattgaatagggtggagagattcaaccagttagcgtgaaagttgg

SEQ ID NO: 37635 - DNA, 100 bp, Homo sapiens
ggctaccgggcccagcacagccagcaccgcacgccctgcaagggagataacgaaggaggcccaacttcattcaataaggagcctgacggatttatcccag

SEQ ID NO: 37636 - DNA, 100 bp, Homo sapiens
ccgacgcgcagatagcagagccatccttgggatcctccgagcggcggcgacggctgttgctaagggaggggacgcgcgaggaagcgcgacccgggcggca

SEQ ID NO: 37637 - DNA, 97 bp, Homo sapiens
cctcagcctcctaagtagctgggactacaggttgcctgcggacacgctgggcctctgtcctgatgctgctgagctccctggtgtctctcgctggttc

SEQ ID NO: 37638 - DNA, 115 bp, Homo sapiens
tttcacagtttgcgggactcagtcccatcactccaaggagagaagatttttcttacagagtagctgcttgtcttcctattgatgatgtattgagaattcagctccttaaaattgg

SEQ ID NO: 37639 - DNA, 75 bp, Homo sapiens
gccagccggtttgagaagacctcttccatctaaatgacagggaggctcagaagcaagaagaagatgaaagttgtg

SEQ ID NO: 37640 - DNA, 75 bp, Homo sapiens
actcattgcagcagccttcctcattatcagaaattaaaggggaattttcaggctactaataaaataccagctgga

SEQ ID NO: 37641 - DNA, 75 bp, Homo sapiens
cctgggctttaccatctttgtggctgtgcttgccaggcctggctccagtgctcctgacctctgataaagctgcag

SEQ ID NO: 37642 - DNA, 75 bp, Homo sapiens
cctcttcttagttgatgatttagttgattctctgaaggacattggctccctggattatcaagagtttgtagttga

SEQ ID NO: 37643 - DNA, 50 bp, Homo sapiens
actcaatgagtgggattccagggctccacataaacacggtttccttgaag

SEQ ID NO: 37644 - DNA, 101 bp, Homo sapiens
gctcgcttcacggaggcaatagctagccgatggggcattctcttctcccaccctcgggactttaccccagtgtgcaccacagagcttggcagagctgcaaa

SEQ ID NO: 37645 - DNA, 50 bp, Homo sapiens
ctatggcatctatgttatcaaccagagaaccatggagtctggcagtaccg

SEQ ID NO: 37646 - DNA, 97 bp, Homo sapiens
ccgtgggcgtaggaccctccgagccaggcaagaattggatccatgtaacgctgagctgactattttagggaggaatacacaaatatgcgaatctatc

SEQ ID NO: 37647 - DNA, 74 bp, Homo sapiens
agaactcatagtggagaaaaaccttaccagtgtgaatactgtttacagtgtcgagttatagcagtgctggattg

SEQ ID NO: 37648 - DNA, 82 bp, Homo sapiens
ctcagatatggcagaagtgaagtcaatgttccgggaagttcttccaaagcaaggttgattgtacacagcactatgaactctg

SEQ ID NO: 37649 - DNA, 100 bp, Homo sapiens
gaggacccactcccccaggactcctttgaaggcgtggacgaggacgagtgggcaggatggactccaacactgctccgctgggcccctcctgcccacagcc

SEQ ID NO: 37650 - DNA, 100 bp, Homo sapiens
gttgccggaagttgagcggcggctccaccaaggacctgatcgagacttgctgcgcagccggacagcagtgggccattgacaatgacgagtgcctggagat

SEQ ID NO: 37651 - DNA, 87 bp, Homo sapiens
tcgagaggaagattcttacctctttgatctcgacaataagggagcaaagcttgtattggcttgcaattcagcagctgcctacagacc

SEQ ID NO: 37652 - DNA, 51 bp, Homo sapiens
acatgatgtcagagtctgtgggactgaaatgctgacttttaacccacacaa

SEQ ID NO: 37653 - DNA, 75 bp, Homo sapiens
agtgactacccctaacgcacaataatatggctccgatgggctcaaagagagattctccctgagaaacaagcagaa

SEQ ID NO: 37654 - DNA, 78 bp, Homo sapiens
ggagactgaccgcaacggcaggactagacgcttgaagcaaagctgccatcccagaagacgacatgctctcagcaaccc

SEQ ID NO: 37655 - DNA, 98 bp, Homo sapiens
gacgatgaggtgacagtcacggatatgggccctcacattttccaaacctgtccatctgctaactattttgactgcagagccatgtccattggagcccg

SEQ ID NO: 37656 - DNA, 100 bp, Homo sapiens
ggcggcgctcctactccctccccggactccgcgggttactcactataaacaatatccacccaacacaagcaaagtttattcctactttgaatgccgtgaa

SEQ ID NO: 37657 - DNA, 75 bp, Homo sapiens
gccctcgatgtgctctgcgtgttgctgggattaaccacaatgaacggttggaattcctgggtgatgctgttgttg

SEQ ID NO: 37658 - DNA, 100 bp, Homo sapiens
ctcagacgctccgagaagcttcaggcagcataacacttacagatgtgactccctgcatgtctcctctgccacatgacagtcctttaatagagaagccagg

SEQ ID NO: 37659 - DNA, 100 bp, Homo sapiens
tgcccccagggctggctgtttctgtgcttaaagccatcttccaggaagtgcatgtacagccagcagaggcctcggaggtggcgggtgggacccaacctgc

SEQ ID NO: 37660 - DNA, 90 bp, Homo sapiens
gtgaaccatgattgtgccactgaactccagcctgggtgacagacttcatctcaaatatatagggtggattacggaacaacaacgagaaag

SEQ ID NO: 37661 - DNA, 100 bp, Homo sapiens
ttttgaagctccaaacttctttcaaaagtacaaggtgggattaaaaactcagcctgaatcaaaatgccctgagctgcttgccaattactgtgacatgttg

SEQ ID NO: 37662 - DNA, 82 bp, Homo sapiens
atgaaagcagaaccaactcggatattgttgagacactggccaaaagaagaccctagacaagaaagatggaagacgaatgtct

SEQ ID NO: 37663 - DNA, 100 bp, Homo sapiens
gcagagttggtgagcagcgctctggggctcgccttgtatctcaacaccctgagtgcggatttctgctatgatgacagagagcctcgcaaggtagtcctgc

SEQ ID NO: 37664 - DNA, 90 bp, Homo sapiens
ttctttcattatggagggaggtttggcagatggagaacctgatcgaacttcgagcctgactagacaggaattctggcaactgctccagca

SEQ ID NO: 37665 - DNA, 75 bp, Homo sapiens
gaggaggaagacgaatcgttaaacatctgaaagggtcaggtcatcatcagatttgaaatatttaaagtggataca

SEQ ID NO: 37666 - DNA, 88 bp, Homo sapiens
aatgtcttaactacaaatacagatggcaagattgagtttatttcaacaatggaaggtaggagatcaaatcattgaaatcaatggggaa

SEQ ID NO: 37667 - DNA, 96 bp, Homo sapiens
ttcggcgaggagcatcccttctatgacagggtggacccttgggagtgctaccaggacacctggcagacgacctgcagcgtgttggaacaccaccgg

SEQ ID NO: 37668 - DNA, 100 bp, Homo sapiens
ggcccagctgctcctggtgcagtggaagcagaggcacccacgctcctacaataatgtgacagtgatgataacatgggtgccaaaaatacttcaataggag

SEQ ID NO: 37669 - DNA, 75 bp, Homo sapiens
tcatgcctaaccttctatgaggcagagatcaatcttcagacgcccagcggcagcaggatgagtgcggaggcaagc

SEQ ID NO: 37670 - DNA, 75 bp, Homo sapiens
ggtggagctccggcagccgccctgatgatccagatcctgatgatggatttaactataaacagatgatggttagag

SEQ ID NO: 37671 - DNA, 75 bp, Homo sapiens
ctcctgagtacctgggactacaggggatgatggaactaacaaagaagccacaagcacaggaaagttgaaccagga

SEQ ID NO: 37672 - DNA, 75 bp, Homo sapiens
ggagcggcttttgtctacttggctgacctcctgatgcctcacttgccagatgaattatactttgaggaaggtgat

SEQ ID NO: 37673 - DNA, 101 bp, Homo sapiens
aaggtgtcggtgttccacgtgaagctcaccgacagtgccctgagggccttcgagagctaccgcgccagacagattgacttgatgcacaacatcacaaaggc

SEQ ID NO: 37674 - DNA, 101 bp, Homo sapiens
gccagagattctgggacaggactaatgatgtctgttaactttagtacccaggaagatgagaatgtgcctactgctcctgatcctccaagtcaacatttacg

SEQ ID NO: 37675 - DNA, 98 bp, Homo sapiens
atggatattgaaatggacagtggagatgaagcctaagaatatgatcagctcatttgatatagtcatcgttggtggcggaattgtggggcttgcctctg

SEQ ID NO: 37676 - DNA, 100 bp, Homo sapiens
tccttccctcctgccccgtccatggctgtgggcttgttagagtgctgtgcaagatgtctggtaggggccccctttgcttccctggtggccactggattgt

SEQ ID NO: 37677 - DNA, 80 bp, Homo sapiens
ggagctaacctcggggaccgagatgcaggccgagcaggagctccgcgtggcccagacagagtttgaccggcaagcagaag

SEQ ID NO: 37678 - DNA, 75 bp, Homo sapiens
tggagtccagtggtgcgatctcggctcactgcaagctctgcctcccaggcattccgcgagttatccaatgtaaat

SEQ ID NO: 37679 - DNA, 100 bp, Homo sapiens
ttgcctccagtggagatatcatcaagttaataacgacatgatagtcactgacaacaacggtgcagtcaagtttccacaactgtgtaaattttgtgatgtg

SEQ ID NO: 37680 - DNA, 75 bp, Homo sapiens
catgtcctagacatcacttagagctaagaagaaatttcctgacttgtttgtcttcttggaagattcctcctcatg

SEQ ID NO: 37681 - DNA, 75 bp, Homo sapiens
tcctttatatagaagggagagtaggccataaaattttgagtagaaaaatccagaaatttgaaaatcagtatcgtg

SEQ ID NO: 37682 - DNA, 110 bp, Homo sapiens
tcttttcttaacctgggaagtggaaccggatatttaagtacaatggtgggcttaattttagttaatagaagatgaaattgcaaccattcttaaatctacattgaaaggac

SEQ ID NO: 37683 - DNA, 74 bp, Homo sapiens
agacccgtccgggtgctgaaagtccacggatgctatccctggtcaaatcagagaattaaacaaccaccatgtcg

SEQ ID NO: 37684 - DNA, 96 bp, Homo sapiens
gataaccgaaagagacttcttttgaatcttcatttggatcaatcattcaagctctattaccaggttttaaacttcgccatgatcgtgtcttctgca

SEQ ID NO: 37685 - DNA, 83 bp, Homo sapiens
gagaggagctgtggataacgggaggtgaatttccatgtcaacatagtcctgactgacgacaacagtggagacttggacccagg

SEQ ID NO: 37686 - DNA, 80 bp, Homo sapiens
aatccggagggggaaaaaatcccaaggtctgcaaaggtgacttcatggtcatgacgattttcttcaatgtgagcaggcgg

SEQ ID NO: 37687 - DNA, 100 bp, Homo sapiens
ggggcgccgtccgcgagcggcctggactgccggagacccgcgggagggagcgcctcgccagttgctgatcatctgggctgtgatccacaaacccggttct

SEQ ID NO: 37688 - DNA, 100 bp, Homo sapiens
ctctggagctgtggttgctgctgtgatatggaggaagaagagctcaggttatcgtgtgaaggaggcctgcggggagctgacgggcacagtgtgtgaaccc

SEQ ID NO: 37689 - DNA, 100 bp, Homo sapiens
ctcccactgaaggcatccgtggttgtttttaagagtacccaaaggcaagtggaacagctctaatggggttgaagaaaaggagacttgggtggaagaggat

SEQ ID NO: 37690 - DNA, 78 bp, Homo sapiens
acaagaggaaaaaagagatcggggtccaaaatcatgataagtctacatcagcatcagcatctgcgtcaccatttcaat

SEQ ID NO: 37691 - DNA, 88 bp, Homo sapiens
cttcatccagaagggacagtttgtgccagctctccagagagaaaagagacagacattgggtgtaggacagtgaactgagaaggaagct

SEQ ID NO: 37692 - DNA, 114 bp, Homo sapiens
cattcctatgactgtagattttatcagactgaagagctattgtgctcgattatttgatgaacctcagcttgctagtctttgtctagatacaatagacaaaagcacaatggatgc

SEQ ID NO: 37693 - DNA, 50 bp, Homo sapiens
gttggctggactcttcatgacaggatgacccctaaatccaaaaggaagag

SEQ ID NO: 37694 - DNA, 99 bp, Homo sapiens
gcggacgctcggtcccgcgctgcgcatccccgcggacgccacagcgcttctgcagatctccaggggagcccaccagcctagtcaacatggcctcggaag

SEQ ID NO: 37695 - DNA, 100 bp, Homo sapiens
cagggttgtatgggattgccatgtgtggtgatgtaacaagcttagtcatccagtggagatttgtgaacagggtccagaagcagatgaacgccttcttgga

SEQ ID NO: 37696 - DNA, 100 bp, Homo sapiens
agaggaggaggttaagaactcagtcaggctcatccccagctggaccacggtgggcagcaggatgggtgtggaagcagtgatggcacttttggaggggacc

SEQ ID NO: 37697 - DNA, 101 bp, Homo sapiens
ggcggccgagcctcgctttgagagacagaattggcttggaaacgaaattgaggttatggtcagtactgaggaagccaaacgccatctgaatgacctccttg

SEQ ID NO: 37698 - DNA, 101 bp, Homo sapiens
aggtggccgaatcttccttcaggatatcaagctgacattatctctacggtagaattcaaccacacgggagaattactagcgacaggggacaaggggggtcg

SEQ ID NO: 37699 - DNA, 101 bp, Homo sapiens
cccagcaacaattcttctgccagtgggacacagcaggccaggaaagatttcgaacaatcacctccagttattacagaggagcccatggcatcatagttgtg

SEQ ID NO: 37700 - DNA, 100 bp, Homo sapiens
gccgcatctctctgcagcaactcggttacattgattacccacctagtacaacatcttacgggaagagcatagtatttcctagaggaatatgaacataaca

SEQ ID NO: 37701 - DNA, 90 bp, Homo sapiens
tacatgatttatagtcttgctccccaatatgttatgtatggaagccaaaattacttaatagaggacatccaggcagaaattgatgcccac

SEQ ID NO: 37702 - DNA, 98 bp, Homo sapiens
gccctcatcgagagcgcacacaagacgccactgtaaaaggagatggcagcagaaaaggccaaagcagcagccggggaggccaaagtgaaaaagcagct

SEQ ID NO: 37703 - DNA, 82 bp, Homo sapiens
ggagctggaaattcctgacgttcattgatctggtgagttgctacagtggctggagagacgacatctgctccatgggctggtg

SEQ ID NO: 37704 - DNA, 83 bp, Homo sapiens
ctcaagaagaagaagttgcgaaggatccccaacggggaggccaacgtgaagaaatttggtcgtattgggcgcctggtcaccag

SEQ ID NO: 37705 - DNA, 51 bp, Homo sapiens
ggcatgtcgatttgtccttcactacagctccttgaggagaatgaccagctg

SEQ ID NO: 37706 - DNA, 80 bp, Homo sapiens
agaagtcgcgtgtctaggtgagtcgcggtgggtcctcgcttgcagttcagcgaccacgcccttcagatatttcaacactc

SEQ ID NO: 37707 - DNA, 50 bp, Homo sapiens
ctatcgggactcggcgaggacgtgcagctgtctgcttcagaaagtgaggg

SEQ ID NO: 37708 - DNA, 95 bp, Homo sapiens
tctgacagccctgtgtgacaccaagataagtaacaatatactgatgataatgctctgattcctaagaattcttctgtaattgttagaagaattcc

SEQ ID NO: 37709 - DNA, 75 bp, Homo sapiens
gcgctgcttccacccaacttcctgttaggccctgagcctgtgcaattatttcgagagtcaaaatgtggatttccg

SEQ ID NO: 37710 - DNA, 96 bp, Homo sapiens
aacatctgcgaggacatcatctgccatgccctcctggaccctgacaagaatttggactcatatcaagatgctctgaagaagaacaaccctttagga

SEQ ID NO: 37711 - DNA, 100 bp, Homo sapiens
ctttttatgtgcgaacatgtaacaagaatccaaagaaaacaaaatggtggtatcatgccctactgccaataaagggaaaataagagatgctcatcgacga

SEQ ID NO: 37712 - DNA, 100 bp, Homo sapiens
cggggacggctgcgcgggacggctctgtaggaaggaacttggttccccctccctcagcttccgccccaaaagatttgcctactggctgggaagaagcata

SEQ ID NO: 37713 - DNA, 75 bp, Homo sapiens
gtggtgtctcggtccatgactctggagatccgagaaggaaggttaccacattctcatctggagccaggaggaagc

SEQ ID NO: 37714 - DNA, 90 bp, Homo sapiens
ctccgtggccttagctgtgctcgcgctactctctctttctggcctggaggctatccagcgaagccgagatcccccgcgaggtgatcgaga

SEQ ID NO: 37715 - DNA, 83 bp, Homo sapiens
agcagatccgatggagaggctgagctgctccaggacttgggattcccaacttcttctggagcctggggatcggtcacactggt

SEQ ID NO: 37716 - DNA, 90 bp, Homo sapiens
ggcgaggtccccaaggacaaggaaggaggcgtgtttgacctggggcccttcattgtagctctggcaggctgccctgagcacgctcaaccc

SEQ ID NO: 37717 - DNA, 100 bp, Homo sapiens
ccggagacttttggggggaaactaggtcgatggtcggcggcgcccggatgggcagctgagctttctaagaagtatggagtacatgtttgtggagaaggtg

SEQ ID NO: 37718 - DNA, 101 bp, Homo sapiens
ctggggctccctgtatgcatggtgtggggttggtgtgattagcttcgcagtctggaaagctttaggagttcacagttttctggaacattcaaattcagtgt

SEQ ID NO: 37719 - DNA, 50 bp, Homo sapiens
ccgcgtcggcgctggggacaaaggttttaaatgcacagagagcaggatac

SEQ ID NO: 37720 - DNA, 83 bp, Homo sapiens
ttctccgtgggcagcattggcgaccagcgcttcacgatttatgtggtccagggcatatatggctatcatcattatatgcagga

SEQ ID NO: 37721 - DNA, 83 bp, Homo sapiens
cggctgctgctgctgctgacgctgctgctgcccggcctcgggacagagattgcgaagagactgaacacaattttagcacagat

SEQ ID NO: 37722 - DNA, 82 bp, Homo sapiens
ggaagatggctgtggaaggtgttttaaaggcctcattgctacgatttcagagtaccctggtaatagctgagcatgcaaatga

SEQ ID NO: 37723 - DNA, 75 bp, Homo sapiens
ggacaagtggaatatctactgaagtggaaaggcttttctgaataacgaaggaggcccaacttcattcaataagga

SEQ ID NO: 37724 - DNA, 100 bp, Homo sapiens
gctatgggatctcagacaccaccttagaagaggcaccgtctgcgtcctgctgtccttccccttcatcttcagcccctgcctgggctgtggggcggccacg

SEQ ID NO: 37725 - DNA, 90 bp, Homo sapiens
tggagaaagagaatctcatacacctgtctctattcaggaagagatagaggaagaatacaagcgattgagtgaagcactagcagaggatgg

SEQ ID NO: 37726 - DNA, 100 bp, Homo sapiens
ccctcgcctcctctcctaggtgccggccgggagggcggccgcagcaggttccatcataatgaatggatccaatatggcaaatacatcaccgagtgtaaaa

SEQ ID NO: 37727 - DNA, 100 bp, Homo sapiens
ggaccaggtgaagagtcctggatggcagatggggggaccccggtacggacctgtgcaggtgaggacaggccaggtgtaattagcatggtcaatgcgggag

SEQ ID NO: 37728 - DNA, 100 bp, Homo sapiens
gtgtcttgtgtccgcttctcgcccaacagcagcaaccctatcatcgtctcctgtggctgggacaagctggtcaaggtgcctaagcctgtgcatcagcctg

SEQ ID NO: 37729 - DNA, 98 bp, Homo sapiens
gcacatctcctgtcccctgctcatcctgcacgctgaggacgacccggtggtgcccttccagcttggcagaaagaaccccaaggagtggaccaagaagg

SEQ ID NO: 37730 - DNA, 99 bp, Homo sapiens
tggctgggaagaagcatatacttttgaaggtgcaagatactatataaacccttacagtgaggtttcttactaagcgattcattggagaatatgcttcta

SEQ ID NO: 37731 - DNA, 100 bp, Homo sapiens
ctgaggcgggcagatcacttgagatcaggagttcgagaccagcctgtgctatatgggtcatggtttgaccacattcatggctggatgcccatgagagagg

SEQ ID NO: 37732 - DNA, 74 bp, Homo sapiens
tggcaggctccctgcctccctgcgtggtggactgtggcaccggaatgtatgacaacatgtccacaatggtgtac

SEQ ID NO: 37733 - DNA, 98 bp, Homo sapiens
agtacaaccgcttcgagaagcgccacaagaacatgtctgtacacctgtccccctgcttcagggtcccgacggcctacacatggggcgctgtgggcgcc

SEQ ID NO: 37734 - DNA, 100 bp, Homo sapiens
acatcttcctgcacatctctgaaaggatatggccctgaagccacatgagcggaaggagaagtgggagcgtcgtctcatcaagaagccccgggagtcggaa

SEQ ID NO: 37735 - DNA, 89 bp, Homo sapiens
ccaccaccaccaccaccacagagtctgtggaagaggtggttcgagctactccctgtatcaaagccatcagcccgagtgaaggatggacg

SEQ ID NO: 37736 - DNA, 74 bp, Homo sapiens
atttaaatggttctggcaaactgctcaagattcgccatgaagtcagcgtaaataatgtaacacataaactgtgc

SEQ ID NO: 37737 - DNA, 75 bp, Homo sapiens
gaaaccagcaggaaggaagatgtctctcagaaacaaagctttatttgaaggtagacgcatcgaatttgcagaaca

SEQ ID NO: 37738 - DNA, 83 bp, Homo sapiens
atcatgtctgcgagccaggattcccgagaggtggagaagagcgagtacttgagaaagaagaggaagaagatgatgatgaagat

SEQ ID NO: 37739 - DNA, 100 bp, Homo sapiens
aagaaatgcagaaacgtaaagaaatgcaattgaggttcatggatcaacatccggagatggatttttccaaggctaaattcaactagcccctgttttttcc

SEQ ID NO: 37740 - DNA, 49 bp, Homo sapiens
cagctgtgaaagcaacataaatgttcattgactccacttgatgcgagag

SEQ ID NO: 37741 - DNA, 90 bp, Homo sapiens
ctattgggatgtcgattgcactttactgggggatttgcctcagatggagttacagctcctgtatcacgtggaagagatagttatggaggt

SEQ ID NO: 37742 - DNA, 98 bp, Homo sapiens
gtagctaagacgccaggatttcctggaagcagagaaatgatgccatggacaatattaccaggcagaaccaattctacgatacccaagtcatcaaacaa

SEQ ID NO: 37743 - DNA, 82 bp, Homo sapiens
cttacgtctgcggaagtgcagctgcctcagttcttagcgcaggacccctcgtccagtcattgtggaacccatggagcagttt

SEQ ID NO: 37744 - DNA, 75 bp, Homo sapiens
gcagcagcagagatgataacatgtttcagatgccaacgtccggcggtacctccagctgacacagtcagaactcag

SEQ ID NO: 37745 - DNA, 97 bp, Homo sapiens
gcgtcctggcctgtcccgcccctctccccaagcgcgggcccggccagcggaagcccctgcgcccgcgccatggatttaatagatgagggtcatgcag

SEQ ID NO: 37746 - DNA, 75 bp, Homo sapiens
gtcaccgccgcccccccagacaagatggacaccgcggaggaagatttgaggcttaagcaacttcttccggggaag

SEQ ID NO: 37747 - DNA, 98 bp, Homo sapiens
cggtcagaatagagggtatgcatttatcaccttctgtggaaaggaagctgcacaggaagccgtgaaactggaacgtcaaggtcgtgggaaataaaagg

SEQ ID NO: 37748 - DNA, 74 bp, Homo sapiens
gggcagcctgctggaccctgccaagaagtcgcccatcgcagcagctcggacagggtgcaggcagatgacctggt

SEQ ID NO: 37749 - DNA, 96 bp, Homo sapiens
cgcagccggcgctggggacgcgcgcggccgagactctggcctgcagtcgccgccgccgccgccagagctgtaggtaaaacttgcctactgatcagt

SEQ ID NO: 37750 - DNA, 83 bp, Homo sapiens
cgtcagcactgactttcagctatggaatcgagaggtggagaagagcgagtacttgagaaagaagaggaagaagatgatgatga

SEQ ID NO: 37751 - DNA, 75 bp, Homo sapiens
aagaaactgaagaagaaaatacaacgtatactggaccagaagtttcagcatggattccgtgaaggaacaacacct

SEQ ID NO: 37752 - DNA, 75 bp, Homo sapiens
atgcatcccattcagcaaagtagagttccccatggtagaatgagaaacctcaattatttttccaatgcttatgca

SEQ ID NO: 37753 - DNA, 100 bp, Homo sapiens
caaggaaacctttccaacacagatgtccaagctgccaattggataacagggcaagattcagaggaagaaaaggatattgatgcattatgttgaagccaac

SEQ ID NO: 37754 - DNA, 76 bp, Homo sapiens
acctgtgtgtcagttaatgtggtctcccatgtctcatgtttctgaaggattgtcattcttgcatagcagtgtgaaa

SEQ ID NO: 37755 - DNA, 74 bp, Homo sapiens
gaccaagaagccaaagaactggctaggcaaataagctttaagtgatattctaatggagttcctgctcaatgtca

SEQ ID NO: 37756 - DNA, 75 bp, Homo sapiens
ggaagatggcggctgggttcaatttgctgacctctctgaggctgccaaccggaacaatgacgccctgcgccaggc

SEQ ID NO: 37757 - DNA, 75 bp, Homo sapiens
ccgcgcacttcgtcatgttcttcgcgccctgccctgggcgctgcctatggcacagccaagagcggtaccggcatt

SEQ ID NO: 37758 - DNA, 88 bp, Homo sapiens
cagacggctcacctgtgcgggatggaacaaaagcgtccgtctccaagagagtatgaagagagtgcgtctgtagggcagggaagatggc

SEQ ID NO: 37759 - DNA, 73 bp, Homo sapiens
ggaaaatggggtatttcctagatgtgacgagtagcacagcccctctatggtttagatggcagtgctgcaaagg

SEQ ID NO: 37760 - DNA, 75 bp, Homo sapiens
aaagaatatgaaattcatcatggaactgtggctgcaccatctgtcttcatcttcccgccatctgatgagcagttg

SEQ ID NO: 37761 - DNA, 75 bp, Homo sapiens
cataccaattcttgaatgacatccgagcgaaagagaaagagacctacagcttactccttgatgtggaggactatg

SEQ ID NO: 37762 - DNA, 80 bp, Homo sapiens
cctttacttttacctacgttggcggccccagaaggtaacatttgtcgatcacccattgcagaagcagttttcaggaaact

SEQ ID NO: 37763 - DNA, 96 bp, Homo sapiens
aaagattcccaggatgtgagcaacacgggaccggtctgttgcggttctcccacttttccataagcagaacaagaaccaaatcaaacgtcttaacgc

SEQ ID NO: 37764 - DNA, 100 bp, Homo sapiens
tgtgaccaagaaccatgcctggtggatccagacatgatcaaagccatcaaccagggcaactatggtgacgcagccgccaaccatcaccaagcagtcagcg

SEQ ID NO: 37765 - DNA, 50 bp, Homo sapiens
gctcttcaacaacgtcaagctacagctggttgccacatccaagaagaacg

SEQ ID NO: 37766 - DNA, 100 bp, Homo sapiens
gctgtgctatatcacaagatgaacaatgagaagcaggcagaagattgcatcacacgggtttctcctcttcaaaaatctgaagttgttgagatggttaaga

SEQ ID NO: 37767 - DNA, 100 bp, Homo sapiens
gaagtgtgaaagcattgatggaatgtgctttagaagttaaaaagtttcagacccaaagtttacgcctatcagacctacacagaaaatcgcatctttggag

SEQ ID NO: 37768 - DNA, 73 bp, Homo sapiens
agaagtcaattcaaaggacctgcccccagagagaaaggtgcctaccagtaacacagagggaggctggtcctgc

SEQ ID NO: 37769 - DNA, 90 bp, Homo sapiens
ccggtaaccagttctattttgggacagggacaagtttgacggtcattccaagaaaatgtttataggaggccttagctgggacactacaaa

SEQ ID NO: 37770 - DNA, 100 bp, Homo sapiens
atctgctcgggcgaagatccgcatcacctccagccccatttttatcaccttctacatcctgatgacacaggctgtcctagcagccagtcagtgtctcctg

SEQ ID NO: 37771 - DNA, 88 bp, Homo sapiens
gctgggcacccgagcgctccagattgcgaaccaggattcttgactgcatttgagtatagtgaaaagaggaaaatggttttccatatca

SEQ ID NO: 37772 - DNA, 100 bp, Homo sapiens
taggaggctcgggtcgttgtggtgcgctgtcttcccgcttgcgtcagggacctgcccgactcagtgttattagaggaagtaacacaaggggatatgagtg

SEQ ID NO: 37773 - DNA, 101 bp, Homo sapiens
gtagcttggttggtggtaccctaaaattagggcatgattaagagaaactccagaaaatcttgccaaacttctgaccaggatgtatttaaaatcagaagtca

SEQ ID NO: 37774 - DNA, 100 bp, Homo sapiens
cggcccgagacctgggccacaacacggctggagctggagggccgaggggccattgagaaactagtcgctcttctcaacacgctggacaggtggattgatg

SEQ ID NO: 37775 - DNA, 76 bp, Homo sapiens
cgcaccttcagtcttttccagcagctcattcagagatgaaaggttgtatcaaagttcttaaggaccaacctcctaa

SEQ ID NO: 37776 - DNA, 100 bp, Homo sapiens
acatctgggggccacaaatgctccttctcctggagacgcaactcaagtgtgtcccggcatggatatccggaacaacctcactaggttgcatgagctggag

SEQ ID NO: 37777 - DNA, 75 bp, Homo sapiens
gaagaagaagaagagcatgatcggcatgtccaccaaggcagatgtacggagcgcaagaggacggcagcgtcggcg

SEQ ID NO: 37778 - DNA, 96 bp, Homo sapiens
gttgttctcagctacttgggactcctctctcaagagaagctgcaagagcaacatctttcctcaccccaaggtcgatgaaacaggtgtagaagttaa

SEQ ID NO: 37779 - DNA, 83 bp, Homo sapiens
ccgctgtttctggccatgatgggtcctctccagggagaccctctgtggaaatggtggagtcaatgaagaaagtagcagggatg

SEQ ID NO: 37780 - DNA, 98 bp, Homo sapiens
cgagaggaagcttaaatctgtcgtttgaatttaggaccacctcgtgcccactgttgatgtctttcagatttccacaaaagagcgatttggattgggac

SEQ ID NO: 37781 - DNA, 100 bp, Homo sapiens
caacatccgcgagttcctgcgcggctgcggggcttccctgcggctggagtcctgtgcctcctgattgctgagtgttcacctggaccttctgactaccttc

SEQ ID NO: 37782 - DNA, 100 bp, Homo sapiens
gtcagactccagcagccaagatggtgaagcagatcgagagcaagcctcgtgcaagccgaatactggcatgaccccataaaggaggatgtgtatcgcaacc

SEQ ID NO: 37783 - DNA, 82 bp, Homo sapiens
cggcgctggagagggggcgctgagctgttgggaacccagcgggtgccgcttctccacccgaggcttccacctccaacgagcc

SEQ ID NO: 37784 - DNA, 74 bp, Homo sapiens
gaccaagaacccaccaattccggacacgattgagaggatccagaatccagatctctggaatagctaccaggcaa

SEQ ID NO: 37785 - DNA, 75 bp, Homo sapiens
ggaattctcctacacttcctatttatgagttggtagctggcagtgttgtgatggcttttgaagaagtatgcccgg

SEQ ID NO: 37786 - DNA, 51 bp, Homo sapiens
gcgacgcctttggcggtaaattcgggtccagacatcatctggtctccctga

SEQ ID NO: 37787 - DNA, 75 bp, Homo sapiens
tttggatgtagcaaggaagaaattgttcagttcttctcagagatacaatcttgcttgaccgtttgggacatcaat

SEQ ID NO: 37788 - DNA, 100 bp, Homo sapiens
gtagcctctcactgaatgagcctgaagacaaggatgtgactattgctgctaaaattgattcaattcctcacttgaataattccacacctctagtggaccc

SEQ ID NO: 37789 - DNA, 100 bp, Homo sapiens
gagctggacaatgaagactattactcgttgctgaacgtgcgcagggagtggaaggagcctgggagaggccaggcctccccggactgctagcctgcttttc

SEQ ID NO: 37790 - DNA, 100 bp, Homo sapiens
ctacgagtgcaacatctgcaaggtccgcttcaccagatccacatgaagaccatgcccgccgccatgttcaggctcctcacgggtcaggagaccccgctgt

SEQ ID NO: 37791 - DNA, 96 bp, Homo sapiens
aaataatgtgggagaaataagtgtatccaccagactcacagttttgcgggcttagcagtgtctgcaaaaacgaatcttttcctacaacctgttaac

SEQ ID NO: 37792 - DNA, 74 bp, Homo sapiens
gtctcctggtgaccgagcacccgcctccgggcatcttcaacttctgcgctcctcagaccaccggcaggtgaaca

SEQ ID NO: 37793 - DNA, 110 bp, Homo sapiens
tagaacacttgcagagggaatctggtcaaacatggaatggggtggccgtttgtatgcaggggcaaaaggtgctcttggagaaaactggatctcagcttggagaacaggaa

SEQ ID NO: 37794 - DNA, 98 bp, Homo sapiens
gagtaactctgtccttattatcggaccccgaggatcaggaaaaactatggtgatgtttgcagacagaaaaagtaaactgtcaaggaattcagagcatt

SEQ ID NO: 37795 - DNA, 50 bp, Homo sapiens
acaagttccaaggttacgtttcagttatgggaagctggctggaagcagcg

SEQ ID NO: 37796 - DNA, 141 bp, Homo sapiens
acgacataatctgtcattgaacaaatgtttccttaaagtgcctcgatctaaggatgaccctggaaaggatccacctgatggctggccgagtaccccagggagctgatcgaatagcagtcaaggctgagatggaggccgttt

SEQ ID NO: 37797 - DNA, 80 bp, Homo sapiens
tgaacagggttcctggggcatcgacgatctccatatttcattgcaagacctgcctagagctggaacgttacctccagagc

SEQ ID NO: 37798 - DNA, 75 bp, Homo sapiens
gctggggactgcgggcggcgctgtgtccgtcgccatgacaggtttttctatatgagtggagaagacagctgttac

SEQ ID NO: 37799 - DNA, 101 bp, Homo sapiens
cgagcagccccccgaggcctgaccaaccgcgaggaccggcggagctttacatggtgagaaccatgctagagtccctcattgcagacaaaagtggttccaag

SEQ ID NO: 37800 - DNA, 97 bp, Homo sapiens
ttccctcctcaaactgactttgcagccacggagagagtacccaaaggcaagtggaacagctctaatggggttgaagaaaaggagacttgggtggaag

SEQ ID NO: 37801 - DNA, 101 bp, Homo sapiens
tggaaggagaactaaatgggagaagaggaatgttccctgacaatttcgttaaggtggtttgctctgttagaggttcagatgtgtattattttaatacttta

SEQ ID NO: 37802 - DNA, 100 bp, Homo sapiens
aaatcagtctttatacagttgaaaagaagaaaaagccatcttacactactcaaagggtggtgaaaactattggcttgagggaagtttggttctttggtct

SEQ ID NO: 37803 - DNA, 75 bp, Homo sapiens
gctttgggggccgaaggcagttctgcaagaggagctattctgatcttgatcctgataacttaagtgactctctct

SEQ ID NO: 37804 - DNA, 80 bp, Homo sapiens
cagaatcgaatctcttctccctccccttcttggaatgggtaccacagaccatgtcatcgtcctggcgtccacgaaccgag

SEQ ID NO: 37805 - DNA, 75 bp, Homo sapiens
tggtctgcgcgggtcacgcgtccccagtcctcgggcggggatgctcgacatgcagcagaaggagaaatatatacc

SEQ ID NO: 37806 - DNA, 102 bp, Homo sapiens
gcttgccctggtcttgctcggccgatgaagtgcagaggtttttttctggacttcctccgtcaggcagctggcaggacctgaaggatcacatgcgagaagctg

SEQ ID NO: 37807 - DNA, 80 bp, Homo sapiens
cgtgtccttaccgtgacgtccaccgacgtgcccccgagccctctcgtcagtgccaacggccccggcgaggaaaaactgtt

SEQ ID NO: 37808 - DNA, 97 bp, Homo sapiens
aagaacacacaatccagtgatgtttgcaacaaagagtgaagttcccagaccctacgccccgctgtcaggcagcccgccgatcagatggaggagaacg

SEQ ID NO: 37809 - DNA, 82 bp, Homo sapiens
gatggaaacaccatggctgcggcggcccagctctctctgacacagagccaaatctcctcagccacctgttgaagaagaagat

SEQ ID NO: 37810 - DNA, 75 bp, Homo sapiens
cggaagtggctgcgtcgtcgacgctgggctttcgggtcccgcgcccagattgcgtacccactgcagagtgctgaa

SEQ ID NO: 37811 - DNA, 75 bp, Homo sapiens
tttcttctctggcagctgcaaacgggcgctgacctcaaccagcagattgatcagggaccatgaaaagaaacttgt

SEQ ID NO: 37812 - DNA, 100 bp, Homo sapiens
cggcaggcccagccggcagccggcggtccatccagccacaatggtgcgcatgaatgtcctggcagatgctctcaagagtatcaacaatgccgaaaagaga

SEQ ID NO: 37813 - DNA, 80 bp, Homo sapiens
gtgtacctgggctcgagcctgcacatgaagaaattccttgagctcataggcattgctcagggtcagatgacagttctgag

SEQ ID NO: 37814 - DNA, 100 bp, Homo sapiens
cggcaggagagtccggccgcgacaggacggttaaacccatccagagtaatggctgcggccttacccaggaccctgggggagttgcagctgtatagaatat

SEQ ID NO: 37815 - DNA, 90 bp, Homo sapiens
actatgctggcctaaaagaagaatttcgtaaagaatttaccaagctagaggagcatccacccaacccaccagtatcaccaggaaaaactg

SEQ ID NO: 37816 - DNA, 82 bp, Homo sapiens
tccagtatgcaactgactacaaggagggaagagaaggaacggtggatccgtgccaagtacgagcagaagctcttcctggccc

SEQ ID NO: 37817 - DNA, 100 bp, Homo sapiens
agacacgggtgaatgctgctaaaaacaagactggggctgctcccatcattgatgtggtgcgatcggcgggcgctaatattgacacctgctcagaagacca

SEQ ID NO: 37818 - DNA, 83 bp, Homo sapiens
actttgttggttgcatctgctaaagaggatcctgccaacattttacaggggctatctgatgggttagagtgcctttgagaaga

SEQ ID NO: 37819 - DNA, 100 bp, Homo sapiens
tcgggagaatgctcttcaggatagtatcttggccagggaactcaaacagcagatgcagactaatagggatgccaaaggaaaaatatgatcctccagatcc

SEQ ID NO: 37820 - DNA, 83 bp, Homo sapiens
ctctgagcctgtggcagcctcccctgcaccggcaggtgagaggcggatctacagacatagctgtcggcagtactcagtggaag

SEQ ID NO: 37821 - DNA, 80 bp, Homo sapiens
cgtccgtccgccgccaccacccactccggacacagatagcctgggctggaagctcttctacgtcacaggctgcctgtttg

SEQ ID NO: 37822 - DNA, 75 bp, Homo sapiens
aacccgcggcggacttacgtcacgcctcctggcacaggctcaagacattgaaacgctaaagaaatttctcctgaa

SEQ ID NO: 37823 - DNA, 107 bp, Homo sapiens
gagcaccaggaggccgtggagatggcagagaagatagctcgctgggaggagtgggatgaaattgattctgcagtaaagatgttggtgtcattaaaaatgagctacaa

SEQ ID NO: 37824 - DNA, 141 bp, Homo sapiens
taggagccccccgcggctgcggcgcaggtgccctcggcctgagtcgggatggagctgcctgctgtgaacctgaagatgtccagctcgccgctgtccaagaaacgtcgcgtgtccgggcctgatccaaagccgggttctaac

SEQ ID NO: 37825 - DNA, 98 bp, Homo sapiens
ccagagtcacacacggtcctaagagctgggcaccaggaagcgaaggctgagaggtacagaaagcagtcaacactgcccagggattgtttcagagatgg

SEQ ID NO: 37826 - DNA, 50 bp, Homo sapiens
agcaacaccagcactgccaacagacctttgcaggaaacatgaatgctgac

SEQ ID NO: 37827 - DNA, 90 bp, Homo sapiens
aacaagtgaaatacttcatacattacagtggttggaataaaaagtatttattacagtatcaggagccaataccttgtgagcagttggtta

SEQ ID NO: 37828 - DNA, 100 bp, Homo sapiens
ccaccttcagcaggatcctgatgccaaagtagcttgtggacacattcagctaacgtattttagcaggtggagtgaggttgaagattcctgtgacagcgat

SEQ ID NO: 37829 - DNA, 80 bp, Homo sapiens
caagactacctcattctcactggctcggagactcctgcctgctgaggttaacattcaagatggtacatgctgaagccttt

SEQ ID NO: 37830 - DNA, 73 bp, Homo sapiens
tggagcccatcagctgccacgcctggaacaaggaccgcaccctgaacagcagagaatttcaaaggaccttgct

SEQ ID NO: 37831 - DNA, 83 bp, Homo sapiens
gtcatgtggcagtggaaaatgcgctcgggctggaccagcaggaagttctactacatcaccctgctacgagaccccgtgtcccg

SEQ ID NO: 37832 - DNA, 75 bp, Homo sapiens
tttcccatccgtgactcctggaatgcaggtttcctatcctgggagcaggagagtgtgcctatttgaatgacaaag

SEQ ID NO: 37833 - DNA, 82 bp, Homo sapiens
cagccgatccagcctgcggagcctgtggggcagtgctgattcctaaagaaaagcccccaatcacggttgtgggtgatgttgg

SEQ ID NO: 37834 - DNA, 100 bp, Homo sapiens
atgagagtcgaattggagaacttgttggagtgctggtgaatcatttcaagaggccaccccagcagacatgtttgccaaggcctttcgggtcaagtccaac

SEQ ID NO: 37835 - DNA, 51 bp, Homo sapiens
gctgccgcggtcccgggactgaggaagaaggagagacgaccatcttgcaac

SEQ ID NO: 37836 - DNA, 90 bp, Homo sapiens
ctgctccctctcagcacctgggcggacgattgaccgactcatcagtcacggggccgacatcctgaagcctgtaatgctcaggcagggaga

SEQ ID NO: 37837 - DNA, 76 bp, Homo sapiens
tttaagtatctccgctacttcactcgcactatccttgatgctagatacaaactggactctcaggacaaaacgacac

SEQ ID NO: 37838 - DNA, 101 bp, Homo sapiens
gatgaacccaacctagtgggtgtaatacatcatgaactgcagggagcttcagtttcagcgactcacccgagaactggaagtggaaaggcagattgttgcca

SEQ ID NO: 37839 - DNA, 135 bp, Homo sapiens
cccagccagcctccaggcccagaacggagccgccttggcctcggggtctccctacaccaacggcattgatcaatatgacagagatagcatcataaatgactttaagaatgggacctgcaaacttcttgtggctac

SEQ ID NO: 37840 - DNA, 100 bp, Homo sapiens
acacctatgaaagtgaagtgaaactcagaacgtctgcagcctggtatagcccagcagtggatccagagcaaaagggaagacattgtgaaccaaatgacag

SEQ ID NO: 37841 - DNA, 98 bp, Homo sapiens
gatagtggagctgcccactctagaggagctgaaagtagatgagttcccatttggccggcgcttgccttgtgacatctactggcatggagtttcatttc

SEQ ID NO: 37842 - DNA, 100 bp, Homo sapiens
cgcggggcctcggccttgcagctggagagaatcagcgtgtactacaacgaagcctacgtctgcagggcaggcactcgggaagggaagatggatgtaaagt

SEQ ID NO: 37843 - DNA, 82 bp, Homo sapiens
cgcaaagcgatctggggacgcggggcgggccccccaggtttggtgcacctcgatttggaggaagtagggcagggcccttatc

SEQ ID NO: 37844 - DNA, 104 bp, Homo sapiens
gggacgtaccaggaggatggtgcccagagtgcagtgaatagaagacacttctctgcaccccaaaagctccatgctgattgtgagaaggaaatgctggatggagg

SEQ ID NO: 37845 - DNA, 74 bp, Homo sapiens
atatatgttggcattgagtcaaaccatcttctcccaaggtttttgcaggtagagtggaacccccagctattaga

SEQ ID NO: 37846 - DNA, 102 bp, Homo sapiens
tgtgtccccgagggcatcgaggacccccaggcactcctggagggtgtgaagggatctggacaactctcctctgtccccaccttcaccaaggaccaaaagcag

SEQ ID NO: 37847 - DNA, 75 bp, Homo sapiens
gaccacagtgctcaccacccaccaccactggaacccaagacagaccaggatgaggagcattgccggaaagtcaac

SEQ ID NO: 37848 - DNA, 80 bp, Homo sapiens
tggcatttggctttgcctttctggacacagaagtatttgtgacagaatgtctgtaaacctgtggaggagacacagcgccc

SEQ ID NO: 37849 - DNA, 98 bp, Homo sapiens
cgaactcggcctatcgctaccctccgaagtccggttcctgcgtgaagaccagctgggagcccactgcctgctgccacctccaactccggccccctcac

SEQ ID NO: 37850 - DNA, 83 bp, Homo sapiens
cgtatagtccgttctttagaaacaactcggagaaaatgagtatggagctccttcagctagattttgactttgaaaaaattcct

SEQ ID NO: 37851 - DNA, 100 bp, Homo sapiens
aatgagaggacccgcgtgggcaccctgcaggtggtcagacatgtcatcaactcagctgaccggggagctctgcacaaagccatcagcctcgagcacgctg

SEQ ID NO: 37852 - DNA, 98 bp, Homo sapiens
ttgtctgtaatggtgtgcttcaagggtctcggtgactgagctgcagactcacccggagctggacacagatggggatggggcgttgtcagaagcggaag

SEQ ID NO: 37853 - DNA, 50 bp, Homo sapiens
cctaaagttcgtgaatctcaacttcccagtgacctgatctttgagttcgc

SEQ ID NO: 37854 - DNA, 100 bp, Homo sapiens
ccgggtctcggcccgcaccaggagcggaacaactgcaagctttcttcctggtggcagatgacatcatggattcatcccttacccgccggggacagatctg

SEQ ID NO: 37855 - DNA, 50 bp, Homo sapiens
gatcacaccactcacgctcaaggttttaaaatcaaagatgggaaaatcgg

SEQ ID NO: 37856 - DNA, 101 bp, Homo sapiens
atgcacaggaccttcaacaagaagctaatgaattgagcaggaagtggcggtgcgagggctgctgcacagcgagcggagccgcggtccggacggcagcgcgt

SEQ ID NO: 37857 - DNA, 51 bp, Homo sapiens
aagtcacgattaggactgacaataaggtcctttccagtctcagaaaaagaa

SEQ ID NO: 37858 - DNA, 50 bp, Homo sapiens
atcgccgcgctcagcgacaaacaaatacagatcacttggattcagtcgag

SEQ ID NO: 37859 - DNA, 115 bp, Homo sapiens
tctctcatctcgctcggctgcgggaaatcgggctgaagcgactgagtccgcgatggagccttatgccagcctggaccatcttggaggcagtgtaggatcatggaagaactttgaa

SEQ ID NO: 37860 - DNA, 75 bp, Homo sapiens
ctcagttgtgcgttgcggccagtcgccactgctacgagatcatcagatgttcattcatctggatcttcagatgca

SEQ ID NO: 37861 - DNA, 90 bp, Homo sapiens
ctgattcttgtcactttaattacttgagaatttataatggaattggagtcagcagaactgaaataggaacctggcttctgtatttaccat

SEQ ID NO: 37862 - DNA, 98 bp, Homo sapiens
ctcccgaacagataatcgtccacgtaatccaagagaggctaaaggaagaacaacagatggatcccttcaggtagttcgaggacactacaaaggtcagc

SEQ ID NO: 37863 - DNA, 75 bp, Homo sapiens
attgaactcttcaggagcacagcagctgaagttcagcagcgccgggtttatttccgcctctggaatgcagcactg

SEQ ID NO: 37864 - DNA, 74 bp, Homo sapiens
tggacagacatgtcttcccatggagggaactgctcgcagaaagaagaaggtggttcatagaacagccacagcag

SEQ ID NO: 37865 - DNA, 74 bp, Homo sapiens
gggcaaccatgaccgaggagagctctgacgttcccagggagttgatagatccacctccgacccttaagccagag

SEQ ID NO: 37866 - DNA, 50 bp, Homo sapiens
cccagcgccacggggtggacctggaaggatcctggtgatgcggcccaaca

SEQ ID NO: 37867 - DNA, 100 bp, Homo sapiens
ctcgtctccttcaccgccgacttcaagaaggtaggtgagctcgtgaaacaatatgaagaggagaaaatagccttttaaggaaattggcccacagaaagga

SEQ ID NO: 37868 - DNA, 116 bp, Homo sapiens
cccgcactgacagcgggaggcagagggaggaacctggacgccggaagccgggaaatggaggaatatagaactgaaggtatcagctggcacaacatagattacattgataatacctg

SEQ ID NO: 37869 - DNA, 75 bp, Homo sapiens
gtgagctcggccggcaaccgagggacccgcgtccagaaaaggtactttgtggactatcggagagtgcttgtctgt

SEQ ID NO: 37870 - DNA, 75 bp, Homo sapiens
gaggcacgtccgcacacacacaggtgtgatgaatgcagactctgctaccattttggctgtttggatcctcctttg

SEQ ID NO: 37871 - DNA, 100 bp, Homo sapiens
ggagattctccggggacccttccgtatctgcctaggcattttgctgtctcctcctaatacgaaaatactgcagtttctacctgaacgaattttctttcga

SEQ ID NO: 37872 - DNA, 100 bp, Homo sapiens
gttgtcccagctcggcccgcgggggagccccgggagccgcacggttgccatgtcaaatcttagcgaggctgtgcaggatgcagacctgctggtgtttgtc

SEQ ID NO: 37873 - DNA, 100 bp, Homo sapiens
gctggaggacacacctaaacatgtggaatcccaatgccgggtaattgggatacttctggcagcgaactgagtgaaggggaattggaaaagcgcagaagaa

SEQ ID NO: 37874 - DNA, 90 bp, Homo sapiens
agcctagctgctcgcacaggactcggccacctgcccttcctgcaccgactggccagatatcagttttagagaatgtggcgtggagaaatt

SEQ ID NO: 37875 - DNA, 101 bp, Homo sapiens
atttcggctcagctggaggaggccagctctacaggcgacacgatgaggcgagtggtacgacagagcaagtttcggcatgtatttgggcaagcggtgaaaaa

SEQ ID NO: 37876 - DNA, 83 bp, Homo sapiens
ctcggcggctgaggaaagcaggaggaggtggcggcggcgggaagatacctcctgccccccgaggtctgcagtctcctgaaccc

SEQ ID NO: 37877 - DNA, 98 bp, Homo sapiens
ctcatcacgaaacattccgtgattaagctttgtgactttggatttgctcggcttttgacctgggttactaggtgtctttcagaagctgattgcatcca

SEQ ID NO: 37878 - DNA, 98 bp, Homo sapiens
tgcttggtgtcgtttttccttgagctgaacgtcttgcaacagtggccgcacgcatagaggatgaggaagatgaggaaatggtggaatctaaagttggc

SEQ ID NO: 37879 - DNA, 50 bp, Homo sapiens
tctacaggacccgctttctaccattaagcctatgtgcttcccaagctgta

SEQ ID NO: 37880 - DNA, 80 bp, Homo sapiens
gggaagagccggggccgtggctgacatggagcagtgggtaattccagaattgattggccataccattgtcactgtattac

SEQ ID NO: 37881 - DNA, 80 bp, Homo sapiens
gaggcccccctgaaccccaaggccaaccgcgagaagatgacccagtttacaggctggtaacctacatctttgtctacgag

SEQ ID NO: 37882 - DNA, 99 bp, Homo sapiens
atcaaaaactatgtacttggaggatcgaacagatcgtaacagttttactttgaaactggaagatactgaaaattggttgtatgaggatggagaagacca

SEQ ID NO: 37883 - DNA, 82 bp, Homo sapiens
gtcgccttctgcctggtcgggatcccgccccgcccggagccccggcccccacagttggaatcgaagcctcttaaaatggcag

SEQ ID NO: 37884 - DNA, 83 bp, Homo sapiens
ggggcagtttcagtctccaccccaaatgcagattggcggcagtaagcacacaatgaatgatcacctgcatgtcggcagccacg

SEQ ID NO: 37885 - DNA, 75 bp, Homo sapiens
cccagctgcgcaaagcttgcgaggtggcgttaggtgaaaggtgtagcagtcactcggcctacacccacagcatcg

SEQ ID NO: 37886 - DNA, 99 bp, Homo sapiens
gcccgtggagtcggctgagggaaaagcgaggcaaggcaggcgggaagtggagccgtcagttcctgctttcattctggtgtactgtatgttctgcccatc

SEQ ID NO: 37887 - DNA, 51 bp, Homo sapiens
cgcaaattcactccccagtacaaagggggggccctcagcctcttggccttg

SEQ ID NO: 37888 - DNA, 75 bp, Homo sapiens
caattgagcaggctgatctactgcaggagggagactcatgcatctgtatgccgtgtgcgtggactgcctggaagg

SEQ ID NO: 37889 - DNA, 100 bp, Homo sapiens
tggagcgcagagcgggcgagcgcgatgcagacagacatgctgaactatctggaagtccactgaaaagcaaaagcactaggaagcctttggcatgtatcat

SEQ ID NO: 37890 - DNA, 50 bp, Homo sapiens
atgagatgatagccaaaccctcagagctgacaaggaaggtttcgagcgtt

SEQ ID NO: 37891 - DNA, 75 bp, Homo sapiens
ttttctgatatgatgggaaatacaaatgaaccaagcacacgtgtccgagtacatatttcccgggataagatcacc

SEQ ID NO: 37892 - DNA, 74 bp, Homo sapiens
ggagatgtccctggaagaacacagccagtgtgaatgcaggatgcagaaggctatcaacaggctgagcaggcttc

SEQ ID NO: 37893 - DNA, 82 bp, Homo sapiens
cgcattgccgccggtcctgaccaccgtgaacggacagtcccccccaggtgaaagaacttgtcctggacaacagtcggtcgaa

SEQ ID NO: 37894 - DNA, 83 bp, Homo sapiens
aaggagcttcggaaaaagttgcctgtgacaatgcagatcttcgtgaagactctgactggtaagaccatcaccctcgaggttga

SEQ ID NO: 37895 - DNA, 98 bp, Homo sapiens
gaagatgccagcctgatttgttcgcactatcagggtataaagagtgaaggacagagcgggatgccaccagcttgtccaaagggaagttccaggagctc

SEQ ID NO: 37896 - DNA, 73 bp, Homo sapiens
aatataacattcttggcacaaatactattatggataagatgatgattgctctggaagcagccaaagcactgga

SEQ ID NO: 37897 - DNA, 82 bp, Homo sapiens
cgcgcagccgccggcgtcgccgccatggacctagtgactgtgaagtgctgaccacactcaccccagacactggccgtatcct

SEQ ID NO: 37898 - DNA, 101 bp, Homo sapiens
gcaatttccctccctgcaggcggaaggaaggcaattagagcgggaggaacaggaattaagcctttcctggaacgctttggagagcgttgtcaagaacatag

SEQ ID NO: 37899 - DNA, 98 bp, Homo sapiens
gataatggcaaagggaggcattgtccgaactgggactcatggactgcttgtgaagcaggaagacatggttggcacttaccatggttccccagaccagt

SEQ ID NO: 37900 - DNA, 82 bp, Homo sapiens
aggacccgggctttagctatggcagcggcagcaccgggagtcagcagagtgaaggagggccctcctggacccgggagcggac

SEQ ID NO: 37901 - DNA, 98 bp, Homo sapiens
gctgttttgccggaggagcccctcaggccggtctccaactgaattccttgaagagaaaatggcctaccaggaatacccaaatagccagaactggccag

SEQ ID NO: 37902 - DNA, 75 bp, Homo sapiens
aggtgctaccgctgacgacacccctggtggatggcgaggatgagagggaacaagctaccctctgagtcagcactg

SEQ ID NO: 37903 - DNA, 83 bp, Homo sapiens
cagcttcttcttcaacatgctcttcgtagaaagatgcgactgccattggtgacctgttaactctttactgtggtctaatggag

SEQ ID NO: 37904 - DNA, 75 bp, Homo sapiens
attggccacctacagaaacaaaatgtcaacaaattgatggctggagtcacatcagaagccgcgcagactatcacc

SEQ ID NO: 37905 - DNA, 50 bp, Homo sapiens
tgctggagtcagccctcactcaggtggaagttaaacgagctgagcctcgg

SEQ ID NO: 37906 - DNA, 75 bp, Homo sapiens
tgaataaagccaagagagaccttggagtaattcgtcgacagcctgacaggagcaatggccaccagcaggtgaagg

SEQ ID NO: 37907 - DNA, 101 bp, Homo sapiens
ccgtggacaacatgatggtcagaaaaggggacacggcggtgcttagacgtgccaaatactggtgtaagcaaacctagagtttctgacgctgtccagcccaa

SEQ ID NO: 37908 - DNA, 100 bp, Homo sapiens
cccttcacctttgatcccctgacctgcattaccttgttacagaatgtctgaaggggacagtgtgggagaatccgtccatgggaaaccttcggtggtgtac

SEQ ID NO: 37909 - DNA, 101 bp, Homo sapiens
gggcatggggagcctgacgttttgaaggatgagcttcaactctatggaggatgtggctttgtttgagatgaatcagtcggattcaaaagaagtggacagtt

SEQ ID NO: 37910 - DNA, 75 bp, Homo sapiens
cggctctggaaaatccgcaagaccatcatgcagacacatcgttcatgtacatgatcgccggactctgcatgctga

SEQ ID NO: 37911 - DNA, 100 bp, Homo sapiens
tggcctgtccctcacatccgatgcaccctttttgtcagattatcaggatgaggaaatacagtccatactgcccggaatctctgcaaagctgacttggact

SEQ ID NO: 37912 - DNA, 100 bp, Homo sapiens
ggggcctcaaacgtggagatcaactcctctctgttaatggagtggttactgtgacagacaatggtagtccccccaaatcaaccattgcaagagtcattgt

SEQ ID NO: 37913 - DNA, 50 bp, Homo sapiens
aggcggacgacgaccggctcaacaagagccctccgggacctcgagccagc

SEQ ID NO: 37914 - DNA, 74 bp, Homo sapiens
tgagtagcagaggccctcacaccttcctcagaatggacccccagcctacaacacagcagtcccctcaggatgag

SEQ ID NO: 37915 - DNA, 90 bp, Homo sapiens
gtgagttgaaacgctgcctggaaaggaagtaccaggacttgcacaggtccagccctgctgggagttttctgccacacagatttgcggaag

SEQ ID NO: 37916 - DNA, 50 bp, Homo sapiens
ccctgtccgtcggcgctggtatctctacctcatttccgaaatggaaaatt

SEQ ID NO: 37917 - DNA, 100 bp, Homo sapiens
tgtgaatcagatcatcaaggacttggcctccatggtgtcagagcaaggagaagctgttggtccagctgggagctccccgacctccaggagggcaagatcc

SEQ ID NO: 37918 - DNA, 75 bp, Homo sapiens
cgaagcctggatgaaatagatctctcggctctgaggagctccactggttcaacagcctctcctccagtttcgacc

SEQ ID NO: 37919 - DNA, 97 bp, Homo sapiens
aagtataattttgatacaatgatatatgtgtgctcagagtcatctacagatgtgcaccgctatcaaaaatacttccttctgcagttctcttccaccc

SEQ ID NO: 37920 - DNA, 98 bp, Homo sapiens
gtggcttacgcaacggtcactgggctcctgggccgctcccgggccagcgagggctgcgaaagaagttgtagatgtggttgtcagtgctatctggaagg

SEQ ID NO: 37921 - DNA, 90 bp, Homo sapiens
cgagcagctctgcagttaatgcacgtattttaaactcccgggcctgcggacgctatgcacaggctgcagagactgcaagtctggaagaac

SEQ ID NO: 37922 - DNA, 75 bp, Homo sapiens
tcacaagctgcaccagcttctaaccgaatacgggaatatgaatggattcattcccaaaccaaaagattgaagttc

SEQ ID NO: 37923 - DNA, 99 bp, Homo sapiens
ttaaccaacctcagctttacaaaccctgaatttataactgaactatatcatcatgtacatagaaaaatccaaaggattctgcaaaaaagctactagaac

SEQ ID NO: 37924 - DNA, 88 bp, Homo sapiens
agcagaggatggaacacttcagtgcattcaagcagagagactttcaagcagctggctggatgttcgtcatattgaaaagtatgtagac

SEQ ID NO: 37925 - DNA, 75 bp, Homo sapiens
gaaaaggaagcaacaacataatgcccagagttggagccaattaaaccaggtaaattggcaggatgaggagcagca

SEQ ID NO: 37926 - DNA, 50 bp, Homo sapiens
cgagcagctcttcttcgtccgtttggatcccatgacagattctgttgtca

SEQ ID NO: 37927 - DNA, 50 bp, Homo sapiens
gagagttgagcgttgtgtgtttggtcaccgacgatgagggcgcacctgct

SEQ ID NO: 37928 - DNA, 100 bp, Homo sapiens
cgcaggccaagaggaggccagagcccattatccctgtcactcagccccggctcttcagcagcctcggtgagctgagctccatttcagcgcagcgcagccc

SEQ ID NO: 37929 - DNA, 82 bp, Homo sapiens
ctcagaggagtacttcgccacttactttaatgagaagatctccattcctgaggaggagttccagggtcacccccgagaggac

SEQ ID NO: 37930 - DNA, 83 bp, Homo sapiens
ggagggtgctggagtgagtcccccacttatcactcagaccccaccaacaactgaacgctttggtcaggctgctacaatggaag

SEQ ID NO: 37931 - DNA, 75 bp, Homo sapiens
cttggaagtccttagctaccaggatgcggctatggaaagggcaaatggaatggagctggatggtagaagaattcg

SEQ ID NO: 37932 - DNA, 99 bp, Homo sapiens
taaagctagttcggagccttgcagtgtgtgaagaatctccaccaccccctgcaccagagatatcacaggagaaccaggatgttgagaaagaactggaga

SEQ ID NO: 37933 - DNA, 74 bp, Homo sapiens
tggaaagttacccggctgtctggtgaggtgacgctggagtgcccgggccacgaggaggtgcccagggtggacaa

SEQ ID NO: 37934 - DNA, 100 bp, Homo sapiens
tcatttttattttgacatttctgctgtatgcaagttttcacttatctcgaaagcctatcagcatagttaaggacggggaggtttactgcatcgacgcgcg

SEQ ID NO: 37935 - DNA, 75 bp, Homo sapiens
tcctgacaatgggcagaacgaattcagtgatatcattaagtccagatctggtgatcatttgaagatctgtcccca

SEQ ID NO: 37936 - DNA, 59 bp, Homo sapiens
gccgtgctctacctctatccggatgccttccgcgccttccaccctgacctggaattcgt

SEQ ID NO: 37937 - DNA, 100 bp, Homo sapiens
gggagccatctgtgccatcatcgtggtagttattgtaaaattcagattttggccgtttttggtgatcatcgtgattctaagcgcactgttccttggcacc

SEQ ID NO: 37938 - DNA, 74 bp, Homo sapiens
tgttcctaaaccagaagaggaggttgcccagaagaaaaagggcggcgactggcggcgcgatggacctgaccggg

SEQ ID NO: 37939 - DNA, 117 bp, Homo sapiens
tccgagtgcccaacagacattttgctgctgctacaaaactaatagggatgccaaaggaaaaatatgatcctccagatcctcgcagaatttataccatcatgtcagcagaggaggtag

SEQ ID NO: 37940 - DNA, 75 bp, Homo sapiens
gcccagagccccgcgtttcagccctagggaaggtagttagaaacaaacctgtggcaaggcaggctcctggcaaac

SEQ ID NO: 37941 - DNA, 100 bp, Homo sapiens
atcgattgcatcagcaatgtggcgcacgggcacttcaggcaaccggggcctccagggggagaaaggcgagaaggtgaggagagaaggaactcatcagagg

SEQ ID NO: 37942 - DNA, 100 bp, Homo sapiens
gtcaattcctattggtttatcacagtctatatttgaactatggggtcatggacaatctcctgaggagctgtacagttctcttaaaaactaccctgtggag

SEQ ID NO: 37943 - DNA, 100 bp, Homo sapiens
ttttgaccaagcccagagattcaaccatcccacgtgcagatcaccactttataaaggtgtgttaccgagtggaatgggccaaattccaggaacgtgagag

SEQ ID NO: 37944 - DNA, 75 bp, Homo sapiens
ctttcatattgcagccagcatcaacccagccacaggactgagcagggggaggaacatttaagctgatggaagtgg

SEQ ID NO: 37945 - DNA, 74 bp, Homo sapiens
ttgcttcgagaaaggaaacctgtgagggaatgcagagagcaaccaatgtcacctaccaagcccatcatgtcagc

SEQ ID NO: 37946 - DNA, 115 bp, Homo sapiens
aaggagcacagagagttcagagcaaaaactaacagggatcttgaaattaaagatcagtctcaaatatctatcagtgtagaagagtgggaagacaccaaagactccaaagaacaag

SEQ ID NO: 37947 - DNA, 74 bp, Homo sapiens
taaccctcttttccagtataagtatttggctcttaatatgcattatgtagttgggacccctgattttagcagga

SEQ ID NO: 37948 - DNA, 100 bp, Homo sapiens
cggacgaggatgaggaggagggggacgagcagcagcggctcctcaacacccctcgaagtactggagaaaatgaaactgggattgacccatcaagatgctt

SEQ ID NO: 37949 - DNA, 50 bp, Homo sapiens
tttacgcttgtgtgataaaactgggcatttcagagaaaagctgccttcgt

SEQ ID NO: 37950 - DNA, 87 bp, Homo sapiens
gtgccccaccatgtcagacgcagccgtagacaccagctccgaaatcaccaccaaggcccgatgagagaaagggaaagttaaggatgc

SEQ ID NO: 37951 - DNA, 83 bp, Homo sapiens
gcgcgcagcgtgtcaggcggagagacccgccgccaggctgaagctcagggccctgtctgctctgtggactcaacagtttgtgg

SEQ ID NO: 37952 - DNA, 102 bp, Homo sapiens
ggaaaacatgggtcgatttggatctgggatgaacatgggcaggataaatgtggtgctcatcggggactcaggcgtgggcaagagcaacctgctgtcgcgctt

SEQ ID NO: 37953 - DNA, 75 bp, Homo sapiens
tcgggcggggcggcggcgacgcggacctgcggactagcgaacccggaggtggagttggcatgaacttaacagcag

SEQ ID NO: 37954 - DNA, 98 bp, Homo sapiens
ccaggatgaagaggttggagatgggaccacatcagtaattattcttgggtacagccaaagaccggagctttggagagatgaagtttaaacagtgtcct

SEQ ID NO: 37955 - DNA, 75 bp, Homo sapiens
gggatttggcacctatgcgcctgcagaggtgacaaagtaattccactttatgcacctctatgtagaaaatgcaag

SEQ ID NO: 37956 - DNA, 98 bp, Homo sapiens
cgtcaagcagcatgtgaaggagaccaaggtgtgtgggcaagtcttcgctctagcactcgcttgatcagctctccaacatccttcattgatgttggcgc

SEQ ID NO: 37957 - DNA, 76 bp, Homo sapiens
ggcctgacatatctgagggagaagcacaagatcatgcacagaggttggatggcaagcatgtggtgtttggcaaagt

SEQ ID NO: 37958 - DNA, 90 bp, Homo sapiens
gagataatgcggcagaagaagcaggagcgggagaagattgtggctcccatcagtgactccccgaagccaccgccacagcgtgtgaccctc

SEQ ID NO: 37959 - DNA, 50 bp, Homo sapiens
attttctactgtccctgcgcgaggtaaaaagaacgtattctcatggtact

SEQ ID NO: 37960 - DNA, 82 bp, Homo sapiens
ggcagagtctgcatgtggctgcaggacctctgtcagagaatgaaacactcatcgcatggttttacagctctttaaaacactg

SEQ ID NO: 37961 - DNA, 75 bp, Homo sapiens
atctgctccgacatcaagtaaaggatttgcttgacttgattaagcaacccaaatgttttccaagcagtgaagcac

SEQ ID NO: 37962 - DNA, 90 bp, Homo sapiens
ggtgcttggaggtccagacacaagaagaggattggaaccagttccgatacagcacaatggcgttgacccggacgacacctataatgagac

SEQ ID NO: 37963 - DNA, 82 bp, Homo sapiens
aagctcagggatcccactgattctactttacgtgacattgtatgcctcctgtattctcctgggagtgttcttgaatagcagc

SEQ ID NO: 37964 - DNA, 100 bp, Homo sapiens
caaaaatgcacaattctatctcttgggcaatcttcacggggctggctgctctgtgtctcttccaagacttaattcagtgcacaaatgagatgaatgtgaa

SEQ ID NO: 37965 - DNA, 78 bp, Homo sapiens
tacaatgtaacagaattaaattcagtcagccaagctggagaatgggccgcaagcttcttatcattgggaccactagcc

SEQ ID NO: 37966 - DNA, 90 bp, Homo sapiens
gcttacggaaactgcatgctgttgtagaaactctagtcaaccataggaaagaatttgaggaagccaggaagtgggtgtcgaagaagttac

SEQ ID NO: 37967 - DNA, 89 bp, Homo sapiens
cgattcctggccacctccatagcaagcagctgtgagccgtgagctttgaggcggtgggatgtgtcagcagaatgtctcctgcccccgag

SEQ ID NO: 37968 - DNA, 101 bp, Homo sapiens
ccggagtgagcggagtagcgagtcggcaacccggaggttcttgcatacactgagggacttcacggaaaatggatgttcagcgagatacgagctgtattttc

SEQ ID NO: 37969 - DNA, 50 bp, Homo sapiens
ggatagcacaacccctttgagtcacggtttctgctttgggacaaccatac

SEQ ID NO: 37970 - DNA, 82 bp, Homo sapiens
tgaagatggcggcagccgaggccgcgaactgcatcatggagttaccggtattgtaagaacaagccgtacccaaagtctcgct

SEQ ID NO: 37971 - DNA, 80 bp, Homo sapiens
aggggggagcggcgttggaggccaccgtttccagaatcttgtggaagaagaatgaagttgctgattatgaagctacaaca

SEQ ID NO: 37972 - DNA, 82 bp, Homo sapiens
gcagatcgattttaccttggataccctgctttggaaatgcactcggtgatggaaagagagccactattctgaagaacacttg

SEQ ID NO: 37973 - DNA, 75 bp, Homo sapiens
gaaaaaactactaggatcacgcggcatgtattgagactggctcttcgtggttgtggtatgcctggctgccttcct

SEQ ID NO: 37974 - DNA, 83 bp, Homo sapiens
gaatgattgagattgtggaggagggctgtggtccaaggccatttttgctggctataagcggggtctccggaaccaaagggagc

SEQ ID NO: 37975 - DNA, 113 bp, Homo sapiens
gatctcatgggaagtgaactctttgtcatttccccgacacagggtctcactctgttgcccaggctggagtgcagtggtgatcataactcagtgcagcctcaaactcctgaact

SEQ ID NO: 37976 - DNA, 74 bp, Homo sapiens
gacgctgacacttgtgtttgaatatgtgatgggcttaggtcacgagcaaggatttggagccccttgtttaaaat

SEQ ID NO: 37977 - DNA, 78 bp, Homo sapiens
ggaagcctgcgtaactttctcccttgatccgggagtctttccactgggacaaggtggagcagacacctcgcagtcaac

SEQ ID NO: 37978 - DNA, 90 bp, Homo sapiens
aaacggccaagaggcagacctaggaaatggagtgctgtgcccccctcccaggaggaaaggccgggccccgctcccaccaacctggctcgc

SEQ ID NO: 37979 - DNA, 90 bp, Homo sapiens
tgcccgccgagaactctccagctcccgcttacaaagtttcctcgcatggtgctggagaatctggtaaaagcaccattgtgaagcagatga

SEQ ID NO: 37980 - DNA, 90 bp, Homo sapiens
ggagacactgctcgccggccgcctggtcgtgggactcggcatcgaaagggctattgcaagacacgaagtccgagaaattgagcagcgaca

SEQ ID NO: 37981 - DNA, 74 bp, Homo sapiens
cagagttctttgtggatggacttgattctgatgagaggtttactcctggcttgggggcattaggaagcactgga

SEQ ID NO: 37982 - DNA, 82 bp, Homo sapiens
gcgcgaccgccgaatcgctcctgcagcagagggcgtgatggtgggcatgggtcagaaggattcctatgtgggcgacgaggcc

SEQ ID NO: 37983 - DNA, 100 bp, Homo sapiens
gcagccagcacggccaaaccccctcctctgcctcgctccaacacagagtgtccccttggctggcatgggccgggctgccagaggccttgtaagtgtgagc

SEQ ID NO: 37984 - DNA, 73 bp, Homo sapiens
cgtgcagtgctcgctgccatggatgccaccaagctggatccctgctgccttggtgatcccgggctgacagcca

SEQ ID NO: 37985 - DNA, 76 bp, Homo sapiens
caggagctgaaggggtacgcctgccgccactgcttcaccaccaagatgaccaagcgagacgtgcctggcttcgcca

SEQ ID NO: 37986 - DNA, 97 bp, Homo sapiens
aagcattggtcttccaggtcttcctggtccaaagggctgtcatcagtgatccagagcaaaatttagccattgagcaaaaagaaagtgatcatatcct

SEQ ID NO: 37987 - DNA, 100 bp, Homo sapiens
cccaggcccttccatggactgaccagggtcctgggtgccagggaaatcctcattgacgattcaatttgttgaaggccaatttgtggactcctacgatcca

SEQ ID NO: 37988 - DNA, 101 bp, Homo sapiens
cctggaaaaagaagtccaagaagcaaaaaagggactgctaagaagataccaccagctgatgaaaccaaggccctgaaaggttcaccaagttgccagggtcg

SEQ ID NO: 37989 - DNA, 88 bp, Homo sapiens
gtgccccctttcttgctccccatcctcttcttggcttctcatgtgggagtacgaccccagcaaagcgacctttgtgaaggtggtgcca

SEQ ID NO: 37990 - DNA, 74 bp, Homo sapiens
gggcagcagagtcacagctgcagagaaacagcacccaggactatcttccaaagagttctggatatcctaaagaa

SEQ ID NO: 37991 - DNA, 82 bp, Homo sapiens
gcctaagtaacttgggaaatacgtgtttcatgaactcagctattcagtgatgtcttggcattgcccattttcaagcaggaag

SEQ ID NO: 37992 - DNA, 89 bp, Homo sapiens
atttagaaggaggttcaggctacggtgagccgaaggagtccgctcagaatttgatcagatcgacacatccaacccaaactgtgtggtaa

SEQ ID NO: 37993 - DNA, 108 bp, Homo sapiens
gacctggggatcgctacggaccttaaaatacccgcaacagccccttcgtcccaagaggatttgatgaagatgttaaagcgaaagtggagaaccttctcgggatttcca

SEQ ID NO: 37994 - DNA, 75 bp, Homo sapiens
cttccagcccatcaccatgagctgcaagattgtgtcagtcctcctccgcctcctcctctctgcatgcgcgtcaga

SEQ ID NO: 37995 - DNA, 140 bp, Homo sapiens
cttcaagatggcggtgcaggagtcggcggctcagttgtccatgaccctgaaggtccaggagtacccgaccctcaagctgggagtgtccactcgccttccaccagcatggcaacgtcttcacagtaccgccagctgctcag

SEQ ID NO: 37996 - DNA, 82 bp, Homo sapiens
gcgagaacgtccactgcgggccggcgaaagctgtcactattccaggtcctcaggatatagccgtgacctaaacacagaaatc

SEQ ID NO: 37997 - DNA, 75 bp, Homo sapiens
gcgggagcctttggggcaccacagagatgcggcatctattgctggcaccatctgacgtggcaggctgggggattt

SEQ ID NO: 37998 - DNA, 101 bp, Homo sapiens
tactctatatgaacaatccgtctggatcacggatgtaggaagtggtggctttcctgggggaatgcctggtaattttcccggaggaatgcctggaatgggag

SEQ ID NO: 37999 - DNA, 100 bp, Homo sapiens
gctttttatcattttgaactttatggaatacatcggcagccaaaacgcctcccggggaaggcgccagcgaagaatattgctgacagacagaacgccttgg

SEQ ID NO: 38000 - DNA, 74 bp, Homo sapiens
acatggaacagggactcactggggataacgaaggaggcccaacttcattcaataaggagcctgacggatttatc

SEQ ID NO: 38001 - DNA, 98 bp, Homo sapiens
ggagactgtgccgtggagggcctcgccatgtcctgctgcccggggctcaatgcgcattgggaaggattttatcctgttcaccaagaaggaagacacca

SEQ ID NO: 38002 - DNA, 83 bp, Homo sapiens
caatccagccaaatacaactggaaaacagctttttgatcagctggcttgaggacacccctggcagtgcccggcccatatcctg

SEQ ID NO: 38003 - DNA, 90 bp, Homo sapiens
ccgtaaggaaaggctcctagaagactccaagggagtaaaagagctgatgaaacaatggcaagcttttaaagaagcagttttttcaccgag

SEQ ID NO: 38004 - DNA, 90 bp, Homo sapiens
cccagacctctgtctctctcgggcttctcacggcattcagcagcagcgttgctgtaaccgacaaagacaccttcgaattaagcacattcc

SEQ ID NO: 38005 - DNA, 100 bp, Homo sapiens
gaagaagcgcaggcacgacggccaggctgaccccgcactacatctacccaccagccatcgtgcagcccagcgtggtgatcccagccgcccctgtcccgtc

SEQ ID NO: 38006 - DNA, 50 bp, Homo sapiens
cattagcgtctacgaccaccaaggggtctaaattatggataataatggaa

SEQ ID NO: 38007 - DNA, 100 bp, Homo sapiens
gggagagccgggtaccggccgtggaagcggccaccgactactgtcagcagctgtgccaggcaatggacctcatcatgaccgttgctgtacttacaatgaa

SEQ ID NO: 38008 - DNA, 75 bp, Homo sapiens
gctgaactcaatactcatgtgaatgtcaaggaaaaggaaccttagtcatttctgctttatattttgagctatcag

SEQ ID NO: 38009 - DNA, 101 bp, Homo sapiens
actctgatttcttcacagaacacactcaagctaaagaattacctccaaagccattgtcaagaccacagcagtcatctgcaccagtccagctgaactctggc

SEQ ID NO: 38010 - DNA, 100 bp, Homo sapiens
gtagctacgggctggtggaagcgctgctcacagtcagtgtcgctcaccatggatgatgatatcgccgcgctcgtcgtcgacaacggctccggcatgtgca

SEQ ID NO: 38011 - DNA, 94 bp, Homo sapiens
atcgatgctacgctaacctatcgggttctctctccgcgcgttcaggttgttattgatgccttcagattgatcaatgctaatatgatggtcttag

SEQ ID NO: 38012 - DNA, 98 bp, Homo sapiens
ccaggcccgccgcctccctgccaagaacaccgaaaatctctcccagcactttagaaaggggaccctgactgtgttaaagaagaagtgggagaacccag

SEQ ID NO: 38013 - DNA, 140 bp, Homo sapiens
tggaaggattcggagagggttggggccgtcttcctcatccttccttttctcggggctcccgtggctacgactaatagactggggtttggctgagttttatcatcctggccaagaatataatgtccgagttgcttcccgat

SEQ ID NO: 38014 - DNA, 98 bp, Homo sapiens
gctgcttctcttactcgtgttccctgccactgtcttgttccgaggcggccccagaggaaaaacgtggtcttcgagaaatgcgagttcttgaaaatttg

SEQ ID NO: 38015 - DNA, 100 bp, Homo sapiens
ctgcaccgcgcgggacaagtcgccggcggcgcccgacggagcaggacttgatgacacgtaccttcgctgcattgagctgcacagccacacccttattcag

SEQ ID NO: 38016 - DNA, 137 bp, Homo sapiens
gcttctgcagttcaagcgttggttctggtcaatagtagagaagatgagcatgacagaacgacaagatcttgtcgacttatcaaaggatctccctcactggaacaagcttaaagcagatgagaagtacttcatctctc

SEQ ID NO: 38017 - DNA, 50 bp, Homo sapiens
caggcctcattggacagcattcgaggacatgctgggcctgcgccccccac

SEQ ID NO: 38018 - DNA, 49 bp, Homo sapiens
ccaccgccctggccatctaccatgtggtactccaaagattcaggtttac

SEQ ID NO: 38019 - DNA, 83 bp, Homo sapiens
aaataactttaccaaaggaaagctattttgcgaactatcttctccagcggagatggccaattttgctggcctagacctgaact

SEQ ID NO: 38020 - DNA, 90 bp, Homo sapiens
gcgggactgcggcggcgccggcctccggggagaaacggttacactcctggcacaccttacaaagtgtcctgttcccccaccagcggggct

SEQ ID NO: 38021 - DNA, 82 bp, Homo sapiens
gaagatcctggtgtcgccatgggccgccgccccgcccgttgagctcaggccccggggcctccagcggcaccagcggagacca

SEQ ID NO: 38022 - DNA, 100 bp, Homo sapiens
atcaaggagcgccaagagctagagcagactcagaatgagctcaccagggagctgaaactcaagaagggaaaaggccgaggcatcagcgtgtgaagaccgc

SEQ ID NO: 38023 - DNA, 80 bp, Homo sapiens
tctcctcatcaactggggatgattacagttcttcctaaaaaagatggcagaaacggtggacacaagcgaaatggtcaacg

SEQ ID NO: 38024 - DNA, 100 bp, Homo sapiens
tggtggcttggaataagctataagggaattggccaatatgatatacaagacaaggtgaagcctcggaaggatgctgaaaacgccattcaacagatgggtg

SEQ ID NO: 38025 - DNA, 90 bp, Homo sapiens
tttgttctctgcctcttgtattctagtacataccgagcatcaaatattaaggcacccggagaacagacagtaccagccttgaaccttcag

SEQ ID NO: 38026 - DNA, 75 bp, Homo sapiens
cgacgtctacactgagtcggaggcgaagatggctcggactcaaaagaacaaggccacagcacaccacttagggct

SEQ ID NO: 38027 - DNA, 97 bp, Homo sapiens
agggggggagatgtttgtcctaaacccgtgtttgccttccatcatgctaacttcccacgtatcctgtggtctgaggccatcttcctcgaggcaaggc

SEQ ID NO: 38028 - DNA, 100 bp, Homo sapiens
ggaggagctggagacagattgtaggaccgagcgcgggcaggcgggaggcaacggagctaccagccggtgtcatggagaaactccagctgggcccagagat

SEQ ID NO: 38029 - DNA, 87 bp, Homo sapiens
caaaattgttttcagctaatgtgtaaaaggaagagaatgtctcctggacctaattgccacaatgctggtactacagtttattcgcac

SEQ ID NO: 38030 - DNA, 100 bp, Homo sapiens
ggactttgggcgctgtgagcggcggcgagcaggtcgccatgggctactcacactccttggtgatagcaagagatgaaagtgagactgagaaagagaagat

SEQ ID NO: 38031 - DNA, 82 bp, Homo sapiens
aaaatgtgggactgcgggaagctgcccttcacattttctgatttgatgatcgtggacggagtgactatgatggtattggcaa

SEQ ID NO: 38032 - DNA, 75 bp, Homo sapiens
attttgctcagcgactgtttgatgacgtcccgcaggtgtgatgaatgcagactctgctaccattttggctgtttg

SEQ ID NO: 38033 - DNA, 100 bp, Homo sapiens
cccatagcagtctgccagacaatagagcatatgggatgaccatgaaagctgtggttctaattctaccaaccgtagtactgctgagagcacaaaatcatca

SEQ ID NO: 38034 - DNA, 88 bp, Homo sapiens
tgttgagattctacttattcatcagtttgttgtgcttgtcaagatcaggctaaagaacgtgccaatggaatggagcttgatgggcgta

SEQ ID NO: 38035 - DNA, 98 bp, Homo sapiens
gaggaatttgacagtttcctgccaggcgccatcatcggcatagcccgggagatgcagccagtttacagtttcagaatggcttcggttattgcctttcc

SEQ ID NO: 38036 - DNA, 50 bp, Homo sapiens
tggagctcggcctgagtgaggcacagaatggaatcactagttccccttgt

SEQ ID NO: 38037 - DNA, 75 bp, Homo sapiens
gactttgaacatgctggtgccgctagccaagctgtcctgcctggatgacactggatcaaaaatccatctgactca

SEQ ID NO: 38038 - DNA, 107 bp, Homo sapiens
cggagccacgcagccgcggcttccggagccctcggggcggcggactggctcgcggtgcaggaaagagaatactgtgccaggcctagactggacatcatccagccact

SEQ ID NO: 38039 - DNA, 75 bp, Homo sapiens
ggacacggtctacaccgacttcgacgcctaagttcgaggcccaggcgcctccatcagcgccgcctgcgccccggg

SEQ ID NO: 38040 - DNA, 82 bp, Homo sapiens
cctggaggcctgggaagccaacgaccacacgcaaattcagaaggagctggcggacatcactttagaccctccacctaattgc

SEQ ID NO: 38041 - DNA, 83 bp, Homo sapiens
cgacgaccgacagggtggtgaaagatgaaggatttgggggcagagcacttggcaggtcatgaaggggtccaacttctcgggtt

SEQ ID NO: 38042 - DNA, 74 bp, Homo sapiens
gagtcacccaggtggagaatgaggagaaactgaaggagctagagcagtgttcgggagattggggagatggtggg

SEQ ID NO: 38043 - DNA, 100 bp, Homo sapiens
ccaagactacaccagaatcagctccctgaactccgtccactgtaaacacatcgaggaaggaggagagtccagacgaaggccttcatccaccacgagctgc

SEQ ID NO: 38044 - DNA, 100 bp, Homo sapiens
cgatggcagcgatgaagagaactgcaagctccagagattatattggggttgccattttgtgaagccatagacatgtggtcattgggatgtgtgattgcag

SEQ ID NO: 38045 - DNA, 100 bp, Homo sapiens
ctatcccagcatggtttgtcaaaagtggtatacagtggacctcatcctcaaagggagatgctgacagcacagaatcgccagcagaaaactgagcttccgg

SEQ ID NO: 38046 - DNA, 51 bp, Homo sapiens
agaacgtccgggagaggcggctggcagagcattgaatgaaatgtggaaatg

SEQ ID NO: 38047 - DNA, 75 bp, Homo sapiens
gtacaacgtgctggagagaccccgcggctgggcgttcatctaccacgctttcgtcaataggagtgaaacatccac

SEQ ID NO: 38048 - DNA, 83 bp, Homo sapiens
caagagtcctcaatccaacagcccagtgcttctgtctcgactgcactttgagaaggcgggacccttgcgtttgtcagcccaag

SEQ ID NO: 38049 - DNA, 76 bp, Homo sapiens
cgccatgaacctgaggggcctcttccaggacttcaacccgagagataatcattcaggtcttcgtgagctaaggcca

SEQ ID NO: 38050 - DNA, 50 bp, Homo sapiens
cggtgcagcagccggccgacccagagtatcaatgtccgagttaccaccat

SEQ ID NO: 38051 - DNA, 102 bp, Homo sapiens
aggaaagaaaacaaatagaggaagaagatctaatcatatgttcaaaccttgtactactcagctgatcacaagctgcttgatgggaacctactagatggacag

SEQ ID NO: 38052 - DNA, 75 bp, Homo sapiens
cgactctttgggccgttatctcacctatgacttcacacctatggattcttctgcagtttatgtgttaagtagtat

SEQ ID NO: 38053 - DNA, 90 bp, Homo sapiens
aacttccctaatgccatcgagcacaccctgcagaaggccaatgatgaggccaatcagagtgatacaagtgtctccttgtcagaacccaag

SEQ ID NO: 38054 - DNA, 51 bp, Homo sapiens
cgcccaagtccctctactcgcgagatgagcagcaccagcagtaagagggct

SEQ ID NO: 38055 - DNA, 50 bp, Homo sapiens
tgctcaacgacgaggacctgacgcagggtgataaaagaaaatgtggctga

SEQ ID NO: 38056 - DNA, 74 bp, Homo sapiens
taaccgaacaacccagtttacagacccaaggttacaccacatcatgaagcctgagacctgggaggaagctggag

SEQ ID NO: 38057 - DNA, 100 bp, Homo sapiens
aagagagcccaggccgagttccccacctgcgattgcgtcggcaatttgaatcaacccatagaagtgacagcgctgtattcatttgaaggacagcagcctg

SEQ ID NO: 38058 - DNA, 100 bp, Homo sapiens
gattgggcaggaggaagaggaggtgccttcatcaactgtggagtacctcaagaaacatggcattgatgtgcgggtcctccagacagagcaggcagtgaag

SEQ ID NO: 38059 - DNA, 101 bp, Homo sapiens
cggccgctctgggcgactgtgctggcgctgggggcgctggcgggcgttggcgtaggaggaccaagaatcgccttcagccctgtctggtgcatccttggcag

SEQ ID NO: 38060 - DNA, 82 bp, Homo sapiens
cggagacgcacggagcggccgggggctcggccgggccgtcccggcctgcgcagcctgaggacctccggctagcctgtttcag

SEQ ID NO: 38061 - DNA, 90 bp, Homo sapiens
caccgcttctttggacccaatgctgaaataaggtggacccccaaaagtacaagggcatatttaacggattctcagttacacttaaagagg

SEQ ID NO: 38062 - DNA, 100 bp, Homo sapiens
cttgataaaaagagatgtggggggattctcgacctgctaacagaactggaccttttcgaattaaacaaccaccatgtcgagcaaaaaggcaaagaccaag

SEQ ID NO: 38063 - DNA, 100 bp, Homo sapiens
gcggaggcgagggtgcgatggcgcggagcccgggacgcgcgtacgccctgctgcttctcctggtctgccatcatggatgttctcgcagaagcaaatggca

SEQ ID NO: 38064 - DNA, 100 bp, Homo sapiens
cgccgagcctgcagcctgccccgcggccaacatgagcttcttgtttgtcgagatggctatgaaccctgtgtaaatgaaggaatgtgtgttacctaccaca

SEQ ID NO: 38065 - DNA, 75 bp, Homo sapiens
ccagagcgtggttgctgaccagttgaaagaggcggggtttcaccatgttgcccagactggtcttgaactcctgag

SEQ ID NO: 38066 - DNA, 74 bp, Homo sapiens
aacgatatgaaaaagtcataaaggcttgtgctctgaaaaagaaactaattctgaagcaagcccttatagttgtg

SEQ ID NO: 38067 - DNA, 101 bp, Homo sapiens
tcaagctggaacaggagttccgatcgacccggtaccaagaaggggagtgcccgcggcagagtgagtatattgctccatgtgactgtcggcgggcttttgtc

SEQ ID NO: 38068 - DNA, 100 bp, Homo sapiens
ctcaaattcaccacctcggactcctgcgaccgcatcaaagacgaatttcagctactgcaagctcagtaccacagcctgtagccaccaatgtttcaagagg

SEQ ID NO: 38069 - DNA, 97 bp, Homo sapiens
ctgcacttcgcattttggcattgacatttaattttagggtcctttatatagaagggagagtagatttggatcatacagcagatgtccagtgagtata

SEQ ID NO: 38070 - DNA, 74 bp, Homo sapiens
caagatcatcgtgggcgacgccacagagaaagttttaatcagctggatctgcctgcctatgagagctttgagaa

SEQ ID NO: 38071 - DNA, 100 bp, Homo sapiens
aggaaatcatgtcaagcgaagccttgaaaaagctgccctgagacggtgtcccgccgaaagggtactagatggaaacttgagaaaggactgcttattgata

SEQ ID NO: 38072 - DNA, 98 bp, Homo sapiens
caacatttcctctcgggaagagatagatcatgcagagtattacctttacaagtacatcaggaacgtctctatcaagaatacaatttcagcaaggctga

SEQ ID NO: 38073 - DNA, 75 bp, Homo sapiens
gattgcctcaaggatgtcatatctatgagtaccgcgagagcaacaaaacaccttccaccatgaccacctcagcaa

SEQ ID NO: 38074 - DNA, 90 bp, Homo sapiens
gctgttttgccggaggagcccctcaggccacttctgcctggtgtcgaaggtggtgggcagatgccgggcctccatgcctaggtggtggta

SEQ ID NO: 38075 - DNA, 100 bp, Homo sapiens
aaactaaggcaagctgtgaaagatgctgtgtctaagaaacccattccattggagaacccaaaggaaaagcgaccaggcatagaatgtcaagctaaccagg

SEQ ID NO: 38076 - DNA, 100 bp, Homo sapiens
agttggagcacaggcttgtccggggagcagtatgccggaagctggttttcaggccacaaatgctttcacagtgatcagggccaaagcggtcagtgagaag

SEQ ID NO: 38077 - DNA, 103 bp, Homo sapiens
tccctgtatgcatggtgtggggttggtgtgattagcttcgcagtctggaaagctttaggagttcacagtctctctgatgtaaaggatggagtaaatcaagcag

SEQ ID NO: 38078 - DNA, 103 bp, Homo sapiens
ttttcacctcgcgtcgcgcccgggaggaaggaacgaggcaaggagctaaagcagcgtgcgttcagccctggggtctcggcgcggaagatggccggcggcgtgg

SEQ ID NO: 38079 - DNA, 100 bp, Homo sapiens
ggaacggcggcgacaagggtgttcccgaactagagtggatcggccatggatatggaacattccttatgtcaaagcaccggatacgcatgggaacatgtgg

SEQ ID NO: 38080 - DNA, 75 bp, Homo sapiens
ctcctgctagagcggcgaaccgtgggcagtgagaacagacttatgagttgatgcggtgtctggaggacttgacgt

SEQ ID NO: 38081 - DNA, 74 bp, Homo sapiens
ttcaacacaatgaacatgaagaccagcacagcctagatttgggaggcagcacaggcacttccccaaccacctcc

SEQ ID NO: 38082 - DNA, 97 bp, Homo sapiens
tctacacagaagattcacctgggctcaaagtgtattgttgcagcatctggcagtgagactgaggatgaggacagcatggacattcccttggaccttt

SEQ ID NO: 38083 - DNA, 90 bp, Homo sapiens
agattacagctgtgagccacctcccctggccataaaggttaatggcctcctacatttccaaaactctgtgtctctctggtttcaaaagac

SEQ ID NO: 38084 - DNA, 100 bp, Homo sapiens
agatgaacaaagattatttactgaaaaagtaaacaacacattttctgaatgcctgaacttgattaatgaggcaatgatagtaagaaatgctaaagataca

SEQ ID NO: 38085 - DNA, 72 bp, Homo sapiens
gaaaggaggttcagagagggaaaggcttgcctgaggtcacacggttcttacgtctgttgctagattatcgtc

SEQ ID NO: 38086 - DNA, 48 bp, Homo sapiens
cgtcaacttcctcaagtcgcccaaagcggaacggaagccgcccctttt

SEQ ID NO: 38087 - DNA, 76 bp, Homo sapiens
agagaacaagaggagagttgaagagagcaatggacatcttttcagcagccagtcgtctgggattgtattccaaaac

SEQ ID NO: 38088 - DNA, 74 bp, Homo sapiens
gaaaaactgcttgatattagaaagaagagattgcgaggtggtgagaaagcccgagcacttcacatatcaagagg

SEQ ID NO: 38089 - DNA, 100 bp, Homo sapiens
aacgtatggaattagccttcagcaggtgattaagagttgccaggtgccatgtttcagaacagagtaagacccctggtaaagaagaactgaagatattata

SEQ ID NO: 38090 - DNA, 78 bp, Homo sapiens
aaagattcgggccagagacgacaacccgggcctccgagatggtcatcatgggccagtgctactacaacgagaccatcg

SEQ ID NO: 38091 - DNA, 82 bp, Homo sapiens
gactgcttttgagtgacatttatttagcagctagtaacttcacttatttcaggatagcagaccccacgttagctgaaatggg

SEQ ID NO: 38092 - DNA, 101 bp, Homo sapiens
cgaatatggtgataaggagagaaagcctgactggctcatggagaaagcctacctaagaatgaagccgggacccggcagaatggctcctgtgaagaagggtg

SEQ ID NO: 38093 - DNA, 90 bp, Homo sapiens
aaggccacgtgaagatgctgcggctggaacaagagttgaatgctcgagcccgggccctccaagctgcatctgcttcatgttcatttcggc

SEQ ID NO: 38094 - DNA, 75 bp, Homo sapiens
cagcgaccgatatagctcgccaggtgaataccgtagcagtaggcaggacagttccaattcaacaaaaacctcttt

SEQ ID NO: 38095 - DNA, 75 bp, Homo sapiens
ctgaggagaggagcgtcaacagcagcaccatgggcccctagcagtcttcttgatgctttggaacaacatttagct

SEQ ID NO: 38096 - DNA, 75 bp, Homo sapiens
cctcatctcatcttacaggagcagactagccctttctaaggcacaaaatgatgtgatggaaatgaagatgcagtc

SEQ ID NO: 38097 - DNA, 96 bp, Homo sapiens
ctttcctccaagagcacattgcctggtaagatgtccctaaaagataagttagtacaagagaaaaagctgtccaatatgtaccaagagcagtgcatt

SEQ ID NO: 38098 - DNA, 103 bp, Homo sapiens
cttctctgctggcttggtggatggtcacgatgtagttatagaaccgaacaatattttgggagtccaagtgacatggcttctactgcagaaaacatcagagaca

SEQ ID NO: 38099 - DNA, 75 bp, Homo sapiens
ccaagattttgaagaagcttgtcgaggctaactgccaggcggccaaaggacagtatgttcacacgggttcttctg

SEQ ID NO: 38100 - DNA, 92 bp, Homo sapiens
ttatactcctcccagtgacgggtctggagtgcgtgggggaccggctgttggcggttcaaatctgaacatcaatgatgtactagggaactact

SEQ ID NO: 38101 - DNA, 101 bp, Homo sapiens
gaggcaacaggccagtggcctccaccccggtgcccggatccccctggtcggagcagagcatggacatgggaacgagtgctctcagcaagaagccgtggtgg

SEQ ID NO: 38102 - DNA, 89 bp, Homo sapiens
ggagggttggctgcacaaacgagaatagcctaacatggcagaccagagacagcgctcactgtctacctctggggagtcattgtaccacg

SEQ ID NO: 38103 - DNA, 75 bp, Homo sapiens
ctccactccatcctgaaggctaccaactacaatggaactgctgttgtaagcggctcatcaagagttgaacttcac

SEQ ID NO: 38104 - DNA, 82 bp, Homo sapiens
ctatcgtcgttatagtgacttccatgacttccacatgagaatcactgaacagtggtatgttcaagccacttgtgcaacacaa

SEQ ID NO: 38105 - DNA, 112 bp, Homo sapiens
ccattgacgccatgtcgggttattcgagtgaccgagaccgcggccgggaccgagggtggaagttaaacgagctgagcctcgggacagcaagagccaagcgccgggacagcca

SEQ ID NO: 38106 - DNA, 75 bp, Homo sapiens
cctggctcagcaagactctcgagcccataacctaaaggcagacccagaagagctttttacaaaactagagaaaat

SEQ ID NO: 38107 - DNA, 75 bp, Homo sapiens
aacctcctctcatcagctgcgctgggtctgcaggtctggtgagctgtaccttctttctggcagtgaatggtctgt

SEQ ID NO: 38108 - DNA, 82 bp, Homo sapiens
ctgaacggagtgtgcgacggattgggagaacactctgctccagccaaggtggtgagggcagctgttcctaaacagcgcaaag

SEQ ID NO: 38109 - DNA, 90 bp, Homo sapiens
gtgtctccagggagaacttcaggtaaaggtgtggagggcgcagctttccagagccgacttcctcatgaccggatgacttctcaagaagca

SEQ ID NO: 38110 - DNA, 83 bp, Homo sapiens
gactttgggcgtcccattgccatgtgttcctctgaacaacagggagaatatctctgatcccacctcaccattgagaaccagat

SEQ ID NO: 38111 - DNA, 96 bp, Homo sapiens
tttgagtcgtgccaccctggagcagaaggtggagggtagggataaggcctgcagaatgatcacaaggcagtgatgaagcaggtggaggaggccctg

SEQ ID NO: 38112 - DNA, 75 bp, Homo sapiens
gtccgagccagccgctgttttgccggaggagcccctcaggccgaaatggaagttccagtattaccgaaaatctct

SEQ ID NO: 38113 - DNA, 97 bp, Homo sapiens
agaggctggaaagagcgttcaaacggcagggcagccagcccgcacctgtcaggatgttaaagtctttagtgaagatgggacaagcaaagtggtggag

SEQ ID NO: 38114 - DNA, 75 bp, Homo sapiens
cgcaaaccaaggatctggggatcttcgcactatcccaaggcttcctgttacctgaaacagggcaaatatgctgag

SEQ ID NO: 38115 - DNA, 100 bp, Homo sapiens
atttcaacctgaaagtggaggctgcgaaaatagggcgccatgttttggaagtttgacctgcacacaagctcgcacctggacacgctgctggagcgggagg

SEQ ID NO: 38116 - DNA, 82 bp, Homo sapiens
gccgggggagcggggccttccacaccccctccgtgggtgtgtggtgctggagatcagaatttatttacctctgtttatccaa

SEQ ID NO: 38117 - DNA, 100 bp, Homo sapiens
gaaaactctcaaagcacccacacttcagtttctaattaggtgtggagttgcaagagctctggaaaagatgttggtgctaaactgttctaccaaattactg

SEQ ID NO: 38118 - DNA, 74 bp, Homo sapiens
aggtccggacccactggctgctggagcttgtcaccaccaggcgccatgtcagaaccggctggggatgtccgtca

SEQ ID NO: 38119 - DNA, 75 bp, Homo sapiens
caccaccgccgctgccccggctgcctcctccctgagggggacttgatctcatcttcatgccaggccttgggtttg

SEQ ID NO: 38120 - DNA, 51 bp, Homo sapiens
gattcagaaggagcaggattaccaaagggtacaacagaatagctcgggaat

SEQ ID NO: 38121 - DNA, 100 bp, Homo sapiens
gcccaccttgtggccctgggctttaccatctttgtggctgtgcttgccaggcctggctccaaggaccccaagagtcagaagctgaagtacaaatggtgcg

SEQ ID NO: 38122 - DNA, 74 bp, Homo sapiens
aacatgatagagcagagtggaccaccccatgaacctcgaatccaggagtcctccagctgagaacgaggtgtcca

SEQ ID NO: 38123 - DNA, 89 bp, Homo sapiens
tggcggctgccggtgctcgggccgggggatacgagcccctcggagggccacagttatcagaacagcggtctggaccacttccaaaacag

SEQ ID NO: 38124 - DNA, 101 bp, Homo sapiens
caacagggacacctggttccagctgcagcacgtggacgctgactcggaagtgcaggctgaaggtgatgtggccgccctcaaccgacgcatccagctcgttg

SEQ ID NO: 38125 - DNA, 100 bp, Homo sapiens
ccccggatggcgctttacccctaggaccggtgtactagccctctcttggtacccacctgatgtaaatgatgaaaatggagaacctactgataacttggta

SEQ ID NO: 38126 - DNA, 83 bp, Homo sapiens
cggcgacatactacctctggccccgagatcagaatgccgtgcctccggagccagcgtggtggccatagacaacaagatcgaac

SEQ ID NO: 38127 - DNA, 50 bp, Homo sapiens
atggcatcgtccctgaaacgtggattgaggagaattctgcctaagccaac

SEQ ID NO: 38128 - DNA, 102 bp, Homo sapiens
ttcaaggaggtgctgaagagcgaggaggagcggcctattgccaattcatggacatgctcttccctggctgcattagtttgaagaaagtaaaatttcaagcaa

SEQ ID NO: 38129 - DNA, 75 bp, Homo sapiens
agcacacggagcactgcaggcgccggccgccaccggcacggccaggccagcatggtggaccacttacttccagtg

SEQ ID NO: 38130 - DNA, 74 bp, Homo sapiens
tttaaactcccgggcctgcggacgctatgcacaggtgtgatgaatgcagactctgctaccattttggctgtttg

SEQ ID NO: 38131 - DNA, 90 bp, Homo sapiens
ctctgttcagggacttagatgcagatggcaatggccacctcagcagctccgaactggctcagacctctcaagctggatccaaggataaaa

SEQ ID NO: 38132 - DNA, 100 bp, Homo sapiens
cggcggcggccgtggcggtgaagcgtgaggccggcatcgtctttccgtcctctgaggcgacggccgcggctgcacaggctttcaaggatatgctgtattc

SEQ ID NO: 38133 - DNA, 51 bp, Homo sapiens
ccagctgctaaaggaagaggaaggaggccactgtctgcagctcccgtgaag

SEQ ID NO: 38134 - DNA, 75 bp, Homo sapiens
gccgcagccaggagatggttcgggcctagcggagccgggactggaggtgcttcttaacctaccagtcctgccaga

SEQ ID NO: 38135 - DNA, 98 bp, Homo sapiens
ggagcacgattggatttgccgaagattaggaagaatccactgatagaaatcatttccatcaataccgggtagtgggcagcagtcagtgacaggtgtaa

SEQ ID NO: 38136 - DNA, 74 bp, Homo sapiens
ctctcgatctcagactcggacagtgggctggaccccggccctggcgcagacggggaagcggagccaacatgcca

SEQ ID NO: 38137 - DNA, 90 bp, Homo sapiens
tcaatgaactaaataatggggttagtaggagtagtgaagaagttctcactgcagaagattgtgaaaatgtctatcatctggtttattcag

SEQ ID NO: 38138 - DNA, 73 bp, Homo sapiens
cgagtctctgcgaacattccttttaacctatgtcttacaaaggcccaaaatatgcttttaaggctattaacca

SEQ ID NO: 38139 - DNA, 117 bp, Homo sapiens
gggcatttacccgtgctttcccaagcctggaagaactcgtcatgctctttgtagcgtggtgcttctgttgctcacaggactcacaccacccggcaagaactgctcactacggctccc

SEQ ID NO: 38140 - DNA, 97 bp, Homo sapiens
ggtcggggatcggtcgcctgagaggcaaaatacatatctcagtgcattgatgagatcaagcaggagctgaagcaggacaacatagcggtgaaggcga

SEQ ID NO: 38141 - DNA, 51 bp, Homo sapiens
tgatgttttctcacccagtcatgatttttgatgaaattgagtcatgaaact

SEQ ID NO: 38142 - DNA, 106 bp, Homo sapiens
tgcgggtgaagatggcggcagccgaggccgcgaactgcatcatggagtaagactttgaccccgacgcaggcttcagtgattgccgcggatcagaagcctgagcact

SEQ ID NO: 38143 - DNA, 98 bp, Homo sapiens
caaattgctccaatacagttcaagagaaaacattcaacaaagatacagtgattatagtagcatctgctgcacccaagcctgagccggttcctgttcaa

SEQ ID NO: 38144 - DNA, 100 bp, Homo sapiens
tctaaacagcctgcctcacaactccaaaaacaaaagggagatactccagcttcagcaacagttgacattttgctaaaggctgtgggagacactcctatta

SEQ ID NO: 38145 - DNA, 51 bp, Homo sapiens
gagaactttcgaagaccacagacagatcacacggatgataccatcggggac

SEQ ID NO: 38146 - DNA, 88 bp, Homo sapiens
cgccctggatgtcttcgcgctctggctggtctcccctctgctgggaacacctcatcaaaatgcagaagcagaaactgcagatgccccc

SEQ ID NO: 38147 - DNA, 76 bp, Homo sapiens
ctcggctcagctaatggaaatggagaccttgattctggtgaatgaaaactttgccattgatttgatagcagagcag

SEQ ID NO: 38148 - DNA, 101 bp, Homo sapiens
agggacgagatctagaatcaactgagagagatgcttaaaaatcaccagttactttaatgaattgactcttttcgccgacaccttgtatttcgtctggcaac

SEQ ID NO: 38149 - DNA, 90 bp, Homo sapiens
acaccgacatggaacagggactcactgggggttatcaatagtctggctgtctatcgtcatcgtgagactgactttggtgtaggagttcga

SEQ ID NO: 38150 - DNA, 105 bp, Homo sapiens
cgctttcctgggttgcttctggcggccatggtgttgctgctgtactccttctccggagtgttcagcctgggtgttcctgtagatgctctcttctttattggtaac

SEQ ID NO: 38151 - DNA, 82 bp, Homo sapiens
cggccgcctggctccccatactagtcgccggtactggtgaccccggccggggcaggccccgggactcgacaacatggcttcc

SEQ ID NO: 38152 - DNA, 97 bp, Homo sapiens
tcagaagttcttcttccagaccgagctgcagtggtctgcaagaagaatctggacagtaccactgtggccgtgcatggtgaggagatttactgcaagt

SEQ ID NO: 38153 - DNA, 100 bp, Homo sapiens
tagtgagtcgcgaagtcgggaccatcgtcgtgaggatcgtgtgcattacaggagtcctccacttgccactggagcaaggtgatgtcacaacacccacctc

SEQ ID NO: 38154 - DNA, 101 bp, Homo sapiens
ccgcgctgaccgcagcaagaagcttttcaggcactacaccgtgggctcctatgacagcttcgacacttccaggttcgatacaagaggctgttttcctagcg

SEQ ID NO: 38155 - DNA, 100 bp, Homo sapiens
gacctgggtgcgaagctatgaattcaccagtaacagctgctcccagcgggctgtgatacttcattagaggggtggtagactcggaggatctccctctaaa

SEQ ID NO: 38156 - DNA, 100 bp, Homo sapiens
cgcgcagcttccgtgtttgctgcgcccgcactgcgagaacctgcagttttggaggatttgacttgacgaatcgctctctgcacgttggcagtaataattc

SEQ ID NO: 38157 - DNA, 50 bp, Homo sapiens
tgagggaggggaaaggcgcaggcccgtggaccgggagcccgtggaccggg

SEQ ID NO: 38158 - DNA, 100 bp, Homo sapiens
gaaaggaggagctggagacagattgtaggaccgagcgcgggcaggcgggaggcaacggagctaccagccgcttgcaggcctctgggaagcaagccatcgt

SEQ ID NO: 38159 - DNA, 100 bp, Homo sapiens
gtactggagccggcggctgcggccggcagccggcagctttgcagcgggcgaaccctcctggtgtactggcccttttggatgaagaatgctggttccctaa

SEQ ID NO: 38160 - DNA, 73 bp, Homo sapiens
ccacctgttgttgtgggtttttgggtgaccagggcttcaagatgggctgcgctccagttccaacagccgcagc

SEQ ID NO: 38161 - DNA, 100 bp, Homo sapiens
accaactctcagaggtggccaataagttcgccaaagcgacaggagctgcatgaagacaacagtgagcgaggcagaacatcccctcttatgtgaaggcaca

SEQ ID NO: 38162 - DNA, 93 bp, Homo sapiens
caagctgataggctgcgctaccggaatgtcatccagcgagtgattagtgcattgaagtaatgggagatggatgccttaataatgaacactttg

SEQ ID NO: 38163 - DNA, 100 bp, Homo sapiens
ctttgactggaacatgctgaaattccattagtgaccagaaggatcccaaggatcgaatggttcaggttgtgaaatggtacctctcagcctttcatgcggg

SEQ ID NO: 38164 - DNA, 83 bp, Homo sapiens
tttaggcatatgtatgtgtttggagacttcaaagatgtatttttgtagaagactatgaacctaccaaagctgacagttataga

SEQ ID NO: 38165 - DNA, 100 bp, Homo sapiens
agtgggcagcaaatgttgtaaacatcctgaagcaaaaagaatgccctgtgcagaagactatgaacaggatctggacttggcacatttcttttaaaggtgc

SEQ ID NO: 38166 - DNA, 83 bp, Homo sapiens
agggcctgcagcgggagctggacggcgagcgcgagcggcgcgagaaaggtggcacctgtggaaatgaaacggagaaataagat

SEQ ID NO: 38167 - DNA, 75 bp, Homo sapiens
cttggggacaagctgcgcatgatcgtcatgggacacagaagtgaggactcttgtgaagatatgagttgtggagag

SEQ ID NO: 38168 - DNA, 101 bp, Homo sapiens
ggcggaatttcaagatggatcgggtcagtatgggaatcctttaaataaatatatcagacattatgaaggattatcttacaatgtggattcattacaccaaa

SEQ ID NO: 38169 - DNA, 100 bp, Homo sapiens
cacaaagtgaccaagaacgtgagcaagcccaggcacagccgacgccgcggggtctcacactctgaggatgactgtctagctttcaaagttcaccaatact

SEQ ID NO: 38170 - DNA, 101 bp, Homo sapiens
ggagctgccaacattgccaacgccaccgccacgctacacacagatgtctttggtggacttgggaaagaggttgctagaagcagcaagaaaaggccaagatg

SEQ ID NO: 38171 - DNA, 75 bp, Homo sapiens
ccaccctgttgtacatccactggacctaaaatatgaccctgatccaggccgcattgacaggaagattgagttccc

SEQ ID NO: 38172 - DNA, 82 bp, Homo sapiens
gacacataacaagcagcagtgaggacaccaaagagcagtcattatggcgaaccttggctgctggatgctggttctctttgtg

SEQ ID NO: 38173 - DNA, 108 bp, Homo sapiens
ttgactgcttcttttctccgcgggcgccgaccaggcctggctcgcgcctctcccaggacccgcctggctgcgagatatgaactgtggaaggtgcatcagtgaagaaat

SEQ ID NO: 38174 - DNA, 73 bp, Homo sapiens
ctgaagtgggcagatggcaaaatgatcaagaatgaagtggacatgcagaaatatgaacagggattcatcacag

SEQ ID NO: 38175 - DNA, 100 bp, Homo sapiens
aaactacatctgtagccaaaattgcacaatacaagaggaaactcatggatctttcccatagaactttacaggttggcaaaagcagcttttgatgatgcaa

SEQ ID NO: 38176 - DNA, 100 bp, Homo sapiens
acaccacagagccctcatccccagaagggaaggaagagagcctagctacagagccagccccaggatgttgcttcagagtgtgaagtcaaatgcatgccaa

SEQ ID NO: 38177 - DNA, 98 bp, Homo sapiens
ccgtgggcctgtggactgcagcctcggcggtcagcaggagtcagagtcagaagcaaaggtagatggagagactgcatcggacagtgagagccgggcag

SEQ ID NO: 38178 - DNA, 82 bp, Homo sapiens
gtgtgacttgactcttcaaacacaaagctaagaagaaatttcctgacttgtttgtcttcttggaagattcctcctcatgtct

SEQ ID NO: 38179 - DNA, 100 bp, Homo sapiens
ttagaaaatcgtcatctttctgaaatggtgatgaaattggaattgggtttacatgaggaaaggcagactacaagttactgagcacctccctgagaaaatt

SEQ ID NO: 38180 - DNA, 94 bp, Homo sapiens
gcgctggggatccctgctcttcgctctcttcctggctgcgtccctagacaatgcagatcttcgtgaagactctgactggtaagaccatcaccct

SEQ ID NO: 38181 - DNA, 75 bp, Homo sapiens
atgataggaatcccatctcatttagggcagagagctccgctaagggcgtccactccttctacaacaacatcagcg

SEQ ID NO: 38182 - DNA, 113 bp, Homo sapiens
atgaaatacagattcgcgaaacccggggcacttagaggcccgtctggaacacgaaggtgatcatggagctcagcttggtctccatggggctggtggtgatggaatacatgatg

SEQ ID NO: 38183 - DNA, 101 bp, Homo sapiens
agaaaggagaacaccttatttcagtatggcatgcagctgtaccagaattatatgcatccatatcaaggtagaagtggctgcagttcacagagcatatcacc

SEQ ID NO: 38184 - DNA, 100 bp, Homo sapiens
cgcattttggcattgacatttaattttagggtcctttatatagaagggagagtagccctcatgcaactggagtctgttttaaggaacatcataaaagaac

SEQ ID NO: 38185 - DNA, 90 bp, Homo sapiens
gaagcgtcgggattaggtgaaagactgcctccgggcctgccaggagcagatcgaagccctgctggagtcaagcctgcgccaggcccagca

SEQ ID NO: 38186 - DNA, 101 bp, Homo sapiens
aaaacgtgaaaaaaaagacctgctttgccctgggaaatagtaaccctgccaaatacatcagcttgtaggagacagaggctggtgtgcaatggcgtgatctc

SEQ ID NO: 38187 - DNA, 96 bp, Homo sapiens
cactgaagaaggtaaccgggtccagacccacgcggcgccagttctccggcgggaaggaaaaccgcgcagagagggcatccgcttcgatcctgaaat

SEQ ID NO: 38188 - DNA, 100 bp, Homo sapiens
cagcctcctaaatagctgggattacagctgccatgcaaagaaagcccaaatcatattcttcttctttaatggatcagattcctatcaaattccttattcg

SEQ ID NO: 38189 - DNA, 143 bp, Homo sapiens
ggagcccagcagcgtggccagtgacgtcagcaagcctgtgctcaccacaaaagtccttctggggcaggatgagatgagtaatgtctcagggatcctggagacagccggcgtccccctggtgtcagcgaactggccgcagccca

SEQ ID NO: 38190 - DNA, 98 bp, Homo sapiens
ctgagctggagctggagctgtcggaagttggtgacaaagttcctgctgatataaggttaacttccatcaaatctaccacactaagagttgaccagtca

SEQ ID NO: 38191 - DNA, 91 bp, Homo sapiens
aggctaccatggtctacaagactctcttcgctctttgcatcttaactgcaggtgctggagaatctggtaaaagcaccattgtgaagcagat

SEQ ID NO: 38192 - DNA, 101 bp, Homo sapiens
cttagatgacaatgtcaagaaagaaaactcctccttgtacctaggaaccgcggggaaaggcgaatgggtgcttttgaatgtgttcgtaaagtgtatcagac

SEQ ID NO: 38193 - DNA, 100 bp, Homo sapiens
cttgccagtaggccgggactagctgtctcggggccttccatccgcttggccccacagattggccttaagagaaggacggagccacatactgctgacggcc

SEQ ID NO: 38194 - DNA, 100 bp, Homo sapiens
gtggagttggcaggtgtgcgcagcaaactccaggtcataggcggaacccatcaaaccaaagtagcttagaatctgactccaattacccctccatctccac

SEQ ID NO: 38195 - DNA, 82 bp, Homo sapiens
cggcagctgatgttctctcagtttgcacaagggaggcgacagagacagcagcaggtgacttaagagattaaaattaatttgg

SEQ ID NO: 38196 - DNA, 80 bp, Homo sapiens
gactggggttctgagactccctgtcccggaccgcaggcgccatggctgcggagcggacccggccgctgcaaggctctggc

SEQ ID NO: 38197 - DNA, 100 bp, Homo sapiens
gcgaaggtcagcgccgacggcagccggcacctgacggcgtgaccgacccgagccgaggcgtggagctatttcctatgacagttctgatcagactgcatta

SEQ ID NO: 38198 - DNA, 100 bp, Homo sapiens
agtttatctgtgccccagcttcctcacttagtctcagaagacttaggctgaggcctcagaaggaggccatggagaagtgtaaggatgcaggattggccaa

SEQ ID NO: 38199 - DNA, 100 bp, Homo sapiens
ttcaaacaaagaggccgcggaggagaagccggaggaggacaacgactaccaccgcagcgacgagcagggtatttgaagtataccatacaactgttttgaa

SEQ ID NO: 38200 - DNA, 75 bp, Homo sapiens
tggagatctacaggatttatcaaatcgagtcactgtcaagcctatggcatgtctgcgttacctttaaatctgata

SEQ ID NO: 38201 - DNA, 100 bp, Homo sapiens
acaatttccactggaactgtgttcagattcacttccttctcatccttttccaccagctaaagtcctgacacagctctccctgaggagcagccacattcca

SEQ ID NO: 38202 - DNA, 98 bp, Homo sapiens
ctcgcagaacgcctttatgcagaagatatgagtaaaattagcctaatcagaatgttagttcctgaaaacattgacacgtaccttatccacatggcaat

SEQ ID NO: 38203 - DNA, 123 bp, Homo sapiens
gtgggcagccgggagatggccgaggccttcgccggggagatccctaaggtcctcgtagccgggcctgacctctcgggacacacccagccctgtggacccagacaccgtggaggtgttgatgac

SEQ ID NO: 38204 - DNA, 100 bp, Homo sapiens
gggcaccttgcgcttcttgcagtcggtggcccgaggcagccgggatgacagctctccccaggaatcctgctgcctgctgagaaacatggtcagcaagtcc

SEQ ID NO: 38205 - DNA, 74 bp, Homo sapiens
gatcgggcgtggagagcccctttctgtcctgccttgcagtctcatcctactcaagtgtggctctgtatccaaca

SEQ ID NO: 38206 - DNA, 100 bp, Homo sapiens
tgtgtgtaacaagaaattctccagagtggctagtctcaaagcgcatattatgctacatgaaaaggaagagaatctcattttcagcttctgccagagccag

SEQ ID NO: 38207 - DNA, 100 bp, Homo sapiens
cccagggcccgcccaggacccccaagccgccgcggacgcagaccttcacggcatggtgcaactcccacctgcggaaggcaggcacacagatcgagaacat

SEQ ID NO: 38208 - DNA, 98 bp, Homo sapiens
tgatgtctcatatgtctcaggcttccatgcagcctgccttaccgaaagctgatggtgtgcccgtctacctgaaacgaggcctgcctgaccaaatgctt

SEQ ID NO: 38209 - DNA, 100 bp, Homo sapiens
gaaaacggagagactggggagaagtgaactatgaccactttactctgggttttcgtgactctgagggtcatcactgcagctgtcactgtagaaacttcag

SEQ ID NO: 38210 - DNA, 90 bp, Homo sapiens
ggaccattcatgctaaacctgggtttgtcatccaactaagtgctggaactttgcctgtcacctttcgttgcctggaagaaaatctgggga

SEQ ID NO: 38211 - DNA, 100 bp, Homo sapiens
ccccatcacataggggtttctgttaaggaactcgatttatatttggcatactttgtgcatgcagcaggtaatctatttaaagaagacaccagaagaagcc

SEQ ID NO: 38212 - DNA, 90 bp, Homo sapiens
ctacacgaagaactaagaatattattagcacaagagcaccatactttgagggtaatgagtatggtgtcaggatttacaccactaatttct

SEQ ID NO: 38213 - DNA, 82 bp, Homo sapiens
atcctgtccttcatgcagtctctcattggcttctttgagactgaaatggcaggttcgatacaagaggctgttttcctagcgt

SEQ ID NO: 38214 - DNA, 83 bp, Homo sapiens
tcctcgtcagcactgactttcagctatggaatcggtatcatgatattagctggtttgacatcaagtcatttgtgagtcatcag

SEQ ID NO: 38215 - DNA, 100 bp, Homo sapiens
atcctactatgattcacaagatgatgtttgcaaagggagcaaaggaagcataaagatggcagtttgtgaaattaaagtgagtccattcttgcacaccgag

SEQ ID NO: 38216 - DNA, 90 bp, Homo sapiens
catgtgaacactcaagtgaagcaaaagccttccatgattacgctatttttatgattcccacaaatccaccaccaacattcagaaagccag

SEQ ID NO: 38217 - DNA, 75 bp, Homo sapiens
aggaccgtatccccagcccactgggctacgcagacacttaaagaatcctgtaatagcacagaagatccagaagct

SEQ ID NO: 38218 - DNA, 50 bp, Homo sapiens
ctaaagcagcgtgcgttcagccctgggtgcctggaagcagcgagcccttt

SEQ ID NO: 38219 - DNA, 80 bp, Homo sapiens
cagcgtgtgtggcaaggggctctacggatcctacagctcccaggagccccaacacaaacttgaccacccaggagcatgaa

SEQ ID NO: 38220 - DNA, 100 bp, Homo sapiens
ccgggatcgtgaccgagaccgtgaccgagagcgtgaccgagagcgcgaatatcgtcatcgttagaaggtgaatctatgttttgaccaatttgtttacaag

SEQ ID NO: 38221 - DNA, 87 bp, Homo sapiens
ccactacagctgttcccagcttggttgcacttgagaaaattaatgtggcagtttctctgtttgaagaacataaggacatttctcacg

SEQ ID NO: 38222 - DNA, 83 bp, Homo sapiens
agaccgggggaggcgacgctaagttgctgatcgtggcgggggatatgagactttctactcggaatatcctgagtgttgcgtgg

SEQ ID NO: 38223 - DNA, 74 bp, Homo sapiens
tcatatccaaacacacttcccgaaagcttcactaacagcagcagcagccacgacgaggcccccgtcctgaacga

SEQ ID NO: 38224 - DNA, 96 bp, Homo sapiens
aaccactaaagggcagagcaaagactccagtaacactcaagcaaagaagagttgagcacaatcagctttgggatgcgacatcagcaaatgagagga

SEQ ID NO: 38225 - DNA, 83 bp, Homo sapiens
aagctcagtgttccactgattctacactatggctcagctggaagctcagaaagccacgcaggacttccagagggccacagagg

SEQ ID NO: 38226 - DNA, 75 bp, Homo sapiens
ctttactctggggtcccggctgccctgtggcctcgctcctcggaggtcgactcctttacatctagcagcgggcta

SEQ ID NO: 38227 - DNA, 88 bp, Homo sapiens
tgtaactcttttaaagtatatgtatgacttttaaaagagagagcttgtgaaactgagggaataggtaaccttttaaggtggagaccgg

SEQ ID NO: 38228 - DNA, 75 bp, Homo sapiens
cgccggccggctgcgaagacgcggtgggccgcccctccggaataagacgagttggaagaagacctgatcaacaac

SEQ ID NO: 38229 - DNA, 88 bp, Homo sapiens
cacaggtgctaaagagagcagtaccctgatggagtcccttgcaggtactccaaagattcaggtttactcacgtcatccagcagagaat

SEQ ID NO: 38230 - DNA, 101 bp, Homo sapiens
tcgacgctattttttggaactgacacaaagtttcatcattccattagtcattcagtggtgcacccaccacaaggatgaccctcctcctcctgaagatgatg

SEQ ID NO: 38231 - DNA, 98 bp, Homo sapiens
cctatacctgccacgccaataactcagtcactggctgcaacaggaccacagtcaagacgatcatagtcactggcagcaaagtaatggagaacggcctt

SEQ ID NO: 38232 - DNA, 75 bp, Homo sapiens
acatcccccataggtcactgtgtggccatctaccactttgaagagcgacaccacaggcaagctgggctttgagga

SEQ ID NO: 38233 - DNA, 80 bp, Homo sapiens
cctcccaaacccactaccaggattgccaaccacttaacaggatatgaattgtctcccacggcagcagctaacttcacacg

SEQ ID NO: 38234 - DNA, 98 bp, Homo sapiens
ggaaaattggcaaatctgttactgcagacagatgggaaaaatatttgatcaaggttttgacaagcttgcatcatgcgtgagtataagctagtcgttct

SEQ ID NO: 38235 - DNA, 98 bp, Homo sapiens
gagccgcgaggacacgggctgcaacctgcagcacatcagcgaccgggagaacatagacggtttgatgaacttgtgaaaaaattcaaagtcgaatatca

SEQ ID NO: 38236 - DNA, 75 bp, Homo sapiens
ctacaaccttcgatctcctgacgatctctggcatctctatcccctatgaggcaccacgtaagacctcctgccctt

SEQ ID NO: 38237 - DNA, 100 bp, Homo sapiens
tcctaaactaccttcccaaatgcatccgggcgtgtgctcgcccactgatatcggtgtactccgaaaagggggagtcatctggcaaaaatgtcactttgcc

SEQ ID NO: 38238 - DNA, 98 bp, Homo sapiens
cgggaaggcgggagacgagaagcctgaaaagtcgcagcgagctggagccgccggagacaaatttacatgtattggagaccagaccagaagcccttctg

SEQ ID NO: 38239 - DNA, 99 bp, Homo sapiens
ggaagaggcgttgcggcgaaaggaacggctgaaggccctacgggagaaaaccgggcgcaagccgccaccggcacggccaggccagcatggtggaccact

SEQ ID NO: 38240 - DNA, 83 bp, Homo sapiens
cgaacgaccaagagggtgttcgactgctagagccgagcgaagcgtatggacgacaaaggcgacccgagcaatgaggaggcacc

SEQ ID NO: 38241 - DNA, 75 bp, Homo sapiens
ctccttcagtgagcaaggcatcaacgagtttctcagaaaaatgttcgttggtggcctgagctgggatactagcaa

SEQ ID NO: 38242 - DNA, 100 bp, Homo sapiens
gaaaaaacctgagaacttcctgatctctctcgctgtgagacatgtctgagactcctgctcagtgtagcattaaggttgtctgcattcaaaagagcattct

SEQ ID NO: 38243 - DNA, 98 bp, Homo sapiens
tccgccatgacaaaagggtttacttggggttgtgcccacgtgcctcagggccttggtagaaatggcccgggtagggggtgcctcctccctggagaata

SEQ ID NO: 38244 - DNA, 88 bp, Homo sapiens
ttatagctaagactccaggacacccctgaagccgagaaatgacaatgcagatcttcgtgaagactctgactggtaagaccatcaccct

SEQ ID NO: 38245 - DNA, 100 bp, Homo sapiens
gttttccaacatccagctacgactggtacaaggctcatccacctgcagacatggggcgcagaaagtcaaaacgaaagccgcctcccaagaagaagatgac

SEQ ID NO: 38246 - DNA, 88 bp, Homo sapiens
gcggagcagcctcggcggcggcggccgaaccaaccgagtcggatcctgaccctaaaacctaatcctgaaagagatgtgcgatgtggag

SEQ ID NO: 38247 - DNA, 82 bp, Homo sapiens
gtcgggagagcgcgcctagccggctcgcgattgatattcactgatggactccaaagaatcattaactcctggtagagaagaa

SEQ ID NO: 38248 - DNA, 100 bp, Homo sapiens
aaaaacatcttgatctggagaaaaactggatgttggtagaaaaagcaagagtttgttatatagcacatcatggcagaacaggatgtggaaaacgatcttt

SEQ ID NO: 38249 - DNA, 96 bp, Homo sapiens
gctcagaacagttggatcttgctcagtctctgtcagaggaagatcccttgttcgttcccacatgcagggcagcacaaggagaatgggcgtcatgac

SEQ ID NO: 38250 - DNA, 50 bp, Homo sapiens
aaacgtcaggaatttactacacagcctcagactatggcatgaaactgcca

SEQ ID NO: 38251 - DNA, 82 bp, Homo sapiens
cggggacctgaagaagatgaacaagcgccaggttcctacaaacttgatgacttttgagtagaagcctgagaaaaaaagagag

SEQ ID NO: 38252 - DNA, 74 bp, Homo sapiens
aaagatgacagactacgccaagaaggttgataacactgatgctgaggggaggctcatactggctgatgcgctct

SEQ ID NO: 38253 - DNA, 100 bp, Homo sapiens
gttggactgcagctcgcggtttcctggcttctaggttccttgcattgactccatggagagtatatcacctgatttccgtcatgatacttgggcgtgttat

SEQ ID NO: 38254 - DNA, 90 bp, Homo sapiens
ctttactgtggtctaatggagacagcactcgactgaaagtgaaggacccagactctagttgttgggataattcttcactattccaccctt

SEQ ID NO: 38255 - DNA, 83 bp, Homo sapiens
agtggtttttcggatcatgtctggtggctccgcggattataacagaccattgccctcttgaacatttaccgtaaccctcaaaa

SEQ ID NO: 38256 - DNA, 101 bp, Homo sapiens
tgtggaggaagtgcgttccctactctcgcagaaggagaacatcaatgtgctgggagggggcaaggaaggagccattggccgtggtgggctccccatactgg

SEQ ID NO: 38257 - DNA, 80 bp, Homo sapiens
agcaaaaccaacgcctggctcggagcagcagcctctgaggcttctcacggcattcagcagcagcgttgctgtaaccgaca

SEQ ID NO: 38258 - DNA, 112 bp, Homo sapiens
cggcgactggccggcggggctgaccacttaccgcagcatccaagtcggccctgcgggcgatgatgagatctcatttgaccctgatgacatcatcaccaacatcgagatgatt

SEQ ID NO: 38259 - DNA, 75 bp, Homo sapiens
cccgcaacccggtgttcccgcgctttatcaagattatcgaggcatcatgacggtgatgtcagctctgtcggtggc

SEQ ID NO: 38260 - DNA, 100 bp, Homo sapiens
gctccatcaagaatgagaagctgcagtgggccatgagatcaaagacgctggccttcagacctgatcagactcccaggggcagccaccacatgtatgacag

SEQ ID NO: 38261 - DNA, 100 bp, Homo sapiens
ccagcttggagcttttcttggctcttttgttagtatatacaagatggcctgatatgaaggagtcacgcctcccgcctcccggagctgcccagtggctgcc

SEQ ID NO: 38262 - DNA, 100 bp, Homo sapiens
gatcgagaacctcctggacagtgaccaccgagagctgattggagattactctaaggttcctatctgacccacgaagccagtggcttggatgaacagggag

SEQ ID NO: 38263 - DNA, 100 bp, Homo sapiens
aacctcagacagatcgccggggaggcagcgcgggatcccagcctcaggcgtgcgcggacggtgtgcggatattaacctggctgcagagccaaaagtgaac

SEQ ID NO: 38264 - DNA, 100 bp, Homo sapiens
ggcggccttgtgccgctgggggctcctcctcgccctcttgccccccggagccgcgagcacccaagtctccggagtagagatgaagagagaatttctaaac

SEQ ID NO: 38265 - DNA, 51 bp, Homo sapiens
ctatcggctactctggagaggactgcccaggccatggctatgatggggagg

SEQ ID NO: 38266 - DNA, 100 bp, Homo sapiens
cgactgcctgggacctggccaagggctccacacaccaagaccaagattagaagcccaggacccaggaaggagacacaggaaatttattcaaagtccccac

SEQ ID NO: 38267 - DNA, 100 bp, Homo sapiens
atgttcctctatgtagccttggtggatatggctctaagggatggaaataagctggcacagatggaagaggctccacttttcccaggagaatcaattaaag

SEQ ID NO: 38268 - DNA, 83 bp, Homo sapiens
cttttcaagacaccaagtgagaggccaaccagaggactaccccaatggcacctggctgggcgacgagaacaaccccgagatgc

SEQ ID NO: 38269 - DNA, 82 bp, Homo sapiens
acgctgccaacaacgggcactacaagccgtgttgccgcccgctgtgctatgagcagtcagagcgccgtctccacaagagttt

SEQ ID NO: 38270 - DNA, 75 bp, Homo sapiens
gagacgccaacggcagtcactgccccccattccagctcctggaatgaactctggaagcccagccagggacaatgc

SEQ ID NO: 38271 - DNA, 100 bp, Homo sapiens
aagcggtacattgcttcttatttagcactcacaggtgctggagaatctggtaaaagcaccattgtgaagcagatgaggatcctgcatgttaatgggttta

SEQ ID NO: 38272 - DNA, 100 bp, Homo sapiens
gccgggcctgaggttgaactggggtgaaccggttcagcctggagaaggaaataaagctgctttcaatgacatgagagccttgtctggaggtgaacgttct

SEQ ID NO: 38273 - DNA, 100 bp, Homo sapiens
gcgtctggctgctgcggaccccgccgagtcctagcgcctggcctgcgcgccgctgcccgcgccacagagttggccaccctgttcaagggcttaggagaaa

SEQ ID NO: 38274 - DNA, 75 bp, Homo sapiens
tggaggaggcctcagagaagaacgataccatttcttagaggagcgcttagccagaatctcgctctgtcacccagg

SEQ ID NO: 38275 - DNA, 82 bp, Homo sapiens
gcgggaactcgactcttggcgccaccgcctcatgcactgtgtagctttggcagcatgtaagcagctgtttgccaagaaccca

SEQ ID NO: 38276 - DNA, 83 bp, Homo sapiens
agaacagctcgagagagcattacaagccagcctctgggaccgaggcaatgctggacgtggctgcaaaccagggctggctggtg

SEQ ID NO: 38277 - DNA, 100 bp, Homo sapiens
taaacaaccagctcctgagcctcccaaaccttacaggggcaagattcttgccaagagaattaatgtgcgtattgagcacattaagcactctaagagccga

SEQ ID NO: 38278 - DNA, 75 bp, Homo sapiens
gacggtttcgccggcagtctcgatggcagaaacggtggacacaagcgaaatggtcaacggcgctacagaacaaag

SEQ ID NO: 38279 - DNA, 100 bp, Homo sapiens
gcatacagcatcatctgaggacggctcaggagcatgacaagcgagaccctgtggtggcttattactagtaaccagagagcacagagaaatgctggtgaaa

SEQ ID NO: 38280 - DNA, 50 bp, Homo sapiens
ctgatattttgggggaagaaaaaggtgcacagacaagatttacatttgag

SEQ ID NO: 38281 - DNA, 100 bp, Homo sapiens
tgaagttaaaagagcagcactccaaggttggatggcaagcatgtggtgtttggcaaagtgaaagaaggcatgaatattgtggaggccatggagcgctttg

SEQ ID NO: 38282 - DNA, 90 bp, Homo sapiens
gaaataaggacaaaagccaagaggaggacagttcgctacacagcaatgcatcgagcactgccagtgaaagatgtagaagataaacctgaa

SEQ ID NO: 38283 - DNA, 98 bp, Homo sapiens
tcctgcactgaaaggaaatgacggattttacgcaaatccagatctccttcccctagaagacgatcttcccctgtcaggagagagagaaagcgcagtca

SEQ ID NO: 38284 - DNA, 75 bp, Homo sapiens
gtattctttacctgcttcccaatcccactgatgaggatcagcccatggtctgccatcatggatgttctcgcagaa

SEQ ID NO: 38285 - DNA, 82 bp, Homo sapiens
gaagtcgcgtgtctaggtgagtcgcggtgggtcctcgcttgcagttcagcgaccacgccagagactgctgctactttgaaac

SEQ ID NO: 38286 - DNA, 73 bp, Homo sapiens
tgtacaccctcgtcagcggctccctgcccttcgacgggcacaacctcaaggtgtcacctggggcccagtgaca

SEQ ID NO: 38287 - DNA, 50 bp, Homo sapiens
cttcatgcttgacaatctcgcagatgctgcagttggagaagaaacttgaa

SEQ ID NO: 38288 - DNA, 98 bp, Homo sapiens
ctatttctctagctattgccttattttttctcatggatgttcttcttcgagtatttgtagaaggactcagattgatggacaacttttcttaattaagc

SEQ ID NO: 38289 - DNA, 51 bp, Homo sapiens
aggaatgtgtgaccatttccaacggtatgagacatctttgttggatttggt

SEQ ID NO: 38290 - DNA, 100 bp, Homo sapiens
gatcctattgtttctataggattttattgcacaaaggcaacggtgactttcaaagttctaatagaagactgtatcccggtactgaagaggtacgccaaag

SEQ ID NO: 38291 - DNA, 100 bp, Homo sapiens
atgttcaggccatggaagaaatgatgatggaaatgaagtataataccaagaaagccccacttggtggctatggaggcttttacaacagtgatggatatgg

SEQ ID NO: 38292 - DNA, 75 bp, Homo sapiens
gccgggcggaggggacagcgcccgccggaccctgcagcccagactcaaggtgtccgcaatgttgccagtgtctgt

SEQ ID NO: 38293 - DNA, 116 bp, Homo sapiens
gagtcgctggatagactgcacaaggtgaagactgtctgcagcaaggctgatcccaaagaactaatcaagatggtcaccaggcatgtgactcgacatgagcacgaagcctggcctga

SEQ ID NO: 38294 - DNA, 60 bp, Homo sapiens
gcccagcctctcgaatgggcacacctgtgtagggtttgtggatgcacttagatgtttgca

SEQ ID NO: 38295 - DNA, 75 bp, Homo sapiens
gggagataaattcaacccagtggtataagccattgcgacgcagggtgatttggctcatcggtcagtggatttctg

SEQ ID NO: 38296 - DNA, 90 bp, Homo sapiens
aaaaaatattgcagtgtcctaaatgtgataaaacatttgaccgaatagctccgacagttagttaatatgtgcatcaacccagatccagag

SEQ ID NO: 38297 - DNA, 116 bp, Homo sapiens
cagcagccaataggacatgatccaggaagagcagtaagggactgagctgctgatacgacgacatattccacagagcgatccgagcacttcaaaccctgccgagacaaggaccttgc

SEQ ID NO: 38298 - DNA, 98 bp, Homo sapiens
ggcattcgtaccagttattaaactctgttttgatgggatagaggcagaagaattgtttttatgggttccacgaaaattgctaatgactgttgaatctg

SEQ ID NO: 38299 - DNA, 98 bp, Homo sapiens
caacctggctgtcctgaagctataccccatcagcctgagtctcttaaaggcctttatacacatatgtctacacatagggatttggatgatctcgggat

SEQ ID NO: 38300 - DNA, 83 bp, Homo sapiens
aggagaacaaacagatcatccgcaaacacgcgcagaccttcgttgccctctgtgccacaggcaccgtctgcgtcctgctgtcc

SEQ ID NO: 38301 - DNA, 83 bp, Homo sapiens
cgcctccctcccgcgcgtgctgcgggtctgctcgggggtctacttcgagggagcgcctggaccatgctgctgagcgcctactg

SEQ ID NO: 38302 - DNA, 75 bp, Homo sapiens
aaacaattgacattcacgttaaagaggactggtcgaattgacaaatcttaccctacagtatgtggccacacagga

SEQ ID NO: 38303 - DNA, 88 bp, Homo sapiens
gacatttcctgctcggaaccttgtttactaattgcactacctggcagcaccatctaaacctgtatcatctgctgtggtcccagttact

SEQ ID NO: 38304 - DNA, 96 bp, Homo sapiens
ccgggggagcggggccttccacaccccctccgtgggtgtgtgtgtactaatggtcacttgatgtgcgctggctgttttatccacctactagcagat

SEQ ID NO: 38305 - DNA, 75 bp, Homo sapiens
tacttggcttggagactggcgcggcgttcgtgtccgaggtatcggtgttcctattatgttagcttatgtctatgg

SEQ ID NO: 38306 - DNA, 80 bp, Homo sapiens
cgcaccgccgcccgcgccctcaccagggcgtgatggtgggcatgggtcagaaggattcctatgtgggcgacgaggcccag

SEQ ID NO: 38307 - DNA, 51 bp, Homo sapiens
gaagatcaagactagtgtgagcaacaaagtattatacctgaagaaccttag

SEQ ID NO: 38308 - DNA, 98 bp, Homo sapiens
aggaacgcctcggccgtcgtcctctacaatgaggagcgctacgggaacatcaccttgcccatgtctcacgcggtcacagttgcagattatatttctag

SEQ ID NO: 38309 - DNA, 112 bp, Homo sapiens
gcctcgggtctcgggggccgctctgggatcccggccaccagcaattgtccgggcaacaggtttgtctatgctggctctaactcgggcgtggtccaggccccgctggccttct

SEQ ID NO: 38310 - DNA, 90 bp, Homo sapiens
gctagctgctaaaaccacctttgtcaccagaatgaatgaagtgcttcagatttaaatagtggcacaagatctctgtaaagtagcaggcat

SEQ ID NO: 38311 - DNA, 74 bp, Homo sapiens
tgtcactcctggtgaccagcattcaaggtgttgtgtaacggaccaggaacatgtgttcctatctgtgtatctgc

SEQ ID NO: 38312 - DNA, 75 bp, Homo sapiens
aacagataaagtccatagatgcaggacctggggaaagctctggcaatttaaatgacccaaataaggaggcactgg

SEQ ID NO: 38313 - DNA, 101 bp, Homo sapiens
tggcgggtgaaattacagagaccggggaactctactcttcctacggtaaaggcagcagtaatgctaacgctagcaagtaaactgaagcgtgacgatggtct

SEQ ID NO: 38314 - DNA, 90 bp, Homo sapiens
attaagtcgatttgaacctcctcagtcagattctgatggtcagcgtcgttctagtttttctattgggaaagctactgatcggatggatgc

SEQ ID NO: 38315 - DNA, 116 bp, Homo sapiens
tggggccgggttgtcgcccttttctactttgccagcaaactggtgctcaagaaccttctgaggaaaggaggccatacagaaattgaacctcagcacttctgtcaagctttccacag

SEQ ID NO: 38316 - DNA, 75 bp, Homo sapiens
cgcggaccgagcctgacggagccggaggctgggagccgcggcggcctgggatgacaagagcacctcaaaggcagc

SEQ ID NO: 38317 - DNA, 87 bp, Homo sapiens
tcaagggacgtaccaggaggatggtgcccaggaacaggaaatatagtggtcattatgattagctatccaaaaggaagagaaattttg

SEQ ID NO: 38318 - DNA, 82 bp, Homo sapiens
ggcaactcagaaacatcaggtccaagatttggtcgtattgggcgcctggtcaccagggctgcttttaactctggtaaagtgg

SEQ ID NO: 38319 - DNA, 78 bp, Homo sapiens
acagactgagcgcgtccaggcctgacagctctgcggctcgggccctgaggttggagaaacgtacggtaaggatataac

SEQ ID NO: 38320 - DNA, 74 bp, Homo sapiens
ccttggcttccttcggcgaacagagctcactgatgccagtggaggggtcaccagtcgttggcacaccaagaagc

SEQ ID NO: 38321 - DNA, 98 bp, Homo sapiens
cagttatcataaccttgaatggcgactagatgtacaggtattgccatcagagagtcagcaaaggtagttgaccaagctcaaaggagagtgttgagggg

SEQ ID NO: 38322 - DNA, 82 bp, Homo sapiens
ccagccccagctgacaaactgactcccaaggggccgggccaggctattgagggcacctacattgacaagaaatgccccttca

SEQ ID NO: 38323 - DNA, 100 bp, Homo sapiens
ctgaacagtgaaggatctcactcagaatcctgtccacaatctgtccagtttacaccttaccccaaagaggcaatttgaatcaacccatagaagtgacagc

SEQ ID NO: 38324 - DNA, 97 bp, Homo sapiens
aaaaattaaccagcttccagaagcagaaagacttaattcagtgcacaaatgagatgaatgtgaacatcccacagttggcagacagtttatttgaaag

SEQ ID NO: 38325 - DNA, 75 bp, Homo sapiens
atggctttacaagaaaaccacctaaatatgaaagattcatcaggccaatggtcattgctagaatcgtggatggaa

SEQ ID NO: 38326 - DNA, 75 bp, Homo sapiens
aatggagaagttgatgactctcgtgaacatagctttaatagggaattagaaggtgacgaggagggagaagacgag

SEQ ID NO: 38327 - DNA, 51 bp, Homo sapiens
cgccgccgcgcacaaccgcacgtgcagttacttatatcaaattgcacatct

SEQ ID NO: 38328 - DNA, 98 bp, Homo sapiens
cgcactttataccacctgcgattactgttcagccgtctgtatatctccccagatacctgaaactgaccacctgagtacgttttcccattgctgagctg

SEQ ID NO: 38329 - DNA, 75 bp, Homo sapiens
cacgcataatggatgaaaggaaccgacaggcgagagctgttttggcaaaagttggctatccagagtttataatga

SEQ ID NO: 38330 - DNA, 83 bp, Homo sapiens
tcgttggagcttgaacccattgtcacccctccggtgagaagccctaccactgcaactgggacggctgcggctggaagtttgcg

SEQ ID NO: 38331 - DNA, 86 bp, Homo sapiens
caagtctcatctgcattaaagctctccattgaaccctctcacaaaactgataccccaatgtccttctttgactttgtggttgatcc

SEQ ID NO: 38332 - DNA, 100 bp, Homo sapiens
aaaaaactttaaggctaaaaacaaagcaaaaccagttaccactaatcttaagaaggcaaccacacctccaaatcaaggaaggccagattctcctgtctat

SEQ ID NO: 38333 - DNA, 100 bp, Homo sapiens
attgaggacatgctggagtgggcaggacatagctgtgatttctgccaagctaacaggtatgcagaacagcttaatgatgcttgttgatacaccagactac

SEQ ID NO: 38334 - DNA, 74 bp, Homo sapiens
ctggagcttgacgcgctggagcttgagaggatcaccattaacaaggacaccaaggtacccaatgcctgtttatt

SEQ ID NO: 38335 - DNA, 75 bp, Homo sapiens
gacagagctcagggaatacttcaagaagttcggagtgatgaggagcgggaaggcctcctgcaccctggagaccgt

SEQ ID NO: 38336 - DNA, 100 bp, Homo sapiens
ctgtccttcatggacacccatggctacagcacccgggactatatcatcatgtacatagaaaaatccaaaggattctgcaaaaaagctactagaaccactg

SEQ ID NO: 38337 - DNA, 100 bp, Homo sapiens
ctgtggaaaaatcaccgcccatggccagcccttggaagaggctacaacacaggtggtctgtttttctggggggccaccaacacctcccgtgaatctacca

SEQ ID NO: 38338 - DNA, 75 bp, Homo sapiens
gttctgtagagaaactcgggcaacctttggcacaccctctggaagcgggtccaaggtgctgtcacccctctgctg

SEQ ID NO: 38339 - DNA, 75 bp, Homo sapiens
ttggacttcatagcctctagaactgttatcaatactctggctgaccatcatcatcgtgggactgactttggtgga

SEQ ID NO: 38340 - DNA, 75 bp, Homo sapiens
gtcagtagcctctcactgaatgagcctgaagacaaggatgtgactggtgaagaaggtgaatacagtgaagaggaa

SEQ ID NO: 38341 - DNA, 82 bp, Homo sapiens
aaggaacgaggcaaggagctaaagcagcgtgcgttcagccctgggatcaggatcctcatgaccagccaaagagaagaagaat

SEQ ID NO: 38342 - DNA, 98 bp, Homo sapiens
tgaaggccgcgcaggagctgcaggagggccagcgctgcgtggtcattctgcccgactcagtgcggaactacatgtacgccatgaagtgcctggacaaa

SEQ ID NO: 38343 - DNA, 100 bp, Homo sapiens
gccctcaccacccctatccagacggctgcccttcaagtaccagtccagtgcacgtgccaacattacactgtcagggaagaagcgcagaaaactcctccag

SEQ ID NO: 38344 - DNA, 95 bp, Homo sapiens
gaacaacaacttgcagctcatctctattgatggatgaatttcatcctttcatcgaagcacttctgccccacgtccgagcctttgcctacacatgg

SEQ ID NO: 38345 - DNA, 75 bp, Homo sapiens
gttgaggacttcaacagggccctcagatggagcagcgtggagaattatatccagatcgagagacagaagattctg

SEQ ID NO: 38346 - DNA, 83 bp, Homo sapiens
ttcctttctctctgcagagggattcagcactttgggcaagtggaaattgagaggctgactgagcgactagaagaaaaagagag

SEQ ID NO: 38347 - DNA, 90 bp, Homo sapiens
cggagcttgacccgtccatcgctgtgattggtgctgaagacatggacggcttccaggcagacacggaggaggaggaagaggaggagggcg

SEQ ID NO: 38348 - DNA, 100 bp, Homo sapiens
acgagcgtaaggtccagctggtcaccgacagggatcacttcatccgaaccctcagcctcaagccgctgctcttcgggatgttcaatagcccagaaatgca

SEQ ID NO: 38349 - DNA, 51 bp, Homo sapiens
agccagaatggggaggaggagcctgaggaaggtaaatactacagtgaggag

SEQ ID NO: 38350 - DNA, 75 bp, Homo sapiens
gctttgaatatggcaagagggttaaaggccataggaaaaggatacagagtagagtttcatgaacctgaaacttgg

SEQ ID NO: 38351 - DNA, 101 bp, Homo sapiens
ctcggagccagaggagaggcgcccccgccggccgccgcgccgcccggcagcctcggcaggccatgtagggcaggaccgggtggactttggccagactgagc

SEQ ID NO: 38352 - DNA, 50 bp, Homo sapiens
taaacgaggtggtcaaggaatgtcagaaagcttgttactgtggagaagca

SEQ ID NO: 38353 - DNA, 90 bp, Homo sapiens
ttccaaaaggtcaaggttcacaagttccacttacttacatgatcatttcgagagatgtaatgttgattgctgctgttttttatgtcagat

SEQ ID NO: 38354 - DNA, 75 bp, Homo sapiens
gacatgagatggtagccaacccctcagaaattattcctttgcaggtggtgcaaaggatcagcacgggagttttga

SEQ ID NO: 38355 - DNA, 50 bp, Homo sapiens
gtgatcaagtacatggggccggcagtgttctaagaacggaagcatctggg

SEQ ID NO: 38356 - DNA, 74 bp, Homo sapiens
tgccccagctccgtctcggcggcggcggacttcgacccccaccacttctggcagtggagcagcttctcggacta

SEQ ID NO: 38357 - DNA, 75 bp, Homo sapiens
cgaccgtccgccagtcgtcccgagttatggctgcagcttcgattgccaatattgtaaaaagttctcttggtccag

SEQ ID NO: 38358 - DNA, 99 bp, Homo sapiens
accaagcgagtgacacgagagctcaaggacagcaacagggagctgccaccaccgtgtactgtgctgctgtcccagaactggagggtctgggagggatgt

SEQ ID NO: 38359 - DNA, 75 bp, Homo sapiens
ggcgacccgtactgggcctactctggtttttagaacttcagccataaaaatgggcagaattttccttgatcatat

SEQ ID NO: 38360 - DNA, 83 bp, Homo sapiens
cccggagctgcccgcaccgcgtacaggcttttacctgatatccccatcagaatttgaacgcttctccctaagtgcccggaaca

SEQ ID NO: 38361 - DNA, 90 bp, Homo sapiens
agagaccagacccctgatgagaacgaccaggtcatcgtgaaaatcatcggacatttctatgccagtcagctcgagatttctgtggctcct

SEQ ID NO: 38362 - DNA, 83 bp, Homo sapiens
tgggaggtcggcggccccaaaatgcaagtggtgacccaggatgaaagagagcagctgtacacacctgcttccttaaaatgctc

SEQ ID NO: 38363 - DNA, 96 bp, Homo sapiens
cagaaggaggtcctgccgtccatgcggaagatcgtcgccacctggatgctggaggtgtggacactgccagcggctgcagccgacttggaatgacct

SEQ ID NO: 38364 - DNA, 99 bp, Homo sapiens
tgcagccatttatattgcttaggctactgatttacactgactgggccaaccactacctagcaaaatcaggccacaagcggctgatcaaggacttgcaac

SEQ ID NO: 38365 - DNA, 147 bp, Homo sapiens
atccagaaggctgagcaggtctaaaaatgaaccaagaaaaacaaacgtcacacatgaagaacacacagcggtggaaaagcacgtgtggagtgagagcgaggactgcctgcctttcttgcagctagcacaggattacatctcctcctg

SEQ ID NO: 38366 - DNA, 100 bp, Homo sapiens
gcttcagcagaagaaacacttcctataaatctcgcccaaacaggaaagatgactccggaattgatgataaaagcctgtagcttttatactggacatttag

SEQ ID NO: 38367 - DNA, 75 bp, Homo sapiens
gacagggcgacctggaagtccaactacttccttaagatcatctggtggacttgctttgtgaagagacagttcatg

SEQ ID NO: 38368 - DNA, 90 bp, Homo sapiens
gaaaaagtggtgctgatgtatgatgagatcttcatggagccgcaaagacagcctggaaagtgacagctccacggccatcattccccatga

SEQ ID NO: 38369 - DNA, 74 bp, Homo sapiens
aaaagaggagtccatgatggaggcagaggtaaacttggagaggtcatacagcagatggaacaaaaaaaattaca

SEQ ID NO: 38370 - DNA, 98 bp, Homo sapiens
cgcgacctgcgcaaagccagcgtgaccatcggggtgatggtgggaatgggacaaaaagacagctacgtgggtgacgaagcacagagcaaaagaggaat

SEQ ID NO: 38371 - DNA, 90 bp, Homo sapiens
acctcattgctctttggcgactcttattgtgcacttacatttcaatcgaccaagttccaaggacctatgccataatgataagcagacccg

SEQ ID NO: 38372 - DNA, 85 bp, Homo sapiens
atcttccggcctccccgggcctcccattgcagcatctgtgacaactgtgtggcttattcagctgattctgaatcatcttacacta

SEQ ID NO: 38373 - DNA, 74 bp, Homo sapiens
agaggagaggcacccgatatatgttctctaggccttttagaaaacatggtcagaaagcaacattgaatgcagaa

SEQ ID NO: 38374 - DNA, 100 bp, Homo sapiens
aaaatggcagtaaccctgagacaaccacttctggtggttgccactcacctgaggatgcatttgttgctatcggggactacaatggccacgtcggtctggg

SEQ ID NO: 38375 - DNA, 76 bp, Homo sapiens
agaagtagaaacagtagaccttgtcttgaagctgaaaaataagctgatacgtaggtaacctttccagagatgtgac

SEQ ID NO: 38376 - DNA, 73 bp, Homo sapiens
atcgacctgcagttcagctacgcgccacggcactcgcgccggaacgaggccaaggccacctttgatgccattt

SEQ ID NO: 38377 - DNA, 98 bp, Homo sapiens
tggttggtggtaccctaaaattagggcatgattaagtggtagagctttgtgttcagtatggacagaatgaggagggaatggtaggcgagcttatagcc

SEQ ID NO: 38378 - DNA, 100 bp, Homo sapiens
gagaatgcagtgcgcatggacgaggctcgggataacgcctgcaacgacatggtgcagctcaacaaggacacagtgtgcaaaccttgccttgcaggctact

SEQ ID NO: 38379 - DNA, 75 bp, Homo sapiens
cacggatgaggcccggcggtcgcgcctcaaccggctgtacggaatccaaggtgctggagaatctggtaaaagcac

SEQ ID NO: 38380 - DNA, 100 bp, Homo sapiens
gattgtgaggcctccccagccatgtggaactgagtgtccatcaggacagcttcacctccttgaggattaaagcctaacagtactgagctatttgtctgtc

SEQ ID NO: 38381 - DNA, 100 bp, Homo sapiens
ttagagacatactaatgtacatggggtgggaaccgccaaacctctcccttctttttgacttcacccttggataccatcaaggccagaggatggaaccaag

SEQ ID NO: 38382 - DNA, 75 bp, Homo sapiens
aggcagaaaaagctgcagatgagagtgagaggtactaccgtggtgcagtgggcgccctgctggtgtacgacatcg

SEQ ID NO: 38383 - DNA, 75 bp, Homo sapiens
gtcccacttcagtcaaagacagtagattatgagttggtgacaaagttcctgctgatataaggttaacttccatca

SEQ ID NO: 38384 - DNA, 75 bp, Homo sapiens
aaactacccattttcttttttggaactcatgagacgcatttattaatacagcaaaagaaatttatgaaaaaattc

SEQ ID NO: 38385 - DNA, 100 bp, Homo sapiens
aggaatgtgagctggagacaatgacaggggagaaagtcaagccggagcagacagtcctcattgacaactgtcggcagcagtgcacgtgccatgtgggtaa

SEQ ID NO: 38386 - DNA, 100 bp, Homo sapiens
aagagttggatgaccagaaaattcaggtgactcctccagaaaaaaactgctggctgttttacaggagattcttattttacccacaatcccaatatccctg

SEQ ID NO: 38387 - DNA, 82 bp, Homo sapiens
cctccaggaagagcggctctcggctgtttgcatcgccgatagagatgagtaacgaaagaggctttgaaaatgtagaactggg

SEQ ID NO: 38388 - DNA, 50 bp, Homo sapiens
ctaagatggcgactgtcgaaccgtgagaaggcaaccaaagtgcaggacat

SEQ ID NO: 38389 - DNA, 100 bp, Homo sapiens
ctgggaagtgcaggcaaagccggctgttaccctgcacagccgtcaccctcaactttcccttcagatgccccttggtgtggccactgcaaggctctggccc

SEQ ID NO: 38390 - DNA, 100 bp, Homo sapiens
cagcatgggagagtacatgagacgatgaagcaaaggttaattatagaaaatgccaagtaggaaatttgccgatggtgaagtggtaagaggtcgatggcct

SEQ ID NO: 38391 - DNA, 75 bp, Homo sapiens
tggagatctgcttgaatgtgctgatgacagggttaacatgtttgttgaaggattccacgatgccatcctcctcta

SEQ ID NO: 38392 - DNA, 50 bp, Homo sapiens
ggcaaagtgatcaatttcctaaaagtattccagtaccagtacccggagag

SEQ ID NO: 38393 - DNA, 75 bp, Homo sapiens
cgcctctatagcctgcagtcggacccagcaacctactgtaatgaaccagatgatattgatgatgttaagaagttc

SEQ ID NO: 38394 - DNA, 75 bp, Homo sapiens
tatgtctttgcattattgcctcactaccacatatgatcttcagaagaaaacctgatggaacaagaggctgagagg

SEQ ID NO: 38395 - DNA, 95 bp, Homo sapiens
gccactgttcaaaatgaagaggaagcccagaaagggaaaaactaccagaacggagatgtgtttggcggtcctaggcctacttacaagcctccagt

SEQ ID NO: 38396 - DNA, 80 bp, Homo sapiens
gccaaagaaagaagtaaactgaagttgcaaagcaacagtaataatttaggcctattaaaggaaggcaggaagaactaaag

SEQ ID NO: 38397 - DNA, 75 bp, Homo sapiens
ctttcaactctacttcaacccgcaccttgtgttccggaagttccaggttacgggcaggacttgagtggcttcgga

SEQ ID NO: 38398 - DNA, 100 bp, Homo sapiens
cgagaagcctgaaaagtcgcagcgagctggagccgccggaggtgggattcaaagaagcacacaggctacgtcggcttaaagaatcagggagcgacttgtt

SEQ ID NO: 38399 - DNA, 104 bp, Homo sapiens
gagccggaccgggaccaggaccgggccccactttccagttcttcacacacccccattcggcgtagtacccagagagctcaagatgtgtggcagttttcggatgg

SEQ ID NO: 38400 - DNA, 83 bp, Homo sapiens
gttgtgtgtggcagcaaggagcccgcagaggtaacctggatgaggacatcattgcagaagagaacatcgtttcccgaagtgag

SEQ ID NO: 38401 - DNA, 96 bp, Homo sapiens
agcatcgaaagcgttggagaggtgttaccggaacggcggcgacaagggtgttcccgaactagagtggatttgatgagcctgtcccagacctctgca

SEQ ID NO: 38402 - DNA, 75 bp, Homo sapiens
ctcacccgaacatcagggccctccagactcaggcgccccaacacttcctgtccacttccaacgaagcggtctata

SEQ ID NO: 38403 - DNA, 100 bp, Homo sapiens
agatgctaatttgggaaaaagctccaggattctgacagggatgttgcgaagaaatgcactcggtgatggaaagagagccactattctgaagaacacttgg

SEQ ID NO: 38404 - DNA, 95 bp, Homo sapiens
cgaaaatgacccaaattactaaggcagccatcaaagctattaaggagacagatcagttggaggaagaaaaagcagagctggagtcggagatcgcc

SEQ ID NO: 38405 - DNA, 100 bp, Homo sapiens
gtgaccgagagcgtgaccgagagcgcgaatatcgtcatcgttagaaggttgatgatgcaatgatggcaaatgcagcccagaaatttcccttcaatactcc

SEQ ID NO: 38406 - DNA, 100 bp, Homo sapiens
gaaagaaggggttcctggtcatacaccagtactaccaaggacagcttttttcctgcaagccttacgacagtctgcctacctcacagacctgcttcttcca

SEQ ID NO: 38407 - DNA, 51 bp, Homo sapiens
aagtattctgatgtttcaggtctgcttgagtacaagcgcaagctagccaga

SEQ ID NO: 38408 - DNA, 90 bp, Homo sapiens
caagaaaccaacattcccaacagccaccaccaccaccagatggtgagaagccctaccactgcaactgggacggctgcggctggaagtttg

SEQ ID NO: 38409 - DNA, 50 bp, Homo sapiens
gtgaccgagaccgcggccgggaccgagggaagcggggagaggtggtgaga

SEQ ID NO: 38410 - DNA, 75 bp, Homo sapiens
caggagctctgctctcccctccaggaaacctaacgaagcatatgaaatctaaagcacacatgaaaaaatgcctgg

SEQ ID NO: 38411 - DNA, 108 bp, Homo sapiens
ttgggatttgagattgacgcggtgaactctgtccagttttcaaaccacacaggaacccaagacagaccaggatgaggagcattgccggaaagtcaacgagtatctgaa

SEQ ID NO: 38412 - DNA, 100 bp, Homo sapiens
atgacgaagatgatgaggatgacgatgacgatgaggaagatgagagggagactggtggctggcccactcgctcagcacaggacagacaggctacatcccc

SEQ ID NO: 38413 - DNA, 89 bp, Homo sapiens
gagagcactggatgatgtgagaaacaggcagcaggatgtgcggaatcatctcccctgccccacaaacatgaaagaaaagacaagagaag

SEQ ID NO: 38414 - DNA, 101 bp, Homo sapiens
acgctgcctggaaaggaagtaccaggacttgcacaggaggctgaaagggaaacatcagccgcccggggggagttaaaatgagtgacaacactactctgcct

SEQ ID NO: 38415 - DNA, 82 bp, Homo sapiens
gatgaacccaacctagtgggtgtaatacatcatgaactgcagggatattagaaatggctactccccagtcaattttcatctt

SEQ ID NO: 38416 - DNA, 100 bp, Homo sapiens
gaagtggttgagaagcctgtacctgttttatacttgcttttgcttcagcgttctgtggttgtcaacagctgagtcagtgctgattctctcaaatagagct

SEQ ID NO: 38417 - DNA, 75 bp, Homo sapiens
gttcccccaaatgtctgactctgactctcggactgagaaacgcaagccctcccaggcccaatacttcaaagcatc

SEQ ID NO: 38418 - DNA, 89 bp, Homo sapiens
caagagaagacctcagatgtgaagtccattaaagggagtccatcttctgcatccagtacaacattcgctcattcatgaacgtcaagcac

SEQ ID NO: 38419 - DNA, 74 bp, Homo sapiens
gtcacgctgggtaatgaggatttgactgtgaaggttttgattcccaccatggccatcacccagtttcggttatt

SEQ ID NO: 38420 - DNA, 100 bp, Homo sapiens
attataggaacctggtctccctggaatgaactctggaagcccagccagggacaatgcaccttcacagagattctgcactaatctgagtgaaggtctaagg

SEQ ID NO: 38421 - DNA, 97 bp, Homo sapiens
accaccgtcagcactcagcgcgggccggtcaacattggcatcctcatcgctgtgaccagagtcatctcacagatcagcgccgacaactacaagatcc

SEQ ID NO: 38422 - DNA, 75 bp, Homo sapiens
gagaagtcagagagaggatgctggtttcttactaccgatacagcatcagaagagctaacaattgctggaatgacc

SEQ ID NO: 38423 - DNA, 102 bp, Homo sapiens
aggcccaacagcggaatcatcgatgcaggggcctcaattaatgtatctggaagaaactaagttccagtacttggatgtcaacttgctgacgacaaggcactt

SEQ ID NO: 38424 - DNA, 100 bp, Homo sapiens
ccgcagatacatccgacagctcatctctgccgtagagcacctgcaccgggccggggtggtccacagcatttttcagttgaaggacagttggaattcagag

SEQ ID NO: 38425 - DNA, 88 bp, Homo sapiens
tttttctgttttgcctgaatacatgatttaaacaagagatttccacagaagatagaagctttggagaaaatgaatgaagatcacgttc

SEQ ID NO: 38426 - DNA, 83 bp, Homo sapiens
caatggtctcaatctctggaaaaacttcttgccaaccaaaaacactctgctccagccaaggtggtgagggcagctgttcctaa

SEQ ID NO: 38427 - DNA, 82 bp, Homo sapiens
cagacttgcttacagaccatgaggagagattgggtctctccacattgccccggctgctctccaacccctgagttcaagtgat

SEQ ID NO: 38428 - DNA, 100 bp, Homo sapiens
gttagcagctagtgcagtaacacaagtagccaagcttgacaaaagtaagctgaagccaggaacaagagttgctttggatatgactacactaactatcatg

SEQ ID NO: 38429 - DNA, 50 bp, Homo sapiens
gaaagcacatgccttcacgggcaggataccgagtggcaatctgggtatgt

SEQ ID NO: 38430 - DNA, 75 bp, Homo sapiens
tgatgctggaaaatctcaggaatctggtctcattggttaaacacagtgggaatatcacttttgatgagattgtca

SEQ ID NO: 38431 - DNA, 58 bp, Homo sapiens
aaaattttctggtggacattttcaaggaccacaagaacctgttggcccagttggtttc

SEQ ID NO: 38432 - DNA, 51 bp, Homo sapiens
caatttctgactggaatctaagatttcctgagaagataacagtgaaacagc

SEQ ID NO: 38433 - DNA, 83 bp, Homo sapiens
ctctgatccgcaagcatgctcagaccttcattgctctgtgtgccaccggtggacaacgcgtactggctgtggactttccaggg

SEQ ID NO: 38434 - DNA, 87 bp, Homo sapiens
aaacgtcagttattaagggcattaagagccaactggtagagcaatttccaggagaggagttcattacttcggaagtggtacaattta

SEQ ID NO: 38435 - DNA, 100 bp, Homo sapiens
gaggaggtccggagactgcagcaggtaccagcctccgaacctcgccatctctaccctctactggaaggcctggcccctcctgctggtcgtcgccgcattc

SEQ ID NO: 38436 - DNA, 100 bp, Homo sapiens
cccgccctcgccctgctcccagtctagtgggggagaaagacagttatgagacagcgtgggaaagaagtggacaagactctgctctcttcatggaaccgag

SEQ ID NO: 38437 - DNA, 75 bp, Homo sapiens
ccggcacctgcacacctggatccaggataacggaggctgggggcagtgatcggtgatggacagtctgctgtggcc

SEQ ID NO: 38438 - DNA, 90 bp, Homo sapiens
atgagattggcctggatgcagctgcccttcctggacaggcttcttctcatatcggtaattccactcaggccactgtgagggatgcagttg

SEQ ID NO: 38439 - DNA, 100 bp, Homo sapiens
aggcccttgttggggcacaaggtggcaggaacctggagaccatcatctcatttcctgggggagagagcctgcatggttttatactggtgactgctttggt

SEQ ID NO: 38440 - DNA, 100 bp, Homo sapiens
ctctgttggctgtgacatctattccatctgtgagtgactctttgacatggagagaatttcactatattcagaatggtgtgctcttgcttgcacagctttt

SEQ ID NO: 38441 - DNA, 75 bp, Homo sapiens
cagcagcacagcgacaagacggacaaggaagatggggagccaaagaccaagcatctcagagaagaggaggaagaa

SEQ ID NO: 38442 - DNA, 75 bp, Homo sapiens
tttagggtcctttatatagaagggagagtaggtcagcagcacagtggccatggaaaaagaaaaactctacagcat

SEQ ID NO: 38443 - DNA, 75 bp, Homo sapiens
cttgcctcctacctttcatccggaagaaatagtttctaatggtgatgaacaattggaaaaagccatggaagagat

SEQ ID NO: 38444 - DNA, 101 bp, Homo sapiens
ttgaatgtcaccatcacacgagccaagtacagcctcttcatcctcggacatttgaggaccctgatggttcaaggagtagttccagttccagagaggccacc

SEQ ID NO: 38445 - DNA, 100 bp, Homo sapiens
cgaaaatcaaattcaggagttcaagaaacgagatgcacaggaaaccgaatgcggtgctacaactgtggtggaagccccagcagttcttgcaaagaggccg

SEQ ID NO: 38446 - DNA, 100 bp, Homo sapiens
aggacttccctttggatgtagcaaggaagaaattgttcagttcttctcaggcgtggtgaccaagatgaagatgcagaggaccattgtcatccgccgagac

SEQ ID NO: 38447 - DNA, 102 bp, Homo sapiens
gccagctggagctgaaagagctcaaggcctcccaccccattccggaggacaaaggaaagtgtgctaataagagtcttgctctgtcgccaggctggagtgcag

SEQ ID NO: 38448 - DNA, 83 bp, Homo sapiens
cttggggccagcacccaggttgtcccaccagcaggtggcctgacggagcaagagctgatggaacagctggaacactgtgagct

SEQ ID NO: 38449 - DNA, 83 bp, Homo sapiens
gcggcgtgtgcgcgcccgccagctgctccggagatacgaacaccttccaccatgaccacctcagcaagttcccacttaaataa

SEQ ID NO: 38450 - DNA, 100 bp, Homo sapiens
ttcacaaatgaccagtgactatgggcacctggctttccagggccagatggcagcagccacggcggaaccagaggaggtgcccctgggcgctgggattgct

SEQ ID NO: 38451 - DNA, 100 bp, Homo sapiens
ctgacagcggagcattttgcagcactccagagcctgctcaaggaaatgggtcctgatgaatatgaagagatggaagaagaggaggaggaggaagaggagg

SEQ ID NO: 38452 - DNA, 100 bp, Homo sapiens
ccagcccccagaaaggattgtgacatatcgttggacccagaattgagctgcagacattcaatactgcctcaccttgtcaagatgtcaaacagctgactag

SEQ ID NO: 38453 - DNA, 83 bp, Homo sapiens
ctgggagggagccgcgcgcctttgtgcgcgcgccgaggtggaatgaatcttacttgttgaatatcttctggttactagttgga

SEQ ID NO: 38454 - DNA, 100 bp, Homo sapiens
gctttcgcccgcggctcctgagggatcggtctcagccgcgcggatatgttgatgatgtgatcagccgcattgacaggatgtttcctgaaatgtccatcca

SEQ ID NO: 38455 - DNA, 83 bp, Homo sapiens
gcggaggagggcaaggactacccctttgccaggttcaataaggcaggtacttcccggagcgagcggggaacgcgacgtacccc

SEQ ID NO: 38456 - DNA, 88 bp, Homo sapiens
gtgtcggaggtctcatctttgaactactgccggagcttctgccaggtgtaattgaaaagtgatcctctcttcagagatgtcaaaaaca

SEQ ID NO: 38457 - DNA, 100 bp, Homo sapiens
gcagcaacatggcaagacggtggtgggccaaatcactgtggacatggatatgtgccaggccctctcctgccacacagacccgctggaccaaagcagctgc

SEQ ID NO: 38458 - DNA, 96 bp, Homo sapiens
cctacagaagatgctgaagctgaggacacacccaggaaaagactcaggacggacaagcacagtcttcggaaggattttgtgaaaatggaaaattat

SEQ ID NO: 38459 - DNA, 96 bp, Homo sapiens
aattggaagacttttaccgcttctcctgggaagacgggaggtggggaagacagggctccagctaccacaggacgggctctgggtatagccgttcca

SEQ ID NO: 38460 - DNA, 100 bp, Homo sapiens
tgggagagagggggagaaaagcggagagaaaggccttgggaaaacaactgggaagaagttatgttataaaggttctacgttccatcgtgtggttaaaaac

SEQ ID NO: 38461 - DNA, 74 bp, Homo sapiens
tttcaggcatcctcatataattaaacttttgaaaatctgaacacagttgctgagtgtctgttttctctggtcaa

SEQ ID NO: 38462 - DNA, 101 bp, Homo sapiens
cgaaggtggagcaggtcctgagcctcgagccgcagcacgagctcaaattccgagatgccatggacaatattaccaggcagaaccaattctacgatacccaa

SEQ ID NO: 38463 - DNA, 100 bp, Homo sapiens
tagtgggtgtaatacatcatgaactgcaggcgttttaccaacgaggatcatttggctgtccataaacataaacatgagatgacactgaaatttggtccag

SEQ ID NO: 38464 - DNA, 98 bp, Homo sapiens
cccaagcccgccacgccgcccagcccggccccgcccgcgccggaagagccacgccggttgagactgagctaaagttaatctgttgtgacattctggat

SEQ ID NO: 38465 - DNA, 99 bp, Homo sapiens
ctgtggctcgctgccagcagtactcggggtgtatgaaccaggtctaaactgcagtaatccatttactcagctggagaggagacatcaagaacatgccag

SEQ ID NO: 38466 - DNA, 96 bp, Homo sapiens
aatgaactgtatccatccccatcatgatgtacagaaccaagtctcttcactaattttaggtgatgggcaagtcagaaagtcagatggatataactg

SEQ ID NO: 38467 - DNA, 87 bp, Homo sapiens
gaagaagtagttataaaagcaaacacaggattcaccacagtacttcacatcgtcgttcacatgggcttcccatcgacggtcagtgcg

SEQ ID NO: 38468 - DNA, 75 bp, Homo sapiens
gagaacagccctccatcttgcagcccagaaggctcccgtcttcgtcaggaagattttccacctcgcattgttgaa

SEQ ID NO: 38469 - DNA, 100 bp, Homo sapiens
catgtggaagaacgagcttgacaaatttattgtgttctggttccagtcaagcaaaattattcagcaccaactggtgacatggcttccagatatgcccgac

SEQ ID NO: 38470 - DNA, 101 bp, Homo sapiens
gcccgcgcacttccaggtgcacagcgcgggagccgtcacggtgctcaagcctcctgacaaggtgatccgggcgggccccgcaggaattttatcccctcacc

SEQ ID NO: 38471 - DNA, 75 bp, Homo sapiens
cccaggggagttctctgtgtctgtgaagctgaccggttccctgatgtgttacctgcttctgctactgatccaaac

SEQ ID NO: 38472 - DNA, 90 bp, Homo sapiens
tgagttctgacacggccttggatgtttctgtcctaaatagctgacattgcatcttcaagactgtcttggattagaagaacaagaaagact

SEQ ID NO: 38473 - DNA, 100 bp, Homo sapiens
gcagaaatcacattggaccctcctcccaactgtagcaattctgtggtgttcttggtcacacatttatggagtttctgaagggcagtggagattactgcca

SEQ ID NO: 38474 - DNA, 76 bp, Homo sapiens
attttcaggaaatggtgtcacaatttgtgaagaacatgggcctggaattgatatattcacacctggtaaacctgga

SEQ ID NO: 38475 - DNA, 100 bp, Homo sapiens
gcgtcccacctagaatctgctggctactacttgaagtgccttggaacactatgttaattgcctggatctggtaaacaagaggctaccttatggccttgct

SEQ ID NO: 38476 - DNA, 100 bp, Homo sapiens
gacttgaaagtgcctgccaaagccaagctcaccaaactgaagatgccttctcagtcagttgaggttgaagcactggacaatgccacatactttgtggatg

SEQ ID NO: 38477 - DNA, 82 bp, Homo sapiens
aacaggattccacagtgtcctctggaaaatggtgacttaagagattaaaattaatttggttgctgttggttctgaacaaata

SEQ ID NO: 38478 - DNA, 100 bp, Homo sapiens
cagagattcaggccagagttgtgggccgccgtcggcagcaagaacagagagagaggtggacagatctgagagatactgagctgcagaagcagaaccacag

SEQ ID NO: 38479 - DNA, 75 bp, Homo sapiens
aacatcagttggacactgatctgtttccccatttagacatcaactagtcaggcagtcttccgtctccagtctggc

SEQ ID NO: 38480 - DNA, 75 bp, Homo sapiens
cttcgagcaccccaacgtggtcagcacacgtcacatggagatgggcgtcaagaagttacctctcgtaccagccgc

SEQ ID NO: 38481 - DNA, 110 bp, Homo sapiens
tccattttaatcaagtgcgagttcctgccacaaatctaatactaggtctgtggctgtcctctctattggaaagcccccatgttcagggctgcagggggagagaagacagg

SEQ ID NO: 38482 - DNA, 80 bp, Homo sapiens
aaatcgtgcacatccaggctggtcagtgtggcaaccagatcggtgccaagatcagaccaaacattgtctggcttgcactg

SEQ ID NO: 38483 - DNA, 74 bp, Homo sapiens
ggggccctggatgagggggaagggcctcaaagccagaagtgatcctgccatgaagcagtttctgctgtacttgg

SEQ ID NO: 38484 - DNA, 82 bp, Homo sapiens
ctggagcctcaggcggcagcgcttctaggtcaaaatgcagatcttcgtgaaaacccttaccggcaagaccatcacccttgag

SEQ ID NO: 38485 - DNA, 98 bp, Homo sapiens
cagcaagcggaagctgcccttcaccgcgggcgccaatggggagcagaaggactcggacacagacaatgcagatcttcgtgaagactctgactggtaag

SEQ ID NO: 38486 - DNA, 82 bp, Homo sapiens
gaagagctgccgtcgctgcagagaccccgctatggctgatttttagactctgaggagcagttggagctaatccacattatgg

SEQ ID NO: 38487 - DNA, 98 bp, Homo sapiens
gatggaggacgttaactctaacgtgaacgcggaccaggaggctgttactgaggcggagacacgggtgatgattggctttctggggagagaggaagtcc

SEQ ID NO: 38488 - DNA, 75 bp, Homo sapiens
aagaaattactgtctcaagtgatacgctaaaagatggcggcaaggcagcccaggcaaatgtaagaataggcgatg

SEQ ID NO: 38489 - DNA, 100 bp, Homo sapiens
acaacgaacagctcttcaccatgaaatggatagatgaggaagcttcctgtgcttcccagaattccatcatctgactgccatcctagaaggcattctcatg

SEQ ID NO: 38490 - DNA, 101 bp, Homo sapiens
atggcggatgccctgcagtacctgcagaaggtctctggagacatcttcagcagactgctgagaaggaagaatttgaacatcaacagaaagagctggagaaa

SEQ ID NO: 38491 - DNA, 83 bp, Homo sapiens
acggggcaggctgagttcctcttgctcacagagctctgtaaagtgctgctcacggccgtgaactgctacagcgtgaaggccgc

SEQ ID NO: 38492 - DNA, 100 bp, Homo sapiens
cgtcgcccgaggtcccagcggctctaccagattgttgtggaggcctctcacccgcacagggatgtgtcttggtgagctagtcattaacccccaccagcag

SEQ ID NO: 38493 - DNA, 74 bp, Homo sapiens
aggtggataaggaacatctcttcccagcggctcaggttcctttgcccaaagactcaacaggtgcagcagatccc

SEQ ID NO: 38494 - DNA, 100 bp, Homo sapiens
ttcctgaaaatcatggtgaggacatgaggaaaatgtccttccagcgctgcgcccggacagacaaggatttttaaaaagtcgagatcgtgcctatgcaaaa

SEQ ID NO: 38495 - DNA, 74 bp, Homo sapiens
tggccggggcgcagttcggaggttcagctgagctgactgctgcccactttggaggaggcggtgggctccttcac

SEQ ID NO: 38496 - DNA, 100 bp, Homo sapiens
agcaggctctgtggttcaggactcccgacttgacacgatattttttgctaagcaggtgttggggatgtcctttgcactgaccctgaactgccagattgac

SEQ ID NO: 38497 - DNA, 75 bp, Homo sapiens
attccttttcgaccttcaatccagttccaaggactccacggggtggacaaggctcttcttggttcagtgaaggac

SEQ ID NO: 38498 - DNA, 82 bp, Homo sapiens
tgcacttaaaggaattctacctcactcccaactctcctgcagaaatgatgaaggatttgggggcagagcacttggcaggtca

SEQ ID NO: 38499 - DNA, 111 bp, Homo sapiens
cgagaccctcgctcccccatcaacgtggagagcttgctgcctgcctgctccaggctgagctggtaaactatgaacgagtcaaggaatattgcctcaaagtcttgaagaagg

SEQ ID NO: 38500 - DNA, 75 bp, Homo sapiens
cgcagtggtcgcttcttctccttggtgttcgtggtggagctcctgggtcggaggctgctgctgctgctgggcttc

SEQ ID NO: 38501 - DNA, 98 bp, Homo sapiens
caggtggacttcttgcaacaggttaacgtgtatggcgtgtgcgtgccagaggctgaggggatctggcggtggagcgctaggatcagacgcccccgcga

SEQ ID NO: 38502 - DNA, 95 bp, Homo sapiens
cgcgtcccccagtaggagaatgactccgattcgtgaccctcagcgccggtgcatgtcgatgtcatccatctccagccccacctgaccagctcaac

SEQ ID NO: 38503 - DNA, 100 bp, Homo sapiens
gaaggtaactggaaggagactgtgaatgaaactgggtttcagctgaagcactggcctgtgtttgtggaggtgaaagaccttttgacattggtgccgcccc

SEQ ID NO: 38504 - DNA, 114 bp, Homo sapiens
tggggcaggaatgcgtcctgagcagcagccccgcggtgctgggtggatgcccggagcataccagtgttagcaaaatggcaaaattcatatagcattaaagttgtacttcaagag

SEQ ID NO: 38505 - DNA, 75 bp, Homo sapiens
cggagccgccaaaaatatgctgaggaggagttggagcaggtgaccaagaatatggcccaggtgaccaaagccctg

SEQ ID NO: 38506 - DNA, 76 bp, Homo sapiens
cccggcccacagtgggggtgtgcaaacccgagagaactgggttaatgatgaaatggcaggtaattcacacttttgg

SEQ ID NO: 38507 - DNA, 93 bp, Homo sapiens
tttccatcgaacattccgagaatgcgagagaaagagcctccgtcaccacatagcccaaactagagtgaaattgaactatttggatcagattgc

SEQ ID NO: 38508 - DNA, 96 bp, Homo sapiens
aggaggaagaggaggaagaaaaatctgaggttatcaatgacgagggagcatttcctgaagacgtagtcatgcagcacgtcagcagctcccagagca

SEQ ID NO: 38509 - DNA, 100 bp, Homo sapiens
cgggggtgctgcagaggacacgaggcggcgggctggagacatggaccgcggcgagcaaggtgcatggctgcctcctaatcccatagtccagaggaggcat

SEQ ID NO: 38510 - DNA, 140 bp, Homo sapiens
agcgcagaaagtgaagctgtttcgggccagcgacccgctgctcagcgtcctcatgtggggggtaaaccactcggtatttataacagcaatgatgtagcagtatcgtttccaaatgtagtatctggctcgggatctagtac

SEQ ID NO: 38511 - DNA, 98 bp, Homo sapiens
tgcattcaggactcagggagtacacacttaccagtactatactggcaattgctggagaagattttgcaattgttgcttctgatactcgattgagtgaa

SEQ ID NO: 38512 - DNA, 100 bp, Homo sapiens
tgcacaaacttgttggcagcaagctccagggcccacaacggcagtgtcctacatgtcggtgaaatgtgtggatgcccgtaagaaccatcacaagacaaaa

SEQ ID NO: 38513 - DNA, 90 bp, Homo sapiens
cagttgcacacactaggagatctcctcaaagaagtttgtccttctgctattgatcctgaaggtaaaacttccttttcctgtagatcaaat

SEQ ID NO: 38514 - DNA, 96 bp, Homo sapiens
ctcctgagtatgttcacgatcggggtcagagcatctgttaagaacatcttcagccagccggcctgcttccctgccaagagtgcctgcgatggaaag

SEQ ID NO: 38515 - DNA, 100 bp, Homo sapiens
ccgctgccgccatcgtgccagcccctcggactggatacacgtctgtttaactacgcaaaaggtaatgctggcatggcttactgggaccctaagtgtggcg

SEQ ID NO: 38516 - DNA, 95 bp, Homo sapiens
tgatcacgcagctggctggcttcagtggaccagcgtgtgctcgcccactgatatcggtgtactccgaaaagggggagtcatctggcaaaaatgtc

SEQ ID NO: 38517 - DNA, 101 bp, Homo sapiens
ccaccttcctggcccgacgccatgggagtgacttggagctgtgcggtcttatgcattggaacttaatttgacagattcagaaaatgccacttgcctttatg

SEQ ID NO: 38518 - DNA, 50 bp, Homo sapiens
cgccgactgggctacaaggccaagcaagtgatatcctgagagaagatggg

SEQ ID NO: 38519 - DNA, 97 bp, Homo sapiens
cagcgctgcacccgcaccctgcaggccgagggacgtgccaagaagcgcaagggcaccaatctgaacaaggcgatgacgctgcaggaggccgaggcct

SEQ ID NO: 38520 - DNA, 74 bp, Homo sapiens
aatggaattagagagaagcatagacatcagcagaagacaggtgatgacctcactatttacgggattgtaatgca

SEQ ID NO: 38521 - DNA, 75 bp, Homo sapiens
ggagcggatccctgagctcgtcaagcagctgtcggccaagctcatcgccaacgtattaaaggtggaagaaggtcc

SEQ ID NO: 38522 - DNA, 90 bp, Homo sapiens
tccgcttcttgaatttctctctgtaaaggagatattctctaagccgctttcatcatgggagaaatagagcagaggccgaccccaggatca

SEQ ID NO: 38523 - DNA, 75 bp, Homo sapiens
cgccaggacggcaagtgtcggcactgtgggaaggctgacgtgatggcagacagggttccccgctgcccggtctgc

SEQ ID NO: 38524 - DNA, 82 bp, Homo sapiens
ctgaggcctccccaaccatgtgcaattgactccagaagacctttccagattcgtggttgagctgcagcagagggagcttgcc

SEQ ID NO: 38525 - DNA, 75 bp, Homo sapiens
gttgcggctttataagcgggcgctacgccacctcgagtcgtggtgcgtccagagctcactgaaaactgaagctaa

SEQ ID NO: 38526 - DNA, 100 bp, Homo sapiens
acaatgcctgatggaaaactgtacaacttttgcaattccagttgtgtggctaaatttcaggaattgaatgatctggcacgggaccctccagcacagtgtt

SEQ ID NO: 38527 - DNA, 85 bp, Homo sapiens
gatggacagaataactgtcaagacaacagtgatgaggaaagctgtgaaagttctcaagatcaggaagcaccatacctcctgcgaa

SEQ ID NO: 38528 - DNA, 50 bp, Homo sapiens
cctgggcgcccttggagtaccgttcggaacactactgagcctgtggcggc

SEQ ID NO: 38529 - DNA, 78 bp, Homo sapiens
cctgaaagacatgggcattgtctccaaggggcatatcattcacttcaagatcccggcctgtgattaatattcagaaaa

SEQ ID NO: 38530 - DNA, 133 bp, Homo sapiens
cggctgtggtggttcccgcagagtggataaagaactgggagaaatcagggagaggcgaattacgttcctgaatatgtttgttgacagcaatcaggatgctcgaagaaggtctgtaaatgaggacgataatccc

SEQ ID NO: 38531 - DNA, 75 bp, Homo sapiens
cttctgacctggtcctttctctggtatggggataggaggagagctccggaggcaacttcagagtggacgttggat

SEQ ID NO: 38532 - DNA, 82 bp, Homo sapiens
aatttggacactctagtagctgtaatagaatgccagcaaccagaagcagacttatacaggttccttggaaaagaaagcaaag

SEQ ID NO: 38533 - DNA, 134 bp, Homo sapiens
cgagtggatggtgcgttgcgtgccctacttcaaggataagggcgacagcaacagctctgccggctggaagacaatgcagatcttcgtgaagactctgactggtaagaccatcaccctcgaggttgagcccagtg

SEQ ID NO: 38534 - DNA, 96 bp, Homo sapiens
gctggctctgctgctgccgccggcgaaggaggaggcgttgccgggatcaactcactatcctgaaggtccattctcccaagaagaggggacagaaag

SEQ ID NO: 38535 - DNA, 82 bp, Homo sapiens
ggaggacagctctgatgaggagtgagacggtttaagcggaagcatcttactgccattgactgccagcatttggctcggagtc

SEQ ID NO: 38536 - DNA, 50 bp, Homo sapiens
gccgatgaagtgcagaggtttttttctgaggaagaaaagtatgcctttgt

SEQ ID NO: 38537 - DNA, 52 bp, Homo sapiens
tgtccctagttttgatgaaagcagcgctggcaagacctcaatgtgatcagca

SEQ ID NO: 38538 - DNA, 98 bp, Homo sapiens
acaaaattggcgattattcctggtggagccctgccttgagcttcacctactcttccgcgcccgtctctctccacatgcatcagcagatcctaagccga

SEQ ID NO: 38539 - DNA, 74 bp, Homo sapiens
atgaatgtgactaccctggttacctcatattacctgtttgaaaatggtagaatagataacatttttactgagcc

SEQ ID NO: 38540 - DNA, 83 bp, Homo sapiens
gctccgtggccttagctgtgctcgcgctactctctctttctggcctggaggctatccagcccgctgccatggcccagacactg

SEQ ID NO: 38541 - DNA, 80 bp, Homo sapiens
ttcggtggaacgaggacgcggactgcgaaggcaggtttccatgtgatccccactatctcaagcatcgtcccggagagctg

SEQ ID NO: 38542 - DNA, 51 bp, Homo sapiens
caggaacttggttatggttgtctcaagggttattggggctgtgccatcggc

SEQ ID NO: 38543 - DNA, 100 bp, Homo sapiens
gccctcgtcctggcggcaggagaagatcacccggaccaaggaggaggccctggagctgatcaacggtcctggtccgcgccagagcccagcgcgcctcgtc

SEQ ID NO: 38544 - DNA, 51 bp, Homo sapiens
ggtggagtgtaggtcatatcgccgcgatatctcttccaaacacatgatgaa

SEQ ID NO: 38545 - DNA, 50 bp, Homo sapiens
gatgcctaccctcggggtggagccggcagcctccttttagaggactcaga

SEQ ID NO: 38546 - DNA, 83 bp, Homo sapiens
gtttaaggagatccaggccctgctctctttgccaaggaactgtggctgcaccatctgtcttcatcttcccgccatctgatgag

SEQ ID NO: 38547 - DNA, 75 bp, Homo sapiens
tgccccaatccccggcagctctctcaggactggctggacaatggcccagaacaagctattcaacaagatcctcaa

SEQ ID NO: 38548 - DNA, 98 bp, Homo sapiens
tgatgctctctctccagtccttgctgaagagactttccgttacatgaagggagaccaagacatcattgttttgaagtttctgaaagtgttgggcggca

SEQ ID NO: 38549 - DNA, 100 bp, Homo sapiens
agagcgagctgagtggttgtgtggtcgcgtctcggaaaccggtagcgcttgcagcatgttccactgctccaaacccacccaccaaggactctgaacctgt

SEQ ID NO: 38550 - DNA, 130 bp, Homo sapiens
cgggagcgccgagcgtcgccgccgccgccgccatgaacaactcgggcgccgacgagatcgggggaacgcccttttgcttgtgactggcagggctgcgacaagaagttcgcccgctccgacgagctggccc

SEQ ID NO: 38551 - DNA, 75 bp, Homo sapiens
caagcagcgaactaaagggaacctgagggaagtgctctctggcgtggtggtcatatcgagtaaggattcagtcca

SEQ ID NO: 38552 - DNA, 100 bp, Homo sapiens
gtactccatgtttgcagctaaacttctgactcacatgatggcagccagcttaggtacacagatgatgataattccgaagaaggcttccacactattcatt

SEQ ID NO: 38553 - DNA, 48 bp, Homo sapiens
aaggtggagccaccagcctctccttgagacggtctcgccacattgccc

SEQ ID NO: 38554 - DNA, 100 bp, Homo sapiens
aagccgatgaacagcgccgggatccaggttattcagcttctcaaggctggaaaagcgaaggaagtttcctacaatgcactagcctcacacataatctcag

SEQ ID NO: 38555 - DNA, 83 bp, Homo sapiens
agagagcccaacgcctggtgctcaagactttctccgagagctccacgcaggagatcggtgaggagctgatcaacggagtcatc

SEQ ID NO: 38556 - DNA, 100 bp, Homo sapiens
gaggaacctgacccattttactatggtcatcagactagtgctgagtcttggggtactggcagagctgtggctcgaattcccagagttcgaggtggtggga

SEQ ID NO: 38557 - DNA, 88 bp, Homo sapiens
ttttctctgatgtgttccaactgtccaactttagctgttcaacttatgaaacaaacttagcagtgtctgcaaaaacgaatcttttcct

SEQ ID NO: 38558 - DNA, 100 bp, Homo sapiens
gaagcagccaagaaaaaaagacgaaagaagaagaagagcaaagggccttctgcaggctttaaaagtaaagaatgtgtcccaaaacttgtggctgatttta

SEQ ID NO: 38559 - DNA, 100 bp, Homo sapiens
gggaggtgaatttccatgtcaacatagtcctgaaactgattattgatgagaagaagtattacttatttgggagaaaccctgatttgtgtgactttaccat

SEQ ID NO: 38560 - DNA, 100 bp, Homo sapiens
gcttcgaggggcagttcagcatcaacaagaacccagaactagttgcccggctggagaagattaagatacagctggccaatgaggaatataaacggatcac

SEQ ID NO: 38561 - DNA, 49 bp, Homo sapiens
aaaaaagcagaggccagggcgccggagaggccccctttcatccctgaag

SEQ ID NO: 38562 - DNA, 111 bp, Homo sapiens
cctgctatccccaacaagaggaaagacacacctaccaagaagccagtcaagcggccaggccctgtttgtgctcttcgtcctggcctacatccacatcgtcttctcccgctc

SEQ ID NO: 38563 - DNA, 100 bp, Homo sapiens
atcacagaagttataaagttattgctaagtgtgggaattttagctaagcgccaagcccatctttgtgtgcttgcatccaactgtgatgagcctatgtatg

SEQ ID NO: 38564 - DNA, 98 bp, Homo sapiens
aggagggcctctgcggagcgtccgaggcctgtgtgaacggatggacaaccggaaattttctacacattttggaattcagttactcaggcactttcttc

SEQ ID NO: 38565 - DNA, 98 bp, Homo sapiens
ggcacttgctggagctggggcagcagtcattgctatggtatttaaaccatgtcagagctgcctcaccacaggaccttgctggaggctatacttcttct

SEQ ID NO: 38566 - DNA, 75 bp, Homo sapiens
atccccacctcccacctggctacctatttccccagtttccaggaaatctatgacaagttcaagcagagtacacac

SEQ ID NO: 38567 - DNA, 129 bp, Homo sapiens
tatggctgcctgggactcatactgtcgtggagaaagattgaaaagtagttaatggcagtggtggtatgaaggtgacgcatccaaagaagacattgacactgctatgaaattaggagccggttaccccat

SEQ ID NO: 38568 - DNA, 75 bp, Homo sapiens
cccttcctgtcgctgacggcgactgcgggaggccagaattcctagaggacctgtgcaacaacctcttgaggatcg

SEQ ID NO: 38569 - DNA, 78 bp, Homo sapiens
gcgcatcatccacctggtgcaccgcttcaacgcccaccacggggacaccaaggaagaaatcccagcaccccagccaca

SEQ ID NO: 38570 - DNA, 96 bp, Homo sapiens
aggtggaagtccaagtcaaacgcagaaggactgcctcactgagcaaccaagagtgtttgatcagagtgcgctttcaactgaagctaaagaagaaat

SEQ ID NO: 38571 - DNA, 102 bp, Homo sapiens
tccggaggccagcggccgggatagccccggcggagcccgcagcttccctgccggtgtcgtgaaaactacccctaaaagccaaaatgggaaaggaaaagactc

SEQ ID NO: 38572 - DNA, 83 bp, Homo sapiens
cagagttgttcatccagggagacagcgtaaatctcacaagcgaggaatgaaaggggacactgtgaatgtgcggcggagtgtcc

SEQ ID NO: 38573 - DNA, 100 bp, Homo sapiens
tccagaaattgatttggagaaatataaacttctgccagaaatctgatcatgatacaacaaagagatccagtgtgggacattctacaaaaagctggtctga

SEQ ID NO: 38574 - DNA, 75 bp, Homo sapiens
ggtgaatcccctgtttgagaaaaggcctaagaattttggcattggggccagagttactcagcaaatacattggag

SEQ ID NO: 38575 - DNA, 116 bp, Homo sapiens
gcgatgagcatagagacgctactggaggcggcccgcttcctggaatggcaagcgcagcaacaacagagagcacgtgccgcttacaaacacgcagatggcaagaagattgatggcag

SEQ ID NO: 38576 - DNA, 100 bp, Homo sapiens
cagcggcctggaggaggacgaggcgggcgagctgcagagcctggagcaggagaaggggcgctggcgggtggagaaggcgcagttggagcagagtgtggag

SEQ ID NO: 38577 - DNA, 78 bp, Homo sapiens
gacgcgcgggaacaacgcgagtcggcgcgcgggacgaagcattgcagtgtcgagatggctatgaaccctgtgtaaatg

SEQ ID NO: 38578 - DNA, 87 bp, Homo sapiens
ctggcctgggcgctccggtggcggcggaggttttttattggcacctcagtctcaacattttcttttcggattcatgaggaaagagaa

SEQ ID NO: 38579 - DNA, 82 bp, Homo sapiens
ttgctgctgccgtgtgaggacagacgtatttgcaatccccttatgccataatttccaatggatgggaccccaatgaaatgtt

SEQ ID NO: 38580 - DNA, 98 bp, Homo sapiens
tgcacagctaagatgccaggaccacctggaagcctagaaatgtgccctataaggactgccaggcaataatgaaggttcttttactgaaggatgcgaag

SEQ ID NO: 38581 - DNA, 74 bp, Homo sapiens
ggggacccgcccgccatggccaccaaggtactccaaagattcaggtttactcacgtcatccagcagagaatgga

SEQ ID NO: 38582 - DNA, 88 bp, Homo sapiens
cagcagctgctgtggaagggctccttcaagcccagcgagcatgggcagagcggcttgggtaaatccaccttaatcaacaccctcttca

SEQ ID NO: 38583 - DNA, 100 bp, Homo sapiens
aagatacatgggtcttggaagataattactcaaaatatgcagggaagattcactttataggaacagcttcagcttcagtgatgaaaaactgaattctcca

SEQ ID NO: 38584 - DNA, 83 bp, Homo sapiens
acacagaccttactccccttagaacaggagatgttgcagtaaagatcctaaaggttgtcgacccaaccccagagcaattccag

SEQ ID NO: 38585 - DNA, 82 bp, Homo sapiens
ctcacctgcgctgtgatgcctgcagagctgtggcttaccagagtatggagagtctcctgagggccaaaggcctggaagtgga

SEQ ID NO: 38586 - DNA, 50 bp, Homo sapiens
gaagcgtcgggattaggtgaaagtacatcaggaacgtctctatcaagaat

SEQ ID NO: 38587 - DNA, 100 bp, Homo sapiens
ctccgggcggccgcacctgccaggagtctccccaggacagtgctatcacccgggatattaaccgaacattcccagcccatgactactttaaggacacagg

SEQ ID NO: 38588 - DNA, 75 bp, Homo sapiens
gcctgggggatgagatgttggcggctgcgctcctaaaggccaagtcccagtgccggggggccccctcctcaccag

SEQ ID NO: 38589 - DNA, 82 bp, Homo sapiens
tggaagcgctgtgagtgccgatcaccgaatgggccgagagaaaaggttgtgaccgagattcccgacgagagagactgagggg

SEQ ID NO: 38590 - DNA, 51 bp, Homo sapiens
taccaagaagccagtcaagcggccagcccacaagagtgaacagatactgaa

SEQ ID NO: 38591 - DNA, 97 bp, Homo sapiens
cttaaagaaatcagtccttcctttccgacttagtcctcgggaagaagtttcagactacaagtgtggccagactccactgatgatagctgccgaacaa

SEQ ID NO: 38592 - DNA, 100 bp, Homo sapiens
attcgaaaagccacttgaagaaaagggtgaaggaggcgaattttcagttgataggttgtagatatttccggtatattttaaagcaagatcaccaaatctt

SEQ ID NO: 38593 - DNA, 95 bp, Homo sapiens
cttggagcggattgtggagatcgcccggctgcgtgcggtccagcggaaggcccgctttgccaagctcaaggatcttagaaatgaagttgaaaaat

SEQ ID NO: 38594 - DNA, 83 bp, Homo sapiens
ctcccatccgtccgcgggtccgtggagctggagcagatcccccagccggctgagacagacctaatctgggagcctgcaagtga

SEQ ID NO: 38595 - DNA, 82 bp, Homo sapiens
atggttaaaacccgaatgcagctagaacagaagttcttcccaggagactctgccggccttttccccaccagccccagcttgg

SEQ ID NO: 38596 - DNA, 75 bp, Homo sapiens
tcaacaacttttcagtggcaagaaaatatgagagccacacccgtgttcacacaggtgagaagccctttgagtgtg

SEQ ID NO: 38597 - DNA, 82 bp, Homo sapiens
ctcaaggacacggtctacaccgacttcgacgagtgcagccgtagcagagcgggagagggtgagccggctgtttgcagatgct

SEQ ID NO: 38598 - DNA, 90 bp, Homo sapiens
agaaactatatgccaccatggagaagcataaagaggagccggtgaaacctgaagaaggcagagatatggcaaacaggattggcgcttttg

SEQ ID NO: 38599 - DNA, 100 bp, Homo sapiens
cggattcgccgaggcaccgaggcactcagaggaggggccagcagcctcccccgatgggtcgtcagcaacgagggtgcctcaggatgtgacgcagggccct

SEQ ID NO: 38600 - DNA, 98 bp, Homo sapiens
cggcgggagatgctgtcgggccgcggcggcgcttggcagccaggagctctgcattgaaggcactgggacaaatttacatgtattggagaccagaccag

SEQ ID NO: 38601 - DNA, 100 bp, Homo sapiens
ccgttccaatggggtagcgctccccccattggacaagtggaagagcaagcaccagaagcaccaggcttttgaagcagagctgcatgccaacgctgaccgg

SEQ ID NO: 38602 - DNA, 126 bp, Homo sapiens
tggagtctgcgaaggccgggacccggttccccggcccacagtgggggtgtgcaaacccgagagaactggttttccaagagataacttcaccaagatgtccagtgataggcaaaggtccgatgatga

SEQ ID NO: 38603 - DNA, 100 bp, Homo sapiens
accctgttccatccaaactcttgccctttgagggaccagaaatgggcaagttcatgaaacctgggaaggtggtgcttgtcctggctggacgctactccgg

SEQ ID NO: 38604 - DNA, 75 bp, Homo sapiens
tcaacacccaaattaataccaaaagttaccaaaactgcagacaagcctattttcacaatggagactatcctggag

SEQ ID NO: 38605 - DNA, 75 bp, Homo sapiens
ctctgcattgctgatcttgtacttggattcagcaaggaaccttccggccaaagagtgtggccagatgcaaaataa

SEQ ID NO: 38606 - DNA, 82 bp, Homo sapiens
acgaagttctcgcgagagtcgtctcctcgataccaattggaatcgaagcctcttaaaatggcagatgacttggacttcgaga

SEQ ID NO: 38607 - DNA, 75 bp, Homo sapiens
gaggagccaacagctttagacattctactgataaccatccagagtcatgtgctgttcctggggcttggatgatgt

SEQ ID NO: 38608 - DNA, 97 bp, Homo sapiens
tgcttcaggaagaaagtgcctgccattcttatcatttctaagcaggttcatgccagcccagaacagagaatcaggcaggagtagggctgattggagc

SEQ ID NO: 38609 - DNA, 75 bp, Homo sapiens
acacttgcagagggaatctggtcaaacatggaatggggatctctccagtgtgtccagcagccccacctccagtcc

SEQ ID NO: 38610 - DNA, 73 bp, Homo sapiens
gaaacttaggggccacgtgagccacggccacggccgcataggaaggtgcttttgcacttgtgtttaaaagtgt

SEQ ID NO: 38611 - DNA, 90 bp, Homo sapiens
ttctacttcacactgcagaactgggttctggactttgggcgtcccattgccatgatctacgaactgcgtgtgatggagaccaaacccgac

SEQ ID NO: 38612 - DNA, 50 bp, Homo sapiens
ggccgaatcagccttttcacgctcaagtttaattagacacttcagaattt

SEQ ID NO: 38613 - DNA, 100 bp, Homo sapiens
cctgccgcgctgtttacatctttgccaagaagaacgacattcccttcgagctgcgcatcgtggatctgattaaagttgaggagctcaagcttgggaaaat

SEQ ID NO: 38614 - DNA, 100 bp, Homo sapiens
aaaaattcttcaagaaatctaaggacttggatgttgtgggtgatggtatgcagtgtcctccttcacctttgctttttgatccttcactaacccttgaaga

SEQ ID NO: 38615 - DNA, 75 bp, Homo sapiens
gagcacgctcacctgaccagctcataaagcaggcttcaacggaccacaccaaaatgccatctcaaatggaacacg

SEQ ID NO: 38616 - DNA, 82 bp, Homo sapiens
gaccatgacgcccatgcactaccacctgcgggagatcatcatctgcacctaccgccaggtatatgtctcgagtccacggtat

SEQ ID NO: 38617 - DNA, 75 bp, Homo sapiens
aaagtcattgaggactttccagcaaagggagagacaaaggcagcgctgccctcgggggagtattggccctggcgg

SEQ ID NO: 38618 - DNA, 101 bp, Homo sapiens
tgatccgcaattacggccccgaggtgtgggaagacatcaagagtacaagatcctcagcatgagagaattattactgtgtctactaatggaagtattcacag

SEQ ID NO: 38619 - DNA, 90 bp, Homo sapiens
gccgtcggcagcaagaacagagagagaggtggacagatctgagagatactgagaatgttggctaccagggtatttagcctagttggcaag

SEQ ID NO: 38620 - DNA, 100 bp, Homo sapiens
gatgttatcatgagggaattccggtcagggtcaagtcgtgttctgatcactactgacttgttggtttgtgaaatggctgctgacatttctgaatccagcg

SEQ ID NO: 38621 - DNA, 88 bp, Homo sapiens
actttcttccagcttctgctgtccttctttgtggagagcaaggtgcacattctccacccacccctggttcccggcaagtaccgctccc

SEQ ID NO: 38622 - DNA, 75 bp, Homo sapiens
gcgctccggtgtttccaccagctcatgaaagacacgactttgaactggaaggtgttccccccacactggggctcc

SEQ ID NO: 38623 - DNA, 98 bp, Homo sapiens
gtgttaaacaagttatagttgtggcttctggaaagggtggagtcggaaaatctactacagcagggaaggtggccatccagaaggaggacttgcagaag

SEQ ID NO: 38624 - DNA, 74 bp, Homo sapiens
ttttggaggtgcttctcatgcaaaaggaatcgtgctggaaaaagtaggagaattctgcctaagccaactcgaaa

SEQ ID NO: 38625 - DNA, 75 bp, Homo sapiens
cgctctttgccgtgacaacaccgttcccccagccgggctggtcttattagtaggtaagaaacagctgctcctcca

SEQ ID NO: 38626 - DNA, 83 bp, Homo sapiens
gtcaccattggagctcatcagactgaccgtgtcttacatcagttcagagaggtgaaagttacacaagaactgaaaaacattca

SEQ ID NO: 38627 - DNA, 100 bp, Homo sapiens
gcctcaggcgtgcgcggacggtgtgcggaaatagaagtgactgcatttaccatgttaagcagcattttaaatgccaagagttttgttaaatgtggaacag

SEQ ID NO: 38628 - DNA, 96 bp, Homo sapiens
ctggaaacttgctaaagagctgtgctattgacctgaaaagtggttctggaaaagtgtaccaaggccctgcaaaaggtgctgctgatacaacaatca

SEQ ID NO: 38629 - DNA, 100 bp, Homo sapiens
actgacaagcccttgcgcctgcctctccaggatgtctacaaaattggtggttcaagcactgtcttcctgttggccctgacaatcatagccagcacctggg

SEQ ID NO: 38630 - DNA, 100 bp, Homo sapiens
catgaatcgagaatggaaaggaatagacaggctacgcctggacaaatactatatggcggagctggtcaccacccacaagtgcctgcaccatgaggtaaag

SEQ ID NO: 38631 - DNA, 111 bp, Homo sapiens
gggcgagggctacccgctctttgccgtgacaacaccgttcccccagccgggctgacaatgcagatcttcgtgaagactctgactggtaagaccatcaccctcgaggttgag

SEQ ID NO: 38632 - DNA, 101 bp, Homo sapiens
caagcggaagctgcccttcaccgcgggcgccaatggggagcagaaggactcggacacagagccgatgatgagcaccccacctcctgccagcgagctcccgc

SEQ ID NO: 38633 - DNA, 96 bp, Homo sapiens
tcatcatcatcgcctcctgcgtcatcaacttaggcggagcttactccacgggaacagcctctagataatctgagttgttgaaaatacgaagcctgt

SEQ ID NO: 38634 - DNA, 105 bp, Homo sapiens
cgcccggtggctccgaagcggggaagtgggacaagatggtttacatctcgaacgatcgcttgggctttaaacaaaggtgtaaaaacagaatacaaacaattctgg

SEQ ID NO: 38635 - DNA, 83 bp, Homo sapiens
gatgtgggatccggttccttggtgtcatccagccttagcaaaccagaggggccacctacagatgctcctgcagtggacacagc

SEQ ID NO: 38636 - DNA, 100 bp, Homo sapiens
gccccatggagcgacgcctggtggagcagctcttcagctcagggactcggagatcatgcagcagaagcagaaaaaggcaaacgagaagaaggaggaaccc

SEQ ID NO: 38637 - DNA, 74 bp, Homo sapiens
gaagcggcggcggcggctccagcgtcctaagaggtggcagttctcattcctttccgtaatcgccatgaacatct

SEQ ID NO: 38638 - DNA, 75 bp, Homo sapiens
cagctatggcctcacgggggcagtgttctcccaggataaggactcggagatcatgcagcagaagcagaaaaaggc

SEQ ID NO: 38639 - DNA, 98 bp, Homo sapiens
cgcagaaggactgcctcactgagcaaccaagagagacattatgggcacagccctgcagaacctggatggtctggtgcagatgcccagtggctgtggcg

SEQ ID NO: 38640 - DNA, 100 bp, Homo sapiens
atgggactgatggtgccattttcttttagtatatttccacagattggacagattgatatcagtaaatgccattatttagtggatttggacaccatgagag

SEQ ID NO: 38641 - DNA, 75 bp, Homo sapiens
gcgtgatctgctcttccaagccctgggccgcacctacagcttgtgagaaggttggcatgcagatccctcgattct

SEQ ID NO: 38642 - DNA, 80 bp, Homo sapiens
ccgggacatgtatgagtgcagctgccccgagctggatcagctggtggacatctgtcggtcaaaatgcagatcttcgtgaa

SEQ ID NO: 38643 - DNA, 97 bp, Homo sapiens
atttgttaaggattccaagtaactcttatttgggttatatcctgtgttgtgacctcatggtttaagtgggaataaagatgagtataagcagtgatga

SEQ ID NO: 38644 - DNA, 98 bp, Homo sapiens
tctgttgttggatggagtgtccttgaaatgttcattagacggacatcgtgaaagccatcgcccgcctcattgagttctataagcacgagagctgtggc

SEQ ID NO: 38645 - DNA, 130 bp, Homo sapiens
ggaatttccttgtgcctccattcccgggaggggggagcggcgttggaggccaccgtttccagacaatgcagatcttcgtgaagactctgactggtaagaccatcaccctcgaggttgagcccagtgacac

SEQ ID NO: 38646 - DNA, 75 bp, Homo sapiens
tggaactgaaccagaggttcacaaaacaagtgtagtagatggctcccgcaaagaagggtggcgagaagaaaaagg

SEQ ID NO: 38647 - DNA, 73 bp, Homo sapiens
aggatcatgtctgcgagccaggattcccggtgaccagaagtcagcagcttcccagaagccccgaagccggggc

SEQ ID NO: 38648 - DNA, 80 bp, Homo sapiens
aacccctccgtctatgtgcctggctgtgacaaaccctgtgcccacgctgcctccactgccgggagactcagggctggggg

SEQ ID NO: 38649 - DNA, 100 bp, Homo sapiens
catagagtccctggacggcgtcaccaacctaccccggctgcaggagctgctactgtgcaacaaccctggcaaactgatacaactcagaaactgctcaatg

SEQ ID NO: 38650 - DNA, 100 bp, Homo sapiens
aaaggaaaaaatagaaaaacaaattgctacatccgggcccccaccagaaggtggacttaggcctctgacctttttgagcctgggaaatgcttaccttgct

SEQ ID NO: 38651 - DNA, 100 bp, Homo sapiens
gtgagaattcctcaatgactgccctctaaaggaagaggaagggaaaaggccgaggcatcagcgtgtgaagaccgcaaagacgatcccgagtacagttgtg

SEQ ID NO: 38652 - DNA, 50 bp, Homo sapiens
atcatcctggggacctggtacatggctatcaagtactagctccaactgcc

SEQ ID NO: 38653 - DNA, 68 bp, Homo sapiens
gcgctgcctcctggcctacttcttggataagggcgcaggattacattgcagtgaaggagaagtatgcc

SEQ ID NO: 38654 - DNA, 100 bp, Homo sapiens
cccagggactggcgcactcacagctttccagaaacactttgtgctactctgtggggctttggaaaagcatgttaaatgtgatattagggaagatgcaaga

SEQ ID NO: 38655 - DNA, 100 bp, Homo sapiens
aagagggtcctgctgggagaaactggcaaggagaagctcccgcggaaacttggatttaactggccagaagcaggtattcaaagcagagaacaatccctgg

SEQ ID NO: 38656 - DNA, 97 bp, Homo sapiens
cgaaagtgttggatctgttggtttcaaggttaactacaaaggttgcaagaaagctcaagtagcctatggagaggatgcaaggcttccagctgatgcc

SEQ ID NO: 38657 - DNA, 75 bp, Homo sapiens
ggatcgtcttcagctacatattctgccttttcaacactacacagggccgcccaataactccagtatacacggtgg

SEQ ID NO: 38658 - DNA, 75 bp, Homo sapiens
aaggtgctgggagtgcagcggcctctcctacagtctttcccagggaactccgatgaagtgttccaacaaaatgag

SEQ ID NO: 38659 - DNA, 100 bp, Homo sapiens
gaagaacatgggaatgattgttataaatgaaggctctcttgatggagtgaactactttatgtccaagggtatcctggatgattcgccaaaggaaatagca

SEQ ID NO: 38660 - DNA, 80 bp, Homo sapiens
gtgcttctgactatcttctcttcaccagctcttcagatcaatatggaaaatcctgccttgcttcgttgggcctatgcaag

SEQ ID NO: 38661 - DNA, 82 bp, Homo sapiens
ggaaaagcgaggcaaggcaggcggtgacaaccatgagtggaaaaaactaattatggttcagcactggcctgagacagtatgc

SEQ ID NO: 38662 - DNA, 100 bp, Homo sapiens
ctgatgtgattttcaaattggagcaagaagaagaaccatgggtgatggaggaagaagtattaaggagacactggcaagttcgatcctttggtacagaaga

SEQ ID NO: 38663 - DNA, 76 bp, Homo sapiens
tggtacatgagtggctatcatactggctattatatgggaggtggggaagacagggctccagctaccacaggacggg

SEQ ID NO: 38664 - DNA, 87 bp, Homo sapiens
gtcagctctttccccgtcagcatcccagccgtgctcacgtgccctctggtggtcagaagatgctgtgctgtctcgttaggatgaatg

SEQ ID NO: 38665 - DNA, 99 bp, Homo sapiens
accagttcgttatattagaaaacctattgactatacaattctagatgatattggacatggagtaaagagttgaagttggtgaagacattcatgatttaa

SEQ ID NO: 38666 - DNA, 108 bp, Homo sapiens
gaagaagaacccgtgaagaaggttctggagaaaaagttccatactgtcagtggaagcaagaagaaactcatctcatccaaatacacgctattgagaaggcgagcctga

SEQ ID NO: 38667 - DNA, 82 bp, Homo sapiens
tctgcgtgagaatagagaccaccgagaaggcgtccagctcagcgcatgaaggtcgcctcagtgacccacagctcagtggtcc

SEQ ID NO: 38668 - DNA, 100 bp, Homo sapiens
cccaacataaatctccagtgccccaagagtcacaagagagaggagccagtggggtgggtcgcagccacattaagaatgccctgctcagccagaatccgga

SEQ ID NO: 38669 - DNA, 101 bp, Homo sapiens
tcgtctcctgtggctgggacaagctggtcaagcgggctacattgagagacctcagctgattcgagcaaaagtgccaattgtgaagttcagggataaagtca

SEQ ID NO: 38670 - DNA, 90 bp, Homo sapiens
gcacaagaccctgagaaatcggtttgccatgcagaacttgaattggggacttgttttcaagcagtaaatagcagaattcagttacaaatt

SEQ ID NO: 38671 - DNA, 75 bp, Homo sapiens
ccacatcgggggcaccaccctccatgcctttgcagctgctacaggagctgagagaccctaccctcactttccgtc

SEQ ID NO: 38672 - DNA, 100 bp, Homo sapiens
gacaattcctggttcagaatttaaacatctttctaggctcttgcagccaatgccggaacaggatttgctgttgctgagcctcaaatcgcaatgttttgtg

SEQ ID NO: 38673 - DNA, 100 bp, Homo sapiens
attaacattgatctctgaagatatcaagtcatattatacagtgcgacagctagaattggaaaaccttacactttctgaaaaggatatgagcatgctcgag

SEQ ID NO: 38674 - DNA, 100 bp, Homo sapiens
tggagagcagggaaatggactgctatctccgtcgcctcaaacaggagctgttgaccacggcatgtttgagaatttgaacacagccctcactccaaagctc

SEQ ID NO: 38675 - DNA, 100 bp, Homo sapiens
aacatgtcagctgcactcacagccaggaagacaaaggaatttagatcaccacctcaagaacagagtctagtcctcaactctaaccaaagtaaaggaaact

SEQ ID NO: 38676 - DNA, 75 bp, Homo sapiens
caggaattgagagtcacagaggaaggacagtggagtctggcatcttattgtgtaaacaggaacatcgataagtag

SEQ ID NO: 38677 - DNA, 88 bp, Homo sapiens
aagatggacagtttcagtgcattacagctgctaggggagctgatcctggaccgtcacaactttgccatcatgacaaagtatatcagca

SEQ ID NO: 38678 - DNA, 75 bp, Homo sapiens
cttgcatcaagctgggcatccagggctcgtacttctgctcgcagacaaaactgtgtggagttttatcctatattc

SEQ ID NO: 38679 - DNA, 82 bp, Homo sapiens
cgagaaggacagcttcagggcccggagtactagtctcaacgagagacccaagagggagtgcatccgccccaacccttttccc

SEQ ID NO: 38680 - DNA, 82 bp, Homo sapiens
cagtgactcacaaatcagcaacacagaatttctgcaagtaattggatcaccagccttttgcaaatgcacacgatgtgctagc

SEQ ID NO: 38681 - DNA, 75 bp, Homo sapiens
aggcactttggataccgcgtcctgcaggtcggaaacggaaccccgagatgcccctgtccttcacaataagccgag

SEQ ID NO: 38682 - DNA, 76 bp, Homo sapiens
gccgcggagctggtttctgccgacaagggtctctctttttggcatgtcggccctgttactccctgggaactttgag

SEQ ID NO: 38683 - DNA, 118 bp, Homo sapiens
taagaaaatattgtatgggtgatcggcctgtccagtttgaaattctcagtgatcagtcagtcaactttggttttagtaacccaagccttgtcagtactgtaacataattgcagcattt

SEQ ID NO: 38684 - DNA, 50 bp, Homo sapiens
cgcacctcgtcaccaaggccaaggcaagtgaaccggagcaaacgacttcc

SEQ ID NO: 38685 - DNA, 113 bp, Homo sapiens
ggtgcggggacaggcatcgtggggatcttggcagcgctgcagggactgggaattcccacatttcatgggagatgttgatgtaaatctccctggtttgcacacccctcacatgc

SEQ ID NO: 38686 - DNA, 73 bp, Homo sapiens
tgccctggagcagttcgtgaacagtgtccgacagctctcagctcaaggtgtagtcgccgccgccagccgccat

SEQ ID NO: 38687 - DNA, 49 bp, Homo sapiens
gtcaggtctggagctcgaccgggccagattatggattggatatgtctac

SEQ ID NO: 38688 - DNA, 98 bp, Homo sapiens
agtacatcacccgctacatcgccagtctgaagcaggccactgagatcgagcgtctcatcacatggtacaacccgctgtcagccccggaactggaacta

SEQ ID NO: 38689 - DNA, 75 bp, Homo sapiens
agcagcagccaggtgtggcagtgacagggagattatgatgaagatgactatgatgctgattgtgaagacattgat

SEQ ID NO: 38690 - DNA, 75 bp, Homo sapiens
cttcgtctttgcagcgtagcccgagtcggtcagcgccggagagtgaagacatttccacctggacacctgaccatg

SEQ ID NO: 38691 - DNA, 99 bp, Homo sapiens
acaaagaaaacatccggcaagacttctgaaaagacaatttagcagctctacgtggccacggaggccatcctcattgcactggttggggccacgccatcc

SEQ ID NO: 38692 - DNA, 74 bp, Homo sapiens
gaaacaaaatgtcaacaaattgatggcccagtggttcccagacacaggtaatcttgggcacctccaagagcaaa

SEQ ID NO: 38693 - DNA, 99 bp, Homo sapiens
gacggcttgacagccctgcaccaggtcaactttgtagtgtgccaactctttgccttgctagcagccatttggtttcgaacttatctacattcaagcaaa

SEQ ID NO: 38694 - DNA, 100 bp, Homo sapiens
gcaatgctgacctcggtttcctggacccattccgactcaggtgacaagaccaccttccagctacaggttcgccaggtggaggactatcctgtggacctgt

SEQ ID NO: 38695 - DNA, 98 bp, Homo sapiens
cgggaaggctctggcttgggacgaaagtgtcaaggcattacggctcccattgagctagatagacgatcagctgaacactctcttgaaggagttccagc

SEQ ID NO: 38696 - DNA, 90 bp, Homo sapiens
caagaaaccaggttatccctcgaactcctagctcatttcgacagccttgtgaagagaaacggattcgggaattctaccagtcccgaggtt

SEQ ID NO: 38697 - DNA, 100 bp, Homo sapiens
atgattgagccgcgcacgctacagtacaaggtgtagcccatcagtgttatcatggtttcatgaaggctgtccaggaaggaaacattcagtgggagagccg

SEQ ID NO: 38698 - DNA, 137 bp, Homo sapiens
ttttgactcacgttcttggagttgctggtgttctatactggaagaggcatgccagaggtagagcaggtactaggttttgacaagcttgcatcatgcgtgagtataagctagtcgttcttggctcaggaggcgttgga

SEQ ID NO: 38699 - DNA, 82 bp, Homo sapiens
gccgcgcccgcggaaccagaccaggattctgaaaccttccttgtatccctcctgagacatctttgctgcaagatcgaggctg

SEQ ID NO: 38700 - DNA, 50 bp, Homo sapiens
tttgagaccgtgaagagaaagatgcagaacttggagcgtgatgcccagaa

SEQ ID NO: 38701 - DNA, 100 bp, Homo sapiens
caggcccaggccgccccgttccccgagctgtgcaggtgagaagccctaccactgcaactgggacggctgcggctggaagtttgcgcgctcagacgagctc

SEQ ID NO: 38702 - DNA, 74 bp, Homo sapiens
catgattgtgaggcctccccagccacgtgaaactggctcgaccacttactggatgagaacagagtgccggacct

SEQ ID NO: 38703 - DNA, 83 bp, Homo sapiens
ccagaacgtgccatggagacgcttaacgaatccacattcatctcaatggaaggatcctgccttaagtcaacttatttgttttt

SEQ ID NO: 38704 - DNA, 74 bp, Homo sapiens
ggagtccagataaaaggggtctctgcgtctgtagttcatttgaccaaacggatcagtttgacaacttagaaaaa

SEQ ID NO: 38705 - DNA, 90 bp, Homo sapiens
caatgccatccagagctgtgcctcccagcaccacagtccttctgcagtccctcgtccagccacccccagactactgccagaacttcgccc

SEQ ID NO: 38706 - DNA, 48 bp, Homo sapiens
cacagtgggctttactgtgttgagcacttttccagccattaactccag

SEQ ID NO: 38707 - DNA, 83 bp, Homo sapiens
cttcatcctaccgctccgccctatggtttgaagtggtgaacatggatttttctcggcttcacatgtacagtcctccccagtgt

SEQ ID NO: 38708 - DNA, 101 bp, Homo sapiens
gagcagtttgttcaagatgtcccggtcgacgttttggaagatgatcttccaaaacccaagactactgaagtaattaggaaaggctcaattactgaatacac

SEQ ID NO: 38709 - DNA, 74 bp, Homo sapiens
gaatcacagatctagtgctaaaagactgtccaaagatgatgttcatccatgctgtggaggaagatgcagagtca

SEQ ID NO: 38710 - DNA, 90 bp, Homo sapiens
aaggtcaaatggacccatgaggaggaagatcagccaataattattaaaaggaaaagaggaagacctcgcaaataccctgtagaaacaacg

SEQ ID NO: 38711 - DNA, 101 bp, Homo sapiens
gaattaaaaaggaccaagaagaggaagaagaccaaggcccaccatgccccaggctgttctgagatgttgatggctcatgctgtgacacagcttgccaatag

SEQ ID NO: 38712 - DNA, 75 bp, Homo sapiens
caaagtgttggaggacagacattaacagtatttactgagagctcatcaggttcagcttgttggtttagatgagga

SEQ ID NO: 38713 - DNA, 95 bp, Homo sapiens
gacatgaagggaacaggcatcatggactgtgcgcccaagtgatcagggccaaagcggtcagtgagaaggaagtggactctggaaacgacatttat

SEQ ID NO: 38714 - DNA, 87 bp, Homo sapiens
atcaagttcatgacggatggtgtgctgcttaaagaaatccagaaggcttctttgctaaagaatgatgagactaaggccctcactcca

SEQ ID NO: 38715 - DNA, 82 bp, Homo sapiens
cagccctggaggcttactgcaagaagtatgagcagctcaaggacaaggtgctgcggatgctgtacgtgtgggcgctctgccg

SEQ ID NO: 38716 - DNA, 82 bp, Homo sapiens
cggtggacgagtacctggagtaccggagatataatgaagatctggaacttgaagatgccattcatacagccatcttaaccct

SEQ ID NO: 38717 - DNA, 100 bp, Homo sapiens
cccagatctgggccgcttgcctcctgctcctcctcctcctcgccagcctgaccagtggctctgttttcccacaacagggtgtccgcaatgttgccagtgt

SEQ ID NO: 38718 - DNA, 73 bp, Homo sapiens
ggctgagaggagtcttctggtgcagtcttattttgaaaagtgattacagtggcgagatcttgaacaactgctg

SEQ ID NO: 38719 - DNA, 90 bp, Homo sapiens
atcgggtggagtgtaggtcatatcgccgcgctcgccctcccctacctgcggaagagtcaagggaatgtcatcaacatctccagcctggtg

SEQ ID NO: 38720 - DNA, 83 bp, Homo sapiens
gtccttctccactttcgccagcccgtgccgcgagcgcggcctgcaggaggggggtcctgtggagatccttcccttcctctacc

SEQ ID NO: 38721 - DNA, 101 bp, Homo sapiens
tgaatactatcaaaaaggaaaaaaaaatgacctaaacttttgagatagatttggctctaagcatgttactctgaggtttctgaagcaccagcaaatggatt

SEQ ID NO: 38722 - DNA, 98 bp, Homo sapiens
ggtgaaagaggacaagatagaagctgaggctgaaaatttgaaagacatattggctgacctgatacctaaggagcaggccagaattaagactttcaggc

SEQ ID NO: 38723 - DNA, 85 bp, Homo sapiens
catcaacagcgcctacaccaccaagattctgccagagactgctgctactttgaaacgtacgatagaggccctgatggacagagga

SEQ ID NO: 38724 - DNA, 74 bp, Homo sapiens
tgggttctattttccctcctcaaactgactttgcagccacggagagttgctggatttgtgcgactcggtgaagg

SEQ ID NO: 38725 - DNA, 100 bp, Homo sapiens
ctcaagacctggtccttggagaccattagtcaagccaggtggcagaggagatcagtggtcccttgacttcagccaataagatcacactggtgtccagcgg

SEQ ID NO: 38726 - DNA, 80 bp, Homo sapiens
aacctcagaggacaacgaagtgttcgctccagggttccttgaaaagaaaacaggtagttaacctatctcctgccaacagc

SEQ ID NO: 38727 - DNA, 75 bp, Homo sapiens
aggaccctgtgtgtctgaaaatgcactcttaaaagacccattttacatgggcttgtaccagaaacgagatcgcac

SEQ ID NO: 38728 - DNA, 100 bp, Homo sapiens
gaatccaaagttaatgccaagaagcagccgccagttgggatcaaatgtgagcctatggatcaaggaggatcaactttttgtggcattgcctcactatgtc

SEQ ID NO: 38729 - DNA, 75 bp, Homo sapiens
cctgccctgaggagtccccgctgcttgcagggagaaggttttaaggtgaaaacgaagaaagaaatccggcatgtg

SEQ ID NO: 38730 - DNA, 75 bp, Homo sapiens
caaggtctctcgcgggcgggagaacggaaaactcccaacttcctgaaatcttctctacatataccctcagagtct

SEQ ID NO: 38731 - DNA, 98 bp, Homo sapiens
gagatggtgtctggagtgtacaagtccgcggagcagggggaggtgagggtctccccagacacccgagcacccacccgcttcgtggatgatgaggagct

SEQ ID NO: 38732 - DNA, 120 bp, Homo sapiens
ggcggacggcgtggaccacatagacatttacgcggatgtcggcgaagagttcaaccaggttgtggcagcactgcctgaaggtatgagaccagattctaatctttatggttttccatggga

SEQ ID NO: 38733 - DNA, 85 bp, Homo sapiens
actgccacaaaagcagcatttctgtggaagacgcaagaaatatgttccatttaagcagacctcttccatagctgtagctggagcg

SEQ ID NO: 38734 - DNA, 75 bp, Homo sapiens
cgaggaggcggatcccccggcgtcagtaagactttgaccccgacgcaggcttcagtgattgccgcggatcagaag

SEQ ID NO: 38735 - DNA, 100 bp, Homo sapiens
caaacatggcggtggactcggcgatggagctgttatttttagatacttttaaacacccgagcgctgagaacattaaccaggtggtatttgttggaaattt

SEQ ID NO: 38736 - DNA, 74 bp, Homo sapiens
cggctttgagcttcctcaggggctttccttaaagtttcccatgtctcaatggactcctgaatataacgagctct

SEQ ID NO: 38737 - DNA, 75 bp, Homo sapiens
tgatacctttgatccagaacttgcagcaacaatagtgatgtcttggttcgtgtccccactgctttctggaattat

SEQ ID NO: 38738 - DNA, 100 bp, Homo sapiens
agagaagaagagaatgaaggaatagttcaactacgaatactaagaacccaggatttaaaaactggaacggtgaaggtgacagcagtcggttggagcgagc

SEQ ID NO: 38739 - DNA, 124 bp, Homo sapiens
ctttgtggaggtccctgagaaggaggggtatgagccacacatccccgaccacttgcggcctgagtatgctgcatcttcctcccgtgaggctggccgagctccacgctgatctgaagatacagga

SEQ ID NO: 38740 - DNA, 90 bp, Homo sapiens
aatgtctggctaatggcatttacaggagatccatccttttacaatccctgctattattcgtccattcagcgtattgaactatgatccacc

SEQ ID NO: 38741 - DNA, 50 bp, Homo sapiens
gtttctccaccacctagcctggaatatacaacaaaggagagagcgggaag

SEQ ID NO: 38742 - DNA, 82 bp, Homo sapiens
ctcgtggcctgcctctgcgtgccggagctggagtttgttcagatcatcatcatcgtggtggtgatgatggtgatggtggtgg

SEQ ID NO: 38743 - DNA, 123 bp, Homo sapiens
cctattatcagatcaaccaccaaagtgggaaacattgaaatcaagcagcaagatgaagagcgacgtcggcagctgagagagagagctcgtcagctaatagcagaagctcgatctggagtgaag

SEQ ID NO: 38744 - DNA, 75 bp, Homo sapiens
cggggcttgccctggtcttgctcggccgatgaagtgcagaggtttttttctggagagaagatgactgaggaggag

SEQ ID NO: 38745 - DNA, 75 bp, Homo sapiens
gccgttgttggaggtccaaaaaggagatggaataaactgagactgcaggacaaagagaaacgtctgaagctggag

SEQ ID NO: 38746 - DNA, 75 bp, Homo sapiens
cggctgaagggcatgtccctgcttgtcagggctgagagcgacggataaaattgtccatggaccacgtgtgccttg

SEQ ID NO: 38747 - DNA, 100 bp, Homo sapiens
cccagtgggtgctcacagctgcccattgcctaaagaagtatcttggagatggccgcttccatctggagtctgtcatgattgccaaccccaatgtccccgc

SEQ ID NO: 38748 - DNA, 83 bp, Homo sapiens
tgaaccatgtttggattgaagccgcctctgtattacttaccagaggctgggaggcggcagaatgcagccagaggagggcacag

SEQ ID NO: 38749 - DNA, 90 bp, Homo sapiens
atgttgccgcagcatcactaattagcaggatgaagttaaaggaagtagatcgtacagccatgcaggcatggagccctgcccagaatcacc

SEQ ID NO: 38750 - DNA, 50 bp, Homo sapiens
ggaaaagcgaggcaaggcaggcggcttcgatgtttttgaagcaggcattt

SEQ ID NO: 38751 - DNA, 82 bp, Homo sapiens
tttgatcatgcttatggtaactatatgcatgatgccttcttctgtagagtgggcgctttgcagaatacgtgttgaatgaaat

SEQ ID NO: 38752 - DNA, 74 bp, Homo sapiens
gcttttctatggcgaatgcaacccgacgagggagtggggtgcccctgggcgctgggattgctctagcctgtaag

SEQ ID NO: 38753 - DNA, 145 bp, Homo sapiens
ggactgcacaaatccacggtacttagctgcaggttcttccaatgctgtcaagctcagtaggttttttgataagcttagatggaaaccatttgagattccaaaagcatctcagaagaaagtagactttgtgagtgtaagtcagtcc

SEQ ID NO: 38754 - DNA, 98 bp, Homo sapiens
ggagacgctgggagcgagcgcagcaaagcgcccagcctgccgcctcgctgtccctgcggcttctgggggaatagccaggccagaagaaggaaggcctg

SEQ ID NO: 38755 - DNA, 51 bp, Homo sapiens
aggatcaacttgaacgaatatttctggttaatttggagtggcccctggagt

SEQ ID NO: 38756 - DNA, 80 bp, Homo sapiens
agtggtcacagctggatgtttgcgacatcccagagagcttccagaccaagaaggatcaagaaggtggagaagaaaagaaa

SEQ ID NO: 38757 - DNA, 75 bp, Homo sapiens
gaggtggccggagccgtgtggaccaggaggagcgctgtgtggacactgccagcggctgcagccgacttggaatga

SEQ ID NO: 38758 - DNA, 105 bp, Homo sapiens
aatattaccagtcagaggcggaaggactcctggaatgccacaaatgcaaatacttgtgcactgggagaggcagaagctcctcctggggtagagacagatcttatt

SEQ ID NO: 38759 - DNA, 90 bp, Homo sapiens
aacatttttgaacgcacagatcgacagacattgtttgaaaatgtccaaagtggctgaaagatctgtgacttcctccgcggagccacagtc

SEQ ID NO: 38760 - DNA, 99 bp, Homo sapiens
aacgagcggcggcggcggcagcgggtcttgggtcctccgagagcagcagcgacaaatttacatgtattggagaccagaccagaagcccttctgaattaa

SEQ ID NO: 38761 - DNA, 89 bp, Homo sapiens
agttgtctgagtgcgttggtcggcggcagtcgggccagacccaggactctgcgactttacgtaagaatgattgatgttggctgatattg

SEQ ID NO: 38762 - DNA, 83 bp, Homo sapiens
gtggttggaatccttgctgtgctgaatcctggctgtgtgaccccaagcagcgcccggttaccacatggccaagctgatcatca

SEQ ID NO: 38763 - DNA, 101 bp, Homo sapiens
ggggaaaccccgtaaagtggttggttgcagttgtgtagtagttaagtgtgccatgcggagctgaatgccatcatgaacaaaaattcgaccgatgtgaaagg

SEQ ID NO: 38764 - DNA, 98 bp, Homo sapiens
gaaagagctcccgcggttgccccattgcaaagtggagaaacagcacccaggactatcttccaaagagttctggatatcctaaagaaatcttctcatgc

SEQ ID NO: 38765 - DNA, 82 bp, Homo sapiens
aaggaatcgtatcgtatgtccgctatccagaacctccactctttcgaacccagcgggtgccgcttctccacccgaggcttcc

SEQ ID NO: 38766 - DNA, 75 bp, Homo sapiens
aaaaaattcttaatgttaacagaatgtttttgaagaagcttcaggaacaagtaggtgcacgtctcatcgcacatg

SEQ ID NO: 38767 - DNA, 75 bp, Homo sapiens
ggaggagtcagctgtgtgtccagaacgtgccatggagacgcttaacggtttctgggtgtctctggggagcccctg

SEQ ID NO: 38768 - DNA, 100 bp, Homo sapiens
cagaatctgccggatggtgctggccacttgcttgggatcctttatcctggtcatcttctatttccaaatattctaccttgtaaatactgttatttgtata

SEQ ID NO: 38769 - DNA, 75 bp, Homo sapiens
tggatatcagcatacaattcttacatattcctggtgtagaatctgcaaacagatcttcaaagctgctgcgggcat

SEQ ID NO: 38770 - DNA, 90 bp, Homo sapiens
gatgaagagtatcaggaatttgaagagatgctggaacatgcagagtctgcacaagccaggagacaagcttctcaagtctttacagccgag

SEQ ID NO: 38771 - DNA, 101 bp, Homo sapiens
acagctagtgttttcttatttagccggagtgagaagcaagaaggccctggacacagcaatatctctgggctttcacaggcacgcacagaggctgggctgcg

SEQ ID NO: 38772 - DNA, 100 bp, Homo sapiens
tctaccatgaatgaaatgaagagttattctcaagctgtcacaggactctgcgtacgtgtcctatgggggcctgctcatgaggctgcagggggatgccaac

SEQ ID NO: 38773 - DNA, 74 bp, Homo sapiens
acagcacctatcacttgttccctccaagacaactgaatggaactgcatatattcatggaatgaaacatgccaca

SEQ ID NO: 38774 - DNA, 100 bp, Homo sapiens
ctccaagaaaaaaaccacaaatgtttttctgttttgcctgaatacatgatttaaacaagagatttccacagaagcttcataaacaagcagatatgcaaga

SEQ ID NO: 38775 - DNA, 95 bp, Homo sapiens
ctcacacaagtggtcagtttggttgtggaaaggctatgattaaaagtttcatggatgtctaccagcttgcaagcactagaatcatgacattagag

SEQ ID NO: 38776 - DNA, 100 bp, Homo sapiens
ccggggagcggcggtggcggcgtcctggggccaggaggagcgaacacctgccgcggtcctcccgccggcgctggatgccgacaaaaggatcaaggtggcg

SEQ ID NO: 38777 - DNA, 83 bp, Homo sapiens
tgaagaccgaagcaagagctggttcaggatagtaatgatgacactgaagatgtttcactgtttgatgcggaagaggagacgac

SEQ ID NO: 38778 - DNA, 80 bp, Homo sapiens
ctggattgctgcaaggctgagggacgagaacgaggatccagccagtccgctctgaccccgtcagcatgccagggtcatcc

SEQ ID NO: 38779 - DNA, 80 bp, Homo sapiens
gaagccatgaggccaaaggcagttgtattggaactgtggctgcaccatctgtcttcatcttcccgccatctgatgagcag

SEQ ID NO: 38780 - DNA, 100 bp, Homo sapiens
cccagacgcgccgcccgcatgcgccgcgaccatggagcgccccgaagcgggactttgtgttttatgccccacgtctgagaatcaacaagcggatcctgca

SEQ ID NO: 38781 - DNA, 100 bp, Homo sapiens
cattccccatcaggcatttataacattaatgtgaccacattaggaggcttgtggatcagaatctgaacaaaattgggaaagatgaaatgcttcaaatgat

SEQ ID NO: 38782 - DNA, 100 bp, Homo sapiens
cctgatgaccctcctgagcccgcaggaggcaggggccaccaaggaccaccatcatggcagtggagtttgacgggggcgttgtgatgggttctgattcccg

SEQ ID NO: 38783 - DNA, 80 bp, Homo sapiens
gtcgcacctgcggacgcacacagagaggtggagaagagcgagtacttgagaaagaagaggaagaagatgatgatgaagat

SEQ ID NO: 38784 - DNA, 90 bp, Homo sapiens
caaagcgttgaataaacggttgtacaaagagctgaaggctatgcagcctttcaggaagatagctctggagatgaggcagaaagtccttct

SEQ ID NO: 38785 - DNA, 75 bp, Homo sapiens
cctgcaccatgagctggggcaccgagctctggtaagactttgaccccgacgcaggcttcagtgattgccgcggat

SEQ ID NO: 38786 - DNA, 83 bp, Homo sapiens
cttcagggatgagtcatgtggcagtggaaaatgcgctcgggctggaccagcaggtcatcatcagatttgaaatatttaaagtg

SEQ ID NO: 38787 - DNA, 109 bp, Homo sapiens
acataacctatttcctggcccaatagacaactctgggctattttcaggctctgtgtgctccgggatggagcaggtgtgcagagggtgagaacccagctctgggaccaag

SEQ ID NO: 38788 - DNA, 89 bp, Homo sapiens
ctcagaaatcagctcaaacatttttatcagaggtagtaaacctattgatggcaattttgctgactgtggaagtgactcatccaaactcc

SEQ ID NO: 38789 - DNA, 75 bp, Homo sapiens
agaaaattgcccttcgggaaatccgaatgctcaagaatgctgaccccctgaaggtgtacccgccactgaagggga

SEQ ID NO: 38790 - DNA, 50 bp, Homo sapiens
gggaaccctggtcaccgtctcctcagggaactctaatgatccaggacaaa

SEQ ID NO: 38791 - DNA, 75 bp, Homo sapiens
cccttccatttcaaagaacagaatgctaaggaagctgtggcaattatgatggttaacggtgatcacaggataggt

SEQ ID NO: 38792 - DNA, 107 bp, Homo sapiens
aagccatggagttgagctgcagcgaagcacctctttacgttggtcaaagaaaaagtgatgtatgaaaaagaggcaaaacaacaagaagaaaagattgaaaaaatgag

SEQ ID NO: 38793 - DNA, 98 bp, Homo sapiens
aaagggaccggggaaagatgagggggctccctctgtggatttatcttgctgagggtgggaactttgaggctcagagacagagcagaagacagaacctg

SEQ ID NO: 38794 - DNA, 82 bp, Homo sapiens
cgcggatctcaccgccgctcaggtaagagttccctatttcattgatttgaaaaaaccacaggatcaaggtttgaatcacacg

SEQ ID NO: 38795 - DNA, 75 bp, Homo sapiens
catagaaaggaatctgcagaaagaagctgaattaaatgtgagggagtctgacgtaagagtttgtgatgagtcatc

SEQ ID NO: 38796 - DNA, 78 bp, Homo sapiens
ggcatcttctataaggttccaggtagaatgggagtatatactttgaagatccccgtcgaggtcaagatcaagatccag

SEQ ID NO: 38797 - DNA, 87 bp, Homo sapiens
acatacagtcgcctctgacaagccagcacacagcaagaaggaggccatcagcaaactgggaagaggaccctcaccaggaaccacatc

SEQ ID NO: 38798 - DNA, 82 bp, Homo sapiens
ctggaattttgccgatttcatgactaaccagtatgcacaagtctggcgttctgaggaaggccattgattacatcaaatactt

SEQ ID NO: 38799 - DNA, 100 bp, Homo sapiens
cgagagcaccgacaccgcctgtgtggggcccaccctccgactatctgttatagtccctgggtcaagacaacaatttttataccttcgtcgtggttcagaa

SEQ ID NO: 38800 - DNA, 50 bp, Homo sapiens
gggaaccctggtcaccgtctcctcagctcctcagaagaaatatcacgtta

SEQ ID NO: 38801 - DNA, 50 bp, Homo sapiens
tgccaatccaaaattatgggagtgctcctcacatgggtcaactgttccag

SEQ ID NO: 38802 - DNA, 50 bp, Homo sapiens
ctccttttccctctccctttccctaagatgcggcattccaaaagaactca

SEQ ID NO: 38803 - DNA, 98 bp, Homo sapiens
gggtggcttacagacgctgccagcatcgccgccgccaggtcgcaatggaagaagagatcgccgcgctggtcattgacaatggctccggcatgtgcaaa

SEQ ID NO: 38804 - DNA, 82 bp, Homo sapiens
ctgtatgagctctcagcaagcaactttgagctgcacgttgcacaaggatttttgtccctgagtcatggaagacagaagagct

SEQ ID NO: 38805 - DNA, 83 bp, Homo sapiens
ctcaactctggctgtgtaccgattgccacacccaggctgctgtggcggggccttcgtgggcccgcgatgccaggaccccaacc

SEQ ID NO: 38806 - DNA, 76 bp, Homo sapiens
aaacagtgtatcaaagtgtggactgaggatgcaatgcagtatgcttctgaatctaaagatactgaattggctgaag

SEQ ID NO: 38807 - DNA, 100 bp, Homo sapiens
gctacattgcgaaaattaaactcccgaagaagaggtcggccctcctccacgctgacttccgggtctcactctcccacgcctgtaagaacgctgtgaagac

SEQ ID NO: 38808 - DNA, 75 bp, Homo sapiens
tggcctgttatttgtctcaacaaaagagcttgcattgatgacaatgttgatatggtgaagtttctggtagaaaat

SEQ ID NO: 38809 - DNA, 98 bp, Homo sapiens
tcggcccttgccttggcagagctgaggaagactatgaccgtctgaggcctttatcttacccaatgaccgatgtcttccttatatgcttctcggtggta

SEQ ID NO: 38810 - DNA, 82 bp, Homo sapiens
gtcattctcgctaacaactgcccagctttgagagcaggaaagtccaatccaaccttttatctccagaagggctttcaaacat

SEQ ID NO: 38811 - DNA, 96 bp, Homo sapiens
accccgctgcacttcgccgcaggtgatcatagatgagttaataaagaaactggacatgaatctgaatgaggacatcagttccctgtccactgaaga

SEQ ID NO: 38812 - DNA, 99 bp, Homo sapiens
cagcatagaaagaaagccttgtaaccatcaggtagatacagcaccaacgtgtttgggaaatgggaagtaatgacagctggcacctgaactaagtacttt

SEQ ID NO: 38813 - DNA, 75 bp, Homo sapiens
tgccttaaccgaattcctcatgggaggaagaaccattctgacaaagaaatcatgagtggaggatctcaagtccac

SEQ ID NO: 38814 - DNA, 125 bp, Homo sapiens
acagtttgtaccaatgaaagaggctggataacctaccagggattcctttcccagtggacgtcatataaaagtgggtctggagtaaacaacagaagaactgagctatttttgaaagaacatgacca

SEQ ID NO: 38815 - DNA, 89 bp, Homo sapiens
gctatgtctgtcatgctagaagtgccaaaggcgaagttgccaaagcagccaaggtgaagcagaaagagtttcactcttgttgcccaggc

SEQ ID NO: 38816 - DNA, 100 bp, Homo sapiens
agggcccctctcctaggcccccaacccgatacgagccccagagggtcaacagcggcctcagttctggaagactcccggattctaccccaggatacttcat

SEQ ID NO: 38817 - DNA, 75 bp, Homo sapiens
gaaactgtccgagaagcccaaaactatgtcttcagcagtggtgcagttatatgcagcagatcggaactgtatgtg

SEQ ID NO: 38818 - DNA, 78 bp, Homo sapiens
caccggccaaagaccacaccacttcctgcgcagaggcatcttcttctcacacagaacctaaaggcagacccagaagag

SEQ ID NO: 38819 - DNA, 82 bp, Homo sapiens
ctctgacatcactccagcagaagaaagggaaggaacacgctgcattactgcgtggtgaccaagaatatggcccaggtgacca

SEQ ID NO: 38820 - DNA, 102 bp, Homo sapiens
agcagatatgcctgctaacatggataagcatgccctgaaaaagtatcgtcgagaagcctatcatcggccttcccttcttcttggtggtgttcttgagtaaga

SEQ ID NO: 38821 - DNA, 114 bp, Homo sapiens
cccgcgagcacagagcctcgcctttgccgatccgccgcccgtccacacccgccgccagcaaaatgatgcttcaacacccaggccaggtctctgcctcggaagtgagtgcttctg

SEQ ID NO: 38822 - DNA, 83 bp, Homo sapiens
ccctgtcctagctctgtaactgtttacagtagatttagacgttactttacctggggaaggtggaaaagatcgacctttcaagg

SEQ ID NO: 38823 - DNA, 100 bp, Homo sapiens
ggaaaaggaggaattcgccgtgcccgagaatagctccgtccagcaggcttctccagggaaagtgaccgaggcagtgaaagaggccattgacgcagggtac

SEQ ID NO: 38824 - DNA, 82 bp, Homo sapiens
tctttaatatgctggatgagctgctgaagcccaccgaattaggagcaggccgggctctcgccatgggtcactgtcgcctctg

SEQ ID NO: 38825 - DNA, 100 bp, Homo sapiens
aaaggaggacgtttgcagccagatatttcaatctgctttgccacggcatggaggcagaagatctttcaaaggctgaagacagaaatgaagacccaggttc

SEQ ID NO: 38826 - DNA, 75 bp, Homo sapiens
gatttgaacctatctgctttcaagctggtcatcatgatgaaacttagacacatctttgagtgattgcagtatgac

SEQ ID NO: 38827 - DNA, 90 bp, Homo sapiens
actactatattcagtggctaaatggctccctgattcatgcccttagagatttgtttgattccatggataaaacttcttccagtattccac

SEQ ID NO: 38828 - DNA, 100 bp, Homo sapiens
gagttcgagcagatcgacaagtccgggagctgggcggccatttaccaggcatttcttttgaagaagctcctgttttcttcggagaagtcttcttggcggg

SEQ ID NO: 38829 - DNA, 100 bp, Homo sapiens
aacaatgtactccagttgctggatatccaagcctctcagcttcggagaatggagtcttccatcaatcatatctcacagagttgtggaaagtaaaaatgta

SEQ ID NO: 38830 - DNA, 101 bp, Homo sapiens
tgaactgaatcatgattttcaagcacttgctctggagggaagagcgatgggagagatttctttaaagactcgtgcagcacatcattatcgctggatgcccg

SEQ ID NO: 38831 - DNA, 100 bp, Homo sapiens
gtggcctgggcagcctgctggaccctgccaagaagtcgcccatcgcagcagctcgacgagctggagccggtggtgcaggatgggcagaggcgcatacggg

SEQ ID NO: 38832 - DNA, 80 bp, Homo sapiens
aaggttccttggaagaagatgtctgcagagtgtggacaacagtgagtatatgcggaatggagacttcttacccaccaggc

SEQ ID NO: 38833 - DNA, 100 bp, Homo sapiens
cgaggggaccatgtccgggaggcgcttccacctctccaccaccgaccgcgtcatcaaagatttgagttctgtgaacctgcatttgttgttggtaattgcc

SEQ ID NO: 38834 - DNA, 82 bp, Homo sapiens
aggaggagtgcgcaggacggcccagccccagcaggtacaggtttgcagattccgccagcagcacagcaagctctacagatga

SEQ ID NO: 38835 - DNA, 50 bp, Homo sapiens
gtttattctcccatagcatgtggtagcagcagcagcagcagcagcagcag

SEQ ID NO: 38836 - DNA, 75 bp, Homo sapiens
cggaacatcgggggccagattcaggagaagggtcggcactcttcaccctcccgagccctgcccgtctcggcccca

SEQ ID NO: 38837 - DNA, 83 bp, Homo sapiens
gtacagcgccggtcaacatcgcggtcatcaagtactgtgcagagcattgtagaccaaggagccatggataggagaagtatggg

SEQ ID NO: 38838 - DNA, 100 bp, Homo sapiens
tcgtgagcagctttccacttcagaaaatgccctgacagatagaagagtgatggatgtcatttctcgttcacagctttacttggatgatcttttttctgac

SEQ ID NO: 38839 - DNA, 75 bp, Homo sapiens
attccggccagcttcacgaagtcagagagagctccttaataagcatttatagtcagtttttggcagcaatagaat

SEQ ID NO: 38840 - DNA, 82 bp, Homo sapiens
tcggctcctgtgtgcagctaatggtcgtcgtcggcatcctcctggcctacctggcaggatcccatgacagattctgttgtca

SEQ ID NO: 38841 - DNA, 50 bp, Homo sapiens
accttggcttggctcttgacgtggacaaacacagaccaccagtgcaaaac

SEQ ID NO: 38842 - DNA, 100 bp, Homo sapiens
gccgggaccgggaccgccgccgccgccgccaccatgggacatgagagatggctttagaagaaaaagtttctactcttcccattatgcgagagagcggtct

SEQ ID NO: 38843 - DNA, 90 bp, Homo sapiens
gaagttaggtcaagatgaagacatggatgtcaaatactttgcacaggaagctataagtggtcttaaagagattattgtaccccagttagg

SEQ ID NO: 38844 - DNA, 100 bp, Homo sapiens
aatacaaaagcaaagtccttaacacaagccacagatggcactctgattcggcttgcaaaaaagctcatttagaggcgagttttgaggaggtagagaacaa

SEQ ID NO: 38845 - DNA, 97 bp, Homo sapiens
tgttcgcagcgtggattttaaccgaggcacggacaacatcaccgtgaggcagggggacacagccatcctcagggaactctaatgatccaggacaaag

SEQ ID NO: 38846 - DNA, 82 bp, Homo sapiens
gaggaagtctgggggccgagaccacacagatatctccacaggaccttcttggttaaatcagggactacttctgaactctacc

SEQ ID NO: 38847 - DNA, 75 bp, Homo sapiens
cgtcaggaggaggagctccgtgggcagatccgggaggagaagcccatgcagaatgccaccaagtatggcaacatg

SEQ ID NO: 38848 - DNA, 100 bp, Homo sapiens
ccatcttgagtctactctgtcgctcttgtgccctagcaccccgagaaccgtcagtttgagccagatgactctaaaatagagctcaagcttgagaagagag

SEQ ID NO: 38849 - DNA, 75 bp, Homo sapiens
gaacttggcattttagatctaattcaagttgtcccagttttggtgcatctcctgtctgctatcagcagtgttagg

SEQ ID NO: 38850 - DNA, 100 bp, Homo sapiens
ggggaacagggtcacagctctcacccagagtgatcagcagctggactgtgccttggacctaatgaggcgcctgcctccccagcaaatcgagaaaaacctc

SEQ ID NO: 38851 - DNA, 101 bp, Homo sapiens
gggtttctacactgttcttctctgagccccgcaatgcctctgtgtgtttcggtcctgcttctctcacggacatgctacaagtgaaaactgatgagaaactg

SEQ ID NO: 38852 - DNA, 75 bp, Homo sapiens
cctgacacccggcatgaccaaacgtccagttgcggataatgagcgaatgtttgatgttcttcaacgatttggaag

SEQ ID NO: 38853 - DNA, 96 bp, Homo sapiens
cagcggcggctggcgcttcctgcgcatcgtctgcaagaccgcgaggcgagacctcttgtgttggagcgggccggagagaagtagagtgggctgcga

SEQ ID NO: 38854 - DNA, 50 bp, Homo sapiens
tcgtcaggaacgtggccgacgacaccagcagcgatggattttgggtgggg

SEQ ID NO: 38855 - DNA, 109 bp, Homo sapiens
cagccttcagcttttggcagcatgaaagttagcactgtctgaaaacgtggtgaaccgcatgaaggagcccagctctccaccccctgctcccacatcttctacctttggc

SEQ ID NO: 38856 - DNA, 100 bp, Homo sapiens
tgattacttcagaattaccagtgttacaggtgaatcatttgatgtaaaagacttgactccataatctgcatctgtcctaatgctgtcatctggagtagag

SEQ ID NO: 38857 - DNA, 98 bp, Homo sapiens
aaaatcgtcttatagttgagaatttatcctcaagagtcagctggcaggcaccacactgtaactcgaggcatcaccaaaggcgtgaaggaggactttcg

SEQ ID NO: 38858 - DNA, 101 bp, Homo sapiens
attttcctgatccaaacaagcttcattgttttcagctaacagtaaccccaggttcgtcacaaggcatcgcagaaggtttatgctatgaagcttcttagtaa

SEQ ID NO: 38859 - DNA, 74 bp, Homo sapiens
agagctccttggccctccacaagctccactcgcgccggacacagggagcagcgagcacgcgtttcccgcaaccc

SEQ ID NO: 38860 - DNA, 106 bp, Homo sapiens
ctattcgcggctcttcccgcccgccttccgccgtctcttcgagttcttcgtgctgctcaagcccgtggaccgggagcccgtggaccgggagccggtggtgtgccac

SEQ ID NO: 38861 - DNA, 75 bp, Homo sapiens
ctcagaataaaggaaagacctcagagtgttctcaaatcagcatgattcttcagaggctcttcaggttctcctctg

SEQ ID NO: 38862 - DNA, 51 bp, Homo sapiens
aactcattcaaggttacccagttggagtataacatgtatggctggtgggtg

SEQ ID NO: 38863 - DNA, 90 bp, Homo sapiens
cttctgcatccttaactgagaatgaggtggagtctttcattttggatcaggatgatttggaaaatccaatgctggaaacagcttccaagt

SEQ ID NO: 38864 - DNA, 50 bp, Homo sapiens
ggcttcagaatgcagtgttttcgatgggacctgcaaaggataaactggtc

SEQ ID NO: 38865 - DNA, 88 bp, Homo sapiens
tcgactgcccagagtccgcgaatcctccgctccgagcccgtccggactcccccgatcccagggcaccttcagcctgcggaagctatgg

SEQ ID NO: 38866 - DNA, 98 bp, Homo sapiens
tggggctccgcgaggaaaacgagggcgtgtataatggaagctggggaggccggggagaggtacaacagaatagctcgggaatggactcagaagtatgc

SEQ ID NO: 38867 - DNA, 101 bp, Homo sapiens
cacctttcctcaggagtcatttctgttccgcacaggcctgctgaactgggtgctttatataggatacttgccagaactaatacagctgatgaaatacctga

SEQ ID NO: 38868 - DNA, 74 bp, Homo sapiens
attatatcgcatcctatggctcaaagaaagatgattatgtcaggcagttcctgctccgactggggctcctccag

SEQ ID NO: 38869 - DNA, 103 bp, Homo sapiens
caggcatgtgtcctgggctgtctgtggacctggagcctgctgtcataggattggcagccaccatttgcatgtgatgttgataaacttcattttacgccacgta

SEQ ID NO: 38870 - DNA, 51 bp, Homo sapiens
gcggggggaggaggacccagaagagacgagttgtactgctgtcacaggaaa

SEQ ID NO: 38871 - DNA, 75 bp, Homo sapiens
cgacgtcgtgatccagaagtccagagctgaggactgcctgtttgcagctgtaggcattcagatgaaacttgaatt

SEQ ID NO: 38872 - DNA, 100 bp, Homo sapiens
cctgaaccatgctctcgagctctcagtgccagagaaggtgaataatgcccagtgggatgctccaggaaaacctggaagcacaatgggagatgacagtgag

SEQ ID NO: 38873 - DNA, 73 bp, Homo sapiens
gcaaattcactccccagtacaaaggtggaagcagggaaaggcctggagatgaggaagctggttctctcggggt

SEQ ID NO: 38874 - DNA, 100 bp, Homo sapiens
aagaaggtgaagatgatacctttctaacagcccaagaagctctggaggaatatgtgaaaaaagtaaactctattcagatggtaagaagaagtccttaaac

SEQ ID NO: 38875 - DNA, 51 bp, Homo sapiens
gcagggcaagccacagagccatgagctgtagagacggggtttcaccctgtt

SEQ ID NO: 38876 - DNA, 101 bp, Homo sapiens
ccctgaaaaacggagacttggatgaggtgaaagactatgtggccaagaatgtgaaagatgttgcagaagtgttccagaagtggctgaagatagaaggaaaa

SEQ ID NO: 38877 - DNA, 87 bp, Homo sapiens
ggcgtagtgcgaagagacgcggtgcgcacgcgcgtgagggatgtcgcggactaagaaaaatggctttgtcagcccaacagataccca

SEQ ID NO: 38878 - DNA, 100 bp, Homo sapiens
gtgtcagatgaatatgagcagctgtcctctgaagccttcccaacttgtctgtgcagccaactgttgtaggggtggatactcacatggaacttgatgaagt

SEQ ID NO: 38879 - DNA, 88 bp, Homo sapiens
ccaagaagaccattcagatgggatctttccggatcaatccagatggcagccagtcagtggtggagttgttagagttggaagcttggca

SEQ ID NO: 38880 - DNA, 74 bp, Homo sapiens
tcaggcacgtcctcgacctcagttgccacgtgcacatgctggtgccttccagttgggcactgccaccctctcgt

SEQ ID NO: 38881 - DNA, 100 bp, Homo sapiens
gattaaattgcttactggtaaacgcgttcaactggcggaagacctcaccctggtacctgacagtgtaaagaaggagctcctacaaagaataagaacattc

SEQ ID NO: 38882 - DNA, 51 bp, Homo sapiens
gaagaatatacccgcacatcccagagagaaaaggaacagttccgtaagctc

SEQ ID NO: 38883 - DNA, 98 bp, Homo sapiens
cgagtgcagccggtgacccggcgagaggcggcgccgctcccaagatgtcgcagacggccatgtccgaaacctacggaaactactttgcttcgcacttt

SEQ ID NO: 38884 - DNA, 100 bp, Homo sapiens
gcggagccacggaactccgcagtttgcgtagacttgaatttcctattcctcggacgatccatgtggaatcccacccctgcagtggaccatgagtcggtaa

SEQ ID NO: 38885 - DNA, 76 bp, Homo sapiens
taaatccagctagagaatggcatgtgcaaagatacagagtgtgtggaccagttgacaaagatccaaactgaattac

SEQ ID NO: 38886 - DNA, 100 bp, Homo sapiens
gtgcctgaccagaaaggaactcccaagcgactgcaggcagaagctgagacggctaagctgccaaatggtgtcacttaccacactggaacatatcaagacc

SEQ ID NO: 38887 - DNA, 123 bp, Homo sapiens
cttaggaagtactcaagaccatgcactctctcaagaatcctcagagccaggctgtagagattgttggaccttcagatggaagtagttacattatagattactatggaaccagacttacaagac

SEQ ID NO: 38888 - DNA, 50 bp, Homo sapiens
ctcagacgcctcacttaggacaaagatatgaatcaggttcttgatgccta

SEQ ID NO: 38889 - DNA, 83 bp, Homo sapiens
ggactacatgtcggaggagaagctgcaggagaaaggaactgtggctgcaccatctgtcttcatcttcccgccatctgatgagc

SEQ ID NO: 38890 - DNA, 90 bp, Homo sapiens
gggaaatcttcatcgccttcgtgtgtagcatcagctacctgctggggctgacgatggtgacggagaatgctcttttcagttgcattagca

SEQ ID NO: 38891 - DNA, 50 bp, Homo sapiens
gttgggaagtccagcttcatcaacaagttcctctgtgacgagggtgcagg

SEQ ID NO: 38892 - DNA, 100 bp, Homo sapiens
gtgaagtggtctgctccggatggctccgcaagtcccccccggagaaaaagttgaagcgttatgtgaagatgcaatgaccggggacacagacaaatatctt

SEQ ID NO: 38893 - DNA, 50 bp, Homo sapiens
ggattttagatatctgccagatgaaaaagaatacagattctgttcatctt

SEQ ID NO: 38894 - DNA, 90 bp, Homo sapiens
gacacccaccctggtacctggtccctggcgagaggggctccatggttcctagaggcaaggaagaagagccaccagtcaaataggtttcag

SEQ ID NO: 38895 - DNA, 80 bp, Homo sapiens
acggatgtcctggaccggagctgctcccggaactggcaggaccttgctgttcaccctgatggtgttcgggtagcctcggg

SEQ ID NO: 38896 - DNA, 101 bp, Homo sapiens
ggaaggtggagatctcctgtgctgcgaccactgcccggctgccttccacctccagtgctgctgcagtgagaagaggagtttgttactttaaacagaggctg

SEQ ID NO: 38897 - DNA, 75 bp, Homo sapiens
gcccggtttggcactgctcctgctggccgcctggacggctcgggcgctggagaaatgctgagagatatcatccgt

SEQ ID NO: 38898 - DNA, 100 bp, Homo sapiens
tgcctcttcctggcccacctcctcttcctcgtggcaattgatcaaaccggacacaaggtcctcggcagcctgatcttctgcttcggcatctggatcctca

SEQ ID NO: 38899 - DNA, 87 bp, Homo sapiens
atgcactacaacaggaaaatcatattatagatggagtaaaggtaattatcagcaggaaattttctgagaagctggtagaatttccat

SEQ ID NO: 38900 - DNA, 100 bp, Homo sapiens
gcagaagtaccacaacagggacacctggttccagctgcagcacgtggacgctgactcggaagtgcagaggaggagacccacccggtggacttgagctcgc

SEQ ID NO: 38901 - DNA, 83 bp, Homo sapiens
atatgtacgacgcggatgagggcaaggcagtttccccggcatgaaccagagtggacttatggcttccagctctccctacagcc

SEQ ID NO: 38902 - DNA, 50 bp, Homo sapiens
ggccggcttcccggaactggaaggtgccagaaccctgtggagcatcatga

SEQ ID NO: 38903 - DNA, 83 bp, Homo sapiens
cgcgcccgcaggacgccccagccaggttttaaaatcaaagatgggaaaatcggagaaaattgcccttccccatggccagcttg

SEQ ID NO: 38904 - DNA, 100 bp, Homo sapiens
tccactgttcctggaggaatccgagaagagcagagcggagggagccccagacacgcggctggctgtcggcaattggattcttccagtacagcccgggcgc

SEQ ID NO: 38905 - DNA, 100 bp, Homo sapiens
gtttcttttggctcacaattatcctagagtgaggacttacatggcccatgaacatggacatgagcatggacatcataaaatggaacttccagattataga

SEQ ID NO: 38906 - DNA, 75 bp, Homo sapiens
ggaaggactcagcaacaaggtatctgtgaaggctggctgccacatccgaggttggggacctgccatggaaattct

SEQ ID NO: 38907 - DNA, 100 bp, Homo sapiens
aggaaaacagttacagatttttgttatcttctggataaatctaagcaactgttcaatgggttaaggtcagcagcaaggacaagatggagtaaaagtccag

SEQ ID NO: 38908 - DNA, 100 bp, Homo sapiens
ctacgtggatatcaccgtgggcagcttcgtgtgcaccacctgctccggcctccttgccggtggtggtgtgcacattgagccccggtatagacagttcccc

SEQ ID NO: 38909 - DNA, 75 bp, Homo sapiens
attagaaactttgcagctgaccattttaatcaggacactgtctcagtgcatcgcccaggcttctacgctgaacgg

SEQ ID NO: 38910 - DNA, 83 bp, Homo sapiens
cagcagcccccggcccgcgctgcccgcactcctggtcctgctcggggctctgttcccaggaagctcttcgtgggcggtcttga

SEQ ID NO: 38911 - DNA, 75 bp, Homo sapiens
gctgaacttcaccttttggctttcttggcctgatgctgaactctcgaggggattgcaaatttttatcctgtacac

SEQ ID NO: 38912 - DNA, 78 bp, Homo sapiens
ttaaagagccatctgtggtgccaattgaaggcatcgactgggcccccgagagtaaccgtattgtgacctgcggcacag

SEQ ID NO: 38913 - DNA, 85 bp, Homo sapiens
actcggaggtcaccgtgcggggcttccggatctatggctccccatggatcaggggggtttgggtattgctatcagcgaagaagat

SEQ ID NO: 38914 - DNA, 97 bp, Homo sapiens
ggcatcagggagaaggactattggacctgctttgaggtcaacgagagggaggaggcagagacctgtctgggccgcagagaggagtctggaggtaggg

SEQ ID NO: 38915 - DNA, 100 bp, Homo sapiens
ccaaggaagccacgtgcagacatctacaaccttcgatctcctgacgagcgcagcccagcctcgaaatgcagaacgacgccggcgagttcgtggacctgta

SEQ ID NO: 38916 - DNA, 101 bp, Homo sapiens
ggcatctctcattcgatccgtggcctccttctccatctacaggaactttatattgctgttggaatatctggagccatccaacatttagctgggatgaaaga

SEQ ID NO: 38917 - DNA, 80 bp, Homo sapiens
agaacaccaggacatcccagagtctgggaaatgcaggatggcccaatggaatcagctacagcagcttgacacacggtacc

SEQ ID NO: 38918 - DNA, 100 bp, Homo sapiens
caagcagctgtccgagtcccaggtcaagagcctctgcgagaaggaattgaatgatctggcacgggaccctccagcacagtgttcagcaggtcctgttgga

SEQ ID NO: 38919 - DNA, 85 bp, Homo sapiens
gccaacctatgttgccctgagttacataaatagcacttttcaggattagaagaggctgtgtatagaaacatacaagcttgcaagg

SEQ ID NO: 38920 - DNA, 82 bp, Homo sapiens
tgtgtctagtgctgcagggatctcggcatgaggccccttctcccaggaggggaggcacgactgcaagatggaggaaggcggg

SEQ ID NO: 38921 - DNA, 123 bp, Homo sapiens
acgtggccgtggtgtgcgaggagacggccctcatcacccgacccggggcgccgagccggaggaaggaggccttagaaaatttacgtgtatacctgtgtgagaaaatcatagctgagagacatt

SEQ ID NO: 38922 - DNA, 82 bp, Homo sapiens
gtatattcagtctctgtgtaatcatctgaagaaattggtcccaagtgtttacgaaaatggggttacagaagatgtgaagata

SEQ ID NO: 38923 - DNA, 75 bp, Homo sapiens
tgactctgatctcaacattttggctgaaattctgtttctggcgtctgcatacgcaagtccccaactcgctgagga

SEQ ID NO: 38924 - DNA, 100 bp, Homo sapiens
gcctcggcagtcctgtttccctgtaagggaagaggaagaacgtctgagaaataaaattcgagctgatcatgagaaggccttggaagaagcaaaagaaaaa

SEQ ID NO: 38925 - DNA, 90 bp, Homo sapiens
ctcaaatataggcattctgatgggaacttgtgtgttaaagtaacagatgatttagttctggatgaaaaagaaagtcggcgtctgttccaa

SEQ ID NO: 38926 - DNA, 100 bp, Homo sapiens
taatctcctaaagatagacagctcaaatgaattggctggagtagagtggcacgatcacgactcactgcagccttgacctccctggctcaagcaatcctcc

SEQ ID NO: 38927 - DNA, 50 bp, Homo sapiens
cccagatccatttacactttacagttcactattatgaagatggcaatgtt

SEQ ID NO: 38928 - DNA, 120 bp, Homo sapiens
agataatgtactactgaagatgtaatgtagctttccactggagtctgggatttgcaattctggagattgaaaatattgaacttcccatggatacaaaaacaaatgaaagaagaggatttt

SEQ ID NO: 38929 - DNA, 51 bp, Homo sapiens
gcgaggtcacctttgcattgcactcaggaaggcaacagcccccaggggagc

SEQ ID NO: 38930 - DNA, 83 bp, Homo sapiens
caatgaacatctgggatgacatcatcacaaatcgaaactaatctggattcactccctctggttgatacccactcaaaaaggac

SEQ ID NO: 38931 - DNA, 100 bp, Homo sapiens
ttctctgctgaccctctctcgtcgccgctgccgccgccgcagctgccaaaatgtctttcatggtgctgattcagacatagaatggctacagaaagacttt

SEQ ID NO: 38932 - DNA, 100 bp, Homo sapiens
ttcagcgcaagcaatttctcagattattacaaaatgaacaatttgagttggatatggaagaggccattcaaaaggtgatgttctgcaccctgaacaccca

SEQ ID NO: 38933 - DNA, 75 bp, Homo sapiens
gccctgtctcctcgcagatgaggctaggcagctggaagagaaagaccgagtgctaaagaagcaggatgcattcta

SEQ ID NO: 38934 - DNA, 98 bp, Homo sapiens
cgcctccattgtttgaccacaacaagggccggattctcacccaggtgcatgtccgttccgaggaatgggatttaatgacctttgatgccaacccatat

SEQ ID NO: 38935 - DNA, 74 bp, Homo sapiens
cagttctggaccagaatacctcaaacgtctaccattacagtggtttctatgcttgagtctgctcaacagcaggc

SEQ ID NO: 38936 - DNA, 118 bp, Homo sapiens
tggccgtccaaaatccaccaaagaaagtgacctctgagaaagtgagccagaaacatgctgagcctttgacagcatgatggaagtggttcattgcatgatattcaactgtcattgccat

SEQ ID NO: 38937 - DNA, 83 bp, Homo sapiens
cggagcagtgatggtgatttatgcctagttgttaaggaagaaccaatatgtgtcacaaagatgtctacacggaactgccaggg

SEQ ID NO: 38938 - DNA, 74 bp, Homo sapiens
gttttagtgattccttcctcaaatgttagcattacaacgtatcactggacaggccatggctccacggtcccggc

SEQ ID NO: 38939 - DNA, 83 bp, Homo sapiens
ccaaggctttgggttttcctctccaaacaaaacagcctacgaggacaagcagaaactcaagcggaccgagatcatcagccgct

SEQ ID NO: 38940 - DNA, 75 bp, Homo sapiens
tcctgtccttcatgcagtctctcattggcttctttgagactgaaatggcagccgttggacataccagatggtcga

SEQ ID NO: 38941 - DNA, 75 bp, Homo sapiens
tcgcatctcgaaggccggccagcaagcttcagaacattaaccaggtggtatttgttggaaatttcttgagaatta

SEQ ID NO: 38942 - DNA, 99 bp, Homo sapiens
agaagatgctgaagctgaggacacacccaggaaaagactcaggacggacaagcacagtcttcggaaggcctttgaagacctcagcaaactaatgatcaa

SEQ ID NO: 38943 - DNA, 75 bp, Homo sapiens
ctctatccaacctattatatccggcagcaaaagtggaccaagaaaccttgacagaaatggtgaaacccagtattg

SEQ ID NO: 38944 - DNA, 101 bp, Homo sapiens
cgggcggctgccgagaaggagggaggggaaacacaaagccggctacgcgctgcgagataaagtggagaattttcatgaagaacatgaaaagaatagtcacc

SEQ ID NO: 38945 - DNA, 90 bp, Homo sapiens
cggagcgggcggctgagacaaaggcgacgaaatgatgtgctcacgggtgccctctgaacagtcttctggtacctctctcttgcctaaaga

SEQ ID NO: 38946 - DNA, 80 bp, Homo sapiens
gcgggcgccaatggggagcagaaggactcggacacaggtcttgttccgagcgagtggtggcaagcccatcgccgtgctct

SEQ ID NO: 38947 - DNA, 100 bp, Homo sapiens
gaatcattctttgtacagaaattgaaaggcttcaaagctagcagttacagaatgtctgaaggggacagtgtgggagaatccgtccatgggaaaccttcgg

SEQ ID NO: 38948 - DNA, 50 bp, Homo sapiens
ggatgtgatgcctgctagccaaaaggcaaattcaacacccaacagcttcc

SEQ ID NO: 38949 - DNA, 129 bp, Homo sapiens
cggcgcgaggacagcgcgtgcccgcgaggagccgccgcgcgcccgcgccctccgcgcgacgccagcctgacatttaccccggtaactgctgggcatttaaaggctcccaggggtacctggtggtgaggc

SEQ ID NO: 38950 - DNA, 50 bp, Homo sapiens
gggaggtgaagttgctgctgttgggtgaactgcgccaggccactgtggcc

SEQ ID NO: 38951 - DNA, 100 bp, Homo sapiens
tttgctcttctggatttagcatcaaccatctggatattgctccttcatgcagaggttgtggtaggaaccacaaggccagagacgctgcctggagatgtgg

SEQ ID NO: 38952 - DNA, 83 bp, Homo sapiens
ggtggaggacatcgacatccaggcgaactcggcctatcgctaccctccgaagtccggtgagaagccctaccactgcaactggg

SEQ ID NO: 38953 - DNA, 78 bp, Homo sapiens
tgaaaaataaagctccaggattagggaaagtcaatgtttgttgctgctggagggcttcaacagttattagaaattttt

SEQ ID NO: 38954 - DNA, 100 bp, Homo sapiens
aactagccctgggtgagaacagcgaagtcttgaagagtggccgggaatatcagaagctctttcctgacattcccatagggtattctgggcatgaaacagg

SEQ ID NO: 38955 - DNA, 75 bp, Homo sapiens
gaagaaatggaaatctggggaggtgaaaatatagaaatgtctttcagagctgaccaactgactgaagagcagatt

SEQ ID NO: 38956 - DNA, 100 bp, Homo sapiens
caatgatgacaacttctgcaaggcggtttctagtgcaaatcccctgctcagggtcttcatccagaaacgagtgtactaatggtcacttgatgtgcgctgg

SEQ ID NO: 38957 - DNA, 121 bp, Homo sapiens
tgtgaacggcgttactgaccagagccccttctcgcctcagttcgcctctgtgaacatcaccaccaaccaggcagattcattccacttaaaacctgaaaacattggaccacacaaagtctta

SEQ ID NO: 38958 - DNA, 97 bp, Homo sapiens
aaaaaagtttcttttaaaggaattgaaaattctcaggcaccaaaaattgtcaggaacagcatatgccatatatgagctggctgtggcttcatttccc

SEQ ID NO: 38959 - DNA, 100 bp, Homo sapiens
caaccttcccagaaagtccaagctcgtggtgtcatggagaaactccagctgggcccagagattctgcagcgggaaaatccaaggcttatttatgccaggc

SEQ ID NO: 38960 - DNA, 75 bp, Homo sapiens
cttggaacgcacagaggaacgagctgagctggcagagtcgttgaaggggcccggccaggactcggggaagggtgg

SEQ ID NO: 38961 - DNA, 87 bp, Homo sapiens
catctcagaccactggatccgcatgcgctcccaggaggggcggcctgtgcaggtacatccagcagtggtcattcgacaacgaaagtc

SEQ ID NO: 38962 - DNA, 90 bp, Homo sapiens
tacgatttaaaacttcgccagaatttgtgctggaggtggtgagagccaactatgacacgctcacgctgaagctgcaggatggcctggacc

SEQ ID NO: 38963 - DNA, 88 bp, Homo sapiens
ttcgagtgtaatttagagagcagcgtggagagtatcatctcaccaaagcatgtcagtgaaaaaaccagtgaatcgccttccaaaccag

SEQ ID NO: 38964 - DNA, 76 bp, Homo sapiens
tgggctgaatgatggatactatggtgctccatttgaacataagtcctattttgtaacggattatgatccaaccatt

SEQ ID NO: 38965 - DNA, 82 bp, Homo sapiens
cctaggtatccgcactgctcaggggaaccacgtgaatgttgagggggcgacacacaagcaggtggtggacctgattcgagca

SEQ ID NO: 38966 - DNA, 80 bp, Homo sapiens
cgtccaatctgagcgtgctgcggacggcgctgcggtacatccagtggtcccaggctgcacccatggcagaaggaggaggg

SEQ ID NO: 38967 - DNA, 100 bp, Homo sapiens
gaggcgatgcagaagcagtgaagggcataggatccggcaaagtcctgaagagggtggatgtggcccatcttgtcctgtatcacctcagtgtttgctgtaa

SEQ ID NO: 38968 - DNA, 100 bp, Homo sapiens
gatcgatgtttcaatattggaagcgctttgatttacagcagctgcagagatcctgaaggagctagacgagtgctacgagcgcttcagtcgcgagacagac

SEQ ID NO: 38969 - DNA, 98 bp, Homo sapiens
ccggacgcggaagaactggcccagcggaggttcccgcttctgaagcgtgggaggcggaagagactgcaggttgtgcccacgtgcctcagggccttggt

SEQ ID NO: 38970 - DNA, 100 bp, Homo sapiens
caagggatcacagagaccatattctacggggctttcagcaaatcaaagccagccaaaattgcctggaaaagagcagtgagaggagtccgggagatgtgtg

SEQ ID NO: 38971 - DNA, 83 bp, Homo sapiens
gacgttggctttggtttgaggaggctgaggaggttgatgataattagaagcatgctttccactgaacttcccgacaacatttg

SEQ ID NO: 38972 - DNA, 78 bp, Homo sapiens
aaaaatgtcaaaccagaccaatgggtgaaggagtctactcttcatcttgtgttgagacttcgtggtggtgctaagaaa

SEQ ID NO: 38973 - DNA, 106 bp, Homo sapiens
ctcaaggacacggtctacaccgacttcgacggagcaggccgggctctcgccatgggtcactgtcgcctctgccacgggaagttttcctcgagaagcctgcgcagca

SEQ ID NO: 38974 - DNA, 75 bp, Homo sapiens
tgggatttcaacctgaaagtggaggctgcgaaaatagctgcagaagaaagatcagcaactggagcctaaaaaaag

SEQ ID NO: 38975 - DNA, 100 bp, Homo sapiens
atgaggagggaaaagaggatgggagagaagaaggcaaagaggatccagagaaggctcctgctgtctccagaccgtgaagggcccagcctctctggagaga

SEQ ID NO: 38976 - DNA, 100 bp, Homo sapiens
agattccatcttttccaactccaaggtgcatctgcagacgcagcaggaggtgaagctgcgcatgacgggcatggcgctgcgggtggtgcgtaccgacggc

SEQ ID NO: 38977 - DNA, 100 bp, Homo sapiens
gtgtcaccgacgcagttgcagaacagggccatctaccaccgttcacagccatgaatgaaccacagtgcttctacaacgagtccattgccttcttttataa

SEQ ID NO: 38978 - DNA, 100 bp, Homo sapiens
gaagctaacaaagcgaagtggccatactcaggagttggcatcctttggaagagttcgtgaaagctttctgcccagagctcctggaccaatgcatcttccc

SEQ ID NO: 38979 - DNA, 75 bp, Homo sapiens
cacaaaccttgtgtctcaatttggctacaaaaggtacgcatagctgctaaattcatcactcatgcacccccaggg

SEQ ID NO: 38980 - DNA, 96 bp, Homo sapiens
acagctccgacaaggtactacgatgatatatattttgattctgattccgaggatgaagacagagcaggtggcgacatgtctaagaatgtgagccag

SEQ ID NO: 38981 - DNA, 100 bp, Homo sapiens
cagaatctgccggatggtgctggccacttgcttgggatcctttatcctggtcatcttctatttccaaagcctggaagaaacgctggtttatcctgcggag

SEQ ID NO: 38982 - DNA, 74 bp, Homo sapiens
cccaagcccccgtgaagatggtgtcctggatgatctccagagccgtggttctggctcttgctgattgaattcct

SEQ ID NO: 38983 - DNA, 101 bp, Homo sapiens
ccgagccggaactgcggcagtctctccctgccaggctcttcatccaagagccagtcttggtgctctgtgttcacctggttcatctgaggagctgcatctac

SEQ ID NO: 38984 - DNA, 85 bp, Homo sapiens
cagtcaggacatattcgatgccatcgtgatggcggatgagaggtggagccccctgagctgcccgctgatctgcagcactggatct

SEQ ID NO: 38985 - DNA, 98 bp, Homo sapiens
ctccctaatgatgatgctcagtttgatgcgtcacactacgacagtgagaaaggaggctcaagcacggacatcagtgaggactgggagaaagactttga

SEQ ID NO: 38986 - DNA, 100 bp, Homo sapiens
aggcgaaatgtggaaaatttcctagaagcttgcagaaaaattggtgtacctcaggtcccactctatgaccagtgggaggatgtgatgaaagggatgaagg

SEQ ID NO: 38987 - DNA, 74 bp, Homo sapiens
tcatttttgccctcaaaagaaatggcaggaaattgagagtcagattgacagaatctgtgaaatgggagaagtga

SEQ ID NO: 38988 - DNA, 51 bp, Homo sapiens
aagcaagtgaatacgagtcagaagggtctccgtctctccaccgggggcttc

SEQ ID NO: 38989 - DNA, 75 bp, Homo sapiens
tccccgatctacggggctgacatcagcggctctttgtatgatgacggccgcctgggcagaatgtcacgatggacg

SEQ ID NO: 38990 - DNA, 91 bp, Homo sapiens
gtgattgaaccagacactgatgctcctcaagaaatgggagatgaaaatgcggagtggaatgcagtagccctctgggcctgggatattgtgg

SEQ ID NO: 38991 - DNA, 82 bp, Homo sapiens
cgaagaagtgcttcagcgggccaggaagcgcatccaggagcagaaaaatatggctcaggagactaaccagaccccggggccc

SEQ ID NO: 38992 - DNA, 100 bp, Homo sapiens
gatagtcttgggacccttgcatggtgtttcaaagggtggtgaagaactaagcaacgcacctcttgctttttcctccaaagtatgttatgttaagtttcgt

SEQ ID NO: 38993 - DNA, 83 bp, Homo sapiens
gcagctgttgtcggcctcctgctgatcaatgtccgagttaccaccatggatgcagagctggagtttgcaatccagccaaatac

SEQ ID NO: 38994 - DNA, 100 bp, Homo sapiens
tgctctgtaccaactgccggaaagtgctgcggaaggaatcttctgcggcttgtccatagtgtgaataaaaactaaatcacatctataattctactgaact

SEQ ID NO: 38995 - DNA, 87 bp, Homo sapiens
cagtttttctccattgattatgatagcagtgggcttttcacagtgggctttactgtgttgagatgtccggtctgtgctacgacagca

SEQ ID NO: 38996 - DNA, 82 bp, Homo sapiens
ctggaaccatgacaggcatgttgtataaatgtacaggtttccagccaatggattctggtcaactggtggagattggctgaca

SEQ ID NO: 38997 - DNA, 100 bp, Homo sapiens
tggctacttcctgattaaacccactctccacagtatagtggaggattacaagccaccgttctacgatgtggttcccaatgacccaagttttgaagatatg

SEQ ID NO: 38998 - DNA, 100 bp, Homo sapiens
gtggcccagactgtgaacctgctggccgagtggctcattcagacagaggatcagcactgccagtggagatgggcgtcactactgctaccctcatttcacc

SEQ ID NO: 38999 - DNA, 100 bp, Homo sapiens
ctcacgattgagtgtcaaagaagttcacacaaaagatgttggacaatttctacaattttgcttcatcatttgctgtctctcaggcccagatgacaccaag

SEQ ID NO: 39000 - DNA, 82 bp, Homo sapiens
gcccgcttcctggaatggcaagcgcagcaacaacagagagcacgtgggggatatgagactttctactcggaatatcctgagt

SEQ ID NO: 39001 - DNA, 100 bp, Homo sapiens
cggaggggagggggcgttagccccgcgcagccgccggcgtcgccgccatggacctagatgaagactggcccatttgcagagcactccaaccagctgtgga

SEQ ID NO: 39002 - DNA, 50 bp, Homo sapiens
catcatccgctatgcaattgggggggccgtctgccctgcccagagctgtg

SEQ ID NO: 39003 - DNA, 51 bp, Homo sapiens
gcgacgagcaggtggcggcggctgcagtgtgtgatccagtcttgggtgaca

SEQ ID NO: 39004 - DNA, 74 bp, Homo sapiens
tcacggaggacggcaggactgtggccgtgggggacatcgtctggggagttcatgatcaagtgttgcccacacca

SEQ ID NO: 39005 - DNA, 98 bp, Homo sapiens
ttggttgcagctgggtatttcagggcaagaattaaaggcttatcaccctttgacaagtttgatgatgtatggcctatggacccccatcctagaaccag

SEQ ID NO: 39006 - DNA, 83 bp, Homo sapiens
ggatggcctcgctcccccctcacctccacaacctccccctttccaatctggcaatcccagaatagcctaacatggcagaccag

SEQ ID NO: 39007 - DNA, 83 bp, Homo sapiens
gttcgaactatgtggaggagatgtactgtgcttggctggaaaaccccaaaagtgtacataagctgtttgcagacaaggtccca

SEQ ID NO: 39008 - DNA, 96 bp, Homo sapiens
cgctggaaaaactccaacagcttcatatggacagatggacttcaaatgctgtttgtattccagagactagcgggtaaactggaaacagtgaaatgg

SEQ ID NO: 39009 - DNA, 83 bp, Homo sapiens
attccaagtaactcttatttgctaaatctggtgtctagtgtcaccatgtcgaagaatatgttggagacatccccacagagctt

SEQ ID NO: 39010 - DNA, 51 bp, Homo sapiens
tttcccgctcgcagagagccggcttgcagcacaaccagtgtctctgaagaa

SEQ ID NO: 39011 - DNA, 75 bp, Homo sapiens
ccagtgggctggggactcacggccgggacactcagggcagggcagcgggtggcatgagacgtgggaacatgggcc

SEQ ID NO: 39012 - DNA, 75 bp, Homo sapiens
ctgctccaggaccaaaggatcacccacatcctccacgtgtccttgccccaggtgctaaagagctgtgcagaattt

SEQ ID NO: 39013 - DNA, 90 bp, Homo sapiens
taccacgccgtcaaggaccggcacaaggacgttctcaagtggggcgatgagaacaacgactatcgtctattccacaagatgagtaacagc

SEQ ID NO: 39014 - DNA, 113 bp, Homo sapiens
tcgaaggcgacttcaagacgcggcccaaggtgtcccttggcggcgcgagcaggaagggccctccagaatttccacagcatacacctggacctgttcccaacagtttcagccag

SEQ ID NO: 39015 - DNA, 74 bp, Homo sapiens
tgggcacaaaaactaccattcgcctgatgaactctcagaaacgatcttcaagacacagaaataagtccaagaca

SEQ ID NO: 39016 - DNA, 100 bp, Homo sapiens
gagaggtaaacagaacaccaggacatcccagagtctgggaaatggtttttcgttggaatatacgttgcacatttatggcgattctgagtgtgagggcaga

SEQ ID NO: 39017 - DNA, 100 bp, Homo sapiens
aatgttggcttatacacctctggatgagaagagccttgctttattactcaattatcttcacgatttcctaaagttcctcatgagagtgctggactcctac

SEQ ID NO: 39018 - DNA, 100 bp, Homo sapiens
aacatttctgagtcctcacgaaactatttcaatagggccagatttgagtgtgtgaatttttgagtgaaacctggaacccaaatgagaagaaatctgcaag

SEQ ID NO: 39019 - DNA, 80 bp, Homo sapiens
aaaacctaaccatgaagacttgaacttaatacagcaagaaagaccatcaagtttaccatactatactggcaattgctgga

SEQ ID NO: 39020 - DNA, 90 bp, Homo sapiens
gacagagttttttactgatctaattaccaaaatcgaagaaatgtctcccgaactggagaatacttatctctggcgcacatcactatattt

SEQ ID NO: 39021 - DNA, 50 bp, Homo sapiens
tgaagtgcagaggtttttttctggttcgctaagctcttgctccgcctgcc

SEQ ID NO: 39022 - DNA, 100 bp, Homo sapiens
tcggctgcgagctcctcaagaatctcgtgctcaccggtttctcccacatcgacctgctggtggagctgtctaaggctcaagatatagaagcaggagatgg

SEQ ID NO: 39023 - DNA, 130 bp, Homo sapiens
ctttttaattagagaggggtctgggtgctgagcttcccatcaggaagaaggggctgtcgtgctgaagtcctgagagatcctgaaggagctagacgagtgctacgagcgcttcagtcgcgagacagacggg

SEQ ID NO: 39024 - DNA, 100 bp, Homo sapiens
tggcggggcccgagcgctggggccccctgctcctgtgcctgctgcaggccgctccaggttatgaagacagtatggagtttccagaccatagtagacattt

SEQ ID NO: 39025 - DNA, 75 bp, Homo sapiens
agtgtgccacacaggtagccctggacggcattcagtgttttgaagaatggctacgtgactgtcagtgagatcaaa

SEQ ID NO: 39026 - DNA, 101 bp, Homo sapiens
catttggatcagctcctcctttgtgccttttatatcatggcaaagatcccggagatcgcccgccatggctttacttactgcggccgcccggctcttgggaa

SEQ ID NO: 39027 - DNA, 100 bp, Homo sapiens
aaaagttttggaattagacagtgtgaaaagtgaaattgttccactgttcactagtctagcttcagatgaacagggcagcagaatcaactgaggaagtatc

SEQ ID NO: 39028 - DNA, 90 bp, Homo sapiens
ggggagctggccagcgagagccagggctccaaagaactcggagctggtgagcaggctgctgcacctgcacttcaaggatgacaagaccaa

SEQ ID NO: 39029 - DNA, 89 bp, Homo sapiens
cggcctccgtgctgcgaagtatctcgctagccctgcgcccgactagcggcaaagtggaagatgctttctacaaaggtgaactcaggctg

SEQ ID NO: 39030 - DNA, 88 bp, Homo sapiens
catcgtcaaagaagaagaaaacaaaggtagaacatggaggatcgtcaggctctaaacaaaattctgcaactttcatcctttgaaacgt

SEQ ID NO: 39031 - DNA, 100 bp, Homo sapiens
caggctcctggaaaggaccgtccacccctccgcgctggcggtgtggacgcggaactcagcggagaaacgcgattgaggtttctcttaaggttctgcaggg

SEQ ID NO: 39032 - DNA, 100 bp, Homo sapiens
gtctgcttcaggaagaaagtgcctgccattcttatcatttctaagcaggttcatgccagcccagaacagagaatcagttgatttggagcatatgcgaaca

SEQ ID NO: 39033 - DNA, 100 bp, Homo sapiens
cggacactggctgcagctgcccagcaaggattcctcctccctccaggcttcagctataaggctggatgtagacatggatttgattgacatactttggagg

SEQ ID NO: 39034 - DNA, 75 bp, Homo sapiens
agttttcatatagattggcctccagggcagacagcaggccgaaatagaactatttgtgaacagacttgattcagt

SEQ ID NO: 39035 - DNA, 101 bp, Homo sapiens
actcaccagcgtcctgaagcttttgatcaccattggctgggaaggaaaaacagaatcagctgttccctgcgaaagtcaccaggagactaaagtccatcaaa

SEQ ID NO: 39036 - DNA, 97 bp, Homo sapiens
aggctcctccctgcgacagaccttcagcttcctctcgggcatgaccggaaaggccaaggaattacatgaacgacagccttcgcaccgacgtcttcgt

SEQ ID NO: 39037 - DNA, 101 bp, Homo sapiens
tggcccaccccttctccttggccgtctttgaggtcaccttccgcaaccctgtcattgagaggattcctcggctccgacggcagaagaaaattttctccaag

SEQ ID NO: 39038 - DNA, 100 bp, Homo sapiens
gaatatcaagaggaggagttgttggtgcccctgggcgctgggattgctctagcctgtaagtataatggaaaagatgaggtctgcctgactttatatggcg

SEQ ID NO: 39039 - DNA, 82 bp, Homo sapiens
aatctgagggtgccctcaatgagcacatgaccagcttagcttctgtcctaaagttccagttcctagcagatttaatagacga

SEQ ID NO: 39040 - DNA, 100 bp, Homo sapiens
caccaacaagaacctgctttaaatttccatggcaatttacaacccccatactgtaccaggcaagattgagaggatccagaatccagatctctggaatagc

SEQ ID NO: 39041 - DNA, 89 bp, Homo sapiens
ggaaaaaggccctcttcaagcctggtcttatcgaatgttacttagcctccaacagtattcgagaagcaatggtaatggctaacaacgtt

SEQ ID NO: 39042 - DNA, 100 bp, Homo sapiens
caggttccgaaagtggctctacaaacccaaggaaattgacaatggcccttcagctatgctaggtctataatgggaagtgtcacagttcggtatttctgtt

SEQ ID NO: 39043 - DNA, 115 bp, Homo sapiens
gtcctggccaacctgctgctggaggaggataacaagttttgtgcagattgccagtctaaagacaatgcagatcttcgtgaagactctgactggtaagaccatcaccctcgaggtt

SEQ ID NO: 39044 - DNA, 126 bp, Homo sapiens
ctcagaactgttccttcagccaaagaaacaagccgtggaataggtgtatcaagtaatggtgcaaagcctgaagcgcattggagtgactgtctggcatcaccaagatgacactccacgccacccggg

SEQ ID NO: 39045 - DNA, 100 bp, Homo sapiens
cgccagcccgggccctcggcagggaggatgacggagctgcagtcggcactgctactgcgaagacagctggcagaccatcctcatgtcccccaaattccac

SEQ ID NO: 39046 - DNA, 100 bp, Homo sapiens
tccaattttcctatttctgaagagactataaagcttctgaaagatttgaaaaggtttatactcataacctatattacctagctcaagtctaccagcatct

SEQ ID NO: 39047 - DNA, 49 bp, Homo sapiens
cagaacgtgccatggagacgcttaacggcctgtcatctttacttcagag

SEQ ID NO: 39048 - DNA, 100 bp, Homo sapiens
taacaataagatatccgagctgaagaatggctcattttctgggttaagtctccttgaaagatttacctggtgtgtaagaggaagctggagagtaagaagg

SEQ ID NO: 39049 - DNA, 83 bp, Homo sapiens
ccaaatcggaagtgaattcggattgtttgctgctggatgaacatcgtactgagcaaaagaagttaaagctcctccaaaagaaa

SEQ ID NO: 39050 - DNA, 100 bp, Homo sapiens
actctgcaccgctaggccgtccccgaccttgcctgaacaaggtcagcccaaggccaaccccactgtcactctgttcccgccctcctctgaggagctccaa

SEQ ID NO: 39051 - DNA, 132 bp, Homo sapiens
gctgctttttcaatgagaagaatgaacagacctagtgggcgttgcctttagacccagatggcgttcaggaagtggcttatattcactcaaaccagaatgtaattggatcgagcaaagctgaaaatcacatga

SEQ ID NO: 39052 - DNA, 75 bp, Homo sapiens
gctgaggccatgtcaggagacggagccacggagcagacagttttaatggaccagtctcgcttccacgagctccag

SEQ ID NO: 39053 - DNA, 75 bp, Homo sapiens
caggcacgcgccaccactcccaggaatcagagatcattgatttcttcctgggggcctctctcaaggatgaggttt

SEQ ID NO: 39054 - DNA, 85 bp, Homo sapiens
cctccgtgcccgctgacattatctcatccacagacaaacttggaatactttcaagtcatcccaaatatggttccatccctaaact

SEQ ID NO: 39055 - DNA, 84 bp, Homo sapiens
gcttcatcaaaaatagtgatagctttgataagagtgtggccatctggggccgtgtggtatttgccactcaggagacatgtccct

SEQ ID NO: 39056 - DNA, 78 bp, Homo sapiens
ggtgttgaaagtgaaatgtcatgcctctgaaaatgaagcctacaacacagcagtcccctcaggatgagcaggaaaagc

SEQ ID NO: 39057 - DNA, 83 bp, Homo sapiens
ctggagcagaaggtgcaggaggtgctgaaggccagacaaggcgaccagccagctcctgttggagacagattgggagtccattt

SEQ ID NO: 39058 - DNA, 82 bp, Homo sapiens
ccagcccctctgtacctcgggggcctgcctggtgtgagatgcacaatgcgaaacctaggccccagcttttacaccatgatgc

SEQ ID NO: 39059 - DNA, 83 bp, Homo sapiens
gcatgcttgacacacatcataaactctgcacattcattctcaaaaacccacctggcaaccacacctccaaatcaaggaaggcc

SEQ ID NO: 39060 - DNA, 83 bp, Homo sapiens
ccttgccagaatttcctgcgctgttccacctcattcaacttcagccatcatcgtctacagactgccgtggacctggaaatgca

SEQ ID NO: 39061 - DNA, 106 bp, Homo sapiens
cccacttgcatcaagctgggcatccagggctcgtacttctgctcgcaggttgctgcagcaactggtcacacagtagtgttggtagaccagacagaggacatcctgg

SEQ ID NO: 39062 - DNA, 74 bp, Homo sapiens
aaaatgtcaacaaattgatgggtgacgcatccaaagaagacattgacactgctatgaaattaggagccggttac

SEQ ID NO: 39063 - DNA, 101 bp, Homo sapiens
tcagtccgccgctcaccccgcggccgcaccttcccgccttctcagcaaaatgatgcttcaacacccaggccaggtctctgcctcggaagtgagtgcttctg

SEQ ID NO: 39064 - DNA, 75 bp, Homo sapiens
tgaggacctgcaccgccaagccaagctcaacctcaaatcagtactgagggccaaagtggaacaggtgaagttcga

SEQ ID NO: 39065 - DNA, 100 bp, Homo sapiens
gggagcttggggggcgcctgctgccaagggttggaaaagagactgttcaaaccactgaggatcagattttgaagagagatatgccaccagcatttattaa

SEQ ID NO: 39066 - DNA, 96 bp, Homo sapiens
gccactttgcattgactggaaacaatggcatttacagaaagagtcaacagcagtggcaacagcacagaagttgggcctcattgggcctccaccacc

SEQ ID NO: 39067 - DNA, 97 bp, Homo sapiens
gaggaattcagcgatttatacaacgaggttggtcaaagaaaaagtgatgtatgaaaaagaggcaaaacaacaagaagaaaagattgaaaaaatgaga

SEQ ID NO: 39068 - DNA, 83 bp, Homo sapiens
agctcaccgacagtgccctgagggccttcgagagctaccgcgccagacagtcaccttcaggccattcagaggaggaaagagag

SEQ ID NO: 39069 - DNA, 100 bp, Homo sapiens
cacttgagccacgtgcatgaaccaaacccacttcgttcaagacaggtgtttaagcgacagtcattttgtttactcattcagccctgttgcaggtcccaat

SEQ ID NO: 39070 - DNA, 104 bp, Homo sapiens
caagacactgaagaaagcatcgtcctaggaatggatttctcctctaatgacaggctgtctcctctttgttgaagatggttccttcttcagaaaggcaaatgttg

SEQ ID NO: 39071 - DNA, 75 bp, Homo sapiens
ctcacgttcatcatggtgcctggctgccaggcagattgtcctgggtcacataatgccagctgagcgtaaaaagcc

SEQ ID NO: 39072 - DNA, 98 bp, Homo sapiens
acgctaagttgctgatcgtggcggctctgacgcccgctctgcggcttcggtgtttgaacaggccacagtccaggagcgcttacattcaggagctccgc

SEQ ID NO: 39073 - DNA, 97 bp, Homo sapiens
tccttggcctctcctgggatcggcccaaggccagttctccgcaggcccagattattcatcagcatggctacctgctaatgaatcattgtggcaggcc

SEQ ID NO: 39074 - DNA, 75 bp, Homo sapiens
cggtaatgctggtggtctgcatcaccaccggatcaacttcgacaaatagaatactcccccagttgcaagaggcgc

SEQ ID NO: 39075 - DNA, 74 bp, Homo sapiens
gtctcccagtgatcaaaaagagagtggttgtgattaagcctgatcaagatgacaacctcccaaaagcaccgaga

SEQ ID NO: 39076 - DNA, 50 bp, Homo sapiens
cttgaatggcgactagatgtacagcgagttgaagaatttctcagcaaaga

SEQ ID NO: 39077 - DNA, 85 bp, Homo sapiens
gcgggagctggacggcgagcgcgagcggcgcgagaaaggcgccatgttttggaagtttgacctgcacacaagctcgcacctggac

SEQ ID NO: 39078 - DNA, 51 bp, Homo sapiens
gaaaagcctccttctggttccaaatgggtcccctcctaaccgcaagcgtcc

SEQ ID NO: 39079 - DNA, 75 bp, Homo sapiens
aaagctgcttccagtgggaatccacattaagaagtacaatagcattcgcgtactatactggcaattgctggagaa

SEQ ID NO: 39080 - DNA, 83 bp, Homo sapiens
cagcggcctcggcctccccttggattcagacgccgattcgcccagacaatgcagatcttcgtgaagactctgactggtaagac

SEQ ID NO: 39081 - DNA, 97 bp, Homo sapiens
cggccggccgacccttcctgtcgctgacggcgactgcgggaggccagcatttttgaaacgttggggttgttggagtggttggattttccctggaatt

SEQ ID NO: 39082 - DNA, 100 bp, Homo sapiens
gaaggcagccatctttagttcgtctttcctagagagtatttttcagtgctgtacaagcgtcttgaattactctggtagcttttccagaaagacccatgac

SEQ ID NO: 39083 - DNA, 100 bp, Homo sapiens
tctgccgcaccaggctcatcctgtccatcgtgtgcctgatgatcacgcagctggctggcttcagtggaccattaagtgggcagaccaacatccacctcag

SEQ ID NO: 39084 - DNA, 90 bp, Homo sapiens
tcacaatttctacagcagagaccttgagggatatctttcttcactcctcttcacttcttcatccaaaagaaactcttccttcaaaacctg

SEQ ID NO: 39085 - DNA, 82 bp, Homo sapiens
ggatcgtgaaggacgccagcatcatacaccggctgttcgaggccttgactgtagaatggcaggaccctgagttgatgagaga

SEQ ID NO: 39086 - DNA, 75 bp, Homo sapiens
aaccgtagatgctcctgtcgctccttcagacaaagagtgggttcagatggctccaactctattttctaaatttat

SEQ ID NO: 39087 - DNA, 75 bp, Homo sapiens
acagcatggacatgaagttcacctactgtgatgacagtctgcaaaatgaatgttcaccgtcgatgtgagaccaac

SEQ ID NO: 39088 - DNA, 51 bp, Homo sapiens
ctgatcttcccttcctacatgcttcgggctcagaatcaggttctgaaaaaa

SEQ ID NO: 39089 - DNA, 83 bp, Homo sapiens
catggatgctgcatggctggaactgaccaatgaagaatttaaggagatgggaaaattgcctaagaattatgacccaaaagtta

SEQ ID NO: 39090 - DNA, 97 bp, Homo sapiens
agctgagccagttatactgttccctggtgtgggaaagcactgtcctcctctctctgtgtaccccaaacaggtacgttggaggtcatcgaacaagtaa

SEQ ID NO: 39091 - DNA, 97 bp, Homo sapiens
gaaaaccttacagttgtggcattgaatgttcagtatcgcttcctttctgcacacgaggcatactgttgagttttagaaagagcgttttcgctacgta

SEQ ID NO: 39092 - DNA, 97 bp, Homo sapiens
ggtgtatcaccaaggcctcaagattgacctagagtctagggacaggaagatggttggcgacgtgaccggggcccaggcctatgcctccaccgccaag

SEQ ID NO: 39093 - DNA, 100 bp, Homo sapiens
ttcttagtcagtgtatctaccgtcatcgtaaagattatgacaaatcacaacttgtagagaaatgttgaaggaattgaaccagcaacgcagagcgaaagcg

SEQ ID NO: 39094 - DNA, 75 bp, Homo sapiens
gttagtggattaaaatctcccaagaggaatgacaaacaaccagctcttcagcccgcctggccagccgcgtctgtg

SEQ ID NO: 39095 - DNA, 90 bp, Homo sapiens
cgactgggaggagcgccggaacgccgaggcccagggattgtcaatgaggcagatcagattccgatttgacgggcaaccaatcaatgaaac

SEQ ID NO: 39096 - DNA, 100 bp, Homo sapiens
cagaagtggaaataattaatgaccgaacagaaacccctcctcccctagcttcactcaatgttagtaagaaatacatgctacaggatttaactatcagaat

SEQ ID NO: 39097 - DNA, 82 bp, Homo sapiens
gatagggatgcagaggatcagaaccggtacctggatggcatggtggctatggaccgccccctgcaggaagaggagccccccc

SEQ ID NO: 39098 - DNA, 98 bp, Homo sapiens
cagatgcacacccttcctgggtgatggtaaaaatgcatttgcaaagggagaaaatgaaggccaaacagaagcaggctccagcttctgcaaaaacttgg

SEQ ID NO: 39099 - DNA, 89 bp, Homo sapiens
ggagatatggcgcaactgcggcgcgaaacaagctcacatcttcctgtgggaaaccttctagcaacaggatgagtctgcagtggactgca

SEQ ID NO: 39100 - DNA, 75 bp, Homo sapiens
gaagggagtgtcggacaccatgacgagagcttgacagaaagaatttactttcaggttttcttacctaaagggagc

SEQ ID NO: 39101 - DNA, 46 bp, Homo sapiens
ccctgagccgcccctacacccacagttgatattcactgatggactc

SEQ ID NO: 39102 - DNA, 74 bp, Homo sapiens
gaggaggtggagttgctgcccttccggagtccgccccgtgaggagaatgcttttcctccgcaaccatgtctgac

SEQ ID NO: 39103 - DNA, 75 bp, Homo sapiens
ccacctcctccgactgtcagcactgctccacctctgattccaccaccggacataaccagtgcggtgcaatccaag

SEQ ID NO: 39104 - DNA, 74 bp, Homo sapiens
ggtgcgtctgccgcagagtcggcacctgaaggacatggagagcgtttcccaaagtgtattctgcggaactagca

SEQ ID NO: 39105 - DNA, 75 bp, Homo sapiens
ccaggccaagagggatccttcacccgtgtctggctgcctgctgtttcccggggagatcatgaaacgaggtcgcct

SEQ ID NO: 39106 - DNA, 75 bp, Homo sapiens
gctacaggactgtggctggaaatatcctgaccgcactctgctgaaaggtgtccgcaatgttgccagtgtctgtct

SEQ ID NO: 39107 - DNA, 127 bp, Homo sapiens
caaaatctgccaagaagaaaaagagaagaggccagatctatatgcattggctatggggattccattactggttgaactatggcacaaggataaaatgagtaaagatttacttctgggaattgcgaga

SEQ ID NO: 39108 - DNA, 88 bp, Homo sapiens
cagcatcttggctgaccttgagtgcagctccccctataagcctcggcctccacagacccaacatgagtgaagtttcctgcaagaaacg

SEQ ID NO: 39109 - DNA, 100 bp, Homo sapiens
caggcgtcaaaccccagagaaatatctgcaatttgtcatctatttgcaatgactcaggacacagcattgttggttttgccatgtactattttacctatga

SEQ ID NO: 39110 - DNA, 100 bp, Homo sapiens
ttcttctgcaggtggatcagaactgtgttcgcaattcttacgatgtcttctctttgctacgctaaacctattcgtcccgggcaacatccagcagcttctc

SEQ ID NO: 39111 - DNA, 90 bp, Homo sapiens
atggagctgaaaaacttgatccaggccaggtggtcctgccatcatggctgtcctctgcaaaggtctcctcgctcattgagagaatctctg

SEQ ID NO: 39112 - DNA, 78 bp, Homo sapiens
agtttcagggagaagacacggtcgtgatcgcggtaccagcaactaaggtttcagagctgaaccctaatgcagaagtgt

SEQ ID NO: 39113 - DNA, 73 bp, Homo sapiens
ggctggacctgttcgagatcagccagccgaccgagtgtggggatgtgccaactgccgagtggttttgtccaac

SEQ ID NO: 39114 - DNA, 98 bp, Homo sapiens
ggcaccagcccgaggctacaccgggaggaagccgcccgggcacttcgcggccgagagggaaaacttgttattggacacaatatgctcttggacgtcat

SEQ ID NO: 39115 - DNA, 110 bp, Homo sapiens
accgcaagactgtgggcgtggagccggcagccgacggcaaaggtgtcgtggtggtcattaagcggagatccgatggagcagcatattgtatgggacgtatgaattctgac

SEQ ID NO: 39116 - DNA, 98 bp, Homo sapiens
ttcccaggtcctcaactttgaagagatcgactacaaggagatcgaggtggaagaggccagtcatggtttcattactcagcacccctgggctagcttga

SEQ ID NO: 39117 - DNA, 87 bp, Homo sapiens
tatacctgcctaccttgcagagaccctctattatgctatgaaggaatcgacttctatacctccattacccgtgcccgatttgaagaa

SEQ ID NO: 39118 - DNA, 90 bp, Homo sapiens
ttccccgcgctgcggcctggcggcttccaggcgcactaccgcggacttctcccacgtggaaggccttctttctcaatctcttcgcctgtg

SEQ ID NO: 39119 - DNA, 90 bp, Homo sapiens
aggctgcgctaccggaatgtcatccagcgagtgattaggatattttggaactcttagaaaaaagagtgaagtcaagattttctcaccggc

SEQ ID NO: 39120 - DNA, 100 bp, Homo sapiens
acgtgtaccactacgaggtggacatcaagccggataagtgtccccgtagagtcaaccggtggtgatctttgtgaagtctgtgcagcggtgcattgccttg

SEQ ID NO: 39121 - DNA, 100 bp, Homo sapiens
gatgaatcacccaacatgctggtgtacagaaagagactccagtacttcacttatttgggaaaaaattgaagagccatccatagattgtcatgaatttgag

SEQ ID NO: 39122 - DNA, 50 bp, Homo sapiens
ggacacttctctgtcgtcacagttagatactctggatgaatattttgaat

SEQ ID NO: 39123 - DNA, 50 bp, Homo sapiens
gacctcaacccaggagttaaaaagagaagagcaagttagtaccttgtacc

SEQ ID NO: 39124 - DNA, 51 bp, Homo sapiens
gaaggacagcctcttctcaatgcttattctaccagattccatgaaagtatt

SEQ ID NO: 39125 - DNA, 101 bp, Homo sapiens
gtgacttcacttttgagtgcaactgccttccagctcgatgcattctatttctcatcatttggctcataactggaggaaggcaccacttttggttcttgcca

SEQ ID NO: 39126 - DNA, 100 bp, Homo sapiens
aacgatcctctcatctcagcctccaaaagtgctggcattacagcctagatattatcctactgaagatgtgcctcgaaagctgttgagccacggcaaaaaa

SEQ ID NO: 39127 - DNA, 101 bp, Homo sapiens
gtttgtcattaaacccatcgacaagaaggcacctgggtatagaacaggctatgcttacaggcatcctctcattcgagagaagcctaggcacaagagtgatg

SEQ ID NO: 39128 - DNA, 100 bp, Homo sapiens
ccacgacccatccttgaagaaggtaaaagagaacctgctttcatgcaagatgctgctgcactgcaaacgggatgagcttcggaaactgtggattgaagga

SEQ ID NO: 39129 - DNA, 93 bp, Homo sapiens
cggacggtacttctgccactgctgctccgtggagatcgtcccgcgcctgccggtccgcgggagagctgtggggcttggtgagtgtttcgtggc

SEQ ID NO: 39130 - DNA, 75 bp, Homo sapiens
ccaagacagagcgctactcctggcagtgcgtcaatcagagcgtcctgtgcggtgctggagaatctggtaaaagca

SEQ ID NO: 39131 - DNA, 100 bp, Homo sapiens
tgccctgagacggtgtcccgccgaaaggttcttgggtgtctctggggagtccctgggccagaccttcctccagactccagcccacctcttcggagcagct

SEQ ID NO: 39132 - DNA, 74 bp, Homo sapiens
tcgcgcccgccgccgcccgtccccagaagtatgatgggcatcttccaatagaaataaaagctgttcctgagggc

SEQ ID NO: 39133 - DNA, 75 bp, Homo sapiens
aaggaaaaacagatgcatgccagtgtgtttcctgtaacaaatcgttcaagaaactctggtcccttcatgaacata

SEQ ID NO: 39134 - DNA, 96 bp, Homo sapiens
cgggacacacagcaggtgaccaccctccagctacccccggtgtcaacattgcatacttgaatactggcatcggaggacacaaaggccccagtttgg

SEQ ID NO: 39135 - DNA, 80 bp, Homo sapiens
gtgcctattgtgacgtgcccaatgtctcttgtgacatagcagcctccaggagaggagtacttcttgcaagcagagctgac

SEQ ID NO: 39136 - DNA, 90 bp, Homo sapiens
ggtcaaactcttctcaggccctaaacatgccatgcatgcgagtaaccagctcataaatcacatcgaacagtttttggatactaatgaaac

SEQ ID NO: 39137 - DNA, 82 bp, Homo sapiens
gccggcaagagctcggtgctggagaacttcgtgggccgctcaccatggatgatgatatcgccgcgctcgtcgtcgacaacgg

SEQ ID NO: 39138 - DNA, 100 bp, Homo sapiens
ttttcaagtatttaaggaccatttatttcaaaaggtggtattaaagataatcaaacattatcaagaagaaggacaaggaactgaagttgttcaaggagtg

SEQ ID NO: 39139 - DNA, 100 bp, Homo sapiens
cagcttttgatttattaaatttaaatagattagtaactggcatagacaactatgggcagaaaaacacaccttgactttagtcagatacatcactgtctgt

SEQ ID NO: 39140 - DNA, 51 bp, Homo sapiens
gctctaagtacactcgtcttgaatagagctccctctttgcccactagcagg

SEQ ID NO: 39141 - DNA, 96 bp, Homo sapiens
aaactgttggagtttatatacacaggaactttaaatcttgacagggttcaggataagtttgaggtgctgaattacacaagcattcctatctttctc

SEQ ID NO: 39142 - DNA, 80 bp, Homo sapiens
ggactgagtcctgcaggacacaggggtgagcccctccagactccgaataggagatcaagagtttgattcattgcctgctt

SEQ ID NO: 39143 - DNA, 75 bp, Homo sapiens
atttgaagagatgctggaacatgcagagtctgcacaatgtgtaatgctgtgtcatggagctaaaatcggattttt

SEQ ID NO: 39144 - DNA, 100 bp, Homo sapiens
gggattttccagcctgggcgctgacgccgcggacctccctgcgaccgtcgcggaccatgggcgacaaagggacccggatattgactgggtacagacagag

SEQ ID NO: 39145 - DNA, 101 bp, Homo sapiens
aaaagacagtgttctgctttcatggagttcacagaagagtcgaggagattcgcttcaagctcagcttatcaatatgggtgttattcctaccttagtgaaat

SEQ ID NO: 39146 - DNA, 50 bp, Homo sapiens
aaggaggtgacccaacagggacaggaccagtcctgcctctgttgtagaag

SEQ ID NO: 39147 - DNA, 101 bp, Homo sapiens
caagcaccacgcggcctacgtgaacaacctgaacgtcaccgaggagaagtaccaggaggcgttggccaaggggaggtggggaagacagggctccagctacc

SEQ ID NO: 39148 - DNA, 83 bp, Homo sapiens
gggatggcgtgcagcgcaaccacgagacggccttccaagcctcccgcgacgatgcccctcaacgttagcttcaccaacaggaa

SEQ ID NO: 39149 - DNA, 75 bp, Homo sapiens
cagaagtctggtccccaaggctctggagccatacgtgacagaactgtcagaccttcagcagcctcagctgcctga

SEQ ID NO: 39150 - DNA, 71 bp, Homo sapiens
ccggttttatgagtgggaaccatttgcagaaggaggaaggctgaacaaggacctgcgacattttctcaatc

SEQ ID NO: 39151 - DNA, 97 bp, Homo sapiens
ctgatccgcgagctgcatcgcgcgcccgaagggcaactgcctgccttcaacgacattcagtcagaagaaggctgctattgaaagagagtatgcacag

SEQ ID NO: 39152 - DNA, 90 bp, Homo sapiens
cctggctcttgccctcatcctggttctggaatcctcagttcaagaaccaatgaggccattcttctggcactttatgaagctgttcattta

SEQ ID NO: 39153 - DNA, 100 bp, Homo sapiens
ggagaagaaggcggtggtggcgggtggaggttcgagcgctgttctcgctccggagccgctgcacatttcgatagaagcagatttgggatatcctggaggt

SEQ ID NO: 39154 - DNA, 101 bp, Homo sapiens
gaagctgcacatcggcatggagaacaagatcatgcagctgcagcgcaaagttgatgagcagggaactcaaccctatgtatgaaggatatctacagcatgat

SEQ ID NO: 39155 - DNA, 100 bp, Homo sapiens
ttctcctgccacccccagacctcctcagctccaggaactgtggctgcaccatctgtcttcatcttcccgccatctgatgagcagttgaaatctggaactg

SEQ ID NO: 39156 - DNA, 78 bp, Homo sapiens
gacaagccgctggcagccgcggatctcaccgccgctcagggacattgacaagcagtacgtgggcttcgccacactgcc

SEQ ID NO: 39157 - DNA, 75 bp, Homo sapiens
gctgcccgcctgccctgaggagtccccgctgcttgctgtgatcgagatggtacaagaggctggtagagtaactgt

SEQ ID NO: 39158 - DNA, 74 bp, Homo sapiens
gtttttaagcttctaattaaagagaacctgtctccagagaagattttccacgtcattgtggccccttgttatga

SEQ ID NO: 39159 - DNA, 75 bp, Homo sapiens
agaacgtgtagccgcgtcccctccagtccgctccgggcaggggacccgaagctgccagtactgtaccaagtggag

SEQ ID NO: 39160 - DNA, 98 bp, Homo sapiens
gggacattctgagggtcacatatacagtgatgtccttgcattgcccatttttaagcaagaagagtcgagtttgcctcctgataatgagaataaaatcc

SEQ ID NO: 39161 - DNA, 75 bp, Homo sapiens
gtgaacaaagctatcaatatattgctggaagggaattcagacacagctgatcagctgaccgaagaacagattgct

SEQ ID NO: 39162 - DNA, 75 bp, Homo sapiens
gcgagcgttgggtgtggaacatcattctcaccaccagtctcttctctggatttcagctctttaaacccagtgtca

SEQ ID NO: 39163 - DNA, 71 bp, Homo sapiens
cagataaccgcaagataactcctcttatggcagcatttagaaaggttggcagtggcaatgacccctggtca

SEQ ID NO: 39164 - DNA, 90 bp, Homo sapiens
gcaagtattgctgtgggtgctgggacttcccgtccgcggcgtggaggcactattcctgatcagagaactccagttgcttcaacacacagt

SEQ ID NO: 39165 - DNA, 50 bp, Homo sapiens
ctatagaccagtgtaataccctgaatcccaaatctgcaactcgacctagc

SEQ ID NO: 39166 - DNA, 100 bp, Homo sapiens
gccggagtgaattgatccgggagttgaagagggctgcaaggtgggaagtgaagtcagtgcctcagttgctgagtgaagtcaccctgctgagaaatgaagt

SEQ ID NO: 39167 - DNA, 98 bp, Homo sapiens
aaagcgacaagtggaggcgccgctctagcggccgggactctgaactatggcgacggagtctcagtggcgtgatcctggttcactgcaacctctgggcc

SEQ ID NO: 39168 - DNA, 75 bp, Homo sapiens
gaagaactacgaggcctccatgtcccacgtggacaagttcgtcaagtcaccgacgatgagggcgcacctgctgtc

SEQ ID NO: 39169 - DNA, 74 bp, Homo sapiens
ggagcagacgctgcagttggagcaacagtccaagctcaaatgccaggtggagctcaacaggaaagtcctagcgg

SEQ ID NO: 39170 - DNA, 76 bp, Homo sapiens
attcggtcagagtcatgatgacagcacagctaggaaaccatttctggacggctaaagacctcaccgaggagattag

SEQ ID NO: 39171 - DNA, 97 bp, Homo sapiens
tgatcggctccttaccagctcacctctcaccgcgcatgtttggaggttaccccacagcctatccagcagctgcccctgcctacaatcccagcctgta

SEQ ID NO: 39172 - DNA, 98 bp, Homo sapiens
atcgccaaaaagctggagaagatggtggccaggaagaacacggagaataaaggcagccccgttgatgactgaaaatgacaaagcatccacctaacaga

SEQ ID NO: 39173 - DNA, 50 bp, Homo sapiens
agactcctgctcagtgtagcattaagatgacgtccggttgtttgccttcg

SEQ ID NO: 39174 - DNA, 50 bp, Homo sapiens
gatttgcctcagcttgtactataatttttatggtgggacgaggatacctg

SEQ ID NO: 39175 - DNA, 100 bp, Homo sapiens
ccctggtctcaggcgccagtggaaatgtgtccagcgacgttgcctacgggggcaagtgacacgggcgcaggaggcggaggagaactacgtcatcaagcgg

SEQ ID NO: 39176 - DNA, 90 bp, Homo sapiens
ttgagaagaaaaacgctttttgcatacaagcaggaaaatgagatgttatccagcattccccgtcggagccctttctagagaaaccagtgc

SEQ ID NO: 39177 - DNA, 50 bp, Homo sapiens
catatatttaacccccctccaaaaagtgcggccggccggacggacctact

SEQ ID NO: 39178 - DNA, 82 bp, Homo sapiens
ccagcagctgtcgccgccgctctcaggaatgtatcctgtcaggtataatgtcagtgaatggcaagaaagttcttcatatgga

SEQ ID NO: 39179 - DNA, 100 bp, Homo sapiens
ttggccagcgacagatcctttgctgctctgtctgccggttcttgaggtgtcatggagaaactccagctgggcccagagattctgcagcgggaaaatccaa

SEQ ID NO: 39180 - DNA, 100 bp, Homo sapiens
tgaggttcatttaaccccaaaatcagtgattctacatctcaagctcatattttgaagtgtttacgggcccgatgagagaaagggaaagttaaggatgctg

SEQ ID NO: 39181 - DNA, 101 bp, Homo sapiens
ggctggggccaggacccagacagagacacacggtcactgcagctgaagccgctgcccctgctacagagcaatggtggaacaaagcggcaaaagatatccca

SEQ ID NO: 39182 - DNA, 98 bp, Homo sapiens
ttggctgggaaggaaaaacagaatcagctgttccctgcgaaagtggatgattcaacagccacacaaagcagcaacattttttggatgcattgggatag

SEQ ID NO: 39183 - DNA, 100 bp, Homo sapiens
cgccgagctggacccggaccggttttgggcacagactgccaaggctgggggcaacatatctgtatcaaaagaggaagcttggaaaccggtaggaccttga

SEQ ID NO: 39184 - DNA, 83 bp, Homo sapiens
ccggacccggactcgaccccgaccccgaccccgcagaggacaagcaggctctaaaaggacaggagtttgcaccttcacatcag

SEQ ID NO: 39185 - DNA, 100 bp, Homo sapiens
ctgagtggttgtgtggtcgcgtctcggaaaccggtagcgcttgcagcatgggtgacatccagcagctgctctttgtctcggaccaccgggcagcttatga

SEQ ID NO: 39186 - DNA, 82 bp, Homo sapiens
cttcagttcgtgtgtggagacaggggcttttatttcaggtgtaccagtgatggcaataagaaacaaaatgatatcagaagga

SEQ ID NO: 39187 - DNA, 100 bp, Homo sapiens
cgagtggtctaaggcgccagactcaaggcaaaatttggtttctctaatattactggaattgattactctccttctgcaattcagctttctggaagtatta

SEQ ID NO: 39188 - DNA, 100 bp, Homo sapiens
ggattcgggaactgactgctgtagttcagaagaggtttggctttccagagggcagtgtagaggaaaactaggtgtctgtgttcactccaggctgaagtta

SEQ ID NO: 39189 - DNA, 75 bp, Homo sapiens
atgctctctctccagtccttgctgaagagactttccgttacatgagtattccagcgtcttcaggaaacagtttag

SEQ ID NO: 39190 - DNA, 101 bp, Homo sapiens
tgctgcagcagtcttccctcagtagtcagtttgaagcgggtatgcacaaagatagctggcttctgggtggtctgtttttctggggggccaccaacacctcc

SEQ ID NO: 39191 - DNA, 100 bp, Homo sapiens
ctctgatgtggagttcttgaagcaactaagaatctgtcactgcgaaggggatgaagagagccccctcatcacaccctgtcgctgcactgggacactgcgc

SEQ ID NO: 39192 - DNA, 75 bp, Homo sapiens
ccgctgtgtgtctcgggcgttcagccgctcgctctccgccttccagaagaaacctgctcctccaaagccagagcc

SEQ ID NO: 39193 - DNA, 148 bp, Homo sapiens
attcctcaagtgatggtttaaggcaaagggaagttcttcggaacctttcttcccctggatgggaaaacatctcaaggtagccaatctgaattctaaggacctctcatataccttaaaggattatgtttttaaagagcttcaaagagac

SEQ ID NO: 39194 - DNA, 95 bp, Homo sapiens
ccgtcgcccaggagtcatcggacgccagaatctggttctgcggggagtgtctccagccctgcctgcaggtgccatccccgctgtgcccactctgc

SEQ ID NO: 39195 - DNA, 82 bp, Homo sapiens
tgaagtgctccgtcgcccttgcctccagacttggagctgatgtctgtgctgtcctccggctctctggtccactcaaggaaca

SEQ ID NO: 39196 - DNA, 74 bp, Homo sapiens
gtagaaaaagcaagagtttgttatatagcatggtttgagtccagccaatgacactggagccaaaaagaagaaaa

SEQ ID NO: 39197 - DNA, 90 bp, Homo sapiens
aggacatggagtatgaaagacgctcaaagcttggattctgccgtgccactcacgaatggcgacacagaagacgatgctgacaaaatgcac

SEQ ID NO: 39198 - DNA, 90 bp, Homo sapiens
gatttcttctgacttgagcctgcagtgtgctgtgagagatctaccactagatgccttcaattaagttgcagagttctgatggagagatat

SEQ ID NO: 39199 - DNA, 101 bp, Homo sapiens
ggcgggacgcgcacagtccctccacgcggaaagaagtaccttcgccggtcaccggctcctgcaggtgtctcaggatgatacataccggtttttaactttgg

SEQ ID NO: 39200 - DNA, 100 bp, Homo sapiens
gacgagggcgacagcagcgtgtccagggcggctgtggaggtgttcgggaagctgaagggcagctggtggaatttttgaagaaaatggaatctcgaggccc

SEQ ID NO: 39201 - DNA, 50 bp, Homo sapiens
ggccaaaattctaacttttcctgagaaggaagcattcaaagctgtggaag

SEQ ID NO: 39202 - DNA, 75 bp, Homo sapiens
catcaacgggcagtttgtcgaacgatgttggactcatagtcactgccagaaagagtgcctggtgaagaatgtgat

SEQ ID NO: 39203 - DNA, 75 bp, Homo sapiens
tggactcacttcctgcccacctggtacatgtcccagagcaagcacacggaggcccgggagctcatgtactcggga

SEQ ID NO: 39204 - DNA, 100 bp, Homo sapiens
gtgacatggaggccaagaggaaggtgcagaaggagcaggccgataagatctctgttgaggagctggcgcggaatctggtcatcaaggtcaacagggatgc

SEQ ID NO: 39205 - DNA, 117 bp, Homo sapiens
tgtataacctgaaaacgctcctgtttttctcatctgtgcagtgggttccagcaacagatagaaatgctttaagttcactctggggaaagctggcctctgaaatcttaatgcagaatt

SEQ ID NO: 39206 - DNA, 98 bp, Homo sapiens
cacaaggcagctcgctctgggagcctagaatgcatcagtgcccttgtggcgaatggggctcacgtcgaatacacaccatctcagcaaggagtggcatt

SEQ ID NO: 39207 - DNA, 90 bp, Homo sapiens
ttggcatttacatcactggcgtggacccaggctctgaagcagaaggcagcgggctcaagaaatgcatcttctgcagacaccgggttaaga

SEQ ID NO: 39208 - DNA, 100 bp, Homo sapiens
cggggggaaaggggcagcatgatggtctgagatgacacaacatttgcctgcaacaaggacagcggccagtggcactactttgatgacaacagcgtctccc

SEQ ID NO: 39209 - DNA, 75 bp, Homo sapiens
cccacccccggcggcggcacgatgccctttgacttcaggaggtcagtttaggggctggtgcaaaggatgagttgc

SEQ ID NO: 39210 - DNA, 74 bp, Homo sapiens
cgctcaggaatcatgggctatcaaaggatcactactcttggaatcaaagataaatccaaatactgcatatcaga

SEQ ID NO: 39211 - DNA, 100 bp, Homo sapiens
cttcatgtgtctcttctaagctgaataaagctgttttggaactgtcaggtacctcaaagctttgcgcgataacaatatctcagaccgaggcatctgcaag

SEQ ID NO: 39212 - DNA, 75 bp, Homo sapiens
tctggtggtcgtcatcaccttattctggtcccgggaagcttgctgtcttcgatacgtggagctccttggcggtcc

SEQ ID NO: 39213 - DNA, 100 bp, Homo sapiens
agcaacgccagagcccaggtgcccagaggactttcttccagcttctgctgtccttctttgtggagagcaaggtcctggtgcttgatggtcgaggccatct

SEQ ID NO: 39214 - DNA, 101 bp, Homo sapiens
cagcaccgcagcactggagctgtcctgaaggtactctcgcaggaaatgggaattctacttgtgtggacacgaagatcgattgagaagttattagaatggga

SEQ ID NO: 39215 - DNA, 75 bp, Homo sapiens
agcgaccgagggactgggagtcgttagtgagaacaatgctaaagtagctgtgctaggggcctctggaggcatcgg

SEQ ID NO: 39216 - DNA, 75 bp, Homo sapiens
cattccagcactggactcatggaggctgagcatttattcagggtgtcaaattgagaaccaggtagatccccacca

SEQ ID NO: 39217 - DNA, 100 bp, Homo sapiens
gccgggagcccttagggaggcagcccaacagcatggtggtggaacaccccgagttcctcaaggcagggaaggagcctggcctgcagatctggcgtgtgga

SEQ ID NO: 39218 - DNA, 99 bp, Homo sapiens
gggaaattaaaaacattcatctcaacctcgacaggcgaacaggatatctgaaggggtttcttttgcgggacagaggatcagatgttgagagtttggaca

SEQ ID NO: 39219 - DNA, 75 bp, Homo sapiens
tggatccaggataacggaggctgggtagcaattgtggtattaggaaacaaaatcgacctttctgagcagagacaa

SEQ ID NO: 39220 - DNA, 88 bp, Homo sapiens
cagaggcgagatgaacgtcaccctgggcattccaagcagcctagggcctaggcccgggccaccatggcgctgcctccaggcccagccg

SEQ ID NO: 39221 - DNA, 51 bp, Homo sapiens
ttccctgtctcacgccatcactctgctcttcacagaatacggtcgtctggc

SEQ ID NO: 39222 - DNA, 80 bp, Homo sapiens
ctgctacatcgatgacagaggattcaggtcaagagcaatctgaatccaaatgcaaaggagtttgttcctggggtgaagta

SEQ ID NO: 39223 - DNA, 82 bp, Homo sapiens
tgaagatccattggtaaattgatcaggatttttggcctaccctccaaagaaaaggtgtggacactgccagcggctgcagccg

SEQ ID NO: 39224 - DNA, 83 bp, Homo sapiens
ccggcacacgcgcagccccggcctctcggcctctgccggagaaacaggattctgatgagatggaggatgggcctggggttcag

SEQ ID NO: 39225 - DNA, 83 bp, Homo sapiens
gaatcttcaacctgtcaaagccttcttaattatgtctgagaaaaggcgccaagcccatctttgtgtgcttgcatccaactgtg

SEQ ID NO: 39226 - DNA, 75 bp, Homo sapiens
gtaccaggcgaagctggccgagcaggctgagcgatacgacggaatgtatcctgtcaggtataatgtcagtgaatg

SEQ ID NO: 39227 - DNA, 130 bp, Homo sapiens
aaggaatctgagggtgccctcaatgagcacatgaccagcttagcttctgtcctaaaggaacagctttctcaagttctcgatgccatgtttgaaaggatagtcaaagctgatgagcatgtcattgaccaag

SEQ ID NO: 39228 - DNA, 98 bp, Homo sapiens
cagggatacttcctgcagatgcacccagatggtaccattgatgggaccaaggacgaaaacagcgactacagcaacgcggtaaaaatattgcttcggtg

SEQ ID NO: 39229 - DNA, 83 bp, Homo sapiens
ctgaggctgatatgcaatgtcacttacaacattaatcagatactgcatttaagtgataatatgcagcatgcatactgggaact

SEQ ID NO: 39230 - DNA, 100 bp, Homo sapiens
atgatgtaaatgagcaacactccggatcagacactggaagtgtagaacgtcattcagagggagctcactcagtgggtttgatgtggtggatgctggctcg

SEQ ID NO: 39231 - DNA, 100 bp, Homo sapiens
cggtccccatcaccggcacacattgtcgtggagcagttctggaggttttatagccacatggtacgtcctggggacctgacaggccacagtgacttccatc

SEQ ID NO: 39232 - DNA, 51 bp, Homo sapiens
acctgcgccgggcactggaggagggctcgttcactttatccaaatgcatag

SEQ ID NO: 39233 - DNA, 100 bp, Homo sapiens
ttctgcttggagaagaagttgcccagtatgatggggcatacaagctgcaagctttcttcctggtggcagatgacatcatggattcatcccttacccgccg

SEQ ID NO: 39234 - DNA, 82 bp, Homo sapiens
cggtggactccttcggcagtccacccaccgccgccgcctcccaggtgcagcttcaagcttaggaccacccaccatgcctatc

SEQ ID NO: 39235 - DNA, 117 bp, Homo sapiens
tgacaggaggagaccataacccccgacagcgccatggcccagattctgccaattcgttttcaggagcatctccagtgtaatgaacaagtctggggtgaatcgtgtagtttggaaacg

SEQ ID NO: 39236 - DNA, 74 bp, Homo sapiens
cgcagaccagacttcgctcgtactcgtgcgcctcgcttcggtctgggcagatcacacattgcttcccccagtcc

SEQ ID NO: 39237 - DNA, 90 bp, Homo sapiens
tgcagaccttcccaggaagccagagccacacacaccatcatggtcctggtcaatgtgacggtggactacattagaccagccagcccagcc

SEQ ID NO: 39238 - DNA, 134 bp, Homo sapiens
ccgcttgccgcagccgcctcagaacccgaccaacatccagaacttccagctgcccccagacaatgcagatcttcgtgaagactctgactggtaagaccatcaccctcgaggttgagcccagtgacaccatcgag

SEQ ID NO: 39239 - DNA, 75 bp, Homo sapiens
agggacacggggtgctgcgctgcgccgacggctccacctacaagctgcgtgcccagatgcgcgacctggcacggg

SEQ ID NO: 39240 - DNA, 89 bp, Homo sapiens
taattcgtgttgctacgattgtagatgttgatgaccaaagagtaaagtcccaggtgctgttcccactgaatccatacaaggaagtacct

SEQ ID NO: 39241 - DNA, 82 bp, Homo sapiens
attcgcagtggtcgcttcttctccttgtggtggacttgctttgtgaagagacagttcatgaacaagagtctttcaggacctg

SEQ ID NO: 39242 - DNA, 50 bp, Homo sapiens
gcggcgggtcgtgggcacctccaggttaaaaagatcaagtggcatgagca

SEQ ID NO: 39243 - DNA, 82 bp, Homo sapiens
caggagttcattgaactcatccggcagaataagagactggacgctgtgaggctccccacaggtgcaggaagccgccgcccag

SEQ ID NO: 39244 - DNA, 83 bp, Homo sapiens
gtcatattatacagtgcgacagctagaattggaaaaccttacaacaatgcagatcttcgtgaagactctgactggtaagacca

SEQ ID NO: 39245 - DNA, 100 bp, Homo sapiens
agctgaagcacctctccagcggggacctgctccgggacaacatgctgcggggcacagagagcagagctgacatctgataaagacatgtaccttgacaaca

SEQ ID NO: 39246 - DNA, 132 bp, Homo sapiens
ctgaccagcgcgcaggacagcgccttcctcaacgacgcggacatggtcatgagctttgtgaacctggcacatggattaattgatgtatgttgagtttatggagctgccttttggtggcttgctttatctgca

SEQ ID NO: 39247 - DNA, 96 bp, Homo sapiens
ggagggtccgagccagccgctgttttgccggaggagcccctcaggccagcgtttcccaaagtgtattctgcggaactagcacctactgtgttctca

SEQ ID NO: 39248 - DNA, 83 bp, Homo sapiens
ctcggacgaggaggacgcgcccgccaccgacatctactttatatggctcgtggacagcagaaaattcagtctcagcagaaaaa

SEQ ID NO: 39249 - DNA, 100 bp, Homo sapiens
aatcactaaatactactctgaggggcttagaaattaacaggtaaacctattgatggcaattttgctgactgtggaagtgactcatccaaactccatgcca

SEQ ID NO: 39250 - DNA, 112 bp, Homo sapiens
tctccctctgcccccccttccccacgcaaccccagatccatttacactttacaggagtgcatccgccccaacccttttccccctcgtctcctgtgagaattccccgtcggat

SEQ ID NO: 39251 - DNA, 99 bp, Homo sapiens
atgggttaccagcgacgcaccctatttggagtccaggaatgagactaagcatttatctgtaggaaaagatattattcaaaacactggttctcagtggga

SEQ ID NO: 39252 - DNA, 100 bp, Homo sapiens
cattgttggatactggtgacatcatcattgacggaggaaattctgaatatagggacaccacaaaaggcttcccaactgatgcaactcttgatgacataaa

SEQ ID NO: 39253 - DNA, 100 bp, Homo sapiens
agctgagcgcctccagcgagaagttgagggagaaaggcgggcccgggaacaggtattcaaagacctggaccaatgcattgttccagtacacatatcgcag

SEQ ID NO: 39254 - DNA, 83 bp, Homo sapiens
gccttgtatctcaacaccctgagtgcggatttctgctatgatgacagacctgcctagagctggaacgttacctccagagcgag

SEQ ID NO: 39255 - DNA, 86 bp, Homo sapiens
cagactttgttggggacatcttatgggaacatctagagatcctgcagaaaggaactgtggctgcaccatctgtcttcatcttcccg

SEQ ID NO: 39256 - DNA, 100 bp, Homo sapiens
gcagggcgcaccatgccgttgtcgggcgcatgcagcaggttcaggagaagtggcacctggtggaggacctgtcgcgactgctgccggagccaggcccgag

SEQ ID NO: 39257 - DNA, 75 bp, Homo sapiens
gggctgctcccatcattgatgtggtgcgatcgcactacgagcagtccaagatgttcaatgatgccatggacattc

SEQ ID NO: 39258 - DNA, 90 bp, Homo sapiens
tgaaggtgcaagatactatataaaggagctggtaagtcgcctacaggagcgaaatgttcaggttttcctaatatctggtggctttaggag

SEQ ID NO: 39259 - DNA, 83 bp, Homo sapiens
gcggcagccggcggtgcagcagccggccgacccagagtcgcacagtgcagaaaaacgccaagtacatctgcctggctaacaag

SEQ ID NO: 39260 - DNA, 100 bp, Homo sapiens
gacgtcatttcgggagttagtactgggctagtggccacgctgcaagccctttctaaggcacaaaatgatgtgatggaaatgaagatgcagtcagagagac

SEQ ID NO: 39261 - DNA, 75 bp, Homo sapiens
gggctggtgctgccattaatcctgtgggccgacagaagtgcaggtgctggagaatctggtaaaagcaccattgtg

SEQ ID NO: 39262 - DNA, 74 bp, Homo sapiens
ggagttcttacaacatggcagacattgacaaatacatactgccatgaaagaaagctcacctttatttgatgatg

SEQ ID NO: 39263 - DNA, 138 bp, Homo sapiens
gtcagtgtctcgaagaaagtgcgcagcctgcaagattgtggtgcacacgccctgcatcgagcagctggagaaggtgggccctgaacctgcggtgtcggggcagcaggaacgttctcagcgccctgcggaaggctgtgg

SEQ ID NO: 39264 - DNA, 98 bp, Homo sapiens
gcgcgtgcggttgggaacgcggagcggacggattcgattcaacggggttccggaccgcgctgcgctatggagcaggttaacacagaaatctgcctcct

SEQ ID NO: 39265 - DNA, 73 bp, Homo sapiens
ggccagggaactcaaacagcagatgcagttatacatgggaagctgttgataccaaaaataatgtactttataa

SEQ ID NO: 39266 - DNA, 100 bp, Homo sapiens
ggggcagccgctgagacggtttttcacaaggatcaccccttctgtgtcattctctgaggaaaacaagttcttctcaaggaggaaagtctgaacttgtcaa

SEQ ID NO: 39267 - DNA, 80 bp, Homo sapiens
gaggaggaggaagagtccagtgaaggattttttatcaagcagaaatgcatcgaacaacgagaatcaagatcactgagcta

SEQ ID NO: 39268 - DNA, 74 bp, Homo sapiens
taaatacttacttcagttaccagatagactgtcttcaagctcactgatattttcctctgcttgatccattgtgc

SEQ ID NO: 39269 - DNA, 100 bp, Homo sapiens
gattcctttactacagcagccaaaacgagaagaagaagaagtgttagaccagggttcgatacaagaggctgttttcctagcgtggcttgctgcctttggt

SEQ ID NO: 39270 - DNA, 80 bp, Homo sapiens
gctatgcaacagtttaaccaacgatacctctattcggttttcctttggaatatggataaatacaccatgatacggaaact

SEQ ID NO: 39271 - DNA, 90 bp, Homo sapiens
ctgtgacctgcatgtactgggggattcgcagggaggatgtcgggacaccccggaagctgggaaatggttacaattcaacaaacatggtgt

SEQ ID NO: 39272 - DNA, 75 bp, Homo sapiens
acttcatttaccaaccctggaaccgcagacctctgggcttcctgatcattgtaatggcctgccgagaatttgaga

SEQ ID NO: 39273 - DNA, 100 bp, Homo sapiens
cattctctccaggaagaatttttacagtatctcaaagacttcacttgacttcttgatcctgcataaaaccaagctgaagaataagttcatgaaaaaattg

SEQ ID NO: 39274 - DNA, 90 bp, Homo sapiens
aggaaggtgaaggtgcttggatctggcgcttttggcacagtctacaaggcgtcctttctgaagaacagatccggaagaagaagattcgga

SEQ ID NO: 39275 - DNA, 75 bp, Homo sapiens
ggacacagcaatatctctgggctttcacaggacttgacacagcaagcaaaagacatacagaacataacagtccag

SEQ ID NO: 39276 - DNA, 90 bp, Homo sapiens
gggagatccaagagattcagtatcactcgctcccttgatgatcttgagggactttgaacatgtcggggatcgccctcagcagactcgccc

SEQ ID NO: 39277 - DNA, 75 bp, Homo sapiens
ggccacagtcctgggaagtcagatgggattgaaaggatgttttgctctgagcaaatgcaggaccgtggcgggccc

SEQ ID NO: 39278 - DNA, 90 bp, Homo sapiens
ctgtttcacaacaccaggagttcagctatgggcagtttgggccatgcaacatgtctgcagcaagaatcatggagtctcactctgtcaccc

SEQ ID NO: 39279 - DNA, 75 bp, Homo sapiens
ggaggaggaccacgcctgcatccccatcaagaggtatatggaggtcagtgggaacctgagggatttgtatgatga

SEQ ID NO: 39280 - DNA, 90 bp, Homo sapiens
atccaacaaagattctgataactggcaaaacaagccccggtttctctggattctgtgcttctccatggaggaaactcaaggagaactgac

SEQ ID NO: 39281 - DNA, 73 bp, Homo sapiens
tggtctattgctagtgagctcatcgaaaagagtgtgaagattgctcctggagcagttgtatgtgtagaaagtg

SEQ ID NO: 39282 - DNA, 100 bp, Homo sapiens
aagtgcgcgccctggcgggtccggaccaaggaagatgagaatgtgcctactgctcctgatcctccaagtcaacatttacgtgggcatgggacaggctttt

SEQ ID NO: 39283 - DNA, 100 bp, Homo sapiens
atggtgcgaggctgggagccgccgcccgggctggactgcgtccagttacaacacagggatcacaacaaacacaaccgccacagaagcactatggcattac

SEQ ID NO: 39284 - DNA, 98 bp, Homo sapiens
ttgcttcttatttagcactcacaggaagtgcattttcagctgagcacctcaaacttcaactccagaaggaatccctaaatgagctgaggaaggagtgc

SEQ ID NO: 39285 - DNA, 97 bp, Homo sapiens
tccccatggctgatgcagcaggcatcatccgctatgcaattggggagttaggacctggaaatgtacagaaagaagtctcatcttcctttgaccacgt

SEQ ID NO: 39286 - DNA, 74 bp, Homo sapiens
ccatccacctcaccagagaacaattggacagcctaatctgcctaggccggaccatgggaaccccaaagccacgg

SEQ ID NO: 39287 - DNA, 120 bp, Homo sapiens
caattgacctcacctcaagcacacccaatggacagcatgcctcaccaagtcacatgacaagcaacatgcacatgatggtgtccaagccagaacagtgggtaaagccaatggctgtagcag

SEQ ID NO: 39288 - DNA, 98 bp, Homo sapiens
cactgcagcagacagctccctgggcaccaggcagctaacaggaaacatgccctgaactgtcacagaatgaaaccagcgctcttcagcgtcctgtgtga

SEQ ID NO: 39289 - DNA, 82 bp, Homo sapiens
ccagtcctcatcctggatgaagccaccagcgctttggatgccgagagcgagtatctgtggaatgcagtagccctctgggcct

SEQ ID NO: 39290 - DNA, 98 bp, Homo sapiens
gctgatccaagcaattttgccaacttcagtgcttggtattcatgggtagtttgaaatatccagatgagaatggatttgatgccttcctgaagaagcat

SEQ ID NO: 39291 - DNA, 98 bp, Homo sapiens
atcctaggattacctgaaggtgaaacagattgagccagaaggaagacaatgctgaacactcctatgccaccttcaccagctgtacaagtgcagggcca

SEQ ID NO: 39292 - DNA, 80 bp, Homo sapiens
ccttgtacagcaatctcctcctccactgccactacagggaagtgcatcacatgtcagaattcagaaggagctggcggaca

SEQ ID NO: 39293 - DNA, 100 bp, Homo sapiens
ctttgttgtgagaagaactactgaattaactgttacaggcttacggagttcctatgctagtcagcatagtcagcttgggcaagaccttcgttctgccgtg

SEQ ID NO: 39294 - DNA, 100 bp, Homo sapiens
gcagagggtggactcgccagtcacaaaaagcgccctcatcaagttagccaacatccgggcagcagaaaaggttgaggaaaagaactttggcagctcgcac

SEQ ID NO: 39295 - DNA, 96 bp, Homo sapiens
ttcacagtcaaatatgtgcctcctgctgctgggcgatacactatcaaagttctctttgcatctcagtatatcaagctgtcttccattaaagtggac

SEQ ID NO: 39296 - DNA, 51 bp, Homo sapiens
ggaagattgtggatcaaataagactcggattctgaaggtaattttgagact

SEQ ID NO: 39297 - DNA, 110 bp, Homo sapiens
atcaatgtggatgaacttgatacccccgatgaagcagattcttttgagtacactggccatgcaggtaattgctgccatggaaacacaactgtctaatgggccaacttgca

SEQ ID NO: 39298 - DNA, 100 bp, Homo sapiens
attctcctctgcgctatgtggacattgccatcccatgcaacaacaagcctggatctcctcaagtccccaagattcacacctgactctgaaatctgaagac

SEQ ID NO: 39299 - DNA, 100 bp, Homo sapiens
gagatgccaacgccgcgcggttgtaactcggccctagttacctggccagggtacgcgacaattggcggaggtggctattatcatggaaaactaatttttc

SEQ ID NO: 39300 - DNA, 100 bp, Homo sapiens
agatcgttagggtgctgactgaggatgagatggggcacccagagataggagatgctattgcccggctcaaggaggaagcaatgaggctccccaagaacac

SEQ ID NO: 39301 - DNA, 83 bp, Homo sapiens
ctgtaacttacgtgtactttaccaacgagctgaagcaggtaatactgcattgcatgattgtgcagaatctggaagtttggaca

SEQ ID NO: 39302 - DNA, 82 bp, Homo sapiens
cgggacctgctgctggacccggcctgggagaagcagcagcgcaaggtgtctgtgacctttgatgatgtggctgtgactttca

SEQ ID NO: 39303 - DNA, 75 bp, Homo sapiens
agtccctcgtccagccacccccaggcgcagttgtgtagcagttgagtaatgctggttagctgttaaggtggcgtg

SEQ ID NO: 39304 - DNA, 75 bp, Homo sapiens
aaggatgttgttgtcaaaactatcatctcgaagctggagaagcttcgagagaaggagcgtaagaaggaagccaag

SEQ ID NO: 39305 - DNA, 101 bp, Homo sapiens
aaggaacctctacaacgaaggtgaagccacggaagataagtgaccgattagcactgctccaggtccgggctatcctccagcagctaggtctgaatagcacc

SEQ ID NO: 39306 - DNA, 73 bp, Homo sapiens
tcttggagcagctggggatcatggatgccttccgcgccttccaccctgacctggaattcgtgggcaagttctt

SEQ ID NO: 39307 - DNA, 98 bp, Homo sapiens
acaataggaggcaaaatgttggataaatatatctatggagcacaggacttccaatagtagtcagacattatcatcctgtcatactatggagccatgta

SEQ ID NO: 39308 - DNA, 100 bp, Homo sapiens
tcctcccagagaagtggtccctcggccccgccctggtgtcacagaggctactattactggtcttggaatgctggccagtgtctacactgatgaccatgag

SEQ ID NO: 39309 - DNA, 100 bp, Homo sapiens
atccagaagatcacacagtgttaagtcacctgcaccggtgcccgtgacgtacgagctgcccacactgtataggacggaggactattttcctgtggacgcc

SEQ ID NO: 39310 - DNA, 76 bp, Homo sapiens
agtaaccttgcattcggctgcaaggtgtactgtacgtacacagctgaccaggtgtatggagaccaggacatgcatg

SEQ ID NO: 39311 - DNA, 75 bp, Homo sapiens
caggcaagagaatgaggctcgaagtgaggatccccccaccacacccatcaggatctatcttgggatcccatggct

SEQ ID NO: 39312 - DNA, 100 bp, Homo sapiens
atccacttattatttatgatgtgttccctgatgcctgcaaagagtttcaagatgcaggtgaacagctgtatgcaggagctattcttgaagtttgtggatg

SEQ ID NO: 39313 - DNA, 83 bp, Homo sapiens
gtgaagagttgtcccagctcggcccgcgggggagccccgggagccgcacgtgccggtggtggtgtgcacattgagccccggta

SEQ ID NO: 39314 - DNA, 90 bp, Homo sapiens
gcatcttggacgtcagcatgggggcgcaggagccctcccggcccctattttcccttataaaggctgcaggggacagcgctggaccgtaca

SEQ ID NO: 39315 - DNA, 82 bp, Homo sapiens
ccctcctgaagaggcggcgctcagacagaataactgaagtgaagtgatggactccgatttggagagtagtaagacgtgaaag

SEQ ID NO: 39316 - DNA, 74 bp, Homo sapiens
gaagatgaagaaggattctcaaggttcgtgagccacacatctccccacaccaagctcctccatacaagacctcg

SEQ ID NO: 39317 - DNA, 100 bp, Homo sapiens
gccagggcctcaagtgcgatgctttgctgtctgcatgccgacatgctgggctcactgggccccaaggaggccaagaaggccttcctggacttctaccaca

SEQ ID NO: 39318 - DNA, 101 bp, Homo sapiens
acgtaccccgggcagtttttgtggatctggagcctacggtcattgggaaagaatatggcaaagctgatgcaagatgggtttattttgatccaaccattgtg

SEQ ID NO: 39319 - DNA, 132 bp, Homo sapiens
taactgcctccattacactgctgagtcacacacaacgcttgttatgttttcatcacttctctccagaagagagacaagagagacacctccaacttcgacaaagagttcaccagacagcctgtggaactgacc

SEQ ID NO: 39320 - DNA, 75 bp, Homo sapiens
attccaagtaactcttatttgcctatccctcggccagatcctgtgcataataatgaagaaacacatgatcaagtg

SEQ ID NO: 39321 - DNA, 75 bp, Homo sapiens
ctttccgggagactggagtcgaaggccgtgaggtaagaatgattgatgttggctgatattggagtgctcattcac

SEQ ID NO: 39322 - DNA, 76 bp, Homo sapiens
ttgaaatacagactgttggggaacaagagctgaaagcaaaatcagaggggaagcttgcaaaacagatttgcaaagt

SEQ ID NO: 39323 - DNA, 97 bp, Homo sapiens
atccttggacaaaatgctgcttatcttggggaattaaaagacaaggaggaagacagcgaacccctcccaccacaggatgcccagacctctgggtcac

SEQ ID NO: 39324 - DNA, 97 bp, Homo sapiens
tcgggctgcaggagaagatggcggtctccacagatctcttccgttccctgctggcagttcatcagctggatcagccacatggtggccttactggaca

SEQ ID NO: 39325 - DNA, 99 bp, Homo sapiens
gctaacttttctgtaaccaacctgaacgtcgaaatgctgagcagcatggattctgcatcggttcgcattatcaaaccctttcctgcgccccagactcca

SEQ ID NO: 39326 - DNA, 82 bp, Homo sapiens
caacaccacaataatccacagccaaggcaatgagaagcacgaccttcatgttacctcccagcagggcagcagtgaaccagtt

SEQ ID NO: 39327 - DNA, 75 bp, Homo sapiens
gagctttatcaagaactatcctgcaattaccagctctggctgggtcgccacaacttgtttgacgacgaaaacaca

SEQ ID NO: 39328 - DNA, 103 bp, Homo sapiens
ccctgctgtggaccggcagtttgcctgctcctcctgcgaccacgtctggtggcgccgcgtgccccagcggaaggaggacgcaaagtaccacatgcagcgctgc

SEQ ID NO: 39329 - DNA, 99 bp, Homo sapiens
cttttgagagttgaacctctagatgaagtaacaactgagtggagtgatgccattgacatcaacagtcagggaacacagaggactacactgaaacattca

SEQ ID NO: 39330 - DNA, 90 bp, Homo sapiens
cttgtgccctagcaccccgagaaccgtcagtttgagccagatggccgtgacttggcgagcacgaccctccccgggtaccctccacacgtc

SEQ ID NO: 39331 - DNA, 100 bp, Homo sapiens
gccatccgggagaagctggcctgggccaagctgcaagctttcttcctggtggcagatgacatcatggattcatcccttacccgccggggacagatctgct

SEQ ID NO: 39332 - DNA, 100 bp, Homo sapiens
ctgcactacccactgagagcatgcagttatatgaggtgacttcacagagaatgcagttgtcttgacttcaggtctgtctgttctgttggcaagtaaatgc

SEQ ID NO: 39333 - DNA, 75 bp, Homo sapiens
cccatcagtgacagcaagtccattcagaagagctcactcctctacttgaaaaagaaagagatggattacggtgcc

SEQ ID NO: 39334 - DNA, 75 bp, Homo sapiens
aaagagggtcatctcttctattgtacctgcaggggatttgggagcagcttgtcttacacaaggacgaaggaaaag

SEQ ID NO: 39335 - DNA, 88 bp, Homo sapiens
gacgcgtttggcaacagcgagggcaaagagctggtggcctcaggtgaaaatgagatgaacccggtacctcagatggaaatgcagaaat

SEQ ID NO: 39336 - DNA, 82 bp, Homo sapiens
agccaagctcgtggcctgcctctgcgtgcgttcgtgctggccgtgggcagcgccgtctttgatgccatgttcaacgggggaa

SEQ ID NO: 39337 - DNA, 75 bp, Homo sapiens
ggcctacccgggatacggaggagggtgccgtggaggtcccagcccccgctgcggttctcggaggtccggagcccc

SEQ ID NO: 39338 - DNA, 97 bp, Homo sapiens
ccagaagggcctgcagtatgtagaggccgagatcagtatcaacgagttgctctcaccagaagatttagtgaatgcgtgcaagatgctggaagcactg

SEQ ID NO: 39339 - DNA, 98 bp, Homo sapiens
ggactgcgcaacgctgcgctctgggctgacaggtgtctgacttccagcaactgctggcctgtgccagggtgcaagctgagcactggagtggagttttc

SEQ ID NO: 39340 - DNA, 101 bp, Homo sapiens
tgatctacgtgtgctttttcaagggagctgataaagaacttcttcccaaaatgggtgtgacgtttctccagatacttcatgctgttcacctgtgtcctcgc

SEQ ID NO: 39341 - DNA, 101 bp, Homo sapiens
tgcttaataatgacaatcttctcagggaaggagcagcccattaatgaaggagttcccccttctgagtatgttcaatatccatgaaaaccttttagaagccc

SEQ ID NO: 39342 - DNA, 80 bp, Homo sapiens
cccggccgggagccgccgcgggcaggacgcgcgctgcaggttctggctccttggcagcaatggctgtatttgaagataag

SEQ ID NO: 39343 - DNA, 74 bp, Homo sapiens
ccgctgtgcgcaggatcgcccaggaagtgcagcgctttgcccaggagaagagaggcgggagatttttgagcagc

SEQ ID NO: 39344 - DNA, 75 bp, Homo sapiens
atttacatgacagaaatcacctatgtttacagcgacaggtttgggccccatggtatccctgtgacagtatttccc

SEQ ID NO: 39345 - DNA, 99 bp, Homo sapiens
caaagaatatagatggttttgaaaagttcatgctgtcccttcattgaattttagccttttccccacgactctgaaagaggacagcgttcccaatgtccc

SEQ ID NO: 39346 - DNA, 80 bp, Homo sapiens
gaatcaggcagttttgtgtccatgtgaacaacttggtattcatgggtagtttgaaatatccagatgagaatggatttgat

SEQ ID NO: 39347 - DNA, 75 bp, Homo sapiens
ctctctttctggcctggaggctatccagcagagagcccccacataccactgtattccccgccaccatggatgacg

SEQ ID NO: 39348 - DNA, 88 bp, Homo sapiens
tgcgttagtcaccagctgctcctccgtcttctcaggagaccagctggtccaacgtgtggatgaggtcaccattgtcaacattttgacc

SEQ ID NO: 39349 - DNA, 83 bp, Homo sapiens
ctcagcttcaccatcgtcagcctcatgtacttcgcctttaccagacaatgcagatcttcgtgaagactctgactggtaagacc

SEQ ID NO: 39350 - DNA, 100 bp, Homo sapiens
acataaacctgtgtaccatgcactgatttttggtgttgagccagacttgaccagggaaggcggcagtattcccgtgaccttgacctttcaggaggccacg

SEQ ID NO: 39351 - DNA, 98 bp, Homo sapiens
ttgactactcgcatcgcgcactttttggatcggcatctagtctttccgcttcttgaatttctctctgtaaaggagtgaacagagtatctgtcaggcaa

SEQ ID NO: 39352 - DNA, 100 bp, Homo sapiens
ctacatggaaatgtcacattaggaggaagcatctcgaagaacagccctgccacactctttgaagttcctgacacatggtaaccaagacctgagggcagca

SEQ ID NO: 39353 - DNA, 87 bp, Homo sapiens
aggcctgaagttgattcagatccaagacaatggcaccgggatcaggaaccctgccatcagcatcactgaaaacgtgctgcatttcaa

SEQ ID NO: 39354 - DNA, 100 bp, Homo sapiens
cgagggcagatctctgagacgctgaagacccggggcatctttgagaccaagtttctctctcagatcgagagtgtcaacagcatctccaccctggagcctg

SEQ ID NO: 39355 - DNA, 82 bp, Homo sapiens
agaagttttgcagatgagaacaatgttttccatgaccctgttgatgatcctgataacttaagtgactctctcttttccggtg

SEQ ID NO: 39356 - DNA, 98 bp, Homo sapiens
cacgatgtttcccttggtcaaaagcgcactaaatcgtctccaaggaatttgctgattcccttggaattccgtttttggaaaccagtgctaagaatgca

SEQ ID NO: 39357 - DNA, 99 bp, Homo sapiens
tttctatgcctgcacagttggaataaacctcttttccatcatgtatactggagcaccgtgctttatcctgtggataaacgcagagtgaacgagtttggg

SEQ ID NO: 39358 - DNA, 100 bp, Homo sapiens
gctctgtagaattcgacagtatggtcagaggcctggcttcaagtactggtatgacaaggagtggctgagcaggggacatatgcatggcctggcatttcta

SEQ ID NO: 39359 - DNA, 82 bp, Homo sapiens
agaattcggccatgagccgctacatactcatcatggggctcctgtacaagacccaacatgagtgaagtttcctgcaagaaac

SEQ ID NO: 39360 - DNA, 75 bp, Homo sapiens
ctccgcccacgacatccacctcctccctgaagatgcagaagaaagcgatcctgaccaccattggtgtgctggagg

SEQ ID NO: 39361 - DNA, 100 bp, Homo sapiens
actattttcacgttttaatgccgagagagatggggtcttgccatgttgcctaggctggtcttgaacttctgagctcaagtgatcctgcccacctcagctt

SEQ ID NO: 39362 - DNA, 75 bp, Homo sapiens
gcaacacagaatcgtcctctttggcaatgttttcttggacggaggagatgttaaagtaacccatcttgcaggacg

SEQ ID NO: 39363 - DNA, 82 bp, Homo sapiens
cccagcacagatcaaagctgtgggcaagctgacgccggtctcggcgcggaagatggccggcggcgtggacggccccatcggg

SEQ ID NO: 39364 - DNA, 50 bp, Homo sapiens
gcccggccgcgaccctgtctgggagggtctcactctgtcacccaggctgg

SEQ ID NO: 39365 - DNA, 75 bp, Homo sapiens
gtctcactgcaccttcaatggcattgagtaggtgctggagaatctggtaaaagcaccattgtgaagcagatgagg

SEQ ID NO: 39366 - DNA, 82 bp, Homo sapiens
gtcttctggcaaacagtgtttgcctctggttcagctcatacaacagcttcttagggggattcccgaagtcttccgttttctg

SEQ ID NO: 39367 - DNA, 101 bp, Homo sapiens
ggtgaacctggaccaggaggaggttttcaggaccaaaattgtggaaaagtcactctggatgccgaggaatgtgacagggctgggagtgtggccacctgcca

SEQ ID NO: 39368 - DNA, 75 bp, Homo sapiens
aaaaaagggctggaaacttcgctatcatggagatcatctgactgcagccatgagcagcaatgagtgcttcaagtg

SEQ ID NO: 39369 - DNA, 75 bp, Homo sapiens
aattatgaatctcaggaacaccaccttctgtcagaaatggtggagtcaatgaagaaagtagcagggatggatgtg

SEQ ID NO: 39370 - DNA, 100 bp, Homo sapiens
cgacaagacttcaacatgatggagcagaggaaacgagttactcagatcctgcaaagtcctgactatgctgagaaggaaaataccatagcaaaagctctgg

SEQ ID NO: 39371 - DNA, 82 bp, Homo sapiens
gtcaaaggaattctgtcttcacaagcagaagttaacaagcacaagccctggctggagcccacctaccacggcatagtcacag

SEQ ID NO: 39372 - DNA, 56 bp, Homo sapiens
caagagtggaaatggagaggtgacatttgcggaagatccatccaaaagctatgtga

SEQ ID NO: 39373 - DNA, 80 bp, Homo sapiens
caactattcgcggagctggaatgactggcaacccaggtcttatcgaatgttacttagcctccaacagtattcgagaagca

SEQ ID NO: 39374 - DNA, 75 bp, Homo sapiens
ccaggcctacatcatcccatcgggagatgctcatcagtttgctatgaagattatggaatcagagagagctcttgg

SEQ ID NO: 39375 - DNA, 90 bp, Homo sapiens
cttgctcaatgagatcattgctgacttcgatgaggttatcttatgatgaggcttttgctatggctaatgatcccttggaaggcttccatg

SEQ ID NO: 39376 - DNA, 101 bp, Homo sapiens
gacggccacgaacttccgagtgggttaaacccatccagagtaatggctgcggccttacccaggaccctgggggagttgcagctgtatagaatattacaaaa

SEQ ID NO: 39377 - DNA, 100 bp, Homo sapiens
acaagaagagcagttcccaggatctgcataaaggaatattaagtgaacttgacgttgatgtaaatgaagggtctctaatggagctacagggacatattgg

SEQ ID NO: 39378 - DNA, 75 bp, Homo sapiens
tttgacctggtaaatgcaggcttttatgcgagagccaaaagaatgcaatggtgtaaagattccagttgatgccag

SEQ ID NO: 39379 - DNA, 80 bp, Homo sapiens
ctgtcgtgcgctgcaccctctcggctaatatcaacaacccctccccgtcgtaaacgctgaggaatgatgtggcaagaatg

SEQ ID NO: 39380 - DNA, 100 bp, Homo sapiens
gccaccgcctcagcgggagaggagtctccaccaggactgaccgctgccgcccagcacgtccagatttccaaagagtcagaggacttcattgtggagcaat

SEQ ID NO: 39381 - DNA, 95 bp, Homo sapiens
tttgggccgaagcatcctgctctgaagatcactcgtcgctatgccttcgcccatatcctaacggatgacaacattgatgagacatacggtgtgaa

SEQ ID NO: 39382 - DNA, 75 bp, Homo sapiens
ctgcgcgcccgggatttcgatctggacctggcctggcggcccaggatggcggcccaggtgactctggaggacgcg

SEQ ID NO: 39383 - DNA, 104 bp, Homo sapiens
tcagggccaacttccctagtgccctccaggacactcaggagtccagcaccactgccactgaggctgcagagtgtttcacagccaatggtgcggattatagggga

SEQ ID NO: 39384 - DNA, 75 bp, Homo sapiens
gcgttccccagaccatggcatctacggaagggagcccctcaatagtgaagatgatgtgagtgatgaggaaggaca

SEQ ID NO: 39385 - DNA, 75 bp, Homo sapiens
ggccgctatggatctattcgactttttcagagactgggacttggagcagcagtgcgtgaccgaattacaagtttt

SEQ ID NO: 39386 - DNA, 75 bp, Homo sapiens
acgagctggagggagaatttcaagaactgcagaataatccagaatggctactctgatctatgttgataaggaaaa

SEQ ID NO: 39387 - DNA, 50 bp, Homo sapiens
tctgcagagagaaggcatagactcccaggttctctttgttcccagacact

SEQ ID NO: 39388 - DNA, 148 bp, Homo sapiens
ccgtcaaaaagcgtctaggatccggaacgctgctgtctggagggggcggcgcggcaggagcgcgttgagggactcttcggaaccaaaaagaagcttcccagagccggggccaggagccccaagcgccctctagcagcaaacacagaag

SEQ ID NO: 39389 - DNA, 112 bp, Homo sapiens
gcactggtcgtgggagtcacctgaaaggcaagaaatggcctatgaaaggaggttccctacatgtcctttgattccgatgttcgtgggcagtgacactgtgaatgaattcaag

SEQ ID NO: 39390 - DNA, 83 bp, Homo sapiens
agagacagtgcctgccttttcagagcgtacctgtgccactgtcaccattggaggaatatctttgcagattatcctgtggaagg

SEQ ID NO: 39391 - DNA, 87 bp, Homo sapiens
acggtcctgggaagcaacggtcccctgagatcatgtaaaaggtccaggagttgggctgcttggaatttccaaagggggtgagctctg

SEQ ID NO: 39392 - DNA, 75 bp, Homo sapiens
agcagtggggattgcaaagcgaactacatatggaggagtgtctggagtttccagatgtcttggaatgcactgtat

SEQ ID NO: 39393 - DNA, 88 bp, Homo sapiens
cttctttgctatttccacctatgtgcagagattactgaagatttcattgctacatatcaggccaattatggcttctctaacgatggcg

SEQ ID NO: 39394 - DNA, 100 bp, Homo sapiens
ggggggcggtgcagagggggcacggagagcccctcgagcgcagcaggccgccccgccagcatgtaatctatgccagcaattatgacaatgttagcagacc

SEQ ID NO: 39395 - DNA, 121 bp, Homo sapiens
cgaggcgggcggatcacgaggtcaggagatcgagaccatcccggctaaaacgaccggaacatgaacattttgcagtactgcccctcttccgacatgtggacgctctttgaaacatgtgacg

SEQ ID NO: 39396 - DNA, 75 bp, Homo sapiens
aacaaacgttattccagccacacatctctggggaatgtttctaatgatgaaacttgccctgcagggacattcaag

SEQ ID NO: 39397 - DNA, 75 bp, Homo sapiens
gcggtgtctgctgctattctccgagcttcgcaatggcaacgcggtaaaaatattgcttcggtgggtgacgcggta

SEQ ID NO: 39398 - DNA, 50 bp, Homo sapiens
tctctttctccacccatcccgagaacagaacttagtgatttggcccgtga

SEQ ID NO: 39399 - DNA, 83 bp, Homo sapiens
gctgccagaggttccctccgagccccttcctgagaagatcccagcagaagatggctgtgccacccacgtatgccgatcttggc

SEQ ID NO: 39400 - DNA, 80 bp, Homo sapiens
gagagctctatgaagagtggctggaacttagaaacggttgcctctgctgttcagtgaacactgccagtgaaagatgtaga

SEQ ID NO: 39401 - DNA, 82 bp, Homo sapiens
gctcgcggcctggcccttggcctcctcctgctgctactgtgtccagcgcagatcacccggaagttcaggctgaattctgaag

SEQ ID NO: 39402 - DNA, 100 bp, Homo sapiens
tgggaagatggcgctgcacttccaggaggaagttaacatccctaataggagggttctggttactggtgccactgggcttcttggcagagctgtacacaaa

SEQ ID NO: 39403 - DNA, 97 bp, Homo sapiens
aacacatcatgaaggctagtttggatgtggaggggaatagactccatctatccatatgaggctgtgccttcctcacctactgtgccagggattccgc

SEQ ID NO: 39404 - DNA, 80 bp, Homo sapiens
ggtcagtgtcctcaccatgcccttctgcttcaaacagactgtgagtcgacacttcaggaacatacctgtgaatgaaaaag

SEQ ID NO: 39405 - DNA, 82 bp, Homo sapiens
ctgaggcggcgcggcagcggagggacggcagtctcgcgcgagctgaagaagcaggtggagagtgccgagctgaagaaccagc

SEQ ID NO: 39406 - DNA, 100 bp, Homo sapiens
aagttatttaaatctctgtgtgttccttattttgtgcttgaacttgatcaaacaggtcttaaaacattttggaaaaagttgaagctctccttttctaccc

SEQ ID NO: 39407 - DNA, 88 bp, Homo sapiens
ccagaggagattagacgtagcagattagcctatatatgcaaacagatttgcagtaccaacctatgcagccaagcaacctcagcagttc

SEQ ID NO: 39408 - DNA, 144 bp, Homo sapiens
ctgaggacttcccctccgtggtgacagcctctgggtcctcggtcggtacagtctctgcacctcgcgccccagcaggtggagaagaccaagctttcttcctccgaggagttccctcagactctgagccttcccagaacaacaact

SEQ ID NO: 39409 - DNA, 98 bp, Homo sapiens
ttgaatcagctcaatcaatcgctgatgatagaagatgttttgggagaagggtcagtctctgccagtcggttcagtaggtggttctctaacccgagcag

SEQ ID NO: 39410 - DNA, 97 bp, Homo sapiens
gctggaggtgggatccacacagctcagaacagctggatcttgctcacactctttcaagagaagcttccttggtatgacctggacgcgtgtgacattc

SEQ ID NO: 39411 - DNA, 83 bp, Homo sapiens
ctcagcaagaacgggaacaaaactctggtgacagatcagtcagtgaaagcatttgctgaacactgtcctgagcttcaatatgt

SEQ ID NO: 39412 - DNA, 100 bp, Homo sapiens
ggaagaacaaaggaaggggagcccgggacccccgggggcgcagaagtgtatgctgacttgtaaagtgaagaagccagtggtgctgcgggtgttcttttgg

SEQ ID NO: 39413 - DNA, 75 bp, Homo sapiens
cacgccaagtacacttgctctttctgtggcaaatccaagtggtaagaagttcagaagcaagcctcagttggcaag

SEQ ID NO: 39414 - DNA, 101 bp, Homo sapiens
ccgcccccgccgccgtcgtctcggtagcagccttcgccacgccggggtcttcaggtgcaatatcagctacttagaagaatggcttaaagataagaacttgc

SEQ ID NO: 39415 - DNA, 100 bp, Homo sapiens
tgaaggcactggaagagcttgtcagccggattgatgacgtgaacgatcaagagagagggaccatagtagatcacgagaaaagagtcgacgtcataaatcc

SEQ ID NO: 39416 - DNA, 83 bp, Homo sapiens
ccgcaacaggcgttttgcaatgcagatgtagcagacgaaaaccactttggtagtgccagtgtgactcatccacaatgatttct

SEQ ID NO: 39417 - DNA, 90 bp, Homo sapiens
cggagaggtagccatgatgccccacttggtgaatggagatgcagctcagcaggtatcagacttggtgataattctgaattatgaccgtgc

SEQ ID NO: 39418 - DNA, 50 bp, Homo sapiens
ttctaacatccagaagatcacacagtgtttggctgcttcaacccccaact

SEQ ID NO: 39419 - DNA, 75 bp, Homo sapiens
caggcatcatggactgtgcgcccaaggtggatatcatccagtgaaaattggagacctcttcaatggccggtatca

SEQ ID NO: 39420 - DNA, 153 bp, Homo sapiens
gcgaaggaaggcctcttagatccaaacgtcaagtcaatttttgtcacctgtggagactgggacttaaaagtcatgatgagagagacctagagaaagatgatgaactggaactgaaaagaagtcttttatgtagagactctgcctatgacagtg

SEQ ID NO: 39421 - DNA, 90 bp, Homo sapiens
cgccatctccatggccacggccgtgagccggccctgcgccggcaggtcgcgggacatactgtggcgcgccccttttggatatgtgccacg

SEQ ID NO: 39422 - DNA, 100 bp, Homo sapiens
caccacgagaattccgcagcccacacggaatagcgggttttgcagcaattgttgcatatggattatataaactgaagagcaggggaaatactaaaatgtc

SEQ ID NO: 39423 - DNA, 74 bp, Homo sapiens
tctccgagtgctgctcctgtcattgtggccatggacgggaccattgacatttatggatgtggccatagaattct

SEQ ID NO: 39424 - DNA, 98 bp, Homo sapiens
cagaaaacaaagaatttgccagatgtttggaagggaaaaggccgaggcatcagcgtgtgaagaccgcaaagacgatcccgagtacagttgtgaacagc

SEQ ID NO: 39425 - DNA, 100 bp, Homo sapiens
ggattacaaggaaaagcaccaggcaaaccaccatcacatctcattttgcaaagggggtgactctggggggcccctgatctgcaacgggtacttgcagggc

SEQ ID NO: 39426 - DNA, 59 bp, Homo sapiens
ctctcttcaccctgccgtcatgtctaagtcagagatgtgaagccctccaatgtccttat

SEQ ID NO: 39427 - DNA, 100 bp, Homo sapiens
agccctacctggatgagcagagagctgtgaaatatctttggcttgcagccaacaatggggtctgcgaggaacagaagtgcgaggaggaggtcttcccgct

SEQ ID NO: 39428 - DNA, 100 bp, Homo sapiens
atattgaaagaagctgagagagaggaagacaactgttagttttgtggcttactgctgctccacccagtgtctgcagacttttgacctgctgagttgataa

SEQ ID NO: 39429 - DNA, 74 bp, Homo sapiens
gtcaagttatccgaaaatataattacgttgctatgctgctgtgttgaaatatgaaaacaatgtcatgaatatca

SEQ ID NO: 39430 - DNA, 101 bp, Homo sapiens
gcttcatgaagctgaaaagaaacaccaggctttgcttttggacacaaacaaacagctctggtagctgaagaacatctcacagtggacgccagggtctattc

SEQ ID NO: 39431 - DNA, 75 bp, Homo sapiens
cggccgcggcggcggccgccaccggctctagacactttttcaaaaatggcaatggtatcagaattcctcaagcag

SEQ ID NO: 39432 - DNA, 75 bp, Homo sapiens
attctgatgaagatgaactaacagaagagagaagggcacagttacctaagtatcaacgtaatcttcctcggccag

SEQ ID NO: 39433 - DNA, 98 bp, Homo sapiens
cgaaggcgaccttccttgctttcagaatttcacccaggttctgacaggcatcagcaatgcagaagcacggcagccagggaaggcccccaacttcagtg

SEQ ID NO: 39434 - DNA, 82 bp, Homo sapiens
gggacattattgcgcgtggaacggctgcttttggaaggacagagcgggatgccaccagcttgtccaaagggaagttccagga

SEQ ID NO: 39435 - DNA, 90 bp, Homo sapiens
tggggctgggctcgccagtcttggggacagtgtcagcgccggagcctcaacagaaagctcctttagttcctcctcctccaccgccaccac

SEQ ID NO: 39436 - DNA, 100 bp, Homo sapiens
taacttcagcggtggcaccgggatcggttgccttgagcctgtttgaaggatgacctctaggaagaaagtgttgctgaaggttatcatcctgggagattct

SEQ ID NO: 39437 - DNA, 83 bp, Homo sapiens
cagaagtcgcgtgtctaggtgagtcgcggtgggtcctcgcttgcagttcagcgaccacggtccttgaatgggcaagagggcac

SEQ ID NO: 39438 - DNA, 100 bp, Homo sapiens
ctaaaggagatggaagtgatgtaccatcatgggtagcctttgataaacaggaggcaagtgaggcctatctggttggcctttttgaagacaccaacctgtg

SEQ ID NO: 39439 - DNA, 100 bp, Homo sapiens
accggatctatccatatgctgccatctcctatgaagaatggaatgaccctcctgctgtgtggcaccctgtgctgcgcacactaaagaaccgcattgaaga

SEQ ID NO: 39440 - DNA, 75 bp, Homo sapiens
tttccatgttcctggccaaccacaacaggatcacccaggtacccaagatattgtatttggagaagtagatcggtg

SEQ ID NO: 39441 - DNA, 74 bp, Homo sapiens
tgagactcctgctcagtgtagcattaagctctcccggggctgaagctgagtgcagatcaggtggccctggtcta

SEQ ID NO: 39442 - DNA, 49 bp, Homo sapiens
ggagtttgagaccagcctggccaccatgcctccagggcaacaccgttag

SEQ ID NO: 39443 - DNA, 82 bp, Homo sapiens
cccccccttccccacgcaaccccagatccatttacactttacagtgctcttacagcctgttccaagtgtggcttaatccgtc

SEQ ID NO: 39444 - DNA, 59 bp, Homo sapiens
tttgatcaagatgcggtgaacatgattggcggcagtaagcacacaatgaatgatcacct

SEQ ID NO: 39445 - DNA, 100 bp, Homo sapiens
cgccgaacctgcctggctagccggcgacttgagtgacgaaacatccagtcatggataaaaatgagctggttcagaaggccaaactggccgagcaggctga

SEQ ID NO: 39446 - DNA, 75 bp, Homo sapiens
agcacccgacctccgcccatcgaagcttcctcaggcaaggtacgcccctgtgggcatcatgttcctggtggctgg

SEQ ID NO: 39447 - DNA, 75 bp, Homo sapiens
gctcatgaagaaatcagggatttcctcaggttatgaagacagtatggagtttccagaccatagtagacatttgct

SEQ ID NO: 39448 - DNA, 100 bp, Homo sapiens
ctcgactgcctcccagaacaaagtgggaaagggaagcttagcccgccgctgccgcctccgagcagcccgccagaccttcacggcatggtgcaactcccac

SEQ ID NO: 39449 - DNA, 82 bp, Homo sapiens
ttagctgtgctcgcgctactctctctttctggcctggaggctatccagcgctcagatccggaacctgaccgtgctgaccccc

SEQ ID NO: 39450 - DNA, 97 bp, Homo sapiens
ccagtgccaaaccaaactggagctggtgcagcaggaattgggatcgtgtcgctgcgcttattccactaagctcaacaaatttcctgtatttaatatt

SEQ ID NO: 39451 - DNA, 100 bp, Homo sapiens
cctcagccaccctgaccactatcatcaccatggaaaaagtgacttgagcaggggatatcattttcaatgcccaatacccagaactgcctcccgattttat

SEQ ID NO: 39452 - DNA, 74 bp, Homo sapiens
gaaggattatttactcgatgatggaactctggtggtttcaggaagagaccgtccaggctggacttgaactcctt

SEQ ID NO: 39453 - DNA, 78 bp, Homo sapiens
cgtgtacttcggcaccgtccgcgactgctatgaggatgtggaagatgtcaagtttgtgatcaactatgactatccaaa

SEQ ID NO: 39454 - DNA, 75 bp, Homo sapiens
atttaaaagacagtcctcgtcagcactgactttcagctatggaatcgggacctgatgcccagaaccctggacggg

SEQ ID NO: 39455 - DNA, 75 bp, Homo sapiens
agaggctgcgtgagaaagaggacagtctggcccaggctggcgagatctgccgacaccccaggccatcgagcccca

SEQ ID NO: 39456 - DNA, 96 bp, Homo sapiens
cctggcttctggcatccaacacatgggggataatgatgctaccagtcgtttcctgactcgggacgaacacccagggtttcaccatgttgcccaggc

SEQ ID NO: 39457 - DNA, 100 bp, Homo sapiens
gatgtgttctgactgtaaaaactctgatgttgtgaaaaaagcttacgctttgcctccactcaaaccaggttaatggcctcctacatttccaaaactctgt

SEQ ID NO: 39458 - DNA, 99 bp, Homo sapiens
ccgagctgcgcccgctgccttcacaccccggacatccgcgccacacggaaggtctgtttctctaacaactttttatcgaacagcgaggaatatcatgag

SEQ ID NO: 39459 - DNA, 100 bp, Homo sapiens
gatgccacagatgaaaaccctgtacctcacgtattgtgccaatcacccttctgcagtgaatgtcctcacggaacacagcagtgactcttcgagaagacag

SEQ ID NO: 39460 - DNA, 100 bp, Homo sapiens
ggggagggaggcccgcagcgcgggaagagcggcccggtcgcgggcgccgccaccgccgccgctgccagagagagtctacagggagattgaacaggtgatt

SEQ ID NO: 39461 - DNA, 75 bp, Homo sapiens
ccttcgcggacccagtggatgtaaaccccttccagggcgaccattgacgaggtggagacggacgtggtggagatt

SEQ ID NO: 39462 - DNA, 100 bp, Homo sapiens
gccaaattcaaaaaggataaggagatcatagcagagtacgatactcaggtcaaaggaatcacatgcagcccaactacagattcttatggaattcctcaag

SEQ ID NO: 39463 - DNA, 80 bp, Homo sapiens
tattgttgaagacctagtagaagaggtgataatacatatgtgtcaagttcagagaatgatgaagatgtgctagttactac

SEQ ID NO: 39464 - DNA, 51 bp, Homo sapiens
ggggcaaggggcggccgggcgcggccgcaaccaaccagtggttcatcccag

SEQ ID NO: 39465 - DNA, 101 bp, Homo sapiens
ggaagggatgcacatcatcacaccatcagcttcagagaatggcagccatttatttgtcccgtgcttctcaataggtttggcatggacaagatctatgaagg

SEQ ID NO: 39466 - DNA, 98 bp, Homo sapiens
gtcttcctgatccatggacccgatgaacatagacacagacatcacttagtgctcttacccagctgatgaaaaagatgccccatttccgaaaacagatt

SEQ ID NO: 39467 - DNA, 82 bp, Homo sapiens
ccaagctgtttcctaccaggtcacacactgttgcagcgcaggttgttggtgctggggctcatcgagctctcctggaacacat

SEQ ID NO: 39468 - DNA, 100 bp, Homo sapiens
acacctgcaatgaatgcaagcaccatgtggagacacgctggcactgtactgtctgtgagatcacaaacaacatcgacccagtgggaagaatccaaatgcg

SEQ ID NO: 39469 - DNA, 100 bp, Homo sapiens
gcccaggaggcggcaggacggccaagaccagcgcgagggccctgggcaaggcccgacaggctgtaagttcagtgaagcaaaatataattgtaaccaccga

SEQ ID NO: 39470 - DNA, 98 bp, Homo sapiens
gcctcggccccatggacgccctgtgcggttccggggagctcggctccaagttctgggtgttacagcacatgaaggccgtgcaggcagatcaggagcgg

SEQ ID NO: 39471 - DNA, 83 bp, Homo sapiens
tgtggtgaaatgtacccagttagtaagaggtgttggggatgtcctttgcactgaccctgaactgccagattgacaaaaccagc

SEQ ID NO: 39472 - DNA, 100 bp, Homo sapiens
tccgggctcagtatgagaccatcgcggctaagaacatttctgaagctgaggagtggtacaagtcgaaggtgtccttaagtttgctcgcttggtcaagtcc

SEQ ID NO: 39473 - DNA, 82 bp, Homo sapiens
tttaacagaaattcaggagttcatcagctttataagcaaacaaggagaggccccctttcatccctgaaggagtggtggctcg

SEQ ID NO: 39474 - DNA, 82 bp, Homo sapiens
ctggcgggctccgtggaagcgtggccggcagcgtcccggacgaggagatgaggtttatataactttccaagacaaggaagtt

SEQ ID NO: 39475 - DNA, 95 bp, Homo sapiens
cccacctgctcaggaaccctcaccttgtttcggactataggaactgtggctgcaccatctgtcttcatcttcccgccatctgatgagcagttgaa

SEQ ID NO: 39476 - DNA, 82 bp, Homo sapiens
ttctaccgaccagagacccagcaccgacatagggcctgattacattccaacagaggaagaaaggagagtcttcgcagaatgc

SEQ ID NO: 39477 - DNA, 100 bp, Homo sapiens
ccaatgttggtgctggcaaaaagtttttcagttatgggacaaaaatattatatcaaaacactgaagctttgcaatctaaattcttttcacctcttcaaaa

SEQ ID NO: 39478 - DNA, 100 bp, Homo sapiens
tttgttcctgcttggctaaatttctcaacaccacagtcagctaagggcactccacagaaggatgttattatcaagtcagatgcaccggacactttgttat

SEQ ID NO: 39479 - DNA, 96 bp, Homo sapiens
catttccaagtacattctcaggtggagacctgtagttgtcctgggaacccctgcagaagaagatggtggtggcaaaattgatttaattgaagcagg

SEQ ID NO: 39480 - DNA, 100 bp, Homo sapiens
cgggccgcgaaccgcagtatcatgctggccaagaagatcatcattaaggacggaggcacggatttacaaaaggtgcaggtatgagcaggtctgaagacta

SEQ ID NO: 39481 - DNA, 129 bp, Homo sapiens
tctcagccagctctgaggggacccgcatcaagaaaatctccatcgaagggaacatcgatcatatctgaagatattagtgagctacaaaagaatcaaactacatctgtagccaaaattgcacaatacaag

SEQ ID NO: 39482 - DNA, 78 bp, Homo sapiens
cgaggacagctggccgccgatattcaccaagcgcttcgctacaagatgatgtgatgccagccacttactgtgaaattg

SEQ ID NO: 39483 - DNA, 82 bp, Homo sapiens
cttacatgtttgaggcccgggaatttcttcgaaaaaagcttattgggaagaaggatggcaagcttaccaaggaggagatcgt

SEQ ID NO: 39484 - DNA, 82 bp, Homo sapiens
cttgaagggccattagacctgataaattatatagacgttgcccagttgtgagtacagaggtggtcagagcccaagaagaatg

SEQ ID NO: 39485 - DNA, 100 bp, Homo sapiens
gacgtttcttctcttggcaagagagctctgcatcaatgcgccggccataggttgtggcagcactgcctgaaggtatgagaccagattctaatctttatgg

SEQ ID NO: 39486 - DNA, 100 bp, Homo sapiens
ctaacaaaccaaatctaaatctgttttcagccaggaaccatgattgaatggggcaattactggttaatacaaaagctgaaccagcaaacaatattacaag

SEQ ID NO: 39487 - DNA, 100 bp, Homo sapiens
aatgagaaccctacttgcctaaatgaggaatgtctttcctaccatctaaaatacgaaggtttctggctgggaaatttggtgagcggcctccacctaaacg

SEQ ID NO: 39488 - DNA, 97 bp, Homo sapiens
catctacctgagagacgagaactccagcaggtcattccgtatcacaatcctgcctcaggagcttctaagtaggacatccttagaaactcagaagttg

SEQ ID NO: 39489 - DNA, 50 bp, Homo sapiens
ctcaactgctgaccccggggtcaggaggcagtggagaaggtgacacagca

SEQ ID NO: 39490 - DNA, 83 bp, Homo sapiens
gaaaaattttgctcaattaactgtgtcaggaagtcgctcagacaagcaggcagctggtgtggaagaatggcggtgagccattc

SEQ ID NO: 39491 - DNA, 100 bp, Homo sapiens
gggcttgccgttcgttcgtttccagcctcaggaatttatggtcgcctttttgaatgaggtgtagaatgagccaaggagactcaaacccagcagctattcc

SEQ ID NO: 39492 - DNA, 75 bp, Homo sapiens
tttgactactggggccagggaaccctggtcaccgtctcctcaggtggatccataaagaacccagccaacccgcag

SEQ ID NO: 39493 - DNA, 100 bp, Homo sapiens
tttcctttaatgcactaaacctttaatattgtattctcctaaatgagacgtctcgcatttgagcaggatttggacgtggcagagggagaggggcaggaag

SEQ ID NO: 39494 - DNA, 83 bp, Homo sapiens
ctctgggtgactcagagagggaagagattcagccagcacactcctcgcgagcaagcggagctggagtttgttcagatcatcat

SEQ ID NO: 39495 - DNA, 82 bp, Homo sapiens
gccttagctgtgctcgcgctactctctctttctggcctggaggctatccagcagctgcctggagttcagcctcagaatccag

SEQ ID NO: 39496 - DNA, 74 bp, Homo sapiens
cctgtctctgccctcctggcgggcccggcggctctcactatccagcacttgcacctcctgcgccgccgcccccc

SEQ ID NO: 39497 - DNA, 50 bp, Homo sapiens
tggaattagcctgcaacatgaagaaaatgtttcgatgaaagatcctccgg

SEQ ID NO: 39498 - DNA, 100 bp, Homo sapiens
agagcgtgaccgagagcgcgaatatcgtcatcgttagaaggaagccagttgagggaagttctccatgaatgtacgtcacaatgatgatgaccgaccaaat

SEQ ID NO: 39499 - DNA, 90 bp, Homo sapiens
atcatctctaaatcccatcctctttcgaggtgttggggacaagaatccttcaagaaacaggaaaaaactcctaaaacaccaaaaggacct

SEQ ID NO: 39500 - DNA, 74 bp, Homo sapiens
tttgctcaaggatcccagttttctctggatgacgtggaagcaggaagagctggtgcagcaggtgcggaagcggc

SEQ ID NO: 39501 - DNA, 96 bp, Homo sapiens
tgcgtcaggtcacccagcagagatcagcaatccttggctcactgaggaggtttggagttatggtacagcacctgtaaatcttaacatcaagacagg

SEQ ID NO: 39502 - DNA, 114 bp, Homo sapiens
tttgatcctagacctggtcgtactaatgtccagcagacaactgatctagaaataccacccccagacctggttcacctgcgagtgtatttggatagtgtctccacagaaaatgtc

SEQ ID NO: 39503 - DNA, 100 bp, Homo sapiens
ctcttcctcctccctcagctccgagtcatcgcgtctctccacagagccatccagcgaggaccctgatgctcccataagacagaaaatgccccttgatgat

SEQ ID NO: 39504 - DNA, 100 bp, Homo sapiens
ttttgacagccgcttccccaaccagaaccagactagaaactgctggcagaactacctgggcaatttcttgcaaccaccaccgaggccccgaaaagcactg

SEQ ID NO: 39505 - DNA, 99 bp, Homo sapiens
ctcgattggatgctgagctagtgaagtataaggatcagatcaagaagatgagagagggtcctgcaaagggactgatgacggagcccaggaggtggtgaa

SEQ ID NO: 39506 - DNA, 98 bp, Homo sapiens
tcattataccttcacccagcatttcatccctcgtcgaaaggattggattggcatctttagagcgcccagacaccatgtcacaaccctccagaactgac

SEQ ID NO: 39507 - DNA, 100 bp, Homo sapiens
cttcatcgacatcagtgaagaagatcaggtggttgaagatggatatgaattttttgcaaagaggcagttggtcactctgttttctgcgcccaattattgc

SEQ ID NO: 39508 - DNA, 104 bp, Homo sapiens
cagcggccgagcgggcggcttcctggcctgggcgctccggtggcggcggagtgcagagcagagcgggcggaggaccccgggcgcgggcgcggacggcacgcggg

SEQ ID NO: 39509 - DNA, 100 bp, Homo sapiens
cactttggagggatccatggcacagctaaagaagggcctcgaaagcgggacggtgctgatccagtttgagcatcaggacagaaaggtgtccaagtacctg

SEQ ID NO: 39510 - DNA, 100 bp, Homo sapiens
atttttctcaatacgaggcgcaaggtggactggctgactgagaagatgcatgccagagacttcacagtttctgctctgcaagaagtctatgtgccccagg

SEQ ID NO: 39511 - DNA, 100 bp, Homo sapiens
tctctcttcagaacagagccaatggcttggaatgagttggtcgcattatgtttcagctcttctcagacatatgtccaaaaacatgcaaaaacttcctttg

SEQ ID NO: 39512 - DNA, 75 bp, Homo sapiens
agagcggcaagatatggcaccgcaagccgtccccggccacgcgggacgggttttatgacaacagatgaaaggaaa

SEQ ID NO: 39513 - DNA, 100 bp, Homo sapiens
gacattttggtctttgtccgcgggaaggtgctcgggtcttcggggcactgggtcccatcggtccctcctcacctgggctcaccctcgggggtctggccgt

SEQ ID NO: 39514 - DNA, 83 bp, Homo sapiens
cgcagagctaaatgggggcctctccagggagtgctctgttcacggctccatcgctgttatgtactaatggtcacttgatgtgc

SEQ ID NO: 39515 - DNA, 100 bp, Homo sapiens
ccgggcttggcaggatttccaggcgcgacttggggacgaagccaagttcattcccagagctcttcagtatccccatcagccagtttccgaggtgctgaga

SEQ ID NO: 39516 - DNA, 76 bp, Homo sapiens
gaagagggaagacacgcggaaacagggccgttgctccagggagaactgcaaatatcttcatccacccccacattta

SEQ ID NO: 39517 - DNA, 50 bp, Homo sapiens
caacggcagaagagactgttcagaaaggttctgctgtgtggcaactcgtg

SEQ ID NO: 39518 - DNA, 100 bp, Homo sapiens
tgccggtgtcctgctcgccgtccccgccatgctgtctctagactttttggacgatgtgcggcggatgaacaagcggcagattcacagttaatagaaggat

SEQ ID NO: 39519 - DNA, 75 bp, Homo sapiens
ggtagggttgctggaacaggcagccggctacttcaccatgctatcatggtgaacttacttcagattgtgcgggac

SEQ ID NO: 39520 - DNA, 90 bp, Homo sapiens
ccaacaacatccgcgagatcgagctatttgaactgctgggacctgaaggacttgaacttattgagaaactcctccagaacagaattacaa

SEQ ID NO: 39521 - DNA, 128 bp, Homo sapiens
cctgcattttgggaaactcgactttggagaaaccaccgtgctggaccgcttttacaatgcaggaaaaccagtagattcccagacatcgcgaagtgaatctgaaattgtgccaaaagttgctaaaatga

SEQ ID NO: 39522 - DNA, 82 bp, Homo sapiens
catcttcgaacttagacttccggaaggactttggcgaggcatccgcagtgtcatgcagaagtacctggaggaccggggcgag

SEQ ID NO: 39523 - DNA, 100 bp, Homo sapiens
tataccagaccctggagtgaactggattccatgtagagacccctggagtgtactaatggtcacttgatgtgcgctggctgttttatccacctactagcag

SEQ ID NO: 39524 - DNA, 83 bp, Homo sapiens
ctaccgatgggaagtccttattattggccctccagatacactttacttggtgctaacagtggtttgcacatcatcatctttga

SEQ ID NO: 39525 - DNA, 82 bp, Homo sapiens
cgaggagtagtcgctggagtccgcgcctccctggatgcatcaaattgcaatttggaggagaggcagcacaagcagaagcctg

SEQ ID NO: 39526 - DNA, 100 bp, Homo sapiens
ctctacccggcagcgggggcagtcagagcggagccaagatgcgaatggggtgaagcggtgagtgctggagatgcattatgtgaaattgagactgacaaag

SEQ ID NO: 39527 - DNA, 143 bp, Homo sapiens
gcggccacctggttcctgcgtgctacggccctgtgggcctgggagctgcctctgaggaacacgccgcaggattgtcagctgacctctgtcctgtgtgcccagtggccccaggtgacgtgtcttcaagaagaggctgagctgcg

SEQ ID NO: 39528 - DNA, 76 bp, Homo sapiens
caaaaacggcccttggatgatggagggatatctgcattacctccacctcctccacctccaccaccaccagcagctc

SEQ ID NO: 39529 - DNA, 82 bp, Homo sapiens
cctggacgtgggtgaaatctgcaccgtggacccgtgccacaagatggagttttaacattgaatgcggagaacactaattatg

SEQ ID NO: 39530 - DNA, 75 bp, Homo sapiens
ccctcaaaccttgcttctaggagataaaaagggaaatcgtggaacacatggtccagcactttaaaacacagatct

SEQ ID NO: 39531 - DNA, 83 bp, Homo sapiens
ggcgaagatccgcatcacctccagccccatttttatcaccttctacatcctgatgaagatctccttcaacgacaaaagcctgc

SEQ ID NO: 39532 - DNA, 96 bp, Homo sapiens
tttgttacgattatcttcatattttgaaacagggagaacctaaagaagtagttaaacctgtgcccattacatctcctgctgtgtccaaagtcactt

SEQ ID NO: 39533 - DNA, 100 bp, Homo sapiens
agaaagtacaacacttcccattatgcactgcatgtgagcctcacacctgccctgcagtggaggagtagatagtttacagatgtttgagacggaggcagat

SEQ ID NO: 39534 - DNA, 100 bp, Homo sapiens
gagtgatttcctgcaggctatggaacacactgaagttcttcagcttctcagccccccaggagatgtttcacaaagcagaagaattattttctaaaacaac

SEQ ID NO: 39535 - DNA, 100 bp, Homo sapiens
cgtcgccgggaccctcgcgcgcgaccgccgaatcgctcctgcagcagagcccgagcgggaagaagttccgcagcaagccgcagctggcgcgctacctggg

SEQ ID NO: 39536 - DNA, 117 bp, Homo sapiens
ctggtgcccacataacgatcaggtcattgccagcggttcagaggactgcacggtcatgctttatggttccataatgtaatttctgaagagtttggagtgggagtgaatatcttttgg

SEQ ID NO: 39537 - DNA, 75 bp, Homo sapiens
cgaaaggataatggctacttcctgattaaacccactctccacagttaatgttcgtgaagaaattgaagagttttt

SEQ ID NO: 39538 - DNA, 83 bp, Homo sapiens
cttaggtctgttagaggaagacgacgagtttgaagagttccctgccgaaggaacggaaaacagttcttccttcaaagcatgca

SEQ ID NO: 39539 - DNA, 88 bp, Homo sapiens
ccgcgctctttggaaacgaattctcaggtgcgcgggaggaaggcagcggcctgccgcgcagagccctgcgcgcccgcgaggtggcgcc

SEQ ID NO: 39540 - DNA, 98 bp, Homo sapiens
ccagatatcttgaaaagctgccagaaagggtgcggggggcaatggcactgcagctctgggccctgaccctgctgggcctgctgggcgcaggtgccagc

SEQ ID NO: 39541 - DNA, 101 bp, Homo sapiens
gttttaatgaaggtttatgggagatagataacaatccaaaagtgaaattttcaagtcaacaggtggtgatctttgtgaagtctgtgcagcggtgcattgcc

SEQ ID NO: 39542 - DNA, 99 bp, Homo sapiens
caagattatagtaccagtcacaatcttttgatgaggacgaaatgaatcaggtgtgaaaatcacaaatgtcaaatgatggaagatccaggaatcgggaca

SEQ ID NO: 39543 - DNA, 106 bp, Homo sapiens
gcctccgaacaggagtaaagaatggctgttgaacatccacaaggcacctgcaagaattttaaagttcaagtcctcagcttcctctggactcatactcaaaacaagg

SEQ ID NO: 39544 - DNA, 75 bp, Homo sapiens
cctttaatccagtgactgtcaggtcgatcatatggggatatgagactttctactcggaatatcctgagtgttgcg

SEQ ID NO: 39545 - DNA, 75 bp, Homo sapiens
cgacggcgccttcggcaaggtttacaaggtgctggagaatctggtaaaagcaccattgtgaagcagatgaggatc

SEQ ID NO: 39546 - DNA, 100 bp, Homo sapiens
ggaaaagtctgcaatcttgtgccatatttgagggatttgggtctgaactgcccaacctaccacaacccagcagattttgatccagacatttaatgtggat

SEQ ID NO: 39547 - DNA, 82 bp, Homo sapiens
ccagcatcaagatgatttatggtaataaggtgatttgatgaaggctgctgcaggagagttcgcagatgatccctgctcttct

SEQ ID NO: 39548 - DNA, 101 bp, Homo sapiens
ctttttctgaggagcagctgaaccgttatgaaatgtatcgccgctcagctttccctaaggcagccatcaaaagggaaggaaaatcacctcggcagtgtttg

SEQ ID NO: 39549 - DNA, 50 bp, Homo sapiens
ggccagctccatggggaatctgggaagctgccaaagaatgtcgacgtcga

SEQ ID NO: 39550 - DNA, 100 bp, Homo sapiens
ctcatccacaatgatttctccagtgctcatcttgttctcgagttttctctgccatgttgctattgcaggacggaggattgtcaatgaggcagatcagatt

SEQ ID NO: 39551 - DNA, 82 bp, Homo sapiens
tattgattcatcagattttgcattggatattcgcatgcctggggttacacctaaacagcctgtggacatctctacagcaatg

SEQ ID NO: 39552 - DNA, 50 bp, Homo sapiens
ccccgggctcccagctgcccacctcatagccctgggcgctgcctatggca

SEQ ID NO: 39553 - DNA, 90 bp, Homo sapiens
tcggctgtgaatccatctggtcctggactctttttggaatagatgtacccaccaaaagccttgcttgcagccacctccacgtctctcaac

SEQ ID NO: 39554 - DNA, 50 bp, Homo sapiens
ccgtgccgcgagcgcggcctgcaggagccccatggctgggggttatggag

SEQ ID NO: 39555 - DNA, 74 bp, Homo sapiens
aagagtcctgcatggtttcaagggacgtaccaggaggatggtgcccagaacctagaagtcggaatccggaagaa

SEQ ID NO: 39556 - DNA, 100 bp, Homo sapiens
ctggagttcgctgaggagcagctgcgagccgaccatgtcttcatttgcttccacaagaaccgcgaggacagagtagacccaaatgatttgtacattgtag

SEQ ID NO: 39557 - DNA, 90 bp, Homo sapiens
ggcgccgcgggaacgcaccacgcggctggatctgggacatgagcgatgatgagaccatctgagatggccccgctgtggggctgacttctc

SEQ ID NO: 39558 - DNA, 75 bp, Homo sapiens
gccacctttccctttatttccggaggtgcaaggaaccatcttcccagctcccaatttcaatcccataatggatgc

SEQ ID NO: 39559 - DNA, 100 bp, Homo sapiens
tctcgagaaaattataaagatcattccatggctccaagtttaaaagaactacgtgttttatccaacaggatcaataagccgagagctgaggattcaggcg

SEQ ID NO: 39560 - DNA, 100 bp, Homo sapiens
cccccgacacaagagacttatggagaatatggttgtctcctcacagactatgagctccttgaaagagggaatcgtgtcttactcatctttgtatccccag

SEQ ID NO: 39561 - DNA, 100 bp, Homo sapiens
aagccatgctcaatgaccgccgccgcctggccctggagaactacatcaccgctctgcaggctgttcctcctcgggtggctgagaacaacctgtgcagcca

SEQ ID NO: 39562 - DNA, 100 bp, Homo sapiens
aagcctgtaaaaattgacaagtgggatggatcagctgtgaaaaactctttggatgattctgccaaaaaggagcgagaacccgagcagcgccatgagcaac

SEQ ID NO: 39563 - DNA, 51 bp, Homo sapiens
atcaataccactgcagatggcaagaaaataatgttgagtttccatgaagaa

SEQ ID NO: 39564 - DNA, 75 bp, Homo sapiens
tctgctaagactgcttccaatgtagaagagaacatccatgatagcagtcttctgtaaatcgaacttttcaagaat

SEQ ID NO: 39565 - DNA, 96 bp, Homo sapiens
ggtgccttgagagcttcaggggaaatggcttcagcgcagtatattactgcagatttgataatgggctgcattaaaagtaaagaaaacaaaagtcca

SEQ ID NO: 39566 - DNA, 50 bp, Homo sapiens
gacgagctgaccctgggagacatcgacgggaaatcctcattgacgattca

SEQ ID NO: 39567 - DNA, 90 bp, Homo sapiens
ggagcatcccggctggagcagagccagagtgcctggtgaagaatgtgatgggatcactagcatgtctgcggagagcggccctgggacgag

SEQ ID NO: 39568 - DNA, 74 bp, Homo sapiens
tgatgacctccctgcaagatttggttatagacttccagctgaaggtttaaagcgcagtgatggcccctatgccc

SEQ ID NO: 39569 - DNA, 90 bp, Homo sapiens
ctcagattccattagctgctgtcatcaagccctttgccaccattccttcaaatgagttgggacagaaataacccagagccctggaacaaa

SEQ ID NO: 39570 - DNA, 100 bp, Homo sapiens
cgcccacttctttgagtttctcaccaaggagctagccctgggccaggaccgacaggccgacggtcgcaaggtcctacggtcaagcatccgggagtttcta

SEQ ID NO: 39571 - DNA, 75 bp, Homo sapiens
tggctgtgaagctggggaagacgcagaaggtgaaggtgctcacgggcacggctcgtgtcctcggtctcttgcctt

SEQ ID NO: 39572 - DNA, 90 bp, Homo sapiens
cgccgctgctcccggaccgggccgcgcacgccgcctcagcaaaagctggcaggctgacagaggcggcctcaggacggaccttctggctac

SEQ ID NO: 39573 - DNA, 90 bp, Homo sapiens
gaactcctccagcctccagaaagtggcagcctcggtttcttcccctcctccctggcctacagcccctaccagtccggcgcgggccccatg

SEQ ID NO: 39574 - DNA, 98 bp, Homo sapiens
ccggtgcctggccctctagccccgctaccggactacatgtcggaggagaagctgcaggagaaagctgacacttcctccatggcccatctatcgccggc

SEQ ID NO: 39575 - DNA, 100 bp, Homo sapiens
ggagaagttgatgactctcgtgaacatagctttaatagggaaaatgtttataggaggccttagctgggacactacaaagaaagatctgaaggactacttt

SEQ ID NO: 39576 - DNA, 99 bp, Homo sapiens
cagcccgcgggccagcaccatggaggacgtgaagctggagttcccttcccttccacagtgcaaggaagacgccgagtacataccgagcatcaaatatta

SEQ ID NO: 39577 - DNA, 95 bp, Homo sapiens
aggcccgggcggcgcgggcgcgggcgctgcggcgggacagctcgacgcgcaggggatcctgctaaagcggagcggcaagtccctgaacaaggagt

SEQ ID NO: 39578 - DNA, 100 bp, Homo sapiens
gatgccccagcgggtgaggctgcaacacgaggctgccgttcagcacccgtcgagcgtcatttcttcagatagctccccagctgtggaaaatgagcatcct

SEQ ID NO: 39579 - DNA, 98 bp, Homo sapiens
ctggaggacacacctaaacatgtggaatcccaatgccggctccgagctctgtccagtggtgggagtattacatcccctcctctttctccagcattgcc

SEQ ID NO: 39580 - DNA, 100 bp, Homo sapiens
tctgcacatccattcttcgactggtttccttaatgacaacaaaaaagggagtaatcctacccactgtaagagtcatgactcttgattgcagctgacagaa

SEQ ID NO: 39581 - DNA, 71 bp, Homo sapiens
tgaccctgatgccctgaaggatcctctctatcagattgatctgcaggccctggccaacgtcaacattggga

SEQ ID NO: 39582 - DNA, 75 bp, Homo sapiens
tcgacctgctaacagaactggaccttttcgcttatatagaattggtgataggatcacaacttctgaggtcccagc

SEQ ID NO: 39583 - DNA, 76 bp, Homo sapiens
gcaagccaagaaagaatccgaagatcagaaacgatgctattaactgagtacttggatatgaaaaatactcgtacgg

SEQ ID NO: 39584 - DNA, 76 bp, Homo sapiens
tctacgcctcctacgtttacctgtccatgcccatgactgaagagttgctgaaacaacaaaagctgaattcacatga

SEQ ID NO: 39585 - DNA, 75 bp, Homo sapiens
cggagtatcagccctgagtggaagcagcaggaaatgaagtgtctgatgaagagtgcttgaagagagtgggcctaa

SEQ ID NO: 39586 - DNA, 98 bp, Homo sapiens
cggcgaagccacagaaaccgtccctgctacagagcaggagttgccgcagccccaggctgagacagagatcctgcagatcattcagctggacctagacc

SEQ ID NO: 39587 - DNA, 100 bp, Homo sapiens
ctttctgccactattactattttcttccactaaaaaagcgtaatttggagacagaagaaattctggcagatgtgctcaaggtggaagtcttcagacagac

SEQ ID NO: 39588 - DNA, 95 bp, Homo sapiens
ccccggcacggtctttggtgccccaagtgtcccaagccaccatgttcagccagcagcagcagcagcagctccagcaacagcagcagcagctccag

SEQ ID NO: 39589 - DNA, 50 bp, Homo sapiens
cttcaatatgcccgccatcaccggaacagtcatgcggaggaatccctttg

SEQ ID NO: 39590 - DNA, 101 bp, Homo sapiens
gcctctgagtgtcctttggcagtttccaaagcatttgggcaagaaggagcttgggcagcttcacaacaggctgaagccgacgtagcttctctgaacagacg

SEQ ID NO: 39591 - DNA, 83 bp, Homo sapiens
gccagtaggtcctgtaccaccagggttctttcagggtgaatctgtaaaatatttcctggataacttggataaacttggagaac

SEQ ID NO: 39592 - DNA, 75 bp, Homo sapiens
acaccacgagaattccgcagcccacacggtgccctacgagacgctgaacaaacgctttcgcgccgctcagaagaa

SEQ ID NO: 39593 - DNA, 100 bp, Homo sapiens
cgcctcgtgggcggcaaggacttcgagcagcctctcgccatttcccggaaaaccatgagctgttttccaagagcttcatctccatggaagtgcctgtcat

SEQ ID NO: 39594 - DNA, 73 bp, Homo sapiens
aaatagaagcttttgttcgacttcaaggagccagcagtaaagattcaggtctataagaaggagaaagctcgag

SEQ ID NO: 39595 - DNA, 100 bp, Homo sapiens
tgtttagctacccctgctgtcagcctcgaaggctcatccaaaatagaggaagcatgcgaaatctacgccagagcagcaaacatgttcaaaatggccaaaa

SEQ ID NO: 39596 - DNA, 100 bp, Homo sapiens
ccagcagaatttgtatagagatgtgatgttggagaactacagaaacctggtctccctagagaccacaccgctgttccagaccctctccatggatgatgtc

SEQ ID NO: 39597 - DNA, 100 bp, Homo sapiens
cagagcgagtctggaaacctcccactgtggctgcataagcataaagatgcctatcaagtgatattggatggtgtgaaaggtggtactaaggaaaagcgat

SEQ ID NO: 39598 - DNA, 100 bp, Homo sapiens
ccctgacccggcctcaccatgttggtgctgtttgaaacgtctgtgggttacgccatctttaaggtaactaaatgaccatggaatctggagccgagaacca

SEQ ID NO: 39599 - DNA, 51 bp, Homo sapiens
ggaggacatggccagcgacgccgtgcagggagtggagcttggtttcgggat

SEQ ID NO: 39600 - DNA, 90 bp, Homo sapiens
ccatggtcagcgtgaacgcgcccctcggggctccagtggagagttcttacgaaactggcgatggaatatgagaggagccctctggaaaga

SEQ ID NO: 39601 - DNA, 100 bp, Homo sapiens
gccgctgttttgccggaggagcccctcaggcccgaatgacaacagagctgctcaaggcgggaactctgagctaagcagtggaggtttctctggatctgga

SEQ ID NO: 39602 - DNA, 100 bp, Homo sapiens
tgggggaagacaaatatggaaacaaatactatgaagacaacaagcaattttttgattctggaacttttcaaagcctgactctcttcttgaaacagtggag

SEQ ID NO: 39603 - DNA, 53 bp, Homo sapiens
gatggcaccggttacactggctgggcagaattcaaggaggcatttctcctgtt

SEQ ID NO: 39604 - DNA, 100 bp, Homo sapiens
cgcaacccatactattcggacagatggcacagaaaccgctgcgcctctttggagtttaacccttctgccaatccagaggcaagcacaatattccagagga

SEQ ID NO: 39605 - DNA, 74 bp, Homo sapiens
ggagacttaaatgccgtccatggagccatgcgtgtgctgacagagtcgggtttctccattcaaggacatgattt

SEQ ID NO: 39606 - DNA, 100 bp, Homo sapiens
ggcggcggcgcctcccgggctccggctccggcttctgctgttgctcttctccgccgcggcactgatccccacagctgcatatccccaccgtttgaatctc

SEQ ID NO: 39607 - DNA, 82 bp, Homo sapiens
agcctcggaagtcaagagactcagagtcccataggtctccagaaatgctttgggttcatctttcattgctgcaaggaacttc

SEQ ID NO: 39608 - DNA, 75 bp, Homo sapiens
ctgtgttgaagcagctgcaggacatcctcaagagcaacctgcaagcaatcaaggccagtctaccctgcagccctt

SEQ ID NO: 39609 - DNA, 100 bp, Homo sapiens
tcgggcagcaacatcatcagcaacctcttcaagaacatggttggtgcgggagaggtggatgaagacttggaagttgaaaccaaggaagaatgtgaaaaat

SEQ ID NO: 39610 - DNA, 75 bp, Homo sapiens
aaatcacacgcataatggatgaaaggaaccgacagttttcggctttgtgagaaaccttaccatcaaacacgatgg

SEQ ID NO: 39611 - DNA, 100 bp, Homo sapiens
cttggttgctcttgaagctggtgagagccctgccaggatgtggagtggacttcctagcagagggacaatgactcattcttcccaggacactggttcttgt

SEQ ID NO: 39612 - DNA, 74 bp, Homo sapiens
caattgtaaataggtttccaggatcaaaactaacctttcagttaaaaacttcttcagagtcagtttcaaaaatg

SEQ ID NO: 39613 - DNA, 90 bp, Homo sapiens
gggcgctatggaggatctgcaagatatgttcattgtccacagcattgaggagatccagtgttatccaagataaattctgtgggattataa

SEQ ID NO: 39614 - DNA, 50 bp, Homo sapiens
aggccaagggcaagtgatttgacagtgcctgatttgagatggggtcccag

SEQ ID NO: 39615 - DNA, 75 bp, Homo sapiens
agacttgtaacctggagaagaggtgtgttccagagaacaagccttcagacatttgctatattgacgctgagctgt

SEQ ID NO: 39616 - DNA, 71 bp, Homo sapiens
acactctgatggacatgaggctgagccaggctgaaggggatgctaagggagataaagcaaaggtgaaggac

SEQ ID NO: 39617 - DNA, 100 bp, Homo sapiens
ggaaatgggaatgtacacgataattaaagagtaaagttgtgctcaacgatgctattaactgagtacttggatatgaaaaatactcgtacggcctctgaac

SEQ ID NO: 39618 - DNA, 82 bp, Homo sapiens
caacaagaggaaagacacacctaccaagaagccagtcaagcggccagctttggaatcgtcctctgggaaatcgccactggag

SEQ ID NO: 39619 - DNA, 101 bp, Homo sapiens
gggttttcttagccctctacttttcaagacaccaagtgagaggccaaccaggtgctggagaatctggtaaaagcaccattgtgaagcagatgaggatcctg

SEQ ID NO: 39620 - DNA, 95 bp, Homo sapiens
cgtggaccacatagacatttacgcggatgtcggcgaagagttcaaccaggtgcccgtggttgacacgagctgtgtccccagctgttcccgtctac

SEQ ID NO: 39621 - DNA, 98 bp, Homo sapiens
taacccgtatccccagtgccaagaagtacaaagtgaggagaaggaggaagtgaccatggacacaagtgaaaacagacctgaaaatgatgttccagaac

SEQ ID NO: 39622 - DNA, 82 bp, Homo sapiens
ccgcggctctccaagttctaccagccctacgtaatattgtgccatataccagagaccagatcaaaggcctaataaggactct

SEQ ID NO: 39623 - DNA, 75 bp, Homo sapiens
cccaagatggccgacttcgatgatcgtgtgtcggatgaggagaagaggtggtgcggagctcctgtttgacggtat

SEQ ID NO: 39624 - DNA, 83 bp, Homo sapiens
gccttgctgcccccaggtgggccgccaccccctgacctgcctgggtccaaaggttctccccatgacaccacctgaacgtctct

SEQ ID NO: 39625 - DNA, 82 bp, Homo sapiens
catcatgggccggcctggaacagcctgtcaggattggagctgctttccgagcacctggaccccaaactcctgtgccgcctga

SEQ ID NO: 39626 - DNA, 87 bp, Homo sapiens
agaaaacttcgaaggcttaagctgtttataccttaacttctctttaccgacaatatacaagtttacttgggaaaatgaattcagagg

SEQ ID NO: 39627 - DNA, 75 bp, Homo sapiens
tggggactcacggccgggacactcagggcaggatgtggggcaatcaagttggggatgaaggagcaaaagccttcg

SEQ ID NO: 39628 - DNA, 75 bp, Homo sapiens
gtggttggaaatggcacctatggacaagtctataagacaagttggatggcttgaggactggtactaaaaggaaac

SEQ ID NO: 39629 - DNA, 100 bp, Homo sapiens
gcttctccttcgcatccgacgcaaccggcagcagcgctgccgccgcgtcctcagccaccgctccctcttcccacggattgcagtaacggatgctccgcag

SEQ ID NO: 39630 - DNA, 82 bp, Homo sapiens
acccagaatatgccaagtatctaaaataacaacgaacttgatgcaagtgataggtttgccaaggtcagacctctcatcatcc

SEQ ID NO: 39631 - DNA, 76 bp, Homo sapiens
tgggggctgaggatgacaaaaaagccttcataggcctccaagggctgcagttctacaggctacaccgggaagaaag

SEQ ID NO: 39632 - DNA, 75 bp, Homo sapiens
taccattatggaacgctgagtttgcttaaaaacttcccacagatttgtattgaacgatgtcttgagaggggaaag

SEQ ID NO: 39633 - DNA, 90 bp, Homo sapiens
atcattttgaaaaacagtattccaaagaactcggagatgcctggaatacagtaagggtggcccagttgaaatccttcccttcctctacct

SEQ ID NO: 39634 - DNA, 98 bp, Homo sapiens
aagccctactgggaggcacggagggtggcgaggcagtaatctatgccagcaattatgacaatgttagcagaccatgcagctcgtcagctgcttgattt

SEQ ID NO: 39635 - DNA, 74 bp, Homo sapiens
ctctctccttggcctctcctgggatcggcccaaggccagttctccgcagagagtgtgacgcaggaaaggaggcc

SEQ ID NO: 39636 - DNA, 74 bp, Homo sapiens
tcgcctgcgcgtcccgctcgtttcgagcaaattggtcaggagatgttggaaaaccttagtcatgacagagaaaa

SEQ ID NO: 39637 - DNA, 100 bp, Homo sapiens
aacagctatctcgggagaaacaacaactgctacatctgttggaggagccaactagcatggaagtgcagatcccttcccactggaggcatgtgatgagagg

SEQ ID NO: 39638 - DNA, 75 bp, Homo sapiens
gactttatcaaaaacatgattacagggacatctcaggctggcttcctgtcaggcgagctggccctcaacagcccc

SEQ ID NO: 39639 - DNA, 83 bp, Homo sapiens
gccgagtgcagaagatctgggtgcccgtggaccacaggccctcgttgcccagatacggaagtgaaaatgtgacaggattggac

SEQ ID NO: 39640 - DNA, 51 bp, Homo sapiens
gaagcactccgggcgtgctgccggcggcgattcgggaactggagcctctcc

SEQ ID NO: 39641 - DNA, 100 bp, Homo sapiens
tggcaggtctaagccaagctctcatttcaagccttgctgacatccagcttccacagatgttggtagctggcagtgttgtgatggcttttgaagaagtatg

SEQ ID NO: 39642 - DNA, 100 bp, Homo sapiens
ggagagcccacaggtgctaaagagagcagtaccctgatggagtcccttgcaggaattacagtttgaaaggctgacccgagagctggaggctgaacggcag

SEQ ID NO: 39643 - DNA, 83 bp, Homo sapiens
cacccggctccccggacgcctcgacctgcctagagctggaacgttacctccagagcgagccctgctatgtttcagcctcagaa

SEQ ID NO: 39644 - DNA, 76 bp, Homo sapiens
tccgcccatacacagtgcccaacaagaaggggaccagggacagtatgatttggtgaaatgcctggctcctattcga

SEQ ID NO: 39645 - DNA, 75 bp, Homo sapiens
atttggagcccattttagaggcatctgttctatcttcccatcataaaaaacttggtggccccatgtgggcagagc

SEQ ID NO: 39646 - DNA, 100 bp, Homo sapiens
ccgggccccgcgctccgccccggcctagggccttgccccgggagcccgcgaggggatgctgtgaagaagtgttttgccgtgtgtcttgcataattcatgg

SEQ ID NO: 39647 - DNA, 106 bp, Homo sapiens
cattgatacacctgtatttgaactaaaggagaccctcctgttcttaactgtgggcgatgagaaaggtggtggactcttcttactggcagggccacctgcgtctgtg

SEQ ID NO: 39648 - DNA, 98 bp, Homo sapiens
tgttacacgtgatgacttaaaatgcttgagactaaggaaaaccagtagattcccagacatcgcgaagtgaatctgaaattgtgccaaaagttgctaaa

SEQ ID NO: 39649 - DNA, 100 bp, Homo sapiens
cccctcctgtctcagcttggggggaactctgtcccccagcctggctgcacttgaggttcccgcccaggaaggtagctgagggcatggcctacatggaacg

SEQ ID NO: 39650 - DNA, 100 bp, Homo sapiens
caaggagatgcagctgtacaacagcatcttcagcctgctcagcttcgagaagattggctacacaggttaatttggagtggcccctggagtcagtttccta

SEQ ID NO: 39651 - DNA, 100 bp, Homo sapiens
tcttcaaagcctttgctatgatcattgacaaactggaagaggtgatcatggagctcagcttggtctccatggggctggtggtgatggaatacatgatgac

SEQ ID NO: 39652 - DNA, 100 bp, Homo sapiens
ttgcttccggatgactgaccaagagtcataccctaatgatcccagcaagataatgtcctgtcttctaagatgtgcatcaagcctggtacatactgaaaac

SEQ ID NO: 39653 - DNA, 90 bp, Homo sapiens
cgaagttcagcccagaggagaaactcgctcgccttcagaagacaggttgcacagagcattgaggatcaccatcaggaagtgattggtttc

SEQ ID NO: 39654 - DNA, 75 bp, Homo sapiens
cgaggggtgagggcgctatggcacccggctgcaaaagttccaattgtggacaagataaggaccattgctcaggct

SEQ ID NO: 39655 - DNA, 100 bp, Homo sapiens
cgtttcccgcaacccgataccatcggacaggatttctccgcctcagcccaacggggaggccaagtcctgtatctgccatgtctgtggcgtccacctcaac

SEQ ID NO: 39656 - DNA, 48 bp, Homo sapiens
agaagggaaccgtatacttcaagccaggtgtgaagtctggcaacaaga

SEQ ID NO: 39657 - DNA, 82 bp, Homo sapiens
tcacaatgaggctccctgctcagctcctggggctgctaatgctctgggtctctggaaatctggcattttttaaagtttgcgc

SEQ ID NO: 39658 - DNA, 90 bp, Homo sapiens
caaaattctgaactcaggacttggcaaagaggaccaggtaaacttccgtggattcatgcgaactttggctcatttccgccccattgagga

SEQ ID NO: 39659 - DNA, 90 bp, Homo sapiens
cccttcgacagaagtggaagtgctgaaaaatgctcatctctcacacagacttttgatggacaggagtttaccgttctgggtcagaggtgg

SEQ ID NO: 39660 - DNA, 101 bp, Homo sapiens
ggccaggggagagcttcatcaccccctacctcctggggcccgacaagaacttcacgcgggagcagtctgttcctgagagcaccgtgttaaagaaagtctct

SEQ ID NO: 39661 - DNA, 101 bp, Homo sapiens
cctggatccagtgctactgctacaaataagggaactctaatgatccaggacaaagaagttaccctggagtatgtatcaagcctggatttttggtactgcaa

SEQ ID NO: 39662 - DNA, 90 bp, Homo sapiens
cccaacatggtcttcattggaggtatcaactgtaagaagaggaaagacttgtctcaggaaatctaccactgtcgaagacaaataaaatat

SEQ ID NO: 39663 - DNA, 75 bp, Homo sapiens
agtgggcgaagcccaagcccctgtcccctacgtcctacatgaggtgctggagaatctggtaaaagcaccattgtg

SEQ ID NO: 39664 - DNA, 100 bp, Homo sapiens
aagaacccagagatggtgaccgcgtggcaggggctctcggacatgctgccaacgacgcgaggtgatgtgtccaatctagatcccaacttctcatttgaag

SEQ ID NO: 39665 - DNA, 90 bp, Homo sapiens
attgccttattggaaaaacatttcttacgcgacattgactacagcaccgtgctcctcggcatgctggtgacgcaggacgtgcagctcggg

SEQ ID NO: 39666 - DNA, 96 bp, Homo sapiens
attgctgcaaggaacttccatgcctctaacactcatcttcaaaagactggctgaccggttccctgatgtgttacctgcttctgctactgatccaaa

SEQ ID NO: 39667 - DNA, 95 bp, Homo sapiens
acagattcttttagaagctggggcagatcctaatgcaactactttagaagaaacgacaccattgtttttagaatgacagggagagagtttttctc

SEQ ID NO: 39668 - DNA, 103 bp, Homo sapiens
caaccgcgccgtgagccggctgagcaggaagcggccgccgtcagggtcagtatagaccttctgatttgctgtgccctgagacatatgtttgggtacccattga

SEQ ID NO: 39669 - DNA, 50 bp, Homo sapiens
cctcactgcagaggtgctggagctggcagcagcggaagatgtcggacagc

SEQ ID NO: 39670 - DNA, 105 bp, Homo sapiens
gtcttcggtggactccttcggcagtccacccaccgccgccgcctcccaggtgggatgctatggaatatgatgagaagctggcccgtttccggcaggcccacctca

SEQ ID NO: 39671 - DNA, 73 bp, Homo sapiens
atttctcctggggctcagagtgatgcctggtgtgcaggagtatatacaacagcctattctcaatggtctgcgg

SEQ ID NO: 39672 - DNA, 99 bp, Homo sapiens
ggaaaccttcactgctaagaggaactaagatctagagtatctcctcgaggaagtacaactgtattctgacaagtccctgtacacccagctgtgctttta

SEQ ID NO: 39673 - DNA, 112 bp, Homo sapiens
cttaagagtcttaggagtcagttggatgtgacacataaggaggttgcacgttttcaaaaaatacctaatggtgaaaatgagacaatgattcctgtattgacatcaaaaaaag

SEQ ID NO: 39674 - DNA, 74 bp, Homo sapiens
cggggaactctactcttcctacgtggaacggcacatgtgtgatggggacattgttatcttcaaccggcagccaa

SEQ ID NO: 39675 - DNA, 75 bp, Homo sapiens
gtggccgagcagcataatgtctgcttccactacacttttgccctcaaccggctctcactgacctatgaacgactc

SEQ ID NO: 39676 - DNA, 50 bp, Homo sapiens
ttggactccagtggtagctatggtgttgagatctgcatagccactcctgg

SEQ ID NO: 39677 - DNA, 100 bp, Homo sapiens
acatgaagtttgagacgggcgccttctcctactatgggactatggccctgacctcggtcccctccggcccctccagccagcgtcaggtgcagaatggccc

SEQ ID NO: 39678 - DNA, 82 bp, Homo sapiens
ccaggcctctccggacaagaggactgaagcagatggcaactctgatcccaactctgctatcagaggactcctgaaacctgga

SEQ ID NO: 39679 - DNA, 100 bp, Homo sapiens
agctaaatggaaaagagaaatatatggtcgaggtcttccagaaagcagcagcgtgcagggtcaaagacagccggccccccatgtcagtggtctaggatgg

SEQ ID NO: 39680 - DNA, 90 bp, Homo sapiens
gaaaatctacaatttcttcgagacactcatataaaggagaataaaggcagccccgttgatgactgaaaatgacaaagcatccacctaaca

SEQ ID NO: 39681 - DNA, 74 bp, Homo sapiens
tggcttcagccccaagaagacgccgcttcctccagagggctaagaagccaccattcttcagagggcaatgaagg

SEQ ID NO: 39682 - DNA, 98 bp, Homo sapiens
cgggcggtgagcgcccatatgggggttctggagagcggggtgtgggatggagtcatcagaacccactgtgaggaagtgacttctccttgaggtcaccc

SEQ ID NO: 39683 - DNA, 100 bp, Homo sapiens
tcagcagcatgattcctatagtcaaaaccagcagtcctatcattcacaaagggaaaactacagccaccacacacaagacctgcctagagctggaacgtta

SEQ ID NO: 39684 - DNA, 100 bp, Homo sapiens
aagaagagctgctgatgaggactgggacagggactggctggcttcgagcagggcatcggaaccaggcctcctggcactggcctgggtagagccagggcga

SEQ ID NO: 39685 - DNA, 100 bp, Homo sapiens
ggcgctacggaggtagtcaccgccacatccaggactccttccacagagaagctttgcatcgtccctatggttgtgatgttgaaccccaggcactaaatga

SEQ ID NO: 39686 - DNA, 96 bp, Homo sapiens
ccaccaggccgattatgtccattgttctcttggagcagctggtcatcatggttttcctcctccaccaggcgctccacctccatctcttataccaac

SEQ ID NO: 39687 - DNA, 100 bp, Homo sapiens
ccggggctgcgggggtaggcggtgtgaagcgaattatgtaaagagagtgaagatagtccaagtcctaagagacagcgcctctctcattcagtctttgatt

SEQ ID NO: 39688 - DNA, 100 bp, Homo sapiens
cggaagagcgctcccaggagaaacaagagttaaagttcctcgtaattttcgcttgttggaagaacttgaagaaggacaaaaaggagtaggcgacggtaca

SEQ ID NO: 39689 - DNA, 100 bp, Homo sapiens
acggcgttgatatcggtggtaacgacggcctcagcaggcggggaagatgaaaggaataccgtgactgatctaaccgttcatcgggcaactcccgaagatc

SEQ ID NO: 39690 - DNA, 138 bp, Homo sapiens
aaaatttcagtgaagaagaaagtaaagttggaagttaagggagacaaagttgaaaacaaagtgctgcctctacggcagacacatgcaggccaacccagaaccaccgaagaagaataatgacaaatcgaaaaagatcag

SEQ ID NO: 39691 - DNA, 100 bp, Homo sapiens
aatgcactaaacatgaagagcttgaaagcgaagttcaggaagagtgacctcaaactttggaacaaataccgaatttccaacattccatcactaatattcc

SEQ ID NO: 39692 - DNA, 75 bp, Homo sapiens
caaggattctgcctggccctgggaagagaagcctagatatctgcccctgcagatcaagtcagtagtggcaccaga

SEQ ID NO: 39693 - DNA, 90 bp, Homo sapiens
cttgcctccacttcaaacagctggcaaccctagcctcaagtactacagccttccagcagccttcccagacccacagatcacacccaggga

SEQ ID NO: 39694 - DNA, 100 bp, Homo sapiens
gcgttgtcgatgccgctgaatgggctgaaggaggaggacaaagagcccctcatcgagctcttcgtcaagtgtctgccaatgattttggacaacaaactga

SEQ ID NO: 39695 - DNA, 75 bp, Homo sapiens
ggacgccagcggacacgcgggcgaggaacttgctactaccagcaccatgccctaccaatatccagcactgacccc

SEQ ID NO: 39696 - DNA, 104 bp, Homo sapiens
ctgaaggaaaacctccttatgctgatatacatccaatgagggagcagcgggaccccacggtgcatgatgatgtgctggagctggagatggacgagctcaatcgg

SEQ ID NO: 39697 - DNA, 99 bp, Homo sapiens
cgaagcgagggtctgaagttcacgactactagaaggggaggggagtggaaaggctctcagtgaaaaaggtccagaggtgtccttctaaagctggtagag

SEQ ID NO: 39698 - DNA, 100 bp, Homo sapiens
tgcctgaagttacatttagagactgaaatcactgcaccttaaaaacaaaagattgagctgcactgtattcctgtgactgaaaactcctgaggcatttcct

SEQ ID NO: 39699 - DNA, 90 bp, Homo sapiens
aagtgtttttgtgtgggtataggtaccttaaatgagataagtttgttgaaagactaaaaggtggagatcctagaaggcaaggatgccggg

SEQ ID NO: 39700 - DNA, 75 bp, Homo sapiens
tggatcattgtattactcatcacagatcggaacggaggcctgtgatttggagcaagaggtggtggtggccttccc

SEQ ID NO: 39701 - DNA, 108 bp, Homo sapiens
gtcagggacaagatggtgccaccggtgcaggtctctccgctcatcaagtctctgctttctatccgtcaagatgataaagtcgtgtgcccgagaaccaaagaagtcttc

SEQ ID NO: 39702 - DNA, 83 bp, Homo sapiens
ggcccagcacccgcctgccaggcgctcgggggccgaactggccctggactacctctgcaggataaagataaagtttctctaac

SEQ ID NO: 39703 - DNA, 73 bp, Homo sapiens
gaaggacctgctgatgaatattacatcatataccgaaatgtttttgataagtagagacagggtttcgccatct

SEQ ID NO: 39704 - DNA, 75 bp, Homo sapiens
tgactatcctgcccctgagatccacccaagttgtgcgtcgtctcggagatgcagccaagaaagccatcagtaaat

SEQ ID NO: 39705 - DNA, 101 bp, Homo sapiens
tcctcctttgacagggacatcagtggagccttctcagacccacagtgttcctttctgccgaaattctccattcatatagaaaccaagtatgaggacaacaa

SEQ ID NO: 39706 - DNA, 100 bp, Homo sapiens
gcgctggagccagaatcggaaccacgatgtgactccgccgccggggacccgtgaggtttgtgtggaccccgagtgtgaaaaactcaaattactgtcttcc

SEQ ID NO: 39707 - DNA, 51 bp, Homo sapiens
caacagcatacagcatttctcccaccaggttattattgcagcagaactcct

SEQ ID NO: 39708 - DNA, 100 bp, Homo sapiens
cgcagcactggggaaacgatccgctcccaaaacgagaaaaaagagtgccggcgggaccaccgcccaccgtgtgctcaggaggcgccccgcaacatggtgc

SEQ ID NO: 39709 - DNA, 75 bp, Homo sapiens
catctaaaatacgaaggtttctggctggcggacaaggcaaaatctcagcaagttcggacctctagtacaataagg

SEQ ID NO: 39710 - DNA, 88 bp, Homo sapiens
taaactcattctactggagcaaatggattttttatcaagcagaaatgcatcgaacaacgagaatcaagatcactgagctaaatcccca

SEQ ID NO: 39711 - DNA, 100 bp, Homo sapiens
tcagtcacgaggctcccttgacaggcggctttgcatcggaaatcagctctacagttcagtttgcttcagtgtccccaacagttcctgaattcttgaaaac

SEQ ID NO: 39712 - DNA, 88 bp, Homo sapiens
gtttacaagcaggccacgattgaatctctgaagagacggggtcttgctgtattgcccaggctagatttgaactcctggcctgaagtaa

SEQ ID NO: 39713 - DNA, 100 bp, Homo sapiens
tatggcggtatttagcacagccttggggataatgtgtggtttgcctcgaagcataaacacagacactttatctaaggaaacagacagtggaaaaaatcag

SEQ ID NO: 39714 - DNA, 75 bp, Homo sapiens
cgctcgtctacttcctcagcagcaccttcaagcaggtgctgctggtgagtagcagccggtacccagaccagtgga

SEQ ID NO: 39715 - DNA, 117 bp, Homo sapiens
tctgggaaagggcagcagcagccaggtgtggcagtgacagggaggcatcaacttctaactcatctcgccaggagaggcctccagtgaaacccttcattctcactcggaacatggctc

SEQ ID NO: 39716 - DNA, 100 bp, Homo sapiens
attcagtgttggcccagaaactacaggctgaaaagcatgacgtaccaaacaggcacgagataagtttgggaaggtggtagtgtatgggatcttcctctgg

SEQ ID NO: 39717 - DNA, 98 bp, Homo sapiens
ggggaggccctgcctgctcacagcggggcgcccctgcttgtggaggagaatggcgccatccctaaggtcgtggccctgaagttcatcccaaaattggg

SEQ ID NO: 39718 - DNA, 106 bp, Homo sapiens
gactcgcggaccggcgtccccggcgcgaagaggctggactcggattcgttgcctgaggtgaaatgacaatggatgctctgttggctcgattgaaacttctgaatcc

SEQ ID NO: 39719 - DNA, 100 bp, Homo sapiens
gcaggcagctcgaggacccgcggccccgccccggctcggcctggcagctctggattgagagatcacgatgtaattgtcaacataaatgggaaacctatta

SEQ ID NO: 39720 - DNA, 100 bp, Homo sapiens
gataaatcagacagaacagttaatcctcaatttaagcctgatctaacccctagaaacaggttctcccatgggcaggtggtctctctggatgagctgcgcc

SEQ ID NO: 39721 - DNA, 100 bp, Homo sapiens
ggtcgccgctggatgggctggaaggaccgctggggtcaggagactctgtttgctggctacacggacaacctggtgcgagtgtggcaggtgaccattggca

SEQ ID NO: 39722 - DNA, 50 bp, Homo sapiens
gatgctggaacatgcagagtctgcacaagatccagtttatggaaaaggaa

SEQ ID NO: 39723 - DNA, 88 bp, Homo sapiens
caatttgcacctacattgaaattggacatcatcctgaggcctactgaacttgacgcactggtatttggccatctatacaccattctta

SEQ ID NO: 39724 - DNA, 80 bp, Homo sapiens
gtggtttttctagcccctgctgaaatcctttgaagagactggctgatgctgcagagaacttccagaaagcacaccgctgg

SEQ ID NO: 39725 - DNA, 100 bp, Homo sapiens
gttgatgcaaagacaaaggcacagctggatgaatggaaagcaaagaagaaagcttctaatgggtaccatctgccagcatgactcggctcgcccgatcacg

SEQ ID NO: 39726 - DNA, 50 bp, Homo sapiens
catgaaaatgcatgtttttaatccaatagaaattattcagcagaccatta

SEQ ID NO: 39727 - DNA, 82 bp, Homo sapiens
cgaccgctactttcggatccaggaggtgctgaagcacgccagggtcacccgtgtgaacagaaagtgagaggttgtagcacat

SEQ ID NO: 39728 - DNA, 98 bp, Homo sapiens
caaaaacttgtcaaaactcagcatgcttagcattcgagagaacaaaattaaacaactacctgctgaaattggtggtgcaggaggcaaaggtgtctggg

SEQ ID NO: 39729 - DNA, 100 bp, Homo sapiens
gtcagctgcgtgattcccgtgattgcgttacaagctttgtctccttcgacttggagtctttgtccaggacgctctagccggcccggtccttggactgaaa

SEQ ID NO: 39730 - DNA, 100 bp, Homo sapiens
aggacaactagccctcctactgatgaacagttgaacatgaagaatactggaaagttgctatgttttgactaaatccggctacttgcagaaatataaagaa

SEQ ID NO: 39731 - DNA, 101 bp, Homo sapiens
ggtgatacggcgtcttgccaccgggcctgtcagttgacctaccccttgcacacctaccctaaggaatccaatgctttgagaaataagaaaaactctcgtcg

SEQ ID NO: 39732 - DNA, 82 bp, Homo sapiens
ctgaagacgtctgcgtgagaatagagaccaccgagattcctggtcgggtggcttccagtggtcttcagtctgtcgtgcaccg

SEQ ID NO: 39733 - DNA, 82 bp, Homo sapiens
cagggaaccctggtcaccgtctcctcaggttcttgctggtgtgaaatgactgagtacaaactggtggtggttggagcaggtg

SEQ ID NO: 39734 - DNA, 75 bp, Homo sapiens
gcgttttcttggatgaattgcttgctttggaggcatgcaggggacctccaagcaatgatatccaaggaattccat

SEQ ID NO: 39735 - DNA, 83 bp, Homo sapiens
ctgtcatagaaacgttcttgctgcaatcagcccttacttcaggtcagatgtaccaacagtaccagcaacaggccggctatggt

SEQ ID NO: 39736 - DNA, 97 bp, Homo sapiens
atcctggacatgactgctgttcttcttgcctgtggcataaacccggaaaaaagcatccttttccaacaatctcagggctcaaaatttgggcggggaa

SEQ ID NO: 39737 - DNA, 82 bp, Homo sapiens
cggggacggcgaggccctcatgtaccacacgacctgcctagagctggaacgttacctccagagcgagccctgctatgtttca

SEQ ID NO: 39738 - DNA, 83 bp, Homo sapiens
ggtgaaggtccggggcttgccctggtcttgctcggccgatgaagtgcagaggtttttttctgaacaatgctaaagtagctgtg

SEQ ID NO: 39739 - DNA, 82 bp, Homo sapiens
ggggagcggcggagaccgcctctgctcccgcctgggacaatgcagatcttcgtgaagactctgactggtaagaccatcaccc

SEQ ID NO: 39740 - DNA, 100 bp, Homo sapiens
gagaccctcacggagctgggcgacgagctgaccctgggagacatcgacgtttgaagaaaacaggtctgaaacaaggtcttacccccagctgcttctgaac

SEQ ID NO: 39741 - DNA, 75 bp, Homo sapiens
atgagtccactctggccttccagcagcttgagatcttcttagcccagagagcagtggagttgagtgaggaggcag

SEQ ID NO: 39742 - DNA, 99 bp, Homo sapiens
gctgtggaccccacatcggggcagctgtatggcctggccagagaactctcggatgagatccaagtccagctggattataaagttggctggaagaaactg

SEQ ID NO: 39743 - DNA, 98 bp, Homo sapiens
ggaagaagcaccatggattggtgaggcagcatgcccgggctgccactgttggggcatccagatgtacctctgcaacagagagcactatggctacctgc

SEQ ID NO: 39744 - DNA, 82 bp, Homo sapiens
cggctgggccggaagatcggcagcggctccttcggagacatctatctcgagctcccagctcctccagcagccgacaggaggc

SEQ ID NO: 39745 - DNA, 97 bp, Homo sapiens
cagaaatcgacttaaagcctccagagaagtagaatctgtagaccttccacactgccacctgattaaaggaattgacctgagcatgcagaattccgag

SEQ ID NO: 39746 - DNA, 100 bp, Homo sapiens
atgctggacccaacacaaatggttcccagtttttcatctgcactgccaagactgagtggacagagcgggatgccaccagcttgtccaaagggaagttcca

SEQ ID NO: 39747 - DNA, 100 bp, Homo sapiens
aattcttgctgtagaaagcttaaacttccagaggaagaattctcctgcttgtggcaggaatgtggcttttgttctctggacagttctgctgacctcatcc

SEQ ID NO: 39748 - DNA, 85 bp, Homo sapiens
tgccagtccgcagagcccggcgacgaagaggattccggagtttgaatccacctttgacaattgtccgaaagacgtttgaatcaac

SEQ ID NO: 39749 - DNA, 74 bp, Homo sapiens
gataagccgggcgggagcccctcggccaggtctctggacctctgactgacactgtgcctgcccaggtccctgta

SEQ ID NO: 39750 - DNA, 100 bp, Homo sapiens
cagtgtgcagggacggggaggaggagttccccttcgagaggaggcagattcccctctacatagacgacaccctgacgctgtcggaaaaggtaacagaaga

SEQ ID NO: 39751 - DNA, 98 bp, Homo sapiens
gtgatttccgcatttccaactgagggtacactcaactctgtgactggtggagtgttggagtgattctcttcgagatgctggtggggcagccgcccttt

SEQ ID NO: 39752 - DNA, 110 bp, Homo sapiens
acttgctgcttttgcctgtgtcctgttggtggttctcttcgtcatgatcaacaaatatggtcgacggtccaaatttggaatgaaggggggcagctggcattttatgctat

SEQ ID NO: 39753 - DNA, 50 bp, Homo sapiens
gataagggacccgacactgatgacagaactgtaccgctctctttttggcc

SEQ ID NO: 39754 - DNA, 115 bp, Homo sapiens
ggaatcagcggtgaattgcagtgatctttcagagaaagcgcctgttcaactttgtcctctctcaggtggcgacatgtctaagaatgtgagccagtcacagatggcaaaattgaac

SEQ ID NO: 39755 - DNA, 75 bp, Homo sapiens
cttgaacttaatacagcaagaaagaccatcaagtttaccagatttggagttccatggagtgatgagattttattt

SEQ ID NO: 39756 - DNA, 95 bp, Homo sapiens
ttccttggccatcccaaagctattctgggggcaacagagtggtaagtccctgaaggaaactgttactcttgaagatggacgaattggagaaagac

SEQ ID NO: 39757 - DNA, 98 bp, Homo sapiens
cggcccccgagagccgccgacatgaagaaagacgtgcggatcctgctggtgggagaacgtcagttcaccgggacctggaggcccagattgcgatcgtg

SEQ ID NO: 39758 - DNA, 95 bp, Homo sapiens
acgccttgaatgtgtggcgttattggtgcatgaccaacgggctcaaagaccacacagacatcaccaaggaggagatgttaaagtaacccatcttg

SEQ ID NO: 39759 - DNA, 75 bp, Homo sapiens
tcttcgatgtatctaaacttggcaccaagtatgctggagccagacggactgctggtgtgggtcctggcaggcgcc

SEQ ID NO: 39760 - DNA, 50 bp, Homo sapiens
cagaaacatatctattatatcacagggtggttgagtttgcctcttatggt

SEQ ID NO: 39761 - DNA, 50 bp, Homo sapiens
agagggaagacacgcggaaacagtgcctgcagctctacgccccagggctg

SEQ ID NO: 39762 - DNA, 75 bp, Homo sapiens
aagcaagtgaatacgagtcagaagttaaacacagtgggaatatcacttttgatgagattgtcaacattgctcgac

SEQ ID NO: 39763 - DNA, 101 bp, Homo sapiens
agccctcgtccagacgccccaaacaaacattggcccgccacaataaactgttgcagcagatgctcaaaccaggatcggatccagatgaaggagatgaagcc

SEQ ID NO: 39764 - DNA, 83 bp, Homo sapiens
tcccagaaacgtcactatcaagaagctatatgttctcctttcagccaagacctttcaccagtgcaggggatagaagattcatt

SEQ ID NO: 39765 - DNA, 75 bp, Homo sapiens
ggacagaccaacctgtcagtgctgcaacactagaaagtttgggatttggctcttacatcagtgaagtaaaagaag

SEQ ID NO: 39766 - DNA, 73 bp, Homo sapiens
cttttggaacacagttaccaccgatgcatcagcagcaaaggactgctgcagatcaatgacaaaatcgccctaa

SEQ ID NO: 39767 - DNA, 97 bp, Homo sapiens
cggggcaacaacctcaccgtgcaccttcgcaagaagcaccagttcaagtggccctcagggcatccccgttttcgctatttccttcgtgctaccatca

SEQ ID NO: 39768 - DNA, 82 bp, Homo sapiens
gtgaggtgccaagtggctgatatgaagaacatttatgaaaaatatattcagggggaagagatgtaatagatttcacattatg

SEQ ID NO: 39769 - DNA, 75 bp, Homo sapiens
aagaacaaggctgtggtggtgaagtccgtccagaggggctcgctggctgaggtgcagtggtccagctgcaacatc

SEQ ID NO: 39770 - DNA, 100 bp, Homo sapiens
agcctcagtttgtgcaggacaccgacatggaacagggactcactgggggtcatcatcagatttgaaatatttaaagtggatacaaaactatttcagcaat

SEQ ID NO: 39771 - DNA, 80 bp, Homo sapiens
cgggagcaagatggcgattccgggcaggcacggggccttttccgaagtggttttagctgaagagaaggcaactggcaagc

SEQ ID NO: 39772 - DNA, 100 bp, Homo sapiens
tgaatctgaaaaaagagagttggtgtttaaagaggatggacaagtccagcctagggtgaatgtttccccctccaagaaggggcccttgcagcaccacaac

SEQ ID NO: 39773 - DNA, 100 bp, Homo sapiens
cacagagcatcgtggaggccacctctaggcttaagaccttcaacttgatcccggctgttgggaattcctggggaagtcggagcctgagcaccagcactga

SEQ ID NO: 39774 - DNA, 82 bp, Homo sapiens
tgctaccctgctttttctggtgtcctgaacctggaagttgtgctttttaagcaattctgtggtgttcttggtcacacattta

SEQ ID NO: 39775 - DNA, 76 bp, Homo sapiens
cctagcagaagcctatggatctggaggtgtgatgaatgcagactctgctaccattttggctgtttggatcctcctt

SEQ ID NO: 39776 - DNA, 75 bp, Homo sapiens
ccggaagagcgccatcattgagacctacgtcatggacagccggatcggatctgacatgaagaatcaaattgaaca

SEQ ID NO: 39777 - DNA, 82 bp, Homo sapiens
tgaaccagctccgtctcagtcctgtgcctcccgtccctggagcgccacccacgtgtttgccgcctggtcctggtcgtgctga

SEQ ID NO: 39778 - DNA, 100 bp, Homo sapiens
agaaggtctctggagacatcttcagcaggaaattgcaagaacctattgatggcttggatgctctggtggtgacagcaagtcctcttctcttgactgaaga

SEQ ID NO: 39779 - DNA, 75 bp, Homo sapiens
acggatgagcatttagtgaaggatttgggcagcctcaatgggggaggaaataatgctggccatacagttgttgtg

SEQ ID NO: 39780 - DNA, 75 bp, Homo sapiens
gccagggtcagaaagtgcagaaggttatggtgcagcccatcaatgaggtgctgaaccggcaaatccaaaaggaga

SEQ ID NO: 39781 - DNA, 78 bp, Homo sapiens
ggataccctgaagtcgggaaatggggttctgaaggaacattaaatgactgcaagataatatctgtagatgaaatcttc

SEQ ID NO: 39782 - DNA, 99 bp, Homo sapiens
gaattcaaccacagacattctcaaggaaacacaagagaaattctatggcctaccatatgttccaaatactgtgtcatggagaaactccagctgggccca

SEQ ID NO: 39783 - DNA, 100 bp, Homo sapiens
gaattcagcaactgaacagcaacaaagaagacatagctcatccagcaagccgcctttggccgttcctcccacttcagtattttccttcttcccttctctg

SEQ ID NO: 39784 - DNA, 83 bp, Homo sapiens
cgcgggcgagcggctgtgtggatgtcggcgaagccgcgggcgagatcatggaagggaagtggttgctgtgtatgttactggtg

SEQ ID NO: 39785 - DNA, 100 bp, Homo sapiens
cgggaacaaactagccctcaagacgggaatagtagccaagaagcagaagacggaggatgagtaatagctcttcaagtctgcaataaaaaatggcctccaa

SEQ ID NO: 39786 - DNA, 122 bp, Homo sapiens
tctgattccctgtgttctgcttttttcattgttccactggacgctcatcagagggaagatctttttcctcaattggatgcagagaatcaaatattaaagacaagtgtatggtaccaagaggt

SEQ ID NO: 39787 - DNA, 100 bp, Homo sapiens
cattttcaaaaccttgttctataatactttgtgctgggcaagagggatctaagcctgtgcccagggcaccttcaagcccctgtcaggagaagggtcctgc

SEQ ID NO: 39788 - DNA, 100 bp, Homo sapiens
attagtttctggaggatctgataatcaagtgattcactgggaaatagaggataatcagggatggagcctatagaggtgcctcttgaggaaaatagtgaac

SEQ ID NO: 39789 - DNA, 100 bp, Homo sapiens
atccggacaaagagtcaaggtggggagccaacatacaatgtggctgtcggcagagctggtagaggaaatactcttaattctaaggaaaacctggaagcac

SEQ ID NO: 39790 - DNA, 98 bp, Homo sapiens
aggaatctggattgtcacctttgctgcaaaaaattacggtttcaccagtgatcattaaagaatgggcagcttacaaaggaaagtctcctcaaaccccg

SEQ ID NO: 39791 - DNA, 83 bp, Homo sapiens
gctgccctggttccccggccccacccgatgcggcctccaagtgcaagaagaaacacacgctgctgtgccccgactttgcccgc

SEQ ID NO: 39792 - DNA, 96 bp, Homo sapiens
cagtcccgccgtgcagcgcttcctggtctcccgggtcaccagaaagtcctacctccatctccgtgggccccagcaccagccgacggcccgcagcct

SEQ ID NO: 39793 - DNA, 100 bp, Homo sapiens
gactgtctcagctgctgccaagaatggtacgtcatcgaacaaaaacaaagaggatgaagacatagctaaagctgcagaaccttggcctgaaaatgctaca

SEQ ID NO: 39794 - DNA, 140 bp, Homo sapiens
aaaaggctgaaaaatgtttctgtccaggcaagggtgtgtgctgaatgactcaaggattttttggatttaccggaacattccaggatttttacgtacacttatggatgccctgagaaaagacaaaataatctttcctaatg

SEQ ID NO: 39795 - DNA, 100 bp, Homo sapiens
aaaagtgccaccgaagaggtgagaacaaaatcatgattcccgatgtgccaggattctcctgggtgactccctgtatatctgccaaggatattgtgtatat

SEQ ID NO: 39796 - DNA, 50 bp, Homo sapiens
gtgaaaacagaagctgtggctattcttggatctcccagtcagcttcattt

SEQ ID NO: 39797 - DNA, 51 bp, Homo sapiens
ggtggctccgcggattataacagtcatccgtccttggctcaggatttggag

SEQ ID NO: 39798 - DNA, 96 bp, Homo sapiens
tatggcattgcatctaaaaagacttatagatgagagagatgaacattcagagtttgcagtgttgatgtgggtatttacctatgttggtgccttgtt

SEQ ID NO: 39799 - DNA, 75 bp, Homo sapiens
gagctgaccctgggagacatcgacgtgtttgaaagatgtatggtgatcttgaaacctccagacacaagaaaactt

SEQ ID NO: 39800 - DNA, 75 bp, Homo sapiens
tttgcgcagccgccgggaccctggcccctgtcgagggccgcgcggggcgctgagcttactgctcctgctgctggc

SEQ ID NO: 39801 - DNA, 110 bp, Homo sapiens
gagtggagcatggtcccgctgccataagagaagctggcttgatgaaaaggctctccagtttgggttgctgcttttgctcagaggacatccatgaccctaatggtcttttt

SEQ ID NO: 39802 - DNA, 75 bp, Homo sapiens
cttacgatgtcttctctttgctacggatactgtcatgaagcagacacatgctgacacacctgttgatcattgtct

SEQ ID NO: 39803 - DNA, 75 bp, Homo sapiens
ccccgcgggcgcagccctttgcgcagccgccgggaccctggcccctgtcgagaatgcaagttctagccggttttt

SEQ ID NO: 39804 - DNA, 75 bp, Homo sapiens
gaactcccacaatgccacaggaggaggcagcaggtgatccatgctctagggcaatcatggcatcctgagcatttt

SEQ ID NO: 39805 - DNA, 100 bp, Homo sapiens
aagagaaagcgggacagaggagcgggcagcaagcggaaacgagataccctcttggccatccgggccccatcaggcaccagcctggaggtgcccatcccag

SEQ ID NO: 39806 - DNA, 101 bp, Homo sapiens
tcttctgcagaaaaagaggctcttcctcctcctcccgcgacgatcctgtttgaccaaactcagagatcaattaaggcacagcttcagaactttgttaaaga

SEQ ID NO: 39807 - DNA, 75 bp, Homo sapiens
cctgctcctgtgcctgctgcaggccgctccagacgaagttatacggaagcgtctcctcattgatggagatggtgc

SEQ ID NO: 39808 - DNA, 75 bp, Homo sapiens
ccagcgccggcctcctccgtgcggagaagaagctgcggccgcacctggccaagcaaatcagccggcaccaggagc

SEQ ID NO: 39809 - DNA, 98 bp, Homo sapiens
aggctctgtgcaatcctcacattcaagctgataggctgcgctaccggaatgtcatccagcgagtgattagagaaagtctattcgtgtgaccaggagag

SEQ ID NO: 39810 - DNA, 74 bp, Homo sapiens
cagctgtggaaagaagttgcaaaacactggcaaaacacttactattttggagtttaaagtatgtcatcatggca

SEQ ID NO: 39811 - DNA, 90 bp, Homo sapiens
cggggaactagggagcgtctccggctgcacagcgctcagattcacaatgacatcctttcaagaagtcccattgcagacttccaactttgc

SEQ ID NO: 39812 - DNA, 75 bp, Homo sapiens
gtgccgccagtgtttccgtcagtacgcgaaggatatcggtttcattaagggtttttaatgaccacaacaagcaag

SEQ ID NO: 39813 - DNA, 75 bp, Homo sapiens
gttcattctgactgacaactgcctttactactttgagtataccacggcagcggaggaggagaaagagatggacct

SEQ ID NO: 39814 - DNA, 97 bp, Homo sapiens
cgggagtcggtgctcggcctcctgcggggagcagcccgagggtctcggcgcggaagatggccggcggcgtggacggccccatcgggatcccgttccc

SEQ ID NO: 39815 - DNA, 115 bp, Homo sapiens
gccggagcccagcagctgtgggagccccgagaacgcctccagcggggatgacacagaagggggatatgagactttctactcggaatatcctgagtgttgcgtggatgtaaaaccc

SEQ ID NO: 39816 - DNA, 83 bp, Homo sapiens
gacagattcgcagtggtcgcttcttctccttggtctctagcatcaattcacgctttgccaaagtacacatcctgtatgtgggg

SEQ ID NO: 39817 - DNA, 90 bp, Homo sapiens
cagaagctggtcctctggcttctgtccctgctcagtcggccaagaagccctgcccagggaaagacattcccggtcaggcatctctggtgt

SEQ ID NO: 39818 - DNA, 100 bp, Homo sapiens
gcgtcctcatgtggggggtaaaccactcgcaccacacactggaagcagacgctgttcatgatggacgacccagtccctgtccatacaggagacgtggtca

SEQ ID NO: 39819 - DNA, 100 bp, Homo sapiens
aagaaaccagccgaacttcagggtttccaccgttcgttcaaggtttggagacttgaaggaggacaaagtgacgcgtcatgatggagccagctcagacggg

SEQ ID NO: 39820 - DNA, 100 bp, Homo sapiens
tggacctccaaggaagccacgtgcagacatctacaaccttcgatctcctgacgattcctgggcttcccgatggactcgagtttttactatgtgagcatcc

SEQ ID NO: 39821 - DNA, 82 bp, Homo sapiens
caggctccttggtgagaagaccaccacagcggcagcagcccctgtcaaagggaacaggaagcagtccacggagggtgacgcc

SEQ ID NO: 39822 - DNA, 74 bp, Homo sapiens
ttgatgggtttgtggagaggatcaagcatgcctgtcaactgcatcaaagctaagccagaagatttatcacattt

SEQ ID NO: 39823 - DNA, 90 bp, Homo sapiens
cttggaggtggcattgttgggagcgctgttttcgtgatcttcagaccccaggttctttggtgctggagaatctggtaaaagcaccattgt

SEQ ID NO: 39824 - DNA, 100 bp, Homo sapiens
gagcaatttgaggtcatcaagcaacaaaaagaaatcattgaacacggcatcgagcttgcccttcactctctgaagaacagccatgcctgaatcagagtct

SEQ ID NO: 39825 - DNA, 75 bp, Homo sapiens
ccgagccccagaccagctctcaggatgactttggtgagttctgcagtcagggtgtccgtgagggcctcatcgtgg

SEQ ID NO: 39826 - DNA, 85 bp, Homo sapiens
aagaagaagaaaacaaaggtagaacatggaggatcgtcaggctctaaacaaaattctgatttgcttgtaaatgcatcacgaagag

SEQ ID NO: 39827 - DNA, 75 bp, Homo sapiens
gtggaagcaggactgcgccgcgtcttcctcaaggccccttcacagatgtagtcactacaaatcttaaattgcgaa

SEQ ID NO: 39828 - DNA, 75 bp, Homo sapiens
tcggaatcagatttgaaaatgaaagtgaattacatgaatgacagtcttcgaaccaatgtgtttgttcgatttcaa

SEQ ID NO: 39829 - DNA, 112 bp, Homo sapiens
cacatcagtgcaagatgagttcatgcacttgctattatgggggaaagcaaggcaaaatggcaatacctgtgctttggaagtttctggagaagtatccttcagctgaggtagc

SEQ ID NO: 39830 - DNA, 108 bp, Homo sapiens
gatgaggaatcggtgaagatcgtccgcttggtgaagaacaaggaacccctgtgtcccaccagtggcagagtgggctgttcctcagtcatcaagactgaaatacaggca

SEQ ID NO: 39831 - DNA, 73 bp, Homo sapiens
cttcacactatggagagggaagcagatgatccaatggaagaagacattctccaagttgtgaaatactgtactg

SEQ ID NO: 39832 - DNA, 51 bp, Homo sapiens
ttctcctatcagggtcgggcttccaggaggcagaggttgcggtgagccgag

SEQ ID NO: 39833 - DNA, 98 bp, Homo sapiens
ggtgaagaagtttgtgaagatcggccgcccgggctacaaagggaaagatgccaccctcctgatacatgaagccaccctggaagatggtttggaagagg

SEQ ID NO: 39834 - DNA, 101 bp, Homo sapiens
acagctgcattcactgcagagctcacttggccaatcatgatgaactaatttccaagagctaagcttgtctgctggatccctgcagctggagcgcaaaagga

SEQ ID NO: 39835 - DNA, 98 bp, Homo sapiens
ggaggtacaatttgccagtgtttccacaatggaaccaattgttttacagtctgttccacatgatcattgtaataagctccagaacctgggtatcaacc

SEQ ID NO: 39836 - DNA, 75 bp, Homo sapiens
acacctgtgacagttaaagctcagactaaagcccctcccaaaccagagccaagagctgggtagagctgcaaggac

SEQ ID NO: 39837 - DNA, 98 bp, Homo sapiens
ttgatgaccggcagcggctggcccgggagcgacgtgaggaacgggagaaacagctaggtggctgactgttcttgggatgaaacaataaagatctatga

SEQ ID NO: 39838 - DNA, 90 bp, Homo sapiens
aaacttctcaaatgagccaacctgagtcacaagcctcctttggaaaatctggcaactgtggaagagactgttgttcgtgacaaggctgtg

SEQ ID NO: 39839 - DNA, 95 bp, Homo sapiens
ccgcggaggaggcggccctggcgcggggaagcagtgggaaaatcgcaaggaagccgggtatgcaggtgccttgagagcttcaggggaaatggctt

SEQ ID NO: 39840 - DNA, 74 bp, Homo sapiens
tggccacgtgcttcaacgctctgctgcccgctgtgagggaaaagtcggcgtggcacaagcctaatggaagatga

SEQ ID NO: 39841 - DNA, 100 bp, Homo sapiens
agttctagagataggagcagagaacgatccaagaggaggctgctgatactttggctgtgaggcaaaaaaggagaatttatgatatcaccaatgtcttaga

SEQ ID NO: 39842 - DNA, 100 bp, Homo sapiens
cgaggctagggaggacctcacttccccggggtgtaataatgttaactgagaagaagaagtattcttctccatggctgatatggacatgtctcatagtctc

SEQ ID NO: 39843 - DNA, 100 bp, Homo sapiens
gtctgttgggggcttgtgttgatcaggagtgaattcacagtctaccatgaattggaagatactaaaatggatcgtaaggataagctatttgtgattaacg

SEQ ID NO: 39844 - DNA, 103 bp, Homo sapiens
tctacctcctgcgaggcctcccgggctccgggaaaactacactggccagatctctgttgaggagctggcgcggaatctggtcatcaaggtcaacagggatgct

SEQ ID NO: 39845 - DNA, 101 bp, Homo sapiens
cagaaagcggcttatcgaacagagccgggagttcaagaagaacactccagagaaacattgctgaggctcttgtcagcaaaggtctagccacagtgatcaga

SEQ ID NO: 39846 - DNA, 75 bp, Homo sapiens
ctatcctcattatctccaaaccaaggtgactattatatggttaaaaagattttggaggaaaacagttcaggtgac

SEQ ID NO: 39847 - DNA, 75 bp, Homo sapiens
gaaagaacatggattagctgagcagaaaagaagaaggaatactggatgcacttcatcgcagtaggaatggcagcc

SEQ ID NO: 39848 - DNA, 80 bp, Homo sapiens
agctcccagtcccaatgaggaaccagcaggctccccacaggtgcaggaagccgccgcccagccatggacggggaggagca

SEQ ID NO: 39849 - DNA, 74 bp, Homo sapiens
tggacaagatcatgggcaaaggacagatccaggatctcatctggccaccgcgttctggaagaggcgagagggag

SEQ ID NO: 39850 - DNA, 97 bp, Homo sapiens
gcactccgcacctcggggacattattgcgcgtggaacggctgcttttggaagtgggtaattccagaattgattggccataccattgtcactgtatta

SEQ ID NO: 39851 - DNA, 100 bp, Homo sapiens
aaaattatttatccaacagctcctcccaggagtgaaagctggacattgaagaagccaaaatctgtttccaagaaactaaagagtgtattccgagtaccag

SEQ ID NO: 39852 - DNA, 75 bp, Homo sapiens
gttgccagatggtgcaatgttcaaagtactcaagatgaatttgagatgagcctgaagtcttgacagaacctccaa

SEQ ID NO: 39853 - DNA, 98 bp, Homo sapiens
acagctacatccaggagagaatgctgacagtcctgcagaacatctgctcaaattaatgaccatgggggatatgaagaccccagactttgatgacctcc

SEQ ID NO: 39854 - DNA, 97 bp, Homo sapiens
cagagctgtaccagtacacggcccacgttgccagattttctggcatccttaaatcttgtgtcaaggattggttataatataaccagaaaccatgacg

SEQ ID NO: 39855 - DNA, 50 bp, Homo sapiens
aaggacgcaaagttctccggcgagtactatactggcaattgctggagaag

SEQ ID NO: 39856 - DNA, 51 bp, Homo sapiens
gccagcagctcgctcagtacaagaggctaggcagctggaagagaaagaccg

SEQ ID NO: 39857 - DNA, 75 bp, Homo sapiens
aatgcaactgcgtgcatggtgaatcttcagctggtactgaacgacacctgggtctccttcccttcctggtctgag

SEQ ID NO: 39858 - DNA, 83 bp, Homo sapiens
gtcgccttgctcctcgccgcggcggggactgcaggtcttgggcgtctttggtactggcttttttaggggtctgcctggggatt

SEQ ID NO: 39859 - DNA, 100 bp, Homo sapiens
ttgctgcaaggctgagggacgagaacgaggcagtgaaatcaactgtgcagaccatcactgttggaggagtgagcacatcacagtttaagacaattattcc

SEQ ID NO: 39860 - DNA, 87 bp, Homo sapiens
aggagatggctacgtgatccatctggctcctccaagtccttgaatgggcaagagggcacatgaagtacggcgtcctccacattcacg

SEQ ID NO: 39861 - DNA, 75 bp, Homo sapiens
ataacaagttccgatcagaggtgaaaccaacagccagtgatatgctatacatgccctggcttgaaaaacagtcca

SEQ ID NO: 39862 - DNA, 75 bp, Homo sapiens
cctccgggaccggagtcagaaccctccgcagagtaaagaaatttaaaagcctgttgattcaagaactttctaaag

SEQ ID NO: 39863 - DNA, 100 bp, Homo sapiens
cgctcggtcccgcgctgcgcatccccgcggacgccacagcgctgctcgcgatgcctctacacaagtatcccgtgtggctctggaagcggctgcagctgcg

SEQ ID NO: 39864 - DNA, 96 bp, Homo sapiens
tccgttgcgagctgcagctgcgatctctgtggtaggcccagctgctcagataaagaatttgatgagccagctaggaactaagcaggactcaagcaa

SEQ ID NO: 39865 - DNA, 101 bp, Homo sapiens
gacctgctaacagaactggaccttttcgccgctccgggaattctgaagttctgggcctttctcagaagactgtaatgtacctgaagtttctgaaatattgc

SEQ ID NO: 39866 - DNA, 82 bp, Homo sapiens
gacaccattgcagaaggaataaccttcatcaagttttatgctccatgaggctgggaggcggcagaatgcagccagaggaggg

SEQ ID NO: 39867 - DNA, 100 bp, Homo sapiens
tttgcctcccaccgtgattctgaggcctccccaaccatgtgcaattctgggatctagcaattgggaggcagcagacttgggtaatgaagagagaaaacaa

SEQ ID NO: 39868 - DNA, 100 bp, Homo sapiens
aatacatgtacagttattttcagaccttggaagattcagatagctacaaaaggcaggctgcacctgaggagtaaacatggaagtactaacttcattccag

SEQ ID NO: 39869 - DNA, 89 bp, Homo sapiens
aggttgaagcagaagaataaggagaaggataagtcgaaggggaaggcgcctgaagaggacgaaggagctgaaggtggtggatcatcgtc

SEQ ID NO: 39870 - DNA, 75 bp, Homo sapiens
accaagatgctatgtgagatcttgaaagtgggcgagttgcgatcttatggttggtgatgaggcaagtgaattacg

SEQ ID NO: 39871 - DNA, 100 bp, Homo sapiens
gctgatttatcttcgatacaaatgcccagatatgcatcgtcctttcaagcaattcacagaagctgtgagtccttcagtgctacccccttcagctttgcca

SEQ ID NO: 39872 - DNA, 74 bp, Homo sapiens
acacacacctgttgccattatagagctggaattaggcaaatatggacaggatgggaaggccattgtgactatgt

SEQ ID NO: 39873 - DNA, 75 bp, Homo sapiens
aactgaccatagccagagaacagccctccatcttgcagcccagaagaggcatttcatccttcatgaagccattca

SEQ ID NO: 39874 - DNA, 101 bp, Homo sapiens
tgatccacccgagccaggatgaagatgaagctgtgctgaatggtttggtggccactgaggtgttgatgtggttttatgtcggagagattataggcaagcgg

SEQ ID NO: 39875 - DNA, 75 bp, Homo sapiens
ctggaaatctgaatgctgttatcacgggtcggcaccaggaattattatagaaagatcggctacagattacaaggc

SEQ ID NO: 39876 - DNA, 103 bp, Homo sapiens
gaggaagaacgcgccagagcaaaatgggacacaagtttgtgaagatgatgtctcgctgaggaggtcctggaagctccagaccctctccacctggtcaacatgg

SEQ ID NO: 39877 - DNA, 90 bp, Homo sapiens
actatggtggcaaaaaagaagacttcaagcgtttgggtacctaagactaatgctttctgtggacaccactgagctctgcctcaactccac

SEQ ID NO: 39878 - DNA, 90 bp, Homo sapiens
gaaagataaagcccttaaggacaagggtaaacttcatgatccagaaggcatgggaattattccaagaatagtgcaagatatttttaatta

SEQ ID NO: 39879 - DNA, 74 bp, Homo sapiens
cggggtcggcgggagccagcgagccacgggagcgagccaggagggctccccgaggactttctgaactccctgga

SEQ ID NO: 39880 - DNA, 83 bp, Homo sapiens
ggaagagcgagccagcgcccggagcaagcggagctcccccaagagccggaaagcaccagcaggcagctggctccggttttggg

SEQ ID NO: 39881 - DNA, 151 bp, Homo sapiens
tgccagcaaacgtctacactgtacatgctttttattacaagactacggagcataggaggaaaattcatcatctgtactacgacatttctgccaaaagtaactacaactttgaaaagcccttcctctggcttgctaggaagctcattggaga

SEQ ID NO: 39882 - DNA, 75 bp, Homo sapiens
ccagttgtttgacaagagtggaaatggagaggtgacatttggatttgttaaggattccaagtaactcttatttgg

SEQ ID NO: 39883 - DNA, 100 bp, Homo sapiens
gtggttctggttttcagtccattgtgaatggatgtcagatatttgttcagtcgaatcaaggtgaagaggaaacaacaagaatttcatattttacttttat

SEQ ID NO: 39884 - DNA, 95 bp, Homo sapiens
gagggtaaaaaccccggaagggcggacacctccacatcgccttttgccacctttccctttatttccggaggatatgggtctgcaggatggagttc

SEQ ID NO: 39885 - DNA, 100 bp, Homo sapiens
agtcgtcctccgcaagaaattctcggccagccgcttctgggacgactgcatcaagtacaactgcacggatcctttgaggttgccttccctgatgctgcgg

SEQ ID NO: 39886 - DNA, 98 bp, Homo sapiens
agaaagcctccggaatctaaaaagccctcagtaccagagacagaagcagatggattcgtccttttagttctgctaagccaatattctctagaatgagc

SEQ ID NO: 39887 - DNA, 80 bp, Homo sapiens
ccatatcataagtggaattttggagatattcaaaggaagggaaaaggccgaggcatcagcgtgtgaagaccgcaaagacg

SEQ ID NO: 39888 - DNA, 74 bp, Homo sapiens
aatattggggggctcggctgcagacttggccaaatggacgggactattaaggtgaaaggtgtagcagtcactcg

SEQ ID NO: 39889 - DNA, 100 bp, Homo sapiens
gacccagcagccagagagtgaaaggtgggaatggaagtggccccacatctcaaagaaaccctaaataagaacttttttgacttcctccttacgttcaaac

SEQ ID NO: 39890 - DNA, 82 bp, Homo sapiens
cactcagtcactccagctccacgggcagacacctgcacagaggcccgatgagagaaagggaaagttaaggatgctggagcag

SEQ ID NO: 39891 - DNA, 83 bp, Homo sapiens
cgcggtccccgccagcgccccatcctgagccggagcgagcccagggcgtggtgctgaaagtgctcacaaacttcaagagcagt

SEQ ID NO: 39892 - DNA, 100 bp, Homo sapiens
cggcccccgagagccgccgacatgaagaaagacgtgcggatcctgctggtgggagaacatgatgataattccgaagaaggcttccacactattcattcag

SEQ ID NO: 39893 - DNA, 90 bp, Homo sapiens
cttctttaagggctacgggaagatcctggaggtggatctgaagaacgggttccgaggcctcatcctgctgctgaccttcctaatttacgc

SEQ ID NO: 39894 - DNA, 98 bp, Homo sapiens
agaactctcacatcatgccgcattctgtccctggtctcatgtctcctgggataattccaccaacaggtgatacagttaatattggagatgtatcctac

SEQ ID NO: 39895 - DNA, 51 bp, Homo sapiens
gtaaaagccccgcctctgccttcggatagtaattagtgaatgccaaaggca

SEQ ID NO: 39896 - DNA, 99 bp, Homo sapiens
caccggaacccgagaccgagtcagaacccgagtgctgcttggcggcgagtgacttgaatcccaccaagaattctggaccagagattgttcacgcgagca

SEQ ID NO: 39897 - DNA, 49 bp, Homo sapiens
ggagaaggaagaggtgtttgaaaaggatctcattttgcccaacggtggt

SEQ ID NO: 39898 - DNA, 100 bp, Homo sapiens
gcgccgggccctgctgcgggggggagagccactgacgccgggaccgggaccgccgccgccgccgccaccatggcttacagcttcgccatgggctgctggc

SEQ ID NO: 39899 - DNA, 75 bp, Homo sapiens
aaaacttggaactaagctggaggacaccgagtactcttatgcagtccccatggaacctctaaaacattatactcc

SEQ ID NO: 39900 - DNA, 73 bp, Homo sapiens
ggcctgctgctggcccgcaggtttcactaggccagtacctgtgggctgcttctctagcagagaaatactgtga

SEQ ID NO: 39901 - DNA, 100 bp, Homo sapiens
ctttaattcatccacagccatcatataaagaacaactggaacgcattgaggaagggatggaccaaatcaataaggacatgaaagaagcagaaaagaattt

SEQ ID NO: 39902 - DNA, 80 bp, Homo sapiens
ctcggcccccatgcctgcccgaccgcgctgccggagccccaggctgaaggtgatgtggccgccctcaaccgacgcatcca

SEQ ID NO: 39903 - DNA, 100 bp, Homo sapiens
cagcgtcggagacggaggccctgccctcagagacgcgccccctagtggaagcagagtgggaagcaggaagacaactgttagttttgtggcttactgctgc

SEQ ID NO: 39904 - DNA, 75 bp, Homo sapiens
caagaaaattactaaagaggagtttgccaatgaatttctgctcattgctatggacagtgctatcaccctgtggca

SEQ ID NO: 39905 - DNA, 73 bp, Homo sapiens
ggagaggctgcagcggaggcggaagcaggactcggggcacttggggcggcgactggcggcgcgatggacctga

SEQ ID NO: 39906 - DNA, 75 bp, Homo sapiens
cttcagctacatattctgccttttcaacactacacagagttgtatatatagaacatcctggagtccaccatgaac

SEQ ID NO: 39907 - DNA, 96 bp, Homo sapiens
gaggagcctttcgatatctggggaacttggcattcaacattaaaaagcggatccaaagacccaggaatgacagatccataatgagatggcatcaac

SEQ ID NO: 39908 - DNA, 98 bp, Homo sapiens
cgtcctcatgtggggggtaaaccactcgacgttggaacttgccaggaatccagcaatgatgcaggagatgatgaggaaccaggaccgagctttgagca

SEQ ID NO: 39909 - DNA, 75 bp, Homo sapiens
tgttgaaaataaaagaaggacttctaaggcagaaagaaattgtaatcgatcgttctttatagctccaagctctac

SEQ ID NO: 39910 - DNA, 50 bp, Homo sapiens
gtctggaggagccttctcaagaacagagatcatgagcgtcttgttgttca

SEQ ID NO: 39911 - DNA, 75 bp, Homo sapiens
ctgaatacaacagaccccaacagtactttgtgttcctccaagaaaagctggttatattgaagacctggttttgat

SEQ ID NO: 39912 - DNA, 100 bp, Homo sapiens
caaggatttccaagtgatttcttccaaagcacaggaatctcactctgttaaagctggtctgttctaactgagtgtatgttttaactggaaaaagtcttcc

SEQ ID NO: 39913 - DNA, 50 bp, Homo sapiens
ggcagctgtactaggactgggaacggtttggtgccctggttgtcagatgt

SEQ ID NO: 39914 - DNA, 83 bp, Homo sapiens
gtccgatggcggcggcactgagggccccgacccagattgccatcagtttccaaacttaatggcagcgttgttactgatggtga

SEQ ID NO: 39915 - DNA, 124 bp, Homo sapiens
actgcacttcttttttgagaaaggaaggaatatatcctgactgattggttttttgattaactcaaaaccagagaatgcctgtgaacccatagtgcctccaccagtaaaagacaattcatctggc

SEQ ID NO: 39916 - DNA, 90 bp, Homo sapiens
cagcttcttcagagagagaggttgttgagtgacctctgagaaggatgtgcaaacagctctggctctagcaaaaggaaagtttggccgtgt

SEQ ID NO: 39917 - DNA, 78 bp, Homo sapiens
gaaggccatcaccacgcagaacgtcaacaccaagtgcatcaccatccccaggttcactatagttgcggagagtctgca

SEQ ID NO: 39918 - DNA, 50 bp, Homo sapiens
tttcaatgaactgtgggattatgaaggaagccatgatactacaattcgat

SEQ ID NO: 39919 - DNA, 75 bp, Homo sapiens
gtatctgcctaggcattttgctgtctcctcctaatacgtttcacttctccgaaccctgaggcagtgtgtgaagct

SEQ ID NO: 39920 - DNA, 97 bp, Homo sapiens
cctggccctcactgtgttggaaggacagtcattttgtttactcattcagccctgttgcaggtcccaataaactcttcataaggttgacagaagcacc

SEQ ID NO: 39921 - DNA, 100 bp, Homo sapiens
gcggatcaggatcggaagcctgcgtaactttctcccttgatccgggagtctttccactggacctgtcgcgaaatcgcctttcagaaattcctatagaagc

SEQ ID NO: 39922 - DNA, 74 bp, Homo sapiens
atctgaacagtagcctgcgctaccttgatgtcagctgggacactccggacgcaggcccggccaggagagttcgt

SEQ ID NO: 39923 - DNA, 74 bp, Homo sapiens
gctgcacatggcctttgcagaaaagagagggggaaatttgcagtggtgagaaaatgtataaagaaagattctgg

SEQ ID NO: 39924 - DNA, 51 bp, Homo sapiens
ggtggttaaacttcgcaaaatgctctttccaacaactgatcctgtgggtac

SEQ ID NO: 39925 - DNA, 80 bp, Homo sapiens
accagaggggcttggatgcagatgatcatcatctgggcactgctggatactgataaagatgacggcgccttgaggtaagc

SEQ ID NO: 39926 - DNA, 99 bp, Homo sapiens
caaagtcaagagacagcgattggacagaatttgtgaagtattctaccttgtaaatactgttatttgtatatactgtaaatgatgacatcggtgggcact

SEQ ID NO: 39927 - DNA, 110 bp, Homo sapiens
accatcttgattcaaaacatctatcgtaatccccaaaacagtgcacagacggctgacggctcacactgttctcttattcaagtaccttccgttgagagggggaaacttag

SEQ ID NO: 39928 - DNA, 82 bp, Homo sapiens
tgccgctcctaagcctgcacagccgcggcggcagcagcagtgagagactatacttgtagcaagcagaaacatcgatctaata

SEQ ID NO: 39929 - DNA, 75 bp, Homo sapiens
cgacaagccgctggcagccgcggatctcaccgccgctcaggaaatggctgcaagcaactgacctcactagagaag

SEQ ID NO: 39930 - DNA, 98 bp, Homo sapiens
ggggttttgatcctgtcactgtggtgtcatggagaaactccagctgggcccagagattctgcagcgggaaaatccaaggcttatttatgccaggctga

SEQ ID NO: 39931 - DNA, 100 bp, Homo sapiens
aaagagaaacacggcaagaagccagtcaaagagaaccagagtgagggcaagggccccactccacagcgccgaccggtgtccagcatacacccccctggcc

SEQ ID NO: 39932 - DNA, 99 bp, Homo sapiens
cactggccatccagcaactggctgagggactcacagctgatgacctgctgctcgtgctgatctcagtgtaaggcaaacattggtgggcaccgatcttcc

SEQ ID NO: 39933 - DNA, 82 bp, Homo sapiens
acaacttagaatggagtataaagatcagtgtactgttacccggacatacctattccttcacaagttctggttcttcagtgct

SEQ ID NO: 39934 - DNA, 100 bp, Homo sapiens
ctgtgcgctaaccccggagcccggccccggggaactagggagcgtctccggctgcacagcgctcagtacaaaattggacagctgtacatgatcagcaaac

SEQ ID NO: 39935 - DNA, 100 bp, Homo sapiens
ccacctcttcaggaaagccatctgacttcaatcagatataattgaccctgcaatcctgcgcccgggccgcctggacaaaacactgtttgtgggtttaccg

SEQ ID NO: 39936 - DNA, 83 bp, Homo sapiens
gtggttggctatggtgatcttaatgggaaagaatactggcttgtgaaaaacagagcactacaaacaccactggtttcccgaaa

SEQ ID NO: 39937 - DNA, 89 bp, Homo sapiens
cgcgagtacgccggggacatcttcgccgaagtcatgctctcaaaggtctatggccctgtgttcactctgtattttggcctgaaacccat

SEQ ID NO: 39938 - DNA, 99 bp, Homo sapiens
gaatttaggagacataagaccgttggttctgacgaggcacagcgtttcttgcaagaatgggagggtcccctggcgatggcagaaatggaccctacacag

SEQ ID NO: 39939 - DNA, 98 bp, Homo sapiens
gacctgaaagaccgaccattcttccctgggctggtgaagtacatgaactcagggccggttgtggccatgggctcaaaatctccttcgccaagaccaaa

SEQ ID NO: 39940 - DNA, 101 bp, Homo sapiens
ggcagaatgcactgcttgaaaagtgtcctcagcctgcgggggctgcgtggaggtggactcggagaccgaggccgtgtatgggatgaccttcaaaattcttt

SEQ ID NO: 39941 - DNA, 88 bp, Homo sapiens
gggtcactgtcctggaagccaccaccctgcagcctcaggaactcgtaacattcagggatgtggccatagaattctcccctgaagagtg

SEQ ID NO: 39942 - DNA, 90 bp, Homo sapiens
ttcggagcagcagccctgtccggcatctgtcttgagctcccagcaagccaacaagtcccaaatttggaaaagctgactcatatgaaaagc

SEQ ID NO: 39943 - DNA, 98 bp, Homo sapiens
tgcaacacggagccttgccctccagatttggtgccctggttgtcagatgttggaaagcagtaggacggaacatactcttcgtggttgtgtatccgttc

SEQ ID NO: 39944 - DNA, 140 bp, Homo sapiens
ttgcaatcatggtgcagaaataccagtccccagtgagggtgtacaaatacccctttgaattaattatggctcaacatggccaacgccctggccagcgccacttgcgagcgctgcaagggcggctttgcgcccgctgagaa

SEQ ID NO: 39945 - DNA, 98 bp, Homo sapiens
tgcgcccgtggaggggcgcgcagagggcaccgggcgccgggagcaggcggcgcagcaccagacctggccgagtgcaagctggtctcctttcccattgg

SEQ ID NO: 39946 - DNA, 50 bp, Homo sapiens
tggcagccaaatgcatcctggcaggtcttgctatcacagatgaaattttg

SEQ ID NO: 39947 - DNA, 100 bp, Homo sapiens
gtcccgaagccccctgcaggaactctacaacccaatccagggccacccagtgctcctgcagaagatcgttcaggaacacccgacagcattgcttcctcct

SEQ ID NO: 39948 - DNA, 76 bp, Homo sapiens
gacgagatgatcaaacgcctgaaggcatgcccaagagaatcgtaaatgcaaaaattgcttgccttgacttcagcct

SEQ ID NO: 39949 - DNA, 97 bp, Homo sapiens
gcaaacagaggcgctcatccacagagccacatctgttaggattcagtggtcccaatttaaaggctattttattttcaaactggagaaagtgatggat

SEQ ID NO: 39950 - DNA, 101 bp, Homo sapiens
cctacttcctctgtatagagcaactgttgaactcagctgcctgtaggaaacttttgagaagaactttgaaagagaaacccataaaataagtgagcaaaatg

SEQ ID NO: 39951 - DNA, 98 bp, Homo sapiens
ttagttccgtcacaggggctatttgtttggatatcctgaaagatcaatgattctacaagggggttgctcctctctggatgagacagataccatacacc

SEQ ID NO: 39952 - DNA, 75 bp, Homo sapiens
ccagattgaagccttcggctccaaattcattcttgacctcatactgaacaactcctgtcttcgttcctggctaga

SEQ ID NO: 39953 - DNA, 100 bp, Homo sapiens
gtcttccccaggcctgcgtccgagtctccgccgctgcgggcccgctccgacgcggaagatctggcaccactccttctacaatgagctgcgtgtagcacct

SEQ ID NO: 39954 - DNA, 118 bp, Homo sapiens
ggtgccagcacctttcggcttctgagacggcggcagcagcggcattcaggaaacatgccctgaactgtcacagaatgaaaccagcgctcttcagcgtcctgtgtgagatcaaagagaa

SEQ ID NO: 39955 - DNA, 71 bp, Homo sapiens
cctcaggatccttctgcaggacccctcttggtggggaccaatgccatggacagccccctcctcaagtacag

SEQ ID NO: 39956 - DNA, 101 bp, Homo sapiens
ttaacccccacatacccatttcctgcctatcatttgaagacgttccttgaggaggtttgaaaaactctctgtcggatgaggccccagtcctgcccaacacc

SEQ ID NO: 39957 - DNA, 100 bp, Homo sapiens
cccagatgtgcaacaaagtgcgatgcccaatcaattgagcagagactgatgaaaatggatcacactgcaatccacccacatctacttgatatgaaaattg

SEQ ID NO: 39958 - DNA, 97 bp, Homo sapiens
gactcagaccaccaccagaaccatcacctcggagacccagacaatcacaggtgtcatggagaaactccagctgggcccagagattctgcagcgggaa

SEQ ID NO: 39959 - DNA, 78 bp, Homo sapiens
ggacctgaaacagaaattctggaacacctatatgaattccttgtgtggatatcagatccggatggaatctcgagcttg

SEQ ID NO: 39960 - DNA, 75 bp, Homo sapiens
aatactggaatctcacaacaataccttagttgacccttgtatttatgtgatcagtttggctgaaccccgtctgcc

SEQ ID NO: 39961 - DNA, 106 bp, Homo sapiens
gccagggaaccctggtcaccgtctcctcagtttcaggtttagctgtgcctcccagtgactataatgacaaggaagctgtaaatgtatttgagttaagcttttgcga

SEQ ID NO: 39962 - DNA, 83 bp, Homo sapiens
cttcggcagtccacccaccgccgccgcctcccaggcctccaggcccaaggtcagcatcccactgtcagccatcattgaggtcc

SEQ ID NO: 39963 - DNA, 80 bp, Homo sapiens
gctgtgtgccccttctccacccagaggtttcccaggcagctgcagacttgaaacagttctgtctgcagaatgctcaacat

SEQ ID NO: 39964 - DNA, 90 bp, Homo sapiens
accagccgactggagcaggcagcagcccagaaatgggacgtcggtcatcagatactgaagaagaaagcagaagcaagagaaaaaagaaac

SEQ ID NO: 39965 - DNA, 75 bp, Homo sapiens
gacgctcctgcctgcgcgcggccaagccatgctcggccccagggttctccaaaaaatgtggaatcctttgcatct

SEQ ID NO: 39966 - DNA, 75 bp, Homo sapiens
cttggactcttgattggaatgttctccctgcagcagtcagcccaaaggaagttcattatgctgacatatcttttc

SEQ ID NO: 39967 - DNA, 75 bp, Homo sapiens
cggacgggccggagggaggatgttaaagccccgcggtttaatttaacctgagaaggctgcagatcctcggggttg

SEQ ID NO: 39968 - DNA, 97 bp, Homo sapiens
gttttgcttttctttgggctggaggaagagcatcctatggtgtgtcaaaaggcaaagtgtgttttgagatgaaggccaaccgcgagaagatgaccca

SEQ ID NO: 39969 - DNA, 50 bp, Homo sapiens
cttcacttctcgccggagtgtgtgcctgtggacatctctacagcaatgag

SEQ ID NO: 39970 - DNA, 100 bp, Homo sapiens
cttaattcctgaaaccactcaagagtcataggattagatgatccaagtcaccaagaaattactgtctcaagtgatacggcaagccaaattagagctgaga

SEQ ID NO: 39971 - DNA, 73 bp, Homo sapiens
gaatcagttgttggagaaaattaaaggatgaggaagtacagacaattggtcagatagaactgtgcctcactaa

SEQ ID NO: 39972 - DNA, 101 bp, Homo sapiens
tggagaaacatgcagattatatcgcatcctatggctcaaagaaagatgattataaatggaatctagttcatcagactactataataaagacaatgaagagg

SEQ ID NO: 39973 - DNA, 75 bp, Homo sapiens
ctgagtcagatatatacagatggtccaggagaagctttgaaggctgtgaaggtcatcagttgtgttttccatcaa

SEQ ID NO: 39974 - DNA, 83 bp, Homo sapiens
cgcgaagaggctggactcggattcgttgcctgagccatcactggtgcaagctatatttaacggagatcctgatgaagttcgag

SEQ ID NO: 39975 - DNA, 75 bp, Homo sapiens
cccggctgaggcagcgcggccgcagcagccctgttaccatcccaccatttcatgaccctttgaaaaaagcacaat

SEQ ID NO: 39976 - DNA, 94 bp, Homo sapiens
gtgggccgcgtcgaagacatggaccagggctacggaggtcaaaatgcagatcttcgtgaaaacccttaccggcaagaccatcacccttgaggtg

SEQ ID NO: 39977 - DNA, 98 bp, Homo sapiens
cagaatttcatctgttcttacaataatgagagtccagagcctaaggaccagactttgaaaatgattaaaattttaagtggtgaaatggctattgagtt

SEQ ID NO: 39978 - DNA, 75 bp, Homo sapiens
tttagtccctctatcaagcaagtgtaatgaacaagtctggggtgaatcgtgtagtttggaaacgacctcgactca

SEQ ID NO: 39979 - DNA, 95 bp, Homo sapiens
agaagccaaaaagcattgctggtatttcgaaggactctatccaacctattatatgacaatcatatcctgattcagcccttcctccacaaaggcaa

SEQ ID NO: 39980 - DNA, 75 bp, Homo sapiens
ctgggtctctgactcacttctgactttaggttcaaaccttgtactactcagctgatcacaagctgcttgatggga

SEQ ID NO: 39981 - DNA, 80 bp, Homo sapiens
ccccgcctagtccacggagctcaatggcggcagtcgcgctgagggactcggctcagggaaccttctgaccagcctcatgg

SEQ ID NO: 39982 - DNA, 75 bp, Homo sapiens
ctgggtttgaacggaatgctggagtcagtggaagacggagctggtcggcccgaaggttttggctacgggcctcca

SEQ ID NO: 39983 - DNA, 100 bp, Homo sapiens
gccgcctcgacccagggcccgcgggccaggagagcgctcggcgggaccgtataatagacgctggccccaaaggaaactactctcgatttatgaatcacag

SEQ ID NO: 39984 - DNA, 74 bp, Homo sapiens
atggaagacgcgacaggtatagcggagctccctgggtcctcagcagtgaggctggcctccctgcgtgacctgcc

SEQ ID NO: 39985 - DNA, 75 bp, Homo sapiens
gctggaacttgccctgtctcctcgcagatgagatctgaacagaattaagacgaacgagctttcacaattgcagca

SEQ ID NO: 39986 - DNA, 106 bp, Homo sapiens
gaagtcgcccgtgggggctgagcccgccgtctacccgtggccgctgccggtctacgtgagaagccctaccactgcaactgggacggctgcggctggaagtttgcgc

SEQ ID NO: 39987 - DNA, 82 bp, Homo sapiens
tggaccaaaggcctgtgtgctgcagaacccccagaccatcatcgtccgtctccaagagagtatgaagagagtgcgtctgtag

SEQ ID NO: 39988 - DNA, 73 bp, Homo sapiens
cttcagcctcgtgccccacaactacgggctggtgctctacgaaaacaaagcgtagagactgggtttcaccatg

SEQ ID NO: 39989 - DNA, 99 bp, Homo sapiens
aaaactatgggaagattttggtagagaagaatgaacattgtattgagaacaatatagatttgcaggtaccctgctgactgctcactccccaactcctgt

SEQ ID NO: 39990 - DNA, 97 bp, Homo sapiens
atgatgaagaggatgatgatgaagaaatcatttgctgtttcaaatagagaactgtgcgatgatgagaaagagttcatacattttccagtatgtgagg

SEQ ID NO: 39991 - DNA, 113 bp, Homo sapiens
gcatctctgggtgggcaacttacccgagaacgtgcgggaagagaagatcatcgagcatttcaaacgtgctgctcacggccgtgaactgctacagcgtgaaggccgccacccgg

SEQ ID NO: 39992 - DNA, 105 bp, Homo sapiens
gttctctaggccttttagaaaacatgggatgacacggtcaaaaaatgaacttggccgaaatgaagacttcatgaaactctataatcatctagagtgtatgtttgc

SEQ ID NO: 39993 - DNA, 100 bp, Homo sapiens
cttaacccagaagtagctgaatgtgttactccattgctgaggagtgggtgctggaaatgtaaacaagaatagactgttcattcctgatggcttttagtct

SEQ ID NO: 39994 - DNA, 74 bp, Homo sapiens
gcctggctcggagcagcagcctctgagaagatgcagatgcctccagctattacgagtcccatggcaacaaggat

SEQ ID NO: 39995 - DNA, 98 bp, Homo sapiens
ttttggtaaggcagcttctgtttttttacaaacaaaatgaagactcaaaacgtttgtcagagcaccataacatggtgtgggaagtgaagacaaatcag

SEQ ID NO: 39996 - DNA, 74 bp, Homo sapiens
ctaagacttggcgaagcgctgcgctcgcgcccggatccctcagaggagcacccccagtcccgtgctgcagcccc

SEQ ID NO: 39997 - DNA, 82 bp, Homo sapiens
agagaagccaggagcacccggcgtcccagacaacgcatggatttaggagaatgtaccaaaatccacgacttggccctccgag

SEQ ID NO: 39998 - DNA, 75 bp, Homo sapiens
aggaattgagccacagagtaattatattccagccaagtatcttcaagaccttctcatggagagtgtgaatttttc

SEQ ID NO: 39999 - DNA, 83 bp, Homo sapiens
ctcacctctcaccgcgcatgtttggaggtttggacatatttgactcttttccccccaggttgaattgaccaaagcaatggtga

SEQ ID NO: 40000 - DNA, 100 bp, Homo sapiens
cttagggtcctgctcggccaagattcttctgatgtagagcgactggaaagattcttcgactcagaagatgaagactttgaaatcctgtccctttgaaaat

SEQ ID NO: 40001 - DNA, 75 bp, Homo sapiens
tgcagcgggagctggacggcgagcgcgagcggcgcgagaaatgagaaggcaaccaaagtgcaggacatcaaaaac

SEQ ID NO: 40002 - DNA, 97 bp, Homo sapiens
tggccgatgaggaagtactgagcctgttggaggaactggcccggaaacaggaggacgccttgtacagctccatcaagaatgagaagctgcagtgggc

SEQ ID NO: 40003 - DNA, 82 bp, Homo sapiens
tcaaatatgagaaagctaggccatctgaataactttactaagacagattatgagggacaagccaagaaactcctggaactga

SEQ ID NO: 40004 - DNA, 100 bp, Homo sapiens
gtcgagatcactcagaccctcgccaaacttttttatataagcttagtaacaaagcagatttgcctgcaatggataacccagtgtttttggaattacttag

SEQ ID NO: 40005 - DNA, 100 bp, Homo sapiens
gtcgtcgtcctctgctgcatcatgatgtcaacaaccgtggctcacaagatgaaagagcactacctccctgcacttggctattcaaaacgggtccatctga

SEQ ID NO: 40006 - DNA, 90 bp, Homo sapiens
ggcggctgctgctgctgctgacgctgctgctgcccggcctcgggtgccggtggtggtgtgcacattgagccccggtatagacagttcccc

SEQ ID NO: 40007 - DNA, 87 bp, Homo sapiens
gtggcaggtaatggagccagtactttgacagcaggttgcaaagttgaagaagaggatgaacttgaatctggagaccaagaggatgag

SEQ ID NO: 40008 - DNA, 100 bp, Homo sapiens
tgggttctggtgccgcgcagctttccccggtgagccctattcccagaggcaggtggtgctgaccctgtaacccaaaggaggaaacagctggctaagctca

SEQ ID NO: 40009 - DNA, 98 bp, Homo sapiens
tgaaagtgctgcaagacaggcttcttaaggacatgataacaattatggctgtgttcctctgcttgaagacagtgaaacaagaaagaataatttgactc

SEQ ID NO: 40010 - DNA, 89 bp, Homo sapiens
ttggctaaatttctcaacaccacagtcagctaaggagcgagcccagggcgtggtgctgaaagtgctcacaaacttcaagagcagtgaga

SEQ ID NO: 40011 - DNA, 114 bp, Homo sapiens
gtatttgctaacgtttagagagtgcttccccttgccgagcactggacaggggcaagtgtccgagtggtgaatcagctacttacagagatggatggtctggaagcacgccagcag

SEQ ID NO: 40012 - DNA, 100 bp, Homo sapiens
ggcctcggagggcagctatggtgagagcggtgtggaggccttcatccagaagtcccgtgaggacgatctctggaaacatggctacagaacatgttaatgg

SEQ ID NO: 40013 - DNA, 100 bp, Homo sapiens
aaggccctggacacagcaatatctctgggctttcacagggccagagtgaagaccctggctccctcctttccttgttccggcggctgagtgaccagcggag

SEQ ID NO: 40014 - DNA, 98 bp, Homo sapiens
acagcgtggccaggcgactgcagtcacgtctccaacaaccaaggaagagctaaggagcaaatccaagatctgtgccaatgtgttttgtggagccggcc

SEQ ID NO: 40015 - DNA, 100 bp, Homo sapiens
ctgcagacggctgcgaggcgctgggcacagctttcactttcagaagaacagaatgaagtaatgaaaaatggctgtgaatctaaagagctggtctacctcg

SEQ ID NO: 40016 - DNA, 100 bp, Homo sapiens
gggagatggagaccaatcacccacccagtgtgcggtgaatgaaaactttgccattgatttgatagcagagcagcccgtgagcgaggtggagactcgggtg

SEQ ID NO: 40017 - DNA, 83 bp, Homo sapiens
gccgtaggcaggaccccgggacaccctggaagccaggaaatgtctataccaaaactcacctttcctggtggtttactaattgg

SEQ ID NO: 40018 - DNA, 98 bp, Homo sapiens
cggcgagcgcgagcggcgcgagaaactgccaaggggccaagggatgagctggggccctccttcccaatggcatctccccctggtctggaactgaagac

SEQ ID NO: 40019 - DNA, 90 bp, Homo sapiens
ctgaggacacttgtccagcgagccccactgctcggggaggaggagccacggccggggacagcatccagtcctggatgagccaatagctga

SEQ ID NO: 40020 - DNA, 82 bp, Homo sapiens
ctggagtgcaatggtgcaatcacggctcaccgcaaccttcgcctcccagcttcatggcggctgaagagatgcattggcctgt

SEQ ID NO: 40021 - DNA, 100 bp, Homo sapiens
gcgccaacaagggctacgtgcagcaaggcgtgtacagccgcgggggctaccctggggcccccggcttcaccaccggcccctttgatgccaagaatccgtt

SEQ ID NO: 40022 - DNA, 100 bp, Homo sapiens
aagacttacccgaagttgccgcggggccttccgatcccctgttgaaatcacaaagattagacacctttttagataggtgttcttcagcaccactgacaac

SEQ ID NO: 40023 - DNA, 75 bp, Homo sapiens
ctgcatctgctgctgaccctcgtgaattaaacaaccaccatgtcgagcaaaaaggcaaagaccaagaccaccaag

SEQ ID NO: 40024 - DNA, 100 bp, Homo sapiens
cttcttcttccagggactcagcacctggcagggtgttcatttagaagaaagcaacactaatgattcaaacagcttcctgaattttaattttgtgttgtct

SEQ ID NO: 40025 - DNA, 50 bp, Homo sapiens
ttcaagttcaagttcacaattggcatgaaggatttgggggcagagcactt

SEQ ID NO: 40026 - DNA, 75 bp, Homo sapiens
cagggctgtattctgacgtttacaaaactacagatgtgaagcagtatgcagatgttgaaggattctaatgcaaga

SEQ ID NO: 40027 - DNA, 89 bp, Homo sapiens
gtcctttcaaattgtgaattcactccagcacccactcctcaggaacatttaaccaaggcaattaagttggaatatgcaaggttggttaa

SEQ ID NO: 40028 - DNA, 90 bp, Homo sapiens
gcgccgcgtgcccggccgcgcccagcaggttcgtgctggccgtgggcagcgccgtctttgatgccatgttcaacgggggaatggccacaa

SEQ ID NO: 40029 - DNA, 75 bp, Homo sapiens
taatgcccgtgtttggcattgcaacaccgtttcacattgccacaatcaaggtgcagtagacattgttgcaatcat

SEQ ID NO: 40030 - DNA, 75 bp, Homo sapiens
ccggcgccaggggagccgccacaggggacggcaaaacagaacagaaaggcggagataaaaagaggggtgttaaaa

SEQ ID NO: 40031 - DNA, 97 bp, Homo sapiens
acacagtggaaaggaaccgttctggatcagcatgaacaaggctcagttatgatgtttgagcaccttattaattctaatggaattaagcctgtcatgg

SEQ ID NO: 40032 - DNA, 106 bp, Homo sapiens
ctttggatttcctgttattcttgctcgtgtggctgtggatcagctcagctactatttaataaaacaaaatctgtagaattcacgttttgtaatgacactgtcgtca

SEQ ID NO: 40033 - DNA, 50 bp, Homo sapiens
gggaaccatggctgccccgagagaaggacagaataacgggctcccagatt

SEQ ID NO: 40034 - DNA, 88 bp, Homo sapiens
cctgtgatgggccttcgcactcccaggactgaccactgagcagatgctgagaaaagaccagaagactatctatagacaaggcgtcaag

SEQ ID NO: 40035 - DNA, 82 bp, Homo sapiens
tactcagcatggatatccaggtgctgagccaggagcagcagcctttctgtgacttaagagattaaaattaatttggttgctg

SEQ ID NO: 40036 - DNA, 83 bp, Homo sapiens
gagcagtccagcggcatgaccattttcttcagcctccttgtcctagagattcagttgtggaaattctttttgaacaagataat

SEQ ID NO: 40037 - DNA, 82 bp, Homo sapiens
caaaaggagcggcgcggtcttcgtggtgttcgtggcagacaatgcagatcttcgtgaagactctgactggtaagaccatcac

SEQ ID NO: 40038 - DNA, 82 bp, Homo sapiens
ataaagagaagtggttatatcgaactcctctacaggaaggtaaaccagaagctctttgggttgaagaaagatttacagctca

SEQ ID NO: 40039 - DNA, 82 bp, Homo sapiens
ttggactgagtcctgcaggacacaggtatcatgaactgatcactaaatatgggaagttggagcctttggcagaagtggacct

SEQ ID NO: 40040 - DNA, 74 bp, Homo sapiens
acccgtttgggttctccacgcattctagactcccgaagaggtggtggtgaagtttattaagaaggagaaggtct

SEQ ID NO: 40041 - DNA, 74 bp, Homo sapiens
cttctccgccgcggcactgatccccacaggtcaaaatgcagatcttcgtgaaaacccttaccggcaagaccatc

SEQ ID NO: 40042 - DNA, 95 bp, Homo sapiens
gtcggtgttccacgtgaagctcaccgacagtgccctgagggccttcgagagctaccgcgccagacagatcgcccaggaccacaccgcagcgtaac

SEQ ID NO: 40043 - DNA, 101 bp, Homo sapiens
ggatgctgagctggaatttgccattcagcccaatacaactggcaaacaactttttgaccagaaaacccatatagacagctgccttgtaactgtcatggaag

SEQ ID NO: 40044 - DNA, 74 bp, Homo sapiens
gagcagcaacaaggccctgcttgagatggctgaggagttgagagcgtggagttaagaggagaatcagctttcag

SEQ ID NO: 40045 - DNA, 83 bp, Homo sapiens
tctgctgctgaagtaatgcaatggtctcaatctctggaaaaacttcttgccaaccaaagatgattacggagctaggaatttcc

SEQ ID NO: 40046 - DNA, 100 bp, Homo sapiens
ctgcaacccatagtcaacgattacatggtcttgggcgtctttggtactggcttttttaggggtctgcctggggattacccttgctgtggatagaagcaac

SEQ ID NO: 40047 - DNA, 100 bp, Homo sapiens
gaggtccgtgtggccaacgagctcaacgccaggcgccgctcctttacagcacagaagttgggcctcattgggcctccaccacctccactgtcatcagatg

SEQ ID NO: 40048 - DNA, 50 bp, Homo sapiens
tgtggtagaccgtctaagagaaggtgtcagctgtgatgcatgtttaaaag

SEQ ID NO: 40049 - DNA, 78 bp, Homo sapiens
gatcatagcagagtacgatactcaggtcaaagttcctgagggaagacctcaattaccatgacccaacagtgaaacaca

SEQ ID NO: 40050 - DNA, 100 bp, Homo sapiens
ctttatttcacatgtacagcatttggcgcctcaaggctttcttcaatactaaaaatgtatggaagtcctttgaaaacaccgtcagtggtttatagacaaa

SEQ ID NO: 40051 - DNA, 75 bp, Homo sapiens
actttggttacctatgtacctgttaccactttcaaaagtactagcaaaggccagacgtcttactcaacaacttcc

SEQ ID NO: 40052 - DNA, 75 bp, Homo sapiens
cttaggaccataccatgacaaggtgtgatccctcacatccacaaatctctgattggaaagaagggacagcagaaa

SEQ ID NO: 40053 - DNA, 100 bp, Homo sapiens
ggctgtttccagatctggggtaggaaaattacagatcatggaagggaagtggttgctgtgtatgttactggtgcttggaactgctattgttgaggctcat

SEQ ID NO: 40054 - DNA, 83 bp, Homo sapiens
gcgccatgcggggtccgagcggggctctgtggctgctcctggctctgcgcaccggatgaccgagtgggagacagcagcaccag

SEQ ID NO: 40055 - DNA, 75 bp, Homo sapiens
gcgcgggccgggaggggacggccgccggagccgcgaggccaactgcatatctatgtgagactgaattttcctctt

SEQ ID NO: 40056 - DNA, 75 bp, Homo sapiens
tatactccaaatttttattgacgaaaatggaacagcaacaattagagggccagctcttccgaggctccagcctgc

SEQ ID NO: 40057 - DNA, 82 bp, Homo sapiens
atcaaacagctatggtgatgattagagacatactaatgtacatggaaatgctgaatgttcatgatcattatcagaacatgaa

SEQ ID NO: 40058 - DNA, 83 bp, Homo sapiens
aaaacagtttacctcttatctaacagtacgagctcaactggaggcagtcctgtgcggaaatctgaagaaaaaacagatacaaa

SEQ ID NO: 40059 - DNA, 96 bp, Homo sapiens
agagaaggcactactgccattagaactacaagatgacggctctgacaccctgaaacatgtatctgatgacatgaagactcacaagaaccctgccct

SEQ ID NO: 40060 - DNA, 100 bp, Homo sapiens
caggacagccacctgctgtcgggccagctgcccacgctcctccattaacccctgcagagtattcactgactgctgaaactagagcatcactgagaagcaa

SEQ ID NO: 40061 - DNA, 75 bp, Homo sapiens
aggaggcagtagccaaacacccagtgccgggccagcccatgaacctgcgggccgaggccaggtcggagaccagca

SEQ ID NO: 40062 - DNA, 83 bp, Homo sapiens
ggaagccctccgaccccaatcggaagcctaactacagcgagctgcaggactctaatccagtgacgccaatgccccctttgccc

SEQ ID NO: 40063 - DNA, 75 bp, Homo sapiens
cctgtttgtcttctgctttggcccaggctcacttatgtctgtaaagatgggaaaaaaatacaagaacattgttct

SEQ ID NO: 40064 - DNA, 100 bp, Homo sapiens
tgctgtcaggaactgtgaccaaggagctgcttcctttggtgctgatgtttgagctaccaattgctggaattcttcaaccggttcctgatcctaattcccc

SEQ ID NO: 40065 - DNA, 100 bp, Homo sapiens
agaagtctaacctgcccgggacgcccgcaccaactcctgcgcgcgtactatactggcaattgctggagaagattttgcaattgttgcttctgatactcga

SEQ ID NO: 40066 - DNA, 100 bp, Homo sapiens
cagtcatgtgcctggaccttgcagcttcctggatgaagtgccccttggacagggtgtaataatgtcctttatatcagaggtgtggaagaagaggaagaag

SEQ ID NO: 40067 - DNA, 75 bp, Homo sapiens
ccgcagtccccccgttccctggaggtcctgtggaatgtggtgctcatcggggactcaggcgtgggcaagagcaac

SEQ ID NO: 40068 - DNA, 128 bp, Homo sapiens
ctacgcaggcttccgcctgacgcccgagcccgtcccgacctgctcgtcctaccctctgccccttcaggcacaggcccaggctgaagaggaaagacaagagccgccctgcccagaaacgtccacatgtg

SEQ ID NO: 40069 - DNA, 73 bp, Homo sapiens
ctcggacatgctgccaacgacgcgaggaatactcccccagttgcaagaggcgcaggaccgtggaagacttcaa

SEQ ID NO: 40070 - DNA, 123 bp, Homo sapiens
ttgtcctggcattgcatccacaggaggggcaggaaattctttgaagtccaagccttatgcatttgatcgggtgttccagtcaagcacatctcaagagcaagtgtataatgactgtgcaaagaa

SEQ ID NO: 40071 - DNA, 101 bp, Homo sapiens
cgtggtttccctggaactcctggacttcctggcttcaaaggcattaggggactcggagatcatgcagcagaagcagaaaaaggcaaacgagaagaaggagg

SEQ ID NO: 40072 - DNA, 75 bp, Homo sapiens
aattgagtttgaagggcttatgaggactctggacaacttgggattaatgaaaatcaagttccatcctcagacaag

SEQ ID NO: 40073 - DNA, 90 bp, Homo sapiens
gtctcccagtacgaccgggacaagtactggaaccgctttcgagacctggtagcagtgtttgatgagcaggatccacatcacggaggtgat

SEQ ID NO: 40074 - DNA, 98 bp, Homo sapiens
gacatgctttgtgatactttgtatcaaggaggaaatcagcttttgcttagtgatcagggaagtgggaatgtccttggcatcattgtgacgtgtgtggc

SEQ ID NO: 40075 - DNA, 100 bp, Homo sapiens
gtcaagttcagagaatgatgaagatgtgctagttactacagagccaataccagtaatttttcatagaatagcaacagctgcgcacaataccacatttccc

SEQ ID NO: 40076 - DNA, 107 bp, Homo sapiens
atgtctcatatgtctcaggcttccatgcagcctgccttaccggaatcaccccaatgctacagctgatccgggccatcctgaaagtccctgaagatccaacccagtgc

SEQ ID NO: 40077 - DNA, 100 bp, Homo sapiens
agctttacctcgctgaccctatgaaggggaaaagagtttctttttacaaacgagcccaaatccttgtagcagatacgtggagtgtattggaaggaaaagg

SEQ ID NO: 40078 - DNA, 100 bp, Homo sapiens
ctgccgctgctggcggccctgcttcaggttatgagtgccagtgagccgccttagatagaagcatcgtcagcactttattaatgatggatagtgagaataa

SEQ ID NO: 40079 - DNA, 74 bp, Homo sapiens
tcgctcttgtgccctagcaccccgagaaccgtcagtttgagccagatgttggtctcttcccatggcgatgtcca

SEQ ID NO: 40080 - DNA, 50 bp, Homo sapiens
tctctttctggcctggaggctatccagcaggacctgaaaaacgtgttccc

SEQ ID NO: 40081 - DNA, 75 bp, Homo sapiens
ttgaaacactacagcgcaggattgaagaagagcaggtaatcacagacctggaggagcagctaaaccagctgaccg

SEQ ID NO: 40082 - DNA, 50 bp, Homo sapiens
agcaatttaaagatcctctccaagcccgcgtgaccccaactctgccgaag

SEQ ID NO: 40083 - DNA, 97 bp, Homo sapiens
aagacggcggcggcgagggtggtggcggtgaagatggagctggaaaaacaagcttaataagaaaaattcagggaatagaggagtataagaaaggaag

SEQ ID NO: 40084 - DNA, 113 bp, Homo sapiens
agccatgcaaaggcaggggaggaagccacctcgaggatgtgatcttcgtggtggaaagctaaattttaaaaccaccccaatggatgcagacagtgatgttgcattggacattc

SEQ ID NO: 40085 - DNA, 100 bp, Homo sapiens
tggagactcgcccacccagaggcccagggtacgactcagtgccagagaaccgagcatccagtcatctcctataaagagaaatctgacagaatattttgtg

SEQ ID NO: 40086 - DNA, 80 bp, Homo sapiens
gcactagtgtggctctcctgttccagcaattgggtacagcaatcatttgaaactccaagggccaaagctcaaatgcccac

SEQ ID NO: 40087 - DNA, 100 bp, Homo sapiens
cgccgggcccgggcatggtggtctggggcaacgcggaagacaagttggatggcttgaggactggtactaaaaggaaacgtgactgggaggccattgccag

SEQ ID NO: 40088 - DNA, 100 bp, Homo sapiens
ctaggatttctgcagctcatgaagccttggagataaatgatgatatgcgctggaacaaaggaaccattctaaaagcatcagtggagtacatcaagtggct

SEQ ID NO: 40089 - DNA, 80 bp, Homo sapiens
agattatgtgaaattttcacaagaatgtttgctgaccctcatggcaaggtgaccaagaatatggcccaggtgaccaaagc

SEQ ID NO: 40090 - DNA, 75 bp, Homo sapiens
tctgcttccctgcgctgtgcctgctccttaatcttcacgctgcagatcctttacctcctgctaggtttggagtca

SEQ ID NO: 40091 - DNA, 87 bp, Homo sapiens
cccatccctgcaggggggcccccacaatcatgccattgctgcagtagctgtggccctaaagcaggccggccccgggctccaccgccc

SEQ ID NO: 40092 - DNA, 100 bp, Homo sapiens
atcttgaaagagaagctcttcctgtgagcaagaatttcgactgggagtgcgactctactcagaggaacagccacaggaagctgtgccccacctagaggcg

SEQ ID NO: 40093 - DNA, 90 bp, Homo sapiens
cttgggtgaactctagcaattacaagacaagttggatggcttgaggactggtactaaaaggaaacgtgactgggaggccattgccagcag

SEQ ID NO: 40094 - DNA, 100 bp, Homo sapiens
cgcctgcttcccgtctgcgcgagtccacgcagctccccagaatatccaagggactgagtgaaaagatatttgcaaaacctgaagaacaaagaaaaacact

SEQ ID NO: 40095 - DNA, 83 bp, Homo sapiens
agttgtgctaaaaagcaccaccaagatgtctctaaatgagcgatcagtaaccctgtacagggactgtgttcacaggatataag

SEQ ID NO: 40096 - DNA, 83 bp, Homo sapiens
gattataggagaactgggcgacggagcctttgggaaagtgtacaaggtggctttctagaagatgaccatagaggaccttccag

SEQ ID NO: 40097 - DNA, 51 bp, Homo sapiens
ggagagtggcctggctggcaacggcacaggcaggatgacgcaaaacacggt

SEQ ID NO: 40098 - DNA, 127 bp, Homo sapiens
ggcggtttttgtcttttgatttcaagagttaggagctcgagaaccgtttggcaatatgtacgacgcggatgaggtgtccccagttgtcctcatccagggtgctattcgagtccagcctgaagggccg

SEQ ID NO: 40099 - DNA, 51 bp, Homo sapiens
ccaagccaatgcccaagacattataaacacgaaatctcacaaaactgtccc

SEQ ID NO: 40100 - DNA, 50 bp, Homo sapiens
aatccagagtatcatattcaaagagaatgtaactggtcactacatttccc

SEQ ID NO: 40101 - DNA, 100 bp, Homo sapiens
tgcactgcatggttgctgctggatgtgttgtgttcctggcttccctctggatgctgacagaaacaaggcctttgaagtaaattttatggatgatgtaggt

SEQ ID NO: 40102 - DNA, 75 bp, Homo sapiens
gcatgaggaagagtcaggggcacagagagatggagagagacctagttaggttatgaagacagtatggagtttcca

SEQ ID NO: 40103 - DNA, 100 bp, Homo sapiens
gattcttaatgcttttcggactcctgatggcatgcctgtaaagaacttgcagttgaaggagtataacacaggtacatgtcccagagcaagcacacggagg

SEQ ID NO: 40104 - DNA, 95 bp, Homo sapiens
gattacacagttctggatgatgtgggccatggtgtcaagcttcttccagaccagctggtcttgcttctggagcatctcttggagcagaagactct

SEQ ID NO: 40105 - DNA, 75 bp, Homo sapiens
cgcataatggatgaaaggaaccgacaggattactacagcatcccatttcccacacccactactccgctgactggg

SEQ ID NO: 40106 - DNA, 101 bp, Homo sapiens
attttgatttgtaatgaagacaggagcagaaatatattttgtggtgccaccaagagagttcagcaaatccactgtgtccctggccagtgtccttccacctg

SEQ ID NO: 40107 - DNA, 100 bp, Homo sapiens
aatatgtcataccagggctttaccaaagacaatggcgtggtgcctgttgttaaggaattaatgggggaggtaaaataccatgaagattttgaaaaaacaa

SEQ ID NO: 40108 - DNA, 73 bp, Homo sapiens
ggggcggaagaccaagatcatcgagatgtatttaggtcagttaacgtccataccaggatacctgaatccctcc

SEQ ID NO: 40109 - DNA, 82 bp, Homo sapiens
acagggtcaaaggagagcacaaccatcgcagttggaagcccatggggcagctacctgaacgacctggagcgtattgcacaga

SEQ ID NO: 40110 - DNA, 75 bp, Homo sapiens
tttttgatgctgaggagctcctggtcgatgaagaggatgatgtttttggtgaagagatgtggtactggatcttcc

SEQ ID NO: 40111 - DNA, 96 bp, Homo sapiens
gctggagaatggagctgaagaaggcatcgtcaaatcaggtgacgccgcagccgccgggagccgcgagggacggggcaggatgaaccgggccaagcc

SEQ ID NO: 40112 - DNA, 82 bp, Homo sapiens
agaagtaccaggaggcgttggccaagggtcccagctagtccacagggaccagcagtgccatggaaggatttaacatgtctca

SEQ ID NO: 40113 - DNA, 89 bp, Homo sapiens
ggcctcccgggctccgggaaaactacactggccagaacccagcgggtgccgcttctccacccgaggcttccacctccaacgagccatgt

SEQ ID NO: 40114 - DNA, 101 bp, Homo sapiens
ccctgaaccccaaggccaacagagagaagatgactcagctgtcccctaccaccaccggtcacagacgtgagccttgagttgcagcagttgcgggaagaacg

SEQ ID NO: 40115 - DNA, 98 bp, Homo sapiens
gagacaaggaccgattgactttggagaaggagcggacatgtgcagaacagattgttgccaaaattgaagaagtattctgccaatttgtggtgtctgaa

SEQ ID NO: 40116 - DNA, 98 bp, Homo sapiens
ggatgccgaagtcctggaggtgttccacccgacgcatgagtggcaggcccttcagccaggacccctatggtgtagccgtgggtggaactgtggggcac

SEQ ID NO: 40117 - DNA, 138 bp, Homo sapiens
aacaatgaaaagaaagaaaagagaaaggaggctgtgaagaaagtgattgctgctatgaccgtggggaaggatgttagcttggtgatccagctatttttcctgccgtaattgtggaacatgttcctggtgctgatattc

SEQ ID NO: 40118 - DNA, 98 bp, Homo sapiens
gaaggctgtgcggtctgccaggagctgcggccccgtccggcccgggctgaggccatgtggaagtgttacatcaccttttgcttggaaagatttactaa

SEQ ID NO: 40119 - DNA, 97 bp, Homo sapiens
cagtcgtagatacaaatttttggatgatgatggatccatttctcctattgaggagtcaaccttgcaagtagaagtctcaggcaacagattaaaccag

SEQ ID NO: 40120 - DNA, 83 bp, Homo sapiens
tgcggttattgtttgcctgggtggaattttaccttttggttcaatctttattgaaatgctgaatcttctccatttgttgagcg

SEQ ID NO: 40121 - DNA, 74 bp, Homo sapiens
ctgcagcgccgtgtggcacgacacaaaaatcaggtgctaactttgagtacatcatcgcagaaaaaagagggaag

SEQ ID NO: 40122 - DNA, 100 bp, Homo sapiens
tgacaacgacggcggtggtgacgggcaccgggctcgcggtgattacccaaagaaggaggactacatcgtctacctgggtcgctcaaggcttaactccaac

SEQ ID NO: 40123 - DNA, 98 bp, Homo sapiens
tgagcagccaacacaccagcccagacagctgcaagtcaccatggacgctgaaggaatagccaggtctggctgggtcggcacaacctgtttgagcctga

SEQ ID NO: 40124 - DNA, 50 bp, Homo sapiens
cgatcccgaggacaggtctggggctccaggaggccagagctctactgaag

SEQ ID NO: 40125 - DNA, 100 bp, Homo sapiens
tgcgactcgcggaccggcgtccccggcgcgaagaggctggactcggattcgttgcctgagactgtgccctgtccacggtgcctcctgcatgtcctgctgc

SEQ ID NO: 40126 - DNA, 93 bp, Homo sapiens
gccacaaagtgaccaagaacgtgagcaagcccaggcacagccgacgccgcggggattatatctgtccaagatgcgagtctggttttatcgagg

SEQ ID NO: 40127 - DNA, 75 bp, Homo sapiens
atggtaggcgtccctggagcggccgccttccagcattcctgacattcagacaactgacttgtaactgacttataa

SEQ ID NO: 40128 - DNA, 75 bp, Homo sapiens
aaacttctatatacatttccaggatggaaagttggagtgacagctcttcagcagattgaaaatattgaacttccc

SEQ ID NO: 40129 - DNA, 97 bp, Homo sapiens
aaccaggctgtgttgaagttcactaccgagatccatccatcctgtgtcactcggcagaaggtgatcggagcaggatggttcgtggagacccaagggc

SEQ ID NO: 40130 - DNA, 100 bp, Homo sapiens
agatacagggcagaggaaaatgcaagaagactgatggagcaggcttgcaatattaaaaaacttgaagggtcaaagtgcaaagggcagcttttgatttttg

SEQ ID NO: 40131 - DNA, 101 bp, Homo sapiens
gaccgccgcagcctctgcggagccgggctcgggtcgccggagccgcgccccaccccgccagctccagagccacaacctaaaggcagacccagaagagcttt

SEQ ID NO: 40132 - DNA, 82 bp, Homo sapiens
tgctgagaagcctgacataccaggactgcctgagacaagccacaagctggggtaaatcttcagcgaaaacaggcggcgaact

SEQ ID NO: 40133 - DNA, 75 bp, Homo sapiens
aagacgtgcaaagcaagtggttcacgaggctgcagagaaggctggtatgtctgcagaacaagcccagggacttct

SEQ ID NO: 40134 - DNA, 90 bp, Homo sapiens
tgctgccgctgctggcggccctgcttcagaatctccctggggtgccctccccaggcagcaatgccaggatgcctgtgtccacctccctcc

SEQ ID NO: 40135 - DNA, 100 bp, Homo sapiens
agaagtttggcgactcctttgtctttgaaggcatgttgagtgagcaagtgaagaccaatattcaacaggcagtgaaaagcaatcacagtgttaaaagaag

SEQ ID NO: 40136 - DNA, 98 bp, Homo sapiens
tgttggtagaaaaagcaagagtttgttatatagcaatgcatagctctcttaggtcccttcgtaatagtgcagctaagaaaagagcaaaactgagtggc

SEQ ID NO: 40137 - DNA, 101 bp, Homo sapiens
gctcggattctcgtagctgtgccgggtgcaatggatgagcttcatagtctggatccaagaaggcaagagttattggaagctagatttactggagttgcaag

SEQ ID NO: 40138 - DNA, 100 bp, Homo sapiens
tggaccctgctcagaggactctatacagggacgtgatgctggagaattataggaacctggtctccctggactgcttttggcttctggatgccctcctcca

SEQ ID NO: 40139 - DNA, 83 bp, Homo sapiens
gttttgcagatcttcaacaagaggacccaggagaaattcgccctcaaaatggcatgatcaacattgacatgactggagagaag

SEQ ID NO: 40140 - DNA, 100 bp, Homo sapiens
gactttgtttttcctgggaactgcagttgcttctgcaggaagcctttttggtggcatggtcctcaagaagttcctaaaaggtaaagaattacctaacttc

SEQ ID NO: 40141 - DNA, 48 bp, Homo sapiens
ggcgggaaccccctgaaccggagtggaagcagggaaaggcctggagat

SEQ ID NO: 40142 - DNA, 73 bp, Homo sapiens
tgacatttaattttagggtcctttatatagaagggagagtagaaactggcagacctttcacttcgtatccaac

SEQ ID NO: 40143 - DNA, 100 bp, Homo sapiens
cgggggtgctgggggcccgggccgccctctctcggagttggcaggaagccaggttgcagggtgtccgcttcctcagaacaccttccaccatgaccacctc

SEQ ID NO: 40144 - DNA, 100 bp, Homo sapiens
tgaaaggagagacacttgtgaacattcaagtgaagcaaaagcctttcatgattatgcatgtactggcattgaaaacattgacgaagctattacattgctt

SEQ ID NO: 40145 - DNA, 98 bp, Homo sapiens
cacccaggccttctcgcgctgcctggtcgctggtgaagcccgcggcgcgcgcctctcccggaccctgcaggatgtcaaaatccacaggcaacttcctc

SEQ ID NO: 40146 - DNA, 83 bp, Homo sapiens
acccatcacactttttggagagggtcctgctgaaagaagagaaagttggcttcctgaggctcaggtagtccaaagagccctga

SEQ ID NO: 40147 - DNA, 74 bp, Homo sapiens
ctggatggaggatgctgacagtgtgtggaaccactttgacagcggttcgtgcccaggccaggccatcggtgtca

SEQ ID NO: 40148 - DNA, 100 bp, Homo sapiens
gttccggggtgcaccgctccctgggcgtccatctgagcttcatcagaaactggcgatggaatatgagaggagccctctggaaagaaaaggacagaccctg

SEQ ID NO: 40149 - DNA, 100 bp, Homo sapiens
attttgaagacaatcgtcacttatacaggttcctgatgttattagcagcataaggcaattatctaaagcggccatgaaagaggatgccaaacccagcaaa

SEQ ID NO: 40150 - DNA, 75 bp, Homo sapiens
atcaatccagatggcagccagtcagtggtggagggctttgaagactgcttggtatttgatgagttaatggataaa

SEQ ID NO: 40151 - DNA, 82 bp, Homo sapiens
ggaaacaggcttcacatgtttcttgtacagttgagatgtgcagtgttacaactccttggcagctgcaatgactctccgcacg

SEQ ID NO: 40152 - DNA, 75 bp, Homo sapiens
ttctaattttcattccttcaaaggtggcgtatgtgttcgtgttttaatgtattcagagccattgggcaataagca

SEQ ID NO: 40153 - DNA, 83 bp, Homo sapiens
atgaaggacagcggggactccaaggaccagcaactcatggccgactcgcgggccgctgcacccaccgccaaggacaaaaggag

SEQ ID NO: 40154 - DNA, 75 bp, Homo sapiens
tgaagctatcactgtcagtgctggttggcaaaagcagcttttgatgatgcaattgcagaactggatacgctgagt

SEQ ID NO: 40155 - DNA, 74 bp, Homo sapiens
caaagttgcatttcctcgtcgagcgcaacccaagctcttgttcagcttctggaatttctgagcagccctcgtca

SEQ ID NO: 40156 - DNA, 82 bp, Homo sapiens
cgagaagctccagatggcgtcttccgtgggcaacgtggccgacagcacagttggtctcttcccatggcgatgtccatctgcc

SEQ ID NO: 40157 - DNA, 75 bp, Homo sapiens
atcggctaatagcccggagacaagcaaataggaaggttgttgattactcacagtttcaggaatctgatgatgcag

SEQ ID NO: 40158 - DNA, 80 bp, Homo sapiens
cgaagcgctgcgctcgcgcccggatccctcaggctaactcaggtgagatggagccgctatagtcctgaattcaaggatcc

SEQ ID NO: 40159 - DNA, 75 bp, Homo sapiens
accaggctggagaatatggtgcagaggccctccacggctcacggttttgaggagatccgtgctactttccttcag

SEQ ID NO: 40160 - DNA, 100 bp, Homo sapiens
gaaagatggaagactaccaggctgcggaggagtctcagagaaagatgtcacatctgctaaagcactgtatgaacatttgactgcaaagaatacaaaattg

SEQ ID NO: 40161 - DNA, 82 bp, Homo sapiens
ctggagcagtggagcccaaagacccctggagacatgagaggtggagaagagcgagtacttgagaaagaagaggaagaagatg

SEQ ID NO: 40162 - DNA, 90 bp, Homo sapiens
tgtccgcacgccaaacgggtttggaggaccctcttcgccttcggagagcagagtcaacacggagatcctgaacccgccgccctccccggc

SEQ ID NO: 40163 - DNA, 74 bp, Homo sapiens
tgtatttactcaagaaatcaagtacttcagtaagagatgggctgcagttgtggttggataatccaaagattcag

SEQ ID NO: 40164 - DNA, 127 bp, Homo sapiens
gtgacacaaggtgatagacttcgggccttgaaaagcagaagacaatccaaaacaaacgctattcctctcacgccagaagcggactcctagaagaggggagcagcaaggatggaatgacagccgtggg

SEQ ID NO: 40165 - DNA, 83 bp, Homo sapiens
ttcctgctcgacctgcggcagtacttgggtgtggatgaggtcaccattgtcaacattttgaccaaccgcagcaatgcacagag

SEQ ID NO: 40166 - DNA, 100 bp, Homo sapiens
aatgggcagcatatgaaagtggattatggattgccccagctgatggaagtagtgcgatccaactatgaagcaatgattgatcgtgctcatggaggcccaa

SEQ ID NO: 40167 - DNA, 83 bp, Homo sapiens
ggcgggggactctgagggaggagctggggacggcgaccctaggagaggttacaagaggacccacctgtgggtgtcagtggcgc

SEQ ID NO: 40168 - DNA, 75 bp, Homo sapiens
atttttggcctcatactctgttatagataaacaaggagattatttggtagcaattgaagagaaaaacaaagctac

SEQ ID NO: 40169 - DNA, 74 bp, Homo sapiens
ctgcagccactgcaccgacttcatctggtatctgcccaaactggaacttatgctgtagacatttctttgtggtt

SEQ ID NO: 40170 - DNA, 74 bp, Homo sapiens
gaagaaagagaatattgttcagttgattatgccagccagatgcagctggtggatagcgaggtggtcatgctttc

SEQ ID NO: 40171 - DNA, 83 bp, Homo sapiens
tggtgctcaggtgccagatgcaaaggaaggaaaatcacctcggcagtgtttgaaggaaggatactgcaactctttgaagtacg

SEQ ID NO: 40172 - DNA, 100 bp, Homo sapiens
cggctggtccaggccttccagtacacagacgagcatggggaaggaatgggtaccacagaccatgtcatcgtcctggcgtccacgaaccgagctgacattt

SEQ ID NO: 40173 - DNA, 95 bp, Homo sapiens
accagaccaataaggacaaaatggaatgtgaagagcaaaaagtctcagatgagctcatgagtgaaaggaggagatgttaaagtaacccatcttgc

SEQ ID NO: 40174 - DNA, 122 bp, Homo sapiens
cgggaaaccaggcatctctgggtgggcaacttacccgagaacgtgcgggaagagaagatcatcgagcatttcaaacgcaccctggaggagaagaggttctgctggaacaagctggtgtagat

SEQ ID NO: 40175 - DNA, 96 bp, Homo sapiens
attcagacagcccggaatatcaagattcatctttttcactaattgtggcattcacatgccatctgggattgacagctcagcctgaactctatcttc

SEQ ID NO: 40176 - DNA, 100 bp, Homo sapiens
tattcagagccttggaagtcaacactgtcacaaaagcggcgccaggaaattgaacaaaaacttgaagttcaggcagaagaagagagaaagcaggttgaaa

SEQ ID NO: 40177 - DNA, 95 bp, Homo sapiens
gaaaactggatccagaactccattggttcttgatggtgctagacattccccaggagcgggggctcagctctctggaccggaaataccttgatggg

SEQ ID NO: 40178 - DNA, 74 bp, Homo sapiens
cctctcctatatctggctcatggacaaggccctgctctgcagcggtacaggtttgcagattccgccagcagcac

SEQ ID NO: 40179 - DNA, 89 bp, Homo sapiens
cgttagcgtgagtgatcactctcaatcccggcttccttcaaaatgtctactgttcacgaaatcctgtgcaagctcagcttggagggtga

SEQ ID NO: 40180 - DNA, 100 bp, Homo sapiens
gagtgtagagaatgctacgacgatccggacatctcagctggaaaaatcaagcagttttgtaaaacctgcaacactcaaagcatgtcctttgcaacctgat

SEQ ID NO: 40181 - DNA, 74 bp, Homo sapiens
ggagtcccaatgaaacgggcagccatggccctccacagcccgcaggtcacgactgctgaatatgagacgatctg

SEQ ID NO: 40182 - DNA, 85 bp, Homo sapiens
gcggaagtgcagctgcctcagttcttagcgcaggatgtgatggtggtgggggagcccaccctgatgggcggggagttcggggacg

SEQ ID NO: 40183 - DNA, 82 bp, Homo sapiens
gatggacatggacatgagccccctgaggccccagaactatcttttcgtgtctttggtgcaacactaacaaggcttgtctgga

SEQ ID NO: 40184 - DNA, 75 bp, Homo sapiens
tgcgttttgccagtcacctctcaactgtgtgccaaaggagttttgagagcaaaatgacaacacccagaaattcag

SEQ ID NO: 40185 - DNA, 82 bp, Homo sapiens
accaacttccctctgcggccgtttgtcattcccttcctgaagaggagctgatcacgcagtacctggctgagcttcggaaccc

SEQ ID NO: 40186 - DNA, 82 bp, Homo sapiens
ctccaggcatgccccgctacgagctggctttaatcctgaaagccatgcagcggaaacctgtttccctccaatcttgtggttg

SEQ ID NO: 40187 - DNA, 97 bp, Homo sapiens
ggaaagaagttgcaaaacactggtgaccatgcagcaggtggccaggacagtggctaaagtggagctctcagaccacgtgtgtgatgtggtgtttgca

SEQ ID NO: 40188 - DNA, 82 bp, Homo sapiens
atcactttagaccctccacctaattgcaggcctatcatggtcaccatcaagcactggaagtgttggtacagtctttgttaga

SEQ ID NO: 40189 - DNA, 102 bp, Homo sapiens
cgacacggcccgcgagcgcgccaagctgcagatcgagctgggcaagtgcaaggcggaacacgaccagctgctcctcaaagaggacatgtactcccaggattc

SEQ ID NO: 40190 - DNA, 75 bp, Homo sapiens
gcgcggcacgcagccgggaggccgaggactcggagttcacctgcagctatggcattgctggttctaccaacgtga

SEQ ID NO: 40191 - DNA, 51 bp, Homo sapiens
ttcaaggccaaggaagctgcggtgaacctggtgctgggggacggccggtcc

SEQ ID NO: 40192 - DNA, 82 bp, Homo sapiens
cgagaaatggccgcgtcggcaggtctgcgaggaacagaagtgcgaggaggaggtcttcccgctggccatgaactacctggac

SEQ ID NO: 40193 - DNA, 125 bp, Homo sapiens
tcttgatgacactcaacgctgggagtatttcagacaaacatttcaggaactgttcaaaggagcatagtggccaccgatcatgaaccaacagatgccaggaaatcttttccttgttttgatgagcc

SEQ ID NO: 40194 - DNA, 90 bp, Homo sapiens
agacaagaaagccaaacgaggagaggaattcttttgcctctaatgacagagcagctacagtggatgccatttgtgaatatcaaacttcac

SEQ ID NO: 40195 - DNA, 100 bp, Homo sapiens
atttgaacttctgaattatacaccagcagattatgtgggatcttgtgtgtgataatgcctggaaggtccatatcgctaagttctccttactggttggatt

SEQ ID NO: 40196 - DNA, 98 bp, Homo sapiens
ggcatccttaccaaggaatctgcttttcaagtatgccaccaacagtgaagaggtgaccctggcagcaaccccaacaaacgccagaggcagccccctct

SEQ ID NO: 40197 - DNA, 75 bp, Homo sapiens
cctgggcgccgcgccgcacgagcaccagcctagagccaggtatggacctgtctgccaatcaggacgaggagaccg

SEQ ID NO: 40198 - DNA, 133 bp, Homo sapiens
agctgtccacttcagagctaggagagatggaactgacttggcaggagatcatgtccatcaccgagctgcagattgttctctggggccggactgagaaatgcctgaaggagacgacggaggagatccggcagat

SEQ ID NO: 40199 - DNA, 95 bp, Homo sapiens
ctttcttttctgactttccagttgactgaacctggaaaagagccgggacatatttggagaagactgtgtaagtgtaaaggatgactctattctta

SEQ ID NO: 40200 - DNA, 100 bp, Homo sapiens
cgctcgctgggagagaggtacctctccttttccctctccctttccctaaggtgaatgaaaactttgccattgatttgatagcagagcagcccgtgagcga

SEQ ID NO: 40201 - DNA, 75 bp, Homo sapiens
ggtccctgaagagggaagacacgcggaaacagaactgtgccgcataaatgaggatcagaaggtggccctggatct

SEQ ID NO: 40202 - DNA, 75 bp, Homo sapiens
atccaatccctgccttttgagtccaggtggcatcagttttgaatgtcaaggaatccaaagctcctgaaagaacgg

SEQ ID NO: 40203 - DNA, 100 bp, Homo sapiens
aaagaaccgccggcgccggcccagcagctgcagccgcagcctgtggctgtgcagggccccgagccggcccgggtcgagacacgttggtcgtcattgcctc

SEQ ID NO: 40204 - DNA, 90 bp, Homo sapiens
cgctgttacatagcccgtagtcagaggcctttcagcccaggggccggcgcacggtgggctgggggccctgactggacctggcctggccag

SEQ ID NO: 40205 - DNA, 75 bp, Homo sapiens
ccgcaccgctggcagcctgaagagagtcgctggccgtggtcgccgctagggtgctggagaatctggtaaaagcac

SEQ ID NO: 40206 - DNA, 97 bp, Homo sapiens
tggcacaactgtccacgtaggcattcaccccagcaagattgctcgctgtaagcagctcatctgtgaccccagctacgtaaaagatcgggtagaaaaa

SEQ ID NO: 40207 - DNA, 100 bp, Homo sapiens
ggaggatcgcgtgaacctggaagtttgaggctgtagtgagctatgattgcaccagtgcactccagcttggatgacagatgaaaatgcctcgtgtaaaagc

SEQ ID NO: 40208 - DNA, 73 bp, Homo sapiens
agaagccttattcactaaaattcaggaggaatttgaagaacatgaaggttgctccttgagggcaggacagttc

SEQ ID NO: 40209 - DNA, 98 bp, Homo sapiens
cttctcctggttaatcaagaattctctatttctgctccgtcatccatgccactaaagggctattgcaagacacgaagtccgagaaattgagcagcgac

SEQ ID NO: 40210 - DNA, 75 bp, Homo sapiens
gactattccctggctgcagccctcactcttcatggtcactggtctgttggagtttgctggaggtccactccagac

SEQ ID NO: 40211 - DNA, 83 bp, Homo sapiens
caggaaaaactttccagccattggctttatcctgtggataaacgcagagtgaacgagtttggggagtcctacgaggagaaggc

SEQ ID NO: 40212 - DNA, 87 bp, Homo sapiens
accgcagtatcatgctggccaagaagatcatcattaaggacggaggcacggctgagtcatcactagagagtgggaagggcagcagca

SEQ ID NO: 40213 - DNA, 100 bp, Homo sapiens
gggacagtgaagtgcagcgcacgatgctggagttgctcaaccagctcgacggctttgagatttgtcaaggtttgaaactgacatttgatactaccttctc

SEQ ID NO: 40214 - DNA, 71 bp, Homo sapiens
aggtgaagaggatgaagaaggtgaagggacacgtgatggaccgtaggaagaaggcactgaccgactacaag

SEQ ID NO: 40215 - DNA, 83 bp, Homo sapiens
cgccggcccgcgggtctacttcctcaaaggtgagaagccctaccactgcaactgggacggctgcggctggaagtttgcgcgct

SEQ ID NO: 40216 - DNA, 100 bp, Homo sapiens
tcccccccggatggaagaaggaggaagtgatccgaaaatctgggctaagtgctggcaagagcgatgtctactacttcagatcaatgaactgagccatgtt

SEQ ID NO: 40217 - DNA, 101 bp, Homo sapiens
cattatagagctggaattaggcaaatatggacaggattaacctccatttcagctaatcatgggagagattaaagtctctcctgattataactggtttagag

SEQ ID NO: 40218 - DNA, 51 bp, Homo sapiens
gcatcctcctggcctacctggcagttggtccaggcgcaatgttcagcgtat

SEQ ID NO: 40219 - DNA, 100 bp, Homo sapiens
aggaggaagccgactgctgcctggtctgcaaagaagtcctttcaagtctctaggactggactcttcctaagcaagtccgccgcttacaaacacgcagatg

SEQ ID NO: 40220 - DNA, 101 bp, Homo sapiens
tggaggctccgggcgcggggaagtcatgctcgcttcacggaggcaatagctagccggccttggatggtatactgtaaattcagcatatggagataccatta

SEQ ID NO: 40221 - DNA, 76 bp, Homo sapiens
ccaggatcacgacctccgcagggacaagaactgcgccaagagcctctctggcaaaatcctgacagatgactttgca

SEQ ID NO: 40222 - DNA, 96 bp, Homo sapiens
ctctgggagcagaagggaggctccaagacctcatcaacaattaagcctgataggcagacactgatgtggagtgcaacctggccaaaagaagtaaga

SEQ ID NO: 40223 - DNA, 100 bp, Homo sapiens
gcggcggcactgccggcggggaccgctgggaaggcgaggacgaggacgaggacgtcaaggaacatctgctcagcaattggatgcaacatttagtacgaat

SEQ ID NO: 40224 - DNA, 50 bp, Homo sapiens
ctgggttccaagttgctttgctgaataagagaagatggcgaattagaaga

SEQ ID NO: 40225 - DNA, 51 bp, Homo sapiens
ggagcccaactgataatccttgaacatgtttttacagagtcaagaggatcc

SEQ ID NO: 40226 - DNA, 75 bp, Homo sapiens
aagaagcacggcaccaaaaacaagcgcgatccagaccaagaccgtggcccagtgcgtggagttctactacaccta

SEQ ID NO: 40227 - DNA, 97 bp, Homo sapiens
tctgtgattggtggtcgcttggggtgatcatgtatgagatgctcatcgctttggagtttaacccttctgccaatccagaggcaagcacaatattcca

SEQ ID NO: 40228 - DNA, 73 bp, Homo sapiens
gagaagcaggagccctactcggcaggtggtgctgtccgagaggctgcaggccctggtgaacagtctgtgtgcg

SEQ ID NO: 40229 - DNA, 100 bp, Homo sapiens
ccaatgatatctacagcacctatcacttgttccctccaagacaactgaatgtattttcatctcagcctagtgacgatgaatcaagtagtgatgaaaccag

SEQ ID NO: 40230 - DNA, 99 bp, Homo sapiens
tctgaagcctggaaacgaggcactcagttggaagagtccagcaagatggcccactgcgtgaccttggttcagctgtccatttcctgtgaccatctcatt

SEQ ID NO: 40231 - DNA, 83 bp, Homo sapiens
gccggaggcctgactctgggagcacgcaactgtgccctgtccacggtgcctcctgcatgtcctgctgccctgagctgtcccga

SEQ ID NO: 40232 - DNA, 50 bp, Homo sapiens
cccaggagtcatcggacgccagaatctgaaagtcctacctccatctccgt

SEQ ID NO: 40233 - DNA, 50 bp, Homo sapiens
cgaatatcgtcatcgttagaagatattacaggagtatgtcaatctggtgg

SEQ ID NO: 40234 - DNA, 118 bp, Homo sapiens
cctggaggagaggccggacggcgcgggcgccggcgaggagagcccgcggctgcagagctcaggccccggggcctccagcggcaccagcggagaccacggtgagctcgtcgtccggatt

SEQ ID NO: 40235 - DNA, 100 bp, Homo sapiens
gacgccttcccacctagctctcctctctttgcagagccatacaaagttatgtatcctccactcctcgctggccaccatcctgctgcccaacagaagaagc

SEQ ID NO: 40236 - DNA, 74 bp, Homo sapiens
catataagccaggcatgtctcccgaggagtgcaggcgcttcaccacagacgattgggggcaggagctgcttttt

SEQ ID NO: 40237 - DNA, 100 bp, Homo sapiens
atcattttggttattacctgttctgaagcaactatacttctttgctatttccacctatgtgcagagatgtccggtctgtgctacgacagcaaaatgttcc

SEQ ID NO: 40238 - DNA, 97 bp, Homo sapiens
tgtatgatgactttgaatgggtgcatgttagtgctcaagagcctcattatctaccacccgagatgccccaagcactcccgatttggaaaaacaacca

SEQ ID NO: 40239 - DNA, 100 bp, Homo sapiens
tggaataaatttttggagaataaatccccttggaggaaaatggatttgcctcaaagggcactgcaaaaattgaacagaggaatcccaaggaagctgcctg

SEQ ID NO: 40240 - DNA, 100 bp, Homo sapiens
tagcattataacaacagctcttctattcaggatagtgctgaaaccgattattgaccgacctattcgaggtcgtggtggtcttggaagaggtcgagggggc

SEQ ID NO: 40241 - DNA, 98 bp, Homo sapiens
cggcggcgacggcggcgggaggttcggttgtcgcccgttggccgcgcggcgccgcgctcggcggccgccattgcagggacacactcaggacaccaaca

SEQ ID NO: 40242 - DNA, 100 bp, Homo sapiens
actgcaatccgttcgggagaggctgctgccaaattgaaaagggtaaatatttaccgcttagttacaaaggggactgtggaggaggagatcatagaacggg

SEQ ID NO: 40243 - DNA, 75 bp, Homo sapiens
gtgcctgatgatcacgcagctggctggcttcagtggaccaactcgcagggcaatgacattaaagtcactgctgag

SEQ ID NO: 40244 - DNA, 49 bp, Homo sapiens
gcgggaccagatcatccgcgtgaagcgggaagaaacccttttttcttgg

SEQ ID NO: 40245 - DNA, 100 bp, Homo sapiens
ggtctgttcctggagacagaattacttttgatgctttcccagaacgactagtggtcgtggctgaacattgtgaacgtagtctggaagacttgcttcgaga

SEQ ID NO: 40246 - DNA, 50 bp, Homo sapiens
ctcggctctcagtctctcaggtctttccatctacagcccactggcactcc

SEQ ID NO: 40247 - DNA, 75 bp, Homo sapiens
cggggttctggcctgggtgaaggagaaggtgggcaaaggaattgggttcaggtgttctgtaatggagctgtaccc

SEQ ID NO: 40248 - DNA, 97 bp, Homo sapiens
gctcaacaagtgcgccgcctcagccgcggaggagagcggggccggcaagaaggacaagagaggaaaatatgatgttcccaagtggctctctcccagt

SEQ ID NO: 40249 - DNA, 82 bp, Homo sapiens
gcgactctcgcggcccgagcggccggaccttgtcttcgctccagcccccttttggacatcgttggcggccggaaggcgaggc

SEQ ID NO: 40250 - DNA, 83 bp, Homo sapiens
cggaacccaagatggctgcgctgttgctgagaggagaagaagatgattctttggccatcaaaccaccccagcaaatgtctcgg

SEQ ID NO: 40251 - DNA, 73 bp, Homo sapiens
caaatttgacaaagaagaatataggaaaaaaattaaggcaaagcatcgggtcatcgtattgaggaagttcctg

SEQ ID NO: 40252 - DNA, 100 bp, Homo sapiens
cagggacgctcggcggatgacagcaaagtgggccccgaagtagaatgtaacgctgccatccacaagaaatgcatcgacaagatcatcggcagatgcactg

SEQ ID NO: 40253 - DNA, 75 bp, Homo sapiens
aagaccaaaaaacacaataccaggcatacatttggcagaataaatgaaccagccaagcccagcaaaagaatggca

SEQ ID NO: 40254 - DNA, 96 bp, Homo sapiens
ctcgcggccctgcagttcttccggagtcagggcgctgagggagcgttgacagggaagcagccggatggatagatcactgcgaccagaggaaattga

SEQ ID NO: 40255 - DNA, 97 bp, Homo sapiens
ggccagggcccacccagccaaagcccgggacctgtacaagggccgccagctacaagctccagaacctgggtatcaacccagcaaacattggcttcag

SEQ ID NO: 40256 - DNA, 100 bp, Homo sapiens
ggaatggctgaatttggcaggaaataatcttaagggtggttctcttcccaaagtggaagccaaattcatcaattatgtgaagaattgcttccggatgact

SEQ ID NO: 40257 - DNA, 100 bp, Homo sapiens
agaaggcgatcaaggccaagtatccgccagtcaataggaagtacgagtgataaaagaatcagagtgtctcaacccttgacaagaggaccaagtgccttta

SEQ ID NO: 40258 - DNA, 75 bp, Homo sapiens
cactcgctttcctcggattcccggatgtgggttctcttgctgcaaatggccctaccaccttggttgataaagttt

SEQ ID NO: 40259 - DNA, 50 bp, Homo sapiens
cagcaccgcacgccctgcaagggagaacctgtgagaagtttctacaatgg

SEQ ID NO: 40260 - DNA, 100 bp, Homo sapiens
agcagcgaacggaagctcctggaggtcagaggccctttcatcatcaggcacacaaaaaatccctttggacgattgaacccaatgaaggcatggttcctcc

SEQ ID NO: 40261 - DNA, 98 bp, Homo sapiens
tgtttgtcgggagatgcggccgcttcgtcctctgcagtcaagacgctgggcgcgtcgaggactggggtgtgggccgaagatatgctcatgtggtgttg

SEQ ID NO: 40262 - DNA, 83 bp, Homo sapiens
gcggggagctgccctcagagaggtggaaccccacgcagaacgtcagacaatgcagatcttcgtgaagactctgactggtaaga

SEQ ID NO: 40263 - DNA, 75 bp, Homo sapiens
agcatcgggctggcccagctgctgctcttcgcccagcagatctgcgaggagcatcggtgtcatcacctatatcct

SEQ ID NO: 40264 - DNA, 98 bp, Homo sapiens
ggaggccaaagagacacagcccatttttttagtttcctagaggaagttctggcttctggactgcacagccgaagcaaggagagctctcaagtcacatc

SEQ ID NO: 40265 - DNA, 50 bp, Homo sapiens
cctatggctcaaagaaagatgattatcctgctgttcatgtacaaggtcag

SEQ ID NO: 40266 - DNA, 82 bp, Homo sapiens
ttacctttgctctctgctgctacatcaccaactgaatagctattcagtcagacagaaccacttatcacgttttgcagtatct

SEQ ID NO: 40267 - DNA, 87 bp, Homo sapiens
agcagcaggcgccaagtgatgaaggataaaagaatcagagtgtctcaacccttgacaagaggaccaagtgcctttattccagagaag

SEQ ID NO: 40268 - DNA, 74 bp, Homo sapiens
gcgcggcgcaggcaccggcccggggagaggcaccatgagcgtgacaaccatgagtggaaaaaactaattatggt

SEQ ID NO: 40269 - DNA, 90 bp, Homo sapiens
aaccagattactgacactgaaggcatctctcatcctcgtcttgaaaccctgaatctcaaaggaaatctggcattttttaaagtttgcgcc

SEQ ID NO: 40270 - DNA, 75 bp, Homo sapiens
gtccagaactctgtcaaatgaagaacactttcaagaaccagaattaaatgtgagggagtctgacgtaagagtttg

SEQ ID NO: 40271 - DNA, 100 bp, Homo sapiens
aaaagacagtcctcgtcagcactgactttcagctatggaatcgttcccagtgacctgacagcagaggagcgtcaagaactggagaacatccgacggagaa

SEQ ID NO: 40272 - DNA, 74 bp, Homo sapiens
ctgctggttgtgcgaaccccgggcagcccgggaaatctccaagtcagaaaggaatcagagatcattgatttctt

SEQ ID NO: 40273 - DNA, 90 bp, Homo sapiens
gctaagactccaggaccctctggaagcctagaaatggttcttgggtgtctctggggagtccctgggccagaccttcctccagactccagc

SEQ ID NO: 40274 - DNA, 100 bp, Homo sapiens
tcacagtcccctgttccgaggtcaggaggatgcaagtcctgacagattcagcaacactgacatgctgaagaacacctccaaaggccaccccgacaggctg

SEQ ID NO: 40275 - DNA, 82 bp, Homo sapiens
tcatggtcccagaaacgtcactatcaagaaggcaacaagattgacctggctgaaaggagagaggtttcccagcagcgagctg

SEQ ID NO: 40276 - DNA, 80 bp, Homo sapiens
agcggctccttcggagacatctatctcgagcggttctggtgaggttggaaggatgcagccacccggttgtcatgaaaggc

SEQ ID NO: 40277 - DNA, 98 bp, Homo sapiens
tgaagggggtcatcaaggctgtgctggatggagtgaagggagagtcccgtattctcagagtaaaagttgtttctggaattgatctcgccaaaaaggac

SEQ ID NO: 40278 - DNA, 100 bp, Homo sapiens
aaggagcagagtcctttgtactgaccaagatgagcaacatctacatccaggagcctcccacgaatgggaagggtcctggcggcagagaccacgtcccagc

SEQ ID NO: 40279 - DNA, 87 bp, Homo sapiens
ggcggagatcctggtccggaggcccacaggaacaggcctttgagagcagccagaagtacaaagaggggaagtacatcattgaactca

SEQ ID NO: 40280 - DNA, 75 bp, Homo sapiens
ggctccccagccccaggccgggagggtttccaggcctgaggtgcccgccctggccccaggagaatgaaccagccg

SEQ ID NO: 40281 - DNA, 98 bp, Homo sapiens
cggattcccctgcggcttcgatccctttccactgggtattgagattggcgaggggagaggcgcagaaacggcgtgttctgtttggattctgcaaagca

SEQ ID NO: 40282 - DNA, 82 bp, Homo sapiens
gagcgacagcggcgagcagaactacggcgagcggtactttaggaagaatcatcaaagtaactcaggaggtgattgactaccg

SEQ ID NO: 40283 - DNA, 75 bp, Homo sapiens
gtgctcatctgcacacacaccaacagtcttcatttccatcacccatgtgcatcgcaccaagcccctgtggagaaa

SEQ ID NO: 40284 - DNA, 74 bp, Homo sapiens
agcatgagcaaaaactccaaactcctctccaccagcgccaagaggttggacgtgataagtatgagcctgcagct

SEQ ID NO: 40285 - DNA, 100 bp, Homo sapiens
caggactacgagtgcaggagccataatgtcgacctgccggagtcgaggattccagggtcgaacactcgatcctgcccggcctgtacatcggcaacttcaa

SEQ ID NO: 40286 - DNA, 75 bp, Homo sapiens
agcaggctctgcgggaggtggagcacctgaagagatgccagcaggtcatcatcagatttgaaatatttaaagtgg

SEQ ID NO: 40287 - DNA, 102 bp, Homo sapiens
aggaagggaaccaacccactttctcggcgccgcggctcttttctaaaagttcactgtgtgcccagtattctgcagacaaacgagaagatgagaagatgtgtg

SEQ ID NO: 40288 - DNA, 75 bp, Homo sapiens
acctaccatggtatgacactgaaatctgtaacgaattgtgagaagctggagaataattttgatgacatcaagcac

SEQ ID NO: 40289 - DNA, 100 bp, Homo sapiens
cgggacctgcagccgccgccgtccccggagcacggggtggtgtgtgggggaagccgcccccggcagcagggaaccctactctggaaactgtcagtcccag

SEQ ID NO: 40290 - DNA, 98 bp, Homo sapiens
gagctgagggtggcggcggtcgacatgttccaggtcccggatagcgagggcggccgcgccggctccaggggttcaactagatatagcttcacaatctc

SEQ ID NO: 40291 - DNA, 75 bp, Homo sapiens
ggggcagtcccgggagaacctgcggcggccggagcggaaatctactttcttcaatgtgttaaccaatagtcaggc

SEQ ID NO: 40292 - DNA, 141 bp, Homo sapiens
atgtagcctacgcaacctccacaggcggtatcgttaataaaatggtcggccgcgttggggactcaccgtgtctagtctgccttggagatcatttcaccatcagctcagaagatcttctttctctgttttcagccacacagc

SEQ ID NO: 40293 - DNA, 90 bp, Homo sapiens
ggcggccgctctgcctgcgcgctgctcctgctctgctacctgctgggtggtgaaagtggtgaaaaccctgctactgaggatgggctgctc

SEQ ID NO: 40294 - DNA, 75 bp, Homo sapiens
tgagctgcgaggaaaatggcggcgggagatcatcatggcaaaaccagctggtgggcccaagcctccaagtgggaa

SEQ ID NO: 40295 - DNA, 82 bp, Homo sapiens
agctttacaggagcgacttgacaatgtccctcacaccccttccagctacatcgaaacgtcttcgccttgatcgtgttctcct

SEQ ID NO: 40296 - DNA, 83 bp, Homo sapiens
gacgtggacatcgtcttcagcaagatcaaatcatgatgctgccgccaccgccgccaccacggagcgagaagcccagatagacg

SEQ ID NO: 40297 - DNA, 100 bp, Homo sapiens
cttccgccgccgggctcggggcctccgcagcgacaacatggaggccgtgaagaccttcaatagcgagaaaatgcttggacagaagagatgagtactattt

SEQ ID NO: 40298 - DNA, 88 bp, Homo sapiens
cttgtatctctaattggaagcacctcccacatgtcatcagcaggatgggcaagctggagcaggtggacgtgaaccttttctgcctggt

SEQ ID NO: 40299 - DNA, 100 bp, Homo sapiens
cgcatcactcccagctgcgcaaagcttgcgaggtggcgttaggtttgaagatggcaccatctcattccttgatgttatcgcgctaaaacatggatttgac

SEQ ID NO: 40300 - DNA, 82 bp, Homo sapiens
ctgccctccggctccaagaaggttatctcctcagccaacagagctgtggttggatgatcggctgaatgtaacagaggaacta

SEQ ID NO: 40301 - DNA, 80 bp, Homo sapiens
agggctacctggagacagtggcggcttattatgaggagcagcacccaccttgttcgggagtctagcagttctcgctcacc

SEQ ID NO: 40302 - DNA, 75 bp, Homo sapiens
agccctggacgactttactgccatccgaggcaactacagcctagagggagcgaagaatggtcaagaaagtggact

SEQ ID NO: 40303 - DNA, 98 bp, Homo sapiens
tatcctttggtgcagctgtgaatggtgcccaggagctgagcgtcttgtagtgcctgaaggactccctggaggaaaagcggaagcggcagcggtctgaa

SEQ ID NO: 40304 - DNA, 83 bp, Homo sapiens
gctgagggctgatgggttctgacggataatttccaagccagcaatggctgccatccggaagaaactggtgattgttggtgatg

SEQ ID NO: 40305 - DNA, 98 bp, Homo sapiens
ctctcccgccgggcgggctcctttgtcttctgggctttcgtcgcgagatggaacgctgggccctagactggagctggttacagacggaagaagaagag

SEQ ID NO: 40306 - DNA, 100 bp, Homo sapiens
ggtcctggcggcccccagccgccgcccacgcagcagggacagcagcaggacatcaaaggccagttctggaatgatgacgactcggagggagataatgaat

SEQ ID NO: 40307 - DNA, 100 bp, Homo sapiens
tctggccagtggagagaggaattcctcaagacaccattccaggcaccattcaggaagattacctaagagagctgctgacaaccatgggggatcggtttac

SEQ ID NO: 40308 - DNA, 75 bp, Homo sapiens
cagccatttatttgtcccgtggaatacttcattgctccatcagtagatatacaagaacaggtttatcgtgtccaa

SEQ ID NO: 40309 - DNA, 75 bp, Homo sapiens
ccatcattgatgtggtgcgatcgatggaccagcttttgggaaatatgattgaaatgtgggttgatcgaatggaca

SEQ ID NO: 40310 - DNA, 98 bp, Homo sapiens
gaatatgcagagcgacttgcgcgccttgtcactggagtgcaagaagaaattcccacctgtcaaagagatgctctacccatggtaccccaggaccagaa

SEQ ID NO: 40311 - DNA, 75 bp, Homo sapiens
agtctagacttccccaaggcgtgtacccagggtgtcaaattgagaaccaggtagatccccaccacctacagtaaa

SEQ ID NO: 40312 - DNA, 100 bp, Homo sapiens
ttgtggagaccctcctcctccttacgaaccgcactgatggtgatgggaatctttgcaaattgtatcttctgtttgaaagtgaagtacttacctcagcagc

SEQ ID NO: 40313 - DNA, 75 bp, Homo sapiens
tgctgctgcggctctcactgtgcgggctgctgctccagagggcggagactctgtgttgatccagacgctggccga

SEQ ID NO: 40314 - DNA, 98 bp, Homo sapiens
cggaacagaccgccgtgagagaggaggggtgccggccgggattcgcggcccggagctcgggaccgggaactgtccaggtttattgctgccgggagact

SEQ ID NO: 40315 - DNA, 100 bp, Homo sapiens
tggtgcctgtgcaagttgttgagtataaccccgttttcacacgaatggccccttcacatatttgaagactaccgtcgtgtccgtgctgaccctttctccc

SEQ ID NO: 40316 - DNA, 90 bp, Homo sapiens
tttggatatgacttgctcgggcaaaagttgtgcattggcccgatcaagcctgacttctagccaagtggatggatgaaaaggcaagaggaa

SEQ ID NO: 40317 - DNA, 95 bp, Homo sapiens
gaagtggtctgctccggatggctccgcaagtcccccccggagaaaaagttgaagcgttataggcgggatgtggtaacagagaccaagactgtgga

SEQ ID NO: 40318 - DNA, 75 bp, Homo sapiens
gactgctgtagttcagaagaggtttggctttccagagggcagtgtagaggatgaattacaaaggctgctggggtt

SEQ ID NO: 40319 - DNA, 75 bp, Homo sapiens
cttctgtttacatggaactcagacatctgcaaatcatggcagctgttgtgctgtgtatggacgtgggctttacca

SEQ ID NO: 40320 - DNA, 87 bp, Homo sapiens
gcaacgctaattagactcatgccacttgagagcaacttatgactctcatctctgctgcacgagaatatgagatagagttcatctatg

SEQ ID NO: 40321 - DNA, 88 bp, Homo sapiens
gaggcctgactctgggagcacgcagactctctataagatcctagacagctgcaaacagctgactctggcccagggggcaggtgaggag

SEQ ID NO: 40322 - DNA, 89 bp, Homo sapiens
aagaaatccaggaacaactgtgtcagcagctagcccttttcctcaaggattttttatcaagcagaaatgcatcgaacaacgagaatcaa

SEQ ID NO: 40323 - DNA, 106 bp, Homo sapiens
ttgctaatgagatgattgaggcagccaagaatctgaaagcggctgatactgaccccacagccccgccttatgattctctgctcgtgtttgactatgaaggaagcgg

SEQ ID NO: 40324 - DNA, 83 bp, Homo sapiens
gccagcttcagcaccctggaggccctggagaaactatgttccaacttcctgtcaacaatcttggcagtttaagaaaagcccgg

SEQ ID NO: 40325 - DNA, 100 bp, Homo sapiens
tgcgagccagcctgagcgcaacacttctccgagccagcgagccagcgagccgccgacccgccgagcaaaatgacaaaaagtaaccttcctgaagaggaca

SEQ ID NO: 40326 - DNA, 100 bp, Homo sapiens
caagcatagggagagccgccggaagtattgacggaaagcttgaattacctacatgtaacaacatgctgtaccccaaggaagacaaggagaaccgcattct

SEQ ID NO: 40327 - DNA, 100 bp, Homo sapiens
ctttcttgtcaactgctcacgacagaaggcgtctcatggcgttggaataccggctctcagcggctgttcagtggtcacctcacaatgagactattttagc

SEQ ID NO: 40328 - DNA, 100 bp, Homo sapiens
ccggcgccgcccgctcggctcccatagcgcccgcgacagcggtccggacgccgcccgaacatggactccgccggccaagactgattcttgctattccaaa

SEQ ID NO: 40329 - DNA, 100 bp, Homo sapiens
aacttgggactctgcaatagatacatggagcccatcagaatggcagatggcttatgaaccacagggtctacatcaactattacgacatgaacgcggccaa

SEQ ID NO: 40330 - DNA, 100 bp, Homo sapiens
ttctgcatgtccagctcaaccggcccaacaagaggaatgccatgaacaaggtcttctggagcttctgtgccttattggagaatcttttgatgactacagt

SEQ ID NO: 40331 - DNA, 97 bp, Homo sapiens
tcttcctcaacaccagcaccgcagatgttgtcaaggtggcctaccaggaggccaggggtgtcgccatgatcatcgaaggtaacatgaaggcccactt

SEQ ID NO: 40332 - DNA, 82 bp, Homo sapiens
aaacagaaacacttcttttattttcctgtaatatatctgtatcatcggagactacgcgtttgttcacatggagaaggaagca

SEQ ID NO: 40333 - DNA, 87 bp, Homo sapiens
gctgtgttcctctctagtcacaagagccttggggaagacagttggaagctcagacatggtgcctaatggataagaacttcgttagga

SEQ ID NO: 40334 - DNA, 98 bp, Homo sapiens
gatgatttgggatggtgcaattcctggccttcaactgtctggcactgttttttgaaaggccacgtgctgtacgccgacatcaagatggagaatgggaa

SEQ ID NO: 40335 - DNA, 83 bp, Homo sapiens
tcctcaacgcattcatcgacaggaaggacagttactactccattcaccagatagcccacaccagttatcctattgaaagaggg

SEQ ID NO: 40336 - DNA, 90 bp, Homo sapiens
gcagaatgcgaagtctgtggtttatcattgtaatcagcttcttaccaaatacagaagggggattcccgaagtcttccgttttctgagaat

SEQ ID NO: 40337 - DNA, 48 bp, Homo sapiens
agtagtgcaaaaaccattcttaagaaaaatgaggaagctgtgagtacc

SEQ ID NO: 40338 - DNA, 100 bp, Homo sapiens
ctcccccgatccaagttggaattagcatcctctcggggaggtctcattgccagcagtttcacggaaacccactatctgcaagacggtactgatgtctccc

SEQ ID NO: 40339 - DNA, 80 bp, Homo sapiens
cgtcaacgccttcaaccaggagcaaaagactgttgaagtagagagcattttgcccagctcactcggattctttgctggca

SEQ ID NO: 40340 - DNA, 82 bp, Homo sapiens
cgggcacctccgagcgcaaggacagcgcgaggtccgcgcagcccagcgcagccataaaaagcttgtggtgaaggggggcaaa

SEQ ID NO: 40341 - DNA, 101 bp, Homo sapiens
tttgactactggggccagggaaccctggtcaccgtctcctcagctattgaaaccaatttcagggaaattgagggcccagtgggaaatgggcattgttcaag

SEQ ID NO: 40342 - DNA, 76 bp, Homo sapiens
acgggctcccccgggatgatctacagatgagcagcaccagcagtaagagggctccgaccacggcaacccagaggct

SEQ ID NO: 40343 - DNA, 99 bp, Homo sapiens
aaggaatccaccttcttacgctatggcaggtgatcataaggtccacagattattagatggcatgtcaaaaaatccttcagggaaaaacagagaaactgt

SEQ ID NO: 40344 - DNA, 73 bp, Homo sapiens
ccgtgacaaaatgtgttccatggtcaaaaaatggcagacatctccatgattgggcagtttggtgttggctttt

SEQ ID NO: 40345 - DNA, 80 bp, Homo sapiens
agagatgctggaggagcaactggtgaggatgttaacccgagaagtcatggacctaatcaagttggtcaaacgccatgctg

SEQ ID NO: 40346 - DNA, 100 bp, Homo sapiens
cagaccgcccgctgtgcgtgtagaaaggggcagatcgccggcaccacgagagcccggcccgcctgtgtggacgatgggaataactgggaacacaagtcca

SEQ ID NO: 40347 - DNA, 100 bp, Homo sapiens
ccaagccttctgcctgtgatgatggtggatgcttccaaaagcatcgaagctgtccatgaggacatccgcgtgctctctgaggacgccatccgcactgcca

SEQ ID NO: 40348 - DNA, 100 bp, Homo sapiens
cagcggggcggcggcggcggcggctgcggcccaatataggtctctaattaacagaagatggcaaagcccagccacagcagctatgtccttcagcagctaa

SEQ ID NO: 40349 - DNA, 98 bp, Homo sapiens
ttgggtaccgggaggggcgaaggcgggcggcagaggcgatcagtaagactttgaccccgacgcaggcttcagtgattgccgcggatcagaagcctgag

SEQ ID NO: 40350 - DNA, 75 bp, Homo sapiens
gcggctgggcatcctcctgagactccggggtcagacgcccactccagagcatgaataatctttcatttagtgagc

SEQ ID NO: 40351 - DNA, 82 bp, Homo sapiens
tgcagctgcctcagttcttagcgcagatgccagagtggtacagttcgaacaaactgcttggattgtcttgatagaacaaata

SEQ ID NO: 40352 - DNA, 83 bp, Homo sapiens
cgtctctgtccccatctggttttagcttcctgcctgacacagctcacttcaagaagtgcacaatgtcagaacgtggaattaag

SEQ ID NO: 40353 - DNA, 90 bp, Homo sapiens
gctttactggtgttccagccctaaggtgttgacagctcttctaccacaagcagtgcttctccaatgcccaacagttatgatgccctggaa

SEQ ID NO: 40354 - DNA, 100 bp, Homo sapiens
tgcaagaggcgcaaacaagccaatcccaggaggaaaaacggaccgagaggagcggaagctgctgctggaccctagcagcccccctaccaaagctctcaat

SEQ ID NO: 40355 - DNA, 117 bp, Homo sapiens
ccggatcccattgtacccagagtgcagagccgcctttccagcatgcaggggctgctcagtggtgccaccgaacatcgcagaactgaagaatttggaggtgctcaacttttttaataa

SEQ ID NO: 40356 - DNA, 88 bp, Homo sapiens
tacttcttgaggtacaaaaactgccggagattctgggaaggattacggccaggagatacaaccagcactttctgtggtactcctaatt

SEQ ID NO: 40357 - DNA, 74 bp, Homo sapiens
agcagcagcagctccagcaggcgctggctcctgctcagagtgctccaagctcccgaagccgaagtctcactttg

SEQ ID NO: 40358 - DNA, 130 bp, Homo sapiens
ccaggaccaaaagaggaagatagtcttgggacccttgcatggtgtttcaaagggtggtgaagaactaaggttggtcaaagaaaaagtgatgtatgaaaaagaggcaaaacaacaagaagaaaagattgaa

SEQ ID NO: 40359 - DNA, 97 bp, Homo sapiens
tcaagcaggttttaaatcaagatttaacattccaacacataaaaattatttatccaacagctcctcccaggttgattgacttatgtgcaatttggga

SEQ ID NO: 40360 - DNA, 100 bp, Homo sapiens
agagagggaagagattcagccagcacactcctcgcgagcaagattcttctgctgatcgacattgagcagtcctacatcaacacgaaccatgaggacttca

SEQ ID NO: 40361 - DNA, 100 bp, Homo sapiens
cttccagcagaagttcttgctggaggctgtgtaacgatgggggtccatcctcttcaagtaagactacaaacaagtttgagggactatcccagcagtcgag

SEQ ID NO: 40362 - DNA, 74 bp, Homo sapiens
tgtacttcctgaagcagctgctctagtgaaacggtctggaaaatcccgaagcagaagcccgtattcatctaggc

SEQ ID NO: 40363 - DNA, 98 bp, Homo sapiens
gaccctccctgctgagatgcgcaaattcactccccagtacaaagatatggtccggcttgctttcacagatgtttcgataaaaaattttgaagagtttt

SEQ ID NO: 40364 - DNA, 100 bp, Homo sapiens
gggattgactccatcctggagcagatgcgccggaaggccatgaagcagggcttcgagttcaacatcatggtggtcggtggtgttggcatgaggaaaggag

SEQ ID NO: 40365 - DNA, 51 bp, Homo sapiens
tgtggtggtgggctgttaactgaaaacatgcaaggaggcactaaactccat

SEQ ID NO: 40366 - DNA, 60 bp, Homo sapiens
ccgggagcctagatcctgtgctttactctgaagactcatcggacagctggcttttaaagg

SEQ ID NO: 40367 - DNA, 100 bp, Homo sapiens
gtccaggaaaatatacagcaatgctttgggaaaatggaattaatggcattttagcagatgaaatgggattgggtaagacagttcagtgcattgctactat

SEQ ID NO: 40368 - DNA, 88 bp, Homo sapiens
ggagaacaggaccacagggttgatatgaaggcaattgaaccctataaaaaagttatcagccatggggctatttcttttagaagagatg

SEQ ID NO: 40369 - DNA, 83 bp, Homo sapiens
tcctgaaaggagagacacttgtgaacattcaagtgaagcaaaagcctttcatgattatgatcgaatcatcaatttagttgttg

SEQ ID NO: 40370 - DNA, 80 bp, Homo sapiens
ggtggggctctactgcgacaagcccgagcgggaagaagttccgcagcaagccgcagctggcgcgctacctgggcggctcc

SEQ ID NO: 40371 - DNA, 75 bp, Homo sapiens
tgatcttcgccaaactgtggagcctcttctgtaaccaaggatgacgtagctttgccaaagacttagaagctaagc

SEQ ID NO: 40372 - DNA, 100 bp, Homo sapiens
gaaaaagccatggaactgatccgcgagctgcatcgcgcgcccgaagggcaactgcctgccttcaacgtgatctgcaactctttcaccatctgtaatgcgg

SEQ ID NO: 40373 - DNA, 100 bp, Homo sapiens
caatgcggcaaataataagaaaaagaagattatccctcagtacttggggtgcattgaagttctgcgctcaatgaggtctcttgacttcagtacaagaaca

SEQ ID NO: 40374 - DNA, 71 bp, Homo sapiens
tgccctcttcaacagacagccagaatgcactggatttcctggaacaaattttgacatttagccccatggat

SEQ ID NO: 40375 - DNA, 75 bp, Homo sapiens
cctgggcctccagtcttgtccctggaggcctctgaggaagtggagcttgggcggcgactggcggcgcgatggacc

SEQ ID NO: 40376 - DNA, 74 bp, Homo sapiens
agatggaacccgaagaagaaaggattcgttacagccagagattgataaaccgagaaaactggtgtacaatagag

SEQ ID NO: 40377 - DNA, 83 bp, Homo sapiens
cgaaatagctaaagaatctgccaaatctcctgtgattgtagacagattcatagtgaccacttagtagctagtgagaaacagca

SEQ ID NO: 40378 - DNA, 90 bp, Homo sapiens
aaacaaaatgtcaacaaattgatggcattagtgccagcagtagttcccaagggctgtctcagccatccacccagacgactcagtatctga

SEQ ID NO: 40379 - DNA, 90 bp, Homo sapiens
tgactttgatgggaaattaaaaggtgggccccctcatcctgtgccacagccagggtatccaggatgccaaccgttgggtccctaccctcc

SEQ ID NO: 40380 - DNA, 111 bp, Homo sapiens
aaaacgcagccaccttacatcgaagaggaggtattggaagaagggttgaagtggatgtgagatgagatggtcttcaggcagtgacagtggtgggagcagcagcagcagcag

SEQ ID NO: 40381 - DNA, 80 bp, Homo sapiens
ggaggatgaacactatgattaccaccaggagattgcaagagcccacaggcggttttgtgagctgcttccccaggagcagc

SEQ ID NO: 40382 - DNA, 75 bp, Homo sapiens
ggttatctcctcagccaacagagctgtggttggtttcctccagcctggtggtgccctgtccttgcaaaagcagat

SEQ ID NO: 40383 - DNA, 50 bp, Homo sapiens
tctcacgctcacaccgggtcatctgattgatatgaacgagactgccaaac

SEQ ID NO: 40384 - DNA, 90 bp, Homo sapiens
cagataccctcgtgattagaggtcttttgctggaggttgactgtgctgtctgtactatactggcaattgctggagaagattttgcaattg

SEQ ID NO: 40385 - DNA, 100 bp, Homo sapiens
cctacctgatgtccctgcagacctgctgaagctgagtttgaagcgtcgctcagacaggcaacaatttctagattggccaaaatgggaaggattggattcc

SEQ ID NO: 40386 - DNA, 75 bp, Homo sapiens
ctttatggaaatcatactattgcttacagcacttagaaattgttgatggccggtatctcttaagtaagaatagcc

SEQ ID NO: 40387 - DNA, 80 bp, Homo sapiens
ttggggatcctctgtacgcccgttcactgggatttagtgcaagaagaagaacagttgatggaagaaaagaaaaagaaaaa

SEQ ID NO: 40388 - DNA, 100 bp, Homo sapiens
ggagacgcacagctaagatgccaggacatcctggaagctgggaaaaggtcctacaggtatggatctctggcagctgctgttgaccttggcactggcagga

SEQ ID NO: 40389 - DNA, 83 bp, Homo sapiens
acctcagagtcggtcggggaaggccacccaggattttttatcaagcagaaatgcatcgaacaacgagaatcaagatcactgag

SEQ ID NO: 40390 - DNA, 152 bp, Homo sapiens
ccgccttcgtctccgagtttgcgactcgcggaccggcgtccccggcgcgaagaggctggactcggattcgttgcctgagatttacactgactgggccaaccactacctagcaaaatcaggccacaagcggctgatcaaggacttgcaacaag

SEQ ID NO: 40391 - DNA, 75 bp, Homo sapiens
attttgaccaacaccatggaagtaaatgaactgtcagctctcatggaggatggacgttgtcaagttcttctagca

SEQ ID NO: 40392 - DNA, 98 bp, Homo sapiens
cccgcgccgacgcggggcccatggccaggaccaccagccagctgaaattcattgagtttgaagatgctctggaacaagagaagaaagagctgcaaatc

SEQ ID NO: 40393 - DNA, 75 bp, Homo sapiens
ctgcgctaggtggcatctcctctcacggatgcctcggtttaagaattgtttaagctgcatcaatggagcacatac

SEQ ID NO: 40394 - DNA, 50 bp, Homo sapiens
atccagcctgcggagcctgtggggcagtttatgggaaaaacagatggaga

SEQ ID NO: 40395 - DNA, 96 bp, Homo sapiens
caaaaacctatcgttagagtcttcctgcccaacaaacagaggacagtggtctcctaaaaacccagaacagaagatcattaagagagtgattgctct

SEQ ID NO: 40396 - DNA, 75 bp, Homo sapiens
gccgcggccggaccgagcgcctcgacctcggtctgaggtacctggaactggaaagtagtggccatcggaatgaag

SEQ ID NO: 40397 - DNA, 75 bp, Homo sapiens
ggatactcagttgtggagagctgattcccaaatctaaaggttacggcctccgctgccacagggccatcatcacca

SEQ ID NO: 40398 - DNA, 75 bp, Homo sapiens
tttgttccctgacaactttgtaagaatgccatggacaatattaccaggcagaaccaattctacgatacccaagtc

SEQ ID NO: 40399 - DNA, 88 bp, Homo sapiens
gccggccgcgggcgcgaccggaggcaggttatgaagacagtatggagtttccagaccatagtagacatttgctacagtgtctgagcga

SEQ ID NO: 40400 - DNA, 80 bp, Homo sapiens
cacgggtcatcttttccccagaggcgtcggaatggacctgtgccacccaggagcagctaacaccctcagcccatcacaaa

SEQ ID NO: 40401 - DNA, 80 bp, Homo sapiens
tgcggcggccggcgggaccataagggcttaactcatatatttaacccccctccaaaaaggccgttgctccagggagaact

SEQ ID NO: 40402 - DNA, 122 bp, Homo sapiens
ctcactgcagcccctgcgtcgccgggaccctcgcgcgcgaccgccgaatcgctcctgcagcagagacaatgcagatcttcgtgaagactctgactggtaagaccatcaccctcgaggttgag

SEQ ID NO: 40403 - DNA, 100 bp, Homo sapiens
gccagggaacggggcatcgcggttccaacggtgtagaatgagccaaggagactcaaacccagcagctattccgcatgcagcagaagatattcaaggagat

SEQ ID NO: 40404 - DNA, 75 bp, Homo sapiens
gaagatgctgttagcctttgcagtctcgacataagtcacgcactcctggctttaaagtttatacttgcatttgcc

SEQ ID NO: 40405 - DNA, 100 bp, Homo sapiens
ccagctcacccactgccagcagagatggagatcttataacaatttttgatagttctgacctttcctttgcaattcagtgcagtaggatactgaaactgac

SEQ ID NO: 40406 - DNA, 98 bp, Homo sapiens
tttgagattgacgcggtgaactctgtccagttttcaaaccacacaggtctcctctgagcctccggcctccataagacccaaaacagatgacacctctt

SEQ ID NO: 40407 - DNA, 145 bp, Homo sapiens
ccagattgcaaagagttatggatattctggtggggagatgaacccaacctagtgggtgtaatacatcatgaactgcaggatgagcaagaaagttccggagcaattatttacaccgtggagcttaaacgctacggggggccccttg

SEQ ID NO: 40408 - DNA, 100 bp, Homo sapiens
gaacagtgcggaagatctgtgctttggatgacaacgtctgcatggcctttgcaggttttcctttggaatatggataaatacaccatgatacggaaactag

SEQ ID NO: 40409 - DNA, 75 bp, Homo sapiens
tgctctgccctggctgggccactacaggttcagccgtctgtatatctccccagatacctgaaactgaccacctga

SEQ ID NO: 40410 - DNA, 98 bp, Homo sapiens
tcatgctcgcttcacggaggcaatagctagccgaacaaggagcactgatactaagttacggatgtaaaataaaacactgggaagcaaacagtcttata

SEQ ID NO: 40411 - DNA, 100 bp, Homo sapiens
ctctcttcccacagtgcactcctcctagtgtcctgccatctgatattacaatctaccaccttattcagcctcctcagttccagattttgaggaagctgtc

SEQ ID NO: 40412 - DNA, 98 bp, Homo sapiens
gacgccatgcagaaagcctgcctgaatggctgtgccaagttccccaaggactctagcacctggactgtggaccaccagctcctgtggggggaggccct

SEQ ID NO: 40413 - DNA, 138 bp, Homo sapiens
gggacgtcacatgtcattataccttcacccagcatttcatccctcgtcgaaaggattggattggcatctttagagcatagaatgtcaagctaaccaggcgtccgctacttcagaagagtgtactgtcgcatggggagt

SEQ ID NO: 40414 - DNA, 100 bp, Homo sapiens
attgcaaaactaaaacgacccacagcacttaaaaagtacatgggctgtgttgaagtgctgcaatcaatgagatcactggattttggaatgagaacccaag

SEQ ID NO: 40415 - DNA, 82 bp, Homo sapiens
accctccaactttgcgacggaaatgtgtcatcgaaagccaggcctatgaaaggaggttccctacatgtcctttgattccgat

SEQ ID NO: 40416 - DNA, 83 bp, Homo sapiens
cattgacgccatgtcgggttattcgagtgaccgagaccgcggccgggaccgaggatggcatccgccacagactcgcgctatgg

SEQ ID NO: 40417 - DNA, 100 bp, Homo sapiens
tctgcccgggcctgtgactctgtcaccagcaatgtactgcctttactgctggaacagttccacaagcacagtcaggacagagcgggatgccaccagcttg

SEQ ID NO: 40418 - DNA, 75 bp, Homo sapiens
tgaggaactggcaagaaagctaagcattgatattgtaaagggagaagatgaggaagagaacaatttggaagtacg

SEQ ID NO: 40419 - DNA, 101 bp, Homo sapiens
gggagggcgcgcggcgccggagacatgtccaggcggaaacagagcaacccccggcagatcaagcatcatcaatgctgtggtactgttgattttattgagtg

SEQ ID NO: 40420 - DNA, 100 bp, Homo sapiens
atgctcaagagtgagctgcggaagcaaaaggcagactttttgatattcagagccttggaagtcaacactgtcaaagataaggatcctgatttagaaacaa

SEQ ID NO: 40421 - DNA, 82 bp, Homo sapiens
tttgacttagtggaggaggtgcagctcaacttctaccagttcctcggggtgcagcagttgctgatagtccaactccaccgcc

SEQ ID NO: 40422 - DNA, 100 bp, Homo sapiens
gttgtcctgtgctggggctgacagcactagctgacgcgtctatgggcgcaacgccgcggccctgagccaggcgctgcgcctggaggccccagagcttcca

SEQ ID NO: 40423 - DNA, 100 bp, Homo sapiens
tttggctcttcgggtaaagatggcggagcgcgggtacagcttttcgctgactacattcagacggtctggaaaatcccgaagcagaagcccgtattcatct

SEQ ID NO: 40424 - DNA, 80 bp, Homo sapiens
gatttgggtcgcagttcttgtttgtggatcgctgtgatcgtcacttggttaaacccatccagagtaatggctgcggcctt

SEQ ID NO: 40425 - DNA, 50 bp, Homo sapiens
cttcgcagtcactaatgcttcctgtgggccaaagctgaccaactccccca

SEQ ID NO: 40426 - DNA, 100 bp, Homo sapiens
ctctgttggatcagaaggtcaagagagagtctacagggagattgaacaggtgattggcccacatcgccctccagagcttcatgaccgagccaaaatgcca

SEQ ID NO: 40427 - DNA, 99 bp, Homo sapiens
cagatcctcaggggcaagtacagttactctggggagtttttcagttatgggacaaaaatattatatcaaaacactgaagctttgcaatctaaattcttt

SEQ ID NO: 40428 - DNA, 100 bp, Homo sapiens
ctataattggcctgatgaatcctttgatgaaatggacagtacactagctgttcaacaggaccgaggtgatgagttcacatacactggaagcggtggtaaa

SEQ ID NO: 40429 - DNA, 75 bp, Homo sapiens
tttctggcatcgtaggaggtggcctgctgccttccttgaatccagaagctggcaaacagcatcagccatgcagac

SEQ ID NO: 40430 - DNA, 100 bp, Homo sapiens
ctgtggatctggattctaaggcaacacttccttgaagaaacaagcttacagaatgaagctcgactgagaattgtaaaaactcttgaagacattgatctgg

SEQ ID NO: 40431 - DNA, 50 bp, Homo sapiens
aagacctctggccctggaagccgaagggttaccttgaggatagttttgta

SEQ ID NO: 40432 - DNA, 100 bp, Homo sapiens
ctccggcacacactgctgctcctgccagcccttctgagctcagcaaatctccttggaccggctgttgggggaaaaaagtgttagccgtctctcccggatc

SEQ ID NO: 40433 - DNA, 100 bp, Homo sapiens
atcccctccaaggaagcgccgccccttcctacggctacgggaaggatcgtccagtggctgaggctggacagagcacagggattgtcgatcagtcacaaca

SEQ ID NO: 40434 - DNA, 98 bp, Homo sapiens
aacagcctggggaaactgccgacgctcaaggatggtgatttcatcttgaccgaaagtctcggaagggtgctgacctggaccgggagaagaaggctgcc

SEQ ID NO: 40435 - DNA, 75 bp, Homo sapiens
ggcaggccctgagcacgctgctgtgtgagcagcaggtgcggctggaagtatttcgggcagaggagctgatggcat

SEQ ID NO: 40436 - DNA, 100 bp, Homo sapiens
agtctgcattagtcaccggaggcttacacacaggtgtgttctactccctcttctgggaatgaagcctccccagcaaagcctatacctgcttgttgattct

SEQ ID NO: 40437 - DNA, 83 bp, Homo sapiens
tttggagtcacacaagctaaagacgggccattttccagacctcatccaggaggcagtggagaaggtgacacagcacatccacg

SEQ ID NO: 40438 - DNA, 111 bp, Homo sapiens
cacactgtgggggtgtcctggtgcacccccagtgggtgctcacagctgcccattgcctaaagaagtggggaagctgaggcaggaagccctttagtcacttgccgaaggcca

SEQ ID NO: 40439 - DNA, 76 bp, Homo sapiens
aagaccgaagggaagacttccagtagctccaaggaggttaagagtcaactactggattttctgtctggcaaacagt

SEQ ID NO: 40440 - DNA, 100 bp, Homo sapiens
ccagttcaagtacatctgggcttatccagaatggcaccctccaaagacctccctggtgaaagcttaagaagagggagaaggaagaagaaaacactccaaa

SEQ ID NO: 40441 - DNA, 100 bp, Homo sapiens
gaaaaagttagcagaagcctatgagcaaatagagaaagatcttactctgcttggtgctacagctgttgaggaccgatatgtgcagcgggggctacagcga

SEQ ID NO: 40442 - DNA, 74 bp, Homo sapiens
tatgaagagtttatgcccacagatggtactgatgttaagaaagtctttatctcttgcaaggttcagtagtggca

SEQ ID NO: 40443 - DNA, 90 bp, Homo sapiens
ctttgtacggcttagaggacttccctttggatgtagcaaggaagaaattgttcagttcttctcaggtcttgtggatgagcagcagaaagt

SEQ ID NO: 40444 - DNA, 59 bp, Homo sapiens
gctaatcccagcataattcggcaaaggaatcaaacattttaagtccagtgcaggatgga

SEQ ID NO: 40445 - DNA, 83 bp, Homo sapiens
cccgtggcgcttaagaaagaaggtggaagttaaacgagctgagcctcgggacagcaagagccaagcgccgggacagccaggtg

SEQ ID NO: 40446 - DNA, 97 bp, Homo sapiens
ttcatgcccaaatcccggaaactccagcgtgtctccagccgtggacctatatccagactttgcctgacactgcagggtccaagagaattaaagaaat

SEQ ID NO: 40447 - DNA, 88 bp, Homo sapiens
gccatatgtttcttgtaaccattttaaacaaagccgtctgtagaggatcctttccccattgggcaagattcttgccaagagaattaat

SEQ ID NO: 40448 - DNA, 80 bp, Homo sapiens
tgcgcgcacgcgccgacagacagcgccgttccagccctcgcccgatgcacgggaatactcccccagttgcaagaggcgca

SEQ ID NO: 40449 - DNA, 82 bp, Homo sapiens
aaagcaagggattgctggctacagcttcagaagaccgaagcgttcgtatctggaaggtcaaaatgcagatcttcgtgaaaac

SEQ ID NO: 40450 - DNA, 101 bp, Homo sapiens
ggtgcctgagcccgtgcctgtcttcagatcttcacagcacagttcctgggaaggtggagccaccagcctctccctgctgacatgggctcattgctccttct

SEQ ID NO: 40451 - DNA, 82 bp, Homo sapiens
ttggagacaaaactatgccagagtacgaccccagcaaagcgacctttgtgaaggtggtgccaacccccaacaatggctccac

SEQ ID NO: 40452 - DNA, 117 bp, Homo sapiens
cagcagagccgatgggtcatgaggatgtaagtgcgtttgaaggcttccacaccctctactccaggggaaggatcgaatcatatttgtaaccaaagaagatcatgaaactccaagcag

SEQ ID NO: 40453 - DNA, 87 bp, Homo sapiens
ctgtagtgggcggccagagcgccggcaagagctcggtgctggagaacttcgtgggccgataccggggagaccacgacgctgcctcct

SEQ ID NO: 40454 - DNA, 75 bp, Homo sapiens
gcatcaaaatacatctactcatattgagagctgtcgacagttacgtcaacagatgtaaatgaagaccctggagaa

SEQ ID NO: 40455 - DNA, 96 bp, Homo sapiens
ccagacccctgtgtcatcctcaagatgcagtctcatgggcagtggtttgaggttccagcaacagatagaaatgctttaagttcactctggggaaag

SEQ ID NO: 40456 - DNA, 95 bp, Homo sapiens
aaatgctgaagaagcccaagtttgaatggatgtttcagcagcccctgagaaggaagaggaggaagctgagggcccgctgagggcgcaggacctga

SEQ ID NO: 40457 - DNA, 98 bp, Homo sapiens
ggccatgcgagggcgctctacgtacttgtggtctacgcctgggcagaggagcagaataagttggtgcatggcggaccctgcgacaagacatctcaccc

SEQ ID NO: 40458 - DNA, 79 bp, Homo sapiens
aaacgttatttttcaacctgtggcagagctgaagaagcaaacggattttgatcttaaaatccttgcacgtttgatgact

SEQ ID NO: 40459 - DNA, 75 bp, Homo sapiens
ggaggaggaggcgaggaggagagactgtgaaaggtgtagcagtcactcggcctacacccacagcatcgaccttgt

SEQ ID NO: 40460 - DNA, 98 bp, Homo sapiens
ctcagtcacctgtgtggtcgcagtgctgccatggacctgggacccatgcgcaagagttaccgcggggaccgagagggaagacctcagaagtgctgaac

SEQ ID NO: 40461 - DNA, 48 bp, Homo sapiens
aagaccaagatcatcgagatgaaataagcgggttttgaaaacaaaaaa

SEQ ID NO: 40462 - DNA, 75 bp, Homo sapiens
gcacctcatcccctggatgggggaccacaagatcctcatcgacaggctgatcagctgaccgaagaacagattgct

SEQ ID NO: 40463 - DNA, 100 bp, Homo sapiens
cgagtctgaggcggagggagtaatggatgaggagaacaatccccttgagacagaatatggcctttctgtctacaaggatcaccagaccatcaccatccag

SEQ ID NO: 40464 - DNA, 100 bp, Homo sapiens
ctgaatgggggcggcgtgcccgccggggggctagtggccacgctgcagagcctcgagccaatggccaaaggccctgccaagaattcagaaccagaggagg

SEQ ID NO: 40465 - DNA, 78 bp, Homo sapiens
aaaggcccagatgataggaatcccatctcatttagtttttccagaaaggaggagtcaaggaagcccttagtgaacgag

SEQ ID NO: 40466 - DNA, 100 bp, Homo sapiens
cagcaattacaatggcacttcaatatggctcagaaagtgaagaagatgctgctttagctgcactgccagtgaaagatgtagaagataaacctgaacaaca

SEQ ID NO: 40467 - DNA, 82 bp, Homo sapiens
cccgcgtcgaggtggagcgcgacaacctggccgaggacatcatgcgcctccgggagaagtgcagatgttggacctgctggac

SEQ ID NO: 40468 - DNA, 74 bp, Homo sapiens
agcagttttacaaatatgcagtacaaatgcagacaatctctttgaacatgaattgggggctctcaatatggctg

SEQ ID NO: 40469 - DNA, 50 bp, Homo sapiens
gtcaactatcgacttggagtactcgactcacagatgaatgcttctcaccc

SEQ ID NO: 40470 - DNA, 83 bp, Homo sapiens
tctgggggaacttaagctcatccaacagagtgaagacatttccacctggacacctgaccatgtgcctgccctgagcagcgagg

SEQ ID NO: 40471 - DNA, 74 bp, Homo sapiens
gccttattggaaaaacatttcttactgagtgacctgcaggaagaaggcaagaatgccatcaactcaccgatgtc

SEQ ID NO: 40472 - DNA, 75 bp, Homo sapiens
ggagtgaatctgatttgtctcagcctgaatcagatgaagagggttacgcactgacacatcttcggcctctgagga

SEQ ID NO: 40473 - DNA, 75 bp, Homo sapiens
agactatgatgaacaggtcgaagagtcactacaagatgagattggtggaacgagaatgcctacacgcagccacag

SEQ ID NO: 40474 - DNA, 90 bp, Homo sapiens
atgctgcaaattaattcatcattagagaaattagatctgggtgactgtgatctgctggagaatgctggaggagaccttaaggatggccac

SEQ ID NO: 40475 - DNA, 83 bp, Homo sapiens
gcctgatgaagccgccgatctggaaaggcaaatagcatttgacattgtgcagcaaagaaatggttatggagaagcccagtccg

SEQ ID NO: 40476 - DNA, 75 bp, Homo sapiens
ctggagcctcagttggaagcagccgatccagcctgcggagcctgtggggcagttttttgtagcatcagatccaac

SEQ ID NO: 40477 - DNA, 98 bp, Homo sapiens
cggagcaggaagctaaagctgtttctgaatgagacccaaacgcagggtcttcaaagcttcacctttctccaaaggcagatgtgaagaacttgatgtct

SEQ ID NO: 40478 - DNA, 75 bp, Homo sapiens
gcagcctcctgaggatctgggattacaggtgtgatgttagctgttgatgctgtaattgctgaacttaaaaagcag

SEQ ID NO: 40479 - DNA, 75 bp, Homo sapiens
agttagcccaacaaggaaacctcttagaaaaaagagtaggtactccaaagattcaggtttactcacgtcatccag

SEQ ID NO: 40480 - DNA, 100 bp, Homo sapiens
gtgcgagtcttcggagcgaccccggcagtcacttatataagaagaaccttgatgtgaccaagatccggaagggaaagcctcagcagcttctcagagtgga

SEQ ID NO: 40481 - DNA, 87 bp, Homo sapiens
ggaatatgttaaaggtctacagaaagaagatggttcttttgctggagatatttgggtggtgacatctttactcattaacctgggaag

SEQ ID NO: 40482 - DNA, 95 bp, Homo sapiens
ctccgtggccttagctgtgctcgcgctactctctctttctggcctggaggctatccagcgccagcatccttcagaaaaagcatccccgaggagga

SEQ ID NO: 40483 - DNA, 75 bp, Homo sapiens
tttcggaccaggaccaggaagtaactttagaggaggatctgttgatatgagactgaaacccctgggttgtggagg

SEQ ID NO: 40484 - DNA, 80 bp, Homo sapiens
ccaggcgggcctcccgtttctggctccgggctgagcttcctggagaagaggaagggggtgaatctctacattaagaactt

SEQ ID NO: 40485 - DNA, 95 bp, Homo sapiens
gttttctgccggctgtaaagtcatcacctcctgggatcagatgtgcattgagcacttttcaggattagaagaggctgtgtatagaaacatacaag

SEQ ID NO: 40486 - DNA, 76 bp, Homo sapiens
attgttagccaaaatgaagacctgtgttgatacctataccaaccgtttaagggaactctaatgatccaggacaaag

SEQ ID NO: 40487 - DNA, 49 bp, Homo sapiens
ctggactcggattcgttgcctgaggtcacgagaagagaatgccttctag

SEQ ID NO: 40488 - DNA, 100 bp, Homo sapiens
agattccaaccttccagccccttttgaaagtgcacgatctgattttctggagagatgtgaagaagactgggtttgtctttggcaccacgctgatcatgct

SEQ ID NO: 40489 - DNA, 75 bp, Homo sapiens
cacaactgtccacgtaggcattcaccccagcaagcatgtttgtgtcattagtgaaactggaaaagcaaaatacaa

SEQ ID NO: 40490 - DNA, 75 bp, Homo sapiens
acatcagcttgtaggagacagaggggacaggcaaatggtatgaattacaagacctccaggtgactgacatccttc

SEQ ID NO: 40491 - DNA, 75 bp, Homo sapiens
gcaaaagtgggaactggagaaccctgctgtgactgggctcatgctgaagattcggttatggaccatcatttccgg

SEQ ID NO: 40492 - DNA, 100 bp, Homo sapiens
tgagagctgcaccgcgcgggacaagtcgccggcggcgcccgacggagcaggttttgtttcctggagggaccccaagagtggctcctggtacgttgagacc

SEQ ID NO: 40493 - DNA, 50 bp, Homo sapiens
cttcgctctttgcatcttaactgcagaggctgggaggcggcagaatgcag

SEQ ID NO: 40494 - DNA, 90 bp, Homo sapiens
ggactgtgggattccattaaaagatgttccatttaagcagacctcttccatagctgtagctggagcggtaattggagctgttcttgccct

SEQ ID NO: 40495 - DNA, 100 bp, Homo sapiens
ggatatagcacaccatccccagccaatggtatgcaattcctgttggttagcctcatctgaaaacgtcactcctggatacatagaacatcactgcgcatgt

SEQ ID NO: 40496 - DNA, 74 bp, Homo sapiens
tgagaaggctgaggaactcagcaaccagctagctactcgagagttaccttatcccatatcacacaactggtcct

SEQ ID NO: 40497 - DNA, 96 bp, Homo sapiens
agagtcaaccagaaagagattgggtacttaatggtgggtttggaggatttgggacaacatctacaactgcaggttctgcattcagcttttctgccc

SEQ ID NO: 40498 - DNA, 50 bp, Homo sapiens
acacagtctactatcaccgacagagttatgtcatgcccaggccagcaggg

SEQ ID NO: 40499 - DNA, 82 bp, Homo sapiens
aggcagagtgctgatgtgaaaaataccacgacaaaaccaccctaggcatacatcacagaaggaagccatggaagtaagcctt

SEQ ID NO: 40500 - DNA, 75 bp, Homo sapiens
aggattgggagagaggtagctacccggatgcagtcctttgggatgaagggtgtgggccgaagatatgctcatgtg

SEQ ID NO: 40501 - DNA, 90 bp, Homo sapiens
caagatttgagaggagcaaatgagaagctagctgtcgcagaaaggagaaggcagagcccccccaggctatgaatgccctgatgcggttga

SEQ ID NO: 40502 - DNA, 100 bp, Homo sapiens
ggatttaatacacagcagcagcagcaaactagtgagacaggcattggcaaatccacgttaatggacactttgttcaacaccaaatttgaaagtgacccag

SEQ ID NO: 40503 - DNA, 97 bp, Homo sapiens
gaactctttatctttctgtggatccttacatgaatgccgggtctaagttgtagattttatcaacacaaatttcctgaggtggaagatgtagtgatgg

SEQ ID NO: 40504 - DNA, 90 bp, Homo sapiens
atgtggcagtggaaaatgcgctcgggctggaccagcagatcgtctggtagaatcaacttccttgagaaaagccatagaaacagtgtatgc

SEQ ID NO: 40505 - DNA, 76 bp, Homo sapiens
ctttcctttcctactgccctggaatgggtgttgctcttaggatgtatcccctcaaaatggaggctccagagtgaaa

SEQ ID NO: 40506 - DNA, 97 bp, Homo sapiens
atattatttgcacccagtcctgcagcgccagcagctggactatggcatctatgttatcaaccagtcatccgtccttggctcaggatttggagagctt

SEQ ID NO: 40507 - DNA, 95 bp, Homo sapiens
caggcatctctgggtgggcaacttacccgagaacgtgcgggaagagaagatcatcgagcatttcaaacggtcaaaatgcagatcttcgtgaaaac

SEQ ID NO: 40508 - DNA, 100 bp, Homo sapiens
gtgcaggcccggcgccgccactgccgcagccaggagatggttcgggcctagcggagccgggactggagatctttgtagaatttgatggctgtaactggaa

SEQ ID NO: 40509 - DNA, 135 bp, Homo sapiens
gcgttgtcagggagtgagtgctccatcatcgggagaatccaagcaggaccgccatggaggaaggtcaatattcagaggaggaacagctgagaggccttggattccgacagactcgaggatacaagagcttagcag

SEQ ID NO: 40510 - DNA, 50 bp, Homo sapiens
cggccaacatgctcgccaccatgtctgctgtgacttactcgaagcctcga

SEQ ID NO: 40511 - DNA, 83 bp, Homo sapiens
ctcgcctctacagccggttcaccagcctggacaaaggagagaatgggactctcaggctttgaagacaagattcccaaaaggag

SEQ ID NO: 40512 - DNA, 74 bp, Homo sapiens
gtggtggtcccggagtgatcctggcagccggtggggaagacaaggaggggaacagaaagaacagcttcaaaaga

SEQ ID NO: 40513 - DNA, 50 bp, Homo sapiens
cgctggtgcccggccccggactgcgggtcaaaatgcagatcttcgtgaaa

SEQ ID NO: 40514 - DNA, 75 bp, Homo sapiens
gccgcaagcagtgcaagacccatccccactttgtgattccctaccgctgcttagagataattgacgaccttgcca

SEQ ID NO: 40515 - DNA, 83 bp, Homo sapiens
gcagggcagccagctggccaggggggcccgtctgggccagccacctggtgtccgcagtgttgtactgctacttctataaacgg

SEQ ID NO: 40516 - DNA, 75 bp, Homo sapiens
tcggagcggccgccgggcagcgatgagtttgatgcctacatcattgtgtctttcgtgaatgccaccctagtgttg

SEQ ID NO: 40517 - DNA, 95 bp, Homo sapiens
tcctgacctcttaaggctctgtcagtcttagaaattgcaggtgctgcagtgtctgaaatttccgggcctttctcaacagaggatgtagccagcaa

SEQ ID NO: 40518 - DNA, 100 bp, Homo sapiens
aggcagcatgcggaaggcattgctgggagcctgaaaactgtgaatggatttgcagatttacagaatggctgcacattaatggaaagagaagcataaacct

SEQ ID NO: 40519 - DNA, 90 bp, Homo sapiens
caatcaagatgaatatgaccctatggaagcagaagaagctgaggatgaagaagatggacttcctcgttctgcccatcttcctaacaaggc

SEQ ID NO: 40520 - DNA, 100 bp, Homo sapiens
atggtggagccaaaatgctattgccctgtcttcatcaacatttaatcattctctcctgcgctatggtggaaacctgtccctccaaagtgccatgagtgta

SEQ ID NO: 40521 - DNA, 99 bp, Homo sapiens
gcccggccccggggaactagggagcgtctccggctgcacagcgctcagaggatacatggtaatgggtgattctttcaatacttccttattcaaacaaac

SEQ ID NO: 40522 - DNA, 98 bp, Homo sapiens
cgggtagcgggctcagctggccggggctcagtctggctcttgctgattgaattcctttggtgcagtttagcatgttcctctgtgttctgcatctcctg

SEQ ID NO: 40523 - DNA, 75 bp, Homo sapiens
tgcccgctcacctgcgctgtgatgcctgcagagctgtggcttaccagaacactcctatgccaccttcaccagctg

SEQ ID NO: 40524 - DNA, 103 bp, Homo sapiens
ctgggctacggactatgggcgaatagctctgaccacccggcgaagacaatgcagatcttcgtgaagactctgactggtaagaccatcaccctcgaggttgagc

SEQ ID NO: 40525 - DNA, 101 bp, Homo sapiens
tccgggccccctctccagccggccccccacctccccccggagccaggctggtttcggaaatgcccttacagcagcagggttgaagctttgagagaagcagc

SEQ ID NO: 40526 - DNA, 101 bp, Homo sapiens
gaaggaaactgtttaaccggatcccattgtacccagagtgcagagccgcctttccagcatgcaggggctgctcagggaccttggggccagcttgcggtaag

SEQ ID NO: 40527 - DNA, 75 bp, Homo sapiens
gagtgttcaagatgctctctctggaccgatcccactggcggcgactggcggcgcgatggacctgaccgggctcct

SEQ ID NO: 40528 - DNA, 100 bp, Homo sapiens
gctgttttgccggaggagcccctcaggccatttgcctgaagacctggataatctccatttttgtcatggactgttaaaacgtttgaagttccaattctgg

SEQ ID NO: 40529 - DNA, 98 bp, Homo sapiens
aactcttggcatttggctttgcctttctggacacagaagtatttgtgacagaaccagacataagttcagaggaatctgtctccactgtagaagaacaa

SEQ ID NO: 40530 - DNA, 90 bp, Homo sapiens
gaatccaccgtcaggcataaattgattattcctcgcccacatctgtgccaggaaggaacaccagccagccgtggaacctcaggtgcaaca

SEQ ID NO: 40531 - DNA, 100 bp, Homo sapiens
gaatctgcccacccctcctgtaacccagcctgtttcacttcttggagtctcaggagcaggggctgcggcagaggctgctggacgagcagttcgcagtgtt

SEQ ID NO: 40532 - DNA, 75 bp, Homo sapiens
gacggggaccagcagctgtcgccgccgctctcaggtggcagtagagaagagcatcacagaagttgctcaggagct

SEQ ID NO: 40533 - DNA, 101 bp, Homo sapiens
ccggatttgcccggaggccgcacccgcctccggcggggctctcaggctgccctgaggatctgtgtttggtgaaaaggagccaaattcacctgcagggcagg

SEQ ID NO: 40534 - DNA, 100 bp, Homo sapiens
gaggaggggagtcattcctagcagaggaaatagcacacgttgtatttcagtgtctgtagacaagatggaatcatctccatttaatagacggcaatggacc

SEQ ID NO: 40535 - DNA, 83 bp, Homo sapiens
tcacactacgatgaactgcttgctgcagaggccagactatatcatcatgtacatagaaaaatccaaaggattctgcaaaaaag

SEQ ID NO: 40536 - DNA, 76 bp, Homo sapiens
cagagtccgatgaaaggaatgggtctgggaccttaacagggagccatgggcctgagcccaggctgctatgacacct

SEQ ID NO: 40537 - DNA, 90 bp, Homo sapiens
gtttaggaggatgtgagcacatcttctgtagttagttgaatccatggacatgaaacccacagatatagagggttggcccggtgcagtggc

SEQ ID NO: 40538 - DNA, 75 bp, Homo sapiens
aggaggccttccagctgtttgaccgaacaggttcgtgctggccgtgggcagcgccgtctttgatgccatgttcaa

SEQ ID NO: 40539 - DNA, 100 bp, Homo sapiens
cgccgatcccgccggaagcgccaggacaatggggacccgggacgacgagtacgactacctattcaaagacttcccaagtaagaagcggaagaggagccgc

SEQ ID NO: 40540 - DNA, 98 bp, Homo sapiens
ttccagcttctgctgtccttctttgtggagagcaaggaactggatgcatttcagccataccccattgaaatcgtgccagggaaggtcttcgttggcaa

SEQ ID NO: 40541 - DNA, 86 bp, Homo sapiens
agggaggatgtcgggacaccccggaagctgggaaatgtggatcaatcttcctgtcctacaactgacaaaggatcccctaaagaccc

SEQ ID NO: 40542 - DNA, 74 bp, Homo sapiens
agaatcaataaagactgtttatagaggaaggtatcatctttatcagaaagtgaggagtcccaggactcatccga

SEQ ID NO: 40543 - DNA, 100 bp, Homo sapiens
agatggcggatgccctgcagtacctgcagaaggtctctggagacatcttcagcagtatttgactacagtcattccttatgagaaaaaaaacggaccaccg

SEQ ID NO: 40544 - DNA, 82 bp, Homo sapiens
ctccaaggatgcccgtgagcctgttgtcggggccagatctctgttgaggagctggcgcggaatctggtcatcaaggtcaaca

SEQ ID NO: 40545 - DNA, 100 bp, Homo sapiens
gtcgccatcttggatccgcgggacaagaaaattcatgcgagcttttgaggagaaacgaaaagaacaggaagaaaaagaacaccaaattagagaacaaata

SEQ ID NO: 40546 - DNA, 51 bp, Homo sapiens
gccatcagttgagcttcagaaaaggagacttaatggagcatttagttcccc

SEQ ID NO: 40547 - DNA, 99 bp, Homo sapiens
ggaccttgcagatgcttcgggagaacctggaggaggaggccatcatcatgaaggacgtgcccgactggaagttactctttcaacctgatcagaacgcac

SEQ ID NO: 40548 - DNA, 73 bp, Homo sapiens
ttacgcctctactcagaaaatgaccgactgagaatcaggtcccgctccccgaggcgcaggtcccccgtgcgcc

SEQ ID NO: 40549 - DNA, 97 bp, Homo sapiens
gagcatgggactagcatcttgcagtctgttaagatcagcaatgtgggagacaggagcttcaccttcaggctggattccatgatggagaaaatacatg

SEQ ID NO: 40550 - DNA, 90 bp, Homo sapiens
ctgtgagagtggagggcccacacccagcctcagccacagggacgcctccaaggaactgttcagggcagctgcaatgactctccgcacggt

SEQ ID NO: 40551 - DNA, 75 bp, Homo sapiens
caacgtgggctcgctcttcgacgacgtgctggagaatctggtaaaagcaccattgtgaagcagatgaggatcctg

SEQ ID NO: 40552 - DNA, 75 bp, Homo sapiens
ttccagaaaaattacagcacatctcagtgaatttgcaagtggaatggcggcgctagatagtaaggcatcagggaa

SEQ ID NO: 40553 - DNA, 100 bp, Homo sapiens
gccgctatggaaagacatccaggacaccttgttaagtgaaaaaaggatctcaaagatttcatgagacaagctggggaagtaacgtttgcggatgcacacc

SEQ ID NO: 40554 - DNA, 100 bp, Homo sapiens
aggaagaggacgaggacgacgaggaggaggaggaggaggaaaaagcatccagagctgctgttggcggattgtacccacggggagatgattcctcatgaag

SEQ ID NO: 40555 - DNA, 119 bp, Homo sapiens
ggacagcaccgtgtcgctggtggtgcaggcgctgcgccgcaacgccgagcgcaccgacatctgcctgctcaaagggcgtgatggtgggcatgggtcagaaggattcctatgtgggcgac

SEQ ID NO: 40556 - DNA, 100 bp, Homo sapiens
cacatccgatgcaccctttttgtcagattatcaggatgagggagttttacagcttcagatctgggtatttatccaaaagacttgaaactggggtcctgag

SEQ ID NO: 40557 - DNA, 75 bp, Homo sapiens
cttctagtatctgcaaagacaatgcaggattttgctatggatggcttggtcaatatagttggaggatgctgtggg

SEQ ID NO: 40558 - DNA, 75 bp, Homo sapiens
ctcgccaagggccccaatgagtggcacacagtctactatcaccgacaggaattgtcttagaagaaagaaggcaag

SEQ ID NO: 40559 - DNA, 90 bp, Homo sapiens
ctcctgttctcctcagagcctggtagttacttttggtgacgctgtccagttcccacaatgtatcattccttatctgaaactagacatcct

SEQ ID NO: 40560 - DNA, 90 bp, Homo sapiens
gggagactgttgttcccggagatgcggcgcgcagcagagtctccttggaggtgacatggatatgggcaacccaggaaccctttcgcccac

SEQ ID NO: 40561 - DNA, 74 bp, Homo sapiens
tgtgggctggtgtgtggaactgctgctacaggagctgagagaccctaccctcactttccgtctgcttggctccc

SEQ ID NO: 40562 - DNA, 50 bp, Homo sapiens
ggaaagtctgttactactacgacgcaaagccttctagacaagctcagtgg

SEQ ID NO: 40563 - DNA, 75 bp, Homo sapiens
ctccttcttcaggagagcgccccagggcaagccccgctccggccaacaaccaatcctgaggcaaaagaaacattt

SEQ ID NO: 40564 - DNA, 50 bp, Homo sapiens
ctcccactgattctacattatggtgagaattatgaagatgatgacctagt

SEQ ID NO: 40565 - DNA, 99 bp, Homo sapiens
gagagctggttgcatcacaagaaaaagttgctaccctcacatctcagctttcagcaaatgaactgcaagcacatgttgaccagataactgaaatggcag

SEQ ID NO: 40566 - DNA, 129 bp, Homo sapiens
gcagaagcaggcagcggcagagagggaatggtgcaggcaggcgctgagaaggacgcgcagtccatctctctcaggattctgaaaccttccttgtatccctcctgagacatctttgctgcaagatcgagg

SEQ ID NO: 40567 - DNA, 75 bp, Homo sapiens
cggaggcagaggtggaggcgctttgaaagggaacccgagcgtcatgttagggtgaagcagaggacctcagtgctg

SEQ ID NO: 40568 - DNA, 83 bp, Homo sapiens
cgggaggaggggagggggcgatgctggaagccatggcggagcccagtcccgaagcaatggctgccatccggaagaaactggtg

SEQ ID NO: 40569 - DNA, 75 bp, Homo sapiens
atggaacccgaagaagaaaggattcgttacagccagagattgttgcttctgcaggaagcctttttggtggcatgg

SEQ ID NO: 40570 - DNA, 103 bp, Homo sapiens
gcgaaggaaaaaccacacacaccagcaagatattgacgacctcaagcggcagaatgctcttctggagcagcaaggagctcgagtatatttagcttgccgggat

SEQ ID NO: 40571 - DNA, 101 bp, Homo sapiens
gcctgcgtgtggcctccgagcagtcctctcagcccacttgcacggatcccaaactctcctctgagctccgttgtaccttccagcagagccttatctattgg

SEQ ID NO: 40572 - DNA, 101 bp, Homo sapiens
gacccaccatggagacccgctacaacctgaagagtccgggtgactgcttagaaaactgcacagcatctgatgaaattagcgaataagaacatcaaccatgt

SEQ ID NO: 40573 - DNA, 100 bp, Homo sapiens
caacgccaggcgccgctcctttacagtggtggcacaaaggctgaggaagctagaatttcctgtgaaggacagtggagaacccagtgtccctcgggctgac

SEQ ID NO: 40574 - DNA, 100 bp, Homo sapiens
atcgtcttcctcttcagccatccagagcccgcggttcccttcaaaaagcggctgcaagatctggaggtgcgggagaaggagtcggccacgttcctatgtg

SEQ ID NO: 40575 - DNA, 100 bp, Homo sapiens
gtgaaagccagaatggcatccagagagaggctctttgaactttggatgctttattgtacaaagaataacaagcctttgtattcatttgaagataatgcag

SEQ ID NO: 40576 - DNA, 95 bp, Homo sapiens
gagcggcgacctttgaaggaaaaaaggaagtgtttggacgacagcgagcgggagaagcggggtcaaacaatgcagatcttcgtgaagactctgac

SEQ ID NO: 40577 - DNA, 100 bp, Homo sapiens
cctgcctcagcctcctgattagctgggattacagtccatgctccgagggagaggaggttgttacaaacacacattctatggaattgagagccatcgctgc

SEQ ID NO: 40578 - DNA, 75 bp, Homo sapiens
ctttgaaattgtaacaacgtctcgaactttctatgtgcaggagtgacactgctgatcctgtaacatggaggattg

SEQ ID NO: 40579 - DNA, 100 bp, Homo sapiens
gcggggtcttgtgggagagattatcaagcgttttgagcagaaaggattccgccttgttggtctgaaattcatgcaaggaggaaatccttcaacaatcttt

SEQ ID NO: 40580 - DNA, 100 bp, Homo sapiens
gaagaacagctgtggaaagaagttgcaaaacactgggcaattcgaagttttcaagtagcccttcacatctatccaatgaaccctgaaatatggaaagaag

SEQ ID NO: 40581 - DNA, 100 bp, Homo sapiens
ctcacacttgcctcgccgaccgccatttcacatccagcagaggaggcgggggcagccgctgagacggtttttcacaagacaatgcagatcttcgtgaaga

SEQ ID NO: 40582 - DNA, 88 bp, Homo sapiens
gacagattcgcagtggtcgcttcttctccttgtttttccagaaaggaggagtcaaggaagcccttagtgaacgagaactcttcaatgc

SEQ ID NO: 40583 - DNA, 75 bp, Homo sapiens
tcagaagacaatatcatgcaagtgtggcaaatggatatgatggatgatatctgtcaggagcaatttctagagctg

SEQ ID NO: 40584 - DNA, 75 bp, Homo sapiens
ctggcgcccccgaccgtcgccgcccctgccccgagtctgttccccgccgcccagacgcaaacatgcagatctttg

SEQ ID NO: 40585 - DNA, 90 bp, Homo sapiens
acccctgacccaggttacggaccggaagtgctccagaactcaagatcaagcttcaggagtctccggaagacatgcctgcagggcagacac

SEQ ID NO: 40586 - DNA, 82 bp, Homo sapiens
tcagacgaacgtggggcaggatggacggcaatgttctacgcagaaatagaagagctgaaactggtgtatccttatcacggcg

SEQ ID NO: 40587 - DNA, 75 bp, Homo sapiens
accatgcactagagcatctacctggcagcgtccgtctccaagagagtatgaagagagtgcgtctgtagggcaggg

SEQ ID NO: 40588 - DNA, 75 bp, Homo sapiens
gccagggacctagtggcccagtggaagaagctggttcctgtggaacggcctgtaacaacactagtgacaggaaac

SEQ ID NO: 40589 - DNA, 74 bp, Homo sapiens
aaaaaaagtaaaagaaaactcagctgtgcgagtccttctggaagagcaagttttggggcagtgccgtgacaatg

SEQ ID NO: 40590 - DNA, 89 bp, Homo sapiens
tttttgccaccacactccagcttggggtggcagcacgcaaagggtgtccctgtccctcaaggggtcatggcctccatgttgctcgccca

SEQ ID NO: 40591 - DNA, 106 bp, Homo sapiens
gcctcgtggtctaaagcttcggcacaagggcccaactggaattccacttacggcaaacttggaaatcatgtcttagagatcaaggagccaagagatgagacaagcc

SEQ ID NO: 40592 - DNA, 82 bp, Homo sapiens
tgagcctttggttaagaccgagctctattaagctgacctgagaaatggaataagattaaactagtggtcacccaagaagatg

SEQ ID NO: 40593 - DNA, 83 bp, Homo sapiens
gctgcgcggccttcccatcaccatcacagagagcgataccagtgaatggaggctaagctatgtcaataaggaatttgctgtct

SEQ ID NO: 40594 - DNA, 100 bp, Homo sapiens
tccgcccgggctacgctcctccatcacgtggtttggtgcacctcgatttggaggaagtagggcagggcccttatctggaaagaagtttggaaaccctggg

SEQ ID NO: 40595 - DNA, 74 bp, Homo sapiens
gcagctgccctgggaggacggcagggagtctagtggattttctcaagaccccttcaggcatcaagttgaccatc

SEQ ID NO: 40596 - DNA, 80 bp, Homo sapiens
tattaatgaaaagtgccataaactgaaaaaccaaacatgagggtagcagggttaaaagtgtggtctgatccatttggcag

SEQ ID NO: 40597 - DNA, 103 bp, Homo sapiens
agcactggggaaacgatccgctcccaaaacggtgtgatgaatgcagactctgctaccattttggctgtttggatcctcctttgaaaaagtctcctaaacagac

SEQ ID NO: 40598 - DNA, 49 bp, Homo sapiens
ggggagcggagccatggcctccggacagagcgggatgccaccagcttgt

SEQ ID NO: 40599 - DNA, 75 bp, Homo sapiens
cctactgcacagcagaagctctgaatcgtgttcctgaatgaaagaagtcaggttcgaaaacatggccaaaagaaa

SEQ ID NO: 40600 - DNA, 75 bp, Homo sapiens
ggtaaagttccagggaggccgcgaagctgaaccttcacctagccccaggattacaaggaaaagcaccaggcaaac

SEQ ID NO: 40601 - DNA, 136 bp, Homo sapiens
ggtagatggagtgatgattcttcctgtgcttatcatgattgctctcccctcccctagtatggaagggaccagtccaacgtcaggcggatgcacacggctgtgaagctcaatggcgtcgtcctcaacaagtcccagg

SEQ ID NO: 40602 - DNA, 51 bp, Homo sapiens
gaagactggatgccaatgatccttttgctgaggctaaacactatcatgcca

SEQ ID NO: 40603 - DNA, 74 bp, Homo sapiens
acgatttagtatcttgcctccaaagctatttaggagcggtggtgccccccccgggcacggggccatgtacaacg

SEQ ID NO: 40604 - DNA, 74 bp, Homo sapiens
aggacggctcagcggtctgatgcctggagcaccactgcagccagaaagcgaggaaacttcctcctggccaaccc

SEQ ID NO: 40605 - DNA, 82 bp, Homo sapiens
ccgggccgggctgcgcccgcttcttgcagaccatcatcaaagaggggatgctgaccaaacagaacaattcattccagcgatc

SEQ ID NO: 40606 - DNA, 87 bp, Homo sapiens
ttgagtctttgtaccaggctgtttgtgatcgtatcagctatcatggtgaacttacttcagattgtgcgggaccactgggttcatgtt

SEQ ID NO: 40607 - DNA, 98 bp, Homo sapiens
acatattggagcaacagcgtgttggctgggctcttgacatggatgggaccctccattttccatatccaggaaaatgtgatgcgccacaggtatcagcg

SEQ ID NO: 40608 - DNA, 100 bp, Homo sapiens
ttatcatgagggaattccggtcagggtcaagtcgtgttctgatcactactgacttgttgactatcggtggtccatgtcaagtgatagttcacaagtggga

SEQ ID NO: 40609 - DNA, 98 bp, Homo sapiens
gcgcgccttcggcattggccgccgcgatgtcagctcagtgctgtgcgggccagtgctgcttttgacacaaaaacggggttacgtgtggcagtgaagaa

SEQ ID NO: 40610 - DNA, 98 bp, Homo sapiens
caggatatgaagagaaaaatggcacctgtcaaggagcagtctcacaggtgctggacagcctggaagagattcatgcgcttacagactgcagtgaaaag

SEQ ID NO: 40611 - DNA, 99 bp, Homo sapiens
cagaataaagccaagctcatctctgagacccggaggaggttcgaagctgagtatgtgacagatgccatggacaatattaccaggcagaaccaattctac

SEQ ID NO: 40612 - DNA, 50 bp, Homo sapiens
gccccaccctggagtgtctgattcactagcactctacacccccaagtgca

SEQ ID NO: 40613 - DNA, 100 bp, Homo sapiens
tacattgcagaccacctgaaggccgaagacacagacttctcggtgtccctggccagtgtccttccacctgtccacaagcatggggaacatcttcgccaac

SEQ ID NO: 40614 - DNA, 75 bp, Homo sapiens
aattgaaaggcttcaaagctagcagctatgctaagaaggaatctgatcttaatggcgcccagatcaagcttcgag

SEQ ID NO: 40615 - DNA, 154 bp, Homo sapiens
ctgtcctccgtttagtctcctcctcggcgggagccctcgcgacgcgcccggcccggagcccccagcgcagcggccgcggcgatggatgactacagtgtgatcggccgctccctgttcaaaaaggaaaccaacatccagctcttcgtggggctca

SEQ ID NO: 40616 - DNA, 75 bp, Homo sapiens
ctgcctcagcctcttgagtagctgggattacaggtcatcgtattgaggaagttcctgaacttcctttggtagttg

SEQ ID NO: 40617 - DNA, 82 bp, Homo sapiens
ctggacacggcgcggcgctggcgctgccggagctgtcgacccggcctggcgccggactagcaattctgtggtgttcttggtc

SEQ ID NO: 40618 - DNA, 74 bp, Homo sapiens
ccacattcaggggaaccgcctcaccgttctgcccccagaactagatcctgataacttaagtgactctctctttt

SEQ ID NO: 40619 - DNA, 100 bp, Homo sapiens
ctggcatacctggaggcaagggagaaaagggtgtgactcttacagacctgaaggaggcagagaaggctgcagggaaggccccagagtcagagaagccggc

SEQ ID NO: 40620 - DNA, 110 bp, Homo sapiens
ggagtgagaagcaagaaggccctggacacagcaatatctctgggctttcacaggttgaaatcacaaagattagacacctttttagataggtgttcttcagcaccactgac

SEQ ID NO: 40621 - DNA, 83 bp, Homo sapiens
ctggaggaggcagaaaaagctgcagatgagagtgagaggtgaccatggaggctggtggcctccccttggagctgtggcgcatg

SEQ ID NO: 40622 - DNA, 100 bp, Homo sapiens
gggccacaccctggagcggtctgtgttcagcgagcggacggaggagtcttctgccgtgcagtacttccaggtcaatgtgacggtggactacattagacca

SEQ ID NO: 40623 - DNA, 75 bp, Homo sapiens
ggccgccgcggcattcggggaatctgcagggcagctcttgaatgtcgtctctcaactagccaaacggaatctgcg

SEQ ID NO: 40624 - DNA, 101 bp, Homo sapiens
aaaagttttattttggcaagagttggatcaacccagagctattgccttagatccttcaagtgggtcagagtggtgctgggaacaactgggccaaggggcac

SEQ ID NO: 40625 - DNA, 51 bp, Homo sapiens
tttgaagtgtgttttgagagcaagggatcacctgctgttaccagctaccac

SEQ ID NO: 40626 - DNA, 50 bp, Homo sapiens
aactgcaccggaaatgtgcctaccaggtggtggtgaagtttattaagaag

SEQ ID NO: 40627 - DNA, 98 bp, Homo sapiens
tcgaccccgcacggacagcgaggtctcggaagggtgctgacctggaccgggagaagaaggctgccgagtgcaaggtggacagcatcgggagcggccgc

SEQ ID NO: 40628 - DNA, 96 bp, Homo sapiens
ggtatccagatatggacactgagctcctcctggagggagagaaaagtctctcctaggtatttggttgtccacctcaaccacttgctgagtcttccg

SEQ ID NO: 40629 - DNA, 75 bp, Homo sapiens
cgaattgacgccttttataataaagacacttatcttgcccaagagctggatgctgagggttggaaaagcaaaagc

SEQ ID NO: 40630 - DNA, 75 bp, Homo sapiens
agtgacgaggacgaagtgtccgaggtgaatgaaaactttgccattgatttgatagcagagcagcccgtgagcgag

SEQ ID NO: 40631 - DNA, 98 bp, Homo sapiens
cgacgcgcagatagcagagccatccttggggagccaacttctggccttgggatcattctggacagtgtgtgtggaatgtttccccaccttctctcccc

SEQ ID NO: 40632 - DNA, 125 bp, Homo sapiens
aacgacagcgacggctacgccgaagcactcgttccgggggtgaagcctcctgcgccggccttgcctcgggtgttgacttcaaaatcaaaactgtagagctaagaggaaagaaaattagattacag

SEQ ID NO: 40633 - DNA, 50 bp, Homo sapiens
tgcaggcacagttgccgattacagacaaggcgcctctgtcgaagagcctt

SEQ ID NO: 40634 - DNA, 99 bp, Homo sapiens
ccacagaagttgctgctgacgctctgggtgaagaatggaagttagggcctagtcaaaattttgaagctgagtcaattcaagataatgcgcatatggcag

SEQ ID NO: 40635 - DNA, 134 bp, Homo sapiens
cttgtctggaagtacccctccctgacccaggtggccaagctgaccgggcactcctaccgcgtgctgtacctgctctttgctgaagagcaagcagagggtcccaaccgcctgctgtacaaagacggcttcagcac

SEQ ID NO: 40636 - DNA, 98 bp, Homo sapiens
caggatgggatccggctcctccagctaccggcccaaggccatctacctggacatcgatggacgcattcagaagatatttctccctcgagtggctggga

SEQ ID NO: 40637 - DNA, 51 bp, Homo sapiens
tttcactgcaggaccaggcacgaaagaactgcaagcacatgttgaccagat

SEQ ID NO: 40638 - DNA, 83 bp, Homo sapiens
gccgtgtgtatcacagaagttataaagttattgctaagtgtgggaattttagctaagatgttggcaaaggatgaactgatgac

SEQ ID NO: 40639 - DNA, 100 bp, Homo sapiens
aactctataaaatgttagcgcatgagcggaagtacaaagtgaaattgaaagaatctttgagttggcaagatctttgcaactggttgttcttgatgcagac

SEQ ID NO: 40640 - DNA, 100 bp, Homo sapiens
cggcggattagccttcgcggggcaaaatggacctggtgttttctgcttcccccgatgccactatcaggatttggtcggtccccaatgcctcttgtgtaca

SEQ ID NO: 40641 - DNA, 80 bp, Homo sapiens
accctgactaaagcttgaaatgctacatttccaagtgagtgtgtccgcttgaaaccaactgacatacagcccgacatctt

SEQ ID NO: 40642 - DNA, 117 bp, Homo sapiens
gccaactccgctgcctttgccgccaccatgcccaaaacggcatcaacttctaactcatctcgccaggagaggcctccagtgaaacccttcattctcactcggaacatggctcaagcc

SEQ ID NO: 40643 - DNA, 100 bp, Homo sapiens
tgggggagcacgattggatttgccgaagattaggaagaatccactgatagaaatcatttccatcaataccgggtgtgcggccgcctgagcccgagccagg

SEQ ID NO: 40644 - DNA, 109 bp, Homo sapiens
ctttcattgtcttttccgcccgcttcgatcgcctcgcgccggctgctctttccggtttggtgccctggttgtcagatgttggaaagcagtaggacggaacatactcttc

SEQ ID NO: 40645 - DNA, 83 bp, Homo sapiens
tcacgttcctgtttctgctcttggtgcaggatctgcagctactgctgcatcagaagaaatgcgtccagaggaccagaggttaa

SEQ ID NO: 40646 - DNA, 75 bp, Homo sapiens
aaactttcaccattaatccagagccgcctttttatagccgaaacacagctgaaatgtacgacaacattctgaaca

SEQ ID NO: 40647 - DNA, 90 bp, Homo sapiens
ccctgagctgcctgtgtctctgcctccttccgcatgtggtcccagagtgatttgccccggatcaaaacggagattgaggccttgaagaac

SEQ ID NO: 40648 - DNA, 75 bp, Homo sapiens
ctgcggagaggtgtttggtgcagaaggatctgaacgtctatgacactctttcgagctgacacagtgaagaacata

SEQ ID NO: 40649 - DNA, 100 bp, Homo sapiens
gatcctgcactcttcctccctcagggattaacttgcatggtttccaagacaatgaaaatcaaaccaggatacatgggaacggctgcttcctgttatgatg

SEQ ID NO: 40650 - DNA, 100 bp, Homo sapiens
cctgtccagatctacattggcctgcttcagcagctgttagcaggtgttggaggtcttgtccagaaggctaaaaaagcaaaggacaggttgttgaaacgag

SEQ ID NO: 40651 - DNA, 101 bp, Homo sapiens
taaaatgcaccctccttccacctggccaggaatcaggccccaatatgggaggtaaatcaacatatattcgacaaactggggtgatagtactcatggcccaa

SEQ ID NO: 40652 - DNA, 50 bp, Homo sapiens
gcgcccagctgccaacaccaaggaggagatgttaaagtaacccatcttgc

SEQ ID NO: 40653 - DNA, 75 bp, Homo sapiens
tttgccaaaggctggctggatcagccctcacagacaagcactcagagtctgaaggaaggcctgacggtgcaagaa

SEQ ID NO: 40654 - DNA, 50 bp, Homo sapiens
tcagcaccggacagtcatcgctgaccaagacaggtacagcacaggcagcg

SEQ ID NO: 40655 - DNA, 50 bp, Homo sapiens
gcaagacgctgcccgccatcgaggtctgtttgaggtccgagcccaagagt

SEQ ID NO: 40656 - DNA, 75 bp, Homo sapiens
tcgggaccgtgtcctgagcgctctccatgcgcccggcgcgaggaatatattattcgagtgcaaagaggaatttct

SEQ ID NO: 40657 - DNA, 100 bp, Homo sapiens
tcctgtacagcctgcagaactttctctcagctactggaagagaaaaacaccctttccattcagctctgcgataccagtcagagtcttcgtgagaaccagc

SEQ ID NO: 40658 - DNA, 75 bp, Homo sapiens
tgcaactactttagaagaaacgacaccattgtttttaggtctcttgcagctgaatggggtaaatatggaatgcga

SEQ ID NO: 40659 - DNA, 75 bp, Homo sapiens
ctgaccagaaaggaactcccaagcgactgcaggcagaagctgagacggctaagctgcagcaaaaaattattcctg

SEQ ID NO: 40660 - DNA, 100 bp, Homo sapiens
ctggcaaacagtgtttgcctctggttcagctcatacaacagcttcttagaatgtctacatattcaactttccccgccggggtgcctgtctcagaaaggag

SEQ ID NO: 40661 - DNA, 123 bp, Homo sapiens
tgtgagcagagctctgccaggcagaaggcctctctcctgatacagcaggcgctcaccatgttccctggagcttccccgggcgctgcctggacaggcctgcctgcgtgctgggacatgtctggc

SEQ ID NO: 40662 - DNA, 100 bp, Homo sapiens
ggcagcgtccctgtgacctggccgatgaggaagtactgagcctgttggaggaactggcccggaaacaggaggacgcatccccacgctcatcatgctggac

SEQ ID NO: 40663 - DNA, 96 bp, Homo sapiens
gccgccgccgccgcggtgagttttccagcctggagaggccgaaccagcgcgggggtcgaggagctggtggtggctctgagtcatcttgtggttcag

SEQ ID NO: 40664 - DNA, 100 bp, Homo sapiens
cgggcagagcgcggcggcgcggacctgatggccaaaagaaaggaagaaaatttttcctctcctaaaaatgccaaaaggccaagacaagaagaattggagg

SEQ ID NO: 40665 - DNA, 75 bp, Homo sapiens
atctgcaaagaccttatttccagcctttctgagaaaagtctacagcattctttctctgcaggttctcttaactac

SEQ ID NO: 40666 - DNA, 82 bp, Homo sapiens
tacaagactctcttcgctctttgcatcttaactgcaggttgtgaactaaaggccgacaaagattatcactttaaggtggata

SEQ ID NO: 40667 - DNA, 73 bp, Homo sapiens
gtagccttggaccgagacatgatgaagaaaggtacaggtttgcagattccgccagcagcacagcaagctctac

SEQ ID NO: 40668 - DNA, 83 bp, Homo sapiens
ctcctggccaccgactcctacaaggagaaaagccttacagatgctcatgggaagggtgtgagtggcgttttgcaagaagtgat

SEQ ID NO: 40669 - DNA, 75 bp, Homo sapiens
gaattctcaaaatccagcccttgagtggaatatggccagcagaggtctgttaccatctgaagggatagttcatct

SEQ ID NO: 40670 - DNA, 101 bp, Homo sapiens
aggtgggaatggagagagagaggaaggaacaggcctttgagagcagccagaagtacaaagaggggaagtacatcattgaactcaaccacatgatcaaagac

SEQ ID NO: 40671 - DNA, 97 bp, Homo sapiens
agacgtcccccaaaacccctcgcctggctcggacccacggagccggcagcccagcactccggatctggttctgctgccggagaaggcaaacccgctt

SEQ ID NO: 40672 - DNA, 75 bp, Homo sapiens
aagggacaatggtcaccgtctcttcagagtgtgaacatggctacgcctcttcattcccgtccatgccgagccccc

SEQ ID NO: 40673 - DNA, 100 bp, Homo sapiens
gcggtagccctccttgcgcctccgattcccaggaatgtatacaaagactatcgcttccttgagctggcatgtgattcccaggaggatgtcgacagctgga

SEQ ID NO: 40674 - DNA, 100 bp, Homo sapiens
aatgactgcaagcacctattatgttacggctagatgaggctcaagaagcagaatgccaggccttgaggctacagctccagcaggaaatggagctgctcaa

SEQ ID NO: 40675 - DNA, 96 bp, Homo sapiens
gaaatgggctaataatgctggcaaagtggaaaaatgtgcgaccttcaatattgatgtacggcagttacattgggcagaatatatagagaactactg

SEQ ID NO: 40676 - DNA, 97 bp, Homo sapiens
agtggcgcctaaagtctgagagagggaagtcgcctctgtgctcgtgagtgcatggggtataaggccaggagacataattactcttttagaggattcc

SEQ ID NO: 40677 - DNA, 75 bp, Homo sapiens
cggcgagtcctgagcggccaggacgacgaggagcagggcctgactgcgcagggaagacgcttccctcctggggcc

SEQ ID NO: 40678 - DNA, 101 bp, Homo sapiens
gcaaagcaagtgaaggcacagacgcacgggacaggagagcctgggcaagactggagaggacatgtcatccagtgacagtgactcggactgggatggaggca

SEQ ID NO: 40679 - DNA, 82 bp, Homo sapiens
ctcacgtctgacggactctgctgacaggctgaccccgcactacatctacccaccagccatcgtgcagcccagcgtggtgatc

SEQ ID NO: 40680 - DNA, 75 bp, Homo sapiens
gtttgaccaggcccagaggtccgtgcggcagcagctccagagctttgtcaaagatcttgctggtggatgccctcc

SEQ ID NO: 40681 - DNA, 100 bp, Homo sapiens
cccctttcctgttaccctgtatgtaccaaatgttccagaaggttctgtgagaatcgagagctccagatcatgagaaagctagatcactgtaacatagtcc

SEQ ID NO: 40682 - DNA, 100 bp, Homo sapiens
gcagcctgtggctgtgcagggccccgagccggcccgggtcgaggatgaagtggcacacactctaactgaaagcagagtattaaagaacactagacatccc

SEQ ID NO: 40683 - DNA, 98 bp, Homo sapiens
agtcaacagactgagcgcgtccaggcctgacagctctgcggctcgggccctgaggtgctcctcagcaagtgatgactcaaatcatcagggggcagcct

SEQ ID NO: 40684 - DNA, 97 bp, Homo sapiens
gcagtgtgtattgaaaatttcaaagtaaaggatattattagaattctgccatgcaacaacacggaggtagtcacgtttcccggaaatccgaacactt

SEQ ID NO: 40685 - DNA, 90 bp, Homo sapiens
ggggtccgctgcccgagaatgggaattctcttcactagaatatggagactgttcaatcaccaggtgccaaacccaagtctgaaatccacg

SEQ ID NO: 40686 - DNA, 90 bp, Homo sapiens
tgggccgagcctatgccctggcttttgcagaaagaggagcgttagttgttgccagagactgctgctactttgaaacgtacgatagaggcc

SEQ ID NO: 40687 - DNA, 100 bp, Homo sapiens
gtatgaccttacaagtatccccgttcgccaccaattatgggagggctggccaacttctgctacagacgactcagtggcccacaaactctttaacaacttg

SEQ ID NO: 40688 - DNA, 90 bp, Homo sapiens
aaatgacggttataagaccatttatttctttggagacaaaactatgccatgtgaagcctcagtttaggtcatctggtggttcagaacact

SEQ ID NO: 40689 - DNA, 100 bp, Homo sapiens
ctcttacgtctgcggaagtgcagctgcctcagttcttagcgcaggatcatgcggccagatgatgccaacgtggccggcaatgtccacggggggaccatcc

SEQ ID NO: 40690 - DNA, 100 bp, Homo sapiens
ccagttctccagagtctgcaagaaaacttcatcctagaccaagtgataaactgaaccctaaaacaattaatccggatattgacggccaagcactcctgct

SEQ ID NO: 40691 - DNA, 100 bp, Homo sapiens
ggagtcatgagcacttcaacagttggaaccaaggcttcatcattcatcattatgctgggaaggctttccttaaagtttcccatgtctcaatggactcctg

SEQ ID NO: 40692 - DNA, 100 bp, Homo sapiens
cgtggctgccatgcgccggatacgggttgaaaggattgttgacaaaaggaaaaataaaaaagggaagacagagtatttggttcggtggaaaggctatgac

SEQ ID NO: 40693 - DNA, 76 bp, Homo sapiens
gcttttcctccaggcctttgagagagttattcctgatgaagctaaagctttgtctctgttggcaccagctaatgca

SEQ ID NO: 40694 - DNA, 100 bp, Homo sapiens
tggctgcaaagaagacccacacctcaaaagtactttgactcaggagactacaacatggccaaagccaagatgaagaataagcagctgccaagtgcaggac

SEQ ID NO: 40695 - DNA, 100 bp, Homo sapiens
gttctggcagcttctccgagaccccaacaccccactgttgcaagtgcacctgtggcgattctcaggtggctacccagccctcatggactgcatgaacaag

SEQ ID NO: 40696 - DNA, 75 bp, Homo sapiens
aagaaatcaggtgtagttctgctgaatcctattcctaagacacagaaactgatgaccagcaacttgaggaagtac

SEQ ID NO: 40697 - DNA, 98 bp, Homo sapiens
tgaagaggatgatgtttttggtgaagggttccgagtctgaggaagacataaccttgtgcctgcctgcccacctctctctctggtcctgttcatctctc

SEQ ID NO: 40698 - DNA, 73 bp, Homo sapiens
ctgcagcatttgccaaggagacatccctcttaggttgtaaagctctctgaaatagtgaccttagcgaagcaag

SEQ ID NO: 40699 - DNA, 100 bp, Homo sapiens
agcccacgctcatgatcgacttcctcacccgcgcctgcgacctcggtgatgtgtccaatctagatcccaacttctcatttgaaggcaccaaactggatgt

SEQ ID NO: 40700 - DNA, 75 bp, Homo sapiens
caccgtgctggaccgcttttacaatgcagtactatactggcaattgctggagaagattttgcaattgttgcttct

SEQ ID NO: 40701 - DNA, 75 bp, Homo sapiens
gaagagccagtagtaaaacacaggatcgaatcatcaatttagttgttggcagcttaacatccttattgattctag

SEQ ID NO: 40702 - DNA, 100 bp, Homo sapiens
ctgctggatgtgttgtgttcctggcttccctctggatgctgacagaaacaaggagatgacctgatcagagccatcaagaaactaaaggcacttggcactg

SEQ ID NO: 40703 - DNA, 50 bp, Homo sapiens
cacgtggtgggctatggccaccttgggggggccctcagcctcttggcctt

SEQ ID NO: 40704 - DNA, 74 bp, Homo sapiens
ggccaaggcagaagaaatcttggagaagggtctaaaggctttgatgacagtagggaaagaaccatttcctacca

SEQ ID NO: 40705 - DNA, 50 bp, Homo sapiens
gatgagaaaccatacaagctgtgtacaagccagctgccatgttgtgagca

SEQ ID NO: 40706 - DNA, 83 bp, Homo sapiens
cgcagagccgagtgcagaagatctgggtgcccgtggaccacaggccctcgttgcccagatatcaagaaggctgagatggatag

SEQ ID NO: 40707 - DNA, 82 bp, Homo sapiens
gttcggtccttccgaggaagctaaggccgcgttggggtgagaccctcacttcatccgtaaaatgtttattggaggcttgagc

SEQ ID NO: 40708 - DNA, 46 bp, Homo sapiens
gaaccgcgattcggcgtgtcaggtattgttgcagcatctggcagtg

SEQ ID NO: 40709 - DNA, 51 bp, Homo sapiens
gccttcccatcaccatcacagagagcgataggaatgcagtagcatggatag

SEQ ID NO: 40710 - DNA, 90 bp, Homo sapiens
tcctagtgctagcagcttagatgccatttctcctgttcagatgatgaagaacgagagcttcaaatggatcctgcagactatggaaagcaa

SEQ ID NO: 40711 - DNA, 100 bp, Homo sapiens
caaagaagcatagcttttagctctaatattcgggaactggagcctctcctctgtcacagtgacaatccatctcagctcatctggacatcatctcgcagtg

SEQ ID NO: 40712 - DNA, 75 bp, Homo sapiens
gtagaattgattgaaaaaattggtgctgttgaggaggagctgaataggtttggatttaggtggcgagtagaaaaa

SEQ ID NO: 40713 - DNA, 74 bp, Homo sapiens
gttccccggcccacagtgggggtgtgcaaacccgagagaactgggtcacagtgctgtcgatatcaccaaggtgg

SEQ ID NO: 40714 - DNA, 100 bp, Homo sapiens
ctggtggcaaagtcccagcattcagaatgggagagaatatcactgggtcacaatcactctggacttaagacagggaagacatgtaaggaatttgcataag

SEQ ID NO: 40715 - DNA, 90 bp, Homo sapiens
gcagccgcagcctgtggctgtgcagggccccgagccggcccgggtcgagctaaaagatggcggcaaggcagcccaggcaaatgtaagaat

SEQ ID NO: 40716 - DNA, 100 bp, Homo sapiens
ttcatggccgtcatgccgactctcatacaggcgggcgccagtgcatcttctagattttgtggaagtataatactttgtcattatgagatgtcgtctctcg

SEQ ID NO: 40717 - DNA, 83 bp, Homo sapiens
cgatccagcctgcggagcctgtggggcagagatgtgaactttgtccccataaggatggagctttaaaaagaacagataatggg

SEQ ID NO: 40718 - DNA, 82 bp, Homo sapiens
tgttcccccaaatgtctgactctgactctcggactgagaaacgcaaggtactggctgtgatcgaacttctcaaccctcagag

SEQ ID NO: 40719 - DNA, 75 bp, Homo sapiens
tactaaagcattcatggaggctcttcaggtctgagtgtacggtttgcagatatgcctggaaaatcaaggaagaaa

SEQ ID NO: 40720 - DNA, 100 bp, Homo sapiens
ccagctctgcagccacatactatccgtttgttcaggaaccaccagtgacagaacttaattcagtgcacaaatgagatgaatgtgaacatcccacagttgg

SEQ ID NO: 40721 - DNA, 100 bp, Homo sapiens
catttccatttctaccttgtatgcctcaatttgctggatttaagcactgctgcactttatgagacttccttgtgaaacctcctagtagaaaaagttcttg

SEQ ID NO: 40722 - DNA, 51 bp, Homo sapiens
ccggggtaggggtctcccgcgaggtagcagcaattgcagagacagatgaat

SEQ ID NO: 40723 - DNA, 101 bp, Homo sapiens
ggattttccaagccttattcattacgcaggttgctatggccaggtgtttaagatagaagtgctaatgaatggaagaaaacattttgttgaaaagagataca

SEQ ID NO: 40724 - DNA, 75 bp, Homo sapiens
ttcaacactgttattgtaaacaaagtgcatcagagaatttagatgagctgtcttcctccagtagctggttactta

SEQ ID NO: 40725 - DNA, 95 bp, Homo sapiens
acatttacgtgggcatgggacaggcttttgctttgattccagacatcgctattgcggttccgaggcagtgggaagagatgcggcccctggacatc

SEQ ID NO: 40726 - DNA, 100 bp, Homo sapiens
cgctgctgcccctgctgtcgctcctggtcggcgcgtggctcaagctagcttcacttaaagagaggaaacttcttggtgctcaaagcaaaggagatgggcc

SEQ ID NO: 40727 - DNA, 82 bp, Homo sapiens
tttctgctgctgaagtaatgcaatggtctcaatctctggaaaaacttcttgccaaccaaacctgcagactgcagagccttaa

SEQ ID NO: 40728 - DNA, 46 bp, Homo sapiens
gttaaaacctgacacttttaacaggaccctgatgctcccataagac

SEQ ID NO: 40729 - DNA, 98 bp, Homo sapiens
ggagaccctgcaacgaaatacctccctgggcctcggagacgctgacaggacattggctccctggattatcaagagtttgtagttgacattgaatccag

SEQ ID NO: 40730 - DNA, 100 bp, Homo sapiens
cctggcattgacccatagcctggtcctgcattacggtctctataagaagatgatcaggcatttcatccttcatgaagccattcaggattttgaattgcat

SEQ ID NO: 40731 - DNA, 50 bp, Homo sapiens
ccgaactggccctggactacctctgcagggctttgttcgcgggggtcaca

SEQ ID NO: 40732 - DNA, 90 bp, Homo sapiens
agctagaattggaaaaccttacacacaacatgcctttctggcggatatcctgccacgcagacctggaggcactgaggcacgccctggagc

SEQ ID NO: 40733 - DNA, 89 bp, Homo sapiens
gggaggtcctgctgtacaaactggatgacctcaccagggtgaatcctgtgacactagagacagctagagttgggaagacatcactgatt

SEQ ID NO: 40734 - DNA, 80 bp, Homo sapiens
gcagcttcgcggagcgactggagagccagagctacagcagcacctgcggagtcaccgggagggcgtctttaagtgccccc

SEQ ID NO: 40735 - DNA, 75 bp, Homo sapiens
ttctacctcggccccaggttctctgcagatgcagtaccagcagagcatgcaggctgaccccgcactacatctacc

SEQ ID NO: 40736 - DNA, 100 bp, Homo sapiens
cccaactcctatgagctcctctctggcaggtgtgcaactgaggaacatggctcaagaaactaatcacagccaagtgcctatgctttgttccactggctgt

SEQ ID NO: 40737 - DNA, 76 bp, Homo sapiens
cagcatatttgagtcatttccttcgtacccacagtgcttcatgagagataccatgtttgtgtggaagtgccccgtg

SEQ ID NO: 40738 - DNA, 83 bp, Homo sapiens
cgggtgatttctgcatttccatctgagtagccatccctgccattggggctcagtattccatgtttccagcagctccagcccct

SEQ ID NO: 40739 - DNA, 98 bp, Homo sapiens
ttggcaaaacacttgaatgatggtaaaatcaatcagcttcctcttttccttggagagcctgctatggatgataatgaagataattcaaatgatgggac

SEQ ID NO: 40740 - DNA, 50 bp, Homo sapiens
acaaggtcttccagtttctgaacctaggctgaccccgcactacatctacc

SEQ ID NO: 40741 - DNA, 75 bp, Homo sapiens
tgagctgcgaggaaaatggcggcgggagggtaagcttgatgattaccaggaacgaatgaacaaaggggaaaggct

SEQ ID NO: 40742 - DNA, 101 bp, Homo sapiens
cgccaggacccactggaagcctagaaatgttactccacaggatccgctgaacataggatgttgccacaaaatctacctcgtgtatttttctctttcactca

SEQ ID NO: 40743 - DNA, 90 bp, Homo sapiens
agatgggccagctggcccaagacggggtccccgagtggttccatggtgcaatctcaagagaggagtcctgacctgggggctgtggagctg

SEQ ID NO: 40744 - DNA, 100 bp, Homo sapiens
aaaaaatacagatggaagggaatgtgtcagaagcgtgaacacagggacacttggcattcagggacgtggccatagaattccctcaggaggagtggaaatg

SEQ ID NO: 40745 - DNA, 74 bp, Homo sapiens
gtgaatgccaatccccacactgccctgggactagtgcaagctggagataagatgggtagactgctacttccctt

SEQ ID NO: 40746 - DNA, 75 bp, Homo sapiens
aggaaattacaaagaggccaagaagatcattgagtgattcgcctttgccagtctcatctcgtgtctgctttgtta

SEQ ID NO: 40747 - DNA, 90 bp, Homo sapiens
cgaaaggcagccgcggatcgccgcgctcagcgacaaacaacctggcacctgtgtttgctctgtttgtaccattttactgctccataccaa

SEQ ID NO: 40748 - DNA, 83 bp, Homo sapiens
agccgctgttttgccggaggagcccctcaggcccccaacagcatggtggtggaacaccccgagttcctcaaggcagggaagga

SEQ ID NO: 40749 - DNA, 98 bp, Homo sapiens
ttaataacttgatctgtgatgaatcagatgtcaaagacttagcttttaaattaaaaaggaagctattcaccattgagcttctcggtgaactactacta

SEQ ID NO: 40750 - DNA, 75 bp, Homo sapiens
ctcatggatggcggctacatcaacaatctgccaggagcacgtgaattgcctctgcttacgttcaggccctgtcct

SEQ ID NO: 40751 - DNA, 75 bp, Homo sapiens
taactctggttgcacgaaatgaggtttattgggcacttcctagcaccaggcactgcaataagaaatggaggttaa

SEQ ID NO: 40752 - DNA, 83 bp, Homo sapiens
gcggcctggcggcttccaggcgcactaccgcggaaaaccaattctgtgtcctcggaggaccacagcccagttgggccccaggc

SEQ ID NO: 40753 - DNA, 80 bp, Homo sapiens
cccgctaacaggccatctgtgtgaggtctgctgacatttgtgaactgtgcctatgtcaagtggggcacacgtgtgcagga

SEQ ID NO: 40754 - DNA, 71 bp, Homo sapiens
cgtgcacttgcaggccgggcagtgcggcaaccaaatcggcgccaagggcagagcggcttgggtaaatccac

SEQ ID NO: 40755 - DNA, 98 bp, Homo sapiens
cgcccacaacagccacgtggtctgcgggatgctgggcttccccagcgaaaagagggtcaacgcggccttctacagacgcccagcggcagcaggatgag

SEQ ID NO: 40756 - DNA, 75 bp, Homo sapiens
cgcgaccacagctatgcgaccgaagcctggtgtgtccgtttctctggtgaatccccagccatccaatggccactt

SEQ ID NO: 40757 - DNA, 100 bp, Homo sapiens
ttccccattctggtgttggatctataggtttattagaatccttaccacagattttgaagccagcttcataaggctattggacaaaataacgaatggttct

SEQ ID NO: 40758 - DNA, 51 bp, Homo sapiens
ctcatgagtagctgggactacagacgtgtcttaaagacattaacagagcac

SEQ ID NO: 40759 - DNA, 100 bp, Homo sapiens
agcagaggaaggaggcgacagcgccggagcaggtcgaaatgagaaggggcagctgggacatggtgacaccaagagagtagaagcccctagactcatcgag

SEQ ID NO: 40760 - DNA, 75 bp, Homo sapiens
cgagaacagagaagggagctctatagtcggagtggagaactgcaaggtttgtggaatcttgcttcccttttttcc

SEQ ID NO: 40761 - DNA, 51 bp, Homo sapiens
aaagaattcttcgaaaattggacttaattcagtgcacaaatgagatgaatg

SEQ ID NO: 40762 - DNA, 82 bp, Homo sapiens
tcctgctgttgcggccgctgccccagggctgcggggacgatacagatcacttggattcagtcgagtttgctttgctccgtgg

SEQ ID NO: 40763 - DNA, 71 bp, Homo sapiens
ctaaacgcggtgtgggacttgtgggccaagcaggagggaaagattgcccgtgaggcagaggctgccatcta

SEQ ID NO: 40764 - DNA, 88 bp, Homo sapiens
ctgcttcccagagctttcacgaaggcaccgacgtcatcatgctgaccaccaatcagatccgtaaggcaccccctgtaatggcctatcc

SEQ ID NO: 40765 - DNA, 74 bp, Homo sapiens
ctatttccaaagtatgttgcacccaggttgaaaggattgttgacaaaaggaaaaataaaaaagggaagacagag

SEQ ID NO: 40766 - DNA, 100 bp, Homo sapiens
ttcaaggaccctgatgaagaccttgaacaagtctcgagagtggaaacaactctcacgtgctggagaatctggtaaaagcaccattgtgaagcagatgagg

SEQ ID NO: 40767 - DNA, 75 bp, Homo sapiens
ccgagactctagaagaaatgccctccgggtcacaggataaggttacagtgtacagcatgtatgtttctataatgg

SEQ ID NO: 40768 - DNA, 75 bp, Homo sapiens
gacccagagaagaggaaaactctaccggtgcagagctacttcctcagccgagcccagagcctgtgtggccccgag

SEQ ID NO: 40769 - DNA, 97 bp, Homo sapiens
ttacaaatttccattcactccacctttagagtcattcaacttatgcttctacacttcccagctggcataaccttgacaacagattgccttgaagata

SEQ ID NO: 40770 - DNA, 100 bp, Homo sapiens
gatggggccctggatgagggggaagggcctcaaagccagaagcatgcagcagattggaataaatatgatgaccgattgatgaaagcagcagaaagggggg

SEQ ID NO: 40771 - DNA, 111 bp, Homo sapiens
aaccatgcaaggacagggcaggagaagaggaacctgcaaaggagtgtttctcaggagctatcagaaactatcctcaccatggtagccaattgcagtaatgttatgaataag

SEQ ID NO: 40772 - DNA, 102 bp, Homo sapiens
tgaagtataataccaagaaagccccacttgggtcatcacactgaaacggtgttcaaccgggttttgccagggcctattgcaccagagagcagcaagaagcgg

SEQ ID NO: 40773 - DNA, 120 bp, Homo sapiens
agagggccagagcgtcggggaggcaagatgatccaccagcggttccatcctacacttgggtcttgttcagcgttgcgtaatcatccagaaagatgacaatggatttgggctgacggtcag

SEQ ID NO: 40774 - DNA, 75 bp, Homo sapiens
gaaaagattttgcatctagaggaattgaaagtcacagtaatgaaaggcagtaatagaaataaggatcattcagca

SEQ ID NO: 40775 - DNA, 135 bp, Homo sapiens
agaagtgctccaaatattaaactgaaacctggagtcataccttctatctttgattctccatatcacctacaggaatttgaagcctacattaatgcttctggagaacatggaattgtggttttctctttgggatca

SEQ ID NO: 40776 - DNA, 80 bp, Homo sapiens
gtggtgcctctcaagctgatttggctgtgctgggcttcctactatgagatttcagttgatgatggtccatgggaaaaaca

SEQ ID NO: 40777 - DNA, 100 bp, Homo sapiens
cggcaaagaacttactgattcttgaggacctgtgaaaagagcaagagaagaaacagacaaagaagaacctgcatccaaacaacagaaaacagaaaatggt

SEQ ID NO: 40778 - DNA, 100 bp, Homo sapiens
gaaaaggatgacagagaagacaaggagaacgcctttaagcgccggcgatgtggcgtctgtgagatggcagcctatttcacccactcaaacctgcagcctg

SEQ ID NO: 40779 - DNA, 90 bp, Homo sapiens
gcacgctggagggcgagctgcatgatctgcggggccaggtggccaagattggctctaccagtgcacctggacagggaggaatcctggctc

SEQ ID NO: 40780 - DNA, 100 bp, Homo sapiens
acaggcggctttgcatcggaaatcagctctacagttcagatgctctacccatggtaccccaggaccagaaggcaaccatatttcagatttaccacttcta

SEQ ID NO: 40781 - DNA, 96 bp, Homo sapiens
gtttctctgctgcaccgacctcgacgtcttgcctgtgtcccacttgttcgcggcctataggaggtgtgattgcctatatcagttcttccagctcag

SEQ ID NO: 40782 - DNA, 83 bp, Homo sapiens
ctcacacaccggcctcagcccgcaccggtatctcaggagattacatttcagcttgaaaaagggtcggtggaatttaaaagaag

SEQ ID NO: 40783 - DNA, 75 bp, Homo sapiens
ccgcctcctcctgctgctgctgcgctacctggtggtcgccctgggctaggtgtgctctgaacaagccgagacggg

SEQ ID NO: 40784 - DNA, 75 bp, Homo sapiens
ccaccacgagggcaggttcagagaacaagagtgagccatggagctacgtgtggggaacaagtaccgcctgggacg

SEQ ID NO: 40785 - DNA, 78 bp, Homo sapiens
gcggacaaaacgccaggcggatctcagaaggccagttcaaagatgacagtcatgtccctttccagggacctcaaggac

SEQ ID NO: 40786 - DNA, 141 bp, Homo sapiens
ttaaatattgccgatacttgacctacgcaagagacaatgtcatgtgattcagcctaatatctcagagattatgtggtcatgtctgtctactttgatctgagcagaagaatgggatactttaccatccagacctatatcccc

SEQ ID NO: 40787 - DNA, 83 bp, Homo sapiens
ggtttttcatcctttgatcccgcggtcccttcctgtaccttgtcctcaggtatggttccagaacaggcgtgccaagtctcggc

SEQ ID NO: 40788 - DNA, 90 bp, Homo sapiens
aactcagccctcaccctgacagatacggagcacgaaaacaagtccgacagtgagaatgaaatggttcaccaaaccaccagccagagccac

SEQ ID NO: 40789 - DNA, 126 bp, Homo sapiens
gagaacgtcagcgggctgcagcgcgccaaaaccgggacggacaagaccctggtgaaggaggtcgtacagttcctggtccagaactttacacagaaaaggtgctcaaaggatatttgtttaatgaat

SEQ ID NO: 40790 - DNA, 82 bp, Homo sapiens
aacaaatccctcaacttgctaaaaatcaagagctctcaacttaatcatccttcagcaaaaaagaattaagactaggtttgca

SEQ ID NO: 40791 - DNA, 96 bp, Homo sapiens
cgcggattcgccgaggcaccgaggcactcagaggaggagcatcagatccatgctgctgctgactcggagccccacagcttggcacaggctctctca

SEQ ID NO: 40792 - DNA, 101 bp, Homo sapiens
cgggatctcaggtcctcgggggcggcggccacgccaaggacggctcctctctgctatatgaaatatgggagacgacagaccgtttgtgtgcaatgccccgg

SEQ ID NO: 40793 - DNA, 98 bp, Homo sapiens
ctggctccctcattaccgtcgccagcggagcgaacccgagagcgtggagcgggctgggccagatcctgaggtgcagaggcaattcccggaggactaca

SEQ ID NO: 40794 - DNA, 75 bp, Homo sapiens
gatgtactttgtattttacaagcagctggtgtccgaatgatctacccagcatgctttgttctagtccctcagtca

SEQ ID NO: 40795 - DNA, 83 bp, Homo sapiens
gggagacgacagaccgtttgtgtgcaatgccccgggctgtggacagtgttcagaatcaagtggatgaagttattgatgtcatg

SEQ ID NO: 40796 - DNA, 96 bp, Homo sapiens
aataaaatgggagagaatgaagcaagtttacctaacacgtctttgcaaggtaaactaacattatggatttttccaagctacccaaaatactcgatg

SEQ ID NO: 40797 - DNA, 75 bp, Homo sapiens
tggggacagggcgacgtgtgtccaggcgtttgccggctgaagccgacgtagcttctctgaacagacgcatccagc

SEQ ID NO: 40798 - DNA, 100 bp, Homo sapiens
ttatatgatgaacgatctttgaatttgtcagaaaaggaagtattggatctctttgaaaaaatgatgtacgcaaatagtgtaaaattgttttaatgcctgg

SEQ ID NO: 40799 - DNA, 83 bp, Homo sapiens
ctgatgccccaggaaacccaggccctcaagcagaaggagttccgccgcctccatctccctggccatgttcttcttgaagaccc

SEQ ID NO: 40800 - DNA, 100 bp, Homo sapiens
ccttcgggagaggatatgtagcgaggaggaacgcgctaaggcaaagcacctggactctgtctactagtgacgatgtcgaagacagggaaaatgaaaaggg

SEQ ID NO: 40801 - DNA, 97 bp, Homo sapiens
gattcacaggtgtttccctctttgaataaatctcctgcaaagaagctgagccatgcaattagtaaatctttggggtgtgtacccacgagagaacccc

SEQ ID NO: 40802 - DNA, 90 bp, Homo sapiens
aggagacactgagggaacaaacacttctggatgcatccatgtgggacctaggaaaaggcctgaagattccccagctataccagtctggag

SEQ ID NO: 40803 - DNA, 118 bp, Homo sapiens
aggagcctcccaaacaagggaaggagaaggccaagaaggcagagcagttctgggaggtgatcagtgatgaacatggcatcgaccccaccggcacctaccacggggacagcgacctgca

SEQ ID NO: 40804 - DNA, 75 bp, Homo sapiens
gtctacctcggggcagatccggaccaagaccccatatcatgtgaacctcctcctggctggctatgatgagcatga

SEQ ID NO: 40805 - DNA, 73 bp, Homo sapiens
gaggaggtggtgcagaacctactggagacacaaggttctgccattacaggaccagtagcaaaggagtgtgcag

SEQ ID NO: 40806 - DNA, 100 bp, Homo sapiens
ccgggaagtgcttggggatggagtgcctccaaaggttgctgagggggcagtgcccaaaggaaatgccactaaagaattcatcgagagtttacagttgaag

SEQ ID NO: 40807 - DNA, 75 bp, Homo sapiens
aggaatgcagtcagtctgttgatgaaactatgctaaatttattgtgaagaaatcagaagatgaagaagacgccgc

SEQ ID NO: 40808 - DNA, 99 bp, Homo sapiens
gcggtccctgtgacctgtggagacacggccagatctgccctccaattcttgttggatctagccttggagggtggcttatgcttcatgctgcaattgcac

SEQ ID NO: 40809 - DNA, 100 bp, Homo sapiens
ctccctgcgaccgtcgcggaccatgggcgacaaagggacccggtgtttggagaagagggattgaccctgaatcttgaagacgttcagcctcatgacttag

SEQ ID NO: 40810 - DNA, 101 bp, Homo sapiens
atctagtctttccgcttcttgaatttctctctgtaaaggagccataaggatgagtttaccattattcctgtactggttggagctctgagtgagtcaaaaga

SEQ ID NO: 40811 - DNA, 80 bp, Homo sapiens
cgccaggaccggccgaacgcagagatatggccgcgtggaaagtgtcaaaattcttcccaagaggggatctgaaggaggag

SEQ ID NO: 40812 - DNA, 100 bp, Homo sapiens
gtggttacaaccgcagcagtggtggctatgaacccagaggtcgtggaggtggccgtggaggcagaggtggcatgggtatctggagtccatctttcaccat

SEQ ID NO: 40813 - DNA, 100 bp, Homo sapiens
gggctcctgcaactccccagcagcacgtgttggaatggacttcggaccctggcctcttgggatgcaaaggctgaagccgacgtagcttctctgaacagac

SEQ ID NO: 40814 - DNA, 101 bp, Homo sapiens
tggcgatggtgatggcagcagttactcgcacaaccccagttaagctgcgctccgggaggtgcgttgtagaagacaagaactcaaaggtggcctggttgaac

SEQ ID NO: 40815 - DNA, 87 bp, Homo sapiens
cgaagaagcatcgttaaagtctctcttcaccctgccgtcatgtctaagtcagaggaactgtggctgcaccatctgtcttcatcttcc

SEQ ID NO: 40816 - DNA, 50 bp, Homo sapiens
ctaagctcatcattgttactgcttaagagttggacagtggaggaccttca

SEQ ID NO: 40817 - DNA, 82 bp, Homo sapiens
aggagtttattggagcgcagactgatggcgcaaaggcttttcctccgcaaccatgtctgacaaacccgatatggctgagatc

SEQ ID NO: 40818 - DNA, 100 bp, Homo sapiens
tacggaccccccagcaacttcctcgagatcgatcaatctgcacatcgtgctgccacacgaggcttcattcgttatggctggcgctggggttggagaactg

SEQ ID NO: 40819 - DNA, 51 bp, Homo sapiens
gccggttatctctgtgaatctcaggtggacccccaaaagtacaagggcata

SEQ ID NO: 40820 - DNA, 83 bp, Homo sapiens
ctggcgctgagcctgcagccggccctgccgaacaagttgaaatcatcgcagaaggataaagttcgtcagtttatgatcttcac

SEQ ID NO: 40821 - DNA, 100 bp, Homo sapiens
caggttaagggactcccaggaatatcaggctgaacataacttctttttttcaaagttccctgtgttgtgaactgagcttgggtgaagtgaaatctttgag

SEQ ID NO: 40822 - DNA, 100 bp, Homo sapiens
atcaagggcctgcagcggctggagtacagaggctacgactcggcaggagagaagatgactgaggaggaggtggagaccgttctggcaggacacgaggaca

SEQ ID NO: 40823 - DNA, 116 bp, Homo sapiens
agaaggctacggcaccatgtacatgaagacacggcttttccaggttatgaagacagtatggagtttccagaccatagtagacatttgctacagtgtctgagcgagcagagacacca

SEQ ID NO: 40824 - DNA, 100 bp, Homo sapiens
ttacccaccttcaagttcaccagccctcagctggagcactggaagtgggggctctgccgcttctctccctctccggtcgcaatggaagaagagatcgccg

SEQ ID NO: 40825 - DNA, 75 bp, Homo sapiens
aagtggaggagatcagtctgctgcagccgcaggtccctgactatggctccccagagcctgccttcatctaggatg

SEQ ID NO: 40826 - DNA, 100 bp, Homo sapiens
cccggaagacctcactgaccccagagtggcagaaaggctgatgcagcagggggcagcactgaaatacttaccaacgatcgtcaacgatgtgaaattggtg

SEQ ID NO: 40827 - DNA, 75 bp, Homo sapiens
cgaccgcacacgttgccaccctgagggaaggagagtcgctcccagatagccctcacgagtggccctggagcagga

SEQ ID NO: 40828 - DNA, 101 bp, Homo sapiens
ggctgaggaagaaaggttaacacttccccataagaggtggtgttatcaaggagaagaaattcctgccttgaccagatgtgtggagcatctacaaatgaatg

SEQ ID NO: 40829 - DNA, 142 bp, Homo sapiens
gaaaggagtagtcggcggtggcggcggcaccaaggcccccaagccctccttcgtgtcgtacgtacgccctgagggttacacatcattttggaatgactgtatatcatctggattacgtggctgtatgttaattgaattagca

SEQ ID NO: 40830 - DNA, 90 bp, Homo sapiens
cccgcctggctgcgagatatgttcacgcttacatcatcagctacctgaagaaggagatgccctctgtgtttgggaaggagaacaagaaga

SEQ ID NO: 40831 - DNA, 83 bp, Homo sapiens
tggttcagttgctgagaagcctgacataccaggactgcctgagacaagccacaagctgtatgaagtgtaacagaacagacttt

SEQ ID NO: 40832 - DNA, 100 bp, Homo sapiens
agaagatctggattccacacagcagcggcagcagcaggctgcaacggagaaggggctagtattgggaaagggtcgttgtggtgcatagacccagagtata

SEQ ID NO: 40833 - DNA, 100 bp, Homo sapiens
gtgtggcagcagttcgtgaagtctgtgaggagtttattggctcttctgaagccctgtaaagattttgaagtggacagtcatataaaagatttcgctgcga

SEQ ID NO: 40834 - DNA, 82 bp, Homo sapiens
gctaggggcggctcggagtccgctggccacccagctgagaggagaggcgcccccggggacgccatggccaaggacatcctgg

SEQ ID NO: 40835 - DNA, 100 bp, Homo sapiens
cctggctgggattcctacacaatgcgttgcctggctccacgccctgctgggtcctacctgtcagagccccaaggtctgaaggggcgtctcgattacctga

SEQ ID NO: 40836 - DNA, 125 bp, Homo sapiens
caagtcattcaaagtcagcatgatccacagactgcgattcacaaccgacgtacagctaggtgtcatggagaaactccagctgggcccagagattctgcagcgggaaaatccaaggcttatttatg

SEQ ID NO: 40837 - DNA, 74 bp, Homo sapiens
agacaaccacttctggtggttgccactcacctgaggatatcgccatggatcggatgaagaagatcaaacggcag

SEQ ID NO: 40838 - DNA, 75 bp, Homo sapiens
aacaaagggacccaaaaatgtcttgtattagagtcacaattgatcctgaccttcctgatgcaaaatcgagagccc

SEQ ID NO: 40839 - DNA, 88 bp, Homo sapiens
cgcacgttggaaccgaagagagctctgttgttgcagaatagccaggccagaagaaggaaggcctgtggtgagtgggacaggaaatgac

SEQ ID NO: 40840 - DNA, 75 bp, Homo sapiens
ctcaaccaaacaactcattaatgctgcaaactagcaaggagaatcatgctttagttttcggctttgtgagaaacc

SEQ ID NO: 40841 - DNA, 76 bp, Homo sapiens
ccgacagaacgaaaagaagccctccgaggtactgcaaaaagcctttgacttcaaactgcacaattcagatagcaac

SEQ ID NO: 40842 - DNA, 150 bp, Homo sapiens
cttggagtcatttccaaaacttttcagctatcttcccatccaatacttggtgactggtctattcaagttcaagtgaatgctcttcgtcagattgggcagaggacgataagcactgcttcccgcaggcattttaaaaataaagttccggag

SEQ ID NO: 40843 - DNA, 100 bp, Homo sapiens
tcttctcttcaccagctcttcagatcaatatggaaagaccacagcaagattctttcattcgtctcctcctagcctgggggaccaggctcgaactgaccct

SEQ ID NO: 40844 - DNA, 93 bp, Homo sapiens
gggacctgggctgggaacccgcggtggagcgggacacgaacgtggtgctggagaatctggtaaaagcaccattgtgaagcagatgaggatcct

SEQ ID NO: 40845 - DNA, 73 bp, Homo sapiens
ggcccccgctgggctccatggctgcactgaggccccctctgactggcacagcctccaggttggcgggctcatc

SEQ ID NO: 40846 - DNA, 75 bp, Homo sapiens
ccgaagcaatcttcctgctaaggccattggacacagaatccgagtggcacaaatggctgccaaactggaacgttt

SEQ ID NO: 40847 - DNA, 50 bp, Homo sapiens
cttcgtacccacagtgcttcatgagaggagaaagttctgccactaatgaa

SEQ ID NO: 40848 - DNA, 75 bp, Homo sapiens
cgtggtactcagcaagctcgagttaaagttggatgtgctggaacaggctgaccaactgactgaagagcagattgc

SEQ ID NO: 40849 - DNA, 100 bp, Homo sapiens
tcctgtgatccatcactcggattggcaggacctggggccaaaagccaagggtgactgttggatctgtatggaactcatgtctacctcgtttgataagttt

SEQ ID NO: 40850 - DNA, 80 bp, Homo sapiens
caaaaaagcaaggccttctgagactggatctgatgatggaaatcctcattgacgattcaatttgttgaaggccaatttgt

SEQ ID NO: 40851 - DNA, 100 bp, Homo sapiens
tcagtcccagtgcagggacctcaagcacttttgatatcaagcaagtggcttcctttttgagatattaaaaaaaaaaagaaaaggaaaaaagtaaatgaag

SEQ ID NO: 40852 - DNA, 89 bp, Homo sapiens
tcccgtccgtgtcgcggccctgcggttggcggcctcctcgtggagcggagcaagggatgaagcctgctgggagcgtgaatgacatggcc

SEQ ID NO: 40853 - DNA, 74 bp, Homo sapiens
cagcctctccagacactggggccccagtgggcgtgggcgaagccttttacacttcactgaaaatctgtttccat

SEQ ID NO: 40854 - DNA, 101 bp, Homo sapiens
acctccaggggaacaatgaggcctacgcagagctcatcgtccttgtcttcagccaatgacttgcttgcatcagacatctttgctcctcccgtctcagaacc

SEQ ID NO: 40855 - DNA, 114 bp, Homo sapiens
cggctccggagctagagacgttacgtgccatgcacaaggctgtggtggatgcaggaatcactaccaagcttctgaccgagtacgagacccaatctagtgcagaagccaaatttg

SEQ ID NO: 40856 - DNA, 74 bp, Homo sapiens
tggacaagatcatgggcaaaggacagatccagattcctggtcgggtggcttccagtggtcttcagtctgtcgtg

SEQ ID NO: 40857 - DNA, 126 bp, Homo sapiens
taaagcttgacggcttggacgaagatggggagaaggaagcgagactcatacgcaacctcaatgacgccctgcatgccaatggaggcctgtgtcgccgagagtcgcagggctctgtgtcctctgcgg

SEQ ID NO: 40858 - DNA, 90 bp, Homo sapiens
ttgcctgttcagtactgtgggtgatatttgcctttagtgcactcttctccttcacagtaaagtggctggggccagacacctgctgagtcg

SEQ ID NO: 40859 - DNA, 100 bp, Homo sapiens
ccttgagctccaggagttcgtctcttacgtctgcggaagtgcagctgcctcagttcttagcgcagaacgtgcgcatcgaccccagtagcctgtccttcaa

SEQ ID NO: 40860 - DNA, 100 bp, Homo sapiens
ccggtgattgctttccaaggccaccgagggaaatcatttctaccagttcggagagatccggacgatcactgttgtgcagagacagcagtgtgctttcatc

SEQ ID NO: 40861 - DNA, 82 bp, Homo sapiens
caagttcaagcagctgcttgccggccccaacacggaccttggaagaagacattgtcttggagaacacttggctcggatggaa

SEQ ID NO: 40862 - DNA, 96 bp, Homo sapiens
gaccgaagtgagcgtggacctgccgttggttgaatctggcgatgtggaacccatggatatggagggctgactatatacaccatgttttttcctggc

SEQ ID NO: 40863 - DNA, 75 bp, Homo sapiens
atccatataacccactttgggcacaactggaggagaaggcagagcccccccaggctatgaatgccctgatgcggt

SEQ ID NO: 40864 - DNA, 100 bp, Homo sapiens
cccgcggctgggcgttcatctaccacgctttcgtgcctactctgtgtatgatgaagacattgggtactgtcaagggcagtcttttcttgctgctgtatta

SEQ ID NO: 40865 - DNA, 88 bp, Homo sapiens
tggcgcagccgggcccggcttcccagcctgacggctacccacctttctgttctgagacccctcaagagacatataagaaggtgatgaa

SEQ ID NO: 40866 - DNA, 50 bp, Homo sapiens
gtggaattgcttggtcaaacgatgagctcacagtgcctgcactttacccc

SEQ ID NO: 40867 - DNA, 74 bp, Homo sapiens
gtcagccatcatgtgtgtcagcatgagaggaaagattctgaagcttggcggagaggggtgtgtgagtggacacc

SEQ ID NO: 40868 - DNA, 100 bp, Homo sapiens
tgattcagcgcatcggcagcggcacctacggcgacgtctacaagactggtcaaacaaatggattttacagaggcttacgcggacacgtgctctacagttg

SEQ ID NO: 40869 - DNA, 98 bp, Homo sapiens
gaagaaaacaaaggtagaacatggaggatcgtcaggctctaaacaaaattctggcattgtgtccagatctggcaccctgacttatgaagcagttcacc

SEQ ID NO: 40870 - DNA, 52 bp, Homo sapiens
ttcgaaagtggattttgtgcaatttgacagatctacaacttactgctttgta

SEQ ID NO: 40871 - DNA, 73 bp, Homo sapiens
gaaacacaaagcagcccaaccaaagggtgttggggatgtcctttgcactgaccctgaactgccagattgacaa

SEQ ID NO: 40872 - DNA, 87 bp, Homo sapiens
ccagggaactcaaacagcagatgcaggtacttgaagaagcagaagctcaacatttatatcagtccatcttgcctgatatggtgaaaa

SEQ ID NO: 40873 - DNA, 88 bp, Homo sapiens
agaggaaactgacggagacgcagatgtggacttgaaagaagctgcagcggaggaaggcgaggacagttcgtgtggcaatgcaggtacc

SEQ ID NO: 40874 - DNA, 75 bp, Homo sapiens
taaagcttgaaatgctacatttccaaggagcgagaacccgagcagcgccatgagcaacactaccgtcgtccccag

SEQ ID NO: 40875 - DNA, 100 bp, Homo sapiens
caaactgtggagcctcttctgtaaccaagaatcccagtgttccaatgcagaagttgcaggatatccagagagcaatggagctgctatccgcatgccaggg

SEQ ID NO: 40876 - DNA, 76 bp, Homo sapiens
ctcttgcgtatgtggatggcaaatgctgtaaggaatgcaaatgcataagcttttaaaacgttgtgcagtcgggccc

SEQ ID NO: 40877 - DNA, 100 bp, Homo sapiens
caacccaaattaccttaattgtgtaggagctgcacgatctgggaacctcacgtttatggtgggaggagttgaagatgaatttgctgctgcccaagagttg

SEQ ID NO: 40878 - DNA, 75 bp, Homo sapiens
tgattgaagctttgataaatgaaatcttcctaagtatagattcctggcaagtttgcagagattgaatgtcaccat

SEQ ID NO: 40879 - DNA, 100 bp, Homo sapiens
gtcttgggcagcatgcagtgctttctggggatacccacccaccatcccagggtctacaacatccacagccggaccgtcacccgctatcctgccaactcta

SEQ ID NO: 40880 - DNA, 100 bp, Homo sapiens
gcgcccgccccagccccgacctggcggggccaggacgctggttcatacactccaagcagtcctagagtctgcaccagcggaccgagcaggagtggaaagc

SEQ ID NO: 40881 - DNA, 80 bp, Homo sapiens
ggattttgatgaaggctctgatgtatttcagatgttccaagatgagatgggattctccaacatggaagatgatggcccag

SEQ ID NO: 40882 - DNA, 73 bp, Homo sapiens
ccggcagatccaggaggaggaggacgagaagcagcggctgcagaatgagcagaagatggctgtgccacccacg

SEQ ID NO: 40883 - DNA, 100 bp, Homo sapiens
caaaattaaaagaggagcagcatggcatttcagtcactggtttgcagagtccagattgaaatcagcaagggatgtggttaccagaacaggacactcattg

SEQ ID NO: 40884 - DNA, 90 bp, Homo sapiens
cttccgtgccatcatctccaggattaatgaaagggccattcaggaaacagcacagggaaggtctgtttctctaacaactttttatcgaac

SEQ ID NO: 40885 - DNA, 88 bp, Homo sapiens
cagattcgcagtggtcgcttcttctccttgagatgtcgccacaatgaatgagcagggcttctgcaagatcgtgggccgctctaaggat

SEQ ID NO: 40886 - DNA, 74 bp, Homo sapiens
tcctacattagcgtctacgaccaccaaggttaaccccaaagattggctttccttggagtgaaatcaggaacatc

SEQ ID NO: 40887 - DNA, 96 bp, Homo sapiens
gagaggaaacaaaaagttaaacaagcaagcctgccataagtgagaaggagaaaatgcagaagtctccatggacgtttccctggcttaccgtgatga

SEQ ID NO: 40888 - DNA, 138 bp, Homo sapiens
gccgagatgtctcgctccgtggccttagctgtgctcgcgctactctctctttctggcctggaggctatccagcgaaacccctcctggagtttccccaaagccatggacagccctagtcttcgtgagcttcaacagcct

SEQ ID NO: 40889 - DNA, 82 bp, Homo sapiens
acagctctttgcatccggagagtggacaagaaagtatttataacagcaatgatgtagcagtatcgtttccaaatgtagtatc

SEQ ID NO: 40890 - DNA, 51 bp, Homo sapiens
taaagggaagcgggtcgttatgagaattgccaagaagatgcttttagaaga

SEQ ID NO: 40891 - DNA, 74 bp, Homo sapiens
aaaaacagctcttgctactcgggaacaggagccttcacgtaaatgggtccagtcatgcctcccagtaagaagcc

SEQ ID NO: 40892 - DNA, 100 bp, Homo sapiens
gacaccaagatgcggatccgggcctttccgcttgttgcagatccttgtgccagcaacccttgtcaccatggcaactgcagcagcagcagcagcagcagca

SEQ ID NO: 40893 - DNA, 90 bp, Homo sapiens
ccggagaaccgcggggacagcagccggccagccggggggcactgcccgcccgggctctgtgtggggtgatcagccccagatttgacgtgc

SEQ ID NO: 40894 - DNA, 100 bp, Homo sapiens
cgcgagcgtctgggcgggtggtagtgtgacagtgacagtgaccaggaagagaaggtaagaccccccctcccccattgtgggcacagcacataacacactg

SEQ ID NO: 40895 - DNA, 83 bp, Homo sapiens
caggccatgctctggcaaaaacccttgatgacttacaagccctcaaggggaagcattttctcctggactccttgatgccggag

SEQ ID NO: 40896 - DNA, 51 bp, Homo sapiens
ttagagccaaactgtccaaggctttggcacacatggattaattgatgtatg

SEQ ID NO: 40897 - DNA, 83 bp, Homo sapiens
agtgctgtcttcctctattatgtactgcattgcatattatggggaacgaatgtctattgaactggagaaccaggagtctcggg

SEQ ID NO: 40898 - DNA, 51 bp, Homo sapiens
cagactcggtgctgtacccgccaggaggtggccaagttggagaagcacttg

SEQ ID NO: 40899 - DNA, 75 bp, Homo sapiens
tctgaagtgcttctctggcttgtgaaaagggaaatgtttcaacgtgcgcaagcgttgcggcggcgggcagaggac

SEQ ID NO: 40900 - DNA, 82 bp, Homo sapiens
ccgtgggcataggaccctctgagccagcttgtacatgcagtggccatgcaaatatctgtcatctgcacacaggaaaatgttt

SEQ ID NO: 40901 - DNA, 93 bp, Homo sapiens
accctggagcctcagttggaagcagccgatccagcctgcggagcctgtggggcagttttccaagagataacttcaccaagatgtccagtgata

SEQ ID NO: 40902 - DNA, 83 bp, Homo sapiens
ctgcccccccttccccacgcaaccccagatccatttacactttacagtgcttgaagtttctgggaagtcggcatccaaccctg

SEQ ID NO: 40903 - DNA, 87 bp, Homo sapiens
tgcccttgggcgcgcagatacccgcggtgcaccgcctgctgggagcgccgctcaaggtcatcatcagatttgaaatatttaaagtgg

SEQ ID NO: 40904 - DNA, 87 bp, Homo sapiens
gcggaacccgtgggcctgtggactgcagcctcggcggtcagcagacaaggcgcctctgtcgaagagccttctgctggtccccagtgc

SEQ ID NO: 40905 - DNA, 75 bp, Homo sapiens
cgccgatctggaaaggcaaatagccctttctaaggcacaaaatgatgtgatggaaatgaagatgcagtcagagag

SEQ ID NO: 40906 - DNA, 99 bp, Homo sapiens
ttttgcccaatgggacgggccaacggttgtggtctggctagaggaaggcctgggccctggtgacacaacgagcactttctgcggaaccccgaattacat

SEQ ID NO: 40907 - DNA, 83 bp, Homo sapiens
cttgaacagggctgacaacatttttccttttccggtgatgaaacttatcaggacatatttcgtgatttttcccaaatggcatc

SEQ ID NO: 40908 - DNA, 86 bp, Homo sapiens
cactgacgccgggaccgggaccgccgccgccgccgccaccatggtattgttgcagcatctggcagtgagactgaggatgaggacag

SEQ ID NO: 40909 - DNA, 100 bp, Homo sapiens
agatgtgattaatgtattccaccacctccgccagttaagaggaaaaagattcacagagttcaacagcgtgttacaattaagaaagctttgactctaaaat

SEQ ID NO: 40910 - DNA, 108 bp, Homo sapiens
ttcagactgacaccccacatcgacaatttggaggtggcaaacagcttcgcagtcactaatgcttgtgatgtatcacccatcagtatgtctcccatcagtcagtctcag

SEQ ID NO: 40911 - DNA, 100 bp, Homo sapiens
aaggagctgagagaccctgtgacctcgggactcaacacctcggtgcaatggtgaactagacccctggtcaggaggtggagtaactaaggatatcacagac

SEQ ID NO: 40912 - DNA, 100 bp, Homo sapiens
cggctgtaaagatggcggcttcctagtgagtcggcggctgatttagaaggaggttcaggctacggtgagccgaagatgggcactgtgccccgactgcggc

SEQ ID NO: 40913 - DNA, 104 bp, Homo sapiens
gggagattcagccgtgaagcaagtgcagatagatggccttgtgttctttgcagaagatgtgggttcaaacaaaggtgcaatcattggactcatggtgggcggtg

SEQ ID NO: 40914 - DNA, 75 bp, Homo sapiens
gcctcagcctccccagtagctgggactacagaaataagaatgtctaagcccctggaggccgagaagcaaggtctg

SEQ ID NO: 40915 - DNA, 82 bp, Homo sapiens
ggacgccagcaaagaagacgtcatcttcttctaaaagggccgtgactcaaggttcgtgctggccgtgggcagcgccgtcttt

SEQ ID NO: 40916 - DNA, 104 bp, Homo sapiens
agaatgagaacggaccctgccccttgctggccatcctcaatgttttgctcctggcctggaaggagcatccccttagtgcaggtgctgcggactacggccctgac

SEQ ID NO: 40917 - DNA, 96 bp, Homo sapiens
ggtgagggaatggaccgacacgggtattgtaccgctgagggaaaggagcgggactccggacctccaggaggtaatctgtaagtcagatgctccaac

SEQ ID NO: 40918 - DNA, 82 bp, Homo sapiens
ctggtggtgcaggcgctgcgccgcaacgccgagcgcaccgacatctgcctgctcaaagatgggagcttgcctgattgtcaac

SEQ ID NO: 40919 - DNA, 121 bp, Homo sapiens
tgtcgttatggtgggaggattgactgctgctggggctgggctcgccagtcttggggacagtgtcagcgtgtcatggagaaactccagctgggcccagagattctgcagcgggaaaatccaa

SEQ ID NO: 40920 - DNA, 100 bp, Homo sapiens
ccactcccaccgccagctggaaccctggggactacgacgtccctcaaaccttgcttctaggagataaaaagacgccctcctgcaaaacggcccaactacg

SEQ ID NO: 40921 - DNA, 51 bp, Homo sapiens
cagctatagcaccccagcccaaaggatcccattgaagataccacgctgcat

SEQ ID NO: 40922 - DNA, 82 bp, Homo sapiens
aaggacaagcaggctgctgctaagaactgtggctgcaccatctgtcttcatcttcccgccatctgatgagcagttgaaatct

SEQ ID NO: 40923 - DNA, 83 bp, Homo sapiens
caaacttggattttttccagtctgatccttttgttggcatcaccgttacttcatccccaatccgaggagcaggagatggaatg

SEQ ID NO: 40924 - DNA, 90 bp, Homo sapiens
gaacaggcattgtaaaccacatcaccagtttaaagaatctgattggttggtcaaagaaaaagtgatgtatgaaaaagaggcaaaacaaca

SEQ ID NO: 40925 - DNA, 90 bp, Homo sapiens
ggtgtgtggcgcgcccagagccccgcgtttcagccctagggaagagcttactcacatagcatattggtatatcaaaatgaaatgcaagga

SEQ ID NO: 40926 - DNA, 75 bp, Homo sapiens
gtcggcttgtcctggctcttgccctcatcctggttctggaatcctcagttcaagcaaatccttgctgttcccacc

SEQ ID NO: 40927 - DNA, 75 bp, Homo sapiens
cctcgtcgaaaggattggattggcatctttagactctggccaggctgccgcacctctacaggaactttgccgcgg

SEQ ID NO: 40928 - DNA, 98 bp, Homo sapiens
atctgagtctaatgctaccagcactgccaactttcccaacattcctgtggcttccacaactcccatggctattgaagaacaagtggctgttatctatg

SEQ ID NO: 40929 - DNA, 100 bp, Homo sapiens
aaagatcttccagttggagttactcactctgattcttccttcagtgacacagaacttgaccgaagaaatgaagctgttgtcatttctggaaggaaactgg

SEQ ID NO: 40930 - DNA, 82 bp, Homo sapiens
ctcagaggtggtggattcgaatccctacagcaacaccttacgagttacccgttctgctgcccccagcacactggacagttcc

SEQ ID NO: 40931 - DNA, 82 bp, Homo sapiens
ctttggcaaagtctctcatcaaatcctggaaaaaattattagggcatccgaggaggctttcgtgaaggaatccaaggaggag

SEQ ID NO: 40932 - DNA, 100 bp, Homo sapiens
cacctggtcaatgcagacggacagtacctcttctgcaggtactggaaacccacaggcacacccaagaatagccaggccagaagaaggaaggcctgtggtg

SEQ ID NO: 40933 - DNA, 98 bp, Homo sapiens
cagatagcagagctgaatcatgagttgctgaacagaagacttttgagagtcagcagaaatcttccactttgcatggttctcttgatgtgaaatcatct

SEQ ID NO: 40934 - DNA, 98 bp, Homo sapiens
ggagcgcagagcgggcgagcgcgtggccactgcctccaccatggctgaggctttctctaagacaacctctgaggaagaccagagcatccaggagccca

SEQ ID NO: 40935 - DNA, 100 bp, Homo sapiens
ggtgtctcgaacatattgtgatgtttggatgattcaaaatgggacactaattgaaagggattctttgaactaataccacaggatctcatcaaaatttttg

SEQ ID NO: 40936 - DNA, 75 bp, Homo sapiens
gcggtcgcagtctccacggcgcaggcccacggtagcgcagccgctctgaggtacatgtcccagagcaagcacacg

SEQ ID NO: 40937 - DNA, 75 bp, Homo sapiens
tttccacagaggtgaccatgtctgggatggaaagtacaaagaggatggtgaagctttgctaattttgctaccctc

SEQ ID NO: 40938 - DNA, 82 bp, Homo sapiens
tgggccagcctgacctccccaaggagatggcctctctgtgaagcggggagaggtggtgagagatgacccctgttgaggattt

SEQ ID NO: 40939 - DNA, 100 bp, Homo sapiens
tcatattatagatggagtaaagggtatgttagagcccaccaaggaaccactgaaaccactttctgctgcagaaaaaatagcttccatcggtcagacagcc

SEQ ID NO: 40940 - DNA, 74 bp, Homo sapiens
ccgagccgggatctcaggtcctcgggggcggcggccacgccaaggacggcggggatctgatgagcttctttctt

SEQ ID NO: 40941 - DNA, 75 bp, Homo sapiens
tgaggttatcacagagcattccatttacacctgtgcctccaagaggtggtgtaaattggtccaatgtaacttgcc

SEQ ID NO: 40942 - DNA, 75 bp, Homo sapiens
tgccgccggtcctgaccaccgtgaacggacagtcccccccaggttcttgatagtccacaatgggtgaaccacagc

SEQ ID NO: 40943 - DNA, 100 bp, Homo sapiens
ccccaagaagaccattcagatgggatctttccggatcaatccagatggcagccagtcagtggtggaggcgggcgacttcaccaaccacaatggcacaggc

SEQ ID NO: 40944 - DNA, 112 bp, Homo sapiens
tgcggagaattggagatggggaccgccctggacatcaagattaaaagagcgaataaagtttatcacgccgggtgtctttctcgagaagcaggtggaaacatgagcattcagt

SEQ ID NO: 40945 - DNA, 101 bp, Homo sapiens
ggcctacctaaaccagcacttgtctggctttggggccgaacgtgaggctacgctgaccattgcccagtacagattgttaaaggaaatgggctggcaggaag

SEQ ID NO: 40946 - DNA, 88 bp, Homo sapiens
gggaggcgggatggagtgatagggaagtctatccagaagttaaaggagagattgctcgtaaagatgaaaagctgctgtcgtttctaaa

SEQ ID NO: 40947 - DNA, 100 bp, Homo sapiens
ccgcctggcgggagcggggctgctgctggcctttctccgcgcgctcggctgcgctgggcgggccccagatggctgatcactgggaaactgcacctcgtca

SEQ ID NO: 40948 - DNA, 73 bp, Homo sapiens
ggccatggcataaggaactctatcccaggaatacagctttgcattagcttataggctttatactgtggtgcct

SEQ ID NO: 40949 - DNA, 82 bp, Homo sapiens
cgcggcttaaatgatgtattttgtgatcgcagcgatgaaaggaatactcccccagttgcaagaggcgcaggaccgtggaaga

SEQ ID NO: 40950 - DNA, 51 bp, Homo sapiens
ggaagaatgccggtcacagcccaggagacgtctttttacaagggaaacggt

SEQ ID NO: 40951 - DNA, 74 bp, Homo sapiens
caactgggttttgcagtatgaccctcccagcaatgcaagggccatcactgtgcatgtccccatgccctcagcag

SEQ ID NO: 40952 - DNA, 130 bp, Homo sapiens
aatcaagccaaggtgccggtggatggtaataaggaagagccccaaatatgcgttattgagaccgtagctttatgggatctgcgtaacttaaaattaaaactccataccttcgaatctcataaagatgaaa

SEQ ID NO: 40953 - DNA, 75 bp, Homo sapiens
aggattccaagtaactcttatttgagtcttttattcaaaacttcagcgttctctatagtcccttgaaaaggcatc

SEQ ID NO: 40954 - DNA, 75 bp, Homo sapiens
caggctacggatggatatgtcaggaatgtgattcttcatcttccaaggtcacatgtgccaatttaacgaacggtg

SEQ ID NO: 40955 - DNA, 93 bp, Homo sapiens
gggcgtggacggtgtggggcggtcccggccccgcagggggggccctcagcctcttggccttgaacgggctgttcatcttgattcacaaacaca

SEQ ID NO: 40956 - DNA, 95 bp, Homo sapiens
ttattaaatttaaatagattagtaactggcatagacaactatgggcaggacccagatgatgtggtaccagttggccaaagaagagcctggtgttg

SEQ ID NO: 40957 - DNA, 102 bp, Homo sapiens
cggcggaacgccgactgcagtaagctccgccgccccctaaagcggaaccggatcaccgagggcatttacggcaggctggcagtgatggtgaaagcataggaa

SEQ ID NO: 40958 - DNA, 50 bp, Homo sapiens
aaggaagtaccaggacttgcacaggctgatttggagcaatataaaaaagc

SEQ ID NO: 40959 - DNA, 100 bp, Homo sapiens
ttccaagaggtggctcagaaattccaaggttcgttccaccagtcataaaccagatgaaatctatggcatgattgaaagactatctcctggcactcgcaag

SEQ ID NO: 40960 - DNA, 100 bp, Homo sapiens
caccttttagcccgggactctttcacaggctggatgaagattggggttggtgacatcgtgaaagtcacaaggatgaatataaatggccagtgggaaggcg

SEQ ID NO: 40961 - DNA, 80 bp, Homo sapiens
tgagagcctgaggagccattttgagcaatggggaacgctcacggactgtgtgaattttgataagctgaatgtaaggacaa

SEQ ID NO: 40962 - DNA, 74 bp, Homo sapiens
gaattaaaagttagaaaatctttgtcaagtaaactaaccaaggtttttaatgaccacaacaagcaagcatgcag

SEQ ID NO: 40963 - DNA, 51 bp, Homo sapiens
cagaaggctgtagaccagagtatcgagaagccacaagtatatggttatgat

SEQ ID NO: 40964 - DNA, 103 bp, Homo sapiens
cgagcgagtcgccgctgcagccctagtgactgcggcctgcatcccgacctgcctagagctggaacgttacctccagagcgagccctgctatgtttcagcctca

SEQ ID NO: 40965 - DNA, 98 bp, Homo sapiens
cacagttatgcactttaccctttttaatattggccaatcatcaagacaagccagcagctcgctcagtacaagaggtgttaatgttgactttgcaaaat

SEQ ID NO: 40966 - DNA, 110 bp, Homo sapiens
ctttgacgccctcttccagccccagcagcacccagcccgtgaccagcacgacaccttcttccttcgagtttgtcccgctggctggaagcctggcagtgacacgattaagc

SEQ ID NO: 40967 - DNA, 100 bp, Homo sapiens
agctatttattcagctggttctgaagcaagaacaagaggaataccagcgggaagggatcccctggaaacataaatggaagcaactgtcgagattgcagcg

SEQ ID NO: 40968 - DNA, 75 bp, Homo sapiens
ccgagatctacgagttccatgttgctccttgagggcaggacagttcttatggctttatccgttgcgtaagcacag

SEQ ID NO: 40969 - DNA, 100 bp, Homo sapiens
cccagctcaaatgctactactttgattacaagtgaaaggtgtagcagtcactcggcctacacccacagcatcgaccttgtgaacccagcgacctgactgc

SEQ ID NO: 40970 - DNA, 83 bp, Homo sapiens
tgcctgcagagctgtggcttaccagattcggaggaacctgagtgcctcagtcatcgccgtcaccatccaggggggagcgcacc

SEQ ID NO: 40971 - DNA, 96 bp, Homo sapiens
tttttgtggaaagaagatacacagcagttgtcttaaacagcaaatgcagccctgaggatttggctactgcatataacaacagggggcaaatcaagt

SEQ ID NO: 40972 - DNA, 96 bp, Homo sapiens
tggggaaggtagatgtcattcaagaaccagtctgcagacctgctggaaatgaaatctggtgctcctgcgagacaggttatgggtggcctcgggaaa

SEQ ID NO: 40973 - DNA, 100 bp, Homo sapiens
cctggggaatgcttttttatctcatattagtgcctgtgatggcatctttcatctaacacagtgaagtcaccctgctgagaaatgaagtggcacagctgaa

SEQ ID NO: 40974 - DNA, 75 bp, Homo sapiens
ccctctgtctgcctgtgtccctgaccatggctccctgcagtaccctttaacggtttggagtgagccgtagatccc

SEQ ID NO: 40975 - DNA, 101 bp, Homo sapiens
cccacctgggccccagaccgtgctgatcttcgatgagctctcggattccttatgcagagtggccgacttgtttaccaagtactggacagaatcaaatgggg

SEQ ID NO: 40976 - DNA, 83 bp, Homo sapiens
gggacaatggtcaccgtctcttcagatgatatcatcaagttgaatcgaaaggaagggaagaagcagaattttccaagactaaa

SEQ ID NO: 40977 - DNA, 82 bp, Homo sapiens
gacttcaccgaagaccagaccgcaggcttgaacatgacaagcagatttgggagtccaaggcccagacagaggtccagcttca

SEQ ID NO: 40978 - DNA, 100 bp, Homo sapiens
aaagcagaaagaaagctgcggcctgtatcaccagaggagattagacgtagcagattaggcagaaaatgtgctagattggaggtgaagaccctggagccag

SEQ ID NO: 40979 - DNA, 102 bp, Homo sapiens
cgggtttggagactcctgcgtcctccgacttttcatggtgctggagaatctggtaaaagcaccattgtgaagcagatgaggatcctgcatgttaatgggttt

SEQ ID NO: 40980 - DNA, 74 bp, Homo sapiens
gcaaggctcttccctgaccattttctactgtccctgcgcgagtttaagctatgaagaaggacatccctcacact

SEQ ID NO: 40981 - DNA, 75 bp, Homo sapiens
cccggaaactccagcgtgtctccagccgtgatccctccctggtgccacagcagctgagtgcgcatcaaatctgaa

SEQ ID NO: 40982 - DNA, 85 bp, Homo sapiens
ggcgctgggagcaacgggagtgtcctggacccagctgagcgggcggtcattcgcatcgcagggcacagactccatcaagatggag

SEQ ID NO: 40983 - DNA, 100 bp, Homo sapiens
aaacggagccagcggctgaggaggggccccagcagcccccgaaggccctatcaggacatggagtatgaaagacgatgacacaattggtactgcctggcat

SEQ ID NO: 40984 - DNA, 100 bp, Homo sapiens
agcacactcattagataaagtgtcgcatactctttgataagatattgatgatgttaagaagttcaaaccgggttacctggaagctactcttaattggttt

SEQ ID NO: 40985 - DNA, 75 bp, Homo sapiens
aagccacacagtgtccagatacgagggagccggtgaaacctgaagaaggcagagatatggcaaacaggattggcg

SEQ ID NO: 40986 - DNA, 82 bp, Homo sapiens
aacctcgacagaagagttccaattccagtggaccgtagttgtggaggattgaactgtggctgcaccatctgtcttcatcttc

SEQ ID NO: 40987 - DNA, 101 bp, Homo sapiens
ccctttcacaaatttggaatctgccttctactccatcgtgggactcagcagccttggtgctcaggtgccagatgcaaagtaatctatgccagcaattatga

SEQ ID NO: 40988 - DNA, 50 bp, Homo sapiens
atgaaagtgcagaagactcggaaagacagggtttcaccacgttgcccagg

SEQ ID NO: 40989 - DNA, 75 bp, Homo sapiens
cggcgctggagagggggcgctgagctgttgggttgtcgagatgtccacagaaggaggatttggtggtactagcag

SEQ ID NO: 40990 - DNA, 95 bp, Homo sapiens
gtaaatgtgagtggaagccatgaggccaaaggcagttgtattgggttttcagagaaagatgctgatgaggtgaaaggaatttttgtagataccaa

SEQ ID NO: 40991 - DNA, 83 bp, Homo sapiens
acccaaggaagtgactcaaactgtgagaacttcagtagttcggtgtagcactgtttgcggcgaggagaaaggaaggagaggag

SEQ ID NO: 40992 - DNA, 74 bp, Homo sapiens
ccccccacccgggctcggcgggggagcgactcatggagctgccgtaaggatgtatcaggaatgccagctctgtg

SEQ ID NO: 40993 - DNA, 75 bp, Homo sapiens
cccagtactaccggcccctgcatgaatcatgggtaaagaaggaagacaggctgcaagaaacagtgactatgcaat

SEQ ID NO: 40994 - DNA, 100 bp, Homo sapiens
ctgccttccctctgggaatctggagcttcagtaacaggaagctgtagagaaatatgaagaagtgctacataatttggaatttgccaaggagcttcaaaaa

SEQ ID NO: 40995 - DNA, 100 bp, Homo sapiens
gcctgccaagaccagcaaaaagccaccaccgtcaaaggaagaactccttaaactaactgtgctccagttcagcacaaactgcccagaatgcaatgccccc

SEQ ID NO: 40996 - DNA, 100 bp, Homo sapiens
aatgttggagccgtctgcaaagtgtccccggcaagaaggaatgtatcctgtcaggtataatgtcagtgaatggcaagaaagttcttcatatggatcgaaa

SEQ ID NO: 40997 - DNA, 90 bp, Homo sapiens
tttgatatcaccaaactggaggatgcctatgtattccctggggatggcgcatcacacaccaaaggtgcagcttcaagcttaggaccaccc

SEQ ID NO: 40998 - DNA, 51 bp, Homo sapiens
caaggtgtcaacaatgtgccgatccaaaggggctattctgaacatttcatc

SEQ ID NO: 40999 - DNA, 51 bp, Homo sapiens
actactgtgtgtggattcagaaagtcaaaataatccagaatggctactctg

SEQ ID NO: 41000 - DNA, 75 bp, Homo sapiens
gtctgtggcacatgcgctttctctcccagcagagtcgtatggcaacgatctgttgtcaacttcagataccactgg

SEQ ID NO: 41001 - DNA, 100 bp, Homo sapiens
gaatggtgcctgtcctgctgtctctgctgctgcttctgggtcctgctgtcccccaggagaaccaagatgggaacccgagcgtcatgttagggtgaagcag

SEQ ID NO: 41002 - DNA, 100 bp, Homo sapiens
cccacggtagcgcagccgctctgagcttccttggaaatcattgactagcatcattgaatattattacatgtggaaaactactgacagatatgtgcaacag

SEQ ID NO: 41003 - DNA, 82 bp, Homo sapiens
ctccttatttcctgtgcaaagtgctgcgtacgggttcatgcaattccagtgtctcgccccatcctcaccctcagggttccca

SEQ ID NO: 41004 - DNA, 96 bp, Homo sapiens
tccctgcagatggcccatttggagatcttgacaaagcctcttctgtttccaatgggaagacttgcactatctgccagatgctgcttcctaaccagt

SEQ ID NO: 41005 - DNA, 98 bp, Homo sapiens
gacctcaacgcacagtacgagcggcggatctacgaactgcgtgtgatggagaccaaacccgacaaggcagtgtccatcattgagtgtgacatgaacgt

SEQ ID NO: 41006 - DNA, 75 bp, Homo sapiens
tcgtttcaggcaaagagagctcgacttaacaagattactggaaaattgcctaagaattatgacccaaaagttacc

SEQ ID NO: 41007 - DNA, 129 bp, Homo sapiens
cggagcccctttagccatgtggatacctacggagcacgagaaatacggcgtggacgcgcgcacgcccacgctggatcctgacacgatgcacgcgcgcctgcgcctgtccgccgatcgcctgacggtgcg

SEQ ID NO: 41008 - DNA, 82 bp, Homo sapiens
attttggtatttcagcagaaagactttcacagagactttcttcatgagattgaaacagcaaaatgatgcttcaacacccagg

SEQ ID NO: 41009 - DNA, 98 bp, Homo sapiens
aggtcatcgaccttgtgctggagaggacccggaagctggaatgtatcctgtcaggtataatgtcagtgaatggcaagaaagttcttcatatggatcga

SEQ ID NO: 41010 - DNA, 83 bp, Homo sapiens
gggatagcgttgcaaatccttaaaagagtcttaacgaaatggtggagtcaatgaagaaagtagcagggatggatgtggagctg

SEQ ID NO: 41011 - DNA, 88 bp, Homo sapiens
gtcaaccagctcaagaagatcatcaagcgcaagcacaccctaccgaattacaagatcagttttctggatatgccgcagaaggatccgt

SEQ ID NO: 41012 - DNA, 118 bp, Homo sapiens
tttggcattgacatttaattttagggtcctttatatagaagggagagtagtgacgccataagggagaagatgaagaaaaattacatgtccaatccaagttacaattatgaaattgtga

SEQ ID NO: 41013 - DNA, 82 bp, Homo sapiens
aatcacaagattctctgccacaaaaaaatataataaggctgagtgcggagccaaggttttgatgatgatggttcagaatttc

SEQ ID NO: 41014 - DNA, 100 bp, Homo sapiens
agccaaactgtcggcttcaaagagaaaaggcaacatcctgtcacaggccatgctctggcaaaaacggaataaccagcaagtacctgtcaagaatgaagta

SEQ ID NO: 41015 - DNA, 75 bp, Homo sapiens
ggggaaatccagtccctgttactccattttggccagaaattcaaggaataactcaagtcacctgtactggaaatc

SEQ ID NO: 41016 - DNA, 100 bp, Homo sapiens
agcttcctgcagctgcagagcatcaaagacgcctgctgcacattccttcgagaacgacgatgggccctactccaaaggaggcaaggacgcaggaggggcc

SEQ ID NO: 41017 - DNA, 83 bp, Homo sapiens
tgcagattccagaaaaattacagcacatctcagtgaatttgcaagtgaattaaacaaccaccatgtcgagcaaaaaggcaaag

SEQ ID NO: 41018 - DNA, 75 bp, Homo sapiens
ctcagacatcaccatcatgtttgagaccacagcaccgggaagtccagtcagcggcagatggtgttcggggtggtc

SEQ ID NO: 41019 - DNA, 75 bp, Homo sapiens
caaggatgaagaacggagacggactttgaagaatatcctgaacatagaacgaactttttcttactacttcaggct

SEQ ID NO: 41020 - DNA, 100 bp, Homo sapiens
ctttgctctgtggacccgtgagcaagcataagctgccaaaccaaggctctgaacaagaaggaacacagagggtgcgacagcccagaccctgatacttcat

SEQ ID NO: 41021 - DNA, 98 bp, Homo sapiens
ctgagatcaaatggcacttcattggccacctacagaaacaaaatgtcaacaaattgatgggagagagaagctcttcagaaacagctggatgaagcaaa

SEQ ID NO: 41022 - DNA, 83 bp, Homo sapiens
acctcctggaagccaaaaatgttgtggaagctgatcgaggaagcctaagcaggctctgtgaagtgggaatagtggtatttgag

SEQ ID NO: 41023 - DNA, 74 bp, Homo sapiens
ggctcttccaagtgtccacgttggatgctgccttgtccggtaccctgtcaggaactgtggctgcaccatctgtc

SEQ ID NO: 41024 - DNA, 80 bp, Homo sapiens
atcgacggcatgactactggctgctagccggcattataaatttgatacaaccaagtcggatgggcagtttaagaagacag

SEQ ID NO: 41025 - DNA, 74 bp, Homo sapiens
aaaagatgagtccttgggatatggagcttatacctaataatgccacttatgaatcagtgttgttccatcaacta

SEQ ID NO: 41026 - DNA, 100 bp, Homo sapiens
cagcctccatcttggaagcggccgccggcgcctagggtatgttagagcccaccaaggaaccactgaaaccactttctgctgcagaaaaaatagcttccat

SEQ ID NO: 41027 - DNA, 95 bp, Homo sapiens
ctgggattggaactgtgtttgggagcctcatcattggttatgccaggactttctgtctcttctgaaggcccttctcaaagacttggaacacctaa

SEQ ID NO: 41028 - DNA, 83 bp, Homo sapiens
ctgatggcaaagatgataaagaattatgccatgtatgctgtatgaagaaaaggtgtgattactttagagtcccttggtaaaag

SEQ ID NO: 41029 - DNA, 75 bp, Homo sapiens
agcgttctgtcatctcagcaaagaatggagacggtggctcagggagtaaaggaaggccagttgagcaaacagaag

SEQ ID NO: 41030 - DNA, 100 bp, Homo sapiens
tgctcatcaagctgctggaggtcctctctggagagaggctggtgcaatggatgagcttcatagtctggatccaagaaggcaagagttattggaagctaga

SEQ ID NO: 41031 - DNA, 75 bp, Homo sapiens
ttgaagtttctcacagactgaactgctcccgagaggaacttgctactaccagcaccatgccctaccaatatccag

SEQ ID NO: 41032 - DNA, 98 bp, Homo sapiens
ctcaggagtcgtcaagaggctctgcaccctggatggaaagcagagttagtgctgagggtgctgtactatggccggcaaaattttatggaagacagcag

SEQ ID NO: 41033 - DNA, 100 bp, Homo sapiens
ttgtaatcagcttcttaccaaatacagaagagtgatcagcagctggactgtgccttggacctaatgaggcgcctgcctccccagcaaatcgagaaaaacc

SEQ ID NO: 41034 - DNA, 100 bp, Homo sapiens
gtgacgtggacgtgatgcccgtggataaaaagaagacctacgtgggctcgctcaggaatggagttcagtctgaaagatgaggaaaatgaagctcgggctg

SEQ ID NO: 41035 - DNA, 90 bp, Homo sapiens
gaggagctgcaattgatgatattgaatttaaaaactgcacaactggtggaagatggatgcctgaagtgtagactgctgctagctgaatac

SEQ ID NO: 41036 - DNA, 74 bp, Homo sapiens
tcagccaagtagactcctgcaggttatacattggctcttcaaagacgttcacctcatcagagaaatccctgact

SEQ ID NO: 41037 - DNA, 97 bp, Homo sapiens
gcacgtctgctcggagatcatttgggagatccaagagattcagtatcactcgctcccttgatgatcttgaggtgtcatggagaaactccagctgggc

SEQ ID NO: 41038 - DNA, 100 bp, Homo sapiens
tgatgaaggcgtggatagcctgaaggcagccattcaggtggttccacgagtgtttgggcgcatggtgggtaaaagccgggaggcggtggctcaggccatg

SEQ ID NO: 41039 - DNA, 120 bp, Homo sapiens
attcccagagttcgaggtggtgggactcaccgctctggccagggtgcttttggaaacgtgaggttactattgaatgtaaaacaaggtactggacatcaagcatggtgctgttttctatcc

SEQ ID NO: 41040 - DNA, 98 bp, Homo sapiens
cgagaccgacttctttctctttaccctcattggcgcttctctcctgcagtccgcctctgggccctgccggctgaccggttccctgatgtgttacctgc

SEQ ID NO: 41041 - DNA, 100 bp, Homo sapiens
taaccagagcttttctagtcagcctcaccaagtagaacaaacagagcttcagcaagaacagcttcaaacagtggctggactgaaatccgccgggaagcct

SEQ ID NO: 41042 - DNA, 82 bp, Homo sapiens
tgctaatgctctgggtctctgggcagcaaggcgaaccccatccctactcactggagctcagctttgatttttaacctccctt

SEQ ID NO: 41043 - DNA, 50 bp, Homo sapiens
ggggacttcgggagccagtagccaaggccctgggcagtgacggggttcgg

SEQ ID NO: 41044 - DNA, 82 bp, Homo sapiens
aaaccccatttggccctcaaacaggatgcgtattggatagcaatgaatagttctctgaaatgtaaaaccctcagcgacatct

SEQ ID NO: 41045 - DNA, 89 bp, Homo sapiens
aaaagttgatggagattacctttggaatgtgtgaatgacaactactggtttgggagggacaaaagctgtgaatattgctttgatgaacc

SEQ ID NO: 41046 - DNA, 100 bp, Homo sapiens
ggatggagaaatttactatataaaccataagaacaagaccacctcttggctagacccaaggcttgaccctcgttttggtcgacctggccgtctctgtttc

SEQ ID NO: 41047 - DNA, 99 bp, Homo sapiens
cctgtgcaacaacctcttgaggatcgaatcttcactcccgctgtctcagcagtctacagcacgggcgtcactgagggctacaatggcaccatctttgcc

SEQ ID NO: 41048 - DNA, 74 bp, Homo sapiens
ctcaatttgctggatttaagcactgctgcactttatgagcttttccagagccttgtgccaaaggagaaatatga

SEQ ID NO: 41049 - DNA, 98 bp, Homo sapiens
ttgacaagacgcggctgccgtacgtggccctcgatgtgctctgcgtgttgctggaagggtgggagagaatcaagctcctgtggccacctgtgtcccag

SEQ ID NO: 41050 - DNA, 76 bp, Homo sapiens
caattcttgaatgacatccgagcgaaagagaaagagatgctgtcccacaccccagattctactgtgtcctgtcccc

SEQ ID NO: 41051 - DNA, 75 bp, Homo sapiens
tgcaaactctggaaaaaaacttggatgagggcagaagtgcagttgaccaagcaggtggtgcacagattgtaattg

SEQ ID NO: 41052 - DNA, 75 bp, Homo sapiens
caacgccttcatgctgctcacgcagtctcgcccaagaacttcaaggtgaaaatgatcatgaagacatcagttctg

SEQ ID NO: 41053 - DNA, 112 bp, Homo sapiens
cggtcctcagcgactcttctgacctccgcgcgacgtacccgccgccgccgttggctggagatgatatcatcaagttgaatcgaaaggaagggaagaagcagaattttccaag

SEQ ID NO: 41054 - DNA, 100 bp, Homo sapiens
tttccatagggtcactcctagatatctccaacacaccagagtctagcattaactatggagcccagtgtgccatcataatgtttgatgtaacatcgagagt

SEQ ID NO: 41055 - DNA, 83 bp, Homo sapiens
actgctgaagctcgatgagcaagggaaactaatctggattcactccctctggttgatacccactcaaaaaggacacttctgat

SEQ ID NO: 41056 - DNA, 90 bp, Homo sapiens
ttgaaggttgtgaccaaaagaggctccgctgttttggaaagaagtgaggtttagacttctccatgttaaccatgagcgtgacactttccc

SEQ ID NO: 41057 - DNA, 74 bp, Homo sapiens
aaagatgaagatgaaaccaagcccttggaagttctacagactttgaccaagttttgtttccccttctatgtgga

SEQ ID NO: 41058 - DNA, 101 bp, Homo sapiens
ggtcctactacgcgtacgtggtggagctctgcgtgtgactcacaccacccggcaagaactgctcactacggctccctgccccagaagtcacacggccggac

SEQ ID NO: 41059 - DNA, 100 bp, Homo sapiens
cggcagaggcagctggaccccaggacagtgcagctgttctggaagccagccccctgccctgagccagctggtgaacctgtaccttgggaggtcacacttt

SEQ ID NO: 41060 - DNA, 73 bp, Homo sapiens
cttgttgatgaggaagaccggaggtacttcaaacagcaggaggtggagcccatgtgcaaggagagcgaccaca

SEQ ID NO: 41061 - DNA, 96 bp, Homo sapiens
ggcctggaatggccactacttcatcctaactgaccagaagggccaggtgcatcagtgcaggctttgacaaattacaaaaggctcgtttggatctgt

SEQ ID NO: 41062 - DNA, 75 bp, Homo sapiens
gggtatcagagccatcagaaccgccaccatgggcagtcagggcgacagcaagaatgccaagaagaagaacaacaa

SEQ ID NO: 41063 - DNA, 96 bp, Homo sapiens
aaggaagccattgaaaaccatcagaacatgattaagcagtttaaagcggttaagaagattgtctaccaaatatagaacagaaaagatatatcccac

SEQ ID NO: 41064 - DNA, 130 bp, Homo sapiens
agttgcaaaaagaaactggagccaccatcaagctgtctaagtccaaagatttttacccaggtgctggagaatctggtaaaagcaccattgtgaagcagatgaggatcctgcatgttaatgggtttaatgg

SEQ ID NO: 41065 - DNA, 100 bp, Homo sapiens
gctcttcacatgatggaactgtttgacacaactgtagagcagctgtatagcatcttcactgtaaaggaggctgaccaactgactgaagagcagattgcag

SEQ ID NO: 41066 - DNA, 75 bp, Homo sapiens
tagccaagtacgagatcatggacggggcaccagtgcgagaaaggaagaggttttatcagaatgtcagcatcacac

SEQ ID NO: 41067 - DNA, 88 bp, Homo sapiens
cgcccgtgcagctcggctgcatccccgccatcctggagggcgtgcgccgggacctgcccccagcctcggcctcccgctccgtccccat

SEQ ID NO: 41068 - DNA, 90 bp, Homo sapiens
gtgtaagcagctgaacgagaaccaagtgcggacgctgtgcgagaagatctatctgcacctgcgctcctacaccgtgccacaggagcaacg

SEQ ID NO: 41069 - DNA, 90 bp, Homo sapiens
ctccttccacctggccaggaatcagaaattgcaggtgctgcagtgtctgaaatttccgggcctttctcaacagaggatgtagccagcaac

SEQ ID NO: 41070 - DNA, 98 bp, Homo sapiens
aaacatcaagcagaatgtgatttgcttgaagatatgaggtatgcaaccactcatgtattcggttcaggaagcattaaatgccagaccatggtggattc

SEQ ID NO: 41071 - DNA, 90 bp, Homo sapiens
ggacccacaagaacttcgagatggattccaacatcctgctagacttgttaaggagggtgtgaagacagagaatgaccacatcaacctgaa

SEQ ID NO: 41072 - DNA, 100 bp, Homo sapiens
gataatattatcaacattgatctcctatttttggcttcaagattttgtgccaaccagcatcagcgagagctttctaactgtcaaaggtgctgcccttttt

SEQ ID NO: 41073 - DNA, 83 bp, Homo sapiens
aaaacttcgaaactcatgcaagggatggggaaagacaccatagtcataaaagaagaaagcaaaaaatataaatgaagtacttg

SEQ ID NO: 41074 - DNA, 83 bp, Homo sapiens
gtttgatgaaggtggaggcagcgcggctctcagggctgaaatctctttaatgatggagggaagcaggcagacgcgagtgtctc

SEQ ID NO: 41075 - DNA, 75 bp, Homo sapiens
cccgggccccgatggccccgaccgcgtgctggagctcttcgacccacccaaggtggacccaagtggagagattgt

SEQ ID NO: 41076 - DNA, 75 bp, Homo sapiens
gtcgatggtcggcggcgcccggatgggcagctgaggtgccttagctggaccaattattgtggagccacatgtcac

SEQ ID NO: 41077 - DNA, 105 bp, Homo sapiens
gaggcggccaaggacctggccgacatcgcggccttcttccgatccggctaccggctctctgaccagttccacgacatcctcattcgaaagtttgacaggcaggga

SEQ ID NO: 41078 - DNA, 96 bp, Homo sapiens
tcaaccacaacacccccgggctccccaagatctacatccaccgagtcggccggacggcccgtgcaggtgctggcccagcagggggagtacagtgag

SEQ ID NO: 41079 - DNA, 92 bp, Homo sapiens
caaggagctaaagcagcgtgcgttcagccctggggattctttctactaatccagatacttgttgaagtgctgactagtttcttggggaaaga

SEQ ID NO: 41080 - DNA, 101 bp, Homo sapiens
ggagatccgaaggaatgaaatccggctattgtggacgatgaaaggctctctgcagaggagatggatgagaggaggcggcagaacattgcttatgaatatct

SEQ ID NO: 41081 - DNA, 75 bp, Homo sapiens
catccccacatcaatgcactgccaatgatattttgagaaaactccagccttgtcattcttcttgtaaaacctgca

SEQ ID NO: 41082 - DNA, 49 bp, Homo sapiens
ctcagccaacagagctgtggttgctcctcagtgaccagctcctgctcac

SEQ ID NO: 41083 - DNA, 100 bp, Homo sapiens
catcgtggtggacgtggggggcgagtacgaccctcggagacaccgatatgaccatcaccagagctggtaagcgggcccctcagtgctaccccagttccgt

SEQ ID NO: 41084 - DNA, 90 bp, Homo sapiens
aaatggagagttctacctacgaactggatgttgaatttgttctctcagcacctatttctgaatggaatggcaaacagggacatatttcac

SEQ ID NO: 41085 - DNA, 82 bp, Homo sapiens
cagtgggaacaagactacctcctcctttaccccagaacctcctttacacagtatcagaacatgctacaactgtggtggcctt

SEQ ID NO: 41086 - DNA, 75 bp, Homo sapiens
gtcatgaagggaagatggctgtggaaggtgttttaaagaaagaatcttcaagagggagacatagggaaaaggaag

SEQ ID NO: 41087 - DNA, 88 bp, Homo sapiens
aactttactgagaattttccacctcctgacacaacaccactcagctcctgttccaaagagtgcacttattcctgtaattcccatcacc

SEQ ID NO: 41088 - DNA, 90 bp, Homo sapiens
gtgccgtggcatgtcgatttgtccttcactacagttaattggccttggtcctcacagctccaaaaagaaacaggatctcgataagctcta

SEQ ID NO: 41089 - DNA, 99 bp, Homo sapiens
cgtgaatttgcctcggggacgcctctccagccattgtttgatgtcctgtgactgagaaaccaggctttaaactttatgcctttggagatggagcccaag

SEQ ID NO: 41090 - DNA, 82 bp, Homo sapiens
ccgcggtaatgctggtggtctgcatcaccaccggatcaacttcgacaaatagtgtttcccattaaacactaccaggacaaaa

SEQ ID NO: 41091 - DNA, 82 bp, Homo sapiens
agtgcttctaccagcccatgcccctgaaggcctcgctggagatcgagtaccaatcttccgtgtgtgctaagatcgtgcagct

SEQ ID NO: 41092 - DNA, 50 bp, Homo sapiens
gtcaggccaagaagcatccgagccacttgctctgaaatttggggactgag

SEQ ID NO: 41093 - DNA, 107 bp, Homo sapiens
gccggctgcgtccaccgcagcggcctcgctctttgagtgctcccggatcaaggccttggcaggtgctggagaatctggtaaaagcaccattgtgaagcagatgagga

SEQ ID NO: 41094 - DNA, 82 bp, Homo sapiens
gagcggctctcataaagatctggctggcaagtttccacttgagcggcacagtgacagaacctgcaatacaatcggagccaga

SEQ ID NO: 41095 - DNA, 83 bp, Homo sapiens
gtgaacatctagcacagaaaccagtatttctccccaggtcagaagttgagtagcaggggcctaggagggctcgaagccttcac

SEQ ID NO: 41096 - DNA, 75 bp, Homo sapiens
ctctgggcatcgcagccttctacttgtcccatgaggtactccaaagattcaggtttactcacgtcatccagcaga

SEQ ID NO: 41097 - DNA, 76 bp, Homo sapiens
atcgaatccctaacaggagggctggctggttctaagggggctgatccaccgcctgctcaggaagaactcagagaag

SEQ ID NO: 41098 - DNA, 100 bp, Homo sapiens
aggattccagtatggttttcagtggaaacaaagggcttcacagagaagtttgccagggtttggatacctgatccagaggaagtctggaagtcagcagagc

SEQ ID NO: 41099 - DNA, 90 bp, Homo sapiens
gcacgcagtccgacttggccttcttcaggttcccgcgggaccctgccagacagaaagaatttactttcaggttttcttacctaaagggag

SEQ ID NO: 41100 - DNA, 90 bp, Homo sapiens
tgtttttccactctttatctggatctaaaagctctagaagcaattgaagtttatgcatactccacatcagttccttcttctcagcagtcc

SEQ ID NO: 41101 - DNA, 147 bp, Homo sapiens
aacgggaaagatcactttgtgctcctgtgatctgaaggctgcgtgaagaagatgaggcttggaaaataggtatcatgatattagctggtttgacatcaagtcatttgtgagtcatcagatcttctcctgaaaatgggagacacagta

SEQ ID NO: 41102 - DNA, 101 bp, Homo sapiens
aaaacaacattgctacacatgctaaaagatgacagacttggacaacatgtcccaacattacatcccagaatgaatctgaagtctgctgcagtaaaacacag

SEQ ID NO: 41103 - DNA, 122 bp, Homo sapiens
agattttaggcggtatcaaatggaaagtttttccaaatattcatctgtacagaaaatatttacaccagcagctccagttcataccaataaagaagatcctgctacccaaactaatttgggat

SEQ ID NO: 41104 - DNA, 100 bp, Homo sapiens
tgggcgtcccttcccccaagttatcaaatccaagggcggtgttgtgggcatcaagcaggttcaggagaagtggcacctggtggaggacctgtcgcgactg

SEQ ID NO: 41105 - DNA, 74 bp, Homo sapiens
ttcgtctcttacgtctgcggaagtgcagctgcctcagttcttagcgcagatataaagatgaagcgcagctgtat

SEQ ID NO: 41106 - DNA, 96 bp, Homo sapiens
tccatgggtgggacacagcagcaatttgtgtgtggcaaaggagcagagaactttgacaagttcttcacacgaggacagcccgtcttaacaccacct

SEQ ID NO: 41107 - DNA, 100 bp, Homo sapiens
tggatgtcctggtgttggatgaggcagacagacttctggacatggggtttgaggcaagctttgtctgttcaccagttggctgctcagggagagatgctct

SEQ ID NO: 41108 - DNA, 100 bp, Homo sapiens
tgtggtcgcgtctcggaaaccggtagcgcttgcagcatgagccgacagttagaatcagaaactgggaccacagaggagcacagtctaaataaggaagctc

SEQ ID NO: 41109 - DNA, 82 bp, Homo sapiens
agctctcccggcagcacgaggcgcagctccacgagcacatcaagatgccatggacaatattaccaggcagaaccaattctac

SEQ ID NO: 41110 - DNA, 75 bp, Homo sapiens
ccccagcacacagaagccgagacgacctgtcgcgaaatcgcctttcagaaattcctatagaagcatgtcactttg

SEQ ID NO: 41111 - DNA, 74 bp, Homo sapiens
cggcgatatgatgatcctgaagtacagaaagacatgcaaagcataattgatttgaaggagaaggaaataccaga

SEQ ID NO: 41112 - DNA, 100 bp, Homo sapiens
cccaggcctgctcggccctcacagggtggtctttgggaagaagcttcctgcctttgccaccatccccatccaccagctgcagcatgagaagaaatatgat

SEQ ID NO: 41113 - DNA, 100 bp, Homo sapiens
cagcatcaagatgatttatggtaataaggtaaatgggcttgatactgtgagagtgcctatgtctgtcgtgaactttgagaagcccaagaccaaaagatat

SEQ ID NO: 41114 - DNA, 111 bp, Homo sapiens
ctgaaattgaagaagagctaaaatctctggacaaagaaatttctgaagctgttccatttcctccaagtcaccggcttacagcaaaagaagtgtttgataatgatggaaaac

SEQ ID NO: 41115 - DNA, 82 bp, Homo sapiens
tcttcatggcaaccatataacaatcagtcacactcagatttctcgaatgctggcagccaaaaccgttttggctatccgttat

SEQ ID NO: 41116 - DNA, 75 bp, Homo sapiens
ccggccttcatcgacatcagtgaagaagatcagggctggtgaattaccatatctccgtcaagtgcagtaaccagt

SEQ ID NO: 41117 - DNA, 74 bp, Homo sapiens
ggagcgcctgctggccaaggaatgcaggagtttttcggagctgtacacgctgtcgctgcaggagcctagccggc

SEQ ID NO: 41118 - DNA, 82 bp, Homo sapiens
ctctggcagcagacatcagccacgcatctgaccttgttggtgagccaccagctgggcagcatcatggacctcttcaccacca

SEQ ID NO: 41119 - DNA, 75 bp, Homo sapiens
cacctgcggattttattcctgcgcatgtggcctttgacaaaaaggacactttccttcctcacgtggaatgtggga

SEQ ID NO: 41120 - DNA, 100 bp, Homo sapiens
aggaatggagacacggcttcccccaaggaatatacagtcaccaggagactaaagtccatcaaaaacatccagaaaattaccaagtctatgaaaatggtag

SEQ ID NO: 41121 - DNA, 98 bp, Homo sapiens
gcccaatttcccatttggaagctcggttgcctggtggcgcatgccctagatggagggaggccacggagaagatggtatctatgaagccaccaggtttc

SEQ ID NO: 41122 - DNA, 100 bp, Homo sapiens
ccagattctgcgcaagcaaatggaattgattctgttttgtcaagggctgaaattgcatcttgtagttatgaggccaggtggagccgccaccaaaatgcag

SEQ ID NO: 41123 - DNA, 90 bp, Homo sapiens
gtccgatcgcccaggggaggagcagcaccgggaccccgcgtcggctgggcgccccacaagacacgagacgacttcctgggccaggtggac

SEQ ID NO: 41124 - DNA, 100 bp, Homo sapiens
tgggaacgcccagcagctggatgtccagctgccaattcatcaatttgagaaagtttcttaatgtcacgagcgttcacctgttcaaggagagatgggacac

SEQ ID NO: 41125 - DNA, 101 bp, Homo sapiens
cttcgcgagcgtctgggcgggtggtaggaatcccttggcaccatgtcctgtgtgcattataaattttcctctaaactcaactatgataccgtcacctttga

SEQ ID NO: 41126 - DNA, 50 bp, Homo sapiens
tccggagagtggacaagaaaatggctgtatgggcgaaaaagatgaccgaa

SEQ ID NO: 41127 - DNA, 83 bp, Homo sapiens
ccggaaccagacgatgagacagagttgcgaccgcgcggcagataagatttgtgaccaaatcagtgatgctgtccttgatgccc

SEQ ID NO: 41128 - DNA, 96 bp, Homo sapiens
ctatgtattccctggggatggcgcatcacacaccaaagggggtgagtggtgcactgacagtgcttatgaaggacgcaatcaagcccaatctcatgc

SEQ ID NO: 41129 - DNA, 82 bp, Homo sapiens
ccgtcctctcccgagtttttcatgtgatttgtggagctatgatttcttcagtggtgaatttgtggtgtcacctgaaccagac

SEQ ID NO: 41130 - DNA, 78 bp, Homo sapiens
tcgcgcgcgaccgccgaatcgctcctgcagcagagcaaccagcaggcctttttactggagaacgtcccttgtaataat

SEQ ID NO: 41131 - DNA, 83 bp, Homo sapiens
gagatgaaccatcttcctgcacacagccaaagtctgcaaagattaataaagaactcttcagaattcctggtgtttcatcatat

SEQ ID NO: 41132 - DNA, 75 bp, Homo sapiens
gctccttaccagctcacctctcaccgcgcatgtttggagccaagtgcaagatctgtgaatgggcgtttgaaagtg

SEQ ID NO: 41133 - DNA, 116 bp, Homo sapiens
acaaacagcccgcccgaccccgtcccgaccctggccgccccgagcggagcctggagggggatatgagactttctactcggaatatcctgagtgttgcgtggatgtaaaacccattt

SEQ ID NO: 41134 - DNA, 85 bp, Homo sapiens
gctgcagtctttgtgggacaagacataatgaagcctacacctggaccaaccccacctgctgcgtccacaacgtcatcatcgggaa

SEQ ID NO: 41135 - DNA, 51 bp, Homo sapiens
ggacccactggaagcctagaaatggggaggaacaggaagagaagagtgtgg

SEQ ID NO: 41136 - DNA, 90 bp, Homo sapiens
agagcgaagactgcctatatttaaatatatatgtcccgactgaggatgtggcttttcatggcctgccactgaaaatcaagaaagaacccc

SEQ ID NO: 41137 - DNA, 97 bp, Homo sapiens
ccagcggcagacagaacgggacctgtgtcagtctacaggtgtatccagcagctccaaagagacagcaaccagcaagaatgggccatagtgacgatgg

SEQ ID NO: 41138 - DNA, 82 bp, Homo sapiens
acttcaaggataagggcgacagcaacagctctgccggctggaaggaatcttgtcgattggcctggctgctgcctactacagc

SEQ ID NO: 41139 - DNA, 98 bp, Homo sapiens
ttcaagtttactgcgaagtccacccagcgttccggaggtgagggcgccgcgccaggccgggcggcagaatgccgaactggggaggaggcaagaaatgt

SEQ ID NO: 41140 - DNA, 98 bp, Homo sapiens
agctattcagacacccctgaaatctgccaaaaattggactggctaaggacgatcagctgaaggttcatgggttttaagtgcttgtggctcactgaagc

SEQ ID NO: 41141 - DNA, 100 bp, Homo sapiens
cgacttctggatataataaagcagagctctgtagaactctgtggtgtaaagattgtggtagtagatgaagaggcaagtgaggcctatctggttggccttt

SEQ ID NO: 41142 - DNA, 82 bp, Homo sapiens
aaaaaaggaggccaaagactttgtggagtttgtccatatgctcaatgctaccatgtgcgccactacccgtaccatctgcgcc

SEQ ID NO: 41143 - DNA, 75 bp, Homo sapiens
ggaactctatcccaggaatacagctttgcattaggctctgctgaaaatgaagaaaagtcagaagttcaagcaatc

SEQ ID NO: 41144 - DNA, 100 bp, Homo sapiens
gaggctcttcctcatcatctcagccacgaagtacagccggagatgccctccaaatccttggttatggaatatttggctcatcccagtacactcggcttgg

SEQ ID NO: 41145 - DNA, 74 bp, Homo sapiens
tcgtcgccctcgagatgattatcgtaggaggagtcctccacctcgtcgcagactcagattgatggacaactttt

SEQ ID NO: 41146 - DNA, 127 bp, Homo sapiens
aaagttgcagcgaggagaagcgcagcgacggcgtcgggagagcgcgcctagccggctcgcgacggagattctggagctggctggcaatgcagcgagagacaacaagaagggacgggtcacaccccgg

SEQ ID NO: 41147 - DNA, 100 bp, Homo sapiens
gtaatcaactgggagaatgtaactgaaagatacatggcttgcaaaaagtaaaccacgatcgttatgctgaaggaccttatcatgtccttcactgtatcca

SEQ ID NO: 41148 - DNA, 74 bp, Homo sapiens
agcccccgaaggccctatcaggacatggagtatgaaagacgacaattgtggcaattaataaagacccagaagct

SEQ ID NO: 41149 - DNA, 98 bp, Homo sapiens
tgccatgttgtgggtatcacttaccagcacattgaccgctggctgctggccgagatgctcggggatctgtcggatggcgtcccatgtagagtgccgtc

SEQ ID NO: 41150 - DNA, 50 bp, Homo sapiens
aatgcttcaagtgtgctcttggtggaaaccccaaagccacggagaaaatc

SEQ ID NO: 41151 - DNA, 51 bp, Homo sapiens
tggccacgctgcagagcctcgaacattgatgatggcacctcagatcgcccc

SEQ ID NO: 41152 - DNA, 100 bp, Homo sapiens
cctctacctccggaagagacgagtgcggtaacaccgttcacagagctagccggacgtcctccgactcaagaaatgagccgtcagactgctacagcattac

SEQ ID NO: 41153 - DNA, 100 bp, Homo sapiens
tttcatcttctagaatttcctgaaggaaaaggagtggctgtcaaggtgcgtatagcagcaaaattcatcattcatgcccctcctggagaatttaatgagg

SEQ ID NO: 41154 - DNA, 100 bp, Homo sapiens
cctttgtttacactgagaaaatctcaaatggagaaagtgaagtacagcagttcaaaagaatgctgaaccgggagctgacacacctctcagagatgagccg

SEQ ID NO: 41155 - DNA, 102 bp, Homo sapiens
gagctgttcctattcgggcatcttggctcctccttgagcctcctgggatggatgtcacccgcttactcctggccaccctgctggtcttcctctgcttcttca

SEQ ID NO: 41156 - DNA, 97 bp, Homo sapiens
ggccagccccaggacactcaacctcagccagctcagcttccaccgggttgaccagaaggagatcacccagctcgccttcctgctctacaatgaccaa

SEQ ID NO: 41157 - DNA, 100 bp, Homo sapiens
gaaaagatgccctctgaatctttgtgtttggctgcccaggctcgcctcgactccaaatggttgaaaacagatatacaggaccctgatgctcccataagac

SEQ ID NO: 41158 - DNA, 82 bp, Homo sapiens
attcacttacgccaccgccatcactttcatcacatggatcctcatccagtttgcatttagactggtcgaattgacaaatctt

SEQ ID NO: 41159 - DNA, 90 bp, Homo sapiens
gtgggcggccagagcgccggcaagagctcggtgctggagaacttcgtgggccgggcccgctcaccacgcagtatctgtggcaccgcttca

SEQ ID NO: 41160 - DNA, 83 bp, Homo sapiens
ttcctgtacagcctgcagaactgggatcccaacaagccctcaggattcagaagtgttaaagctcctgtcactaaagtggctgc

SEQ ID NO: 41161 - DNA, 50 bp, Homo sapiens
cggggaggtcacctgacgaggagaggtacttggaaggctccatcgcccct

SEQ ID NO: 41162 - DNA, 98 bp, Homo sapiens
cctggggcagagaggaagcttctagtgtactcttactttgaaaaggagactcctgtgctgaccagaatagaaaaacaaaagcgcaaagaggaggaaga

SEQ ID NO: 41163 - DNA, 78 bp, Homo sapiens
ttaaaaatttggaatgcaaattacttcctaatttacatagtacatgacgaagttaaggataaagcttttgaactagaa

SEQ ID NO: 41164 - DNA, 75 bp, Homo sapiens
ctggggttggacgctgccagtttgcacagcagcaggtcgcaatggaagaagagatcgccgcgctggtcattgaca

SEQ ID NO: 41165 - DNA, 100 bp, Homo sapiens
gagagtcaccgcggcggcgccgggtggtggttaaaccatgttaaggaggattttacagagggcaaagcgaaggctggagctaggagaaagcggtcatcag

SEQ ID NO: 41166 - DNA, 51 bp, Homo sapiens
acaatttgtcatggctactctgaggccttctccacagtaggcactcctgac

SEQ ID NO: 41167 - DNA, 50 bp, Homo sapiens
gccctgggctggaacgaccctggccagccatgtgactgccttcctcccct

SEQ ID NO: 41168 - DNA, 100 bp, Homo sapiens
cctgatgatgtacctctgccagcaggttgggagatggcaaagacatcttctggtcagagatacttcttaaataatggaggggaaagttccagtcgcagcg

SEQ ID NO: 41169 - DNA, 138 bp, Homo sapiens
cgggcccacatcttccggccaacttccattgaacttcccagcactcgaaagggaccgaaatggagagcaaagattgaaggtgcatttattcaaggcatgggactttatacaatagaggaactgaattattctccccag

SEQ ID NO: 41170 - DNA, 99 bp, Homo sapiens
cgtggatccaagatggcgacggcgatggtgctggagaatctggtaaaagcaccattgtgaagcagatgaggatcctgcatgttaatgggtttaatggag

SEQ ID NO: 41171 - DNA, 50 bp, Homo sapiens
ttcatagcattcgcctactccgtgaaggccttttgcaagaaggagaggaa

SEQ ID NO: 41172 - DNA, 100 bp, Homo sapiens
aggtctctggagacatcttcagcagctcagctcacctatgaaccccgtcagcagcagcgaggacatcaagccccccctgggcctcaatggcgtcctcaag

SEQ ID NO: 41173 - DNA, 83 bp, Homo sapiens
ctcgcgctactctctctttctggcctggaggctatccagcatgacgcactctggtgcagggtcaccaagccggtgcctgcggg

SEQ ID NO: 41174 - DNA, 87 bp, Homo sapiens
tgctccgcagcgacatcaccaagctggaggtggacgccatcgtcaacgccggtgctggagaatctggtaaaagcaccattgtgaagc

SEQ ID NO: 41175 - DNA, 50 bp, Homo sapiens
atgaaaggagagcaagaatctcataggttcagttccggaaggtgtcttag

SEQ ID NO: 41176 - DNA, 97 bp, Homo sapiens
tcaggaactcataaatgccacctcaacaattcagagaatcttttagctgaaaaagtagagcagctgatggaatggagttccagacgctcaatcttcc

SEQ ID NO: 41177 - DNA, 87 bp, Homo sapiens
gctgctgcctgtcatcattgactgctggattgacaatatcaggatattcaaatagaagccttgctgatgagagcctgtgagcccata

SEQ ID NO: 41178 - DNA, 100 bp, Homo sapiens
cactgagaagtgtatatcaagccacaatttccatcaaaaagtgattaagcagagaatggagaagaaggttgattccagaaatgaaaattggacatttgac

SEQ ID NO: 41179 - DNA, 82 bp, Homo sapiens
cgcgggacggctctgtaggaaggaacttggttccccctccctcagcttccgccccaaaagatacagaattcgttgttgggaa

SEQ ID NO: 41180 - DNA, 50 bp, Homo sapiens
acggaggagccaggtccctgtctgagccatttcacctgtgattccctgga

SEQ ID NO: 41181 - DNA, 100 bp, Homo sapiens
cctcaccacccctatccagacggctgcccttcaagtaccagcattcctagccgagtgtgacacagtggagcagaacatctgccaggagactgagcggctg

SEQ ID NO: 41182 - DNA, 100 bp, Homo sapiens
ttgccttatgtataaaatgtcatactacagatttggagaaatgcagggtgccgacccccacatcctggcaaaagagcgagagagcgccctgtcgctggcc

SEQ ID NO: 41183 - DNA, 100 bp, Homo sapiens
ctcagccccgccgaccggccggccagggcagggggcagctaggacggccccgggctgggtccgatacgccgagcgggtgctgggtcgccccatcactgcc

SEQ ID NO: 41184 - DNA, 100 bp, Homo sapiens
cccaaatcattcaagaggaagatctccgttgtctccaccttttgtggtgacattggatgaggtagagctgatccactttgagcgggtccagtttcacctg

SEQ ID NO: 41185 - DNA, 100 bp, Homo sapiens
gaattatttcgtgatatccaagaacaagcactgcagaatgcaaggccagaaactgtcactaatgacgatgaagaagccttggatgaagaaacaaagagga

SEQ ID NO: 41186 - DNA, 50 bp, Homo sapiens
gtcttctgatagcaactttaatgtgcatttctggattaaaagtggtgggg

SEQ ID NO: 41187 - DNA, 100 bp, Homo sapiens
ttgtcaaggtggcctaccaggaggccaggggtgtcgccatgtgtggcaaaggagcagagaactttgacaagttcttcacacgaggacagcccgtcttaac

SEQ ID NO: 41188 - DNA, 96 bp, Homo sapiens
acaagcgcgacgcccggcgcgagctcaagctgctgctgctcgtgcaccgtccaggtgaggttagagctggggcatcgcgcccaactgcgcaagaag

SEQ ID NO: 41189 - DNA, 90 bp, Homo sapiens
gctcgcgctactctctctttctggcctggaggctatccagcaatggatgatgaacttgttgttggacatagtgcaagatcagacatctcc

SEQ ID NO: 41190 - DNA, 80 bp, Homo sapiens
aaacaaacagtttaaatggaactattctttacatatacgctcaacggcaagaaagtggaagttgccgtcaaacagatcat

SEQ ID NO: 41191 - DNA, 50 bp, Homo sapiens
cttcaacagcgaggtggacgagaaagtgacaatgcagatcttcgtgaaga

SEQ ID NO: 41192 - DNA, 80 bp, Homo sapiens
cgcggaggggcgggggaggcgccgggaagtcgacggcgccggcggctcctgacaccattcgcttttcacccaagatgatt

SEQ ID NO: 41193 - DNA, 74 bp, Homo sapiens
ttccgcgccgggcgtggacggtgtggggcggtcccggccccgcaggaagctcttcgtgggcggtcttgactgga

SEQ ID NO: 41194 - DNA, 98 bp, Homo sapiens
gcggcacctacggtcacgtctacaaggcgaggcggaaagatggagtttgctctccaaagctcggggaattgattccagctctgttaaactccggggta

SEQ ID NO: 41195 - DNA, 95 bp, Homo sapiens
gggatgtgagcgctgagcccttggcagaaattccgggtagatatgcctggctcaggcagtgcattcatccccaccatcaacgccatcacgaccag

SEQ ID NO: 41196 - DNA, 100 bp, Homo sapiens
tgacgatatggacctacagcccaataagcagaaagaccaacatgcaggtgccagacaagcagagcctgtgtggtgcccctatctccttgttccaagggcc

SEQ ID NO: 41197 - DNA, 100 bp, Homo sapiens
gccaggtgcccagggctgcttccacgacgtgggtcccctgccagatttgtgggacagagcagaatgggctgatatagatccggtgccgcagaatgatggc

SEQ ID NO: 41198 - DNA, 99 bp, Homo sapiens
cctacttctataaagtcatccagatcttatgccttcattcatccggcatggtccaacaattccaagacgaactgatatctgtcttccagattcaagccc

SEQ ID NO: 41199 - DNA, 75 bp, Homo sapiens
gagctccccaggggagttctctgtgtctgtgaagcaaaacaacgagtggatgagaaacccagcctgggagccgtg

SEQ ID NO: 41200 - DNA, 100 bp, Homo sapiens
cctgggcgctggggctcctgctctttctccttcctgggagcctgggcgcagcaattaccagctctggctgggtcgccacaacttgtttgacgacgaaaac

SEQ ID NO: 41201 - DNA, 100 bp, Homo sapiens
gcgccccagggcaagccccgctccggccaacaatataaaagaacgtgtggatcactttgctgagtacatccaagatttgaagaactgaaataaatcagct

SEQ ID NO: 41202 - DNA, 100 bp, Homo sapiens
agagtccacaaagggacctgatgaagcgaagatcaagtgaccccaggcatgaagatctacatcgatcctttcacctacgaggaccccaacgaggcagtgc

SEQ ID NO: 41203 - DNA, 100 bp, Homo sapiens
ctggactctgcaacacctgtcaactccatctgcagtgttcaagctttggcagcatgtaagcagctgtttgccaagaacccaggtcactgctaagaaaggg

SEQ ID NO: 41204 - DNA, 48 bp, Homo sapiens
ccaactctttgatgatgcatccagggtgtacaactatgagcctttgac

SEQ ID NO: 41205 - DNA, 85 bp, Homo sapiens
gggaagtgaactctttgtcatttccccgatcctcggggagcttccggagcactgtgcctacatcatcatctacgggatgcccacc

SEQ ID NO: 41206 - DNA, 100 bp, Homo sapiens
acatttctcctttcactgctgtcaatgacctgggacatctgcttgggagagctggctttaatactctgactgtgcttaatcttctccatacagagctggc

SEQ ID NO: 41207 - DNA, 88 bp, Homo sapiens
gtctccgcaggtcagctccgccgaaggcgccgccaaggaagagattggtgaaagacaacaagtgttagtaacagaagaatcttttgat

SEQ ID NO: 41208 - DNA, 100 bp, Homo sapiens
tatggctggacagctagctgcttatggctataaaattacagtgctgggcctaaaggagataacatttatgaatggagatcaactatacttggtccaccgg

SEQ ID NO: 41209 - DNA, 90 bp, Homo sapiens
tgggtgctgctgttctgggtgcctgtgcctcaggggatttcgcttctgtacagagttcaccgaacagcagaaagaatttcaagctactgc

SEQ ID NO: 41210 - DNA, 101 bp, Homo sapiens
ttggaacttagtgttatgccaaaagatgaagacattctccaagtgatctttcatttgcaggccggatgtcgtggctcataactgtaatcccagcattttgg

SEQ ID NO: 41211 - DNA, 100 bp, Homo sapiens
acccacctggtacatcgcctcagggcattcatttcaggctccttctaaatggccaaggttcagtaccttgaaatagttccagaaaccagaaggtaccctg

SEQ ID NO: 41212 - DNA, 100 bp, Homo sapiens
ccatgaccactgtggagaacaaatccaagattagcacagtgttttccaagcagtgaagcacttgccgtgttgaactgaatgcactactggagaatgttct

SEQ ID NO: 41213 - DNA, 90 bp, Homo sapiens
aacgatggcattttgaaaacagcaaagataacccaacagcttgagggaatctgcttacaggtcattggtactgttttacaacagcatgtc

SEQ ID NO: 41214 - DNA, 100 bp, Homo sapiens
ctggaactggacgaccaggacacgtgcgggatagacggggacaatgaggaggagacggagcacgccaaagggcaccgaccgtcacgagctaacttcctgg

SEQ ID NO: 41215 - DNA, 99 bp, Homo sapiens
ctatgacatcagctatggggaaaggaacagttgctgttcaagaaaaagcaggcatcagcaggactcagacctctcagcagcgtgctctgacgctgacct

SEQ ID NO: 41216 - DNA, 75 bp, Homo sapiens
tttggaacagcagtggcaagatctcatgtccatcatggaaatgcaggcccaggctgaagcccagagggaacatga

SEQ ID NO: 41217 - DNA, 127 bp, Homo sapiens
tgaataaaactgaccatagccagagaacagccctccatcttgcagcccagaagaatcatttgctgtttcaaatagagaactgtgcgatgatgagaaagagttcatacattttccagtatgtgagggg

SEQ ID NO: 41218 - DNA, 87 bp, Homo sapiens
agctcctaactttgcccaatggagagcgcctcagtcttccacccaatcaaaagcggcgccaggaaattgaacaaaaacttgaagttc

SEQ ID NO: 41219 - DNA, 101 bp, Homo sapiens
actcgagggaggttcatgacaactgaggaaaaagccaaagtgggaccagggtctgagaaagaaccccagtttaagtttatctacttcaaccacatgaatct

SEQ ID NO: 41220 - DNA, 110 bp, Homo sapiens
agttaaagctgatacattcctgtgggtcaactatgcaactaactcagattttgaggtggaaccgtcccaaaatgtcccttgctcagaagaaggatcgggtagctcaaaag

SEQ ID NO: 41221 - DNA, 50 bp, Homo sapiens
ggactctgccgacaccggagagagacaggggcaagtgtccgagtggtgaa

SEQ ID NO: 41222 - DNA, 74 bp, Homo sapiens
ctgtctccttagctgctcacatatggatactttcacagttcagggccaattcctgtccccccagcagcatggca

SEQ ID NO: 41223 - DNA, 83 bp, Homo sapiens
ctggcatctgtaaggtgcggccgccgccggtgagaagccctaccactgcaactgggacggctgcggctggaagtttgcgcgct

SEQ ID NO: 41224 - DNA, 87 bp, Homo sapiens
atactactgaaagtgcaatatttgagtatcactgcgaggatcactactcttggaatcaaagataaatccaaatactgcatatcagaa

SEQ ID NO: 41225 - DNA, 112 bp, Homo sapiens
cactgctggccgccgattctacgccgcccggtcgccagggagagtgaatacagctagggacgtgaaagatgccaggatagaagaatttgtttatgagaaactggatagaaaa

SEQ ID NO: 41226 - DNA, 95 bp, Homo sapiens
tcgcctgagctccgggggtcgtcgccccgcaggaatcctgctgcatcacagaagctggaagttctgatgttccactgaaatcacaatggaaagtc

SEQ ID NO: 41227 - DNA, 95 bp, Homo sapiens
cttgactccatcgggcgcttctttggcggtgacaggggtgcgcccaagcggggctctggcaaggttgtgtgtcgcagccctgtcggtgaataact

SEQ ID NO: 41228 - DNA, 100 bp, Homo sapiens
ctgaaacagctctccaacctctgtcgcttttgtgatgacatcctgagcagttattttaggcttagtcttggaggttatggaggttttgatgactatggtg

SEQ ID NO: 41229 - DNA, 100 bp, Homo sapiens
caaagacaagacgcaggagaaaatcgagacctcaagtaatcattcccaagactacaaagctgatgaagacccagcattattccagtcagtcaagaccaag

SEQ ID NO: 41230 - DNA, 100 bp, Homo sapiens
attctgattctgatgatgatgatgaagagcatggagcccctctggaagggggactttctcattgttgaccccattgaagagggagaaaaggtgaaggctg

SEQ ID NO: 41231 - DNA, 75 bp, Homo sapiens
tcttccaggctgcatgtccccctcaatatcctggtaagggactgttctgaagaacctttccatttagtgatcaag

SEQ ID NO: 41232 - DNA, 90 bp, Homo sapiens
ggcatgtgtaagttaagttcctgcggacgctcctcttgaagaaacttttgcagccctcgcaggccaggtcagagcagcccaccatgggat

SEQ ID NO: 41233 - DNA, 100 bp, Homo sapiens
ggccctctgcgacctggggccctgggtgaagtgctccgtcgcccttgcctccaggtcgcctggtcggcgctctggatgcagtgttggattccaatgcacg

SEQ ID NO: 41234 - DNA, 97 bp, Homo sapiens
atgatgttcagtgctaccttgagcaaagagatccgtccagtctgccgcaagttcatgcaagataattatatccagatcgagagacagaagattctga

SEQ ID NO: 41235 - DNA, 101 bp, Homo sapiens
ccgaccagaactgggccatccgcgccatcgagaccctctcggtctcacagaaagttctccgctcccagacatgggtccctcggcttcctgcctcggaagcg

SEQ ID NO: 41236 - DNA, 100 bp, Homo sapiens
cagaaatcgagagaggcttcagttttttaagaaattggagatattgctggtgttgctgatgttacaatcagacagtcctatagactgatctatcctcgag

SEQ ID NO: 41237 - DNA, 101 bp, Homo sapiens
caagccaatcccaggaggaaaaacggcctccggtgtggctgtctctgatggtgtcatcaaggtgttcaacgacatgaaggtgcgtaagtcttcaacgccag

SEQ ID NO: 41238 - DNA, 74 bp, Homo sapiens
cggtcgggcggggcggcggcgctgacagacaagttggatggcttgaggactggtactaaaaggaaacgtgactg

SEQ ID NO: 41239 - DNA, 100 bp, Homo sapiens
cagatcccagacctttggggagaaggagcaaccgcctctggcacagcccatcagggagaaagagcagctctggattaatcgaattacagctgctagccag

SEQ ID NO: 41240 - DNA, 83 bp, Homo sapiens
gctgaatttccttctgcctgctgcccgatttctatttgactggcaatagtctgatttgtcccatcagatgaaaagaagaaaca

SEQ ID NO: 41241 - DNA, 50 bp, Homo sapiens
caagaacgaggaggacgcggggcaatactgaacactgcgcagcttgcaga

SEQ ID NO: 41242 - DNA, 100 bp, Homo sapiens
aaaatgacttcccattatgtgattgccatctttgccctgatgagctcctgtttagccactgcagcttggttctacagccattgggatccagacatcagag

SEQ ID NO: 41243 - DNA, 82 bp, Homo sapiens
atcagtgagctgtccctgctggaggagcgcttccgggctggacggcagtctggaaacgaccaatgagatcttggactctgcc

SEQ ID NO: 41244 - DNA, 83 bp, Homo sapiens
gagaccatggagacatgaccaacaggaagttccgccatgacaaaagggtttacttgggacctactgctcgccgcaagccagat

SEQ ID NO: 41245 - DNA, 100 bp, Homo sapiens
cagtatactcgccttgctgtgcagagaggtggcaccttccagatggggggtagcagcagccataacagttccggaaccccaaggcatccttgcgtgtgcg

SEQ ID NO: 41246 - DNA, 75 bp, Homo sapiens
gctgcgtgaccccgacggctgcttctgggtattttgaaggtggcgtctcatctgtctacctctgggatctggatc

SEQ ID NO: 41247 - DNA, 74 bp, Homo sapiens
cacttcattggccacctacagaaacaaaatgtcaacaaattgatggcgggtccatatggaatatttgctggtag

SEQ ID NO: 41248 - DNA, 100 bp, Homo sapiens
gtccttctttgtggagagcaaggtgacccatgggctgagggcatacgatggcttgtctctgcctgaggacatagagaccgtcacagcaagccaaatgcgc

SEQ ID NO: 41249 - DNA, 75 bp, Homo sapiens
cgatgacaatgagtatgcctacctcaaagccatcatcttctttgacccagaatgtatgacaacatgtccacaatg

SEQ ID NO: 41250 - DNA, 78 bp, Homo sapiens
ctggccacttgcttgggatcctttatcctggtcatcttctatttccaaacacgtcagctaactgttcagatgatgcaa

SEQ ID NO: 41251 - DNA, 90 bp, Homo sapiens
ggattgtgcgatgctgcggccacaggaaagacagtggttcctgactcaggaagacagtctcagaaacatgtggaatgatattgagctgct

SEQ ID NO: 41252 - DNA, 107 bp, Homo sapiens
tatcggaaactggtcgccaaggacgggtcgtgcctgttccgggccgtggcggagcaggtgctgactgggttacttttttaaacactaggaatggtaatttctactct

SEQ ID NO: 41253 - DNA, 50 bp, Homo sapiens
caactgttgaactcagctgcctgtagatgccttattggaggaactggaac

SEQ ID NO: 41254 - DNA, 98 bp, Homo sapiens
atgcagtgtggctctggatagcaccttatggacaggtctcctttacagaaaggggcttggataaggaggaaagaccatcagaagaaaagataagacac

SEQ ID NO: 41255 - DNA, 82 bp, Homo sapiens
gagaccgtcacgccctcagaggccccggtgctggcagctgagcccgaggctgacaagttcaaggagcagggacaagttacag

SEQ ID NO: 41256 - DNA, 100 bp, Homo sapiens
atttcccccttgctttggatcttggttgtggaagaggttacattgcacaatatttgaataagtttcggagcaacatcccctgtcacctggttgatatctc

SEQ ID NO: 41257 - DNA, 99 bp, Homo sapiens
tcgccttcagccctgtctggtgcatccttggcagaaagtgaggaggaaaacacccccattgttaccttttcgacaaaatgattcatctagtcattgcca

SEQ ID NO: 41258 - DNA, 75 bp, Homo sapiens
gccacaatgtgcctttgcaggggagcctgagagccacagggaagaaggagaaagggccaacccctgaagaagcaa

SEQ ID NO: 41259 - DNA, 75 bp, Homo sapiens
gcttaatgtgaaaatttatctgcacatacagaaccagtccataatacagcctgtggccgtgggttctacaagtct

SEQ ID NO: 41260 - DNA, 100 bp, Homo sapiens
cctcaggctccttcctactgtccgagggccaccaggccgccgggggcctgctgcgcccggatgctgaagttccgaacagtccatgggggcctgaggctcc

SEQ ID NO: 41261 - DNA, 100 bp, Homo sapiens
gagcgcaggcctcgtgccgttacggccatcacggcggccgcagtggcgtcctggagccctcctcagcgtcgagggcgaggcccccagcagtgagactggc

SEQ ID NO: 41262 - DNA, 100 bp, Homo sapiens
acaaatatgctgcaagatttggggaatctatagttaatcttggcgacattgacaatgatggctttgaaggttaatttggagtggcccctggagtcagttt

SEQ ID NO: 41263 - DNA, 82 bp, Homo sapiens
gagacgtcgggcccagggggaacaggcacgagctgaactcttgaaatcatgagtggaggatctcaagtccacattttttggg

SEQ ID NO: 41264 - DNA, 74 bp, Homo sapiens
tttcagaggtattctagaagaagaaattatgcaccttggtgtggagtcaaaagtacacatgctggatcaaaata

SEQ ID NO: 41265 - DNA, 74 bp, Homo sapiens
gatccatcgagatgacaggtccacagatcgcctgccttcagctcacacatggtgaatctcatgggcaccttcaa

SEQ ID NO: 41266 - DNA, 100 bp, Homo sapiens
gtccagcggctgattgagcagatccacccgtcgaaggatgagaatgtctccaggtcctgacctggccttcctgacttcctgtcctgacaagaacaaagtc

SEQ ID NO: 41267 - DNA, 100 bp, Homo sapiens
tatgatttcccccactgccaaggagcattgtccgtgatgccagccgtgcacaccttctctctctttgcgggattggcagtcttcattgactttcttctgc

SEQ ID NO: 41268 - DNA, 89 bp, Homo sapiens
cgacgacgtgctgttcgaggatgtgtacgagctgtgcgaggtgatcggaaaaggcgtagaggctccggtgttttttgtgccaattgcct

SEQ ID NO: 41269 - DNA, 90 bp, Homo sapiens
ctcagccccatggggtatatccaccctcaagtgtggcatctaataggattcaggaatcaaagaatcagtgtactcaggtggtacaggaaa

SEQ ID NO: 41270 - DNA, 90 bp, Homo sapiens
cttcaaggtcaagatggtggacgagcttaagagagcagggagaagaggatgatgagcatgccaggcccctggccgagtccctgctcctgg

SEQ ID NO: 41271 - DNA, 83 bp, Homo sapiens
gagcagcccatcgtgcttaaagaagggtcctcagccctcgctctcgctggcggagcagcacctggagtcgcccgtgcccagcg

SEQ ID NO: 41272 - DNA, 75 bp, Homo sapiens
gttgatttctccaaggatctgctgaaatttttcagttatgggacaaaaatattatatcaaaacactgaagctttg

SEQ ID NO: 41273 - DNA, 82 bp, Homo sapiens
tcttcagatcttcacagcacagttcctgggaaggtggagccaccagcctctccctggccctgggaggagcggggacactgag

SEQ ID NO: 41274 - DNA, 50 bp, Homo sapiens
cgcggcatgggcggcgctggccgagaacccagcgggtgccgcttctccac

SEQ ID NO: 41275 - DNA, 156 bp, Homo sapiens
ggagaccctctgcctggcaaccaccccgtctgagaagtgaggagcccctccgcccggcagctgccccgtctgagaactcattctcaatgcaagatcctccgctgcaatgctgagtacgtatcgtccactctgagccttagaggtgggggttcatca

SEQ ID NO: 41276 - DNA, 75 bp, Homo sapiens
aagaagatggtggataagcccacccagaaaagttgccagacggccagcattgccactgccagtgcatccgcccag

SEQ ID NO: 41277 - DNA, 100 bp, Homo sapiens
catagtagatggagtgagctatgctgcagaggttgctccttgagggcaggacagttcttatggctttatccgttgcgtaagcacagagaggtctgcgagg

SEQ ID NO: 41278 - DNA, 100 bp, Homo sapiens
ttccggctcttcccctctgtgcagtgggaccgaggctcaggccgggtgtccgcaatgttgccagtgtctgtctgcagattggctacccaactgttgcatc

SEQ ID NO: 41279 - DNA, 90 bp, Homo sapiens
ggccaacacaattcttttcttccgcttggatattcgcatgggcctactttacatcacactctgcataggaacgatggcactgaatttgga

SEQ ID NO: 41280 - DNA, 98 bp, Homo sapiens
aaatgaaaagatgggaacagcagaaaatcaaaacaagctctttatgagaatggcatctaaggtggttcccctctctcagcgaagtggtgttcttgaat

SEQ ID NO: 41281 - DNA, 50 bp, Homo sapiens
ttcagacccatttccagtcatgacaattctgtggtgttcttggtcacaca

SEQ ID NO: 41282 - DNA, 74 bp, Homo sapiens
gcgctactctctctttctggcctggaggctatccagcctgctctgttaaaagcgaaaatgaaacaattgcctgc

SEQ ID NO: 41283 - DNA, 74 bp, Homo sapiens
gtgctttttatttttccccaattcagcagagaatattttcaaggggggtcaaaatgcagatcttcgtgaaaacc

SEQ ID NO: 41284 - DNA, 75 bp, Homo sapiens
tcggatacgatagaaaatgtaaaggccaagatccaggataaggaagagcccatggatttcagaaaattatctaca

SEQ ID NO: 41285 - DNA, 96 bp, Homo sapiens
ggtggcggcggcgggaagatttgtcgccgtgatcctgaaggcgctgacctacgacgagaagcggggtgcctgcagcgtgggcaccaacgtcaggga

SEQ ID NO: 41286 - DNA, 75 bp, Homo sapiens
aaggagattccaacctacttcaggaggaccaacgacaactttatgcaatggcaaataccctggaagatggtggca

SEQ ID NO: 41287 - DNA, 76 bp, Homo sapiens
ctctagccagctaggttcctggtgctttggggggcatgaaaatcaacatggacaagaatcggaggcgaaagccagc

SEQ ID NO: 41288 - DNA, 78 bp, Homo sapiens
gaaaaactctaaacgggattacactggaacatacaacctcctcttcagtgtcaaaaaagccacggttagaccagattc

SEQ ID NO: 41289 - DNA, 88 bp, Homo sapiens
ttcttcagaaagtgaacttggcattttagatctaattcaaagatcctgaactttcaactgtttgccggaagtctggtacattaatatt

SEQ ID NO: 41290 - DNA, 97 bp, Homo sapiens
tcactctgcatggttgaccgttctggaagagctcgtccgcatggtgctgaatggctgaggaccttcccagtctccccagagtccgtgcctttccctg

SEQ ID NO: 41291 - DNA, 90 bp, Homo sapiens
gcgaatcctaaagcgtttcctcgcttgcattcagctcctctgtgtttgccgcctggttttatgtgctgaaagagttggccagatgactaa

SEQ ID NO: 41292 - DNA, 50 bp, Homo sapiens
tcatactgcctctggatgttagtacgctctttcaccatgcctggatcact

SEQ ID NO: 41293 - DNA, 100 bp, Homo sapiens
gcttttgctacgacctcattttctgctggaactgcggtcttgcgagtggctggttccctgcagaagagcacagaagtgatgaaggccatgcaaagtcttg

SEQ ID NO: 41294 - DNA, 75 bp, Homo sapiens
attaacggagatgatgccgaaaacgcaaggccgaagccaaagccagctcaaactggaggattataaggatcgcct

SEQ ID NO: 41295 - DNA, 100 bp, Homo sapiens
tgcggaggaattcactcggctggagcctgtctactcaccccctggcagccccccacctggggacccccgaatctttcagtggagatggggtttcaccatg

SEQ ID NO: 41296 - DNA, 82 bp, Homo sapiens
ccgcctctttgagaggtctcgcattaaggctctggcagtactacgagatgtcctacggcttgaacatcgagatgcacaaaca

SEQ ID NO: 41297 - DNA, 97 bp, Homo sapiens
tttgcaaaagtaaaattggcaagacatatccttacaggcagagaggacattaaattgtatgattggacagatgaagcatattttggctgcagaacag

SEQ ID NO: 41298 - DNA, 98 bp, Homo sapiens
cgaagcctagctgcccgtactgctgctgtgctgttggcagcaaggaccgctcgctttctgtctggcttcccgtggaggatgacattgacctcagtgat

SEQ ID NO: 41299 - DNA, 83 bp, Homo sapiens
ctgtgatgctcgggagggagactgttgttcccggagatgcggcgcgcaggtccacctaatcatcctgtgaaagtggtttctct

SEQ ID NO: 41300 - DNA, 100 bp, Homo sapiens
attcagttctacccaagcaaatttgtccttatcaccgacatacttgatacatttgtatcaaatcatgggtggataagatgcaagaagaccttgtcacact

SEQ ID NO: 41301 - DNA, 87 bp, Homo sapiens
atcgttctcctgacccacctgctggtgtcagcccaggcgtcgaccagaagattatgatattcataacagcagaaagaaaccaaggat

SEQ ID NO: 41302 - DNA, 128 bp, Homo sapiens
caactgagagaaattacggggattaatgacacccagatactacagcaagccttgaaggcaagaaataccgcccacgaatggatcaggaagtctctgaccaagccattagcagagaatgaagaaggaga

SEQ ID NO: 41303 - DNA, 98 bp, Homo sapiens
gcgcggaggcggaggcttgggttaaaagttgcaaaggtcgctgtttcgagagaacatttgggaactgtcgctgtgatgctgcctgtgttgagcttgga

SEQ ID NO: 41304 - DNA, 75 bp, Homo sapiens
tgcctcggcggagcagaggaaccacacgctgatcatgggtatttgaagtataccatacaactgttttgaaaatcc

SEQ ID NO: 41305 - DNA, 74 bp, Homo sapiens
ccagataaccacgcacattacactgaagcagatgacgatgactttgagtctaacaaagtgccagtggtgcagca

SEQ ID NO: 41306 - DNA, 100 bp, Homo sapiens
actgtaataggcatacacaagtgtgcattaatgggttaagggaagaaagtcggaggctggctttggctgcgaaaagagaaaaaagaaaagagaagagaag

SEQ ID NO: 41307 - DNA, 74 bp, Homo sapiens
aatgtgccagtgatattttccaggagagaagaccaagaggtcggagaagaggtagaaaatgtggcagaggccat

SEQ ID NO: 41308 - DNA, 83 bp, Homo sapiens
tgataagattgaatgccaagcagaaaattacctaaatgcactctttcgaaagaaagtgggaagtaccttctgtctatagtggt

SEQ ID NO: 41309 - DNA, 100 bp, Homo sapiens
ccccgtcgtcctggtgctgcagcggtggggtaaaaccttgtgcattaaactgcttggctgaaggttataatttctacactgaacgtgctcctgcggtgat

SEQ ID NO: 41310 - DNA, 50 bp, Homo sapiens
tgagccaaatctctaccattgcagtacgtagagaaatcgacactcttaat

SEQ ID NO: 41311 - DNA, 74 bp, Homo sapiens
acagaggctgttccctatggcagataatcacatttttgcctggggcaatggtggtaatggccgcctggcaatga

SEQ ID NO: 41312 - DNA, 100 bp, Homo sapiens
aggcaccgggatcgtgaccgagaccgtgaccgagagcgtgaccgagagcgcgaatatcgtcatcgttagaaggtgaccttgaggaaccctgggagctcag

SEQ ID NO: 41313 - DNA, 100 bp, Homo sapiens
ataatatggggctgaacagctgcaggaatgaaaagagatacaatcttgcttgaccgtttgggacatcaatcttccacatgaagtgcaaaatttagaaaaa

SEQ ID NO: 41314 - DNA, 100 bp, Homo sapiens
acgctccctgtctgggaccttctccctgcctggacccctactattgcaacaaggaaaatcagaggctccttaaaaatatgttcaaaatcggtgatttttg

SEQ ID NO: 41315 - DNA, 101 bp, Homo sapiens
ccgggtgtcggctccggcgggacgggcggttctgcgtacccctctccagagcccgagcccagcacattgtgccctgtactatatctcagctgctttctgcc

SEQ ID NO: 41316 - DNA, 50 bp, Homo sapiens
taaccctcaaactgcccagtgaggtttctctacagtgagttaatgaaata

SEQ ID NO: 41317 - DNA, 101 bp, Homo sapiens
cagccaataaggtggaaattgagaaaattcgggatattggtgctggaaaaggcaaatactatgctgtcaattttccaatgagagatggtatagatgatgag

SEQ ID NO: 41318 - DNA, 101 bp, Homo sapiens
agtggaaggccctctttaacaaaaacaagtgttcatagtcggttggggattatttataatcctacatcaaaaataaatgaagagaacacagctatttctag

SEQ ID NO: 41319 - DNA, 83 bp, Homo sapiens
cagacaaccgccccctaaagaaactggaggcccaagatctgtgatattgccattaactgggctggtggtctgcaccatgccaa

SEQ ID NO: 41320 - DNA, 108 bp, Homo sapiens
ggcgtgccccaccatgtcagacgcagccgtagacaccagctccgaaatcaccaccaagcaaattgtggctactaatttgccccctgaagatcaagatggctctgggga

SEQ ID NO: 41321 - DNA, 82 bp, Homo sapiens
cccactttctcggcgccgcggctcttttctaaaagtgtctcggacagcccgggagacgagccctcggagtccccatacgaaa

SEQ ID NO: 41322 - DNA, 75 bp, Homo sapiens
gcatgggccccatctggtccagttactatggaaactgccgttctctcctgcttgctggagtggctgcccgacgtt

SEQ ID NO: 41323 - DNA, 100 bp, Homo sapiens
cccccgggactcccagggctccagggccctcctccggccccaggcctaccccagtcacggacggccgaatacatcaagcaatggtaacatctttaaatga

SEQ ID NO: 41324 - DNA, 107 bp, Homo sapiens
gatggccccaggtgtaagcgcagaaagcaggcgaacccgcggcgcaataacgggatgtttcagcagcccctgagaaggaagaggaggaagctgagggcccgctgagg

SEQ ID NO: 41325 - DNA, 90 bp, Homo sapiens
cgtcagcggctccctgcccttcgacgggcacaacctcaagaaagatccccagcaggccctcaaggagctggctaagatgtgtatcctggc

SEQ ID NO: 41326 - DNA, 82 bp, Homo sapiens
agccctcacctttgccaggaactggggggccgactatatcctggtggtcgagatatccagtctgacggagcacttgctgacg

SEQ ID NO: 41327 - DNA, 84 bp, Homo sapiens
tttcgcggagaaaaggctgacatgcccgtcctatatgacaggtactccaaagattcaggtttactcacgtcatccagcagagaa

SEQ ID NO: 41328 - DNA, 133 bp, Homo sapiens
ctgccagctgctgtggcggccccggcctcccacactcctgagccaggaacagatcaaggccctgctgctcctgggggccgccgccctggcctgcctcgccctggacctcctcttcctgctcttctactccttc

SEQ ID NO: 41329 - DNA, 75 bp, Homo sapiens
actccaagccaaaatcacagctttgagtgagaaacagaatgccgggacattctgcttcctgtcatcaccaaagag

SEQ ID NO: 41330 - DNA, 100 bp, Homo sapiens
gtgcgctcgatccagcaccatggggaagcgggacaatcgggtgggaagccatcagccgcgtctgtgaagctgtgcctggtgcgaagggagccttcaagaa

SEQ ID NO: 41331 - DNA, 96 bp, Homo sapiens
caaaaccgagtcaacagggaagcagaggagaaccgggagccattcagaaaaggatatcccagaagctcctgagagactgatgacagacaccattaa

SEQ ID NO: 41332 - DNA, 90 bp, Homo sapiens
atacgaaattgtcacctatgggaaaattccctacccagcagtgtttggccagcgcttggatgagactgtggcctatgaacagaaattcgg

SEQ ID NO: 41333 - DNA, 100 bp, Homo sapiens
ttttaccacggcacggtgagggagacagaactgtccagcgtcacgctcagcacttgccgaggaattagaattgctggaatccacaaataccaaactatgg

SEQ ID NO: 41334 - DNA, 85 bp, Homo sapiens
gacatctgggctgcgtgctgtgttgtcacaaaggaaattggccttgcctctctgggtgcacctgatgaatacattgaaaagctcg

SEQ ID NO: 41335 - DNA, 51 bp, Homo sapiens
ccattgctccacaggttggcaatgaatgtgtctgtgaaaactacaagctgg

SEQ ID NO: 41336 - DNA, 75 bp, Homo sapiens
agatggatgctcacccgaaggctgattactttggtttaagaattgtttaagctgcatcaatggagcacatacagg

SEQ ID NO: 41337 - DNA, 100 bp, Homo sapiens
atcttcgaggattcggatgactcggagcccgggggcccccctgctcctcggcgtcggaccccccgagaaaatggacacatgacggaagtgtgtatttttg

SEQ ID NO: 41338 - DNA, 101 bp, Homo sapiens
aagttttgaaattagagacgcagacaggtgctggagaatctggtaaaagcaccattgtgaagcagatgaggatcctgcatgttaatgggtttaatggagag

SEQ ID NO: 41339 - DNA, 82 bp, Homo sapiens
cagaaacaacacagctaatgatactgcagggctccacccaggactcggccatcaaggacttcgtgctgaagtacgccctgcc

SEQ ID NO: 41340 - DNA, 95 bp, Homo sapiens
acgtcctcgaacgcgaggccaacagccccgaataagaaagccttgagttttgtgaaaaaccggagaagagaaactaaaaggacagtagaaaaggc

SEQ ID NO: 41341 - DNA, 90 bp, Homo sapiens
agcggcctggcccagcgcgtgtgcatccagcgcaagcccctcagtcccttttagatccccagaggtctttctgaattggacaaaacctac

SEQ ID NO: 41342 - DNA, 82 bp, Homo sapiens
ccgctcctaagcctgcacagccgcggcggcagcagcagtgagaggggcctagaagacagttcccaggaggccgaggacgagg

SEQ ID NO: 41343 - DNA, 82 bp, Homo sapiens
ctgagagaaacccactgaagacgtctgcgtgagaatagagaccaccgaggggccaaaccagtgctcctgccacctctctggc

SEQ ID NO: 41344 - DNA, 100 bp, Homo sapiens
ctgttcccataaggagtacatgaagggacttgggatatttaattggataatagaagattgaaggggcgtctatgggccaaaagcatatgtagcaactcaa

SEQ ID NO: 41345 - DNA, 75 bp, Homo sapiens
tgtgagggctgccccctgcaaagcctgcacaagctctgtgagaggatagagggggtgataatgagaagcaatgga

SEQ ID NO: 41346 - DNA, 98 bp, Homo sapiens
ttcaaggttgggcattgggtggaggagcagaatttactacagcatgtgatttcaggaatcaactcaattacatcacagaagaacttagaaacccttac

SEQ ID NO: 41347 - DNA, 50 bp, Homo sapiens
ccggagccagccccgcagcggcttttcctccgcaaccatgtctgacaaac

SEQ ID NO: 41348 - DNA, 83 bp, Homo sapiens
tgaagtctgtgtcaaacatccatatcataagtggaattttggagatattcaaaggagcggaccctgaggaaaccattctcaac

SEQ ID NO: 41349 - DNA, 87 bp, Homo sapiens
agaagaggatgaacccacgcttgaggcctcttggcctcacatacaggtttttagaacttcagccataaaaatgggcagaattttcct

SEQ ID NO: 41350 - DNA, 83 bp, Homo sapiens
ggtggcagcgctggagatcgagaaagtatggtgtttgcgaaaacttgcggaagctggagatcacaggcgtgtcttgtcgggac

SEQ ID NO: 41351 - DNA, 90 bp, Homo sapiens
ccgagaacgccgcgctgcgcatctccaacagcgacctgagcggtactccaaagattcaggtttactcacgtcatccagcagagaatggaa

SEQ ID NO: 41352 - DNA, 96 bp, Homo sapiens
cccaggagccaataacctgcaggtgcttttctgctttgggccaagtagcaaaagctcgattcctgcatgagaccaatgagattgcagatcaagtat

SEQ ID NO: 41353 - DNA, 108 bp, Homo sapiens
ctcagatctgtggagcagatccgatggagaggctgagctgctccaggacttgggcaaactgtcatcaggagcttaaataggacagattttcacggcagtggatatacc

SEQ ID NO: 41354 - DNA, 82 bp, Homo sapiens
aagctcaccgagacggcgatccgggcgctcgagacttaccagagccacaaggtcagaagagatcaattctacagaaatttcc

SEQ ID NO: 41355 - DNA, 100 bp, Homo sapiens
ttctcatctgacccccctgtgttattctttcatttcttacgtacaggtggcgacatgtctaagaatgtgagccagtcacagatggcaaaattgaaccaac

SEQ ID NO: 41356 - DNA, 100 bp, Homo sapiens
gatgaacaaatttatatcattaccttagaggaagaagcactccagagacgactaaatgacaagttggatggcttgaggactggtactaaaaggaaacgtg

SEQ ID NO: 41357 - DNA, 75 bp, Homo sapiens
gggctctcttgcacccctaactgccccctgcctgctccggcactgccccaggctgagcggaaggaggagaaaaag

SEQ ID NO: 41358 - DNA, 100 bp, Homo sapiens
gaagagaaaacgaagtcagcctcagcactttacctaccacccagaccaggtgataggtttgatcgagacagaccgttgagaggacgtggaggcccgagag

SEQ ID NO: 41359 - DNA, 99 bp, Homo sapiens
tgagttgcagctacgagtgcgacagctggtggaacaagtggagcagatccagaaagagcagaactaccagcggatccgggaggagattgacaagtttgg

SEQ ID NO: 41360 - DNA, 98 bp, Homo sapiens
gctgatccaggccacagctgctggtggaggaggtgaactgggcttcatgggagcagacgctgcctacgctgtgtgaggacccgtcaggggcaggtgtc

SEQ ID NO: 41361 - DNA, 82 bp, Homo sapiens
gcgagctgagtggttgtgtggtcgcgtctcggaaaccggtagcgcttgcagcatggagctgctgctcttcctccagaacctg

SEQ ID NO: 41362 - DNA, 75 bp, Homo sapiens
ggccctccctgttcgtgtacccagaggagtcgctggtgattggttaaataggattgcgaatcaggtggccattca

SEQ ID NO: 41363 - DNA, 100 bp, Homo sapiens
tcagcggggcgctccaggaggcactcacaggtgagagcaaagagcaggtggccaactcagcttttgtggagcgagtgcggaaacggggcttcgaggtggt

SEQ ID NO: 41364 - DNA, 75 bp, Homo sapiens
gtcacctacccccagcaccacctccagcccctgcgcctcggttctggcctataggaacaagacattttcagtaat

SEQ ID NO: 41365 - DNA, 59 bp, Homo sapiens
ggaagtgctgctagatttgactgcaagattgaaggtggctggttatagcggttggtctg

SEQ ID NO: 41366 - DNA, 82 bp, Homo sapiens
gtggagatatggcgcaactgcggcgcgctgctctttggcgtaaattgcaatcgattagggatcgtttctcagaatcaagtta

SEQ ID NO: 41367 - DNA, 100 bp, Homo sapiens
gggacgacgtgacagctgtctttaaagagaacctcaattctgagggccccattgtgctgtcccgaccccaggatggggactctccactgtccgactcacc

SEQ ID NO: 41368 - DNA, 83 bp, Homo sapiens
ctctcaccgcgcatgtttggagactttatattcagagcaccaatcaaattaagcaagcctggggaacttcgtgaggaatatga

SEQ ID NO: 41369 - DNA, 80 bp, Homo sapiens
atggagctcagaaagctgtatggacctctgtgtggggattgtgggactttaccaaatcggtttgtaataacacctagaag

SEQ ID NO: 41370 - DNA, 78 bp, Homo sapiens
aggagagaatggagctcttacagcaagcccatcaggattggatgaaaggtctgcaggcattttgcaatttacggaaaa

SEQ ID NO: 41371 - DNA, 51 bp, Homo sapiens
gacacggccagatctgccctccagtctcggcgcggaagatggccggcggcg

SEQ ID NO: 41372 - DNA, 75 bp, Homo sapiens
gcggcggcagcagcggcagcggcaagcaccccttagattgtaagcaaaagaaatcaaggtcaagatctggaagca

SEQ ID NO: 41373 - DNA, 100 bp, Homo sapiens
gggtctggagggctgagcagtcaactcaaatgcaagtccaagaggaggaggaggcggaggtccaagcggaaagtctgatgccaatgcaagttacttaaga

SEQ ID NO: 41374 - DNA, 100 bp, Homo sapiens
agccgattcaagaaggacaaagagatcatagccgagtatgaaagtcaagtcaaagggtgtcttttatgaataatcaaaagcagcaaaagccaacgctatc

SEQ ID NO: 41375 - DNA, 83 bp, Homo sapiens
gaagtcgcgtgtctaggtgagtcgcggtgggtcctcgcttgcagttcagcgaccacggtgagcgagtgctgtgctttcatggg

SEQ ID NO: 41376 - DNA, 50 bp, Homo sapiens
gcctattgtaggaccttgtgatcatgaactgaaattaccattcacttttt

SEQ ID NO: 41377 - DNA, 100 bp, Homo sapiens
attttacagaattaagaggagaaatagcaggacctccagacacaccatatgaaggagagaaggatattcctggactgactgatactacagtgcctcgccg

SEQ ID NO: 41378 - DNA, 98 bp, Homo sapiens
ctgtctggatccagagacaagactattaagatgtgggatgtcagtactggcatgtgccttatgaccctcgtctctcaggcagctgcagagcttcaaca

SEQ ID NO: 41379 - DNA, 87 bp, Homo sapiens
gaggagtctcagagctgtcagaaaggtctcaagattctgccctccaagaaagtcttgccatgattggataggacccccagataaata

SEQ ID NO: 41380 - DNA, 82 bp, Homo sapiens
cttcgacggccgcgaccgggagaggaattccctcttcagattctaggaatgcaaatctttattttttggacgttgtgcaaca

SEQ ID NO: 41381 - DNA, 100 bp, Homo sapiens
gcgacaggagaaggaggtcgacgaggacacgacagtcacaatcccctcggccgtatgaggtttatataactttccaagacaaggaagttgtgcaaagcct

SEQ ID NO: 41382 - DNA, 84 bp, Homo sapiens
ctgatgaagcttctgaaccatccacacatcataaagctttaccaggtcaaaatgcagatcttcgtgaaaacccttaccggcaag

SEQ ID NO: 41383 - DNA, 100 bp, Homo sapiens
tagctgggagccatcacgcccagctagccatcttctaattttcattccttcaaagagggagaaccgaagattacaggaggccagcatgaggttggaacaa

SEQ ID NO: 41384 - DNA, 90 bp, Homo sapiens
ccgccgtcagagccgccctatcaggtgttggtaaatcatgcttattgctacagtttacagacaagaggtttcagccagtgcatgacctta

SEQ ID NO: 41385 - DNA, 75 bp, Homo sapiens
aaggaatcaaaagaatatttagaatgcaggatggagagacaatgcagatcttcgtgaagactctgactggtaaga

SEQ ID NO: 41386 - DNA, 78 bp, Homo sapiens
gagcggccaaagcagtacagctgggatcagcgcgagaagatcgtaaagctgaaaattgaaatcatgaaagtagacagg

SEQ ID NO: 41387 - DNA, 50 bp, Homo sapiens
cattacggtctctataagaagatgatcgcgatggatgactacagtgtgat

SEQ ID NO: 41388 - DNA, 75 bp, Homo sapiens
cgcatcctggctgccatattgcacctggttggatggcaagcatgtggtgtttggcaaagtgaaagaaggcatgaa

SEQ ID NO: 41389 - DNA, 83 bp, Homo sapiens
cgttgctgcgggggattgtgggagtctccgcgtcccgctcgctgggagagagtgtcaacagcatctccaccctggagcctgtg

SEQ ID NO: 41390 - DNA, 106 bp, Homo sapiens
tcccaggaaaggaaatgctccacgcagttactagtgtctgaagatccaaaggaaggaggagctaccaccaaagagtcagggcatcattcagaagatagtggacagt

SEQ ID NO: 41391 - DNA, 100 bp, Homo sapiens
atccttgttgccgtcccttcgcctccttcaccgccgcagaccccttcaagttctagtcatggtcagaatggcggcagtggagcatcgtcattcttcagga

SEQ ID NO: 41392 - DNA, 75 bp, Homo sapiens
attatgtcgtgtgcttccccgttgaatctggtatcaagtgtcactctctccaagtccgcatcggaggcttctcca

SEQ ID NO: 41393 - DNA, 75 bp, Homo sapiens
gggagcgtctccggctgcacagcgctcagccaccaaagtccttggcactgtcaaatggttcaacgtcagaaatgg

SEQ ID NO: 41394 - DNA, 90 bp, Homo sapiens
gatttctatgagaagtatcgtaacccccaaagagaaaaagaaatgatgcaattgtatatcagagtccaaagaggactggtgatctacgtg

SEQ ID NO: 41395 - DNA, 82 bp, Homo sapiens
tgggactccagataacagggatagaaggactgcagatcggtggaaaactgataagccagcaaaatgatgcttcaacacccag

SEQ ID NO: 41396 - DNA, 80 bp, Homo sapiens
ctggatatcaaaggaaatcatggtatgccattttgaagactgagacgttggagttttatcctagaggataaaggaaatct

SEQ ID NO: 41397 - DNA, 124 bp, Homo sapiens
atctcttcctgaaaattgatgctactcaggtggaagtgaatccctttggtgaaactccagaaggacaaggtatttatgggccatcggtaagaatgtctggaagagatggaagaaaaggtttttt

SEQ ID NO: 41398 - DNA, 50 bp, Homo sapiens
gaagctgcagccgcacctggccaagggtggccctgctgcagttgatggag

SEQ ID NO: 41399 - DNA, 75 bp, Homo sapiens
cttcaagaatgaagccgcggaccctcacgcccagagcatgttccagatcccagagtttgagccgagtgagcagga

SEQ ID NO: 41400 - DNA, 100 bp, Homo sapiens
aactcgcccaccacgtccagcttcaccacgcggctgcacaactgcaggaacaccgtcacgctgctggaggagatctcagaaaactgatcttcacaatgaa

SEQ ID NO: 41401 - DNA, 100 bp, Homo sapiens
aattggctgactccacttctatggtgagagagaggagtgcatcaaagattactcccaggatttcaaatatgcgtgcattagagaatgattttttcaattc

SEQ ID NO: 41402 - DNA, 100 bp, Homo sapiens
tgagaagtacagggagcgagagctggagaagctgggattggagattccacccaaacttgctggtcactgggagctgagatctgtatctgtggacctgaat

SEQ ID NO: 41403 - DNA, 100 bp, Homo sapiens
cttcaaactacgttaagatgacgacagactcagatccaagtcaacagtgaggcaggtggaagtcatcataaagtttctgtttcacccgtcgtccatgttc

SEQ ID NO: 41404 - DNA, 50 bp, Homo sapiens
catgtacccggtggactcggtgaagggaagtctgttagaactgctgtgct

SEQ ID NO: 41405 - DNA, 75 bp, Homo sapiens
ccggggaactagggagcgtctccggctgcacagcgctcagtggtcgtggagtcggactttgtgaaatacgagggc

SEQ ID NO: 41406 - DNA, 100 bp, Homo sapiens
gaggggagcacagagaaagagaatgatgaagagaaaggcccggagactgaacgagttgaagcagttaatatggctgaaggaatcattcacgacacagaaa

SEQ ID NO: 41407 - DNA, 101 bp, Homo sapiens
gatgcctttgccgccgccaagctcctggccctggccctgatcatcctgctgggcttcgtccagatcgggaaggctttgtggattatggcagccaaatggga

SEQ ID NO: 41408 - DNA, 97 bp, Homo sapiens
ttaggaggaacttgagtcataatttgatgttgaatcagagagaacaactgtttgggcttatttgcctcagaggagtctccaagagcttttagattac

SEQ ID NO: 41409 - DNA, 74 bp, Homo sapiens
caggaccagcgggcgggggcccacgagagatggtaacctgcacctcaatgtgacggcggaggccttcagcccct

SEQ ID NO: 41410 - DNA, 100 bp, Homo sapiens
gctctggataaggaccagtacctgcccaggaaactggaagaagaagacagagctcttaccagggggaggcagagatggcacagcaagagacatgccccca

SEQ ID NO: 41411 - DNA, 100 bp, Homo sapiens
gcacgcgctgggcagaaaggctaccatcaccgcactgagatcaacaagaagcgtgaaggagggtgccaacaaggaggtgctgggaatcctggtgtcctac

SEQ ID NO: 41412 - DNA, 101 bp, Homo sapiens
gctgggtctgtagaggagcgcaggcctggtgcaaacagactcaagaggctcggagaaccagcttggagctggactggccattatggaggaggagctgcagc

SEQ ID NO: 41413 - DNA, 98 bp, Homo sapiens
cggaggctgcggcggggcggacggtcgcgcggcggcaggcacagccacccacacagaatatgcctatgggtcctggagggatgaatcagagcggccct

SEQ ID NO: 41414 - DNA, 88 bp, Homo sapiens
gaatcagatgtcaaagacttagcttttaaattaaaaaggaagctattcaccattgaggcaaaattggtatgtcagtgtggactccgtg

SEQ ID NO: 41415 - DNA, 90 bp, Homo sapiens
atcagctcttcacccggttcagtgacaacaaccaagcattatgaaaaagacttgggaggacatagaagacatctcctgccgtgacttcat

SEQ ID NO: 41416 - DNA, 102 bp, Homo sapiens
caagggggacaggctggactgaaagaggacacgggaagaacaaagacttagactcggttcgagaacttgtcttggacaattgcaaatcaaatgatggaaaaa

SEQ ID NO: 41417 - DNA, 100 bp, Homo sapiens
caatgctcaagtgatggctggttttcaggaactcataaatgccacctcaacaattcagagggggcacccaagccaattgccattgaaccatgtgctggga

SEQ ID NO: 41418 - DNA, 100 bp, Homo sapiens
caagctcatcgacttcggttcgggtgcgctgctcaaggacacggtctacaccgacttcgacggaccacaagcagacggtgtcactttgcacttgaacacg

SEQ ID NO: 41419 - DNA, 50 bp, Homo sapiens
cagcctcccgggtagctgggactacagactaactttgaataattggacct

SEQ ID NO: 41420 - DNA, 50 bp, Homo sapiens
cctcaacatctctcagagacgaaagttattgggccagttcaattgtctta

SEQ ID NO: 41421 - DNA, 75 bp, Homo sapiens
cggcccacacccagtgcgccgcggcccgcgctcggccgcccgccgatctttgcagattatcctgtggaaggaaaa

SEQ ID NO: 41422 - DNA, 101 bp, Homo sapiens
cctgagccaggtgaagggccccgtaaattggaaggatgcacaagttccaaggttacgtttcagttggtcaaagaaaaagtgatgtatgaaaaagaggcaaa

SEQ ID NO: 41423 - DNA, 75 bp, Homo sapiens
gtgacatccgaggtgcctttctccaaaaggcattggaatggatacttgtgtcattcctttgaggcacggtgggct

SEQ ID NO: 41424 - DNA, 75 bp, Homo sapiens
ggaaagcaccgagctgacaagtcaactctaagatcaccgaagtggccttggagtacaacaactgtcatggggacc

SEQ ID NO: 41425 - DNA, 75 bp, Homo sapiens
ctcggtcaacggcttcatcagcaccttggggtaaaatctgtaaaaactgggtcagttttttggacaatgtgctgc

SEQ ID NO: 41426 - DNA, 74 bp, Homo sapiens
aaacaactagagaagattggacagcaggtcgacactgtctgtgatcctggaaacatacgtgtgactgaagctcc

SEQ ID NO: 41427 - DNA, 100 bp, Homo sapiens
catgtccctcatcatcaataccttctattccaacaaggagattttccttcgggagttgatctctaatgcttctgatattacgccttcccatacattatat

SEQ ID NO: 41428 - DNA, 100 bp, Homo sapiens
agcggtttaccatggaacccgtgaccaagtggagccccaaacaagtggtggactggactagagtcaagagaacaatcggatgatgagactgaggagtcgg

SEQ ID NO: 41429 - DNA, 96 bp, Homo sapiens
gagccaggcacaaggatgaacattctgccgaagagaacaagacgtgtgaagactcagcataaacttgaatgtgatttgcagcagagggaggaagag

SEQ ID NO: 41430 - DNA, 100 bp, Homo sapiens
ggaccggagcggcctgtccgagtttggtgccctggttgtcagatgttggaaagcagtaggacggaacatactcttcgtggttgtgtatccgttctggggt

SEQ ID NO: 41431 - DNA, 85 bp, Homo sapiens
ctgaagaaatatcaaatgtttcctagtaagacagcaactcaggttgttgcttagaatatgctaccatgttggataaagaagccaa

SEQ ID NO: 41432 - DNA, 100 bp, Homo sapiens
ggatcaacccgacaactgtccagagagagtaataccctctaccatctgctttggtcagggtgccgctcgaggatttaaaagcaacaagaagaaaaccaaa

SEQ ID NO: 41433 - DNA, 75 bp, Homo sapiens
cttggcctgatgctgaactctcgagggtcctcttcctgatggatgggaacaagccatgactcaggatggagaaat

SEQ ID NO: 41434 - DNA, 51 bp, Homo sapiens
ggttgtgtcagcaaaattcttggcagggaccctccattttccatatccagg

SEQ ID NO: 41435 - DNA, 83 bp, Homo sapiens
gatcaagatcagctccaggcctgggaaagtgaaggagtaaaagtccctcgcaatttccgactgttggaagaactcgaagaagg

SEQ ID NO: 41436 - DNA, 100 bp, Homo sapiens
cctgaacggagtgtgcgacggattgggaggctcgggttatgtatgattttgctgctgaacctggaaataatgaactgacggttaatgaaggagaaatcat

SEQ ID NO: 41437 - DNA, 82 bp, Homo sapiens
caagcttctggaagctctttgcggtggcgttggtgctgtttgcggatgctgatgcagggggatatgagactttctactcgga

SEQ ID NO: 41438 - DNA, 100 bp, Homo sapiens
cagaatgtgatttgcttgaagatatgagtctacaaataagaaacctcgaaaatctccaggtgagaagagcagaattgaagctggaattagaggagcaggc

SEQ ID NO: 41439 - DNA, 75 bp, Homo sapiens
agcagcggcctcgccgccgcccgtctcctgtcgcgcagcttcctccgagtctactcttcatcttgtgttgagact

SEQ ID NO: 41440 - DNA, 117 bp, Homo sapiens
ccctgagtcactgcctgcgcagctccggccgcctggctccccatactagtcgccggtactccaaagattcaggtttactcacgtcatccagcagagaatggaaagtcaaatttcctg

SEQ ID NO: 41441 - DNA, 100 bp, Homo sapiens
cccgcccacgtgaagccagcctaactgagctctggactttggggacagctgtcagtggcctaggccgcagagcttgatgcattagatgccaatgatgagt

SEQ ID NO: 41442 - DNA, 100 bp, Homo sapiens
cagggagctggttcacatgatcaactgggcgaagagggtgccaggtcctgctcaggttccaatgatgtccccaaatggttctgtgcctcctatctatgtg

SEQ ID NO: 41443 - DNA, 100 bp, Homo sapiens
aggagcctgtggataaggcgaaggaaggaataggatgagtgataatccacccagaatggaagtgtgtccttactgtaagaagccatttaaacgattaaaa

SEQ ID NO: 41444 - DNA, 50 bp, Homo sapiens
ttcagaaggagcaggattaccaaaggatacagtttatgtaacttgatgga

SEQ ID NO: 41445 - DNA, 100 bp, Homo sapiens
cttgaaggtcattgtgtccttggtttccttgggagtaggtcttcgaaacttgtgtggccagagctcccagcccctggtggcctgacggagcaagagctga

SEQ ID NO: 41446 - DNA, 101 bp, Homo sapiens
ccggcgacagcagccaggagtcatgagcgacagcggcgagcagaactacggcgagcggtactaaggctcgtacgtctgcatcgattatcttacgtggggca

SEQ ID NO: 41447 - DNA, 113 bp, Homo sapiens
tgaaatgtcaccactgtggaaaaccatataggtcgaaggctggacttgcatatcacctgaggtcagagcatgggcctcagatttctcatctatgtggaaggcagaaagcagac

SEQ ID NO: 41448 - DNA, 82 bp, Homo sapiens
cgggtgcgctgctcaaggacacggtctacaccgacttcgacgacccagccgatgcccaatcctgtggcgtactacctgcacc

SEQ ID NO: 41449 - DNA, 51 bp, Homo sapiens
atccgcatccgatgccatttaggtgtagagaggagagagagtgaacaggga

SEQ ID NO: 41450 - DNA, 100 bp, Homo sapiens
ttatgatgcctgcagtttttcatactgttgcttcaaggacacagcttgcattggacgactgggtttggattcagaagaggattattatacaccacaaaag

SEQ ID NO: 41451 - DNA, 74 bp, Homo sapiens
agcactgcctctggcatccccgacttcaggcatccgtgtcattctggaccttactcccaactaccggggtgaga

SEQ ID NO: 41452 - DNA, 83 bp, Homo sapiens
ctctagctattgccttattttttctcatggatgttcttcttcgagtatttgtagaaggggtcatgatcagagttcgactcttg

SEQ ID NO: 41453 - DNA, 73 bp, Homo sapiens
cagaaggacttggcctttgcccaagcttatctgaccagggggaagcaagcacttatttggctacttggtgtcc

SEQ ID NO: 41454 - DNA, 100 bp, Homo sapiens
tcctcctccttggtcgccgcgtccttggctggcgtccccatggctgggggttatggagtgatgggtgacgatggttctattgattatactgttcacgaag

SEQ ID NO: 41455 - DNA, 51 bp, Homo sapiens
ccaagttcaggagaactcgaccgatttcagagacaactgtctgaaccctgc

SEQ ID NO: 41456 - DNA, 75 bp, Homo sapiens
atgactataaaactctgtatccacaattcatggaatcagtctggctagttcaggggatacgataaaagatctcca

SEQ ID NO: 41457 - DNA, 75 bp, Homo sapiens
agcatcatcccagtaagctccaaccaggcccggtacaagcagagccttgacccaactgtggatgaagtcaagaag

SEQ ID NO: 41458 - DNA, 82 bp, Homo sapiens
acgcggatgtcggcgaagagttcaaccaggtcagcccaaggccaaccccactgtcactctgttcccgccctcctctgaggag

SEQ ID NO: 41459 - DNA, 98 bp, Homo sapiens
gggaataggacatgctcctgagcaaaagcccatcctcactcagcgctaacatcagcagcagcccaaaagttgagcagctttgatctccggagccgcct

SEQ ID NO: 41460 - DNA, 98 bp, Homo sapiens
cttcacttggaaacagaatcacgccttgtgaagagatcatccctaagcaggagagaagctactaaagggctctctaaatacgtacagattctgcgata

SEQ ID NO: 41461 - DNA, 51 bp, Homo sapiens
acttctctgtgtttttccagaaggccttggacaagattcgctatgagagcc

SEQ ID NO: 41462 - DNA, 100 bp, Homo sapiens
aagggagacacagccttggatatgcgaggacgatgcagtgctggacaaaagggtgcggaggcagcaaatgttacaggtcctggtggtgttccagttcaag

SEQ ID NO: 41463 - DNA, 100 bp, Homo sapiens
tggaaccgtggagacaccgagaaaccatgagtgtaaggttaccccagagtatagacagatatttgatttaatggatgccaaagcacgtgctgattgcatc

SEQ ID NO: 41464 - DNA, 99 bp, Homo sapiens
atgaaatccaaaggtgaatcttttggttggtgattttgatgatagccacaaagcaagcaggagaaaatgctgctgtgaagacccaattaaagctttcac

SEQ ID NO: 41465 - DNA, 75 bp, Homo sapiens
ggaggctgctgggcaggtcatgagtcaccatgaccccctggttgtggaatacgaggcattgctggtacaactacc

SEQ ID NO: 41466 - DNA, 95 bp, Homo sapiens
ggagagaaggcggcgcgggaggtgaagttgctgctgttgggtgctggaggtggtgagagccaactatgacacgctcacgctgaagctgcaggatg

SEQ ID NO: 41467 - DNA, 75 bp, Homo sapiens
gcagaaagcaggcgaacccgcggcgcaataacgccctgaaggatggctgccatattgggagacaccatcatggtg

SEQ ID NO: 41468 - DNA, 90 bp, Homo sapiens
gggattttcaaatattattatgcctgtggaatctaatcagaaaagctcattccaagaaatccccaaacttaatgaagaactactcagcaa

SEQ ID NO: 41469 - DNA, 100 bp, Homo sapiens
gcacggtggcggagctcgcagtccaagacaatgcagatcttcgtgaagactctgactggtaagaccatcaccctcgaggttgagcccagtgacaccatcg

SEQ ID NO: 41470 - DNA, 100 bp, Homo sapiens
caacgtacaccggggccattaagggtcaccatgaagttcaatcccttcgttacctcggaccgcagtaaaaaccgcaaacgtcacttcaatgccccctcac

SEQ ID NO: 41471 - DNA, 50 bp, Homo sapiens
ctgtgctttctgtcccagaactccaggttatcaatactctggctgaccat

SEQ ID NO: 41472 - DNA, 100 bp, Homo sapiens
gaaacctggaggcccggggggcccagctcccgtagggagccgtgggcgctcggtgcccgggccgggcagcgatggcaagccggcaggtggatattgcaac

SEQ ID NO: 41473 - DNA, 100 bp, Homo sapiens
ctgggcgggaaggcggcgccccggccgaggtggcggcggctcctcaggagggccctcctggacccgggagcggaccctggtggcggtgaagcccgatggc

SEQ ID NO: 41474 - DNA, 100 bp, Homo sapiens
caagacagagcgctactcctggcagtgcgtcaatcagagcgtcctgtgcgcacacggaccctgactactcggctgcctatgtcgtcatagaaactgatgc

SEQ ID NO: 41475 - DNA, 98 bp, Homo sapiens
agctgctggaaggcgaggagagcagggatcatagacggtatttctatgtaaacgaacagtcgggcgagtctcagtgggagtttccagatggtgaagag

SEQ ID NO: 41476 - DNA, 101 bp, Homo sapiens
aggggccttcctcatccgggagagccagaccaggagaggtgtctgacttccagcaactgctggcctgtgccagggtgcaagctgagcactggagtggagtt

SEQ ID NO: 41477 - DNA, 98 bp, Homo sapiens
agccacgcgggcgagcggctgtgtggatgtcggcgaagccgcgggcgaggttcctaatgtgagaggctagacccagatcatggaggtgcttcagtgtg

SEQ ID NO: 41478 - DNA, 75 bp, Homo sapiens
ccgcgcagcagcaaaggatgagcggaaccttggaaaaggattttcagtcaatgcatcatcggagcgactcaacat

SEQ ID NO: 41479 - DNA, 76 bp, Homo sapiens
catttgtctacaccatcaaggaggaaggcctggttcttcaagagagacaagagagacacctccaacttcgacaaag

SEQ ID NO: 41480 - DNA, 100 bp, Homo sapiens
gcttgctttctgtcgtggcaatgttttgaaactggcaaaatcagcatgcttttcacttccactgcatctctcgctggctcaaaacacgacaggtgtgtcc

SEQ ID NO: 41481 - DNA, 75 bp, Homo sapiens
agaaatattggaaagacgctcgtcaccaggacccaaggaaccagtcctcagaatggttggaatgaccctccagct

SEQ ID NO: 41482 - DNA, 76 bp, Homo sapiens
gtgaggcttccccagccatgtggaactgtgaaggctactggccgcgagcttttccagcaagtgtgcaacgtggcga

SEQ ID NO: 41483 - DNA, 90 bp, Homo sapiens
tgggacgcctggcttcccagtgcatggcgctcaagtctgtgcgccctatctttcagatcattcagagcataaggatgggcatgtgagaaa

SEQ ID NO: 41484 - DNA, 89 bp, Homo sapiens
agaaccacagtttatcatcccttcctaaacattgctgaggctcttgtcagcaaaggtctagccacagtgatcagataccggcaggatga

SEQ ID NO: 41485 - DNA, 100 bp, Homo sapiens
acccagaccctggagcctcagttggaagcagccgatccagcctgcggagcctgtggggcaggcgtctgtagaggcttctggtgaaatcgcattatgcaag

SEQ ID NO: 41486 - DNA, 74 bp, Homo sapiens
ttatcgctgtcttttgtacccgtcgtaccacctctcaccagaaaaaatggtgtcctcagaccgaagccaacttt

SEQ ID NO: 41487 - DNA, 75 bp, Homo sapiens
tctcgtatttgtcttagcagcttctaacctgccgtgggaaatatcgagcatcagatgaagaaaaaattaatccac

SEQ ID NO: 41488 - DNA, 87 bp, Homo sapiens
ggctttggggaccgggaccgggatcgtgaccgtggagggttggatggcaagcatgtggtgtttggcaaagtgaaagaaggcatgaat

SEQ ID NO: 41489 - DNA, 100 bp, Homo sapiens
gctgcaggtgccttcatcctcaccctcccacacttcctctccgagccctaccagtacaccttggccagcactggttatgagtgccagtgagccgccttag

SEQ ID NO: 41490 - DNA, 83 bp, Homo sapiens
ctcacaatgaggctccctgctcagctcctggggctgctaatgctctgggtctctgggctatctgaagcagtgccggaagagaa

SEQ ID NO: 41491 - DNA, 100 bp, Homo sapiens
aaggcgtgaggcgccgcccgggtgtccccgcggcgcaggaggcggtggagcgcagagcgggcgagcgcggttcagcttgttggtttagatgaggagagtt

SEQ ID NO: 41492 - DNA, 100 bp, Homo sapiens
tcgccttactcactctctcgggattattgccgattgccagggtgctgaccgtgggagccgaccgagatcgagcctgcgtgctgccgaagcagggcgccga

SEQ ID NO: 41493 - DNA, 100 bp, Homo sapiens
ggcgctcttaggcagccgagcggagctggaagcggacgaggtctatcatatgcaagtcacacggttggtttcacgccaccaacttcactgactagagctg

SEQ ID NO: 41494 - DNA, 100 bp, Homo sapiens
gcagaggggtccatacggcgttgttctggctgccactgcagagccccgccatggaagacacgccgttggtgatatcgaagcagaagacggaggtggtgtg

SEQ ID NO: 41495 - DNA, 82 bp, Homo sapiens
aaaccaacactcctagccaatggtggtcatggagtagaagggagcgatactacagggaactgtacctggggaatgaattgta

SEQ ID NO: 41496 - DNA, 100 bp, Homo sapiens
ggcgcaggcccagatgcgcgcgatgctggaccagttgatgggcacctcccgggacgggaaatcctcattgacgattcaatttgttgaaggccaatttgtg

SEQ ID NO: 41497 - DNA, 100 bp, Homo sapiens
ctaacagtctatgatgtcaaggataagtctcatgacaccgtgctgactgggttacttttttaaacactaggaatggtaatttctactcttctggacttca

SEQ ID NO: 41498 - DNA, 100 bp, Homo sapiens
ccaggaggggcgagagggagccgcagctgatgtcagaacattctagtatgccagtagaaaaaaatatcactttagaaaggccttctaatgtaaatctcac

SEQ ID NO: 41499 - DNA, 75 bp, Homo sapiens
gcaattgaaaagtaccctctggttttctcaccgcagatggtgggagctgctgcaaccattgacagcttagcaagc

SEQ ID NO: 41500 - DNA, 100 bp, Homo sapiens
gtttgcacagatcatcaagattggacgtactcatactcaggatgctgttccacttactcttgggcaggagctggtgtgggtgacattggtgtggaggtgg

SEQ ID NO: 41501 - DNA, 108 bp, Homo sapiens
tacctgcgctccaagatgagccaagtagcccccagcctgtcagccctaattggggaagcgcatggagatatggaccaaaaggaacgagacgtgattatgagggagttt

SEQ ID NO: 41502 - DNA, 81 bp, Homo sapiens
ctgctgggccctgaggctgcaccaagtggcgaaggagccggctccaagctcttttgaaacagatggtcaccatgtttagat

SEQ ID NO: 41503 - DNA, 90 bp, Homo sapiens
aggaatgaccaccatggcagatggcaacagaggatgtcaacaattttttggagaaggactccatgaaagatgacagaagaagttattgtg

SEQ ID NO: 41504 - DNA, 120 bp, Homo sapiens
ctttggagggacagcctcgaggctactgttttgttaactttgaaactaagcagccctggtacctgacagtgtaaagaaggagctcctacaaagaataagaacattccttgctcagcatgc

SEQ ID NO: 41505 - DNA, 75 bp, Homo sapiens
gaaacactctttgacattctggtggctggtggaatgctgggaccgtgtgtatgtacaacaaaataatgtggagaa

SEQ ID NO: 41506 - DNA, 75 bp, Homo sapiens
ggcgcgtttcagcgaagtcgcacgtgaaggatagcagtggcctgagaaaggagcctgtgtgaaatgcagcaaagg

SEQ ID NO: 41507 - DNA, 75 bp, Homo sapiens
ccttcaatccttaaactggccattgaagggttgcagtataaggatgcatttatgaaagcaaatcctggctacaaa

SEQ ID NO: 41508 - DNA, 96 bp, Homo sapiens
tgaagacatcagccacatcacacctacacaggtaaaataccatgaagattttgaaaaaacaaaggggagaggctttactcccgtcgtggacgatcc

SEQ ID NO: 41509 - DNA, 85 bp, Homo sapiens
tcggcggcgcccggatgggcagctgagggatcactacttgtgtgatgtgacatgggcaacacaagaaagaatttctttgcagtgg

SEQ ID NO: 41510 - DNA, 100 bp, Homo sapiens
catccgcactggttgctcgtcgtcattacagcaggatgaagttaaaggaagtagatcgtacagccatgcaggcatggagccctgcccagaatcaccccat

SEQ ID NO: 41511 - DNA, 50 bp, Homo sapiens
tgacttccttgtgtttgacgcactgggaagtcgagacaacatgagtgtga

SEQ ID NO: 41512 - DNA, 100 bp, Homo sapiens
taaggattccaagtaactcttatttgatgccgacaaaaggatcaaggtggcgaagcccgtggtggagatggatggtgatgagatgacccgtattatctgg

SEQ ID NO: 41513 - DNA, 100 bp, Homo sapiens
gctgcccgggtagcttcccgacttatcgacatgagcaggcaccaaggtctcgaagtgctgcagctaaaactcatacaactgccttggctgggcgaagtcc

SEQ ID NO: 41514 - DNA, 93 bp, Homo sapiens
gcgcttcctgcgcatcgtctgcaagaccgcgaggcgagacctcttcttcggaaccaaaaagaagcttcccagagccggggccaggagccccaa

SEQ ID NO: 41515 - DNA, 75 bp, Homo sapiens
tacgagaaggtggaggatgcctgccagggatgcccaccccctcctcctgtcctggatggtgaggacgtgcttcct

SEQ ID NO: 41516 - DNA, 100 bp, Homo sapiens
cttatcatacctcagtggaagacttcagaaagccccgtgagagaaaaggttatatcttaagtgtggtgctgctaacattgcccaggcagcatctggttca

SEQ ID NO: 41517 - DNA, 100 bp, Homo sapiens
agagccgggagttcaagaagaacactccagagggatacccacccaccatcccagggtctacaacatccacagccggaccgtcacccgctatcctgccaac

SEQ ID NO: 41518 - DNA, 50 bp, Homo sapiens
tcagacgcctcacttaggacaaagtcgccaacatccagcagcagctggcc

SEQ ID NO: 41519 - DNA, 100 bp, Homo sapiens
cagaaagctgctgaagaggtggaagcaaagttcaagtatctcagatgaagacatcatcaacattactcttcctactggagtccccattcttctggaattg

SEQ ID NO: 41520 - DNA, 100 bp, Homo sapiens
tcagggcggctgccccgggacccgcagattcaaccctatgaaaagataaaggccaggggcttgcctgataatatatcttccgtgttgaacaaactagtgg

SEQ ID NO: 41521 - DNA, 75 bp, Homo sapiens
tggcagtgtggacaaaattcctgataaaggtggtgttcccactgatgaagagcaggcgactgggttggagaggga

SEQ ID NO: 41522 - DNA, 82 bp, Homo sapiens
ggaccggggtcacttagactaccccaggaacccgcgccgcgagggctccttccctcaggagaacatattgtgatgttcgtgc

SEQ ID NO: 41523 - DNA, 100 bp, Homo sapiens
aggaccctgtacacccagattcgcaaccgtgccctcatccagggagtgcctgcagcaccccggcggggccaccccagtctgcgtgtacacgagggatgag

SEQ ID NO: 41524 - DNA, 100 bp, Homo sapiens
aaattatggtagaagaaatcgtagctggcgtgagttatcttctggaaatgagtcttcaagctctgtaagacatgacccagatgatgtggtaccagttggc

SEQ ID NO: 41525 - DNA, 100 bp, Homo sapiens
caggagttcgtctcttacgtctgcggaagtgcagctgcctcagttcttagcgcagcaagacactaagggcgactaccagaaagcgctgctgtacctgtgt

SEQ ID NO: 41526 - DNA, 82 bp, Homo sapiens
cctgggcgctccggtggcggcggaggtggtcattgggactcccacacttaaacaaagaaaggaaattctgcaagtgattacc

SEQ ID NO: 41527 - DNA, 100 bp, Homo sapiens
aatctagaagaaatatgttctttccagcaaatgctcgtacagtctttagaagaatgcaccaacctcaaggaataggttctcctagtgtctatcatgcagt

SEQ ID NO: 41528 - DNA, 80 bp, Homo sapiens
cagcccgggtccccgcgttcacagccccagcgcaggtgtcgtgaaaactacccctaaaagccaaaatgggaaaggaaaag

SEQ ID NO: 41529 - DNA, 100 bp, Homo sapiens
cgactttagcgcccatctccaacgtaacctcggcgccggtgacgtccctcccgctggtcaccactccggcaccaggctgcctgctgtttcccggggagat

SEQ ID NO: 41530 - DNA, 75 bp, Homo sapiens
agaatgctggaacgagttataggaagatgtagtccaacccacatcagcaggttgtttacattcagagctctatca

SEQ ID NO: 41531 - DNA, 75 bp, Homo sapiens
gccgcccccacagcaccccgggctggcgtgagacagagaaagagctggacccagatgggctgaagaaggagtcag

SEQ ID NO: 41532 - DNA, 96 bp, Homo sapiens
agttcaccttcgtctgcatggctctgtcactcacgaaccgagattaagcgtagctcctgaaatggatatcatggactactgcaaaaaagaatggag

SEQ ID NO: 41533 - DNA, 75 bp, Homo sapiens
tccccttggattcagacgccgattcgcccagctggagaatgctggaggagaccttaaggatggccaccaccacta

SEQ ID NO: 41534 - DNA, 83 bp, Homo sapiens
agcgggagttcgaagagttggatactcagcgtcgctggcagccgctgtacttgggtttccaggcctgaggtgcccgccctggc

SEQ ID NO: 41535 - DNA, 75 bp, Homo sapiens
cagacttcgacgttcagacctgggttcccgtccagttccattccttgcacagggagcaagagcagctctacctga

SEQ ID NO: 41536 - DNA, 98 bp, Homo sapiens
gcttgccctgccgggatgacgatagtgtgactgccaaagatcttagcaagatggaggagatgtataagaaagctcatgctgctatacgagagaatcca

SEQ ID NO: 41537 - DNA, 89 bp, Homo sapiens
cgggcgggggagccagcgctcaggtggcttgctttggtgaaggtattcatacagccttcctaaaggcaatgctttccacaggatttaag

SEQ ID NO: 41538 - DNA, 101 bp, Homo sapiens
gtattgcaagcaacagtagtcgctgttggatcgggttctaaaggaaagagctctcaacgaaatgtggaagtgtcagaacatgcttcggagccatgtacgcg

SEQ ID NO: 41539 - DNA, 74 bp, Homo sapiens
gctggacccggaccggttttggaggtgagtgccgggctcggcgctctgctcctggagctcccgcgggactgcct

SEQ ID NO: 41540 - DNA, 78 bp, Homo sapiens
caatgatagtgaaaattggaaggaagtgcataagatggtggttgaaagtgcttatgaggtgatcaaactcaaaggcta

SEQ ID NO: 41541 - DNA, 101 bp, Homo sapiens
ggaaaaccgaagttggaagtgtctcttagcagcgcgcggagaagaacggggagccaggtgacggccacccacggactctgtcacttgctgggattcacaca

SEQ ID NO: 41542 - DNA, 73 bp, Homo sapiens
tccctctgctcttcctcccttcgctcgcaccatgactgtgccctgtccacggtgcctcctgcatgtcctgctg

SEQ ID NO: 41543 - DNA, 100 bp, Homo sapiens
gcacgccaagcacgtggtgggctatggccaccttggtatatgagggtgggagcaacgtggaccagtttgtgacccgcttcctcctgaaggagacggccaa

SEQ ID NO: 41544 - DNA, 82 bp, Homo sapiens
agagaaaatgaaaccagcagacagaatttgtcagttgctgaacctgtttgcatgagttgctcctgacggccctttaggatac

SEQ ID NO: 41545 - DNA, 89 bp, Homo sapiens
tactggagtgactggagtgaagaagcaagtgggatcacctatgaagatatcctgcatgaccccttgttcactatcaaactgacttccac

SEQ ID NO: 41546 - DNA, 82 bp, Homo sapiens
ttggtttcgggatctcggtgctgcagacggcgagacctcctgcacagatctgaagaagacacttgaatcatgggtgacgtta

SEQ ID NO: 41547 - DNA, 75 bp, Homo sapiens
ctggttgtcacatacccccagcttagaggtgcttcaccctgccccaagatgtgttcagagcaacattgttttgtt

SEQ ID NO: 41548 - DNA, 100 bp, Homo sapiens
cgctggcagccggggagctgcaggaaccagactgggggcgagctgagcacctgtagtcaatcacacgcaggtttatctggcaagactgaggcaaataaga

SEQ ID NO: 41549 - DNA, 98 bp, Homo sapiens
gcagctgctgcagttactgaccacatacattgttcgggaaaacaggcgcagttgtgtagcagttgagtaatgctggttagctgttaaggtggcgtgtt

SEQ ID NO: 41550 - DNA, 99 bp, Homo sapiens
cctgaggagcagggaagcatggctattgtggatgtaaaagccatgttcaagaatgtgacagtgatgataacatgggtgccaaaaatacttcaataggag

SEQ ID NO: 41551 - DNA, 101 bp, Homo sapiens
gggcaggggacccctgacccaggttacggaccggaagtgctccagaactcaagactggctcttcgtggttgtggtatgcctggctgccttcctcatcttcc

SEQ ID NO: 41552 - DNA, 100 bp, Homo sapiens
gttgagagacagaggcaccccggacagagacgtgaagcactgaatttacctagaaaagtacgagaaagttcatcattttggggaggatgatgatgaggta

SEQ ID NO: 41553 - DNA, 82 bp, Homo sapiens
ggccagagcgccggcaagagctcggtgctggagaacttcgtgggccgagccagcagccacccccgcccagccaacacctccc

SEQ ID NO: 41554 - DNA, 95 bp, Homo sapiens
gaatatttaatggaaaatcgcttggttaaaacctgacacttttaacaggtgcttttgaagatgatgatatcacgcacgttgaaggaagtgtagat

SEQ ID NO: 41555 - DNA, 128 bp, Homo sapiens
ccaattcgggaacaaatactactacatcccgcagtacaagaactggagagatttcctccttcttcacccctgaaaccatatccaaagaagcccccaaaccaaaaggatgttattaaatttccagaatg

SEQ ID NO: 41556 - DNA, 74 bp, Homo sapiens
attgacgatctttttcttgctgcgaagaagattcctggaatctcatcaactgatggagtcttgctctgtggccc

SEQ ID NO: 41557 - DNA, 100 bp, Homo sapiens
gaaagtttcaactacactgaatgtggctcaggtctctggacctctgactgacactgtgcctgcccaggtccctgtatgcactgccacagtgccctgggcc

SEQ ID NO: 41558 - DNA, 96 bp, Homo sapiens
gctgagtgatgggcagcccccaccacccgcccaggccagccccagcagcaacagcagcacaggttcgatacaagaggctgttttcctagcgtggct

SEQ ID NO: 41559 - DNA, 100 bp, Homo sapiens
tgaaaacccgacgccgagaccttgcacagtctattatcctcccagtccacaacgctgaaccgtggctggacgaatgtttgaggtctgttttgcaacagga

SEQ ID NO: 41560 - DNA, 100 bp, Homo sapiens
gcaagcagctggaagatggacgtactttgtctgactacaatattcaaaagagctgaggcttcgaagacctcagaggacttctctcagcactcacagaaac

SEQ ID NO: 41561 - DNA, 98 bp, Homo sapiens
caggctcaagtgatcctcccacctcagcttcctgagtaggtactccaaagattcaggtttactcacgtcatccagcagagaatggaaagtcaaatttc

SEQ ID NO: 41562 - DNA, 83 bp, Homo sapiens
aacacccacagactgccaagtgggacaactttctggcttttgaaaggctccttcttcagggctctccaatgtcagatgtggtc

SEQ ID NO: 41563 - DNA, 100 bp, Homo sapiens
gtggcggcggggaccgtccagcccagcgattctcagtcagagcaaattggtcaggagatgttggaaaaccttagtcatgacagagaaaagatacagcgag

SEQ ID NO: 41564 - DNA, 75 bp, Homo sapiens
gcccgacggacagtacatcgtgactggcggggacgacggcaagacccagacagtcatccacacagtgcagagcgc

SEQ ID NO: 41565 - DNA, 88 bp, Homo sapiens
acagatggggccgaatataacatagaggaccgcctggcccggtgcaccatgcattgcaacgacaaagccaaagattcaatagatgctg

SEQ ID NO: 41566 - DNA, 50 bp, Homo sapiens
gacggcggcagcagcggcattcaggttttaaaatcaaagatgggaaaatc

SEQ ID NO: 41567 - DNA, 110 bp, Homo sapiens
ccattgggatactgtgttgcaggctatacagtctctgaaattgccagacaaaaccctcattgacctctatgaacagtttcggagcaacatcccctgtcacctggttgata

SEQ ID NO: 41568 - DNA, 83 bp, Homo sapiens
ctgggacctggccaagggctccacacaccaagaccaagagaaagcatgggattatggcaaccacagaatctcagtagtacaag

SEQ ID NO: 41569 - DNA, 50 bp, Homo sapiens
ggaagactccctgcctcctgagtcccagaagcagaatctggtaatataag

SEQ ID NO: 41570 - DNA, 74 bp, Homo sapiens
gcccgcctgccccttgtcaacagctacacacgtgtgcccccactgtattcacaggcctccactgggctctcagt

SEQ ID NO: 41571 - DNA, 75 bp, Homo sapiens
ctgctgccttcccgtcgccgctcccgaagcttttccagcttcctgcctgacacagctcacttcaagaagtgcaca

SEQ ID NO: 41572 - DNA, 82 bp, Homo sapiens
ctaacttctactgacgaagcttggaagttgcagaagactctgagatttgcccacctgatgaccttgccagcttgccatcatg

SEQ ID NO: 41573 - DNA, 74 bp, Homo sapiens
tcaagaatgtgaacctgagaaggtggaaatcagagagaggtgatagaaattgaagatgcttcacccaccaagtg

SEQ ID NO: 41574 - DNA, 98 bp, Homo sapiens
attccttctccagggagagtcgctgcagatgaggacggggacttggttgccttttccagtgacgaggaattgacaatggccatgtcctacgtgaagga

SEQ ID NO: 41575 - DNA, 83 bp, Homo sapiens
aggctccctgctcagctcctggggctgctaatgctctgggtctctggtgaaatgacaatggatgctctgttggctcgattgaa

SEQ ID NO: 41576 - DNA, 83 bp, Homo sapiens
ggaggtgaaggacccagaggacaaggtaaccaaggagcagtgaacagcagctactacagtagtggaagccgtgcatctatggg

SEQ ID NO: 41577 - DNA, 114 bp, Homo sapiens
agccccttccccagccagcagactacaatgtatcaacagcaacagcaggaaggctgtgggatgacaccaaatgccaacccatcccaaatttacaacatcgaccctgcccgcttc

SEQ ID NO: 41578 - DNA, 75 bp, Homo sapiens
aggtgaccgtggacggaccccgggagcccagacgaagatcccagtgtctgagtgaactaacagtcctgctttcag

SEQ ID NO: 41579 - DNA, 99 bp, Homo sapiens
acatcatgaaggctagtttggatgtggaggggaatagactccatctatccatatgagctagagacatgacctaacaccctgatgaccactctcagggac

SEQ ID NO: 41580 - DNA, 51 bp, Homo sapiens
ctctctgtgtaccggctggagtacatgagactttgagcaaagcatggtcct

SEQ ID NO: 41581 - DNA, 75 bp, Homo sapiens
tgggtaccgcttgccaactttggagacaggtgcagttcaggagcagatgagatccaagggaaaccgagataggcc

SEQ ID NO: 41582 - DNA, 50 bp, Homo sapiens
attccaagtaactcttatttggaaacagtactgctggagcaccctttcag

SEQ ID NO: 41583 - DNA, 76 bp, Homo sapiens
aatctgcccacccctcctgtaacccagcctgtttcacttcttgtttcgagaggcccgtgccatgagaccgcctggg

SEQ ID NO: 41584 - DNA, 98 bp, Homo sapiens
ggagaccgaggagcagcagcgattctcttaccaacaggtctcctctgagcctccggcctccataagacccaaaacagatgacacctcttcccagtccc

SEQ ID NO: 41585 - DNA, 83 bp, Homo sapiens
gggctttcttcgccgtgctggccgcggcccgcctcagcatctggtacagccgacctggtccgacccccagtggcactaacgtg

SEQ ID NO: 41586 - DNA, 97 bp, Homo sapiens
ccgagggccctccgtgccgccggcgccatgggcaattgccacacggtggggcccaacgaggcgctggtggtttcagacaaatttacatgtattggag

SEQ ID NO: 41587 - DNA, 83 bp, Homo sapiens
ttgttaaggattccaagtaactcttatttggttctgacttattctggagaggagtaggaagtaatatgagcaggaactcttgg

SEQ ID NO: 41588 - DNA, 100 bp, Homo sapiens
caggagcacagcagctgaagttcagcagattactttctatgaagacaaaaattttcaaggccgtcgctatgactgtgattgcgactgtgcagatttccac

SEQ ID NO: 41589 - DNA, 75 bp, Homo sapiens
tatttgagtcatttccttcgtacccacagtgcttcatgagagagctacttcctcagccgagcccagagcctgtgt

SEQ ID NO: 41590 - DNA, 100 bp, Homo sapiens
gacatgcggattgtggaagaactcttcggctgtggggatgtgaatgccaaagctagtcaggtgacaatggaatggactctgatatggaagaggaagcaga

SEQ ID NO: 41591 - DNA, 100 bp, Homo sapiens
tggtgattggcaggatcctggtatccgctaacagacagtgacaataccctcccctcccttgggctggacccctctctacagctaggagccaatggcagaa

SEQ ID NO: 41592 - DNA, 100 bp, Homo sapiens
ggaggccaagaagctggcgggccgcgcggctgtggagaaccacgtgaggttaaacttgtggttccgtgggttgatatccagaaattagaaagaacgtcca

SEQ ID NO: 41593 - DNA, 95 bp, Homo sapiens
aagtaaaaacaatagctcaaggaaacctttccaacacagatgtccaagctgccaaccatatccagaagacccagcagtttataaaccactctccc

SEQ ID NO: 41594 - DNA, 100 bp, Homo sapiens
ctttgccgcggcagacgcctgaggatgatgccccagctgcagttcaaagatgccttttggattcttgctcacttgtggcatctgggctactcaccagaag

SEQ ID NO: 41595 - DNA, 75 bp, Homo sapiens
ggacctgcggactagcgaacccggagcatcatcagcatcatgctattacaatcccaaaccatgggggtttctcac

SEQ ID NO: 41596 - DNA, 100 bp, Homo sapiens
ccaggattatatccggaagaccctggaccctacctacatcctgagctacatggccccctggtttagggagggatttacaagaccagctagaggatatgat

SEQ ID NO: 41597 - DNA, 101 bp, Homo sapiens
tttcagaaaatcaggcctcctcctggggaatgtgcctcagcttctgtccagggaccttgacccagcccctctcagcagacgcttcatgataggaaggactg

SEQ ID NO: 41598 - DNA, 100 bp, Homo sapiens
agttcaacttgctagacttcacacggcgagcatacggcaccaattacatcgagaccctcagagtgcaggtttgaaccctggtgacacttaaattcatttg

SEQ ID NO: 41599 - DNA, 90 bp, Homo sapiens
caaccaggggctgagcttctgcgctgtggagaagccaggatgtccatgaggagccccatctctgcccagctggccctggatggcgttggc

SEQ ID NO: 41600 - DNA, 82 bp, Homo sapiens
tggggctggaaattgcgctggaccgtcgccttgctcctcgccgcggcggggactgcaggaactctgcgaccttcaagtcgtt

SEQ ID NO: 41601 - DNA, 74 bp, Homo sapiens
cagatccattacgcacatttaaagataccatctaccttactcagaatgacagcccatatcaaggcggtgtattc

SEQ ID NO: 41602 - DNA, 83 bp, Homo sapiens
gcccaatgggaatgaagacaccacagctggtgaagatcatgacggagaaggaactcctggccgtggcttgtgagcagtttctg

SEQ ID NO: 41603 - DNA, 90 bp, Homo sapiens
aaacagcaagcggcgtggacgaccgttgctgagctggtgtggaacgtctgtgatcaggcccagcccctagccaggaggccgggaccaagg

SEQ ID NO: 41604 - DNA, 89 bp, Homo sapiens
tggcattgacatttaattttagggtcctttatatagaagggagagtaggtggctttcttcctccagaagaaataaaagaaagatttgac

SEQ ID NO: 41605 - DNA, 100 bp, Homo sapiens
cagtgacgagagggagagcaagaccatcatgctgcgcggccttcccatcaccatcacagagagcgatggtgtccgcaatgttgccagtgtctgtctgcag

SEQ ID NO: 41606 - DNA, 83 bp, Homo sapiens
gcagtcgggaggtccatgtgtgtggagatttcacttaagacttctgagatgcctgaaaacttcatgcctcctgttcccatcac

SEQ ID NO: 41607 - DNA, 88 bp, Homo sapiens
gtgctgggcgctgtcatgatcgtgatggtgccgtcgctcatcaagcagcaggtccttaagtttcgccgtgaggaagatgcggaaaagg

SEQ ID NO: 41608 - DNA, 75 bp, Homo sapiens
agaagacaaagtcaattccatgatggcttaaattccttggtccttgatttagattttcctgctttgaggaaaaac

SEQ ID NO: 41609 - DNA, 152 bp, Homo sapiens
ctcctgctggtgaccagcgtcacgctgctggtggcccgggtcttccagaaggctgtagaccagagtatcgagaagcctcctgacagtgggcctccaccattgccaacatcctccctcccagaaggttattatgaggaagctgtgccgctgag

SEQ ID NO: 41610 - DNA, 73 bp, Homo sapiens
agccacccatcaaatcagagagaaggaatccaccttcttacgctatggcagacagcgtttgtttgaaaatttg

SEQ ID NO: 41611 - DNA, 75 bp, Homo sapiens
gcatcatccacgagttcgacccgtgtcaggtcaattcagtgaagatatgatacccacagtgggcttcaacatgag

SEQ ID NO: 41612 - DNA, 74 bp, Homo sapiens
agccctatcaagaccaacaaagcctacgaggacaagcagaaactcaagcggaccgagatcatcagccgctcctg

SEQ ID NO: 41613 - DNA, 82 bp, Homo sapiens
agtccacccaccgccgccgcctcccagatctgggtcaatgaggagaccaagctggtgtacttccagggcaccaaggacacgc

SEQ ID NO: 41614 - DNA, 100 bp, Homo sapiens
gctcacctgtgcgggatggaacaaaaggtattttcagtgtcaacccaaatatggcttgttcgctcctgtccacaaagttaccaagattggcttcccttcc

SEQ ID NO: 41615 - DNA, 100 bp, Homo sapiens
caggcatctctgggtgggcaacttacccgagaacgtgcgggaagagaagatcatcgagcatttcaaacgcattgtcccagatatagccgttggtacaaag

SEQ ID NO: 41616 - DNA, 99 bp, Homo sapiens
gctgctgctgctgctgcatgtctaccaggagaggagggaactgcggagcggaactgctttctccaggggttaaaaataagaattttaaatgccaccgaa

SEQ ID NO: 41617 - DNA, 100 bp, Homo sapiens
caccaaactcctggagttccagctggcactcaaggacagagcgggatgccaccagcttgtccaaagggaagttccaggagctcctggtgggcatcgttgt

SEQ ID NO: 41618 - DNA, 95 bp, Homo sapiens
gtgctggagaggccgctgcgagcggaaggcctcctccataaccgagtccgaaagggcagaatctatgggggtcctaacaactttcttcaacctga

SEQ ID NO: 41619 - DNA, 50 bp, Homo sapiens
ccgggagttacaccgccaccgccaggggagagaccattctaacacaggta

SEQ ID NO: 41620 - DNA, 100 bp, Homo sapiens
tctatccactccctgcgccgcctcctcccaccctgagcagagccgccgaggatgataaacacccaggacaggctgaccccgcactacatctacccaccag

SEQ ID NO: 41621 - DNA, 100 bp, Homo sapiens
agctggcctggtttgatactgacctgtaaatcatcctttagtgaaatccggcccaactccaccgtgcagtgggaagaagtgtgccggccctgggtctctg

SEQ ID NO: 41622 - DNA, 100 bp, Homo sapiens
cttggattagaaattaccactcagaatcatagtgaaagattcgttttcattgcagagtggtatgatccaaatgcttcacttcttcgacgttatgagcttt

SEQ ID NO: 41623 - DNA, 96 bp, Homo sapiens
gcctactcgcccgccaccctgcgctgccgccgctctgaggagttaaaggcgtgttccatccaccacatcagaacaatgtcgtatgtttttgtaaat

SEQ ID NO: 41624 - DNA, 74 bp, Homo sapiens
taagacatccatgtcttccaaaatcattggaatgaaacatgacagctgccctacaggcagctctgaagaacccc

SEQ ID NO: 41625 - DNA, 75 bp, Homo sapiens
tacagggctatgatgctattgtggttgaacaatggacagtcctggaaattgtgtcagcagctaaggtgtgtggag

SEQ ID NO: 41626 - DNA, 100 bp, Homo sapiens
tgggcgtccatctgagcttcatcagtactatactggcaattgctggagaagattttgcaattgttgcttctgatactcgattgagtgaagggttttcaat

SEQ ID NO: 41627 - DNA, 100 bp, Homo sapiens
aagctgcactgcatggttgctgctggatgtgttgtgttcctggcttccctctggatgctgacagaaacaagggcttcctggactgggtccccaagaagat

SEQ ID NO: 41628 - DNA, 89 bp, Homo sapiens
cctgcagcgccgtgtggcacgacacaaaaatcaggtgaaatgacaatggatgctctgttggctcgattgaaacttctgaatccagatga

SEQ ID NO: 41629 - DNA, 82 bp, Homo sapiens
gtgaggatcccgtgcacgagtgtggcacccagcctggtccggactgcaaaattcaaaatggggctcaaggtattcgtttcat

SEQ ID NO: 41630 - DNA, 75 bp, Homo sapiens
cacaaatgctccttctcctggagacgcaactcaagcataatgctccaattcctcaaggagggcgtggtgcaatcc

SEQ ID NO: 41631 - DNA, 100 bp, Homo sapiens
ggttggggtctctgggagctctgcaggacagtcattttgtttactcattcagccctgttgcaggtcccaataaactcttcataaggttgacagaagcacc

SEQ ID NO: 41632 - DNA, 83 bp, Homo sapiens
cagaaaacctgcagaagaactggcttcgggaattttaccagtaagactttgaccccgacgcaggcttcagtgattgccgcgga

SEQ ID NO: 41633 - DNA, 100 bp, Homo sapiens
gacagcagtgatgaggatgacaaaagaaaccaaggaaatttgtatgataagaactgtcaagtaatccacctctggctaccatccttattcctcctcatgc

SEQ ID NO: 41634 - DNA, 100 bp, Homo sapiens
aacagtgccctctgcagctgaataacccttttaacgagtattccaaatttgatggcaaggttcttgggtgtctctggggagtccctgggccagaccttcc

SEQ ID NO: 41635 - DNA, 88 bp, Homo sapiens
atacctggaggactattcggcagagtacatcattcagcaaggtggctgggttgaagttcatgagttcgcccagcctcagtgacctggg

SEQ ID NO: 41636 - DNA, 98 bp, Homo sapiens
cgccgctatgactggtgagggccccgggccctcagcctctcttttcccatgatgggcacccacatgccaatggctggagacatgaatggactcagccc

SEQ ID NO: 41637 - DNA, 50 bp, Homo sapiens
gttgtggcagcactgcctgaagctttgtttggagacagtctctttctgcc

SEQ ID NO: 41638 - DNA, 89 bp, Homo sapiens
caccagaggactgggaggagcatgtcaacaggaactgcaagcacatgttgaccagataactgaaatggcagcagtaatgaggaaagcca

SEQ ID NO: 41639 - DNA, 98 bp, Homo sapiens
aggagccaacattaacaaaccgcatgtctgtacttcatctgcaaagctttggagaaggattgccggtacagcaaagggctggtcctcaaggagaagat

SEQ ID NO: 41640 - DNA, 100 bp, Homo sapiens
ggggctgactgagagcgtctgcttgaatcccctactttgaaactagtgctgccaatgggacaaacataagccaagcaattgagatgcttctggacctgat

SEQ ID NO: 41641 - DNA, 83 bp, Homo sapiens
ccggaatctaaaaagccctcagtaccagagacagaagcagatggattcgtccttttagactctatcaagaagaatatctaatc

SEQ ID NO: 41642 - DNA, 75 bp, Homo sapiens
gctgggggcagctgtagtgggagtgttccaggattcgccttggttcatgattacaaagaaggaaccccagaagag

SEQ ID NO: 41643 - DNA, 80 bp, Homo sapiens
cccttcctgcccctgtcgtcagcaggactcgctcagcagcagcctgaaaacttgctacaagtatctcaatcagaccagtc

SEQ ID NO: 41644 - DNA, 98 bp, Homo sapiens
cgcgaagacggtaacccgtgtgactttgactggaacaccttccaccatgaccacctcagcaagttcccacttaaataaaggcatcaagcaggtgtaca

SEQ ID NO: 41645 - DNA, 83 bp, Homo sapiens
ccacaggaattggatctactagtgcagctgaagccacacatcaatgggcccttcacccctgacctggctcaccctgtggcaga

SEQ ID NO: 41646 - DNA, 90 bp, Homo sapiens
ccagttctatcgctacaagatgccccgtctgattgccaaggtcccaccacatcaaccgggtccacctgtagttggtgctctccagccgcc

SEQ ID NO: 41647 - DNA, 75 bp, Homo sapiens
gtaaagcgatcctcagcttcttcagcagccagtggccagtgagggctgaagaagatgcagagcagcctgaagctg

SEQ ID NO: 41648 - DNA, 98 bp, Homo sapiens
ggacacctggttccagctgcagcacgtggacgctgactcggaagtgcagctcttggagtttgacaaggagttgtctgtctttaaggacagactgtatg

SEQ ID NO: 41649 - DNA, 100 bp, Homo sapiens
ccaacctgttcttgcaaacaagcagatatttgtgtgcacccagaggcctccattcaggctgttttttcagatgcccaaatgcatatttgggcattagaag

SEQ ID NO: 41650 - DNA, 100 bp, Homo sapiens
gggactattgacagcacccaccttggtgcatgcaggttaccacccatacctcggctgtatagtgatgactttggcagttcttcagcctcttctggcagtc

SEQ ID NO: 41651 - DNA, 50 bp, Homo sapiens
gggcccgggcctcgggggcgattccggcggaaatgagaaagcagagggag

SEQ ID NO: 41652 - DNA, 74 bp, Homo sapiens
tctgtccgggggcctggctaaggaaaccctattacctccagctcccggagccctgcctgttccctgtccatcca

SEQ ID NO: 41653 - DNA, 75 bp, Homo sapiens
ggactctccttctcaccgttccgggaacaaatgctagatacggtcctcccagcgcccagccatgggggaactgtg

SEQ ID NO: 41654 - DNA, 100 bp, Homo sapiens
ggtctcccatgtgaactgctggcaggctgccttccctgacccccagttacgcctggaatatgaaggcttccccgtcccgatatttggagttcttacaaca

SEQ ID NO: 41655 - DNA, 100 bp, Homo sapiens
gacaaaatgcagccgagaactccgctcgttctgtgcgttctcctgtcccaggtagttgtcctgggaacccctgcagaagaagatggtggtggcaaaattg

SEQ ID NO: 41656 - DNA, 82 bp, Homo sapiens
gtgccggcttcgcgcgcgaacccggctttcgcatttgggaccctgcagggtcagaagttgagtagcaggggcctaggagggc

SEQ ID NO: 41657 - DNA, 75 bp, Homo sapiens
gcggatggcagccatgctgaagtgcgtgatgagcggcagtcagggcccagaatgtgttcagtatcttcaacaaga

SEQ ID NO: 41658 - DNA, 75 bp, Homo sapiens
gaggtcaagagttggagcagacggtggcgggacaggcttcattgggacagccctaacccagctgctgaatgccag

SEQ ID NO: 41659 - DNA, 112 bp, Homo sapiens
ccacctccaagatcctggtgcggaacatccccttccaggcccacagccgggagatccgagagctcttcaggtgattgatgtaaagcgaagttatgtaactatgactgcaaca

SEQ ID NO: 41660 - DNA, 100 bp, Homo sapiens
gaaggatgatggtgaagctaaagaaatttctacacctacccattggtctaaacttgatccaaagacaatgaagaccaatctccagttcaacaacaacaag

SEQ ID NO: 41661 - DNA, 100 bp, Homo sapiens
gagagaagacgatctgcacttcgcattttggcattgacatttaattttagggtcctttatatagaagggagagtagatggaggagatgtataagaaagct

SEQ ID NO: 41662 - DNA, 96 bp, Homo sapiens
atcaattccatccaaatttagattattacaaagcacgaggagcagacctcatgaataaaagccggtgggaaagcagtgccactctccgcttcacag

SEQ ID NO: 41663 - DNA, 75 bp, Homo sapiens
tggcactgcactgggtaggaaaaagaccattcctcaagaattttgtatccaaggcccaaaagtttgttacccaag

SEQ ID NO: 41664 - DNA, 87 bp, Homo sapiens
gggcctgcaggtctctgtcgagcagcggacgccggtctctgttccgcaggatggtgaaaatccccagcaaggaggaagaggcagata

SEQ ID NO: 41665 - DNA, 82 bp, Homo sapiens
gcgagcgtctgggcgggtggtaggttgaagctccattcataccaaagtttagaggctctggagataccagcaactttgatga

SEQ ID NO: 41666 - DNA, 100 bp, Homo sapiens
ctcggttaaagcacattgtagaattgcaaataatcctggaaaagtacttggcaggtgtggtatctgtgcgctttgaagaagatgaagacaggaacttgtg

SEQ ID NO: 41667 - DNA, 100 bp, Homo sapiens
ctgaatgaaagaatgaactggttgtgcaggaaccaggatccgaacccgcctccccaggtgaaagaacttgtcctggacaacagtcggtcgaatgaaggca

SEQ ID NO: 41668 - DNA, 75 bp, Homo sapiens
tctgactctgactctcggactgagaaacgcaagtgatgtcttggcattgcccattttcaagcaggaagattccag

SEQ ID NO: 41669 - DNA, 74 bp, Homo sapiens
tgacatcagacatctttcattagccctactcaaaaatggcggcaacattctctcgggcctagccgtccttggaa

SEQ ID NO: 41670 - DNA, 95 bp, Homo sapiens
tttgatgtctgacaacgtggatcgttgttttgaaacggtgaaaggttgagccatgcagtaggctgtgcttttgcagcctgtttagagcgcaagca

SEQ ID NO: 41671 - DNA, 75 bp, Homo sapiens
cttccggagcttctcagaagacagagggttttcttttgagctgagtcagtgctgattctctcaaatagagcttga

SEQ ID NO: 41672 - DNA, 90 bp, Homo sapiens
gtttctggctccgggctgagcttcctggagaagaggaagttcctgggcttcccgatggactcgagtttttactatgtgagcatcccggtg

SEQ ID NO: 41673 - DNA, 101 bp, Homo sapiens
catggtgcagaaataccagtccccagtgagggtgtacaaatacccctttgaattaattatggctatcatatactcctatgaaaggaggaatctccaatgta

SEQ ID NO: 41674 - DNA, 78 bp, Homo sapiens
gaggaagaagaggacgacgacgacgaggaagaggaggtttctgagatgcttttactgactctgctatcagtgctaaag

SEQ ID NO: 41675 - DNA, 100 bp, Homo sapiens
agagcggtcggtgacagcctcaagggcttcagcaccgcgcccatggcagagccagaccgtggagttctacttcctttcccagtacgtgtcgccagccgac

SEQ ID NO: 41676 - DNA, 97 bp, Homo sapiens
cttacggaaactgcatgctgttgtagaaactctagtcaaccataggaaagccatattgaaggtggtatcatcggtcctgcagcttggaaatatcgtc

SEQ ID NO: 41677 - DNA, 100 bp, Homo sapiens
tggaggagcgcgagcggcggtttccttgcccggggccgcgggaaggccgaccgactgccgcggtctgcaataatttccctctactcattgattgtttccc

SEQ ID NO: 41678 - DNA, 100 bp, Homo sapiens
gattgttgccagtcagctagaaagatgtaggcttggagcagaatcaccaagcatcgccagcaccagctgctgcgtggatgtgctgggtgctgagcaagct

SEQ ID NO: 41679 - DNA, 82 bp, Homo sapiens
cggcccgcgcctgggctgccggcacttcgcggcagtgaagatagtgatccggggagacaggaacacgggcaagacagcgctg

SEQ ID NO: 41680 - DNA, 100 bp, Homo sapiens
gcgaggatgtgcgcagcgacttccagcgcagagtgccctacaactacctgcagcgggcctacatcaaggataaccacgatggatcatccagtgaaggaat

SEQ ID NO: 41681 - DNA, 75 bp, Homo sapiens
ggcgagccctggtggaggaagagaaagtgactgagaccgaagatgatagtgatagtgacagcgatgatgatgaag

SEQ ID NO: 41682 - DNA, 100 bp, Homo sapiens
agtccaagccttcctcagggtcccacctctacagacaacaatggagatgaggcgcctggtgtttggatgatcccaacttcagatccagcggctaacttgc

SEQ ID NO: 41683 - DNA, 75 bp, Homo sapiens
cctggaggtggatctgaagaacgggtctgctcaccaggtggccagataccgcccacgtgcccccatcattgctgt

SEQ ID NO: 41684 - DNA, 83 bp, Homo sapiens
cagcaggttgcttgagcaagcaggaaatctggcattttttaaagtttgcgccccacaaagaggaaatattccaaaggtactca

SEQ ID NO: 41685 - DNA, 127 bp, Homo sapiens
gagacgcacgcagctgactttgtcttctccgcacgactgttacagaggtctccagagccttctctctcctgagaccccatccttggtggtccccttggaagaccgtgtggtatctgtgggagaaaca

SEQ ID NO: 41686 - DNA, 100 bp, Homo sapiens
ttgctggttaccagtggccttccaggttgttatctgcaggtgtggcaggttgcagaggacagtgcctaatagtcccagtgaatattgtttttatgtggat

SEQ ID NO: 41687 - DNA, 75 bp, Homo sapiens
gcgcgcgccagcaagaagatcctgctgcccgagcccaggcccactgctcagtggagcgtggaggacgaggaggag

SEQ ID NO: 41688 - DNA, 75 bp, Homo sapiens
gaactgtgaggagttcgccgagttccaggctattttggcattctgctggatatatgttcgtaaataccaaagtcg

SEQ ID NO: 41689 - DNA, 106 bp, Homo sapiens
gcttatgccaggccgatcccgacctggactcagacaagatgataccacgagtcaacccaaaagttgctggggagaagttgctctttaatgaattgcatctcatgaa

SEQ ID NO: 41690 - DNA, 75 bp, Homo sapiens
acaggaggcagtagccaaacacccagaattcctagaggacctgtgcaacaacctcttgaggatcgaatcttcact

SEQ ID NO: 41691 - DNA, 75 bp, Homo sapiens
gatgctgctgctaaaggtatccaggaaattgctgactctgtaaagcacgagaagccctgccaacgtgggataagc

SEQ ID NO: 41692 - DNA, 73 bp, Homo sapiens
ggggccactgcgaggccgttttagcttgctgatgaccgtatggcactggtgtcaggcatcagcttagatccag

SEQ ID NO: 41693 - DNA, 100 bp, Homo sapiens
tggagcagctcaagagccggggcctttttgacagcttccgccgggactgcctggccgacgtggacaccaagaaatgcactcggtgatggaaagagagcca

SEQ ID NO: 41694 - DNA, 51 bp, Homo sapiens
ctcttcacaaacttctacattcagggggacttgatctcatcttcatgccag

SEQ ID NO: 41695 - DNA, 75 bp, Homo sapiens
aaagtcattgccattaatgtggatgatcctgatgcagccaattataatgatccatgaccagaactgtcctttggc

SEQ ID NO: 41696 - DNA, 100 bp, Homo sapiens
ataagaagggactggctgtgttattctgcatattgcagttcttgtcaatgacctgtttaacggatgaagagtcccggaaaaattgggaagaatttggaaa

SEQ ID NO: 41697 - DNA, 100 bp, Homo sapiens
agtgctgcctttgctaaagccagagaggccctacagaaagcacagacccaggaatttcaggttcaccaagttgaagagtcttaacctttccaataatcat

SEQ ID NO: 41698 - DNA, 100 bp, Homo sapiens
cggctggttccccagcaactacgtgcgcgaggtcaaggccagcggcaatgtctacttcgatctgaagtctagaggagacaagtatggcaaattggtcggc

SEQ ID NO: 41699 - DNA, 100 bp, Homo sapiens
gggagttctggtctcaggcaaggtggggactgggcacatcatcaatacggccactcgctctggtgggaccctcgtgcttgtggggctgggctctgagatg

SEQ ID NO: 41700 - DNA, 75 bp, Homo sapiens
cgttttcgcctgcagctgctcaccggatcagtttgacaacttagaaaaacacacacagtggggaattgatattct

SEQ ID NO: 41701 - DNA, 100 bp, Homo sapiens
ggcagaatacctgaaactggagtttatcaaggcttacggagttcctatgctagtcagcatagtcagcttgggcaagaccttcgttctgccgtgtctcccg

SEQ ID NO: 41702 - DNA, 105 bp, Homo sapiens
ttgggctcgcggcgagcggacggggtcgagtcagtgcgttcgcgcgaggtgagaagccctaccactgcaactgggacggctgcggctggaagtttgcgcgctcag

SEQ ID NO: 41703 - DNA, 74 bp, Homo sapiens
tgcgcaaacttgacactcaccctgaccgctggcggaggcagtgacctcagactctggacggtgaacggggatct

SEQ ID NO: 41704 - DNA, 100 bp, Homo sapiens
gcgatggagctgttatttttagatacttttaaacacccgagcgctgagccccatctgtgacttcctagaactccagcgccgttaccgcagcctcctggtc

SEQ ID NO: 41705 - DNA, 98 bp, Homo sapiens
ccgccccatcctcatcctcaaggagactcggcggctgccctgggccactggctacgcagaatgaaggtcaccgtgtccaaagggggcgaccgggacag

SEQ ID NO: 41706 - DNA, 100 bp, Homo sapiens
tgttatctggtggatgttatagggatatagctagtgcaataaaagaacttcttgatacagtgaataatgtcttcaagaaatatcaataccagaaccgcag

SEQ ID NO: 41707 - DNA, 99 bp, Homo sapiens
aatcagacagtgaagatataacaagatcagcaaatctaactgaccagattctggggagcaggtcctggtggatgtggagaccaagagcaataaggagat

SEQ ID NO: 41708 - DNA, 100 bp, Homo sapiens
ccgggtgctctccatacagagccacgtcatccgcggctacgtgggcaaccgggcggccacgttcccgctgcagtgttctaagaacggaagcatctgggct

SEQ ID NO: 41709 - DNA, 90 bp, Homo sapiens
gtcaagtacactgaaattcatcctgagatgagttcaaggagcagggacaagttacaggaatgttctccaagcagcaatccaaaagagtct

SEQ ID NO: 41710 - DNA, 100 bp, Homo sapiens
cgagaccgtgaccgagagcgtgaccgagagcgcgaatatcgtcatcgttagaaggctttaatccagtgtgaccagttgaggaaggagctggagaggcagg

SEQ ID NO: 41711 - DNA, 88 bp, Homo sapiens
tgcagaaggtctctggagacatcttcagcaggccagaagccttttaaaaggtccctgcgaggttcagatgctttgagtgagaccagct

SEQ ID NO: 41712 - DNA, 101 bp, Homo sapiens
aaacttgcaaggaaaggaacatgtttgaatttcagatgtgttcctcaatgaatcacatgatacaccccctgaagactccattcctttggtctttccagaat

SEQ ID NO: 41713 - DNA, 96 bp, Homo sapiens
gccgggctggctgcggccgccctgggccgggccccaccggacggcggtgcgtctttctacgtgaataggattttgtggctggccagatacactgca

SEQ ID NO: 41714 - DNA, 50 bp, Homo sapiens
gttaaaggcaagatcgacaccatgaagaggagagaaatgactggatcagc

SEQ ID NO: 41715 - DNA, 86 bp, Homo sapiens
aactgtcataaagtcacctactgtaccagagtttcagacatatctgaagagatggattaagaatgctttggattaaggattgtgga

SEQ ID NO: 41716 - DNA, 90 bp, Homo sapiens
ctcgggtcgttgtggtgcgctgtcttcccgcttgcgtcagggacctgcccgactcagtggatatgctgcaggctgctagtcattatcgcc

SEQ ID NO: 41717 - DNA, 74 bp, Homo sapiens
catcatcgtggtagttattgtaaaataatccagaatggctactctgatctatgttgataaggaaaatggagaac

SEQ ID NO: 41718 - DNA, 100 bp, Homo sapiens
ctaaccacagggcaggccatgggcaagatatctcagtgttctccgctctcataggtcagttgaatctggtatcaagtgtcactctctccaagtccgcatc

SEQ ID NO: 41719 - DNA, 100 bp, Homo sapiens
cctgtacccactaaagcagtgccatctcctgggagttactaaaagatgtaactgaactgcagatccttggtgaaatatctttcaacaaatctctatatga

SEQ ID NO: 41720 - DNA, 96 bp, Homo sapiens
ctgctttccactcggctcctgtcgtccgttctctcaggctcccgttcagaacaccttccaccatgaccacctcagcaagttcccacttaaataaag

SEQ ID NO: 41721 - DNA, 100 bp, Homo sapiens
ctgtagctgcagtaaaatgggtgatgtcaaagagaactatcttgaaacatttatttccagtccaaagctgttaatgccagtgaaaaaacagttgtggaag

SEQ ID NO: 41722 - DNA, 100 bp, Homo sapiens
ctaacgctgcctttgctttaaaacagtattacttgcgcatcagaggctccttgaaatgctagatacagagaaggaactgttaaaagaaaaaataaaggaa

SEQ ID NO: 41723 - DNA, 119 bp, Homo sapiens
cgacgacgtgctgttcgaggatgtgtacgagctgtgcgaggtgatcggaaagtcagtcaccacgaacaggggcactcggcatgctgccccagcactggagaagcagcgctgtgggggca

SEQ ID NO: 41724 - DNA, 50 bp, Homo sapiens
cgagagtcgtctcctcgataccaaccggtggctgctggcagcggaatccc

SEQ ID NO: 41725 - DNA, 100 bp, Homo sapiens
ttacttccggtaccttgctgaagttgcgtgtggtgatgatcgaaaacctcctgtgtcctaccgacctctccactgtatctgggaattgccaaggagaaga

SEQ ID NO: 41726 - DNA, 82 bp, Homo sapiens
ctcccctctcaggacaacccagatgtgcaacaaagtgcgatgacagaaccaagttgtattgttagacacactggaacaagag

SEQ ID NO: 41727 - DNA, 97 bp, Homo sapiens
gacagaagatggtgcagaagaaaccagccgaacttcagggtttccaccgttcgttcaagataacgaaggaggcccaacttcattcaataaggagcct

SEQ ID NO: 41728 - DNA, 101 bp, Homo sapiens
gctctgaaagctagaagaaaaggtgtacttgcaagaaacctcaggacttgagtaacagcaacatggtcattaaatttgacggtggagaggaagtacttatt

SEQ ID NO: 41729 - DNA, 90 bp, Homo sapiens
acccgaggccgctgctgtgcggagacccccgggtgaagccaccgtcatcatgtctgaccagatctatgcagttagatcagttgttcccaa

SEQ ID NO: 41730 - DNA, 98 bp, Homo sapiens
ccgtggcaagggtcctggtgcccaaaagccagcccagggcagtgttgctgcatattgcatggatgaaaggctgaaggctgcctcctcttgcaggctgg

SEQ ID NO: 41731 - DNA, 96 bp, Homo sapiens
gaatcctctccatctggttcgaagtctcagcggtattctggtgcttatggtgcctcaggaagagctaaagatggctgaatttctagatgaccagga

SEQ ID NO: 41732 - DNA, 100 bp, Homo sapiens
aagttctgaactgggaggtgactttgagttcatggatgatgccattgtggacatcggatacccaaggagacgaagctgaagcaggagaaggaggggaaaa

SEQ ID NO: 41733 - DNA, 100 bp, Homo sapiens
gggggctgcaggggcggccaagtctccccagcgccaggtgcccccggccacacgcaatggctgccatccggaagaaactggtgattgttggtgatggagc

SEQ ID NO: 41734 - DNA, 98 bp, Homo sapiens
tgtcctatgtggacgtcggcactgggaaggttgccaaggaaagtgtactgcagttttacccgaaagctaatatcgttgcctaccatgacagcatcatg

SEQ ID NO: 41735 - DNA, 82 bp, Homo sapiens
tgtcttgttgcgggcaccgcagtcgccgtgaagatggcgtctaccagccgctggttttcccatgggctatgcagcagcagct

SEQ ID NO: 41736 - DNA, 50 bp, Homo sapiens
tgaagaggcaggatgcagatgcctggaagctggagaagcttcgagagaag

SEQ ID NO: 41737 - DNA, 100 bp, Homo sapiens
ccggcagagcatcatccgcaaggtggtggaccctgagacggggcgcaccagctttttacctgcacctactcagctatctcaggaccagcttgaggctgaa

SEQ ID NO: 41738 - DNA, 97 bp, Homo sapiens
ctctcccggcatttcctccctgaagcctccagacctgtgcacaccgatatgaggcaaggcagcgagtggaccagatcctggagacgcgggatatgat

SEQ ID NO: 41739 - DNA, 100 bp, Homo sapiens
tatatttgcagccagtactctatatgaacaatccgtctggatcacggatgtaggaagtggttttgacgagtttgggtctgtggacttcagtggcacattc

SEQ ID NO: 41740 - DNA, 100 bp, Homo sapiens
cgttggaataccggctctcagcggctgatccagccgcagaagccaggatgaaggtagcctgcatcacagagcaggtcttgaccctggtcaacaagagaat

SEQ ID NO: 41741 - DNA, 95 bp, Homo sapiens
cacctggcggccatcgtcatcctgctgctgaagatctggaagacgcgctcctgcgccgtttgtcagaggaatggctgtgaatggatgcctggaag

SEQ ID NO: 41742 - DNA, 75 bp, Homo sapiens
ttcggtgggtgtgccctgcacctgcctcttcccccattctcacttattctaccagattccatgaaagtattgcca

SEQ ID NO: 41743 - DNA, 100 bp, Homo sapiens
ccagcagcccccgaaggccctatcaggacatggagtatgaaagacgatggaggaattggttgagggcgttcgctgggcctttattgacatgctagagaaa

SEQ ID NO: 41744 - DNA, 75 bp, Homo sapiens
ctggatgtgctggagagtgtgaacctgctcatgtccccacaagttttatcttcaagacactaaaagtagtaatgg

SEQ ID NO: 41745 - DNA, 100 bp, Homo sapiens
ttcctggtgaagcatctgatgcacgttccatccggcgctcagctgggcttgagctttgtgctgatgaacatggtcaccttgaaaggtgtgttgaatatgg

SEQ ID NO: 41746 - DNA, 75 bp, Homo sapiens
attcttaaaacgggagagagtcagaatcaactaggatttggagtggatcagttacgagatgacaatctagaaact

SEQ ID NO: 41747 - DNA, 100 bp, Homo sapiens
ggaagtgtggtttggattccatcagtctgttcggcctgccatgtggaaaatgatgcttaatatcgatggtgaccaagaatatggcccaggtgaccaaagc

SEQ ID NO: 41748 - DNA, 83 bp, Homo sapiens
ccatgagcgagcgcctccgtcccagggtctgggggtggtggcatctcccctaaaggaagtggtccctctgtggcaagtgatga

SEQ ID NO: 41749 - DNA, 100 bp, Homo sapiens
caacagaggtggaatgcccaacagagggaactacaaccagggttatgtggtccgaatcagtggtgggaacgacaaacaaggtttccccatgaagcagggt

SEQ ID NO: 41750 - DNA, 75 bp, Homo sapiens
gtgacaccattgattttgaaactactcattaacaaagttatgatgttttgtggaatgaaaaatggagcaattcga

SEQ ID NO: 41751 - DNA, 83 bp, Homo sapiens
gcctgcaggatggcgcggccgagtccccgtacggccacccggcgggtgtgtgccctcttcctgattctggagaaaaatgccgg

SEQ ID NO: 41752 - DNA, 83 bp, Homo sapiens
cccgacctggccgcggagccgcgagcgtgaagccgccgccttccgggagactggtctctgtgctgacttccacccgagtgggg

SEQ ID NO: 41753 - DNA, 74 bp, Homo sapiens
gaaaacctccttatgctgatatacatccaatgaggggatgactaatccaactgctgaggtctccctttatgtgt

SEQ ID NO: 41754 - DNA, 100 bp, Homo sapiens
gtatcaggtaacaaattagaagaaagatgctggtttcgagttttggagatccttgttttttatggaacacagttctgtaaaattttcataagattccttg

SEQ ID NO: 41755 - DNA, 100 bp, Homo sapiens
ctccctggatgccctgaagatcagcatccgccagctcaagtggaaggaggagtctccccaggacagtgctatcacccgggatattaaccgaacattccca

SEQ ID NO: 41756 - DNA, 83 bp, Homo sapiens
gctctctagaaactcgctctaaagacggaaccgccacagcactcaaatcaacaggcggtccttcgggtcggagtggacatcgg

SEQ ID NO: 41757 - DNA, 100 bp, Homo sapiens
gatttcctcatcctgaaccggactgtaaccccagtgaagctgccagtgaagaaagtaacagtgagatagagcagcaagtgaagtcttctgttggggacag

SEQ ID NO: 41758 - DNA, 82 bp, Homo sapiens
cctggatcttcgaacttttgacacggctttggaaacgacgtcatgtgttagcttttatctgacaagcatatatgatcattca

SEQ ID NO: 41759 - DNA, 75 bp, Homo sapiens
gctgcagcgggaaagagaacagagagtcctggggacaggatgaccagtgtcccagtgaaggaacgagtgaaggtg

SEQ ID NO: 41760 - DNA, 100 bp, Homo sapiens
gagtacaaagcgggcgacctggtcttcgccaagatgaagggctacccgcactggccggcccggtttcttaaacaattaggtctacatcctaactggcaat

SEQ ID NO: 41761 - DNA, 75 bp, Homo sapiens
cttcttcatggaccatccaccagcactcctttaaagtgggcactgcaaaagtgcaattctgtggtgttcttggtc

SEQ ID NO: 41762 - DNA, 80 bp, Homo sapiens
gatctgaagagctatggtgaaacaccactgaagcattgccaaggtcagtaacagatccaagagatggaaagagagtagcg

SEQ ID NO: 41763 - DNA, 90 bp, Homo sapiens
ggccacagaagttgctgctgacgctctgggtgaagaatggaagggtatattcaggaattttgatgatgccttcctgccagttctgaagcc

SEQ ID NO: 41764 - DNA, 90 bp, Homo sapiens
gccctcatggggaaaatctccccggtgactttcagtgtgtagcccacaatgccctggagtgtgcacgagccatctacgcctacgccctgc

SEQ ID NO: 41765 - DNA, 83 bp, Homo sapiens
cctctgcccccccttccccacgcaaccccagatccatttacactttacagaggagctgacaagcacaagtgtggaacacatca

SEQ ID NO: 41766 - DNA, 125 bp, Homo sapiens
ccagttacaagcgtcttgccaccggcttccctttgtaaattgagctctgcacgctggggagtttgttgggcatgatgccttcttctgtagagtgggcgctttgcagaatacgtgttgaatgaaat

SEQ ID NO: 41767 - DNA, 75 bp, Homo sapiens
aatcaaggggtgtggaattaccttcactctgggaaaaggcactgaagttgccaggtgactttatacacactttgg

SEQ ID NO: 41768 - DNA, 73 bp, Homo sapiens
ggctccccccacacccctcacccctacctcacacacggaaagctgccttggaagacacactggcagaaacgga

SEQ ID NO: 41769 - DNA, 100 bp, Homo sapiens
cgaggactgcagtctggagttggagcccttgtcccaaccagggctggataagaagcaggcagcataagaggccgagggcgaggtgcagctggcaacagag

SEQ ID NO: 41770 - DNA, 100 bp, Homo sapiens
ctgctggtgggactcaatgttctcgatgccaatctctgcttgaaaggagaagacttggattctcagaaaagaatggtttgtcattcattgaaacttcggc

SEQ ID NO: 41771 - DNA, 82 bp, Homo sapiens
taaagaagatgatgctccaagaacaatagcttgccctcataaagaggaattctaaggaaaggtgcaaagctgttcttccgcc

SEQ ID NO: 41772 - DNA, 87 bp, Homo sapiens
gtcgtggaagcaggactgcgccgcgtcttcctcaagggagtgcatccgccccaacccttttccccctcgtctcctgtgagaattccc

SEQ ID NO: 41773 - DNA, 100 bp, Homo sapiens
caccttcaaaatggagatgttgttgggcagcattcatttcctggcagggtcacctctgtccagtcagccagtcttaatcaccgtccagcggcagctacca

SEQ ID NO: 41774 - DNA, 100 bp, Homo sapiens
cggcagcaagcctctgcaaatctgggacaaaaagcgctttggctctgccctggtgcccactgggaacctgcagttgaggaagaaggtgtttgagaaggac

SEQ ID NO: 41775 - DNA, 75 bp, Homo sapiens
ctagaggcaaacttttgtctctctcggttgctgaaaagccaggagtcaaaatgactgagcgctttgactgccacc

SEQ ID NO: 41776 - DNA, 51 bp, Homo sapiens
ggcagacagcgagtggcgacgatgtcatcatggtcacaggagaccatccaa

SEQ ID NO: 41777 - DNA, 100 bp, Homo sapiens
ccttcagctaaagcagctattgactggtttgatggtgaggaagaggatggagatgaagatgaggaagctgagtcagctacgggcaagcgggcagctgaag

SEQ ID NO: 41778 - DNA, 98 bp, Homo sapiens
tgacacccacacgcaggagccctctgcccagcaggtggagctggccctgctacagcgctcctaccaggacctggcctcgcagatcaacctcatccttc

SEQ ID NO: 41779 - DNA, 100 bp, Homo sapiens
cggaagtgcagctgcctcagttcttagcgcaggcatgtcagagcgggagcgacaggtgatgaagaagctgaaggaggtggtggacaaacaacgcgacgag

SEQ ID NO: 41780 - DNA, 75 bp, Homo sapiens
caggggaaccgcctcaccgttctgcccccagaactagacttaattcagtgcacaaatgagatgaatgtgaacatc

SEQ ID NO: 41781 - DNA, 88 bp, Homo sapiens
gaaggtctctggagacatcttcagcagcgttctcccggggaagtacttggaagagatcgccacacagatgcgcacgcacagcatcaac

SEQ ID NO: 41782 - DNA, 136 bp, Homo sapiens
gccctggcgctccaggggcgggaactggccgggaggaccgcgcgggagagcacggatgggcaccctgggctcgatgccagaacacaaagcgtgaatccggaagaaaagttcaatctggaaacatcaatgctgccaa

SEQ ID NO: 41783 - DNA, 99 bp, Homo sapiens
caggtaccttatatgaaggggaaaaatttcaacttctatttaaatttagtagtcgatatccttttgactctcctcagcctccagtctgtggactttgaa

SEQ ID NO: 41784 - DNA, 100 bp, Homo sapiens
agcagatctactactcggacaagtacttcgacgaacactacgagtaccggtttcgtttataatgtcagcccttatatggagtatcatcctggtggagaag

SEQ ID NO: 41785 - DNA, 98 bp, Homo sapiens
ctcagcctctcgagtagctgggattacagaatggagatgtatgcatttcgattcttcatccgcctgtagatgacccacagagtggagaactgccttct

SEQ ID NO: 41786 - DNA, 82 bp, Homo sapiens
tccagaaactgcgaggatccgagcgtactgtttgtgcaccacaagatatggctcgtggacagcagaaaattcagtctcagca

SEQ ID NO: 41787 - DNA, 101 bp, Homo sapiens
aaggaccgaacccaggagctccgcacgatcgcccaggaccacaccgcagcgtaactgcaggcctctcagcgaaaaagggggaaagcaaagacccgggtgtg

SEQ ID NO: 41788 - DNA, 98 bp, Homo sapiens
tggagcaagggaaagaggcctggagtatgaagagacatgagatcatggtggccaaacccacaggtgctggagaatctggtaaaagcaccattgtgaag

SEQ ID NO: 41789 - DNA, 82 bp, Homo sapiens
ggcatctgcaaaattcggccgcccaaggttatcttatgatgaggcttttgctatggctaatgatcccttggaaggcttccat

SEQ ID NO: 41790 - DNA, 82 bp, Homo sapiens
cacaggagacgtagaagaggagagacctcccagggacgtgcactcagaaagaattggtagggtgcccccctttttcacagag

SEQ ID NO: 41791 - DNA, 76 bp, Homo sapiens
caggattggatttgaatctcttacatgccatacgtgcttggttaccagatgtggtggtttacccaacaacattgtg

SEQ ID NO: 41792 - DNA, 75 bp, Homo sapiens
caaaactgttcggacttccccgttagaactcgcgtttccacttcagagatctggctggtaatcctggtggacctg

SEQ ID NO: 41793 - DNA, 100 bp, Homo sapiens
agttctacaacctggtgcgcttccggatcgggggcaagcggaaggtgatgcccaagatggaccagtcagagcaccataacatggtgtgggaagtgaagac

SEQ ID NO: 41794 - DNA, 74 bp, Homo sapiens
cgggtggccccgcgctgcgcccgccctcgcctcacctggcgcaggggtgacagtccaaagattgacttggccgg

SEQ ID NO: 41795 - DNA, 100 bp, Homo sapiens
agaaagctaggccatctgaataactttactaaggttgctccttgagggcaggacagttcttatggctttatccgttgcgtaagcacagagaggtctgcga

SEQ ID NO: 41796 - DNA, 100 bp, Homo sapiens
tcatcggctcccagagaaaaatcggcagatgttacagctgctcatgaaccacttggcaaagagtggagtcaacatatcaatggagcaagtcacagtcgtc

SEQ ID NO: 41797 - DNA, 89 bp, Homo sapiens
cttccttcgctaacgcctcccggctctcgtcagcctcccgccggccgtctccttaacaccgaacaccggcatccgcttcgatcctgaaa

SEQ ID NO: 41798 - DNA, 78 bp, Homo sapiens
aaggatgacctcattctgaaagtatacatactattgcccagaagaaaagatgtttggttttcacaagccaaagatgta

SEQ ID NO: 41799 - DNA, 82 bp, Homo sapiens
cggcagcggccggagccgggccgggcagctagcagggcgcttcggggagttcccattagacttgaagttgggccacgtgata

SEQ ID NO: 41800 - DNA, 100 bp, Homo sapiens
agaataacctccagtatgttgccatctctaacctaccagctgccactttccagatcaagcttcaggagtctccggaagacatgcctgcagggcagacacc

SEQ ID NO: 41801 - DNA, 100 bp, Homo sapiens
ggagaaggatggcatcaccgttgtggtgaaatgacaatggatgctctgttggctcgattgaaacttctgaatccagatgaccttagagaagaaatcgtca

SEQ ID NO: 41802 - DNA, 83 bp, Homo sapiens
gcggaagcggcggcgggagcttccgggagggcggctcgcagcacccagtcagcttgaagagtttcaaatggaccctaccactg

SEQ ID NO: 41803 - DNA, 98 bp, Homo sapiens
gtagctgggattacaggcacccgccaccacgcccagcctgaaagaatagacccaagcgcatcacgacaaggatatgatgtccgctctgatgtctggag

SEQ ID NO: 41804 - DNA, 83 bp, Homo sapiens
cagatggtggctcccggagtccagggggaaatttgcagtggtgagaaaatgtataaagaaagattctgggaaagaatttgctg

SEQ ID NO: 41805 - DNA, 82 bp, Homo sapiens
gcgcccccgcggctggagggtgcaaacggggattcagcgtccgatcctttggaacagggactcacgtgaagcttccaggacc

SEQ ID NO: 41806 - DNA, 98 bp, Homo sapiens
tggaaggatcataggtggcactcatgtctcactgccccactcaggggcaggaagtcaatgaagctgcttgcgacatcgcccgacaagtggctgatgaa

SEQ ID NO: 41807 - DNA, 73 bp, Homo sapiens
cggccatggtccaaccttgaagcagcgatggattttgggtggggaagtcctccttgcggagttggcgccagct

SEQ ID NO: 41808 - DNA, 83 bp, Homo sapiens
ccgagccgtgtttccttccatcgtcgggcgccccagacaccaggttaaataggattgcgaatcaggtggccattcagcggaag

SEQ ID NO: 41809 - DNA, 100 bp, Homo sapiens
ttcgccttgggaaggggtcgagggaagcagttagacggctgccgggcggcggctgccgcgcggcacacaatgtctcggtccagctcgacttccagctcag

SEQ ID NO: 41810 - DNA, 100 bp, Homo sapiens
cggccatgcagctgagtgtaatgttcacggcgtttgcattatggcaggagagctggctgacaaaaaggaccgtgatgcatcaccttccaaggaggaaagg

SEQ ID NO: 41811 - DNA, 50 bp, Homo sapiens
ttgttccctgacaactttgtaagagtattgttgcagcatctggcagtgag

SEQ ID NO: 41812 - DNA, 100 bp, Homo sapiens
agtcatcgcggatttgcaccccgtggggtggtgcacacagaacaacaaggtgttgatgccgccggacgatcgcccaggaccacaccgcagcgtaactgca

SEQ ID NO: 41813 - DNA, 83 bp, Homo sapiens
atgcagctcactgatttcatcctcaagtttccgcacagaacccagcttagactagaaagtctagaagacacacacataatgaa

SEQ ID NO: 41814 - DNA, 90 bp, Homo sapiens
taacatttcttggaattggactgtgggcatggaatgaaaaatggcaccctgtgctgcgcacactaaagaaccgcattgaagagaacactg

SEQ ID NO: 41815 - DNA, 50 bp, Homo sapiens
atcgctaccatccaggagtatcagaggaagtactgtgagagtcttgcctg

SEQ ID NO: 41816 - DNA, 75 bp, Homo sapiens
ccgacttcgatgatcgtgtgtcggatgaggagaagattgctgacagaactggaatctcctgcttggtggcccttt

SEQ ID NO: 41817 - DNA, 100 bp, Homo sapiens
agtgaggatgctagccaagaaacctggatggaaagaaactaattttcaggaaggtggagtgtttacttttggagctggagggtatggtcagttgggccat

SEQ ID NO: 41818 - DNA, 101 bp, Homo sapiens
aaaagaaacctagcaacaaaaagaaagctgcgttaatgtttgcaaatgcagaggaagaatttttctatgaggatgagaacaagttgagcagtgccaacggc

SEQ ID NO: 41819 - DNA, 89 bp, Homo sapiens
gtgggaagagtacatctaccttcgaggcaggagccctctcatggtgaacagcaactattatgtcatggcagcctggcatcctcgctaca

SEQ ID NO: 41820 - DNA, 51 bp, Homo sapiens
gctctcgaggctgctaagagactaaccgattctggtgaacaagaggagcac

SEQ ID NO: 41821 - DNA, 83 bp, Homo sapiens
gagcggccgggagcccgccgcgctggtagcggtttggtgcacctcgatttggaggaagtagggcagggcccttatctggaaag

SEQ ID NO: 41822 - DNA, 74 bp, Homo sapiens
cgggacctgttggttgtcgcccatgatctgatccggaagatgtcaccttgttgacccgaatgatcagaaaaaga

SEQ ID NO: 41823 - DNA, 100 bp, Homo sapiens
cagctgggcgagaagctgctccggcctagcctggcggagctccacgacgagctggaaaaggtgaaagaacttgtcctggacaacagtcggtcgaatgaag

SEQ ID NO: 41824 - DNA, 100 bp, Homo sapiens
tgagaggatgtggtggtctactctgatgtcaatcttgagggctagggctgttttgctgcagcttctgaagtgttaaagcacttgaaggaacgatttccgc

SEQ ID NO: 41825 - DNA, 78 bp, Homo sapiens
cttgcctcaggccagtcgcctccaggccaagagggatccttcacccgtgtctgccgccaccggcacggccaggccagc

SEQ ID NO: 41826 - DNA, 75 bp, Homo sapiens
gctgatgaatccagcagcagcatcctaaaacctctcaaccccaagactgcttctgagacagaaacagatatctgt

SEQ ID NO: 41827 - DNA, 100 bp, Homo sapiens
ctaaaagacgacggcctgcacgttcaatttttgatggtttccgggattttcagactgaaactagtactaggttttgacaagcttgcatcatgcgtgagta

SEQ ID NO: 41828 - DNA, 125 bp, Homo sapiens
cttggacgtcagcatgggggcgcaggagccctcccggcccctattttcccttataaaggtaaccatgtgcgaccgaaaggccgtgatcaaaaatgcggacatgtcggaagagatgcaacaggact

SEQ ID NO: 41829 - DNA, 78 bp, Homo sapiens
tcaggtcctcgggggcggcggccacgccaaggacgggatgattgtcttttgaaagtgtggtatcctatgactggttgg

SEQ ID NO: 41830 - DNA, 50 bp, Homo sapiens
gggccgggctgcgcccgcttcttgcaggggccccaactcccacctgtccc

SEQ ID NO: 41831 - DNA, 100 bp, Homo sapiens
tcttgaagttagtgagaccaaaaacccaccaattctggacacattgggattaaaggccaagtcctgtatctgccatgtctgtggcgtccacctcaacagg

SEQ ID NO: 41832 - DNA, 112 bp, Homo sapiens
gcgcagtacgtttctccagagctgctcacggagaagtccgcctgtaagagggtaagagtaaagtctccaccagaagctggtacccagttaccaaagatcatcttcagcaggg

SEQ ID NO: 41833 - DNA, 97 bp, Homo sapiens
tgaagctgccgccgttgcctccgccgccaagagtgagcgagcggacccgcgatgggatgatgacctggaagaaggtgaagtgaaggaccccagtgac

SEQ ID NO: 41834 - DNA, 100 bp, Homo sapiens
atattcaccggacaagccaacgtcgttaagacaggctcttgccatgttgcccgggctggtcctgaactgctgaattcaagtgatcctcccaccttggcct

SEQ ID NO: 41835 - DNA, 88 bp, Homo sapiens
aacctccgaaagctcagcacacactcccgcaggatcccgccattgttcagtattgaagaatgtcgcaatataatcgtgcagtttggtg

SEQ ID NO: 41836 - DNA, 50 bp, Homo sapiens
cctcccacagtgctgggattacagctcgcaaaggatctccttcatccctc

SEQ ID NO: 41837 - DNA, 75 bp, Homo sapiens
tgcaaaaacaagctcagggatcccactgattctactttacgatcctgataacttaagtgactctctcttttccgg

SEQ ID NO: 41838 - DNA, 75 bp, Homo sapiens
gggaaatgtctgccgccgccggctctcgggagcgcaacactgcagtggtattcatgggtagtttgaaatatccag

SEQ ID NO: 41839 - DNA, 90 bp, Homo sapiens
agaagatgcctttaccgacctttcctgttttccagcacccaacataacttgtaaggattccagtggcaatgaaacacattttactgggaa

SEQ ID NO: 41840 - DNA, 98 bp, Homo sapiens
gggacttgggcccagtttatggcttccagtggaggcattttggggcagaatacagagatatggaatcagatcatggaagggaagtggttgctgtgtat

SEQ ID NO: 41841 - DNA, 83 bp, Homo sapiens
ctttgaccctttgatcaacccaatctcccataggcactcagtcaaggatggacactccacagctgaccttgactgaactccgg

SEQ ID NO: 41842 - DNA, 82 bp, Homo sapiens
ctgcagtacctgcagaaggtctctggagacatcttcagcagccggtggctgctggcagcggaatcccccagatcaagtgctt

SEQ ID NO: 41843 - DNA, 86 bp, Homo sapiens
ctcgactcttggcgccaccgcctcatgcactgtgtagatgaaggatttgggggcagagcacttggcaggtcatgaaggggtccaac

SEQ ID NO: 41844 - DNA, 131 bp, Homo sapiens
ggaagtggccgtcctgagcgccatggctcactccccggtgcagtcgggcctgcccggcatgcaggtgtttcaggcctcacctgaagatcatgaaaaatacggtggggatccacagaaccctcataaactgc

SEQ ID NO: 41845 - DNA, 110 bp, Homo sapiens
gtgataaggcagctgcaaaaagcggcagcgatatgccaatttcaaggacgaacctactttgaaggagaaagaaatacagtctattcctcttctggagtatgtgttctcta

SEQ ID NO: 41846 - DNA, 50 bp, Homo sapiens
actcagatctgcaaacagcaaagcccagatattgatgatgttaagaagtt

SEQ ID NO: 41847 - DNA, 83 bp, Homo sapiens
ggcgctggaagggatgtcgtctcagcagtgctcgggcgcaggcgccatgtcagaaccggctggggatgtccgtcagaacccat

SEQ ID NO: 41848 - DNA, 82 bp, Homo sapiens
agaggccatcccagaccccagagctgtgaaccaggacaagaagaacatgctgttttctcaatcagccatgactgcctttgca

SEQ ID NO: 41849 - DNA, 100 bp, Homo sapiens
cagttccaaggactccacgggtctccacaaaccggaggactacccccagactgcagtaagtgttgtcatggagactacagctttcgaggctaccaaggcc

SEQ ID NO: 41850 - DNA, 82 bp, Homo sapiens
aataagcagcttctttagaaatgtggacaccagctctaagcgaaagacatgaggcctcagcctgaaatgaggttgttttgag

SEQ ID NO: 41851 - DNA, 100 bp, Homo sapiens
tgaggagcctgtccccaaggaaaccatggaggagcactgcaagcttgagcaccagcaggggagcatcatgacagagcctcagattacacaagtaaaccag

SEQ ID NO: 41852 - DNA, 75 bp, Homo sapiens
tgaccgcgcgactcggcgcccgcccgcggtgagatttgtggatttaaaattcacgggcagaatgtcccctttgat

SEQ ID NO: 41853 - DNA, 100 bp, Homo sapiens
gcccatttatgttttccttacatctcaatgaagcaagggactatgaaggacttgcaattgtgaccaaatatattacaaagggctggaaagaagttcatga

SEQ ID NO: 41854 - DNA, 117 bp, Homo sapiens
cgcaggagcagccgcagtagatctcgaagtatctcaaaaagtcgctcccgatccactttgatggctggagtcatggctatgatttctggatcgacgctgaccacccagacatccacc

SEQ ID NO: 41855 - DNA, 73 bp, Homo sapiens
gagccgggatctcaggtcctcgggggcggcggccacgccaaggacggcatcaagatggtgctcatgtggacca

SEQ ID NO: 41856 - DNA, 101 bp, Homo sapiens
caaggaaggcattcctcctgaccagcagaggtgtgcatcaccttcgaccaggccaacctgaccgtcaagctgccagatggatacgaattcaagttccccaa

SEQ ID NO: 41857 - DNA, 101 bp, Homo sapiens
aaatgttaatggctgtagcactgccgaagaatctgtatctcaaaatgtggaagggacccaggctgattcagtagagacggggtttcgccatgttggccagg

SEQ ID NO: 41858 - DNA, 100 bp, Homo sapiens
aagctcatgaagactgtgtaaataatatcagatttcagagacaactgtctgaaccctgccaccccttccctcctcagccaggagttcctggagataatcg

SEQ ID NO: 41859 - DNA, 87 bp, Homo sapiens
ctacccagaattcaattaaagtggctcagactgctgagaaggaagaatttgaacatcaacagaaagagctggagaaagtttgcaacc

SEQ ID NO: 41860 - DNA, 113 bp, Homo sapiens
agaagaggtcccaatcccccactctttccgccctaatggaggtctccagtttcgcttcgagagcatgcagaggctctgcgacaagtacaaccgtgccatcgacagcatccacc

SEQ ID NO: 41861 - DNA, 75 bp, Homo sapiens
ctgcttcctgcttccacttccgtgaccgttagggacaagacagcaaagagcccagccaacagcgagtaaaaagat

SEQ ID NO: 41862 - DNA, 101 bp, Homo sapiens
ctcctacgtttacaacggctacagcgtggtttttgtggggactaagagtggcaagctgaaaaaggtgagttgggaatcagactcttgagttgacagctggc

SEQ ID NO: 41863 - DNA, 50 bp, Homo sapiens
agtggatgcctccatttttaaggagtctgctacaccatttttgatttggg

SEQ ID NO: 41864 - DNA, 100 bp, Homo sapiens
aagagctcaaagatttggtttgaatgtctcttcaatctccagaaagaaatcatgaccaccccaggaaaagagaactttcgcctgaaaagttacaagaaca

SEQ ID NO: 41865 - DNA, 95 bp, Homo sapiens
gctttcacttatattaatctggataaagcggttcttgatcccaaagagaagattgatattgggctgcctccacccaaagtctcccggacccaaca

SEQ ID NO: 41866 - DNA, 90 bp, Homo sapiens
gcgatgggcgacccggaaaggccggaagcggccgggctggatcaggatgagtcattaacagctgaagagaagacgattacagaaaagcac

SEQ ID NO: 41867 - DNA, 75 bp, Homo sapiens
aaaccagaaagttcattgggcctgcacctccaggggatcccaacaagccctcaggattcagaagtgttaaagctc

SEQ ID NO: 41868 - DNA, 94 bp, Homo sapiens
caaccgccagatcaacctggagctctacgcctcctacgtttacctgtccatgataacgaaggaggcccaacttcattcaataaggagcctgacg

SEQ ID NO: 41869 - DNA, 87 bp, Homo sapiens
aacgagaaccaagtgcggacgctgtgcgagaagggaggcaaacttggtcgatgtaagcggtggcttggagacagaatcatctaatgg

SEQ ID NO: 41870 - DNA, 51 bp, Homo sapiens
ggagccgggggaagctggccttgggtgtgttgcaggtgccatgtatatcac

SEQ ID NO: 41871 - DNA, 83 bp, Homo sapiens
gcagaattaccgcctcttctttaacaatgcagatcttcgtgaagactctgactggtaagaccatcaccctcgaggttgagccc

SEQ ID NO: 41872 - DNA, 100 bp, Homo sapiens
gcagcagcggctcctcaacacccctcgaagctgcacatcattgactcctgggcccaactgtgaccgatttaaactgcacataccatatgctggagagaca

SEQ ID NO: 41873 - DNA, 50 bp, Homo sapiens
cccatcttcccttcacacctgatttcaggtatgctgctgaaagtgggaat

SEQ ID NO: 41874 - DNA, 75 bp, Homo sapiens
agcaagtgcagatagatggccttattgcagagggaatggcatacatcgagcggaagaactacattcaccgggacc

SEQ ID NO: 41875 - DNA, 100 bp, Homo sapiens
tgaaatgtcatgcctctgaaaatgaagtgaacagagtatctgtcaggcaagagctgctgtgatggtttatgatgatgccaataagaagtgggtgccagct

SEQ ID NO: 41876 - DNA, 83 bp, Homo sapiens
cgggagacacagtgtcagaattacaagccaacaagtcccaaatttggaaaagctgactcatatgaaaagctggaaaaactagg

SEQ ID NO: 41877 - DNA, 100 bp, Homo sapiens
cgggacagagcggtcggtgacagcctcaagggcttcagcaccgcgcccatggcagagccagaccactgtcccaggtgccctccggctctttgtaaatgga

SEQ ID NO: 41878 - DNA, 98 bp, Homo sapiens
cgcgcgcagggcctgcagcgggagctggacggcgagcgcgagcggcgcgagaaaaccgcgctgagcacgttcttccaagaaaccaacattcccaacag

SEQ ID NO: 41879 - DNA, 75 bp, Homo sapiens
gctcctctgattccttcaacgaggacatcgctgcctttgccaagcaggcccgggaggtcaagcgggaggccctgg

SEQ ID NO: 41880 - DNA, 131 bp, Homo sapiens
ccgccgccgccgccgcggtttgtcgccagaaggaagatggcggatctggaggagcagttgtctgatgaagagaagcttcccatcgacggtcagtgcgcacgttgtaatcagctgaggccatgtcaggagac

SEQ ID NO: 41881 - DNA, 82 bp, Homo sapiens
caaaatcagacctctgtggcagcattttttccagaacacaaaaggtgaaatgacaatggatgctctgttggctcgattgaaa

SEQ ID NO: 41882 - DNA, 96 bp, Homo sapiens
tacagtggtatttgaagttaaaatcctggtgggctacaaattacgattttctattgcagcagaccatgctacgagtgaaggatcctaagaagtcac

SEQ ID NO: 41883 - DNA, 100 bp, Homo sapiens
agtatgtttctcgcatgaaggagacacagaagtccatctattacatcactggtgaggaagaggatggagatgaagatgaggaagctgagtcagctacggg

SEQ ID NO: 41884 - DNA, 101 bp, Homo sapiens
atttgatgaggtggatctgacagatgccagcgtagctgaatccagtaccaaaaacgtcaacaacagttttacggtctctaattaacagaagatggcaaagc

SEQ ID NO: 41885 - DNA, 83 bp, Homo sapiens
gattgagttaatgaacttcacgcctcagcgtccaggactgctcctgagaaggatggagctgaagcccctccgtgtgtacagtg

SEQ ID NO: 41886 - DNA, 83 bp, Homo sapiens
ccgacatgttcacgcacgggatccagagcgccgcgcacttcgtcatgttcttcgcgccctggctgatcagctgaccgaagaac

SEQ ID NO: 41887 - DNA, 50 bp, Homo sapiens
ctcccgagaagctgggattacagagcgatgaagtaacttgatttgaacaa

SEQ ID NO: 41888 - DNA, 97 bp, Homo sapiens
tccggaagaatcctgagttccgtgtgcagttccaggacatgtgtgcaaccattggcgtggatccgctggcctgacccttttggagagaagcggggcc

SEQ ID NO: 41889 - DNA, 74 bp, Homo sapiens
gctaggacgcggaacatcccagaggccagcatcaacatggagtgcatccgccccaacccttttccccctcgtct

SEQ ID NO: 41890 - DNA, 131 bp, Homo sapiens
cttaccctcttcgacgatgagtttgagaagaaggaccggacatacccagtgggagagaaacttcgcaatgccttcaggggaagttcttcaggtgcaccgacttgtccaagatgacagaggaggagtgcagg

SEQ ID NO: 41891 - DNA, 75 bp, Homo sapiens
tatcagatatgcaagtctgtgaattctgaagtcctgagcgaggagcccattttgaagtggtataaagatgcacat

SEQ ID NO: 41892 - DNA, 75 bp, Homo sapiens
ccgctctggtgttcttggacaaaagtcttactactttgaccgcgatgatgtggctttgaagaactttgccaaata

SEQ ID NO: 41893 - DNA, 75 bp, Homo sapiens
ccggaccccggcgcgctgaatgcagaatgaagagcttcgaaacttgtctttgtctggccatgtgggatttgacag

SEQ ID NO: 41894 - DNA, 51 bp, Homo sapiens
aggattgagatttgtgtctctgactgctcctctggtgcaagtgtggtagct

SEQ ID NO: 41895 - DNA, 75 bp, Homo sapiens
ctgctgtttaccttggcgaggcctttcaccaagtccatggtggctgcagtgggacaagagccacaggtatttgga

SEQ ID NO: 41896 - DNA, 100 bp, Homo sapiens
gtccgcaccaggggccctcagggaagagaccctgcaaagatcctgggagaccaaggttctgctccagacgagcccttaccacgttgactcactcctgcag

SEQ ID NO: 41897 - DNA, 100 bp, Homo sapiens
taagaatcccaatgcaccattccagatccggcacagtgacccagagagtgacttttatcgtgaaacaaagagtcctcttcgtggaaaagaaaaaaatacg

SEQ ID NO: 41898 - DNA, 100 bp, Homo sapiens
gttggagggcggtactttacaactacacgccaggtgattggtgaaaacactaaacaaccctgagcccagggccaacccctacggaacaccactactttac

SEQ ID NO: 41899 - DNA, 82 bp, Homo sapiens
gtgtccctgcagcgaaggatcctgagggtcaccatgaagttcaatcccttcgttacctcggaccgcagtaaaaaccgcaaac

SEQ ID NO: 41900 - DNA, 74 bp, Homo sapiens
gagcctccggccgcgcgcctctaaggccccggcgttcatggaaatttggtgagcggcctccacctaaacgactt

SEQ ID NO: 41901 - DNA, 98 bp, Homo sapiens
aaaaaggataaggagatcatagcagagtacgatactcaggtcaaaggtggagtctttcattttggatcaggatgatttggaaaatccaatgctggaaa

SEQ ID NO: 41902 - DNA, 83 bp, Homo sapiens
ctccccaggggagttctctgtgtctgtgaagtacggacattgctgcaggagaagaggttgccatcaagcttgaatgtgtcaaa

SEQ ID NO: 41903 - DNA, 75 bp, Homo sapiens
cctgcatcaaggaggccattctcttgcccgtctgccgtttaagcgcctgaatcttgtcccaaaggggaaagccga

SEQ ID NO: 41904 - DNA, 100 bp, Homo sapiens
gcagcccagacactgagagccgctttcatcaagattgaaactcccatgatgaacatcatcccagggggagccgtggccaagcctttcatcacttatcaca

SEQ ID NO: 41905 - DNA, 83 bp, Homo sapiens
ttccgatttaaagctgagctgcgaggaaaatggcggcgggaggatgataatgaagataattcaaatgatgggacccagccatc

SEQ ID NO: 41906 - DNA, 99 bp, Homo sapiens
atctctctcatctcgctcggctgcgggaaatcgggctgaagcgactgagtccgcgatggagaatattatccagcaatgcaaatgaacaaactataacta

SEQ ID NO: 41907 - DNA, 100 bp, Homo sapiens
aggacttcagagagcccatgtcctctatttcaaaaatgggccaaacgtaccaagaaagtcgggatcgtcggtaaatacgggacccgctatggggcctccc

SEQ ID NO: 41908 - DNA, 98 bp, Homo sapiens
ttgagcacagcagccgtcctatcaatgtgattaattggtgtaatacggtgcccagtatgccgccaagaatgcagacagatagaccttgtggataatta

SEQ ID NO: 41909 - DNA, 98 bp, Homo sapiens
ggcgagctgggtggtctggagaccatggagaccctcacggagctgggcgacgagctgaccctgggagacatcgacgctcgctctcgaaggcaggagcg

SEQ ID NO: 41910 - DNA, 99 bp, Homo sapiens
gccagagagggcctcgggaagagatgcgaggatgacaaggacctacagatagaacgagagaggagttcatataatatatctggtggctgcacggccctc

SEQ ID NO: 41911 - DNA, 75 bp, Homo sapiens
cccctaaagcggaaccggatcaccgagggcatttacggcaggtcagcacctcatctatgggcactttaccaaagc

SEQ ID NO: 41912 - DNA, 80 bp, Homo sapiens
cgcggtagctgggaccgccgttcaggagcttactccacgggaacagcctctagataatctgagttgttgaaaatacgaag

SEQ ID NO: 41913 - DNA, 99 bp, Homo sapiens
ttccagcacagctaccgcctgctggtgcctgagattctagactttggctacccacagaattccgagacaggcgcgctgaaaaccttcatcacgcagcag

SEQ ID NO: 41914 - DNA, 90 bp, Homo sapiens
ccggagccatgaggatccacagtaaaggacatttccaggccttagaggagaaaaggagaaaagaggaactagtgaaaaagcgaattgagc

SEQ ID NO: 41915 - DNA, 100 bp, Homo sapiens
tgacccttcaaattctcattttattgcctggactggtcgaggcatggaatttaaactgattgagcctgaagagttactggggcttccggatgcagatgac

SEQ ID NO: 41916 - DNA, 73 bp, Homo sapiens
caggagaaggagcagtatagtcgcctgagtggtggtggccattataacaggtgggcagaaacagcggattgcg

SEQ ID NO: 41917 - DNA, 47 bp, Homo sapiens
actgtcacaggagaactacacaatgctcttcacagaggtcctccagg

SEQ ID NO: 41918 - DNA, 101 bp, Homo sapiens
gaccatggctccctgcagtaccctttaacgtttcctgcctgcgatggttcacataataaacacaatgaattgacaggagataatgtgggtccactaatact

SEQ ID NO: 41919 - DNA, 82 bp, Homo sapiens
caaccagctgacgccggagcagctcctaacccagtgtcctcagcctgcgggggctgcgtggaggtggactcggagaccgagg

SEQ ID NO: 41920 - DNA, 90 bp, Homo sapiens
cggaaactaggaagaggaaattaactatctgtacttataaggggtgcacagagcgttttgtatgtagtccagatgaagttatggatacca

SEQ ID NO: 41921 - DNA, 75 bp, Homo sapiens
tggagctcacggagaagaaggcctccgacgtacatccagacactgaaggaccacaggccccggatggtgtgggac

SEQ ID NO: 41922 - DNA, 74 bp, Homo sapiens
ctactaccttctgtgcacatggaggatggaggcaacctgaaggtgacctttccagctcacccccagggccttat

SEQ ID NO: 41923 - DNA, 100 bp, Homo sapiens
caccctttgatgaacacaagtgtctggctgagggatgtgatccagctttgcttcctgagcccaatcacgtcatgctgaaccacctatacgcgctgtctat

SEQ ID NO: 41924 - DNA, 75 bp, Homo sapiens
tgccaatttaccagagataattgataacaccctgtaacagctgaggtgatcagcccatgacctaaacctccagac

SEQ ID NO: 41925 - DNA, 83 bp, Homo sapiens
gggatgcccagctgatcaaggagctggggctgcggctgctctatgctgaaggagaagagctggagctggtggagaaaagctgt

SEQ ID NO: 41926 - DNA, 75 bp, Homo sapiens
tggaagcaagggagcccagccggagccatgggatttatcaaagatgttcatgaagactcccttacagttgttttt

SEQ ID NO: 41927 - DNA, 100 bp, Homo sapiens
tgatcaggtggaacagattcagaaggagcaggattaccaaagggtggtgaaggcatttgtgatcctggcctcgcagttcctatcccatgacccagaacag

SEQ ID NO: 41928 - DNA, 98 bp, Homo sapiens
gctcttcattagggcaccaaagcgaagctccagagtttcctattttggagaagcagaactggttgattcatcttcattatatccggaaagattatgaa

SEQ ID NO: 41929 - DNA, 100 bp, Homo sapiens
ctgtttctgaatgagacccaaacgcagggccccttcacagatgtagtcactacaaatcttaaattgcgaaatccatcggatagaaaagtgtgtttcaaag

SEQ ID NO: 41930 - DNA, 100 bp, Homo sapiens
ttaaatcagtgcttcggggcacttagcacagcgcctggcgcaagaggcggggtttcaccatgttgcccagactggtcttgaactcctgagcttaagcaat

SEQ ID NO: 41931 - DNA, 75 bp, Homo sapiens
gcgcggggaaccaaggagacgctcctggcactgcagttgtcgagatgtccacagaaggaggatttggtggtacta

SEQ ID NO: 41932 - DNA, 95 bp, Homo sapiens
aataaggagcgactcttacatgatgaacaaagtactgatgacagaaatgagccgtcagactgctacagcattacctaccggtacctcgaagtgtc

SEQ ID NO: 41933 - DNA, 100 bp, Homo sapiens
cagttacgcctggaatatgaaggcttccccgtcccggaggctctgtcggtggtgagcgacgaccagtccctctttgactcagcgtacggagcggcagccc

SEQ ID NO: 41934 - DNA, 100 bp, Homo sapiens
gtgcattgtcacttgtgctgtccagatgggcacatgcagcatgctgtgctcacagcccgccggcacggcaggcctcctgcagatgcagctgatcctgcac

SEQ ID NO: 41935 - DNA, 100 bp, Homo sapiens
tgattgctggaacctaagggatgtgagaaatcactgtggagtgtcaaggtcactcctggaagcaaggcggctctagctaatttatgtattggagatgtaa

SEQ ID NO: 41936 - DNA, 101 bp, Homo sapiens
atggtccccccggtcctgctggaagtcgtggtgatggaggcccccctggtgctactggtttccctggtgctgctggccgagtcggtcctcctggcccctct

SEQ ID NO: 41937 - DNA, 100 bp, Homo sapiens
gcgggcgagcggtggtttggacgccggcggagacgcgggcgagctgcaacattattcctctgcaaagatgattgtccctggggaacagtaacaggaaagc

SEQ ID NO: 41938 - DNA, 75 bp, Homo sapiens
ctcaccccgcggccgcaccttcccgccttctcagattcatgatgttgctatcaaaagttgagaaattgtcagaag

SEQ ID NO: 41939 - DNA, 100 bp, Homo sapiens
atcacacagttgaagctccaggaggtcaaaaggcatacaagaattaaattctgaataagtctgcaggtaggatggacagttattttaaagcagctgtcag

SEQ ID NO: 41940 - DNA, 50 bp, Homo sapiens
acgacagactcagatccaagtcaacagtattgtgggattagtgatatgct

SEQ ID NO: 41941 - DNA, 82 bp, Homo sapiens
aagaggtcccaatcccccactctttccgccctaatggaggtctccagtttcggcagcccttggctggtccctgcgagcccgt

SEQ ID NO: 41942 - DNA, 98 bp, Homo sapiens
gagggcaaggggctggttgcaggtggtgctgggaggatggagaagcctggctacagataagggaccaaaatgactgactcaaaatatttcaccacgac

SEQ ID NO: 41943 - DNA, 88 bp, Homo sapiens
cccagttccaaagtgtcttaaagggctagtgaatgttcccgaggaacccattgaagaggaggaagaggaggaggaggaggaagaggaa

SEQ ID NO: 41944 - DNA, 98 bp, Homo sapiens
aagaaaacaaaaactgatgaccaagagaatgtgtcagccgatgcaccgagtccagcccaggaaaatggagaggctgctggtggtctacccttggaccc

SEQ ID NO: 41945 - DNA, 100 bp, Homo sapiens
gaggaggacacctgagtttacgtctcttccatctgctgctcacctcagctgcctgggtccccgacgagagccaggatggaatccgacgtggtaggcccag

SEQ ID NO: 41946 - DNA, 75 bp, Homo sapiens
attgtcttccaccgaaagaagaatcttcagggctcagtaaagagacaagcactatatgcctgtagtacctgcacc

SEQ ID NO: 41947 - DNA, 74 bp, Homo sapiens
tcatcctgaatgaatttagagccaaactgtccaaggctttggcagtgaagctgtacttcacaaaaacagtagag

SEQ ID NO: 41948 - DNA, 100 bp, Homo sapiens
caggccgactacctcaacctggtgcagtgcgagacgctagaggaactggtcatgctgctggagtggtggtcctgcacggagtgtacactgttcacggacc

SEQ ID NO: 41949 - DNA, 74 bp, Homo sapiens
cgaggatcgtgggagctaagaaccataaggatgagtttaccattattcctgtactggttggagctctgagtgag

SEQ ID NO: 41950 - DNA, 75 bp, Homo sapiens
aaacttaagtggaaataaactgaaagatatcagcaccttggaacctttgcctgaacagaaacagatggtggccca

SEQ ID NO: 41951 - DNA, 100 bp, Homo sapiens
ggcgaaaagggacattatgcttatgattgtcatcgttacagccggcgaagaagaagcagctatgtgatgatgatgccatttaaacgacaggctctagtgg

SEQ ID NO: 41952 - DNA, 75 bp, Homo sapiens
agagttgtaccgagactataaccacggtgtgctgaagataaccatctgtgcatgttatttgaaagcaattgagac

SEQ ID NO: 41953 - DNA, 97 bp, Homo sapiens
ccctgccttcttcctttgcaaaactgcagttttgacagcgccttcaataatctggagaatcttgtctttggcaaaggattccaagcaaagatcttcc

SEQ ID NO: 41954 - DNA, 101 bp, Homo sapiens
aggaggcggcaggacggccaagaccagcgcgagggccctgggcaaggcccgacaggtggattctgagacccattgtcatgcagaaaggtgcttcctctctt

SEQ ID NO: 41955 - DNA, 101 bp, Homo sapiens
ccatcaagtgctgtttgtatgcacgacttgaagacacgcacttatcattcagtgggtattgttgcagcatctggcagtgagactgaggatgaggacagcat

SEQ ID NO: 41956 - DNA, 97 bp, Homo sapiens
gactacggagcataggaggaaaattcatcatctggtgaaatgtccatatgagaaagtaaacttgagctggtacaatggaacggtcaacccctgccct

SEQ ID NO: 41957 - DNA, 100 bp, Homo sapiens
ggaagatgctcagaacagagcagaaatcaaattgaagagagcagttgaagaagtgaagaaattattggtacctgcagcacgtgtggttctcaaatatagg

SEQ ID NO: 41958 - DNA, 50 bp, Homo sapiens
tgcgctgaccctgactcactccagtaagactttgaccccgacgcaggctt

SEQ ID NO: 41959 - DNA, 100 bp, Homo sapiens
tcggattactaaagcagatgctgcggaattttggagaaaagcttttggggaaaaattttgaagatgtaactgagtttctggaagaggtcattgaagcctt

SEQ ID NO: 41960 - DNA, 144 bp, Homo sapiens
tgccgccgccagggtctgcagggcctgggccgccgctgctacctgcagcgccgtgtggcacgacacaaaaatcaggttggatggcaagcatgtggtgtttggcaaagtgaaagaaggcatgaatattgtggaggccatggagcg

SEQ ID NO: 41961 - DNA, 74 bp, Homo sapiens
cgagtatctggtgaagtggaaaggatggcccccaaacctaagttcgaggcccaggcgcctccatcagcgccgcc

SEQ ID NO: 41962 - DNA, 125 bp, Homo sapiens
gctggaggagctccccagctggtggctggagcgaccccttgttctttggtggcgctggtgctggagaatctggtaaaagcaccattgtgaagcagatgaggatcctgcatgttaatgggtttaat

SEQ ID NO: 41963 - DNA, 74 bp, Homo sapiens
gttgagaatttatcctcaagagtcagctggcagataatgaaattttcaccagaaagtgttgcagcgtttatagc

SEQ ID NO: 41964 - DNA, 96 bp, Homo sapiens
atctaaaggagctaggaatgcatgggatgcttatggaatgtgcgagaacacggattgcttgtcttactcagctttgcaagtcctatcccgaaggtg

SEQ ID NO: 41965 - DNA, 75 bp, Homo sapiens
actgctgaagcagctcccgcgaggaccacccgctccccaggtgtgtcctggtagacaactgctcccaggagctgg

SEQ ID NO: 41966 - DNA, 100 bp, Homo sapiens
ccacacttaagaagcagccaagccacatggaggccgctcattttggtgacctggttttaagacaattatctcctatattgatgagcaatttgagaggtac

SEQ ID NO: 41967 - DNA, 100 bp, Homo sapiens
ccccagcagtcctgctcctcgccgtaccaaacaggactcctgcactgactcctgaggacttttgtctgggattggtcatcactcttctgtaatgcccacc

SEQ ID NO: 41968 - DNA, 100 bp, Homo sapiens
caagaagccaccccctggcgagcggaggtccctcacaacatcaacttccgtgagaagaagccaaagccatccaagaagaaagcagaaggtggcggcgcag

SEQ ID NO: 41969 - DNA, 100 bp, Homo sapiens
catgaacccgagctatagagaaaggagatgaggagatctataaggacaggcagaaattctcagaacaggttttcaaagtggcctcctcagacctggtcaa

SEQ ID NO: 41970 - DNA, 98 bp, Homo sapiens
tgcaatcatttgcaccaaactgagccagagaagttccctcttttaacataaagtgtccaggaggagcatttacacccaatatgcgaaccaccaaggag

SEQ ID NO: 41971 - DNA, 100 bp, Homo sapiens
ctggagccccatattttgcagcaatctcagctctcaaagtggaggatcccttttcccccagaaattactcaatgctgaaacctctcaaagtggtattaga

SEQ ID NO: 41972 - DNA, 82 bp, Homo sapiens
ccgacgactgtgacgaggacgaggaggcagccacggggcccctgggtctggccagcatgacccagaacttagagccacttct

SEQ ID NO: 41973 - DNA, 82 bp, Homo sapiens
cacctccattggatttaaaagacagtcctcgtcagcactgactttcagctatggaatcgatctcctgggaggcccccgtgga

SEQ ID NO: 41974 - DNA, 74 bp, Homo sapiens
gagtatctggcctccatcttcggcaccgagaaagacaacaccatcactcctgtagtgggtaagaagagaaaacg

SEQ ID NO: 41975 - DNA, 98 bp, Homo sapiens
aattcatcaaggagctcatcaaggacgggaagtcactcataagcgcgctcaagacatttttgaaacgttggggttgttggagtggttggattttccct

SEQ ID NO: 41976 - DNA, 75 bp, Homo sapiens
ggtactccttcttcaatggctactctgcgcagtgtcagtgctacaatggagttctcttgtccacggagagcagtg

SEQ ID NO: 41977 - DNA, 100 bp, Homo sapiens
gcctctcgcccatcagcgcggcgctggccgagagccgcggctccgtgtttctggaaagtgacagcagatgagctctctccggaacagcacaacctttctt

SEQ ID NO: 41978 - DNA, 100 bp, Homo sapiens
cagatggcctcaaatgagagagatgctatatcgtggtaccaaaagaaggcttatgcaagcaaagatctggaggagcagttacggtctgtgtccagtgtag

SEQ ID NO: 41979 - DNA, 73 bp, Homo sapiens
atggaaccctccatcttcaacactctgaagagcggagcgggcactggacacaatgaactttgagatgctcaaa

SEQ ID NO: 41980 - DNA, 75 bp, Homo sapiens
cgtggaagcaggactgcgccgcgtcttcctcaagagttgtctgctggttctcagcttgaagaagattctgcagtc

SEQ ID NO: 41981 - DNA, 83 bp, Homo sapiens
cccaacaagaggaaagacacacctaccaagaagccagtcaagcggccagccctgggcgctgcctatggcacagccaagagcgg

SEQ ID NO: 41982 - DNA, 100 bp, Homo sapiens
gctgtgtgaggaagggctacggccactgtgtggtgggaagaggccggtccccttcccctgagcccatctacaatagcgaggggaagcggcttaacacccg

SEQ ID NO: 41983 - DNA, 100 bp, Homo sapiens
ctgcagaaccagatccgggagcacgtcatcgccatcgaaggtgacagagctgaatgaacctctctccaatgaagatcgaaatctcctctctgtggcctac

SEQ ID NO: 41984 - DNA, 75 bp, Homo sapiens
ggagaaggaaattgtcccgaatccctgcagagctaaagttgcagacaagatccagctcatcaataatatgctgga

SEQ ID NO: 41985 - DNA, 100 bp, Homo sapiens
ctgggaagatggcgaaggtctcagagctttacgatgtcacttgggaagatttcctcctctgatgctcctcttcagcctttggtatcctctccttctctgc

SEQ ID NO: 41986 - DNA, 100 bp, Homo sapiens
atcagtcaggtggccctttgggagtggacagcccatctgctggttcttgctcagaactctggttttgaccttcaggaaacattagttaaaattcaagcag

SEQ ID NO: 41987 - DNA, 83 bp, Homo sapiens
cgagggagttcgacacccaagagcagcttgtgcacgttgaaggtttagaacagatgtggaaaaatgtttacttcagagaaagg

SEQ ID NO: 41988 - DNA, 98 bp, Homo sapiens
ggagagtgacatgcagttggatggcggtgactgcgtgtgactacaggtatgtggcagctgctttggctgtcatgagaaatgtgactcagcagatcaac

SEQ ID NO: 41989 - DNA, 74 bp, Homo sapiens
tcatggccaagtttggcgctattctggcccagggcatactggatgcagaccagaatccgtagaagctagccctg

SEQ ID NO: 41990 - DNA, 73 bp, Homo sapiens
aagattatgagaaattgcagcagtcacccaaacctggggagaaggataacaaagccattgacctttgccgatt

SEQ ID NO: 41991 - DNA, 51 bp, Homo sapiens
cgagaagtccccgaccgactgacaaagaaccggcgctgcaaactgctgccc

SEQ ID NO: 41992 - DNA, 95 bp, Homo sapiens
aattatatgtaatgctctgcagagacagaaagagagattggaaggagaaaatgatgacttcctgatccatttgctaaggtggtggttgatggatc

SEQ ID NO: 41993 - DNA, 100 bp, Homo sapiens
cgcagctgggcgacatcggcacgtcctgttacaccaaaagtggcatgatcctttgcagaaatgactacattagtattgactcggagacaaaaagaggcca

SEQ ID NO: 41994 - DNA, 83 bp, Homo sapiens
ggagctgctggcgcccgcagatgacttcccaagtaagaagcggaagaggagccgctggaaccaagacacaatggaacagaaga

SEQ ID NO: 41995 - DNA, 97 bp, Homo sapiens
ccaggccgagggctgggggccagaagacaagagagacggcgaggcgcgctccctgcccggcagcgactcggaggaaatccaggatgagtcagctgtg

SEQ ID NO: 41996 - DNA, 100 bp, Homo sapiens
attgccctgaaactggttggtgaagaaggatttgtagtgtgtaatgctgtgtcatggagctaaaatcggatttttccaaggagatatcaggctgctcatg

SEQ ID NO: 41997 - DNA, 82 bp, Homo sapiens
atgatacctatcactcaagagactcttcatttagattggattctgaatatcagactttggacaaagtttaccaaatgaaaag

SEQ ID NO: 41998 - DNA, 75 bp, Homo sapiens
cttgatacagttaggagaaaggaaaacaagaatgtaacagccttgaatataaaaaggcttctgcagaaccccaaa

SEQ ID NO: 41999 - DNA, 50 bp, Homo sapiens
cgaagatgcagagttcattgttgccaagcttctgggagccagaggaaccc

SEQ ID NO: 42000 - DNA, 87 bp, Homo sapiens
gcgcgggagggcgccgcggggcagccgccgctcctccggggtcaaaatgcagatcttcgtgaaaacccttaccggcaagaccatcac

SEQ ID NO: 42001 - DNA, 77 bp, Homo sapiens
accaacggagcgctgaggcgggcgttttcttggatgaattgcttgctttggagggtctccgtctctccaccgggggc

SEQ ID NO: 42002 - DNA, 50 bp, Homo sapiens
tgacttgggagactctcacccaaccatgtctggacagaagtctattctcc

SEQ ID NO: 42003 - DNA, 98 bp, Homo sapiens
gcgttttgccagtcacctctcaactgtgtgccaaagtggctgacaagattttgaaaaagaaagaataccctctttatataaatcaaacctgccataga

SEQ ID NO: 42004 - DNA, 100 bp, Homo sapiens
gaatttccaaggggattcaaacttcaacagaatgtggcaaccagcaagataaagccgatcttatccgaccgaaacggaaatatgaaaagaagcccaaagt

SEQ ID NO: 42005 - DNA, 74 bp, Homo sapiens
ctgatattaagccatcaaatgtggaacctatggaaaaggcaatcttcatgattcctacaaatcctcctcccaca

SEQ ID NO: 42006 - DNA, 100 bp, Homo sapiens
gctgctgccgctgccgccctgagtcactgcctgcgcagctccggccgcctggctccccatactagtcgccggaactttatattgctgttggaatatctgg

SEQ ID NO: 42007 - DNA, 100 bp, Homo sapiens
tcactgagctatgatggcacgttacgctgtggggatttttccagggctatttttgaagaggccatcatgaggaagccacgagcagccgtgggaagtggtc

SEQ ID NO: 42008 - DNA, 100 bp, Homo sapiens
tgtgtgagcagtctctggacaagatgaccacactccaggaatgccagtgcatcttttgcacagctgtcgtagttcccccgctccctgggaaagcgttttt

SEQ ID NO: 42009 - DNA, 90 bp, Homo sapiens
cgaagtcgcagcgccagacccaaggcccccgagtgagcgcgggcgccgagctctacgaactcgacggggaccccaagaggaaggaattcc

SEQ ID NO: 42010 - DNA, 74 bp, Homo sapiens
cttttccctctccctttccctaaggaggaaggaacctaggaagcaagcaggaagtctggcctcgctctcggatg

SEQ ID NO: 42011 - DNA, 100 bp, Homo sapiens
cgccgctccggccacctgaccagcgtccactcaccggaggaacacagcttcattaataccaccttctgggtgaaccctcagttcaagatccggctggatg

SEQ ID NO: 42012 - DNA, 104 bp, Homo sapiens
gacaaactctggagtaattggagccaagaaatgagtatagaggggccgtatggggtctttgctggaagagatgcatccaggggccttgccacattttgcctgga

SEQ ID NO: 42013 - DNA, 111 bp, Homo sapiens
ggaagctatgggtacggaggcaactcggcgacagcaggctacagacagcggcggtttccagatggtgtcgctggtgtctctgtccgaggtgacggaggagggcgtccgctt

SEQ ID NO: 42014 - DNA, 98 bp, Homo sapiens
ctggactcatggaggctgagcatttattcaggtaggagcattgcttttcgtggtgaaagaggcaatgatgaatctgccatcgaaatgattaaagtatc

SEQ ID NO: 42015 - DNA, 50 bp, Homo sapiens
caccgctttcctggaacttgaggctcccgtcttcgtcaggaagattttcc

SEQ ID NO: 42016 - DNA, 49 bp, Homo sapiens
ctggaactcatgccactctcagagtgggctcgggatgagtttgaaggcc

SEQ ID NO: 42017 - DNA, 98 bp, Homo sapiens
accacaataatccacagccaaggtgaacctgagcaaggtgggcgagtattggtggaacgccatcctggagggagaagagcccatcgacattgacaaga

SEQ ID NO: 42018 - DNA, 82 bp, Homo sapiens
tgaagctatcactgtcagtgctgaaggtcatgcatacaaggaagaggcatatggaactatttcaagaactaaatcagaaatt

SEQ ID NO: 42019 - DNA, 83 bp, Homo sapiens
cttacagccgctcgtcagactccagcagccaagatggtgaagcagatcgagagcaaggacttctgcacggacctggccgtctc

SEQ ID NO: 42020 - DNA, 50 bp, Homo sapiens
gatcattgctctttgaattccagtcccgttgagatggaagattttcgagg

SEQ ID NO: 42021 - DNA, 100 bp, Homo sapiens
atcgtgttgctcaggcaacaggagagactcctatagcagtcatgggcgaggtgacaatgctcgatcccaggttttgagagagaaaattattgaattggaa

SEQ ID NO: 42022 - DNA, 50 bp, Homo sapiens
ggagtatctgcggcagcatgacaagtgtctcgactgcattgtgagagtga

SEQ ID NO: 42023 - DNA, 83 bp, Homo sapiens
ctaaagtctgagagagggaagtcgcctctgtgctcaactcccccactggaaaggattctgaaagaaatgaagtcagccctcag

SEQ ID NO: 42024 - DNA, 100 bp, Homo sapiens
atgtcttcacctttgccggggaaaaaaagtgacaagagagacgactctgatcttgtaagggaggcatttggctttattgaaagaggtgatgttgtaaaag

SEQ ID NO: 42025 - DNA, 75 bp, Homo sapiens
tggtggaggaggtggcaggcctcggcgctgtgtaaatgagtatggaagattatgatttcctgttcaaaattgttt

SEQ ID NO: 42026 - DNA, 96 bp, Homo sapiens
aaccttgtggagaagaccccggcgctggtgaacggggcctttatcatctgctggactcctggattggttttgttacttctagacgtgtgctgtcca

SEQ ID NO: 42027 - DNA, 100 bp, Homo sapiens
gaaggccgggacccggttccccggcccacagtgggggtgtgcaaacccgagagaactggcatgcacggccccacagggcactgcccccacccccgggtcc

SEQ ID NO: 42028 - DNA, 100 bp, Homo sapiens
caggaatcctcccaccacagtctctcaaatacttgggactacagttggctactcctggcttcccctcctgaaagacggaagggtggtgacaagcgagcag

SEQ ID NO: 42029 - DNA, 80 bp, Homo sapiens
cagaggaagccttgaggacctactcacagataggaattgaagctgcggcttgatgagacccaggaggcagagttccaggc

SEQ ID NO: 42030 - DNA, 75 bp, Homo sapiens
ctccgccctggggtcattgtcagacatcctatgctcagctccttgcagcaacatgtctttcaaaacttgtcagcc

SEQ ID NO: 42031 - DNA, 82 bp, Homo sapiens
cccagaatgttcatctttagagcaagaggagcttcaagcattgcagatagagcaaggagttggcaaacatgaattgactggg

SEQ ID NO: 42032 - DNA, 75 bp, Homo sapiens
cagaaacagaggactaattttggcagttctaaatttgaatttgagaggttggaaagaaccatgactgtattcagg

SEQ ID NO: 42033 - DNA, 75 bp, Homo sapiens
ggcgccgcgctcctgctcctatgcgccgcgccccgctccctgcgcccggttctggctgaccatgttctacttgtc

SEQ ID NO: 42034 - DNA, 75 bp, Homo sapiens
gtcacctgacacatttgtgagaactatttatgcagctgtccaatgtgaaagaaaacccattgaagtatcacgaga

SEQ ID NO: 42035 - DNA, 98 bp, Homo sapiens
gattcagactttagacaaagggtgcccaccagctgacctctcctccttctcagtcagagtctctgctggccatgtttgatccactgtcttcacatgaa

SEQ ID NO: 42036 - DNA, 80 bp, Homo sapiens
agcctcctgagaagctgggactacagggaacgggctgttgaggaagaagacgctggtcccagggccgccaggttcgagcc

SEQ ID NO: 42037 - DNA, 96 bp, Homo sapiens
ggagctgctggacaagtactgtgtggcctacggcgtgggcatcattggcttcttcaagaaaggaagctgttgaagttattgaagtacctgttgcta

SEQ ID NO: 42038 - DNA, 100 bp, Homo sapiens
gggagacgagaagcctgaaaagtcgcagcgagctggagccgccggagtgacagagagtcgagggattgtggatagcctgcagaagttttcctcgctccct

SEQ ID NO: 42039 - DNA, 116 bp, Homo sapiens
cagaccctggagcctcagttggaagcagccgatccagcctgcggagcctgtggggcagatcactccaagaactgaggcccctgtcagcagtgtcagtaatagtttggagaatgccc

SEQ ID NO: 42040 - DNA, 80 bp, Homo sapiens
cagaaaacagaaatcgaaacagatacagagatgtaagcccatgaaatttgcgagaatccccgatttatcattgatggagc

SEQ ID NO: 42041 - DNA, 98 bp, Homo sapiens
cgacccgggcttctgtgaaacatggcggtaggctgggaccataacacaagcgaggtgctcagtcccctctgatctttctctatgtggttgacacatgc

SEQ ID NO: 42042 - DNA, 111 bp, Homo sapiens
aggaagtcggagtttgagccccggaggcagagcggctgccatgccctgaccctctattctgcaccctgtgagccaccgagactgaaccaaacccaggaagcggcgccacca

SEQ ID NO: 42043 - DNA, 75 bp, Homo sapiens
gggccttgcacctgaggtggctgaccgcattggggactatgtccagcaacatgcatttggccaagagacgaatgt

SEQ ID NO: 42044 - DNA, 75 bp, Homo sapiens
ggaaagacgatggagggcagcgaagagagtcaccgaccatgacgggtgcttccaatagtcctggtcagcctaatt

SEQ ID NO: 42045 - DNA, 101 bp, Homo sapiens
gcaggactcagaggcgagagtggccccagccgggccagaagcaggtgctggagaatctggtaaaagcaccattgtgaagcagatgaggatcctgcatgtta

SEQ ID NO: 42046 - DNA, 90 bp, Homo sapiens
caacctttaatgttgagtctaccaaaaagaatgaaccgcttgcttcttatttagaaagtctttatctcttgcaaggttcagtagtggcag

SEQ ID NO: 42047 - DNA, 83 bp, Homo sapiens
gagagattgaagcatgctctggaaatgttcccagaacattgcacgatgcctcctggttcaggaagatttgactgaagagaaaa

SEQ ID NO: 42048 - DNA, 75 bp, Homo sapiens
ccgagcaggctgagcgatacgacggtccgggttgctctccggcggcctccctcggaagtgttccgtcttccacct

SEQ ID NO: 42049 - DNA, 100 bp, Homo sapiens
ggaagtagagcccgggaccgccaggccaccaccggccgcctcagccatggacgcgtccctggagaaggaaatctgaaatagagtactatgctatgttggc

SEQ ID NO: 42050 - DNA, 100 bp, Homo sapiens
aaatttcttttaagtgcaaacagttttttattcaacttagaaaagaattggaactgcaagcacatgttgaccagataactgaaatggcagcagtaatgag

SEQ ID NO: 42051 - DNA, 83 bp, Homo sapiens
agctgctgcaggccgagaagcgggcagccgagaaggtgtccgaggcccgcaaaagtgtcgtgaaaactacccctaaaagccaa

SEQ ID NO: 42052 - DNA, 75 bp, Homo sapiens
ggggcccccagaagtgatcgctcagctggagaacgcggctaaagttctgatgctatgctaagaaggaatctgatc

SEQ ID NO: 42053 - DNA, 51 bp, Homo sapiens
aactacctggcattgccttttgttgaggagttcatgatcaagtgttgccca

SEQ ID NO: 42054 - DNA, 83 bp, Homo sapiens
caagcaaggcaaaccccagcacttaagcaaacgggaattctcgcattcccactggaaattcgttgtatgaatcttattacaag

SEQ ID NO: 42055 - DNA, 74 bp, Homo sapiens
ctccttctcctggagacgcaactcaagggtggtcaagacgttaaaaagaaagttcacctaagtgaaaaaattca

SEQ ID NO: 42056 - DNA, 100 bp, Homo sapiens
ccctgtatgacattccttacatgtttgaggcccgggaatttcttcgaaaaaagcttattgggaagaagggagaagatgtcaaccggacactagaaggtgg

SEQ ID NO: 42057 - DNA, 100 bp, Homo sapiens
tgggcgagccgtgcgatctggacgcggcgctgctgaccgacatcgaaggtgactcctgcacctgcgccggctcctgcaaatgcaaagagtgcaaatgcac

SEQ ID NO: 42058 - DNA, 121 bp, Homo sapiens
gttgacatggaatttgctaagaatatgtatgaactgcataaaaaagtttctccaaatgagctcatcctgggctgtgtaattgcttactcggtcatcgtgggagcactgatggcaagtggaa

SEQ ID NO: 42059 - DNA, 98 bp, Homo sapiens
cgacaatttggaggtggcaaacagcttcgcagtcactaatgcttaacactctgctccagccaaggtggtgagggcagctgttcctaaacagcgcaaag

SEQ ID NO: 42060 - DNA, 75 bp, Homo sapiens
cggtgcttctccactctgcagtggctcttccgcttggacatcaggtggtgactctcaaaaggaaataggatcatg

SEQ ID NO: 42061 - DNA, 74 bp, Homo sapiens
tttctttaaggatggtttagaaatggaaaaatgtggtgaaacttcctacatccgagtttatcctgagagaagca

SEQ ID NO: 42062 - DNA, 100 bp, Homo sapiens
tccaaaccacaagttctcaaaactctctgaaaaatggctccctccgagttaaggctcagctatgtgaaccatgcagaggacctggcctccaagctcctac

SEQ ID NO: 42063 - DNA, 100 bp, Homo sapiens
cgtgtgcctgactttggtgtctgggaaagaggaagcaaatataataatggcagcacagagctacattcgagtggattaatgacttagaaaatgatgattt

SEQ ID NO: 42064 - DNA, 96 bp, Homo sapiens
cggcggtggaggagccggagcataatggtcacggagctgctggacgtctccatggagctgggctgtttcctggctggagcgctcgtctcctctcag

SEQ ID NO: 42065 - DNA, 100 bp, Homo sapiens
gccaccccttagagatggagcaagagtacttatgaaacttatgccgccagatgccagaagtgggtggagaactgtaggagagcagacttagaagataaaa

SEQ ID NO: 42066 - DNA, 100 bp, Homo sapiens
taaagttggaacacagcagagggtgtgtaataaaatacaggttaaacccatccagagtaatggctgcggccttacccaggaccctgggggagttgcagct

SEQ ID NO: 42067 - DNA, 96 bp, Homo sapiens
cggacggggagctgaacgtggacagcctcatcacccggctgctggaggattctcgctgaagtctgttaattctactttttgagtacttatgaataa

SEQ ID NO: 42068 - DNA, 98 bp, Homo sapiens
gttgatgtttatataaagcagtgccaggagggtgaaacttcctacatccgagtttatcctgagagaagcaccagctatggctactcacggtctcggtc

SEQ ID NO: 42069 - DNA, 100 bp, Homo sapiens
tcctactacaggaaaataattgaaggcactgaagttgtccagcttcgtgctctgtctgatgatggagtatctgatcttgaagacccaaccttgactcccc

SEQ ID NO: 42070 - DNA, 87 bp, Homo sapiens
cgaggacagcagaacaaagggatagtcagaacattatgcctttttctgactccagcagagagaaaatgctccaggttatgtgaagca

SEQ ID NO: 42071 - DNA, 89 bp, Homo sapiens
ccggggacatcctcaggctggtctctgatcacagggactctgtcaccaggagactaaagtccatcaaaaacatccagaaaattaccaag

SEQ ID NO: 42072 - DNA, 102 bp, Homo sapiens
aagaccgcgcgcagggcctgcagcgggagctggacggcgagcgcgagcggcgcgagaaagaaccacgtgaatgttgagggggcgacacacaagcaggtggtg

SEQ ID NO: 42073 - DNA, 100 bp, Homo sapiens
acccatggacgttcgccagtgggttgacacagatgtggatgagcttttagaaaagtacatggactcttatgatattgttttagtacaagatgaatcatta

SEQ ID NO: 42074 - DNA, 98 bp, Homo sapiens
agcggagacctcgctgcgctcatggcgtcgcccgggcggaaggtgctctaccagcgtgcacccaggaatatccaccgccatgtgatcctctctgagat

SEQ ID NO: 42075 - DNA, 80 bp, Homo sapiens
atatccttctcaaccttgtgggatgtgaaaactctgttactgaagcggatactctgttttcaaggaagctgaatgggaaa

SEQ ID NO: 42076 - DNA, 97 bp, Homo sapiens
atgtagccacctcctaaccttcccttcttgaacccccagtggccgtcctacgggtggaagcactgaccgtatccagaagttgcggaaagagtattat

SEQ ID NO: 42077 - DNA, 100 bp, Homo sapiens
gtgcctttgatagccagtcaactatcaaagactgtgcaacggtgtttgctctgagcactatgactagctctgtccagcccttagagatttgtttgattcc

SEQ ID NO: 42078 - DNA, 83 bp, Homo sapiens
cttcaagcagcgccgcaccttcgagtgaagacatttccacctggacacctgaccatgtgcctgccctgagcagcgaggcccac

SEQ ID NO: 42079 - DNA, 74 bp, Homo sapiens
tctcattacatgactttagtggttcaatccaaagtaaactgtttcacgttagacctgtaacccaaggagatgtg

SEQ ID NO: 42080 - DNA, 98 bp, Homo sapiens
aaggaaataagaaaactgcctctgatccaagcagagaaggcgcaccctggctgacatcatcatggagaagctgactgagaagcagacagaggttgaga

SEQ ID NO: 42081 - DNA, 100 bp, Homo sapiens
ttaaagaaagagcaggacatctatacccatctggtcaaatctctgcaggaatcagacaggttgatgctatgaaactgggagtaaaggaaatgaagaaggc

SEQ ID NO: 42082 - DNA, 114 bp, Homo sapiens
gggcgtaagcggactgcagccgcgagctcctggaggcggcgggatggaggcggcggccgaggtggggctggtgtccgagcacttctcgcaggccccgcagaggctgtccttcta

SEQ ID NO: 42083 - DNA, 100 bp, Homo sapiens
cagcttcctcctgagcaaggagaaccagcctgaaaacagccagacgcccaccaagaaggcagtataccttaaatggcaagaaggaaataaatcatctgac

SEQ ID NO: 42084 - DNA, 90 bp, Homo sapiens
aacgcggccgctgtgcactctgcccatagggagtacattggatcgcagctccaagaggaggcaggtgaagcctttggcagcttctctgct

SEQ ID NO: 42085 - DNA, 76 bp, Homo sapiens
agtctcaacaagggagacatcctaagtgagaaagatcagtctaaagaaaaggagaagaaagtgaaaaaaacaattc

SEQ ID NO: 42086 - DNA, 51 bp, Homo sapiens
cagccaaggcgactgcttaacacactgagcttcttggacacttaatgattg

SEQ ID NO: 42087 - DNA, 90 bp, Homo sapiens
cttatatttccgtgagaaaaaatttgctgttgaagttcatgatccacgaagtgaaatgttcagagtgaaagaagaaagcagtagcatttc

SEQ ID NO: 42088 - DNA, 50 bp, Homo sapiens
gtttttgccaccacactccagcttgggacatacagcagctcctccagctc

SEQ ID NO: 42089 - DNA, 100 bp, Homo sapiens
ggccagagccctggatgtcatttggaaaaacactagagacagacggctggcagttggtagctggcagtgttgtgatggcttttgaagaagtatgcccgga

SEQ ID NO: 42090 - DNA, 74 bp, Homo sapiens
ggaggaggtggcaggcctcggcgaaatctagttcatatgattgaacacgcacagaaggaacttcagaagttaag

SEQ ID NO: 42091 - DNA, 100 bp, Homo sapiens
gcgagattatgagtacaacagatacagagactattacagacaatacaatcgggatgatctggttctgctgccggagaaggcaaacccgctttgagtgaag

SEQ ID NO: 42092 - DNA, 82 bp, Homo sapiens
gagcttccatcctggttcttccaaagtgcccggacccaaaacaggaatgttcggctaatgaatgagttcactaatatgccag

SEQ ID NO: 42093 - DNA, 140 bp, Homo sapiens
agaggaaacaaagcatctgataaagccactatcatggcctttgatgccctggtgaccttctgtgaagaactggggacactggggttgggaaatcaagcatcgtgtgtcgatttgtccaggatcactttgaccacaacatc

SEQ ID NO: 42094 - DNA, 50 bp, Homo sapiens
gggagcgatgcggtgcagcgcggtcgccactgggacactgtgaaccagga

SEQ ID NO: 42095 - DNA, 128 bp, Homo sapiens
tgccgactggaggctgtaccattggagtttggggactatcaccctctgaaacccataacttgaaatgcaaaatggaggacgatgcagtacctgcagccaagatgaaaattccatcatcttaaccatag

SEQ ID NO: 42096 - DNA, 83 bp, Homo sapiens
gcattatccaacggctgctggaagcacttgcacctcctgcgccgccgccccccatccaaggatatgccttcaagcctccacct

SEQ ID NO: 42097 - DNA, 98 bp, Homo sapiens
gaaaaagtggttctggaaaagcggggaaagtggaatgcagtagccctctgggcctgggatattgtggttgataactgtgccatctgcaggaaccacat

SEQ ID NO: 42098 - DNA, 100 bp, Homo sapiens
ctcatattgagagctgtcgacagttacgtcaacagaggaagagttcatcgattggtggagcaaattctttgcctccataggggagagggaaaagtgcggc

SEQ ID NO: 42099 - DNA, 88 bp, Homo sapiens
tgatccaaggaggtgacccaacagggacagggcatgaaaatcaacatggacaagaatcggaggcgaaagccagcaagcgactccgtga

SEQ ID NO: 42100 - DNA, 80 bp, Homo sapiens
tcattgctgcctggaccgtccgtgtctgtgaaagagtgtgaacatggctacgcctcttcattcccgtccatgccgagccc

SEQ ID NO: 42101 - DNA, 75 bp, Homo sapiens
ggcgcggggaccgctgtgctctcgcatgaacaaggctcagttatgatgtttgagcaccttattaattctaatgga

SEQ ID NO: 42102 - DNA, 98 bp, Homo sapiens
tggcgtgcactccgcacctcggggacattattgcgcgtggaacggctgcttttggaagttaattggccttggtcctcacagctccaaaaagaaacagg

SEQ ID NO: 42103 - DNA, 51 bp, Homo sapiens
tggcttcgtcataatactccagagcatctgacagatacgtctcatggtgta

SEQ ID NO: 42104 - DNA, 100 bp, Homo sapiens
actgttgatccctgtgacattttgggtggagttgataatcagcaaagactgctacacattgtctggcctcacaggtgcccttagagatttgtttgattcc

SEQ ID NO: 42105 - DNA, 134 bp, Homo sapiens
gtaaagtggaattgcatgggaaaatcatggaagttgattactcagtctctaaaaagctaaggtactaggttttgacaagcttgcatcatgcgtgagtataagctagtcgttcttggctcaggaggcgttggaaa

SEQ ID NO: 42106 - DNA, 101 bp, Homo sapiens
ttcacatccatgtgaaaggccagccaccagttcaggagcacttgggagtgatctagattgagctccttgatttcaaaggagaggatttatttgaagatgga

SEQ ID NO: 42107 - DNA, 75 bp, Homo sapiens
cgaacgccagggaccctgtgcaggcctgctcctccgtttgcaagggatcgtgggactttaccagatcggtttgta

SEQ ID NO: 42108 - DNA, 75 bp, Homo sapiens
ccggatcgtctttgagaagagacatgaaccatacgaattcatatgggatcatcagaggcctgcagtttgcctcat

SEQ ID NO: 42109 - DNA, 74 bp, Homo sapiens
gaggctgcgagtaaaagaagccgattccagttcctgtatgatgttcaggctaatggtcgatttgaagtgggcaa

SEQ ID NO: 42110 - DNA, 100 bp, Homo sapiens
tggagatcaagctggaacaggagttccgatcgacccggtaccaagaaggggagtgcccgcggcagtgaatggcattactgaggaagctgatcccaccatt

SEQ ID NO: 42111 - DNA, 100 bp, Homo sapiens
accctgctcagatggagaatatccgatgttatctgccagatgcctataagattatgtctcaaagaatgacatcttcgagtggtccagggaccaccgagcc

SEQ ID NO: 42112 - DNA, 75 bp, Homo sapiens
aaaataaaaaagttggtttggcattaaagggagaagatgtcaaccggacactagaaggtggaaggaaacctcttc

SEQ ID NO: 42113 - DNA, 75 bp, Homo sapiens
atccccatgctctggccgggcgcattatcactgagagcctcaacaccagccatgaccatgatgaccgctgggaga

SEQ ID NO: 42114 - DNA, 100 bp, Homo sapiens
aaaacaatcgcttcaatgatgggaaggtggatcccgccgggaggtactttgctgacttcctgggaatgaaaatggttggtgagctgctacgaatgtcggg

SEQ ID NO: 42115 - DNA, 82 bp, Homo sapiens
gcgggagttcgaggccctgcggagctgcttcgccgctgcgtgaagatagtgatccggggagacaggaacacgggcaagacag

SEQ ID NO: 42116 - DNA, 83 bp, Homo sapiens
tgccttattttttctcatggatgttcttcttcgagtatttgtagaagggtgactctgttttgagaagtgcaaccagatctctc

SEQ ID NO: 42117 - DNA, 50 bp, Homo sapiens
gacaatttccctgaactaagcgaggctgcccttccaaaggccaccatcct

SEQ ID NO: 42118 - DNA, 83 bp, Homo sapiens
ggcccactgggttccccaaagctgagaatcctgagatgttttgaacagagataaggatgaggagccaactgtaaaacaagaga

SEQ ID NO: 42119 - DNA, 83 bp, Homo sapiens
caaggatttccgggactacctcatgagataacgaaggaggcccaacttcattcaataaggagcctgacggatttatcccagac

SEQ ID NO: 42120 - DNA, 97 bp, Homo sapiens
aaaatggccaaggctactgggaaactaaaggaagctgcagtaaaggaagatgaagaagaagtttcagataagggcagtgattctgaagaagaagaaa

SEQ ID NO: 42121 - DNA, 90 bp, Homo sapiens
gctccatgaggagacaccgcccaccaccagcagcgactctgaggatggagatgaagatgaggaagctgagtcagctacgggcaagcgggc

SEQ ID NO: 42122 - DNA, 100 bp, Homo sapiens
tcctggtggtgacccgtctggctgcgttcaagtcggccaagcacaggcccgaggatgtcgtccagttcttggccaactgtgcaggaagatggaggggatg

SEQ ID NO: 42123 - DNA, 83 bp, Homo sapiens
gaaaactctagaagtctggatgtcggtgggcctctgagatatgccgtttacggatggtcctagaacaattggagattcatacg

SEQ ID NO: 42124 - DNA, 90 bp, Homo sapiens
ccgactcccagaactccggacgtgtgcggcggggcaacctgggctccttgcagctggaggtgcggctgcgggacgagacggtgctgccct

SEQ ID NO: 42125 - DNA, 96 bp, Homo sapiens
cgacggcagccccggcgcctcccgaggacgcagaggctggggagtagctgctgagactgtgccctgtccacggtgcctcctgcatgtcctgctgcc

SEQ ID NO: 42126 - DNA, 100 bp, Homo sapiens
tactggatttcttcatggtgtccattttatttagcaagatagtgacgagaggctgcgagactgtggaaatgaccctgaggaggaacgggctgggccagct

SEQ ID NO: 42127 - DNA, 115 bp, Homo sapiens
agcatgtacggcaaaggcaagagtaacagcagcgccgtcccgtccgacagccaggcccgggagaagtagctacagcaagctgggtagcaggcagatccaaaggatatcatgaagt

SEQ ID NO: 42128 - DNA, 100 bp, Homo sapiens
tggaggcgatatgggtggtccgtggcccggttcagtcgcttgcagcagcccggggaacagaagcatcaagtgtacctgatttgtgaacctatcttgcttc

SEQ ID NO: 42129 - DNA, 97 bp, Homo sapiens
ctcccctctcaggacaacccagatgtgcaacaaagtgcgatggttctatttcaccaattggcatggaaccaacgacaatgagcagtcagtgtggcgt

SEQ ID NO: 42130 - DNA, 75 bp, Homo sapiens
gaacactttgttacctccttggattctgctcctaagtgtaggagagaacttggtgcctcttccactctggagtga

SEQ ID NO: 42131 - DNA, 88 bp, Homo sapiens
gctgcaggccatcgacccccagagcaacgagtggagtcaacatatcaatggagcaagtcacagtcgtcgatgccagcttcttcttgaa

SEQ ID NO: 42132 - DNA, 100 bp, Homo sapiens
ccgctactctccgggaggggcgcttcccgacgccaaggttgaaaaagatcatctagcaaagccttttttcccagctacatataaggaatttgaaagtcac

SEQ ID NO: 42133 - DNA, 75 bp, Homo sapiens
ggaaaatatcccaaggactaatctgatcgggtcttccttcatgctgcctgctgtttcccggggagatcatgaaac

SEQ ID NO: 42134 - DNA, 83 bp, Homo sapiens
tggcagtcatggacaagagctattgatagaagagccctatgagtttgtctctctggaatggctgcaaaagtggttggatgaat

SEQ ID NO: 42135 - DNA, 50 bp, Homo sapiens
cttcagaccccaggttctttggctgaccccgcactacatctacccaccag

SEQ ID NO: 42136 - DNA, 83 bp, Homo sapiens
gaatgatcagctttgactgctttatgaccatattaatgcagatgaggcgttctttggtgaatgactggcaggaggactgggtc

SEQ ID NO: 42137 - DNA, 82 bp, Homo sapiens
catgtgtgtgcgcgcgaaggagcggaagaatggcagtgctcaaactcaccgaccagttactccacaggatccgctgaacata

SEQ ID NO: 42138 - DNA, 73 bp, Homo sapiens
caaaggccaatgttggtgctggcaaaaaggaaatgaatggggtgctgaaaggaatgctctcagaatggttttc

SEQ ID NO: 42139 - DNA, 87 bp, Homo sapiens
gagccccggctccctctgttggaccatcagggcgcgcattggaagaacgcggtgggcttctggactccctggaggaaaagcggaagc

SEQ ID NO: 42140 - DNA, 100 bp, Homo sapiens
cgagacctcctgagggaacagcactgcaaagaggaccagttacagaagtggatccgcggtaatgtgagtgcatgtgcgaactctgttttcatatttgacg

SEQ ID NO: 42141 - DNA, 83 bp, Homo sapiens
caagactctcttcgctctttgcatcttaactgcagtggtgctcatcggggactcaggcgtgggcaagagcaacctgctgtcgc

SEQ ID NO: 42142 - DNA, 82 bp, Homo sapiens
gcctgggcccgtgtgcagagccttgcccagaacccacgcctcaggtcaaaatgcagatcttcgtgaaaacccttaccggcaa

SEQ ID NO: 42143 - DNA, 101 bp, Homo sapiens
ttgatgatacccttgttgctattgacacctgccctggccaacgtcaacattgggagcctcatctgcaatgtaggggccggtggacctgctccagcagctgg

SEQ ID NO: 42144 - DNA, 100 bp, Homo sapiens
agcgtggcctccgccaccgtgcacatccgaatggcctgcctagggtagttaaaagacgagtgaatgctctcaaaaacctgcaagttaaatgtgcacagat

SEQ ID NO: 42145 - DNA, 82 bp, Homo sapiens
ccacctccaggatcaggatgcagaggacatggatttgattgacatactttggaggcaagatatagatcttggagtaagtcga

SEQ ID NO: 42146 - DNA, 85 bp, Homo sapiens
ctgatggggcagacctcccaagtcgactggaaggaccattttctgtactgtgccaaagccttcgtgtcaccatggccacacaccc

SEQ ID NO: 42147 - DNA, 100 bp, Homo sapiens
tcaagtgaagcaaaagccttccatgattacgttgaattctcttacccgcccctgattccaggagatggacatgacagccacactttacctgaagaatgga

SEQ ID NO: 42148 - DNA, 75 bp, Homo sapiens
cgcagtggtcgcttcttctccttggttttgagtttgatcgatggctgaatacccccggctggcccccgtacctcc

SEQ ID NO: 42149 - DNA, 75 bp, Homo sapiens
agctgtggaaagaagttgcaaaacactgggagccaaaaacctgtatatcatctccgtgaaggggatcaagggacg

SEQ ID NO: 42150 - DNA, 82 bp, Homo sapiens
agtagcaggcggcggcggcggaacgccaggcagcatgaagaggaaccacctcagaatatgaaaccacaatcaggaaacgata

SEQ ID NO: 42151 - DNA, 90 bp, Homo sapiens
cttttactcaagatattttgcaccgtgggttggtgtggctgaagacccagtgacaggccttcgtgatctccttcacgtctgacttcatcc

SEQ ID NO: 42152 - DNA, 75 bp, Homo sapiens
tttcaggctgaaggctctttaaaaaaaaacgagcagaattttaaacttgcagtatgagcaagctgccgatgcaga

SEQ ID NO: 42153 - DNA, 82 bp, Homo sapiens
ggaccggctgctgcaggccatcgacccccagagcaacgtgccctacgagacgctgaacaaacgctttcgcgccgctcagaag

SEQ ID NO: 42154 - DNA, 80 bp, Homo sapiens
gacccattcaggagcctccaggagcccagacaccagccccccaccatgggaacccatattgaaatgtctattggaattat

SEQ ID NO: 42155 - DNA, 75 bp, Homo sapiens
tgcaccttcaggaccagttcgcagtagcagtggaatgggaggaagaggctccaccatctcttcccctaaaggcaa

SEQ ID NO: 42156 - DNA, 100 bp, Homo sapiens
ttcttgaaacagtggagcatcatacagagtttacttgtggtttagacttcagtcttcagagccccactcagaacagtgctcggcatggcagggattccag

SEQ ID NO: 42157 - DNA, 100 bp, Homo sapiens
cgaggctgcgggaccccaggatgggggacaggaggctgcggggcctcaggtgaagcggaggctggacctggaaactgaccatcagtacctggccgagagc

SEQ ID NO: 42158 - DNA, 95 bp, Homo sapiens
ggatttttgagctggtggaagtggttggaaatggcacctatggacaagtctataaggaagaaatgttggctatttggcgatgagaggtggtgaac

SEQ ID NO: 42159 - DNA, 96 bp, Homo sapiens
gagtactcaacaccaacatcgatgggcggcggaaaatagcctttgccatcactgccattaagaaagacctggtggaagaggaggctgaggaggctg

SEQ ID NO: 42160 - DNA, 96 bp, Homo sapiens
ttggaccaagagaacaatgggaaccagtctttcaaaattatcaccttttgccatgatagcatttctttcattggacagttccttacaagggctcca

SEQ ID NO: 42161 - DNA, 98 bp, Homo sapiens
gtgagggagagaaccagcacttctgggacgcacagagaccgtgaagattccaagttcaggagaactcgaccgagcaatggtggaacaaagcggcaaaa

SEQ ID NO: 42162 - DNA, 75 bp, Homo sapiens
ccctgtcgcgaacctccggcgcgctgccccgccggaccgtggttatatcttaagtgtggtgctgctaacattgcc

SEQ ID NO: 42163 - DNA, 50 bp, Homo sapiens
cagacaggtggcgacggcagaggacatgatgccttcttctgtagagtggg

SEQ ID NO: 42164 - DNA, 50 bp, Homo sapiens
ccgagccttcccagccaatgcgcatggggaatcaaaggtggcatgccaag

SEQ ID NO: 42165 - DNA, 83 bp, Homo sapiens
gcaagaagatcggctgcggcaacttcggggagctccgcctaggaagctcttcgtgggcggtcttgactggagcacgacccaag

SEQ ID NO: 42166 - DNA, 112 bp, Homo sapiens
tcatgaaggctagtttggatgtggaggggaatagactccatctatccatatgagattcagaatggacagtttagaagaacctcagaaaaaagtctttaaggctcgaaaaacg

SEQ ID NO: 42167 - DNA, 75 bp, Homo sapiens
ccctggggccggcgatgtgccaccgaggctgaggatgatggtagattgccagagatcccgctgtgcgctggctgt

SEQ ID NO: 42168 - DNA, 80 bp, Homo sapiens
agagcataagtacctctggcttcccctctcttcaactagaggagatgaccgccgggttctgctatggcacatggaacaag

SEQ ID NO: 42169 - DNA, 75 bp, Homo sapiens
tggacaagatgaagtctttctgccaggagcgcctggaccatgctgctgagcgcctactggcacggcctccacccg

SEQ ID NO: 42170 - DNA, 74 bp, Homo sapiens
actcttcagataatcagagtggaggaagtacagccagcatggccataaaatgcagtaaaaacaaatccagttcc

SEQ ID NO: 42171 - DNA, 100 bp, Homo sapiens
ccatgaagacttgaacttaatacagcaagaaagaccatcaagtttaccaagtttgctctccaaagctcggggaattgattccagctctgttaaactccgg

SEQ ID NO: 42172 - DNA, 105 bp, Homo sapiens
aaaacatcatcgttttgaagagttctgcgttttgccagtcacctctcaactgtgtgccaaagaagtcaatgaaaggattctattttgcaaagctgtattatgaag

SEQ ID NO: 42173 - DNA, 101 bp, Homo sapiens
aaaaagacctgtggctattaagatagtaatctatgccagcaattatgacaatgttagcagaccatgcagctcgtcagctgcttgatttcagccaaaaactg

SEQ ID NO: 42174 - DNA, 90 bp, Homo sapiens
aggatatcatgcccctgtggcattgcttaatgatataccacagtcaacagaacagggagtatatgttgctgcagtacgggaattttactt

SEQ ID NO: 42175 - DNA, 75 bp, Homo sapiens
cgacatcgacctgtccgccctgcgggagaccagtatgatgtctgtgccatttgcctggatgaatatgaggatggg

SEQ ID NO: 42176 - DNA, 96 bp, Homo sapiens
cggctgtggaagagagcggcggccgctcacaacatgcacagcctggcgacggctgcgaacccctgaacagtgcccaagtgttgtctctttgttgtc

SEQ ID NO: 42177 - DNA, 100 bp, Homo sapiens
agcgtcgcttcttaggaggaggaggaagaggaggaaggagggcgagcgaggaggatggcggagtcggggctcctgacgtggttagcaggaagaagatgag

SEQ ID NO: 42178 - DNA, 75 bp, Homo sapiens
cggcttccactcaaggaccatttatgacattgcttggttcacttatgtagttcccatttgttacttcgacgagca

SEQ ID NO: 42179 - DNA, 75 bp, Homo sapiens
tttccaagccaatgcccaagacattataaacgtacaaatcaagacctaccagctcctacattccatctttcagta

SEQ ID NO: 42180 - DNA, 100 bp, Homo sapiens
aacatcagtccagcaacttccgtagttcagcatagccacttacgagaatcaaattctagaattttccagttcatatgaagaggtgatctctcaaataaat

SEQ ID NO: 42181 - DNA, 51 bp, Homo sapiens
aagcactgaaaaaggatcacgggacagtcattttgtttactcattcagccc

SEQ ID NO: 42182 - DNA, 90 bp, Homo sapiens
cctgcaccattctcctccggggggctagcaaagagattctctcgttcaggaccagaagatgacttcgaatcttgtttgagaaatatgaag

SEQ ID NO: 42183 - DNA, 98 bp, Homo sapiens
aaacatctcaccaatttcaaatctggcaaaaatctccagccctacagagactgagcggtgcatcgagtccctgattgctgtcttccagaagtatgctg

SEQ ID NO: 42184 - DNA, 96 bp, Homo sapiens
acccaggagagggctcccccatgtcagatgggaaccccgagcacccctcaggactccccagggctgaagctgggatcccggccagccaggtgaccc

SEQ ID NO: 42185 - DNA, 83 bp, Homo sapiens
gccaccgtggacagcctgccactcatcacaggcaggtaaaaatcaaggtgaccccaagaaaatggctcctcctccaaaggagg

SEQ ID NO: 42186 - DNA, 95 bp, Homo sapiens
caacacggtcctgtcactggcccgctccctggcggtgcagagaccagcatccttggagaagaatgtttactcagtgcctggctcccagtatcttt

SEQ ID NO: 42187 - DNA, 75 bp, Homo sapiens
cccaccactccctgccgaagcccagcccctgatgtcccagcagcctgctgagggatgcccaagaagttccagggt

SEQ ID NO: 42188 - DNA, 82 bp, Homo sapiens
caagttcaatgcggttctgtgctcccggagccgggcccacctggtagcaggtcacgcatgaagggagcaccgtggagaagac

SEQ ID NO: 42189 - DNA, 101 bp, Homo sapiens
gcaagatccagatcgggatttacgtggagatcaagcgcagcgatggcctcattgctacgatttcagagtaccctggtaatagctgagcatgcaaatgattc

SEQ ID NO: 42190 - DNA, 96 bp, Homo sapiens
agaaagttgaacagaacgcggctcccagccacaccaagttcagaagtggtacaccatccccaaaacgaacatctgtaggctccaggccaccagcag

SEQ ID NO: 42191 - DNA, 101 bp, Homo sapiens
cgaacaccgcgccttcggaagcccgttcggcctggaggagccgcagtgggtcccggacaaggagatggctcccgcaaagaagggtggcgagaagaaaaagg

SEQ ID NO: 42192 - DNA, 83 bp, Homo sapiens
cgtcgcccgcccagcctccgcccgacaatgcagatcttcgtgaagactctgactggtaagaccatcaccctcgaggttgagcc

SEQ ID NO: 42193 - DNA, 51 bp, Homo sapiens
agacatcgtagtgggacgaatcacagagctcaacgggacccaggtggagtc

SEQ ID NO: 42194 - DNA, 75 bp, Homo sapiens
agccttctcgacagccttttactgtgaacagtaaaatgtttattggaggcttgagctgggatacaagcaaaaaag

SEQ ID NO: 42195 - DNA, 83 bp, Homo sapiens
accaaaaacccaccaattctggacacattgggattaaaggctggtgcctctgccgagatcacccttttattccttatttggta

SEQ ID NO: 42196 - DNA, 76 bp, Homo sapiens
tttgggagaaacacagccagaagatttgggaatggatgatgaaggagatgatgacccagttcctctaccaaatgtg

SEQ ID NO: 42197 - DNA, 50 bp, Homo sapiens
gtgaccgagaccgcggccgggaccgagggaccacagccgctttgtcaact

SEQ ID NO: 42198 - DNA, 75 bp, Homo sapiens
gtcagcccttcccgccccaaagcagattcaagatggaaaaggtgatgtaaccattacaaatgatggtgctaccat

SEQ ID NO: 42199 - DNA, 82 bp, Homo sapiens
ctccttggagggccttccccctagcacctcctcaggccagccacccctgcaggacatgctggaaactgggcctgtggtgatc

SEQ ID NO: 42200 - DNA, 75 bp, Homo sapiens
tcttgctcggccgatgaagtgcagaggtttttttctgtgatgatgatgtagaagaaacacatccaatggatggga

SEQ ID NO: 42201 - DNA, 83 bp, Homo sapiens
ccggcttcggagcgggagtgttcgttgtgccagcgactaaaaagagatgagaaccacagtgctacagcagagtccagtcgcct

SEQ ID NO: 42202 - DNA, 73 bp, Homo sapiens
cctggcccccgggactccctgtgccttgcttggagctgacgccgacggggattttatattggaagacatggat

SEQ ID NO: 42203 - DNA, 104 bp, Homo sapiens
gacaccctgacggccacgaacttccgagtgggtactccaaagattcaggtttactcacgtcatccagcagagaatggaaagtcaaatttcctgaattgctatgt

SEQ ID NO: 42204 - DNA, 100 bp, Homo sapiens
gcggccgccccaacggagctgcagacgaaaggcaagaacggcgatggccgccgtaggtcaggctctgccaacataaatgaccgcagcatgctgggaaagc

SEQ ID NO: 42205 - DNA, 100 bp, Homo sapiens
ctcatgcccacacaaattattcctggcacagaaaatgatgcatcctgttgccagcagtaatccagctttctgtgggcctggcaagccttcctgcctcaat

SEQ ID NO: 42206 - DNA, 82 bp, Homo sapiens
cttttccctctccctttccctaagggcgtgatggtgggcatgggtcagaaggattcctatgtgggcgacgaggcccagagca

SEQ ID NO: 42207 - DNA, 75 bp, Homo sapiens
ctctacctggcctacttcgtgcgtgagcgagccgcctgtcttggttagatggctctggattaggattctcactgg

SEQ ID NO: 42208 - DNA, 100 bp, Homo sapiens
ggtgtggatatcagcagggaggagagtgctgaacaaggacatcgcggcctgccgcactgccaccatcacgggcacactgaagcggccgtctctgcccgag

SEQ ID NO: 42209 - DNA, 73 bp, Homo sapiens
gatcaacaaggccaaatgggacgcatggaatgcccttggcagcctgcccaagattgaaatcccagtgacaccc

SEQ ID NO: 42210 - DNA, 75 bp, Homo sapiens
gtgagcagtgcttttgaacaaggggcagatttattgaaattaactagagatgatgtgatccaaatctgtggccct

SEQ ID NO: 42211 - DNA, 100 bp, Homo sapiens
aaacgtgtaccatttccacttgatgtcatcacgcagaaggggtgaaagagactcggtgacagatacagggactttgaacatgtcggggatcgccctcagc

SEQ ID NO: 42212 - DNA, 117 bp, Homo sapiens
ctatactgacctggaggtcagggtgccagtacccaagcacgtggtgaagggaaagcaggggggctttctctgtggtccgacgctgtgtcaagctctgcaccggccatgagtatgcag

SEQ ID NO: 42213 - DNA, 99 bp, Homo sapiens
tcagttcccacgccaaaccagaccccatggcctgctcagcctcagcggatcaaagaagacaggcatgaggctaccttctcaggagctgtagtgtaccat

SEQ ID NO: 42214 - DNA, 100 bp, Homo sapiens
ctcaaatctcctgctgtgaaccagcagaatttttgaacagtccttgtcaccacccccgccgtgggaacggcctgacagtcactcgtcaaaggaagtggct

SEQ ID NO: 42215 - DNA, 75 bp, Homo sapiens
caagtgtctgcagtgccaaatgtgtgacccaggtcatcctggcgtgcaactcaggccccgccctgaacgacgtga

SEQ ID NO: 42216 - DNA, 111 bp, Homo sapiens
aaccatgtctccatccccgaccgccctcttctgtcttgatgttcatgagagcgcagtttgactatgatcccaaaaaggacaatctgatcccttgcaaggaggcgggactga

SEQ ID NO: 42217 - DNA, 100 bp, Homo sapiens
ccctcagctccgagtcatcgcgtctctccacagagccatccagcgaggagaactacgatgacccgcacaaaacccctgcctccccagttgtccacatcag

SEQ ID NO: 42218 - DNA, 100 bp, Homo sapiens
cctgcagtacctgcagaaggtctctggagacatcttcagcagttcaaagaggaaatctcccggaggtttaaggctcagcaggatcagctggtcctgatct

SEQ ID NO: 42219 - DNA, 100 bp, Homo sapiens
ctgcaacctggctgtacagctcctcaagtgcaacaagtcccacttccgaaaccacaagtttgccgatcttccagtggtgtctgtagtgagagaaacagag

SEQ ID NO: 42220 - DNA, 82 bp, Homo sapiens
ggagtcggggatagtgtcatcggttcggtaaagtttctgttctctgcagccattgtttgatgtcctgtgactgagaaaccag

SEQ ID NO: 42221 - DNA, 116 bp, Homo sapiens
cagccagccccagccctggccctgggcccagagtggcccagaaaccaggtagcccagccatgacccataggaatctgacttcctccagtctgaatgacatttctgataaaccggag

SEQ ID NO: 42222 - DNA, 100 bp, Homo sapiens
gagtgagagagagctattagagattgtgaagaagaatttcgatctccgccctggggtcattgtcagatattgaagcacagattcgagaaattcaaggcaa

SEQ ID NO: 42223 - DNA, 75 bp, Homo sapiens
gatcggaatcagccctgtccgagaggtgctgcaggcccgagactctttaccatacaccagattgatgcctgcact

SEQ ID NO: 42224 - DNA, 75 bp, Homo sapiens
atcgggatttacgtggagatcaagcgcagcgatgctgggctcaaaatgcagagaactcaaagatattcatttcgg

SEQ ID NO: 42225 - DNA, 83 bp, Homo sapiens
ccccgctccagactccaggcgctcccaacccagcccagattaactgctgaagtactgatcgagttctgcatttcttcaatgag

SEQ ID NO: 42226 - DNA, 101 bp, Homo sapiens
gttagtgtgctctgagggagggtccgagccagccgctgttttgccggaggagcccctcaggccggtgaaaaggctgatagcttttacatcatagagtctgg

SEQ ID NO: 42227 - DNA, 75 bp, Homo sapiens
ggtttttgggctgtgttgacatcaaggatctaccagatctctacctcatttccgaaatggaaaattgtattttaa

SEQ ID NO: 42228 - DNA, 123 bp, Homo sapiens
ggagaggtcagtaactaaattggagaaaagcattgatgacttagaaggatttccagatgtgacttgcactcagaagatcagtggtcaacttcagaagctcttccacgcttagatcatgtcttc

SEQ ID NO: 42229 - DNA, 98 bp, Homo sapiens
ttttacaatggaaggtgaaaggtcacctaatgaagagtatacctgggaagaggtatccagctcacatagaagacattgactacgaggaaggaaaagta

SEQ ID NO: 42230 - DNA, 75 bp, Homo sapiens
gtttctggctccgggctgagcttcctggagaagaggaagggggcagtgcccaaaggaaatgccactaaagaattc

SEQ ID NO: 42231 - DNA, 88 bp, Homo sapiens
aatgaagttgatggaattacactgtgatacgactgactatattaataaggcagcggaaagaagaaatatgaatacggctccatcaaga

SEQ ID NO: 42232 - DNA, 80 bp, Homo sapiens
aactttattcaaagttcacaacagtaccagacttaattcagtgcacaaatgagatgaatgtgaacatcccacagttggca

SEQ ID NO: 42233 - DNA, 83 bp, Homo sapiens
tatcgtatgtccgctatccagaacctccactctttcgaagtgaagctggacaaggtttcatgctgttgctgcttagaaaagag

SEQ ID NO: 42234 - DNA, 100 bp, Homo sapiens
gagggaaacagaagaggcggcccgacgccctgaggttttacgagaggcgaaggagaaagaagagatacggacctccaatgaggttaccgtggaaacagac

SEQ ID NO: 42235 - DNA, 100 bp, Homo sapiens
ttccgaggcgggaggatgaagttgattgactatggtctctccggctaccaggtactccaaagattcaggtttactcacgtcatccagcagagaatggaaa

SEQ ID NO: 42236 - DNA, 102 bp, Homo sapiens
gccaaatgtgaccttagatagcgttaatgaaactggatctacggccctttccatagccagagcagtacaagagcactaacataaatagtgactctccagttg

SEQ ID NO: 42237 - DNA, 89 bp, Homo sapiens
cagaaagcagttcacctccacctgaaaaaggttgaaatcacaaagattagacacctttttagataggtgttcttcagcaccactgacaa

SEQ ID NO: 42238 - DNA, 73 bp, Homo sapiens
ggcaggttccacatgtatgaagggtacccactctggaaggaaaactaggtgtctgtgttcactccaggctgaa

SEQ ID NO: 42239 - DNA, 73 bp, Homo sapiens
caggaacatggactgaagtatccagcgctcattgggaatttagttaaggcccaagtctgttttggtggtctga

SEQ ID NO: 42240 - DNA, 75 bp, Homo sapiens
caagaaacaaagtgtacaaagagagcacttcctaagaagagtcagatcgataaagaattggctagtggtgaatac

SEQ ID NO: 42241 - DNA, 100 bp, Homo sapiens
caaagtgtgccctgtcctcatagagctgacagccccagatagcaatgatgatgtgaaaacagaagctgtggctgctggtgggcttaaactggatggccgg

SEQ ID NO: 42242 - DNA, 75 bp, Homo sapiens
gcagctgcctcagttcttagcgcagatccggcactccacccagagcctctttgagtacatgaagggcattcagag

SEQ ID NO: 42243 - DNA, 75 bp, Homo sapiens
caccctttgagagtgcatcacacaacgagacctatcgccgcatcgtcaaggctgagaacgggaagcttgtcatca

SEQ ID NO: 42244 - DNA, 98 bp, Homo sapiens
cagctctcccgaagccgcgggtctccggccggcggcggcggcggcggcggcggcggcgcagggcttagctgaaaacaaaagtactttaggacctgagg

SEQ ID NO: 42245 - DNA, 75 bp, Homo sapiens
ggcctaagaattttggcattggtgaatatgcaggttttgatgagacgcagccaacagctgaatctggtggaaaag

SEQ ID NO: 42246 - DNA, 74 bp, Homo sapiens
gagtggttgtgtggtcgcgtctcggaaaccggtagcgcttgcagcatgtcctgtgcctcctgattgctgagtgt

SEQ ID NO: 42247 - DNA, 100 bp, Homo sapiens
tggtgcgctgctcacggccattcactgcccatgctgagcgcctctcacacaggtgatttgatgaaggctgctgcaggagagttcgcagatgatccctgct

SEQ ID NO: 42248 - DNA, 82 bp, Homo sapiens
ttctttaatatgctggatgagctgctgaagcccaccgaattaggaaccatcactgttgctggaggcacctgacaaatcctag

SEQ ID NO: 42249 - DNA, 96 bp, Homo sapiens
tgtgggcttcccatccttccacctgagagtggaatgttggctgtccgtgaaaaccgctacattgtcctggccaaggacttcgagaaagcatacaag

SEQ ID NO: 42250 - DNA, 75 bp, Homo sapiens
tacatgagacgatgaagcaaagagaggtacagaaagcagtcaacactgcccagggattgtttcagagatggacag

SEQ ID NO: 42251 - DNA, 101 bp, Homo sapiens
cgcctctttcatctcttctggggcaggggccagggccaggtgtgtgggaatgccctcatgaagcaataccaggttcagttctggaagatgctaattctcat

SEQ ID NO: 42252 - DNA, 87 bp, Homo sapiens
aaaaacgctttttgcatacaagcaggaaaatgagatgttatccagttttacaggcgtttatcagaggaaatgacacaaagaagatgg

SEQ ID NO: 42253 - DNA, 74 bp, Homo sapiens
tcttaatgcaattttcccaagacctgagggcactcgctttgctcctgtcagtacacactcccaaacagttaaac

SEQ ID NO: 42254 - DNA, 100 bp, Homo sapiens
cactacacagctagtatcatgacagcagcttcagaaccagagctggcttccaggatctagtgaaaagccatttgatgtatgcggtcagagaagaagtgga

SEQ ID NO: 42255 - DNA, 97 bp, Homo sapiens
gcctggagctacccccggccagcggtccggccaaggacgctgaggtttttgagtcatgatgcaagaatctgggactgagacaaaaagtaacggttca

SEQ ID NO: 42256 - DNA, 75 bp, Homo sapiens
tccccatcgcgttttgccagcgataatacgcctcaggtctgagcgggaaagttccgaagaataggagtggctgag

SEQ ID NO: 42257 - DNA, 100 bp, Homo sapiens
ctgatctctggcagaactgtagcacctcttcctcaggaaatgtccaccactgtttctcatcatcaccaaacggtccctccagctacaaggtgggcaccat

SEQ ID NO: 42258 - DNA, 130 bp, Homo sapiens
ctcagaggggagtcatcatgagcgatgttaccattgtgaaagaaggttgggttcagaagagggcatttgatgaatacagaaatatcagccaaaaggacattgtggacagcataaaaggagaattatctgg

SEQ ID NO: 42259 - DNA, 99 bp, Homo sapiens
aaaacgcttccatctttatccagaggtcctagcagaagatgtgactcagactgcctctgggtggggctggctggcccacagatcctgccaccatgccgc

SEQ ID NO: 42260 - DNA, 100 bp, Homo sapiens
cctaaactagcagtttagggtgtcagacctagaggatcaagacataatgggagcatttttagacaagccaaagatggaaaagcataatgcccaggggcag

SEQ ID NO: 42261 - DNA, 75 bp, Homo sapiens
ccagtcaattgagtggtgttaaaggcaagggatatgctgtatgacactctcctgatgctgggcatggctgtgagc

SEQ ID NO: 42262 - DNA, 100 bp, Homo sapiens
gtctactctgtcgctcttgtgccctagcaccccgagaaccgtcagtttgagccagatggttatgaagttcatggaatggaaaaaataccagaagatggac

SEQ ID NO: 42263 - DNA, 83 bp, Homo sapiens
tggagatatggcgcaactgcggcgcgtgagaagccctaccactgcaactgggacggctgcggctggaagtttgcgcgctcaga

SEQ ID NO: 42264 - DNA, 100 bp, Homo sapiens
gtctggctaatggcatttacaggagtctctggaatctgttctgcgccacccggcagataatcgcacccagattcgagagcttggccagactctgattgat

SEQ ID NO: 42265 - DNA, 75 bp, Homo sapiens
catggaggctgaggagctggagcaggagcgagagcagctgaagccattggtgtctgctccgctgatcgtcctgat

SEQ ID NO: 42266 - DNA, 83 bp, Homo sapiens
tggaatgtgaagagcaaaaagtctcagatgagctcatgagtgaaagtcagcatgaataccagcacagcccaactatgtgtaag

SEQ ID NO: 42267 - DNA, 85 bp, Homo sapiens
catctctgaggatgtgataattgtcacaagcaggtttctagagaggaaggatctccccagctgtcttcagcaaggccgtctcctg

SEQ ID NO: 42268 - DNA, 100 bp, Homo sapiens
ggaacgtcatccctgatatccctgaccacttcctgtgtctgtgggagcactgtgagattacctctctagtgacccttcagctgttaaccctggttggcca

SEQ ID NO: 42269 - DNA, 100 bp, Homo sapiens
gaactgcaacgcccgcctggtggagctcaagaggcaggccctgaggttgctcctcccggggcccttcccgggcaaggaaacttttgagaagaactttgaa

SEQ ID NO: 42270 - DNA, 77 bp, Homo sapiens
aggagtcagctgtgtgtccagaacgtgccatggagacgcttaacgccattcaaactcctccccacgacactctgaag

SEQ ID NO: 42271 - DNA, 75 bp, Homo sapiens
tgttggacctggtggctataacttaaaaaaacttcaggctgaaacagactgcaaaattcaaaatggggctcaagg

SEQ ID NO: 42272 - DNA, 100 bp, Homo sapiens
ccttgcctgcacaccttctgtgagagcctacaacacagcagtcccctcaggatgagcaggaaaagctcttggatgaagccatacaggctgtgaaggtcca

SEQ ID NO: 42273 - DNA, 75 bp, Homo sapiens
gctccccgtcgtcctggtgctgcagcggttatactactccaactgccccccaggcatacagccagcctgtccagg

SEQ ID NO: 42274 - DNA, 75 bp, Homo sapiens
aaaggaataacaaggcttatctctaggatccataaggtgggagatgccatcccagcagtggaggtgtttgaaggg

SEQ ID NO: 42275 - DNA, 97 bp, Homo sapiens
cctcagcaacatggtataagaccagtgaaagttaatgtcattgatttttcaccatttggagaaccaatatttttgggagatcgacgacgtgatcagc

SEQ ID NO: 42276 - DNA, 100 bp, Homo sapiens
gacaattactagttatttactttcctccgcttcagaaggtttttcagactgagagcctaagcatactggaattagcagcagcctctgtcaccatccaaag

SEQ ID NO: 42277 - DNA, 75 bp, Homo sapiens
acagtggttctgctggattgataaacccagctgctacagtgggagatccagaataccagccatctggccgttgat

SEQ ID NO: 42278 - DNA, 108 bp, Homo sapiens
cagagctttcacgaaggcaccgacgtcatcatgctgaccaccaatcagatccgtaaggtcaaaatgcagatcttcgtgaaaacccttaccggcaagaccatcaccctt

SEQ ID NO: 42279 - DNA, 100 bp, Homo sapiens
gccctcatggggaaaatctccccggtgactttcagtttgtgtttaaggagaaactaacaatgaaaacggcctcgttgacggaggaaaagttggaatgcag

SEQ ID NO: 42280 - DNA, 74 bp, Homo sapiens
tcctgctgttcccagaagcgaagtggagagcgccagagtaatggggtgaggatccacgacctccgcagtggtaa

SEQ ID NO: 42281 - DNA, 75 bp, Homo sapiens
ctcaagcagaggcctacacgatttactggatcccatgacagattctgttgtcacgtctccttacagagtttgagc

SEQ ID NO: 42282 - DNA, 82 bp, Homo sapiens
accgccgccccctccggcgtgttcatgcccccgggcaagagtgagccatggagctacgtgtggggaacaagtaccgcctggg

SEQ ID NO: 42283 - DNA, 100 bp, Homo sapiens
gaatgtcacacacattgatcagtaccaagggaagaacacctacctggagaagattgacggcttccgagcctattacaagcagtggctgacagtgatgccc

SEQ ID NO: 42284 - DNA, 75 bp, Homo sapiens
gtgctttcccattttgctcagcgactgtttgatgacgtcccgcaggtatgccgagcagacagctggaggatcccg

SEQ ID NO: 42285 - DNA, 75 bp, Homo sapiens
tcgcgtgcaaagcccaggcccgggcggccaggaacaggagtacagctgtgtagtaaagatgccttctggtgaatt

SEQ ID NO: 42286 - DNA, 118 bp, Homo sapiens
gttggccctgtgatccctcaagactggtccacggagtgtatgaccacaaacagccatcaagataacaacgaacttgatgcaagtgataggtttgccaaggtcagacctctcatcatcc

SEQ ID NO: 42287 - DNA, 98 bp, Homo sapiens
cggagatgccaccttccccaaagctatggacaacgtgacggtccggcagggggagagcgccaccctcaggtggctagaggtgcaggtagctaatttaa

SEQ ID NO: 42288 - DNA, 100 bp, Homo sapiens
ccccagcagcccccgaaggccctatcaggacatggagtatgaaagacggtttgcccttgcatctcatttcctctggggactgtggtccattgtacaagcc

SEQ ID NO: 42289 - DNA, 100 bp, Homo sapiens
attgcaaaggcattcttggcggaaggacccgagacgtgaaaaaaacaggcgtattctggtaatttcgaggagattttgctaaacatgttgactttctaga

SEQ ID NO: 42290 - DNA, 75 bp, Homo sapiens
tgatccgcctcttccaggagtgggagccctgaccctctattctgcaccctgtgagccaccgagactgaaccaaac

SEQ ID NO: 42291 - DNA, 74 bp, Homo sapiens
gacgaacatggagaacccccagcttggagcgcaagaaattcattgagtttgaagatgctctggaacaagagaag

SEQ ID NO: 42292 - DNA, 87 bp, Homo sapiens
aaagtacaatcaagctaaggagaaactgcagcgagctgcaattgcccagaaaaagctctacattaatcatactcctccaccactgtc

SEQ ID NO: 42293 - DNA, 75 bp, Homo sapiens
tcactgaacttaggagaaagtatacagaattacagctggaagcggcatattttctaccttcagcatcacttaaat

SEQ ID NO: 42294 - DNA, 98 bp, Homo sapiens
tgccgcccctgcgccgccgagccagctgccaggtgctggagaatctggtaaaagcaccattgtgaagcagatgaggatcctgcatgttaatgggttta

SEQ ID NO: 42295 - DNA, 75 bp, Homo sapiens
aaaatcgcttggttaaaacctgacacttttaacaggtgaaatgacaatggatgctctgttggctcgattgaaact

SEQ ID NO: 42296 - DNA, 75 bp, Homo sapiens
ggttcccttggatcagactcctcttttttatccatggcagtctcatataatggcagcaaaggctgtagcaaatac

SEQ ID NO: 42297 - DNA, 50 bp, Homo sapiens
aaggattccaagtaactcttatttggaaacctgtgatctggggaagataa

SEQ ID NO: 42298 - DNA, 75 bp, Homo sapiens
ctaaagtctgagagagggaagtcgcctctgtgctcatgtccagggtgctgcagaaggacgcggagcaggagtcac

SEQ ID NO: 42299 - DNA, 74 bp, Homo sapiens
gatatttcaactgtgtcagtttgtaatgtaccatgcggagaccatcaagaatgtgcgcacagccacggaaagct

SEQ ID NO: 42300 - DNA, 98 bp, Homo sapiens
ttcaatactacctttatttccaccatagaaaacagaatcttggcattgtcttcctcaagaaatggactcttcccaaaccttggatacatcccagacta

SEQ ID NO: 42301 - DNA, 74 bp, Homo sapiens
cccagcagcccccgaaggccctatcaggacatggagtatgaaagacggacacattcagctaacgtattttagca

SEQ ID NO: 42302 - DNA, 113 bp, Homo sapiens
atcactttacccctaggcggggctgccgaaatcatgagcatgttaatgttagctggtgctttgtgtgctcagaaggtggttccttaaaaacagttattgctcaagatgaaaac

SEQ ID NO: 42303 - DNA, 100 bp, Homo sapiens
cccggtgtggccacgagtcggcatatgagctatttgcattcatcagtcacatgggaacatccacaatgagtggtcattacatttgccatatcaaaaagga

SEQ ID NO: 42304 - DNA, 90 bp, Homo sapiens
gtaaggtgcgcggagggactgcaccttctccatcaggtgcagaagctgaaaatgtgtgtctgacatgcaagctcagtggggcagagaccc

SEQ ID NO: 42305 - DNA, 100 bp, Homo sapiens
taaaattctttctggcctagatgatatgtctattggtggaaatctttcaaaaacacaaaacatggaacgatttggagagacagttgatattcataaagag

SEQ ID NO: 42306 - DNA, 90 bp, Homo sapiens
ttcatgcatgtcttttaacccggaaacaagaagactgtccataggtctagacaatggtacaatctcaaatgctgtcagaagggtatctca

SEQ ID NO: 42307 - DNA, 96 bp, Homo sapiens
cgggtgaggctgcaacacgaggctgccgttcagcacccgtcgagccgggctgacgcacgaggcacacaggaaggaggtggagcaggtgtatctgcg

SEQ ID NO: 42308 - DNA, 80 bp, Homo sapiens
tcaccacaaggccaagggcaagtgatttgacagggaagaggaagaacgtctgagaaataaaattcgagctgatcatgaga

SEQ ID NO: 42309 - DNA, 97 bp, Homo sapiens
gccatgaggaactctgagtatgtgaccgaaccgatccaggcctacatcatcccatcgggagatgctcatcagcgtgacgacagcatgtacgatccct

SEQ ID NO: 42310 - DNA, 75 bp, Homo sapiens
ggaagatgggcaagatgatggtgaaggccctgtcagaagagatggacagtcattttgtttactcattcagccctg

SEQ ID NO: 42311 - DNA, 100 bp, Homo sapiens
attggatttagcagatccatctgccaaagcagtgcttactggcatagaatgtcaagctaaccaggcgtccgctacttcagaagagtgtactgtcgcatgg

SEQ ID NO: 42312 - DNA, 75 bp, Homo sapiens
ctctagaggaaaaaattgaaagagaaaaggaattagcagaagacattatgtcagagtttcactcttgttgcccag

SEQ ID NO: 42313 - DNA, 95 bp, Homo sapiens
ggctgggcatcctcctgagactccggggtcagacgcccactccagatcttcagtttagatcttggaggcatatcaactgtggttctaaatggcta

SEQ ID NO: 42314 - DNA, 100 bp, Homo sapiens
ctgacagatgccagcgtagctgaatccagtaccaaaaacgtcaacaacagttttacggagcaaggagcccctgcaggacaacgtgatcgccacctacgag

SEQ ID NO: 42315 - DNA, 102 bp, Homo sapiens
gaagctttcactttttttggatacatatccagaagagggatgctggatcatatgtatgtaaaatgaatgtgcatattcgatgtcaagcgaacgtggccccta

SEQ ID NO: 42316 - DNA, 80 bp, Homo sapiens
ctacggcctggacttctatgtggtgctggaggtggtgagagccaactatgacacgctcacgctgaagctgcaggatggcc

SEQ ID NO: 42317 - DNA, 75 bp, Homo sapiens
gcgtgaccgagagcgcgaatatcgtcatcgttagaagagctgaatcaatttatgaagaaatgaaacagaaatatg

SEQ ID NO: 42318 - DNA, 96 bp, Homo sapiens
aagatggagatgatggggatgatacagccagcgaatcttatttgcctggagaatatgcttttaaggctattaaccagggtggccttacatcagtag

SEQ ID NO: 42319 - DNA, 74 bp, Homo sapiens
cggcccacagtgggggtgtgcaaacccgagagaactgggaataaaggttggggagactacacctgacaaacttt

SEQ ID NO: 42320 - DNA, 90 bp, Homo sapiens
agattcgcagtggtcgcttcttctccttgctgtcacaagatgaaggtagaggcacattatacaaatacagacctgaagaagtagatattg

SEQ ID NO: 42321 - DNA, 73 bp, Homo sapiens
aacatgcatatttgggtccaactgtgaagccagatgataagaatgaactctggaagcccagccagggacaatg

SEQ ID NO: 42322 - DNA, 83 bp, Homo sapiens
gaaggaacgaggcaaggagctaaagcagcgtgcgttcagccctggggccaagtcctgtatctgccatgtctgtggcgtccacc

SEQ ID NO: 42323 - DNA, 82 bp, Homo sapiens
ctgcactcagttgctggcttccacttcgggcttcctttccacagagagcctgttacctatccataaacccccaaaaggatga

SEQ ID NO: 42324 - DNA, 74 bp, Homo sapiens
tggggtgttctgaatgacttctgtgaaaactgtgtcagcgtgttatgatgccgtcccgtaccaacctggctact

SEQ ID NO: 42325 - DNA, 82 bp, Homo sapiens
gaacatcgaaaggaccaagtaacacagctttcacaagagtttcttaaacaattaggtctacatcctaactggcaattcgttg

SEQ ID NO: 42326 - DNA, 50 bp, Homo sapiens
cggggtcattgccatcgaccgagtgcctggaagagctgggatgtctggtt

SEQ ID NO: 42327 - DNA, 101 bp, Homo sapiens
gtggccagtccaaactgtgcagtgcgctatttcgtgtgagccgctggagagtcctgtccacggaagcatggattgctctccatccttgagagcgtttcagt

SEQ ID NO: 42328 - DNA, 100 bp, Homo sapiens
cggggagccggtctatggactttccgaagacgagctgcattacaggcactaaagagaaagaagaggttcgagaaacagctcactcagattgatggcacac

SEQ ID NO: 42329 - DNA, 90 bp, Homo sapiens
gcagaacttctccttcaaaccttgtaaagagactcaggcatttctcattgcaattgtggtaccagatgttgagacattatgttcctgggc

SEQ ID NO: 42330 - DNA, 100 bp, Homo sapiens
gagtcgcgaagtcgggaccatcgtcgtgaggatcgtgtgcattacaggagtcctccacttgccactggttttgtttggctatgccaccacagtcatcccc

SEQ ID NO: 42331 - DNA, 96 bp, Homo sapiens
cacatcgtggagatggacaggagacctggaatcattgttgatattgatgatgttaagaagttcaaaccgggttacctggaagctactcttaattgg

SEQ ID NO: 42332 - DNA, 100 bp, Homo sapiens
gtccctcgcccaggtccccttggacaaatgggtcgggaaagaggttaaagaagacacgcaagtatgatatcatcaccactccagcagagcgagtggaaat

SEQ ID NO: 42333 - DNA, 100 bp, Homo sapiens
cagtgatgttctggcaggatttgctcaaggagccctggtggcctgctgcatagttccggtggaggaggaggttgctggtgatctctgctcctaacgatga

SEQ ID NO: 42334 - DNA, 98 bp, Homo sapiens
tccatcttcgacagtgaggaagatatcaccaccttcgtcaagggcaagatacacgatcagttccatgacaagaccccttatacgattatgtttggtcc

SEQ ID NO: 42335 - DNA, 49 bp, Homo sapiens
ggccactgggcgagcgtctggcagccaggcgggcaccacggcaggggct

SEQ ID NO: 42336 - DNA, 100 bp, Homo sapiens
ctgatcactactgacttgttggactcagcccaggagagtgttattactcgagatattcatcgtacatttcccgcacatgattactttaaagatactggag

SEQ ID NO: 42337 - DNA, 74 bp, Homo sapiens
ggtaccgagcggagaggagatgcacacggcactcgagtgtgagggcagctgcaatgactctccgcacggtatta

SEQ ID NO: 42338 - DNA, 90 bp, Homo sapiens
agggtcgcgatgctgcccggtttggcactgctcctgctggccgcctggacggctcgggcgctggagaacactgatatttgcatttaatgg

SEQ ID NO: 42339 - DNA, 80 bp, Homo sapiens
ttgatcaccattggctgggaaggaaaaacagaatcagctgttccctgcgaaagcggggccttttccgaagtggttttagc

SEQ ID NO: 42340 - DNA, 74 bp, Homo sapiens
cttcatcaaaaatagtgatagctttgataaatggagtcccactctgttgcccaggctggagtacagtggcatga

SEQ ID NO: 42341 - DNA, 98 bp, Homo sapiens
ggatggcggagtcggggctcctgacgattggtggaacgagaatgcctacacgcagccacaggaatccagtttccatggaaaccaaaagcagttgcttg

SEQ ID NO: 42342 - DNA, 100 bp, Homo sapiens
caagaagaccattcagatgggatctttccggatcaatccagatggcagccagtcagtggtggaggtgtcatttacaggaaaacaaggtgaaatgagagaa

SEQ ID NO: 42343 - DNA, 114 bp, Homo sapiens
tcctggagccgcccccgggacgtcagtcctggaggaggcgaggcctggtccgacccccagtggcactaacgtgggatcctcagggcgctctcccagcaaagcagtggccgcccg

SEQ ID NO: 42344 - DNA, 83 bp, Homo sapiens
cttggactgagtcctgcaggacacaggcggctatgagaggttttcctccgagtacccagaattctgttctaaaaccaaggccc

SEQ ID NO: 42345 - DNA, 75 bp, Homo sapiens
gcgcctggcctggccgggaccatgaactgaagcgctgcggcatggcgcgcgcctgcctccaggccgtcaagtacc

SEQ ID NO: 42346 - DNA, 73 bp, Homo sapiens
tgaagaactggaacacgtagaaagtgcaagcaaagctgccactgcagagccccgccatggaagacacgccgtt

SEQ ID NO: 42347 - DNA, 99 bp, Homo sapiens
gttttggctgaggactgaagagatggccttggaagaaatggtgcagagattaaatgcggtttccaagcacacgggtgtcttcaaaaacaaacatattta

SEQ ID NO: 42348 - DNA, 82 bp, Homo sapiens
ggccaaagcagtacagctgggatcagcgcgagaagacaatgcagatcttcgtgaagactctgactggtaagaccatcaccct

SEQ ID NO: 42349 - DNA, 96 bp, Homo sapiens
gtcattacatatgagatgagtctcttgaagactacagatgagttgtctgctggttctcagcttgaagaagattctgcagtccttattgatcctttt

SEQ ID NO: 42350 - DNA, 75 bp, Homo sapiens
ggccaggcgccgctcagaacggatggatgtggacagtttccatatgatgcaaacatccagatacactgggtatca

SEQ ID NO: 42351 - DNA, 75 bp, Homo sapiens
gcacttgaacagactagaaattgcaccacagatatatgggttgtattagtcactgtaccactggctttactacag

SEQ ID NO: 42352 - DNA, 82 bp, Homo sapiens
gagaagcattgggggaaccagtgggccccacgtgggtaaaaagtgatcggagggtatggttggcatggaattgaatttcatc

SEQ ID NO: 42353 - DNA, 82 bp, Homo sapiens
gctgcggccggagcgggcggctgagacaaaggcgacggtgaaatgacaatggatgctctgttggctcgattgaaacttctga

SEQ ID NO: 42354 - DNA, 100 bp, Homo sapiens
cccacgctgttccggttggcgagtgacaccactgatgacgatgatgcactcgtgccttgctttccatgacatttcccctcaagcaccaacacattttctg

SEQ ID NO: 42355 - DNA, 83 bp, Homo sapiens
ggactaatgtacactcaagggcctctgaagaaaatcatggaagcatgtgcagttcaaatctgaacatcaatgatgtactaggg

SEQ ID NO: 42356 - DNA, 100 bp, Homo sapiens
cccaaccacacaccagcggctgcaggactgggcacagcatgagatccaaaggcagggcaaggaaactggccacaacagccagacccggtccgtttggaat

SEQ ID NO: 42357 - DNA, 83 bp, Homo sapiens
ctgagcttcacggtgcatcccaagcccaaggtcagggaagtcaaagatgcatccctgagttcttcctagcaggcaagcagccg

SEQ ID NO: 42358 - DNA, 100 bp, Homo sapiens
gtctgtggtgtcccggccatggacatcccccagaccaagcaggacctggagctcccaaagatgggggcaggaagctcatatacctgcaggagctgcccgg

SEQ ID NO: 42359 - DNA, 99 bp, Homo sapiens
cttgaacaaggcaaatatggttttgggacctgatgcccagaaccctggacgggcagatcaccatggagaagacgcccagttacttcgtcacgcgggagg

SEQ ID NO: 42360 - DNA, 75 bp, Homo sapiens
ttggacgagtcttggattcgtgaacagaccacagtggaccacttctggggtactggaaaactgggcttctctttt

SEQ ID NO: 42361 - DNA, 100 bp, Homo sapiens
gtccgttggtccttgagcgcgtccgacagtctgtctgttcgcgatcctgccggagccccgccgccgccggcttggtgctggagaatctggtaaaagcacc

SEQ ID NO: 42362 - DNA, 100 bp, Homo sapiens
ctgcgactcaggctccggcgtctgcgcttccccatggggctggcctgcggcgcctgggcgctctgaggccatcatctgtgcgatctctgcggtggacgag

SEQ ID NO: 42363 - DNA, 100 bp, Homo sapiens
agaaactggaggagtcccgctcgaagctagctagagatgatcgctatggaaaatcctgcagacttgaagaagcagttgtatgtggaatttgaaggagaac

SEQ ID NO: 42364 - DNA, 100 bp, Homo sapiens
aggacatctgatggatcttttcaggaagctattatcagcaagttgacagatgctagttggtataccgtggaatcagcatgattcttcagaggctcttcag

SEQ ID NO: 42365 - DNA, 100 bp, Homo sapiens
attttgcatctgaaaccatacggcttatggaaaagtatttctagttcgtaaaataagtggccatgatactggaaagctgtatgccatgaaagttttgaaa

SEQ ID NO: 42366 - DNA, 76 bp, Homo sapiens
agctgaacaaggcaactgttcaaccaggagaaaagacagcaatggaccgagcttccgcaggttcactcgatccaac

SEQ ID NO: 42367 - DNA, 100 bp, Homo sapiens
cgggatcccaaatcggaagtgaattcggattgtttgctggcatgtaatgaatttactacacatgtgatgaaccttctccgagaacagagtagaacacgtc

SEQ ID NO: 42368 - DNA, 82 bp, Homo sapiens
ctttccgcttcttgaatttctctctgtaaaggaggtgtcgtgaaaactacccctaaaagccaaaatgggaaaggaaaagact

SEQ ID NO: 42369 - DNA, 50 bp, Homo sapiens
cgcccaagtccctctactcgcgagctctctgtcggatgaggccccagtcc

SEQ ID NO: 42370 - DNA, 90 bp, Homo sapiens
ctccatggagagagtaactctgtccttattatcggaccccgaggatcaggaaaaactatgtcgggaacatgccctgtgtgccgccgtcat

SEQ ID NO: 42371 - DNA, 75 bp, Homo sapiens
gtacaccaacgcggtgcgcgaccgggagctggacctccggggggctttgttatgcacctaaagccatattggaag

SEQ ID NO: 42372 - DNA, 98 bp, Homo sapiens
tatataccagcagctcacatcattcacacagttacattggtttgccctatgcgttctgctaagccaatattctctagaatgagcacaaaacaaatcga

SEQ ID NO: 42373 - DNA, 82 bp, Homo sapiens
tccgtggccttagctgtgctcgcgctactctctctttctggcctggaggctatccagcctcttttgaaacagatggtcacca

SEQ ID NO: 42374 - DNA, 100 bp, Homo sapiens
caaaaacaaaattctgaactcaggacttggcaattcttcaccaaaggacatggatgaaaatgaaagcaaccagtctctgatgacaagcagccaatatcct

SEQ ID NO: 42375 - DNA, 51 bp, Homo sapiens
tctccagtcgacactctcgcgcccggagattttgatgcatacgaaagagat

SEQ ID NO: 42376 - DNA, 82 bp, Homo sapiens
caaatgcattccacgtgtatcaggtcaaaatgcagatcttcgtgaaaacccttaccggcaagaccatcacccttgaggtgga

SEQ ID NO: 42377 - DNA, 96 bp, Homo sapiens
caagtttcctgacttcttccatcctctggaaatcagctgtggccctgaagaggaaagtgaggatgactctcatctcgaaggcagggatcctgatat

SEQ ID NO: 42378 - DNA, 75 bp, Homo sapiens
cctgcgtcgccgggaccctcgcgcgcgaccgccgaatcgctcctgcagcagaggcttcttttggaagttcgagcc

SEQ ID NO: 42379 - DNA, 90 bp, Homo sapiens
cttcgtctatgtggcgcccggcataggccagaagcggactcctagaagaggggagcagcaaggatggaatgacagccgtgggccggaggg

SEQ ID NO: 42380 - DNA, 100 bp, Homo sapiens
aaacaagactatgaacaagcagtgtttcatttacagcagcttttagaacgtaagccagaaacctccacagctgttgagaaaaaggagaaacctcttccaa

SEQ ID NO: 42381 - DNA, 101 bp, Homo sapiens
cgaaccatggaccaggccctcaagtccctgatggcctcagaggaggagtgcctcagtgaaggagccctctctcctgatgggactgtgctggctactgcgag

SEQ ID NO: 42382 - DNA, 83 bp, Homo sapiens
cttggcgccaccgcctcatgcactgtgtagctatccaacttgataaagtcaatcttcaagtatattgtgcatggtctcttctg

SEQ ID NO: 42383 - DNA, 75 bp, Homo sapiens
ctgcgtcacaaacttgcctaagcctcgacagaagcagccaggtatggacctgtctgccaatcaggacgaggagac

SEQ ID NO: 42384 - DNA, 82 bp, Homo sapiens
ccgcccaggcgcagatgcgggccctgctggaccagctcatgggcacggctcgggacggctgatcagctgaccgaagaacaga

SEQ ID NO: 42385 - DNA, 75 bp, Homo sapiens
ggctactctgcctcggggacgaaagcaggttctaagctggtctatgtccatcaccttcttggagaaggagccttt

SEQ ID NO: 42386 - DNA, 75 bp, Homo sapiens
ccgcacctttgccgtgtacctcaatagcactggctaccggacagatattaataaggcagcggaaagaagaaatat

SEQ ID NO: 42387 - DNA, 83 bp, Homo sapiens
cgctggaccgtcgccttgctcctcgccgcggcggggactgcagtggggggactgcaccgttttcccccaacatcatccctgag

SEQ ID NO: 42388 - DNA, 83 bp, Homo sapiens
ctctgggtcctcggtcggtacagtctctgcacctcgcgccccagcagggactttgaacatgtcggggatcgccctcagcagac

SEQ ID NO: 42389 - DNA, 111 bp, Homo sapiens
cgaaacgcgagtccggagaggagttccgcatggagaagttgaaccagctgtgggagaaggcccagcgaggaggcacggtgattggaagtgcccggtgcaaggactttcggg

SEQ ID NO: 42390 - DNA, 100 bp, Homo sapiens
cgctgaggggcttgcctgaagcgagggattcaaccctatgaaaagataaaggccaggggcttgcctgataatatatcttccgtgttgaacaaactagtgg

SEQ ID NO: 42391 - DNA, 100 bp, Homo sapiens
acgtgcatttccaggggtcagttgtccagttcatccctgagccttgagctcccagtcgcagatcatcattttctgggtggaagtattcagctaaagactg

SEQ ID NO: 42392 - DNA, 100 bp, Homo sapiens
gacgcattcaggagaagaaggatgagctctcaggagaagtgattttgcaaattgccaacgaacctgttctgccctttaatgcacttgatatagctttaga

SEQ ID NO: 42393 - DNA, 98 bp, Homo sapiens
gccgtgctatggccctgtaccacactgaggagcgcggccagccctgctcgcagaattaccgcctcttctttaatgtggaaatggaggcccagaaagat

SEQ ID NO: 42394 - DNA, 51 bp, Homo sapiens
gcctcccgagtatctgggattacagcgcaatgtccctgctcttctctcgat

SEQ ID NO: 42395 - DNA, 89 bp, Homo sapiens
gtctgacatggaggatgatttcatgtgcgatgatgaggaggactacgacctggagcccagtttcctccaattgcagcacaagaccttcc

SEQ ID NO: 42396 - DNA, 74 bp, Homo sapiens
ggcggctcagttgtccatgaccctgaaggtccaggagtacccgaccctcaaggacctcagcagccatgtcgaag

SEQ ID NO: 42397 - DNA, 98 bp, Homo sapiens
tggaacctggagacaagcccaggaaagcaacatgaataactgaagtgaagtgatggactccgatttggagagtagtaagacgtgaaaggaatacactt

SEQ ID NO: 42398 - DNA, 100 bp, Homo sapiens
cctgatacccggatgtgaggcgatccgctggcgctagtctgaccctccgccaggcaaaaggaagaatgatatggaacctagcaaagctgttccactgaat

SEQ ID NO: 42399 - DNA, 50 bp, Homo sapiens
tgccgctgcactctacaggcaagggcggcgactggcggcgcgatggacct

SEQ ID NO: 42400 - DNA, 74 bp, Homo sapiens
gccgcccccgggctcgcggcctgcagagggtgacatgccatgccgtgccaacatcctggtcacagagttgtttg

SEQ ID NO: 42401 - DNA, 50 bp, Homo sapiens
gctaccctgagaaaggtggacgtggtgaaaatcctatttataagagtgcc

SEQ ID NO: 42402 - DNA, 100 bp, Homo sapiens
acacggagacaagcctctcaccattaacaggattttcaaaggagctcatgaaagacttcttagagaagagagacaaggggaaacttctcatacagagaag

SEQ ID NO: 42403 - DNA, 100 bp, Homo sapiens
gccttcctgggcaaggaggactccaagaccttcgaccagctcaccccggacgagagcaaggagaggctaggggacaggatgagaacttcagtcaatgttg

SEQ ID NO: 42404 - DNA, 93 bp, Homo sapiens
ggagtttaaggagctgaaagcgcggactggacctacagagacatctgggattttctgcgtcagctgtttgtcccatactgtatcctgtatgac

SEQ ID NO: 42405 - DNA, 98 bp, Homo sapiens
cgcctcgggtcgtggagccaggagcgacgtcaccgccatggcaggcatcaaagagattatggagaagtctggcgaggaaggaatgcctgatcttgccc

SEQ ID NO: 42406 - DNA, 51 bp, Homo sapiens
gcgtatttcgtcgagaatttttggacaggaacacagaggacgatcgccccc

SEQ ID NO: 42407 - DNA, 100 bp, Homo sapiens
aggagctacaacttgtccacgacaccggctacttctcagctttaccatccctggaggagacctggcagcaggttggtcaaagaaaaagtgatgtatgaaa

SEQ ID NO: 42408 - DNA, 101 bp, Homo sapiens
cttgccctgtctcctcgcagatgagttatctccgacgaggtgaaagtcattggtggatgaagggctcaacccctacccagatctcagagatcatcattaaa

SEQ ID NO: 42409 - DNA, 50 bp, Homo sapiens
tggtgattgtgggtcctgaagcccctagcagtcttcttgatgctttggaa

SEQ ID NO: 42410 - DNA, 100 bp, Homo sapiens
cactgaaaatgatttatgcaagtttaaggtgaccatgctttgggattttcatagtttgagtaattcctatgggctctaccacccagcgagttaaagaaga

SEQ ID NO: 42411 - DNA, 75 bp, Homo sapiens
acgaactacgaacccctggacgggagagtctgccggcggagaatataaggaagtggtcatagtaagtgctacaag

SEQ ID NO: 42412 - DNA, 98 bp, Homo sapiens
ttatacaggccgcttttgagaggacaagcccagattccaaaacttatgtcaagtgaagtattacagacacttagcacctgatcacttgctgcaaatat

SEQ ID NO: 42413 - DNA, 97 bp, Homo sapiens
gtcttcggtggactccttcggcagtccacccaccgccgccgcctcccaggccacgtgctgtacgccgacatcaagatggagaatgggaagtccaagg

SEQ ID NO: 42414 - DNA, 82 bp, Homo sapiens
tttagcgtcagaaataagccgttttttgacatctgtacttcaagaaaggttatgtgaaattacctccagagaaatttgcacc

SEQ ID NO: 42415 - DNA, 74 bp, Homo sapiens
ggaagggaagggagtccgggctgcgcgggtcagtaagactttgaccccgacgcaggcttcagtgattgccgcgg

SEQ ID NO: 42416 - DNA, 75 bp, Homo sapiens
ccagagcaccccctgggacagcgccacattcgccgggaccacatggtgacaatgcatgatgtgcttgatgctcag

SEQ ID NO: 42417 - DNA, 97 bp, Homo sapiens
ggcaaggtgatccagcaaggtcggcagagcaaggggcttacgcagaaggacctggccacgcaaacggggattcagcgtccgatcctttggaacaggg

SEQ ID NO: 42418 - DNA, 82 bp, Homo sapiens
cacattggaccctcctcccaactgtaggtatccgttacagcactgatgtgagtgtagatgaagtaaaagctttggcttctct

SEQ ID NO: 42419 - DNA, 90 bp, Homo sapiens
gtggtgctgaaaggggaccagctctacatctctgagaaggaggcagagacccgtgctgagtttgctgagagatcggtagccaagctggaa

SEQ ID NO: 42420 - DNA, 50 bp, Homo sapiens
gctgccgccgctctgaggagttaaagattcgccttttacaagtccacctc

SEQ ID NO: 42421 - DNA, 75 bp, Homo sapiens
tgatgttttggggattccactctccagtgtaatgattattgacaacagaatcggtcgaggtggacggtttggccg

SEQ ID NO: 42422 - DNA, 100 bp, Homo sapiens
ctggtgcagagccccaattcctacttcatggatgtgaaatgcccagactacgtctactttgagaactcctccagcaacccatacctgatccggagaatcg

SEQ ID NO: 42423 - DNA, 83 bp, Homo sapiens
ccaacgccccggtggagaagctgagacggaaatggagagctggatttctccacttttctgaccattatgcacatgcaaataaa

SEQ ID NO: 42424 - DNA, 75 bp, Homo sapiens
gaagaatccactgatagaaatcatttccatcaataccggattttaggtgatgggcaagtcagaaagtcagatgga

SEQ ID NO: 42425 - DNA, 101 bp, Homo sapiens
tttcgcccctcgcgtccggagtccccgtggccaggtgctggagaatctggtaaaagcaccattgtgaagcagatgaggatcctgcatgttaatgggtttaa

SEQ ID NO: 42426 - DNA, 75 bp, Homo sapiens
gccgccatgcacaagctgcacttcctgcacagattttattgtcaagatatccgagcttatgacattttatttgga

SEQ ID NO: 42427 - DNA, 100 bp, Homo sapiens
tggagccaagaaatgagtataggtcatacagcagatggaacaaaaaaaattacaacaaggaattcctccatcagggccagctggagaattgaagtttgag

SEQ ID NO: 42428 - DNA, 88 bp, Homo sapiens
cctattatcagatcaaccaccaaagtgggaaacattgaaatcaagcagcccagctggtccgcaaccttgtaaatgctcaacaggtggc

SEQ ID NO: 42429 - DNA, 100 bp, Homo sapiens
attgtaagaggtgacaacgtgggatcccaacaagccctcaggattcagaagtgttaaagctcctgtcactaaagtggctgcgtcgattggaaatgctcag

SEQ ID NO: 42430 - DNA, 82 bp, Homo sapiens
ggcgtcttccgtgggcaacgtggccgacagcacagcagcgtccgtctccaagagagtatgaagagagtgcgtctgtagggca

SEQ ID NO: 42431 - DNA, 75 bp, Homo sapiens
gaggccacagcccaggtcacagtgaaaggcccagtgctaaacgacggtataaaaaccagaagtttggttttggtg

SEQ ID NO: 42432 - DNA, 75 bp, Homo sapiens
ctcggccgatgaagtgcagaggtttttttctggtcaccttcttgactcctttgcccgttcagctttatgggattc

SEQ ID NO: 42433 - DNA, 76 bp, Homo sapiens
gactcccctcgccaccgcccgagcccagatcgagctgggagcattagtacccttgattctttagactttgcaagat

SEQ ID NO: 42434 - DNA, 100 bp, Homo sapiens
tcgagaggaccatcctgggtgctggccctgtgctggaggacaagatcgcagaggaaggtgggcggcgggagtgcccagccgtgtgacagcatcgttgtgg

SEQ ID NO: 42435 - DNA, 95 bp, Homo sapiens
gccctgggctttaccatctttgtggctgtgcttgccaggcctggctccagcactgttatagaagaatggaagaagatacagattatagaatcagg

SEQ ID NO: 42436 - DNA, 87 bp, Homo sapiens
ggcgcagaggcctacatcccacagagatacccagacaacaggatcgtctcgtccaaggttaacacagaaatctgcctcctgggccat

SEQ ID NO: 42437 - DNA, 100 bp, Homo sapiens
ggaagaggaagtgagagcagcggcagccggcggtgcagcagccggccgacccagagtgactggctggacaatggcccagaacaagctattcaacaagatc

SEQ ID NO: 42438 - DNA, 83 bp, Homo sapiens
ggggggattctcgacctgctaacagaactggaccttttcgctaccgagtctattgcttgctgggagacggggagctgtcagag

SEQ ID NO: 42439 - DNA, 96 bp, Homo sapiens
acgagcacaacaccagcgtcgtcaagaagatccacattgaggtagtggacaaaggatgccaggccaaggtggagcaagcggtggagacagagccgg

SEQ ID NO: 42440 - DNA, 85 bp, Homo sapiens
acgtcttgcaacagtggccgcacgcataggccgctacctgtctgaggaacccgagccctacctggcagtctacctgcactcggag

SEQ ID NO: 42441 - DNA, 88 bp, Homo sapiens
aggcgactacagccacgtgaagctgctcctgctaaggccaagccggctgaagctcctgctgctgcagccccaaaagcagaacctacag

SEQ ID NO: 42442 - DNA, 75 bp, Homo sapiens
gacgcggcccaaggtgtcccttggcggcgcgagcaggaagcgtccagcctgcatgccgtgcggactgcacccacc

SEQ ID NO: 42443 - DNA, 97 bp, Homo sapiens
tcggcttcttgggccttgtccactgccttccctgcaaagtggtgtttccccaggatctgctggagaaaggcctcgaagcaaacaactttgccatgct

SEQ ID NO: 42444 - DNA, 100 bp, Homo sapiens
gcttttgtggcgctcttgctcctctctccttggcctctcctgggatcggcccaaggccagttctccgcagggttggatgactgcctgcaacaatatgtcc

SEQ ID NO: 42445 - DNA, 83 bp, Homo sapiens
aaacgggccgagcactcgggcgtcctcccaccattaagacctaacatagtctggaatgagagtggtcccaggctgcacccatg

SEQ ID NO: 42446 - DNA, 98 bp, Homo sapiens
gcgttggaggccaccgtttccagtgacttctgacagctctctccatggaaggaggcggcggccgcgatgagccttcagcctgccgggcaggggacgtg

SEQ ID NO: 42447 - DNA, 98 bp, Homo sapiens
agagccgagtgcagaagatctgggtgcccgtggaccacaggccctcgttgcccagatgttcttgggtgtctctggggagtccctgggccagaccttcc

SEQ ID NO: 42448 - DNA, 75 bp, Homo sapiens
cggaggaatacctcgtatgcaacctcaggcttcagccagaatactttcaagtcatcccaaatatggttccatccc

SEQ ID NO: 42449 - DNA, 74 bp, Homo sapiens
gggaaccctggtcaccgtctcctcaggctgaccccgcactacatctacccaccagccatcgtgcagcccagcgt

SEQ ID NO: 42450 - DNA, 100 bp, Homo sapiens
gcccaggcccagctcgtccagagtctgcggacagcgcacgtccagtctcgcccaagaacttcaaggtgaaaatgatcatgaagacatcagttctgctcag

SEQ ID NO: 42451 - DNA, 90 bp, Homo sapiens
atctcgctcggctgcgggaaatcgggctgaagcgactgagtccgcgatggaggttacgaaggtgagaatctgatgaaaattctaaaagac

SEQ ID NO: 42452 - DNA, 90 bp, Homo sapiens
tattgaacagattccacttgtgaaggaacaagagtttgttcagaaacaacagcaagaattagatggctctctgaaaaagatcatccagca

SEQ ID NO: 42453 - DNA, 75 bp, Homo sapiens
tgcagccggtcctcttggggaaggctgtgtgggccagcccagccatggagccggcatcatggattccttcaaagt

SEQ ID NO: 42454 - DNA, 75 bp, Homo sapiens
cggaccaagcctcgggagctaaggacacattcagctaacgtattttagcaggtggagtgaggttgaagattcctg

SEQ ID NO: 42455 - DNA, 98 bp, Homo sapiens
gactcctcgggcagcctcaacgagaactcggagggcaccggaggtgctggagaatctggtaaaagcaccattgtgaagcagatgaggatcctgcatgt

SEQ ID NO: 42456 - DNA, 99 bp, Homo sapiens
ggaagtggttggaaatggcacctatggacaagtctataagctaaaccaggtggacaggtgaaatgtcagtatatctctgctgtggataaagttatattt

SEQ ID NO: 42457 - DNA, 75 bp, Homo sapiens
gcctggaccgagttccacaagaaggactgcggggacctggtggccatcgagatctggttggagttggagggtgag

SEQ ID NO: 42458 - DNA, 83 bp, Homo sapiens
ggaagcagcagctcaccgaggacggggactcacctgcctagagctggaacgttacctccagagcgagccctgctatgtttcag

SEQ ID NO: 42459 - DNA, 75 bp, Homo sapiens
cgaccctggccgccccgagcggagcctggaggtttgtcctggttgtggtcaagactggatgatgtaactggctct

SEQ ID NO: 42460 - DNA, 100 bp, Homo sapiens
agctcacatgccaatggagaccctgttgcagtggccaaggcccagccgagttatgtgtctcggtaccacgtgaaagactcctcacgccacgtcatcctag

SEQ ID NO: 42461 - DNA, 100 bp, Homo sapiens
ctggaagatgctcattcaggccctgctcaagattccagtcctgttttgggaggtcatcagcgatgagcatgggatcgaccccacaggcagttaccatgga

SEQ ID NO: 42462 - DNA, 100 bp, Homo sapiens
cgccgcctgcgaggcggaggcaggatgaagatgactgtggatttcgaggagtgtctgaaggactcgccccgcttcagaattctgaaggtggactctatgt

SEQ ID NO: 42463 - DNA, 80 bp, Homo sapiens
gaggaggaaggtgaagaggaggacgtgagtggagaggaggaggtatctctgcattagccagattggacatatgtaaaggg

SEQ ID NO: 42464 - DNA, 75 bp, Homo sapiens
acacgctcaagaaaaccaccacttacacccagggggtgccccccagccaagctcctgcccctcctaaagctgaag

SEQ ID NO: 42465 - DNA, 158 bp, Homo sapiens
atcaagcaggaggagcagccatacccatggggaccacgcgactcaatggacggagagcttggattagactctggccctatggccataaaatgcagtaaaaacaaatccagttcccaagaagctgtacaaatgctttcttctgttcgactcaatttacg

SEQ ID NO: 42466 - DNA, 83 bp, Homo sapiens
cagtgccctattccttcacatgtaattcagaaattagggacagggccatgtttatgagtggactaagtgaaagcaaacaaacc

SEQ ID NO: 42467 - DNA, 74 bp, Homo sapiens
gccgccatgtcccaccagaccggcatccaagacaaatttacatgtattggagaccagaccagaagcccttctga

SEQ ID NO: 42468 - DNA, 98 bp, Homo sapiens
gcgactccggagacagcccaaatatcctcggaagagcgctcccaggagaaacaagtgtcagttgtacccgaggcgttctcagcagcagcaagtacctg

SEQ ID NO: 42469 - DNA, 80 bp, Homo sapiens
ctgaaatacatccaggaaagacatggagattctcttaaaaagacttgaaagagggctccagaaaaagtagatgcgtatct

SEQ ID NO: 42470 - DNA, 95 bp, Homo sapiens
atgcgggtccggatagggctgacgctgctgctgtgtgcggtgctgctgagcttggcctcggcgtcctcggaagctgccagtaactcagattctag

SEQ ID NO: 42471 - DNA, 75 bp, Homo sapiens
aagagcgctcccaggagaaacaagttctgtacagagtaatgagatgtgtgacggctgcaaaccaggtgttttttt

SEQ ID NO: 42472 - DNA, 100 bp, Homo sapiens
atcactggccggaaccgctccttggaaggtcgctgggaggtggcattcaaagcgtttgctgccaattgatggggcaaatgatctcttttttcagccacct

SEQ ID NO: 42473 - DNA, 75 bp, Homo sapiens
gcggggaccgctgtgctctcgggccatgaagcccccaggaggagaatcgagcaatctttttggaagtccagaaga

SEQ ID NO: 42474 - DNA, 50 bp, Homo sapiens
agcctcccaagtagctgggtttacagatgaggatgacgatgaaccagaag

SEQ ID NO: 42475 - DNA, 90 bp, Homo sapiens
cgccaggatcttataaaacaaatgctgctgctatgaatatgggtcgaccattccaaaaaaatcgtggcgagtaagaaaagaagctatgat

SEQ ID NO: 42476 - DNA, 76 bp, Homo sapiens
tacggtctcacagacaacgttgaggtatcccctgaaatactgacttcaggtcgaattatattgaaaagctcctgac

SEQ ID NO: 42477 - DNA, 100 bp, Homo sapiens
agagaggggagccggcgaggatcaaaatcttcgaaggagggtggccacaaagcgggcacaggcctggtgctacagcaaaaacaacattccctactttgag

SEQ ID NO: 42478 - DNA, 75 bp, Homo sapiens
cctgcttgcccctttgttcaatgagaaggccacattattactggaatccagcttcaaaagcagtggactgtcttt

SEQ ID NO: 42479 - DNA, 89 bp, Homo sapiens
caacgacaacgacctcagctgcgatgtggtcaaggtggacagggggcggtggtgatggcgcagtttgacactgaataccagcgcctaga

SEQ ID NO: 42480 - DNA, 82 bp, Homo sapiens
tggaagatagcttgaacagggctgacaacatttttccttttccggtcaaaatgcagatcttcgtgaaaacccttaccggcaa

SEQ ID NO: 42481 - DNA, 50 bp, Homo sapiens
ttcaggtttggagtgttatgatgaggaggaagttttattttgtcttcatc

SEQ ID NO: 42482 - DNA, 74 bp, Homo sapiens
ccagattctgccaattcgttttcaggagcatctccagcctgattacatcaaccccagagccgtgcagctgggct

SEQ ID NO: 42483 - DNA, 109 bp, Homo sapiens
catgcctatgccatctgcaaatacgcctttctcatatccactgccaaagggaccaaaatgagccgtcagactgctacagcattacctaccggtacctcgaagtgtccac

SEQ ID NO: 42484 - DNA, 97 bp, Homo sapiens
aaccgccctctcctgcatccaccagcagccaggaatccaaggtgcagctaaatcaagtccagcagctaaaccaggatccacaccttctcgaccctca

SEQ ID NO: 42485 - DNA, 100 bp, Homo sapiens
gaagaaatagatgcaatggatgttcagcagctttcacaaatagtaccaaagtaagagatgctaaaaaccttgtacctatggaccccaatggcctgtcaga

SEQ ID NO: 42486 - DNA, 87 bp, Homo sapiens
cggaaagctgcccagccaccagcaaccccccagccctgccaaggtaaccctgctggggtcagttatcttcacattccagcacaccca

SEQ ID NO: 42487 - DNA, 75 bp, Homo sapiens
gacatttcttcggcattctgcaacagttgactggtctgagtgtctccaatggaaaggaccaacttgtagtgttcc

SEQ ID NO: 42488 - DNA, 75 bp, Homo sapiens
cgatccgggcgctcgagacttaccagagccacaagcaccatcagcaccaggccgcccaggctctccatctggcca

SEQ ID NO: 42489 - DNA, 100 bp, Homo sapiens
ccaaagttctgggattacagggaacagtcccatgacactacccccaggatgctccatgatgaccctacactcaaacgtgctcattccatgaccaacccca

SEQ ID NO: 42490 - DNA, 90 bp, Homo sapiens
cactcggcaggcagtacccctcttctcttgaccaaacagatccctttaaccgtagtcccctcaccatggaccagatccggccaaacacag

SEQ ID NO: 42491 - DNA, 49 bp, Homo sapiens
ggcttccttgccctgtccgggtccacaggtcctggctaccctgggaaga

SEQ ID NO: 42492 - DNA, 100 bp, Homo sapiens
aatcacattggaccctcctcccaactgtagattagaaatgatatttgccaaatttgatgaagtgcaaagttcaggcggtatgattttgagtgtctgcaaa

SEQ ID NO: 42493 - DNA, 98 bp, Homo sapiens
tgcagcccaatcccatcgtctacatgatgaaagcgttcgacctcatcgtggaccgacccgtgaccctcgtgagagttcaatctcatccctcccagcag

SEQ ID NO: 42494 - DNA, 101 bp, Homo sapiens
gcgtgtgggaaaacatgcatccaagttccagtttgtggcctcctaccaggagctcatggttgagtgtacgaagaaatggagacatgggggacaaaggacag

SEQ ID NO: 42495 - DNA, 83 bp, Homo sapiens
acgccatgaaagctgccatggccctggagaaaaagctgaaccaggccctcggatgcccagaacctgtaggccgcaccgtggac

SEQ ID NO: 42496 - DNA, 82 bp, Homo sapiens
tcagcatcatcgacacccccgggatcctgtctggagagaagcagcggatcagcagaggtactgggcctaatcgctacgtgcc

SEQ ID NO: 42497 - DNA, 51 bp, Homo sapiens
ggactcacggccgggacactcagggcaggactctcttctctgacctgagtc

SEQ ID NO: 42498 - DNA, 82 bp, Homo sapiens
ctggagcctcagttggaagcagccgatccagcctgcggagcctgtggggcagcataaccagtgtgcagcgttcagacaatgg

SEQ ID NO: 42499 - DNA, 80 bp, Homo sapiens
atcatggagccgctggggtcccttttgcctcagatactattttgaagccagagactgctgctactttgaaacgtacgata

SEQ ID NO: 42500 - DNA, 99 bp, Homo sapiens
gaacagttggctaaattaaagaggaattatgccaaagcagtggaactactggtggaactagcttctctgcagttgtggacatcggatacccaaggagac

SEQ ID NO: 42501 - DNA, 88 bp, Homo sapiens
aggaaccagatatcttgaaaagctgccagaaagactgggctggcttagatgaagatgaagatgcacatgtctgggaggataattggga

SEQ ID NO: 42502 - DNA, 75 bp, Homo sapiens
caaacagggaaactgaggaccagagaggatattgatgatgttaagaagttcaaaccgggttacctggaagctact

SEQ ID NO: 42503 - DNA, 110 bp, Homo sapiens
agatgccaggaccacctggaagcctagaaatggagaactgcgacacatcaccaagctgaagccctggagcctctttgatgtacttgtggaaaagtatggctggccccatg

SEQ ID NO: 42504 - DNA, 75 bp, Homo sapiens
tgagtcgcttcaagtttatcgctgataccccaatgtccttctttgactttgtggttgatcctcattctttccccc

SEQ ID NO: 42505 - DNA, 75 bp, Homo sapiens
acggagagaacacgagcccatcaggtgttggagcgggccggagagaagtagagtgggctgcgaggagaaggaaac

SEQ ID NO: 42506 - DNA, 74 bp, Homo sapiens
ttctgaactcaggacttggcaacattcttcagcatccaaatattcttcagtgtgttggacagtgcgtagaagcg

SEQ ID NO: 42507 - DNA, 76 bp, Homo sapiens
aacgctgcctttgctttaaaacagtattacttgcgatcagctggatactcttgttaccagaattccaaaggttctg

SEQ ID NO: 42508 - DNA, 98 bp, Homo sapiens
caaaaggaaactgttggtgggacgacttacttctatacagacacaactccagcacctttgactggaatggcctttccatctatccggagtgacctacc

SEQ ID NO: 42509 - DNA, 96 bp, Homo sapiens
acgggcgcccggccggctgcggtccgtgcggaggctgagccggccgcgggcgcgaccggaggcaggtacactgatgctgaagtactatgagccttc

SEQ ID NO: 42510 - DNA, 90 bp, Homo sapiens
cgaaggggagccatggcggctgacagtcgggaggagaaaggagctcttgtccctggcaaagcgaaagcgcagtgactctgaggagaagga

SEQ ID NO: 42511 - DNA, 51 bp, Homo sapiens
cactggaattgatgtcacctccaaggttctcttgctgcaaatggccctacc

SEQ ID NO: 42512 - DNA, 82 bp, Homo sapiens
cccgattctcatctgcccataatcatggacacagccccaggatgtgcagggacccttgaacatctgtgaagaaatgactatt

SEQ ID NO: 42513 - DNA, 96 bp, Homo sapiens
ggagaaaggcgggcccgggaacagtggaagtatgcgagacttaagagctcaagtgactagtggtctcctgccatttccagaagtgactcttcaagc

SEQ ID NO: 42514 - DNA, 101 bp, Homo sapiens
gggctcgcggcgtctccggggaaagccgtggccccgagggcggatccgagagctccaaacgagaatggaagccgctggaggaccgtagctgcacagacata

SEQ ID NO: 42515 - DNA, 119 bp, Homo sapiens
cccgcgtccagcacctacgtcccgctgccgtcgccgccgccaccatgcccaagagaaagacaatgcagatcttcgtgaagactctgactggtaagaccatcaccctcgaggttgagccc

SEQ ID NO: 42516 - DNA, 75 bp, Homo sapiens
aattttcagaagcacatgtattataacaggagaatacttatctctggcgcacatcactatatttggctgcctctg

SEQ ID NO: 42517 - DNA, 82 bp, Homo sapiens
ttcagacagcatatttgagtcatttccttcgtacccacagtgcttcatgagaggaaactacagtcgtcgggaaggaacaaga

SEQ ID NO: 42518 - DNA, 80 bp, Homo sapiens
aacccccttggacacaggcataccctttcccccggtcttctctacatcctcagcagtgtttgatcagtatgtaaagacca

SEQ ID NO: 42519 - DNA, 101 bp, Homo sapiens
ccaggagaccaagtttcagatgttccagctaattgacattgcccggcagacggctcagggaatggagtacgttggaggtcatcgaacaagtaagattatga

SEQ ID NO: 42520 - DNA, 75 bp, Homo sapiens
gtttgccgccggcatggccagtgccctagaggcgttggaaggagttccatctggaatatgacaaattagaagaac

SEQ ID NO: 42521 - DNA, 82 bp, Homo sapiens
gggggaggcgaacagtctcgttgctgcctctgtgtacgctgaggggggagcccgtggaccgggagcccgtggaccgggagcc

SEQ ID NO: 42522 - DNA, 100 bp, Homo sapiens
caggattcttgatgtttcttctgagctccagggtcaggcagtatgattgaagtttctaagccagcataagcagtactataatggatgtagacagcacaat

SEQ ID NO: 42523 - DNA, 96 bp, Homo sapiens
ggagagcaagaccatcatgctgcgcggccttcccatcaccatcacagagagcgatggcaattgaaggaacagactaaaaatcgtgtcctggaagga

SEQ ID NO: 42524 - DNA, 130 bp, Homo sapiens
aaggacatgaagatcaagtccctggaggagatctatctcttctccctgcctattaaggtacgcaggtaccaggtgctgctgtcactgatgctctccagccaaaccaaagaccaggtgacggcgggcgcca

SEQ ID NO: 42525 - DNA, 50 bp, Homo sapiens
catggaaggggtcctcagagttactgggtatgagaataatgttatcacta

SEQ ID NO: 42526 - DNA, 98 bp, Homo sapiens
agccggccgtacgcggtgctgcgagggcagaacctggccattggatttaatgtagagacggtgacgtacaaaaaccttaaattccaagtctgggattt

SEQ ID NO: 42527 - DNA, 100 bp, Homo sapiens
gaactggctaccgttcggactatttgtagtcatgtacagaacatgatcaagggtgttacactggaaagatatggagagagatttgaaggctgactcaaac

SEQ ID NO: 42528 - DNA, 74 bp, Homo sapiens
gccaagaagattgaagccagagaaaggaaatggcacctcgaaaggggaaggaaaagaaggaagaacaggtcatc

SEQ ID NO: 42529 - DNA, 90 bp, Homo sapiens
cagaggaggcgggggcagccgctgagacggtttttcacaagtgttatccaagataaattctgtgggattataaacatttcagtagaaggc

SEQ ID NO: 42530 - DNA, 75 bp, Homo sapiens
tcacagctgatgacctgctgctcgtgctgatctcagatgaagttgcggagaataatgaacatgatgtcacttcta

SEQ ID NO: 42531 - DNA, 98 bp, Homo sapiens
tatcgttctatttctctagctattgccttattttttctcatggatgttcttcttcgagtatttgtagaagggaatagccaggccagaagaaggaaggc

SEQ ID NO: 42532 - DNA, 75 bp, Homo sapiens
ccactgcccggctgccttccacctccagtgctgatctcgaatacctgatgcatgcaaaacagcagctagtaacca

SEQ ID NO: 42533 - DNA, 74 bp, Homo sapiens
gtttgggagcctcatcattggttatgccagggggccgtctgccctgcccagagctgtgtcctgatgccgtgttc

SEQ ID NO: 42534 - DNA, 100 bp, Homo sapiens
agaatttgttgatgattataccgtcagagtgattgatgtgtttgctatgccacagtcaggaacaaaagctgacttcatgagaccgaggatctcgttcgtt

SEQ ID NO: 42535 - DNA, 75 bp, Homo sapiens
gactcggtgctggtgggccctgtgccagcagggagacacatgtttgtctttcagatgctcccataatactctcag

SEQ ID NO: 42536 - DNA, 75 bp, Homo sapiens
tgagcttcttcctatttgccatgggaggatgaaggagaagatgactaaatagaacactgatggattccaaccttc

SEQ ID NO: 42537 - DNA, 98 bp, Homo sapiens
tcggctctcgctgcggcagacgggctcccccgggatgatctacagagctctgcgtgcctcttgctgtgccctacctggacaaacccccaactccgctc

SEQ ID NO: 42538 - DNA, 100 bp, Homo sapiens
gcaaatgtcatccgacagctgggcagcctgagtgtccaggactaagcctgtatgtgtcacctgcagtgcccatctacaatgcaattatgtttctctttgt

SEQ ID NO: 42539 - DNA, 78 bp, Homo sapiens
ggaagctgcccttcaccgcgggcgccaatggggagcagaaggactcggacacaggtgaggcggaaccaaccctcctgg

SEQ ID NO: 42540 - DNA, 75 bp, Homo sapiens
tggctccagcatgtatcagccgaggtggagctgcggggccctggcatgaaagcacccaccaaggctccggatgtg

SEQ ID NO: 42541 - DNA, 101 bp, Homo sapiens
atggtcgcctgcagcccgcactccttgaggatcgggtgaaaggttgagccatgcagtaggctgtgcttttgcagcctgtttagagcgcaagcagaagcggg

SEQ ID NO: 42542 - DNA, 98 bp, Homo sapiens
cgagtgaggaaaggaggtactgtaggacactcatgaggaccatgatacttccactgagaatacagacgagtccaaccatgaccctcagtttgagccaa

SEQ ID NO: 42543 - DNA, 82 bp, Homo sapiens
acagcatggacatgagggtccccgctcagctcctggggctcctgctgctctggctcccagcttactaccagcccagtctgac

SEQ ID NO: 42544 - DNA, 51 bp, Homo sapiens
gctgaagctgggcatctggggcgccatcgactacagtgacagcgccatgct

SEQ ID NO: 42545 - DNA, 101 bp, Homo sapiens
ccatttccaaaagatgcctctttaaacaagtgctcctttcttcacccagaacctgttgtggggagtaagttctgtggctcctgatggatctgagaagatgg

SEQ ID NO: 42546 - DNA, 78 bp, Homo sapiens
gagaagcacaagatcatgcacagagcttggatttacactgggcaacgtggttggaatgtatctggctcagaactatga

SEQ ID NO: 42547 - DNA, 98 bp, Homo sapiens
caaaaactgatgaccaagagaatgtgtcagccgatgcaccgagtccagcccaggaaaatggagagctagaatgggtactaggaaaaaagttcatgcat

SEQ ID NO: 42548 - DNA, 90 bp, Homo sapiens
ccggcttctgctgttgctcttctccgccgcggcactgatccccacagaaatggcttcagacatacctggatctgtgacgttgcccgttgc

SEQ ID NO: 42549 - DNA, 95 bp, Homo sapiens
ccagaagtccagagctgaggactgcctgtttgcaggtttatctggcaagactgaggcaaataagactacagaatttcaatgagcgccaacagatt

SEQ ID NO: 42550 - DNA, 95 bp, Homo sapiens
cgcggggacagcagccggccagccggggggcactgcccgcccgggctctgtgtcttcaataggccgtgtttaagaggcgtcttacactccctgtt

SEQ ID NO: 42551 - DNA, 87 bp, Homo sapiens
ggtctgtcagtgagatggcttctaacaaggtatctggacaggaagacttctcccatcagctttaccagaggaagctgcaggccccac

SEQ ID NO: 42552 - DNA, 95 bp, Homo sapiens
gaagccggggcggagcacgcgagctatggactttccttatcccagttgattgtgcagaatacactgcctgtcgcttgtcttctattcaccatggc

SEQ ID NO: 42553 - DNA, 100 bp, Homo sapiens
gtcagaagaaggctgctattgaaagagagtatgcacaggtaaacactcgataatctggataactgactagcaccattatgatcaccagtattgtggctgg

SEQ ID NO: 42554 - DNA, 145 bp, Homo sapiens
cacaagatgagccatgatgcatttactgtcatcaagaactgtaatacttctggaatccagacagaatgggccccctcccccgggaatgcgcccaccaaggccctagactcatcttggccctcctcagctccctgcctgtttcccg

SEQ ID NO: 42555 - DNA, 90 bp, Homo sapiens
gtgaagctggagaagctggacatcatgatccgcctggcctctcaggccaacatcgcccagctccatgatgcgttatctgggtctggaaac

SEQ ID NO: 42556 - DNA, 90 bp, Homo sapiens
gcagttgctccggcggcgctcggggagggagccaggtggtcgtgtgatggtaacagatgctgacaggtcaatactatctccaggtggaag

SEQ ID NO: 42557 - DNA, 100 bp, Homo sapiens
gagcgggtaccgggcgcgggcagagcgcggcggcgcggcaaagatttctgaagacgtctttctagaaatgactggaaagtttcaagaggcataagataca

SEQ ID NO: 42558 - DNA, 100 bp, Homo sapiens
tgggtctctcatccctctcgtcctggtgaagaagaagagtatacccagcggcatgatggaagtggttcattgcatgatattcaactgtcattgccatcca

SEQ ID NO: 42559 - DNA, 76 bp, Homo sapiens
atcccatgactaaagtgcaggccgaactagatgagaccaaaatcattctgactgtttgtctgtgggatataaacgc

SEQ ID NO: 42560 - DNA, 99 bp, Homo sapiens
gtggaattcgcgaagctgccaaagccttagacaatccggttccagttgttggcaaaggagaggaagaggaagaggaagatggcatgcggctttgtctgc

SEQ ID NO: 42561 - DNA, 87 bp, Homo sapiens
caattgaatgagtttttagcacagacgctccagagggtggataagattgtggaccagctgcagcagttaatgcaggtgtatgacttg

SEQ ID NO: 42562 - DNA, 100 bp, Homo sapiens
cacgctctcagtcagcctggggaatgagacccaaactgctcatacagaattacgcatttccacttctaatgcacctgtggccttgccgaagaactggaaa

SEQ ID NO: 42563 - DNA, 75 bp, Homo sapiens
tatactaccaatatccaggagctcaatgtctacaggtgtccaggactaagcctgtatgtgtcacctgcagtgccc

SEQ ID NO: 42564 - DNA, 74 bp, Homo sapiens
ggactttgtcaataactatctttcaaaaggagtactcacagcgctccttcaccactattacccaattgagatcg

SEQ ID NO: 42565 - DNA, 74 bp, Homo sapiens
aggaaaccctcagattggaggctggtgtcccggagcagtgcaagatgacttgcaccgttggtttaacaggaaga

SEQ ID NO: 42566 - DNA, 96 bp, Homo sapiens
gaaaacatcaaagaggtctagcaaagacaagttggatggcttgaggactggtactaaaaggaaacgtgactgggaggccattgccagcagaatgga

SEQ ID NO: 42567 - DNA, 90 bp, Homo sapiens
ccaagctgctgataaagctgcctgcctgttgccaaagggtttcttcagtgcccgtggtcatcgaccccttgacaagaagagagaagaggc

SEQ ID NO: 42568 - DNA, 74 bp, Homo sapiens
ttcatcgatgatctggcagacctcagctgcctggtgaggaggagaagaaacaggcttacgctgagcgaatccaa

SEQ ID NO: 42569 - DNA, 90 bp, Homo sapiens
caacagcagcctcttcaagagctggaggctacagtgccccttcggcaacaatgacaaggcctccccatggccacccatggaccagtcggc

SEQ ID NO: 42570 - DNA, 83 bp, Homo sapiens
caatgactgcaagcacctattatgcttcatcactggtccagctgtaataccagggtacttctccgttgatgtgaataatgtgg

SEQ ID NO: 42571 - DNA, 100 bp, Homo sapiens
gggatgtcagaatctggctcggaggaatctcagtagggacaacaggcaggagaattatgggagcgcatttccccaggcgtcatcatgaccggggcctaca

SEQ ID NO: 42572 - DNA, 100 bp, Homo sapiens
gaagggagccaacaaaaattgttttttctacctgttgacgtgtcaagcactaactgtggatccataaagaacccagccaacccgcagagggaggggaggg

SEQ ID NO: 42573 - DNA, 100 bp, Homo sapiens
ccgcctctgcgtcctcaacgagatcttgggcaccgagagggactacgtgggcaccttgcgcttcttgcagtcgataatgtggatgcaaatgatcttaagc

SEQ ID NO: 42574 - DNA, 82 bp, Homo sapiens
ttcacaaggatcagatgatgaacagataatctttacagtgaccttgataagtgttctgaccagggcataaggaattatgctg

SEQ ID NO: 42575 - DNA, 114 bp, Homo sapiens
tgacccccagttacgcctggaatatgaaggcttccccgtcccgatggattaattgcctctgaaggagccataagtcccgatttcttcaatgattaccaccttcaaaatggagat

SEQ ID NO: 42576 - DNA, 100 bp, Homo sapiens
agccacgaaccacggcactgattttcagttctgggaaaatggtgtgcacaggagccaagaggatgaatctggttatagatggacaagagacgatcattct

SEQ ID NO: 42577 - DNA, 97 bp, Homo sapiens
aagaagcagaggtcacggaagcactcagtcaatgaaaaatgtaatatgaaaatcgagcactatttttctccggaatcaagaacccagtctcggttgc

SEQ ID NO: 42578 - DNA, 83 bp, Homo sapiens
agctaaggccgcgttggggtgagaccctcacttcatccgtacctggagtagaacagaaaaattattatgtctgtgttcccttg

SEQ ID NO: 42579 - DNA, 97 bp, Homo sapiens
cccgagccggtgcagtacacacactggaacacacaccagccgctgttagatgatgaagatagcaacaacatcacagtaggatccttagttacagtgt

SEQ ID NO: 42580 - DNA, 90 bp, Homo sapiens
ccgccagatcatcggtcaggccaagaagcatccgagcgtgccttcagccgctacaagagcagaagcagtgggcattggatggagctgagt

SEQ ID NO: 42581 - DNA, 96 bp, Homo sapiens
tatggccgtggctaccccggatttgctccaagctatggctatcagttcccaggtgtcatggagaaactccagctgggcccagagattctgcagcgg

SEQ ID NO: 42582 - DNA, 80 bp, Homo sapiens
ggacgcactgactcgcctcaagcacctgcgcatcgtcatcggctcacagctggaggaaaatttgcctcaggatgaatcac

SEQ ID NO: 42583 - DNA, 83 bp, Homo sapiens
caccgccgccccctccggcgtgttcatgcccccgggcttcaaggttactgactttttatgatgtttggtggctatgagactat

SEQ ID NO: 42584 - DNA, 90 bp, Homo sapiens
gagcattgcttattgttgattccttggttgccgtgctgagtcctgctttaaggaagcaggccccatcacaggtatatggaggagtgacct

SEQ ID NO: 42585 - DNA, 83 bp, Homo sapiens
aaggatatcgacgtcgtgatccagaagtccagagctgaggactgcctgtttgcagaaattttactgcaggataaaactccagg

SEQ ID NO: 42586 - DNA, 75 bp, Homo sapiens
acacgctggcaagcaagattataatcaggaagtggatgcctccatttttaaggtgaccaaaagccagccccactg

SEQ ID NO: 42587 - DNA, 75 bp, Homo sapiens
ggctcgcgagatccgcatgaaggagctggagcggcagcagaaggagctgaccaagaatgggacagtggagtcggt

SEQ ID NO: 42588 - DNA, 80 bp, Homo sapiens
atgtttccaaaccagtcagctgggctgatgaaacggatgacctggaaggagatggtgcatgtgagggaaccctggcttgt

SEQ ID NO: 42589 - DNA, 95 bp, Homo sapiens
caagaccatcatgctgcgcggccttcccatcaccatcacagagagcgatcgatgccctcctagctagccgtcacgggatggagggcttcatggac

SEQ ID NO: 42590 - DNA, 51 bp, Homo sapiens
gccgaatcttccttcaggatatcaagggggctgaagaaccgaaactaaaat

SEQ ID NO: 42591 - DNA, 83 bp, Homo sapiens
actttgccttcctgaatctttttccctgcactacgaggaagaggatccatatggctttggagacagtcgagattcaaggcgtg

SEQ ID NO: 42592 - DNA, 100 bp, Homo sapiens
ccataatcggaatgtgatcacagagcctatttacccagaagtagtccatatggctttgatgaactaggtggacttctcaaaccaacagtggcctctcaga

SEQ ID NO: 42593 - DNA, 90 bp, Homo sapiens
aatcagagaatgaaaaaaacgcaccttggagaaaaattttaacgtttgagtgcttatgaggtgatcaaactcaaaggctacacatcctgg

SEQ ID NO: 42594 - DNA, 90 bp, Homo sapiens
gtctgttgtaccccactgctggggtggtggttccaatgagacagggcacaccaaactccatctgaacaccttccaccatgaccacctcag

SEQ ID NO: 42595 - DNA, 100 bp, Homo sapiens
ctcggagtgcagcggggttaggatggacgaggacgtgttgcaccctgaagagcctcatcatcggggagccacagacatttacattaaaattcaagagagc

SEQ ID NO: 42596 - DNA, 82 bp, Homo sapiens
aatatttagggaacacctgtggaattccaaaaaacagctgagttcaggtaatagcctgcagctggtgttttgagaagcccta

SEQ ID NO: 42597 - DNA, 100 bp, Homo sapiens
aggactaagagaagtcacaaaacagcagatttcccaagagcagcggaaaatgatccagtcacagggatcgtgggactttaccagatcggtttgtaataac

SEQ ID NO: 42598 - DNA, 82 bp, Homo sapiens
atggaaagatggagatgaacctctaacacagtggaaaggaaccgttctggatcaggttattctggtacaagttaacccagga

SEQ ID NO: 42599 - DNA, 141 bp, Homo sapiens
tgtatgatcgtgtgattgactttgatgagaacactgctctggatgatgcagaagaggagtcctttaggaagggggcagctggcattttatgctatgtgggagcctatgtcttcatcacttatgatgactatgaccacttct

SEQ ID NO: 42600 - DNA, 102 bp, Homo sapiens
gctgtttgtctccttgcccgccaaagttctgcccagtccaacgactccacgcagctcgcccttggtttgctgtggaatttgtcatctaatgacaaactcaag

SEQ ID NO: 42601 - DNA, 100 bp, Homo sapiens
acgttcatcacctagaaagccttttggagcagaaggaaaaagagaacagtatgttgagagagtcagaatctggagatgtgagtagaaacacggaactgaa

SEQ ID NO: 42602 - DNA, 100 bp, Homo sapiens
aggagatctccagcgactctgagagcgagaggtggaccccaagttcctgaggaacatgcgctttgccaagaagcacaacaaaaagggcctaaagaagatg

SEQ ID NO: 42603 - DNA, 121 bp, Homo sapiens
agaggacgttggctcgccttctcgtgatcattgtgagcctgggctatggcattgtgaagcctgacggagatggcggtcttcagttgtgaggcccacaatgacaaagggctgaccgtgtcca

SEQ ID NO: 42604 - DNA, 75 bp, Homo sapiens
aacccagctgttcattggaggtgtcactggatgggatctgaaacttgcccacccttcgggatattgcaggacgct

SEQ ID NO: 42605 - DNA, 75 bp, Homo sapiens
aagaaaatcagagttttgaaaatgaaactgatgagacgacaactatacagtttatgtaacttgatggaagaaaat

SEQ ID NO: 42606 - DNA, 100 bp, Homo sapiens
gcttcctggcccgcgagcagtaccgcgccctgcggcccgacctggcgaggcgagcaccgtcaggagcgcagagatcggccctactagatgcagagacccc

SEQ ID NO: 42607 - DNA, 101 bp, Homo sapiens
agtagccggtaacaaacgagggttcccgggattggaccgacgcagccatggaggcaagtgaggcctatctggttggcctttttgaagacaccaacctgtgt

SEQ ID NO: 42608 - DNA, 101 bp, Homo sapiens
actgaaattcatcctgagatgaggtcgttcttccctctttccaatagatgatggcttgcttgatgatggtcacagtgatcaagttggagttttaaattcac

SEQ ID NO: 42609 - DNA, 96 bp, Homo sapiens
ctcaggaaggtgggaaaattcatctggaattactacccaatcaaggaatgctgatcaactgtatggagaggacgctggtgacttttttgacacata

SEQ ID NO: 42610 - DNA, 100 bp, Homo sapiens
gacgataattcaaaaacactatcccagggagtgcaagcttagagcgtctggccaagaatcagaggaagtggacggagtcttgctctgttgcccaggctgg

SEQ ID NO: 42611 - DNA, 99 bp, Homo sapiens
gccgccgccgctgccgcttccaccacaggcctcaggagtgcaagtagctgatgaagtatgtcgcattttttatgacatgaaagttcgtaaatgctccac

SEQ ID NO: 42612 - DNA, 75 bp, Homo sapiens
gcgggcggcgcgggggagatgcctttccgctgtgcccattgccattactcctgcaacatatctggctctctgaag

SEQ ID NO: 42613 - DNA, 75 bp, Homo sapiens
tttgcagatcgggagcgcaaggtcgccctcaaggccatgatcaaaacgagcctgggcctgccaaggtggctgtta

SEQ ID NO: 42614 - DNA, 82 bp, Homo sapiens
aaaacagccaccttcagtatctcagtcctccagtgtttggatattcagtgttgtcatgactggatcttacaataatttcttc

SEQ ID NO: 42615 - DNA, 98 bp, Homo sapiens
gcctctcgtcggcagtgaagctcaagttgctactcgggacgctgcacctcccgcgccgcacggtggacgagctggcccccaagaggaccctttccaag

SEQ ID NO: 42616 - DNA, 90 bp, Homo sapiens
cactggagtttgcattgtcttggctgttgagtgaagaaaaagagcaggaagtcattacatgactgtcagcatcaataaggccattaatac

SEQ ID NO: 42617 - DNA, 101 bp, Homo sapiens
cgaccttcaatccagttccaaggactccacgggagaatggatcttggagaatgtctgaaagtccatgacctggctttaagagcggattatgaaattgcatc

SEQ ID NO: 42618 - DNA, 50 bp, Homo sapiens
aactataaacgagtgactgggacaaggttatatcttaagtgtggtgctgc

SEQ ID NO: 42619 - DNA, 83 bp, Homo sapiens
gccggcgagcggacgccccgaggtcctgaacgaggctgtgggggccctgatgtaccacaccatcactctcaccagggaggacc

SEQ ID NO: 42620 - DNA, 75 bp, Homo sapiens
gtccgagatgcctcaacaaaaatgcagggagattatactttgactttgcggtcaatgcctatcagcaaggagtag

SEQ ID NO: 42621 - DNA, 82 bp, Homo sapiens
ctcgcgccggctatggccgtgccctggggctgagccctcagggctgggttacgacccctacaaccctgagctgcccaagccc

SEQ ID NO: 42622 - DNA, 83 bp, Homo sapiens
ctgaattatggcagcccagtcaaggtgattgaattactcagatatgaagatcatcatctaggttttgtgtaaaaggccctgga

SEQ ID NO: 42623 - DNA, 100 bp, Homo sapiens
ccaaagacgtggaccggacgagactggagctatgccctttgccttctgtacgagagagaagcttccttggacagaatttgctgagtcagcagaggatggg

SEQ ID NO: 42624 - DNA, 82 bp, Homo sapiens
gcttgagagttccggaataccaaagggtcctgcagttctgagcttgggttccctttgcctggacaccaaccaagcccccaac

SEQ ID NO: 42625 - DNA, 74 bp, Homo sapiens
ctccattcccgggaggggggagcggcgttggaggccaccgtttccagtgccaccatggcaactgcaccatacaa

SEQ ID NO: 42626 - DNA, 100 bp, Homo sapiens
ggactggctgtgttattctgcatattgcagttcttgtcaatgacctgctccctctcactggcagcaccttccatgaccagatagccatgctgagccaccg

SEQ ID NO: 42627 - DNA, 75 bp, Homo sapiens
tttgtaactacctggcattgccttttgttgagtcaagtccatcatctccagaaccagctagtcttcctgcagaag

SEQ ID NO: 42628 - DNA, 100 bp, Homo sapiens
ccgcggaggcggaagcatccatggcggagggcggcagcccagacgggcgggcagggccgggctccgcagatgccttcgtgaacagccaggaatggacgct

SEQ ID NO: 42629 - DNA, 75 bp, Homo sapiens
cgaccacagccaaagcgggcacctctgtgagtgaaagccttcagagggaagctgctaagaagcaggccatgaaac

SEQ ID NO: 42630 - DNA, 100 bp, Homo sapiens
acacacctccattggatttaaaagacagtcctcgtcagcactgactttcagctatggaatcgagttgacgggcgccgacctgaaggactgcgtcagcaac

SEQ ID NO: 42631 - DNA, 100 bp, Homo sapiens
aaagtcctgaagttttgccacacatagaaaagaaaggtgcaaaattccttagtgatgctgagatcatccagttagtcaatgctaagcatatcccagccta

SEQ ID NO: 42632 - DNA, 75 bp, Homo sapiens
gacagagtggagccatggctagagggcgaactttctgaccaagtatacaactacccagagggcctaggagaagtg

SEQ ID NO: 42633 - DNA, 74 bp, Homo sapiens
tgacatttaattttagggtcctttatatagaagggagagtaggagtctcagcagtccaattttggcactggaga

SEQ ID NO: 42634 - DNA, 96 bp, Homo sapiens
attcagtttgcatctctccctcctttaaacagcttctccgggtctcagcatgatcaacagtacaaattctgaagtttgtaaacttgctgatggtgg

SEQ ID NO: 42635 - DNA, 50 bp, Homo sapiens
gcgaaggcccagagcatcctaagaacagtgctgggctttgacaaacttcc

SEQ ID NO: 42636 - DNA, 87 bp, Homo sapiens
ccgagtgcggcccggaggcggcggagggcaccccgggcgggcggcggctgctgattatatctgtccaagatgcgagtctggttttat

SEQ ID NO: 42637 - DNA, 75 bp, Homo sapiens
caagaaggccctggacacagcaatatctctgggctttcacagcgctccagggcagtgttaccagtgcccatcagg

SEQ ID NO: 42638 - DNA, 82 bp, Homo sapiens
cctccccagccatgtggaattaacaagtttccaggagtttctaaagcgtccggatcacaagcaagattttgtagctcaatgg

SEQ ID NO: 42639 - DNA, 90 bp, Homo sapiens
gagccgagcatctgggccgagaccattccgtatggagagccggacccagaagtccacattcccctcgagaatctacagcagtttcctgcc

SEQ ID NO: 42640 - DNA, 100 bp, Homo sapiens
cgtcgccagcggagcgaacccgagagcgtggagcgggctgggccaggtgtacctggccttgggcctgacccaggcagagatcaatgagttctttactggt

SEQ ID NO: 42641 - DNA, 82 bp, Homo sapiens
ttggtgaggcaacagcaggcctttcctcacgccagaacaatggctcggacatcatcatgcagctggacgacgtggttagcag

SEQ ID NO: 42642 - DNA, 100 bp, Homo sapiens
cggcgagcaggagaggaggtcttccgggccgcggcctccgagcgcgcgggatttgcaggctcagggaagaatttatggaaaaattaaagaagaaaacttt

SEQ ID NO: 42643 - DNA, 100 bp, Homo sapiens
tggaccaagatcgagcccagcgtcaacttcctcaagtcgcccaaagataaaataccatgaggagtttgagaagagccgcatgggccctagcgggggcgag

SEQ ID NO: 42644 - DNA, 83 bp, Homo sapiens
agccagacggggttagcggagcaatgcgcaggaataaggaagcgacctgcaaccgacggaatcaaagatcaactcccactgag

SEQ ID NO: 42645 - DNA, 83 bp, Homo sapiens
tacttctcggcgctgccgtctctggaggagtactggcaacagatcctgatctggtccattcagcagaggactgcagaagtctg

SEQ ID NO: 42646 - DNA, 74 bp, Homo sapiens
ttcattattacatgaagtatcatgtttctgttccatgcctctgcagcggtgcctcatgtttgctgtgtagttgc

SEQ ID NO: 42647 - DNA, 100 bp, Homo sapiens
tgtctcctacctggatggcaaagggaacctggcacctcaaggatcggattgagtttgtgacgggcaccaaaaaaggcaccacgaccaacgccacgtccac

SEQ ID NO: 42648 - DNA, 98 bp, Homo sapiens
tttagtcattcatttttgatcaggagaaagaagacagccatcatttgaaagggttcccagcaccatgagggcctggatcttctttctcctttgcctgg

SEQ ID NO: 42649 - DNA, 50 bp, Homo sapiens
gctcattggagatggcatggaaaggaactaagcgtcttgtagaaggaact

SEQ ID NO: 42650 - DNA, 50 bp, Homo sapiens
tggtccccggagctcctgcccccagtgctgcttttgacacaaaaacgggg

SEQ ID NO: 42651 - DNA, 90 bp, Homo sapiens
ggagcctcgtggctgcgtcaccgccgcccccccagacaagatggacaccgcggaggaaggacaaggaagatggggagccaaagaccaagc

SEQ ID NO: 42652 - DNA, 100 bp, Homo sapiens
tccaacagaacgacctagtatttgaatttgctagtaacgtcatggaggatgaacgacaggctatgcattcctgctgtttcaagatgaaagctctgtgcag

SEQ ID NO: 42653 - DNA, 83 bp, Homo sapiens
ctgatgccaacagtgtaccagcagggcgttggctatgtgcccatcacagttcatagccctgatgaagcaagttactctgctct

SEQ ID NO: 42654 - DNA, 83 bp, Homo sapiens
cttcaatactacctttatttccaccatagcagagctgtacgtctctgaccgagagggaagcgatgccacgggagatggaacca

SEQ ID NO: 42655 - DNA, 100 bp, Homo sapiens
catttctgagagtggcgtggccctcacttctgttctggtgaagaaaggtgatgtcaagcccttggctgagttccccctgcagtggtttggagtccctgcc

SEQ ID NO: 42656 - DNA, 123 bp, Homo sapiens
cagacatggacccctcgcgagccatccagaacgagatcagctccctcaaagcccagctcaacattggcaatgtgctccctgtgggcaccatgcctgagggtacaatcgtgtgctgcctggagg

SEQ ID NO: 42657 - DNA, 95 bp, Homo sapiens
gtggagtccaccctggctgtggataccgttaaccctggataaagagaatggaggttacctctgtccgtgtagattcctaagctgtcctggagtga

SEQ ID NO: 42658 - DNA, 139 bp, Homo sapiens
cagcagctgtggaggtggaatcagtagcagcagcagcagccgcggtggcagtgcaaaaggctggcagtacagcttctgaaagtacagagaagcttaacaactccactggcctccagagctcctcagtcagtcaaacaaa

SEQ ID NO: 42659 - DNA, 100 bp, Homo sapiens
cccgtccccgccccgggggccgccgccacccgcctcccaccatggctctgaagagaatccacaaggtgttgctggaagaagccaaggatttgctctctga

SEQ ID NO: 42660 - DNA, 90 bp, Homo sapiens
tggggctgctcccatcattgatgtggtgcgatcggaccctcgagatgcccctcctccaactcgtgctgaaacccgagaggagcgcatgga

SEQ ID NO: 42661 - DNA, 51 bp, Homo sapiens
gagaaattctcgcagagcttacaggagctacagggagctggccgactgcac

SEQ ID NO: 42662 - DNA, 51 bp, Homo sapiens
atggagaccaatcacccacccagtgtgcgatattgatatgctggaggaatt

SEQ ID NO: 42663 - DNA, 90 bp, Homo sapiens
ggcagactggtgacttcacttttgagtgcaactgccttccagtttctctgtttgaagaacataaggacatttctcacggcctgttgtgag

SEQ ID NO: 42664 - DNA, 82 bp, Homo sapiens
tcgagcccagcgtcaacttcctcaagtcgcccaaagttgatattcactgatggactccaaagaatcattaactcctggtaga

SEQ ID NO: 42665 - DNA, 101 bp, Homo sapiens
gccgtggtcagccgcttcgacgagcagatggcccactgcgtgaccttggttcagctgtccatttcctgtgaccatctcattgacaaggacatcggctccaa

SEQ ID NO: 42666 - DNA, 50 bp, Homo sapiens
tgagtttctcggtgtgagctggaggttgaagaagcctcagcggaggcgat

SEQ ID NO: 42667 - DNA, 50 bp, Homo sapiens
tggaaacttgtcaaatttcatcaggaacgaggtctcactatattgcccag

SEQ ID NO: 42668 - DNA, 74 bp, Homo sapiens
atgcagcgctatgcggaggatgttggggccgtcaagtcatttaatgaacctgaagtactatgtctctccttctg

SEQ ID NO: 42669 - DNA, 51 bp, Homo sapiens
caaggacatggagggaaggcttcctaaggcttatgcaagcaaagatctgga

SEQ ID NO: 42670 - DNA, 85 bp, Homo sapiens
gcctccatctgggccatggatggggtgggattaaaaactcagcctgaatcaaaatgccctgagctgcttgccaattactgtgaca

SEQ ID NO: 42671 - DNA, 75 bp, Homo sapiens
cattgattatgatagcagtgggcttttcacagtgggctttactgtgttgagctagtgagacctgcaacgacttcc

SEQ ID NO: 42672 - DNA, 87 bp, Homo sapiens
gtgacttctacgaaaaagccctggtggagctgaaggttgcaggctccagtgatcattctacatatattgtacaaacactagattttc

SEQ ID NO: 42673 - DNA, 73 bp, Homo sapiens
atagatggccagctttcccccgagggtcaacgagaaagagatcgctttctgaaaaggatatgagcatgctcga

SEQ ID NO: 42674 - DNA, 82 bp, Homo sapiens
aatgcctggaaagtatacaatgagttacccatgcagttgttactgtaccagcctattttaatgatgcccaacgccaagcaac

SEQ ID NO: 42675 - DNA, 98 bp, Homo sapiens
ccgtccttcagacccctccagacatccaatcagagcattcaagggatggtgaaatggatgatagtcgagctcgcaacgccctggtggtctccttcgca

SEQ ID NO: 42676 - DNA, 101 bp, Homo sapiens
acgcccgcagccatggcaaaaagctaccacctgccagtctgaagcaccgagatgaggaaggcatcaaccacgagtgtaagctgtgcaaccagatgttcgac

SEQ ID NO: 42677 - DNA, 74 bp, Homo sapiens
gcaaggaagaaattgttcagttcttctcagagaatctgctagtcacatggaagcaagtggggctggaactgaag

SEQ ID NO: 42678 - DNA, 100 bp, Homo sapiens
agaaaacatggtcaacgtcttgaaaggagtgcttatagaatgacgtcttgctgccctccaaaaaagaagagaacttcgagcagctggcatagaaattcag

SEQ ID NO: 42679 - DNA, 96 bp, Homo sapiens
gagcgagctgagtggttgtgtggtcgcgtctcggaaaccggtagcgcttgcagcatgtaccctcaggtgactacagatgtgttaacacccagcatg

SEQ ID NO: 42680 - DNA, 83 bp, Homo sapiens
atcacaaccaggcattaagttcacagtgaatgaaaactttgccattgatttgatagcagagcagcccgtgagcgaggtggaga

SEQ ID NO: 42681 - DNA, 98 bp, Homo sapiens
ccccttccccacgcaaccccagatccatttacactttacaggaaatcctcattgacgattcaatttgttgaaggccaatttgtggactcctacgatcc

SEQ ID NO: 42682 - DNA, 76 bp, Homo sapiens
ctcagtgcgaagaagctgcagccgcacctggccaaggatgtgctagtgctgctgatgacagatgtactggtgtttc

SEQ ID NO: 42683 - DNA, 100 bp, Homo sapiens
ctacgcgctggcgcggatggggcacggggacgagatcgcacctggctgagcacgcagacactgtgcagctggtgtccggcttcgaggccaccatcaacaa

SEQ ID NO: 42684 - DNA, 100 bp, Homo sapiens
tgtatactctcgttctgcgacttataaaggaccagacaaatcaaattagtggttttggacctgatcccaaccttgaagaaagtcctaaaagaaaaaatat

SEQ ID NO: 42685 - DNA, 83 bp, Homo sapiens
cccctcaggctggaacttgccctgtctcctcgcagatgagtgctttctcctgctcaagacagccacacgaacacggatctccc

SEQ ID NO: 42686 - DNA, 107 bp, Homo sapiens
tccaagagcggccccgagtatgcttcgtttttcgccgtcatgggcgcctcggccgccatggtcttcagcgaggtggggctggtgtccgagcacttctcgcaggcccc

SEQ ID NO: 42687 - DNA, 82 bp, Homo sapiens
attccgacattcagagttgtttcctccatttgctaaaggaatagtgtttggttcaccatcattaatagcaaacaaatgggaa

SEQ ID NO: 42688 - DNA, 100 bp, Homo sapiens
aaaatgtctctctatccatctctcgaagacttgaagaggctgggaggcggcagaatgcagccagaggagggcacaggctggctgctggagctgctgtccg

SEQ ID NO: 42689 - DNA, 101 bp, Homo sapiens
agcgagggacgcgggcagccatggccgaagcggcgcctgcccgggttaatgttcgtgaagaaattgaagagttttttccaagaatgtggaagataaatcaa

SEQ ID NO: 42690 - DNA, 120 bp, Homo sapiens
ggcggtggcgcctgcggacctaactagctccaggttaggccgagctttgcgggaaagcagcgggcagctggtggaatttttgaagaaaatggaatctcgaggccccctttcgtgcgacac

SEQ ID NO: 42691 - DNA, 98 bp, Homo sapiens
ttttcccttacctcgacccttttgattccgcctcacagttgatggagccagaaatgaaagctcattagcatctacactgaagacgctcctgttcttca

SEQ ID NO: 42692 - DNA, 96 bp, Homo sapiens
aagcagtcctaccatgtcagccttcccagtagctgggaccacagagttcacccagggcatgatcttacctacaatgaatggagagtcagtagaccc

SEQ ID NO: 42693 - DNA, 82 bp, Homo sapiens
gcacagatgagagcgctccgaagactgagctggaagtcgagtgtgctactcaactcaggagatttggagacaaactgaactt

SEQ ID NO: 42694 - DNA, 101 bp, Homo sapiens
cggagctcctgtttgacggtattaagaaacatcgagtcactttgcctggacaggaggaacccttgagggccccaaggctgttgcagctcctcgacctgatc

SEQ ID NO: 42695 - DNA, 82 bp, Homo sapiens
gaagttaggggagatagtcaccaccattcctaccattgccagtaatgttaaagtagagactcagagtgatgaagagaatggg

SEQ ID NO: 42696 - DNA, 111 bp, Homo sapiens
cgccgtgacctgcaggtactgacagatccgtagggaggacaccgtgacttcccggacgctgggaaatggtgctggagaatctggtaaaagcaccattgtgaagcagatgag

SEQ ID NO: 42697 - DNA, 80 bp, Homo sapiens
acgcgcagaccttcgttgccctctgtgccacaggattttttatcaagcagaaatgcatcgaacaacgagaatcaagatca

SEQ ID NO: 42698 - DNA, 82 bp, Homo sapiens
agtgacttaacaacattaggcctcaatctgaactctcctgagcctccccggaagctgagcagatgccagcaccataattcca

SEQ ID NO: 42699 - DNA, 100 bp, Homo sapiens
gttcacaaaccactggtggaatgagctcttcaacaagactgcggccaacttggtagtggaaactgggcaggtgccgacgccaccgccgagcccatgatcc

SEQ ID NO: 42700 - DNA, 95 bp, Homo sapiens
accaaccaattccggacacacttggactcgacagactctaaggtggatctaggatccggcttccaacatgtggcagctctgggcctccctctgct

SEQ ID NO: 42701 - DNA, 99 bp, Homo sapiens
gggataattatccaaataaattgcaagcattctatccaaatggtggcagcgttcctccctctgaaactaagacgtctaggccagcagaacgtaatgtcg

SEQ ID NO: 42702 - DNA, 100 bp, Homo sapiens
gtgaaagcattgatggaatgtgctttagaagttaaaaaggtaaatagctcccgtaaagaggatgacttcaaacaaaagcaaccaagcaagaaaaagagga

SEQ ID NO: 42703 - DNA, 75 bp, Homo sapiens
gttgtcctcaattgcgtaggaccagttgttcctactgaaggattggtctccatattaaagaagaggaatgatact

SEQ ID NO: 42704 - DNA, 100 bp, Homo sapiens
ttcgataagaatgctggagagaacactttcctccgggaagagattgtatacccccaaaaaaaatacactttcgggaaatggcctctaaatcctggctgaa

SEQ ID NO: 42705 - DNA, 100 bp, Homo sapiens
gacagaagatggtgcagaagaaaccagccgaacttcagggtttccaccgttcgttcaagtgaagtacctggggctgctggcaatgtccaagatcctgaag

SEQ ID NO: 42706 - DNA, 83 bp, Homo sapiens
ctgtctctagcatcacctctcagcacgattttcccgagagttcacagcggagctggagtttgttcagatcatcatcatcgtgg

SEQ ID NO: 42707 - DNA, 82 bp, Homo sapiens
ggagctagctgaaataacccttgatcctcctcctaattgcaggctttccttaaagtttcccatgtctcaatggactcctgaa

SEQ ID NO: 42708 - DNA, 97 bp, Homo sapiens
aggagaggacgggactgccaagagacatgttagaaggacaaaacctatccagtgctgattcagggagagacatcagttggtaaaacaagcctgatcc

SEQ ID NO: 42709 - DNA, 50 bp, Homo sapiens
aagcactctcaggaacctggcaacagagcatcctggccagaacaagccaa

SEQ ID NO: 42710 - DNA, 75 bp, Homo sapiens
gtgcgagaactgcgcagacctggtggaggtgttaaatgaaatgcctccggagccagcgtggtggccatagacaac

SEQ ID NO: 42711 - DNA, 100 bp, Homo sapiens
aggcacctggataaccttttgctaacaaaaacaggtaaaaaagctcgcacatttgacttggaagcaatgtttgaacaaactcgaagaacagctgtggaaa

SEQ ID NO: 42712 - DNA, 87 bp, Homo sapiens
gctacatcttttcgtcgcttgccggctgtctgatgaagagcagcgagaatggcgcggtgctatgacaagcgtctgtggcctcgaatg

SEQ ID NO: 42713 - DNA, 98 bp, Homo sapiens
cggaagcttcgaggcatgatggtcgactacaagaagagggcggagcggagacgggagtattatgaaaagatcgatcttcatcatctgggccatcagca

SEQ ID NO: 42714 - DNA, 98 bp, Homo sapiens
tcagaaaaatgttccaagtggattctgctggaggattatcggaagcgggtgcagaacgtcactgagtttgatgacagattcctgtctgactaaaggga

SEQ ID NO: 42715 - DNA, 98 bp, Homo sapiens
cttttggcttatgatgtctacaataattcggatttgttctacagagagttaaagccttccatctgaagtatgatgaagttcgtctggatccaaatgtt

SEQ ID NO: 42716 - DNA, 151 bp, Homo sapiens
cagtgtcactttatctcctttaccttgtggaaatgatttcctcaggactccagattatctacaacactgatgaggttgctaggaagaggctcaatgtttgtgttttcaccagatcagtttcagagactgcttaaaattaatccagactgga

SEQ ID NO: 42717 - DNA, 82 bp, Homo sapiens
cgaggcaaggagctaaagcagcgtgcgttcagccctggggaaggtgggagtcaatcattttgacaagtctcctgaaaggaac

SEQ ID NO: 42718 - DNA, 75 bp, Homo sapiens
ctgtcgggcggcgtttggtcccgggagcctcgccgggtgctatacttggtagatcagaaactcaggagtgtcttt

SEQ ID NO: 42719 - DNA, 87 bp, Homo sapiens
gctaatttgggaaaaagctccaggattctgacagggatgttgcgaagaatgccgggtctaagttgtagattttatcaacacaaattt

SEQ ID NO: 42720 - DNA, 88 bp, Homo sapiens
ttcatatgactttagaattaccttggagcgctgatagagcaattcaacagttcggtgctgctgatgtagagaaggtggaggaaaagtc

SEQ ID NO: 42721 - DNA, 76 bp, Homo sapiens
agaacttgtacagagatgtgatgttggagaactatagcaatctggttttcttggatatttgtcaggatacgaatca

SEQ ID NO: 42722 - DNA, 100 bp, Homo sapiens
gggtttgagtccgcatcgccacagctgaaggctgcgagggactaagagcagaaaagaagcagatgccattgatgacactctgagttccaaacttaaagtt

SEQ ID NO: 42723 - DNA, 100 bp, Homo sapiens
ctctcctccaaatgatgctgttggagaattggagcaacagtcagagcaccataacatggtgtgggaagtgaagacaaatcagatgcctaatgcagtacag

SEQ ID NO: 42724 - DNA, 100 bp, Homo sapiens
tagctgccaaattggataagacactgcaggttttagcaaagccaaactcgaatcaatggaaacataccttaaagctgtgaaattgtttcgaaatgaccag

SEQ ID NO: 42725 - DNA, 51 bp, Homo sapiens
gagctcggggactcccccaaagacaagctgcagcgggagcccctaacccct

SEQ ID NO: 42726 - DNA, 75 bp, Homo sapiens
aggttgaaagtgatcttcctggagaactaccgtgtgtccttggctgagaaagtctcctctccaccctatcccagc

SEQ ID NO: 42727 - DNA, 101 bp, Homo sapiens
ctcactgttcaagggaaacttttgggacactggggttgggaaatcaagcatcgtgtgtcgatttgtccaggatcactttgaccacaacatcagccctacta

SEQ ID NO: 42728 - DNA, 101 bp, Homo sapiens
ctggagcacttgagccacgtgcatgaaccaaacccacttcgttcaagacaggtgtttaagcggatggcaccacagatgtgacgcggacaatgcattttggg

SEQ ID NO: 42729 - DNA, 75 bp, Homo sapiens
caggcattgtaaaccacatcaccagtttaaagaatctgattgcaatcccacagagtattgatgaggaaactgaag

SEQ ID NO: 42730 - DNA, 51 bp, Homo sapiens
taggactctatgacacggccggacagacgcccagcggcagcaggatgagtg

SEQ ID NO: 42731 - DNA, 101 bp, Homo sapiens
gagatcttcgaggaagagtggcaagcctccacagccacggggacaccctgcacctattcccacgggacaggctggacccagagactctggacccggggcct

SEQ ID NO: 42732 - DNA, 89 bp, Homo sapiens
gacgacgtgaaggagcagatttacaaactggccaagaagggccttactccttcacagatcggaaaaccagcattggaatcagctgattc

SEQ ID NO: 42733 - DNA, 75 bp, Homo sapiens
ctcgctggagatcgagtaccaagtgtctgtgacctttgaggatgtggctgtgacattcacccaggaggagtgggg

SEQ ID NO: 42734 - DNA, 100 bp, Homo sapiens
tctgctagctccctatgccaagggtggcaaaattggaaaatatgttgtgttcttcttttaccctcttgacttcacctttgtgtgccccacggagatcatt

SEQ ID NO: 42735 - DNA, 96 bp, Homo sapiens
gggccctgcaggaaggacggacttcaggggcagggcaagtgtccagagaatggctgggatgaaagtacacttgaactctttttacatgaacttgca

SEQ ID NO: 42736 - DNA, 74 bp, Homo sapiens
tgactctctgcagcgggatcaagctgtgtgcattagtacaaatgccctacctgaacccatccttccatccctcc

SEQ ID NO: 42737 - DNA, 75 bp, Homo sapiens
agaggacgccttcaacaccaccttcatctccaccatcgccattgacctcatcaacaacctgctgcaggtgaagat

SEQ ID NO: 42738 - DNA, 100 bp, Homo sapiens
aagccatgaggccaaaggcagttgtattggtacagaactggaacagtgaaattcttgctaagcaaaaacctcttattgccaaaccttctgcaaagctact

SEQ ID NO: 42739 - DNA, 100 bp, Homo sapiens
gccgactggaccgcgaggttttgttcctgggaaagaccacagcaagattctttcattcgtctcctcctagcctgggggaccaggctcgaactgaccctgg

SEQ ID NO: 42740 - DNA, 51 bp, Homo sapiens
caacagcctggcgtccgccacgacaatggcgatgaccactcagaaggaggc

SEQ ID NO: 42741 - DNA, 100 bp, Homo sapiens
ctcgcctcgggtctcgggggccgctctgggatcccggccaccagcaattgtccgatctgttacctaaagcaataaaaaatggccagaggatcagtgtccg

SEQ ID NO: 42742 - DNA, 100 bp, Homo sapiens
gactctccgccagtgtcggattcagaggtccgagcctccgtactgggtgcaatgaaagctccacgcaggccttaccatggaaggctgtgactcgcccgtc

SEQ ID NO: 42743 - DNA, 50 bp, Homo sapiens
cctggtccagctgcccgcaggggtggtagctacagcaagctgggtagcag

SEQ ID NO: 42744 - DNA, 90 bp, Homo sapiens
gctgcagctccaggactgcagcatcttcatcaagatcattgacagaatatgccatggacaatattaccaggcagaaccaattctacgata

SEQ ID NO: 42745 - DNA, 75 bp, Homo sapiens
acagctcatgtctcattaatcacaccaacaaaaagatcctgtggtacagtttcctattctgtgaaacagaagaca

SEQ ID NO: 42746 - DNA, 78 bp, Homo sapiens
agatttgcagggaacaaactccagaaggccaaatgagatcccatttcattctgaaggccggcatccccgttccttaat

SEQ ID NO: 42747 - DNA, 100 bp, Homo sapiens
ctctctacactattttccaaggagaggtgtcagttgtacccgaggcgttctcagcagcagcaagtacctgtggtggatttccaggctgaactgaggcagg

SEQ ID NO: 42748 - DNA, 82 bp, Homo sapiens
ttttcaggccacaaatgctttcacaggctactgcagcactggggtgtcagttgttggtccgacccagaacgcttcagttctg

SEQ ID NO: 42749 - DNA, 83 bp, Homo sapiens
ctggctctttcctcttcgccttaaattcggtgtcgtgaaaactacccctaaaagccaaaatgggaaaggaaaagactcatatc

SEQ ID NO: 42750 - DNA, 100 bp, Homo sapiens
caaaaaagtaattgaagaaaaggctaggatgatatatgaagattacatttctatactatcaccaaaagaggatagcagtgagattcacttcaaagtgaaa

SEQ ID NO: 42751 - DNA, 98 bp, Homo sapiens
tcagagagggaagagattcagccagcacactcctcgcgagcaagataacgaaggaggcccaacttcattcaataaggagcctgacggatttatcccag

SEQ ID NO: 42752 - DNA, 75 bp, Homo sapiens
actgagccgggacacgattaacaggtggtccgcaggcctgaccagcagtctgttggatttgcacttgccaaggtt

SEQ ID NO: 42753 - DNA, 100 bp, Homo sapiens
gcaaatgggtatttctttaaaagacgtgccaaatactggtgtaagcaaacctagagtttctgacgctgtccagcccaacaactatctcatcaggacagag

SEQ ID NO: 42754 - DNA, 100 bp, Homo sapiens
tctccgccggctactgccgcttcagttctcccggtgtggccacgagtcgggttatcaatactctggctgaccatcatcatcgtgggactgactttggtgg

SEQ ID NO: 42755 - DNA, 100 bp, Homo sapiens
tgtccccactgagctcttggaagagaggtgtgggacgcctgctcagaggccctgataatgtttgataaggataatttagatgacatgggctatatcgtgg

SEQ ID NO: 42756 - DNA, 75 bp, Homo sapiens
gagaagcatgatgcagtcactaagccagaatcctgaccttgctgcacaggtgttggagcgggccggagagaagta

SEQ ID NO: 42757 - DNA, 76 bp, Homo sapiens
cttgcattgcttctatatttccaattgagagaaaagtgcaaacggttagagcaggagcttcatcatgtgaaagagc

SEQ ID NO: 42758 - DNA, 75 bp, Homo sapiens
agaccgcggccgggaccgaggttgtcgccgtgatcctgaaggcgctgacctacgacgagaagcggggtgcctgca

SEQ ID NO: 42759 - DNA, 51 bp, Homo sapiens
gtgcctttcagtgctcgaggcggcagacaaggcgcctctgtcgaagagcct

SEQ ID NO: 42760 - DNA, 82 bp, Homo sapiens
ctgtaatcatgtcttctgtatgacttgtattcttaaatgggcagagtccaatcagtgaaagtcgaagagtactacaggaatc

SEQ ID NO: 42761 - DNA, 98 bp, Homo sapiens
catgcatctgatgctctctctccagtccttgctgaagagactttccgttacatgagcagagatcctacaagaatccaggatgatgatcccagattgcc

SEQ ID NO: 42762 - DNA, 98 bp, Homo sapiens
agaagtgctggaccgaggacgaagtgtattctaccttgtaaatactgttatttgtatatactgtaaatgatgacatcggtgggcactaaccgagcccg

SEQ ID NO: 42763 - DNA, 98 bp, Homo sapiens
gcctcctgggatcaagtgattctcgtgcctcagcctcctgagtagccgggactacagggcagagagctccgctaagggcgtccactccttctacaaca

SEQ ID NO: 42764 - DNA, 100 bp, Homo sapiens
cggcctcccaagtagctggaactacagcatctggcgaggccccaatgtgaactgcacagacagttcgggttacactgctttacaccacgcagccttaaat

SEQ ID NO: 42765 - DNA, 83 bp, Homo sapiens
gctggaggcagcgccatatcctggaggtgagaagccctaccactgcaactgggacggctgcggctggaagtttgcgcgctcag

SEQ ID NO: 42766 - DNA, 80 bp, Homo sapiens
tgacacagttcacatcctggagatgtacgagggtgcgttccatggatgaactgaatcatgattttcaagcacttgctctg

SEQ ID NO: 42767 - DNA, 71 bp, Homo sapiens
aaatataagtatacagcatctgtcctcatagcagaaagtgactgagaccgaagatgatagtgatagtgaca

SEQ ID NO: 42768 - DNA, 100 bp, Homo sapiens
tgtcagaacttcccagctatggtgaaatggctgcagaaaagttgaaagaaaggtcaaaggcatctggagtccctgaaaaacagctgaatgatattgaaga
